United States Patent Application Publication US 2003/0194704 A1 - sequence listing, part 2

SEQ ID NO: 2800 - DNA, 542 bp, Homo sapiens
  MAP TO CHR5.1; EXPRESSED IN FETAL LIVER, SIGNAL =   5; EXPRESSED IN LUNG, SIGNAL = 8.9; EXPRESSED IN HELA, SIGNAL = 3.6; EXPRESSED IN BRAIN, SIGNAL = 3.7; EXPRESSED IN HEART, SIGNAL = 8.6; EXPRESSED IN BONE MARROW, SIGNAL =   4; EXPRESSED IN PLACENTA, SIGNAL = 3.8; NT HIT: gi7657414, EVALUE 1.00e-84; SWISSPROT HIT: Q06712, EVALUE 2.30e+00
agtaacttgcccattgccactcagctagtaagtgatagagtttgggttccagccccacctgtctgcctccaaagcccatggtctcctctgtgctctgcccatcgcatggccatcaggggaggaggagaggcatcctgccttgtctaaaagtgagtctaccccctcatcagctcatttactccctctccaggttcgacctgatcgcaaatggaggtgcttccttgactctacactttgagcgagccccgttcatgagccaggagcgcactgtgtggctgccgtggaacagcttttacgccatggacaccctggtgatgaagaccgaggagaactccatccccagctgtgacctcagtggctttgtccggcctgatccaatcatcatctcctccccactgtccaccttctttagtgctgcccctgggcagaatcccatcgtgcctgagacccaggtaggaatggcagtgccagggcgggactctcaggacttccctaacgaaaaccaactggacactgcctctccccgagtggaccagaaacta

SEQ ID NO: 2801 - DNA, 566 bp, Homo sapiens
  MAP TO CHR17.1; EXPRESSED IN BRAIN, SIGNAL = 0.75; EXPRESSED IN BONE MARROW, SIGNAL = 0.83; EXPRESSED IN FETAL LIVER, SIGNAL = 0.67; SWISSPROT HIT: Q99758, EVALUE 1.20e-01; NT HIT: AL445563.1, EVALUE 2.10e+00; EST_HUMAN HIT: AV731894.1, EVALUE 1.00e-123
aaaagtaaatgggggatcggctaccgcctgaggtatcattcatttttattgacattattctatattatactcttgctatactgttattatgttggaggcttgctgttatatgctttgaccatcatttatggtactaaatttaatttaaagccttcataatttacttttggctgtttattgtataatcattaattgtgatttttggtattctctagcatgtacatagacaaatattgtgccacagaatctctttcttcactggttaaacaacatatacctggagctactttattacaacagaatgaccaacaacttgtgtatagcttgcctttcaaggacatggacaaattttcaggtattacttactttaagtctcttggtgtttgaactgggatcctatattgggaataggtttcattgatttcctttttgtttccttctccatgtagtattgccatgctcccaggtggccagagttaatattctgtttctgctttattttgtttttgaaagccagaaaaaacacagcaaaatttttttttttacaaacaccatgcaagaaactg

SEQ ID NO: 2802 - DNA, 533 bp, Homo sapiens
  MAP TO CHR6.1; EXPRESSED IN ADULT LIVER, SIGNAL = 0.9; EXPRESSED IN BONE MARROW, SIGNAL = 0.63; EXPRESSED IN BRAIN, SIGNAL = 0.57; EXPRESSED IN HEART, SIGNAL = 0.64; SWISSPROT HIT: P25747, EVALUE 2.20e+00; NT HIT: gi14765976, EVALUE 5.10e-01; EST_HUMAN HIT: BE788357.1, EVALUE 0.00e+00
ttgcttcacagaactcacggtttaagcagagcaagcctgtctgttttcaattcttaacttttcacacatggcaaacgagtggaacttctgagcactgcgatcatctggctgatgaacaagctgttttccatttctggcaacaaatacttctggcttatcgtgacgggatgaaaagggatgaaaatatactctggttggatattgttgataacatttgtcatctttgcagctaaaaaaagctggcttaaaattttttcctttggtgttgcagaaaaatggcaaaagaagcgacatcaccgttgagttgccaattaaattgcattcctaaatgaagtaggttagtgagatcttttccataagaaacgcaatgtcacatcctgagataaagtaaggactggaccaggaggcaaggtctgtggggcctgggcctggggctccactggtgcacgtggtgtcttttaaaggctcgctttacatgtctgaacctgtctccctctgtattcccttgctagggccgccataataaacaccac

SEQ ID NO: 2803 - DNA, 530 bp, Homo sapiens
  MAP TO CHR19.1; EXPRESSED IN FETAL LIVER, SIGNAL = 0.85; EXPRESSED IN LUNG, SIGNAL = 0.65; EXPRESSED IN BRAIN, SIGNAL = 1.1; EXPRESSED IN HEART, SIGNAL = 0.9; EXPRESSED IN BONE MARROW, SIGNAL =   1; EST_HUMAN HIT: AI743403.1, EVALUE 1.00e-123; SWISSPROT HIT: P56146, EVALUE 3.80e+00
gacaaactgttgccagggacaggggaggacttcttttgagatccttggtagttttcaatgaagtctttgatatggcttacccttcctacttggtgaccctgtcctgaaaagagctggaagacaggcttcgtagacatatatgtttcatttttcttgtcttcaactttaacacccacctctttatcaaaaattccctgtaattctgaaggtaattccccctttttgatggagttcagaaactgctgacttgcaccatttgaataacttctgaaataattgttgacggtgaatccatttttccataattttatgtttacgtctacctgtttcttttgttaagtgggagacaagcatttggaaccaaccttctgagcttcctcaaaaaggctatcaacaaactattcacaatttgtttattgattatcaccaagaccttgattgtcaggtcctgtttcacaaacccagtcttttatactttcgagattatctacgtctttcattctcttttgcgttactccgagcacagcctc

SEQ ID NO: 2804 - DNA, 585 bp, Homo sapiens
  MAP TO CHR17.1; EXPRESSED IN HELA, SIGNAL =  14; EXPRESSED IN BRAIN, SIGNAL =  20; EXPRESSED IN HEART, SIGNAL =  15; EXPRESSED IN BONE MARROW, SIGNAL =  21; EXPRESSED IN PLACENTA, SIGNAL =  15; EXPRESSED IN FETAL LIVER, SIGNAL =  19; EXPRESSED IN LUNG, SIGNAL =  12; EST_HUMAN HIT: BG471399.1, EVALUE 5.30e-02; SWISSPROT HIT: Q39575, EVALUE 2.00e-08; NT HIT: X82786.1, EVALUE 3.60e-02
gtttgtgggattgagatggggagcagggcagggagctggacaaattggacatgcataggtttggggtcttggcctggcattgagggctgagtccccacaatgtggcagtaattatgctatgactccctaggttgtcagcactggagacttatttcatccccaaggatggcagcctcgcttcttacaaggaatacatcagcttattgcctggcatggacccccctgaggcctttggccagcaccccaatgctgatgtggcctctcagatcactgaggcacaaaccctctttgatactttgctttccttgcaacctcagattacacccaccagggctggaggccagacccgggaagagaaggtaaaaagagccgggcctgggggagggaaagtgatgagaagagggggctacactcaagagctcctgcctgctcaggtccttgagttggccgctgatgtgaagcagaagatccctgaaatgatcgactatgaggggactcaaaaactgctagctctcgacccctcccccctcaatgtggtccttctgcaggagatccagagatacaacacactgatgcagaccatcc

SEQ ID NO: 2805 - DNA, 504 bp, Homo sapiens
  MAP TO CHR2.1; EXPRESSED IN LUNG, SIGNAL = 1.5; EXPRESSED IN BRAIN, SIGNAL = 2.8; EXPRESSED IN HEART, SIGNAL = 1.8; EXPRESSED IN BONE MARROW, SIGNAL = 3.1; EXPRESSED IN ADULT LIVER, SIGNAL = 2.2; EXPRESSED IN PLACENTA, SIGNAL =   2; EXPRESSED IN FETAL LIVER, SIGNAL = 2.3; EST_HUMAN HIT: BE771910.1, EVALUE 3.00e-65; SWISSPROT HIT: P22064, EVALUE 2.00e-21; NT HIT: gi14723948, EVALUE 2.00e-65
taggtaatactgggcgtggcacttgcagccatcatttcagtctaaaaacatttcctaaggaaaagtactaaatgtttttttcatagaacccaacattttggctgttaaaccattttcatcaaaacattttatttatatgtaaaatattttaaaagctgttttctgtgtaaacatgttcatctcatcatcacacactaatcaggatgtgttgagtgcctctgtttatccattaatatctggtgtttgtcagcctgtgtttgttttgtgtctgatgttccatgtcttttttgcagatattgatgaatgtgtaaacaacactgtttgtgacagtcacgggttttgtgacaatacagctggctccttccgctgcctctgttatcagggctttcaagccccacaggatgggcaagggtgtgtgggtgagtttttagattttttcccaacgtgtttcacatgtccctagggaaaagaaatcacagtgaacaacaggagcttttaagcagg

SEQ ID NO: 2806 - DNA, 564 bp, Homo sapiens
  MAP TO CHR17.1; EXPRESSED IN FETAL LIVER, SIGNAL = 1.2; EXPRESSED IN HELA, SIGNAL = 1.5; EXPRESSED IN BRAIN, SIGNAL = 1.3; EXPRESSED IN LUNG, SIGNAL = 1.4; EXPRESSED IN HEART, SIGNAL = 1.1; EXPRESSED IN BONE MARROW, SIGNAL = 1.4; NT HIT: gi16164885, EVALUE 0.00e+00; EST_HUMAN HIT: AA853292.1, EVALUE 0.00e+00; SWISSPROT HIT: P33076, EVALUE 4.00e-07
ctgctggactcagagaaccccaggacctctacccaacgtgcctgctccaaagaaggaatgaggttctgcagagctgtggtccgagccgtgatcaggaaggatgcctcgggaagtatagttttccccagcaaactgcccagcagtgcatccgccggctgtggctggctccagtgcagacagagctcagaactcggctcctgcaagacccatcctggctcatctacaccatcgaggatgaagagcagccgctctggcctagacaggatctgtctaatgggagccggagtggctgtcccatcttttccgatgagctcagcgagactcaccaccttggactgggccagctctctgcagctgaagtagaagacatgctggaagcggtccccatacagctggcctctcccccaggcttccttcacctgcctggccagtgttgacttcccaattccagcagccccctgcagtatgactatgcgaggttcttgggtatccaggcctgggccaaataagtctctgatctcaattaaatgtcctcgattctcctccacataatcaggccagctt

SEQ ID NO: 2807 - DNA, 518 bp, Homo sapiens
  MAP TO CHR22.1; EXPRESSED IN PLACENTA, SIGNAL = 5.8; EXPRESSED IN FETAL LIVER, SIGNAL = 4.3; EXPRESSED IN HELA, SIGNAL = 5.1; EXPRESSED IN BRAIN, SIGNAL = 5.7; EXPRESSED IN HEART, SIGNAL = 5.3; EXPRESSED IN ADULT LIVER, SIGNAL = 4.6; EXPRESSED IN BONE MARROW, SIGNAL = 6.4; NT HIT: L77570.1, EVALUE 0.00e+00; EST_HUMAN HIT: AW246142.1, EVALUE 6.00e-91; SWISSPROT HIT: P34420, EVALUE 4.00e-07
tctgactttcattctgatctctccttgcagggcctccagacggtcatccaaagggatttctttcctgatgtggagaagctccaggcacagaaggagtacctggaagccgaggagaatggagacttggaacggatgcgccagattgccatcaagtttggctctgccttgggcaagatgtcccgggagcccccgccaccctgtatgaggaccctgtgggtggcggagaggggaaagcctgctgaactgtcgcttcaggctcactctaattcttatccccctctcttcccctagatgtgactccagccacatttgaaacccctgaggtgcatgcaggcactggagtggtgggcaacaagcccaggccccgcggccgaggcctggaggatggtgagtgagggtgccctctttaagtcacatggtcaggattgcctgggaatcttagcctgtgaggccctgagggggtggtccagagggctgcaggccacatcttgttcctgaggggtcttgcgtaaatagca

SEQ ID NO: 2808 - DNA, 555 bp, Homo sapiens
  MAP TO CHR19.1; EXPRESSED IN PLACENTA, SIGNAL =  22; EXPRESSED IN FETAL LIVER, SIGNAL =  13; EXPRESSED IN LUNG, SIGNAL =  12; EXPRESSED IN HEART, SIGNAL =  12; EXPRESSED IN BONE MARROW, SIGNAL =  16; EXPRESSED IN ADULT LIVER, SIGNAL =   5; EXPRESSED IN BRAIN, SIGNAL =  15; EXPRESSED IN HELA, SIGNAL =  19; NT HIT: AJ223603.2, EVALUE 0.00e+00; EST_HUMAN HIT: BG675229.1, EVALUE 0.00e+00; SWISSPROT HIT: P05060, EVALUE 1.20e-01
agtaggacaccagcagccacggccaacagaagggctgccaatccagctgtgggagccacacagcctttattatggggctgctggggccccccttttgcaggatactgccctgaattgctgcggtcctggtggccagcggcgcctccagtcaacctgggctcctcatcccgggaggcctcgtgttctactccctgtctcggagtctgactggttggcgctggcatgggtttggtggtggatgtgggtctcactggggccgaggtagaagtggtgacagatgtggttgaggccacagtcgtgggctctggagggggcagccggacaaggggtgggattcgaggggagaagtaggtcttgttgcggaggtcagagttacagcgggacccctggcaacaggagccactgagcgtgaaccctgggcctgttactccatcccgagtgcagaattcatcctggacacagccccggacaggcaaggacacagtcacattagctgcaggaaggagacacagataggtcagtggctggagggagagaggttgacatggccagaac

SEQ ID NO: 2809 - DNA, 591 bp, Homo sapiens
  MAP TO CHR7.1; EXPRESSED IN BONE MARROW, SIGNAL = 2.2; EXPRESSED IN HELA, SIGNAL = 3.4; EXPRESSED IN FETAL LIVER, SIGNAL =   2; EXPRESSED IN BRAIN, SIGNAL = 2.5; EXPRESSED IN LUNG, SIGNAL =   1; EXPRESSED IN HEART, SIGNAL = 1.1; SWISSPROT HIT: Q9ZC95, EVALUE 5.70e+00; NT HIT: AL161515.2, EVALUE 2.20e+00; EST_HUMAN HIT: AA635016.1, EVALUE 1.00e-128
gattatgtaggccgtcaccgtttttaaaaattgcattaagcccataaactcattctaaattggcagatctttaaaaaggatgtttatgtttacagattctaatgcttttgagaaaacagacacccatttccatttcctttgcttctcaacacatcatgctggtgacagatgtttctgaactgtttcaatgtccctgtctaaatagaaaatgcacacttaatgatacccatgtgtgtatatttctatttctagtcttatctttatatatctacaaaagattgttccccttggtaattatagtcctattcaatattaatgaattattggcagaaagtcactttttatgtatatatctacacacaaaagatctgtttttgtacattatgatgactatagatactcacttatgtttgcttgtaaatgtaaatggtcacaatgttttatatatttttcttttaaaagcttaaacttcatatgcttattttcaaggcatatagtgaaggtattgtttattgtgagagagtaaaagaaaagcagcttagtgtcagctctgctgtctctgactaatctgcaagccacccactttaatgg

SEQ ID NO: 2810 - DNA, 552 bp, Homo sapiens
  MAP TO CHR7.1; EXPRESSED IN FETAL LIVER, SIGNAL = 0.61; EXPRESSED IN BRAIN, SIGNAL = 0.5; EXPRESSED IN BONE MARROW, SIGNAL = 0.53; NT HIT: gi16161089, EVALUE 1.30e-01; EST_HUMAN HIT: H12637.1, EVALUE 7.70e-01
gcaaagaggaggttttgctgcagttgtttttatttgttttgggttgtttttgctcttgcttttcttgttttgttttgttttgttttgttttgtttttaaccaagttcaaggccagaaaagtgtatcacccataaagtaaccccagcactccatgccagaggaatttctgacaaaatgaatggtttcaaatacaacagcctgctgactaagttcccagcttgcaacctccctggaatctgcagtcttggattaaccctcagcaaaaaagaccttcattctggtgtctttgccatatctattgtctgctccaatcctatgaaccctctaggaagtgtaagctaatttggacaactagatgtgcagtcatactataaaactattttgttctacttcttctaaatgtattttaaaaagaacgtaaggaaaaagtagcaaagcctctttaaaaatccaaattcagaaccagcagaaggaacacaggaagctttactgagtaattgaagtgattacatgcaaagcactttcccataatcagcgagtttcaaagaaggg

SEQ ID NO: 2811 - DNA, 528 bp, Homo sapiens
  MAP TO CHR7.1; EXPRESSED IN HELA, SIGNAL = 0.54; EXPRESSED IN BRAIN, SIGNAL = 0.7; EXPRESSED IN BONE MARROW, SIGNAL = 0.63; EXPRESSED IN FETAL LIVER, SIGNAL = 0.62; SWISSPROT HIT: P97792, EVALUE 3.30e-01; NT HIT: L42301.1, EVALUE 3.20e-02; EST_HUMAN HIT: BI761793.1, EVALUE 0.00e+00
tgcaaagttgtgaagccaagatctaaagccgaagtagtttagtctcctgagcctttgctaactaccatgctagactgctgccctcgtacactcacaggggactcaccatcaaccgtgacttgtatcttctgactggcagatagagttccatttccctgaatgttgaccttcacgatgtaattgccttcatcagggaactgcagtgggttgataagcagagatgcattgggtggcatcatggtgaacttgtgttggtattccaagtcaggaaccacagacttattcacagagcccagtaagtatttgggcattgtgtggggtctctcaaatagccatatgatctggatgtctgatgctggagtgtggaagccatagtggacgggtaggtagagggcctgacctctgacgccatggacagtgtgtgatggcactgtcaccttcagccccgagcaagcacctgttgcaaaggaaaggaaagttgtgaagaccttgagccacatttcacaatctaaaggggcaaatgcagag

SEQ ID NO: 2812 - DNA, 572 bp, Homo sapiens
  MAP TO CHR8.1; EXPRESSED IN PLACENTA, SIGNAL = 2.1; EXPRESSED IN LUNG, SIGNAL = 2.4; EXPRESSED IN HELA, SIGNAL =   2; EXPRESSED IN BRAIN, SIGNAL = 2.3; EXPRESSED IN HEART, SIGNAL = 2.1; EXPRESSED IN ADULT LIVER, SIGNAL = 2.8; NT HIT: AL161535.2, EVALUE 2.20e+00
gcatagctgtggctttctccctttaaaataaaccccatgttacttggaatttgtattcctcaagggaccattttttccagatacacatcatactaaatactttaatcaaatgtgtaatcaaaaatattttccattttacttcttttattcatttaatggatttatgttacccattctttttggaagataattaacttggaataaaggctcagcttttatattccaaaatatgaaaaaaaatttcttctttctgggacatataaaatgtcaatctaattgtgcattgtttggtatagtcatgtgtagttctaaggaatatgaaattatatatatattaatattaaattaatttttcctagggtatcactctcacgcttaaaagaatttggtatagggtatgacttgagcaggttgtatagatctttttagggctctcacattatttcaattatcactaattgaaatacctaattatttcattacctaatattgtcagataggtcccacatatctgtatctttgagtcccatggcaccaagctcaggagtggttcctgccttcaacacagttca

SEQ ID NO: 2813 - DNA, 571 bp, Homo sapiens
  MAP TO CHR22.1; EXPRESSED IN BRAIN, SIGNAL = 0.62; EXPRESSED IN HEART, SIGNAL = 0.64; EXPRESSED IN BONE MARROW, SIGNAL = 0.68; EXPRESSED IN ADULT LIVER, SIGNAL = 0.61; EXPRESSED IN PLACENTA, SIGNAL = 1.9; EXPRESSED IN FETAL LIVER, SIGNAL = 0.68; EST_HUMAN HIT: AA446418.1, EVALUE 0.00e+00; SWISSPROT HIT: P24347, EVALUE 4.00e-35; NT HIT: X57766.1, EVALUE 1.00e-121
gcagctctccctatccactgtgtccctaaggatccatctgtctgttcctgcccttggccataacattcctggctctgggaagtctctcgagcagatccccaacccccactcaccttggaagaaccaaatgtggccctgggcatcctcgaaggcagcgtccacagggctgggcagtccctgccagtggcgagaggccaatgctgggtagccgggctgcagctggcccccacggaggcgccacacaaagcccgctttgaagaaaaagagctcgcctcggatggtggagaccgcgtcaaaggaggcctcacaggcatctggcggggcgtctggctggggtgggagagagggacacatgctgagggcatatgctgcagtcacagtggccagcagaggagtagggggactggcaggcagggcctcacctccagcggtgcaatctcattggtgtctatcccagcctgggggcccagggctggggtcctggaggtgacagtgggccagggctggccatataggtgttgaacgcccctgcagtcatctgggctgagactcagtgggtagcgaaaggtgt

SEQ ID NO: 2814 - DNA, 584 bp, Homo sapiens
  MAP TO CHR19.1; EXPRESSED IN BRAIN, SIGNAL = 3.1; EXPRESSED IN HEART, SIGNAL = 4.4; EXPRESSED IN ADULT LIVER, SIGNAL = 6.3; EXPRESSED IN PLACENTA, SIGNAL = 3.5; EXPRESSED IN FETAL LIVER, SIGNAL = 2.6; EXPRESSED IN LUNG, SIGNAL =   5; EXPRESSED IN HELA, SIGNAL =   3; NT HIT: AB037816.1, EVALUE 2.00e-93; EST_HUMAN HIT: BI917570.1, EVALUE 2.00e-72; SWISSPROT HIT: Q9UBS0, EVALUE 1.10e+00
gctttgtcttcagcctggtccgggcccactacaagcaggtaggagtgggcgtgggcagggtgggcatggcatggatggaaggcggagcaatgttgacatcactgatggccacccctctcctgcaggtggccacgcggctccagtcgtcccctaatccagcagccctgctgaccctgcgcatggaattcacccgcatcctgtgcagccacgagcactacgtgaccctcaacctcccctgctgccccctgtcacctccagcctcgccctccccctctgtgtcctccaccacctcccaggtgggctgccttcacttctgcctcctctctttgacctacaacctctcaccttcagtccatctcctatggttccctcatctctgtccctttcacggtggaccactgcctaggtgaactaatcccttatgtttgacttttgacttctgacccttcacctctcttgccattctcagcaatttcccagaaggactaacctctgatttctctcccctaaatcctaactcccagcccagtgttccatctgctatttctcagtcctctgacttttgactccgtgccctgttacat

SEQ ID NO: 2815 - DNA, 508 bp, Homo sapiens
  MAP TO CHR19.1; EXPRESSED IN FETAL LIVER, SIGNAL = 1.5; EXPRESSED IN LUNG, SIGNAL = 3.2; EXPRESSED IN BRAIN, SIGNAL = 1.2; EXPRESSED IN HEART, SIGNAL = 2.6; EXPRESSED IN BONE MARROW, SIGNAL = 1.4; EXPRESSED IN ADULT LIVER, SIGNAL = 1.3; EXPRESSED IN PLACENTA, SIGNAL = 1.6; NT HIT: gi14757575, EVALUE 2.00e-83; EST_HUMAN HIT: BI084356.1, EVALUE 3.00e-83; SWISSPROT HIT: P48301, EVALUE 1.00e-24
ttgggggttcagagaatcactttgaggggcttgtgatttgcaggctcagagatcctgattcggatctccgagggttcaggcccagtctccagtcactgtgggtggggtgatgaaaggaaggtggcagtgagagtgagtgtggtggcatcttagaggcacagggtggagctcaattcctggggtgacccgtgggtctctcagccaccattttcccaactcccttccccttggttcagacggaacgggcccagctggaggacggcagatttgtgtaccgcctgctgcgctcgcccatgtgcgagtacctggtgaatttcttgcacaagttgcggcagctgcctgagcgatacatgatgaacagcgtcctggaaaacttcaccatcctccaggtgatgcctggggctgggctggagtggggccccccagtgtggagggacagtacctataacagaccctcagtctaggggatctcctcacccaggaactgacacagcagggactccaaagt

SEQ ID NO: 2816 - DNA, 597 bp, Homo sapiens
  MAP TO CHR5.1; EXPRESSED IN HELA, SIGNAL =   4; EXPRESSED IN BRAIN, SIGNAL = 4.1; EXPRESSED IN LUNG, SIGNAL = 3.1; EXPRESSED IN HEART, SIGNAL = 3.2; EXPRESSED IN ADULT LIVER, SIGNAL =   3; EXPRESSED IN PLACENTA, SIGNAL = 4.1; EXPRESSED IN FETAL LIVER, SIGNAL = 3.5; NT HIT: gi6678244, EVALUE 2.00e-41; EST_HUMAN HIT: BG327699.1, EVALUE 8.00e-38; SWISSPROT HIT: P15265, EVALUE 8.80e-01
cttgaaattccagcagaggcccatctgtctcacaggatgggtcaaggcctgcctagcaaggtagggaagtctttcctcgtgtctggccagcagccagactgctaacagctatctctcccaaccacaggcccagccctcctctctaccccctgtccccttcctgcggatatagacagcacttccctgcccccactgcagcccctggcgccccctaccccaggtgagtcccctacactgcagctaggctcctgcttcctgttgcccaggcttcagagcccacacaaggccatgcccaggccagtgcttgccctgtgttagtcgtttgtccatctgtccgtctgtcattttgcagccccctgctgtcctgtgcctgagaatgaagctagtgcaagtgccaagaggcctcagcctgggccacaccgtgcagcagagcaccacagaggccaggacagtacaggcatatgtggctcagcccgtgtgcagatgtgtgtgcactcacctctgttcttcatccctacttagaaggactctcctgggcatcccctgagctttgcccaagctgagacagcaccttttacctaagtccccaacctctga

SEQ ID NO: 2817 - DNA, 543 bp, Homo sapiens
  MAP TO CHR5.1; EXPRESSED IN PLACENTA, SIGNAL = 1.6; EXPRESSED IN FETAL LIVER, SIGNAL = 1.1; EXPRESSED IN LUNG, SIGNAL = 1.2; EXPRESSED IN BRAIN, SIGNAL = 1.5; EXPRESSED IN ADULT LIVER, SIGNAL =   3; NT HIT: gi14781188, EVALUE 1.00e-124; EST_HUMAN HIT: BE074872.1, EVALUE 1.00e-124; SWISSPROT HIT: P29817, EVALUE 2.30e+00
agcgtctaaaggccaggaactttatcagtgatcacatgctatgagggttctgtaatacacaaaattagctatttagcaacctatgtgcggcagagatatggaaggaagagaggggttttctttagtaccaaagccctaaataataagcaaggagagactctgttataatatactgattgctaaggagaatgatacttaacctatctaaagaaatctatgacttttccacttcaggttgttaaaagctaaaaaatggtcctcatttgtcatttttcttttttacagtgaacatcagaagttggaagagaacatagacaatataaaaagaaatcataatttggcattagggcgacagaaaggttatgaagaagaaattattcattttaagaaagaacttcgagaaccacaatttcgggatgctgaggaaaagtatagagaaatgatgattgttatgaggacaacagaacttgtgaacaaggatctggatatttattataagactcttgaccagtaagtattagactggggattttcttattgcag

SEQ ID NO: 2818 - DNA, 531 bp, Homo sapiens
  MAP TO CHR22.1; EXPRESSED IN HELA, SIGNAL = 7.2; EXPRESSED IN HEART, SIGNAL = 5.6; EXPRESSED IN ADULT LIVER, SIGNAL =  10; EXPRESSED IN BONE MARROW, SIGNAL = 9.1; EXPRESSED IN PLACENTA, SIGNAL = 8.3; EXPRESSED IN LUNG, SIGNAL = 7.3; EXPRESSED IN BRAIN, SIGNAL = 8.6; SWISSPROT HIT: P12018, EVALUE 2.00e-64; NT HIT: S74019.1, EVALUE 0.00e+00; EST_HUMAN HIT: BG502270.1, EVALUE 0.00e+00
tacagcaacactgcaggaccaggagatgctgagtggctcagcctcctcggcgcttcgggcggcggctccaccctcttccatgacagtctctccaaggggatgcgtgcctctgctgtcttcagttcaagggacacgtgtcctggctgcagtgggttccatttcttcctcccactccctctccctctcctccttctccgagctgcgggcccccatagcacagtaatacatagcctcgtcctcaggctgcagctcagagatgctcaaataccccctgttcctggccacatctttggatccagagaagcgaggggggacctgggggccctggctcttgtctgattgtgagaaatatctcagcaggaacctgggagggtggcccggcctctgctggtaccagtagacgctgtacacaccgatgtcatggtcgttcctcagggtgcaggtgaggcggattgtggttccaagggccgaggacatggccggcggctgatgcagcaccggctgaggaccacaacctggtgacacagatgc

SEQ ID NO: 2819 - DNA, 553 bp, Homo sapiens
  MAP TO CHR19.1; EXPRESSED IN HELA, SIGNAL = 3.8; EXPRESSED IN BRAIN, SIGNAL = 2.6; EXPRESSED IN BONE MARROW, SIGNAL = 2.2; EXPRESSED IN HEART, SIGNAL = 4.3; EXPRESSED IN PLACENTA, SIGNAL =   4; EXPRESSED IN FETAL LIVER, SIGNAL = 3.6; EXPRESSED IN LUNG, SIGNAL = 5.9; SWISSPROT HIT: P02460, EVALUE 2.00e-01; NT HIT: gi14759823, EVALUE 0.00e+00; EST_HUMAN HIT: BG983485.1, EVALUE 1.00e-70
aggcatcagtcttcaccctgagaatggggacaagaggattcaaaggtcctggtgtttctcccatccccagggacccctggcccagcctccccacctgccttccctgccaaggaccccgatccaccctactccgtggagaccccctatggctaccgcctggacctggacttcctcaagtacgtggatgacatcgagaagggccacacgctgcgacgcgtggcagtgcagcgccgcccccgcctgagctcgctgccccgtggccctggctcctggtggacgtccactgagtcgctgtgctccaatgccagtggggacagccgccactcagcctattcctactgcggccgtggcttctaccctcagtatggtgctctggagacccgcggtggcttcaatccgcgggtggagcgcacgctgctggatgcccgtcgccgtctcgaggaccaggcggccacacccaccggcctgggctccctgacccccagtgcggccggctcgacagcctccctggtgggcgtggggttgccacccccgacaccacggagttcaggac

SEQ ID NO: 2820 - DNA, 519 bp, Homo sapiens
  MAP TO CHR22.1; EXPRESSED IN BRAIN, SIGNAL = 1.6; EXPRESSED IN HELA, SIGNAL =   2; EXPRESSED IN BONE MARROW, SIGNAL = 1.5; EXPRESSED IN HEART, SIGNAL = 1.1; EXPRESSED IN ADULT LIVER, SIGNAL = 1.5; EXPRESSED IN FETAL LIVER, SIGNAL = 1.2; EST_HUMAN HIT: AV648625.1, EVALUE 8.00e-10; SWISSPROT HIT: Q64471, EVALUE 2.00e-18; NT HIT: AF240786.1, EVALUE 0.00e+00
catgtgtgtgatgggctaggatgtccccctccctggggacacttggaagcctcttaatatagctgcggtgaggggtttgtaaagccccattttatagatgaggacactgaggctcagaaggagaagtgactcacacagggtcccacagccagaaaagacaacatgagctgggatgtcagctcccttcccggatacaccactgcccagcgggccaccgcaccccatggcactctcatgcctcagctccgtgattgccaccaagccagccacagagatacggggcccagtaaggaaggcctggtcccgcaggaacttgtcctcgagcagctgcaggcatccgtccagctcagccaaagtggccgccaacatctcgggtggcactgactcgcccaggaacacagggattattatctggtgggccgacaggcagagagaggggtcagggtctgcccaaagcccatcctggttcccaccatcatcctatcatcaccagtccttgggatttctgctcacctctgc

SEQ ID NO: 2821 - DNA, 576 bp, Homo sapiens
  MAP TO CHR4.1; EXPRESSED IN FETAL LIVER, SIGNAL = 0.67; EXPRESSED IN HELA, SIGNAL =   1; EXPRESSED IN BRAIN, SIGNAL = 0.53; EXPRESSED IN LUNG, SIGNAL = 0.67; EXPRESSED IN BONE MARROW, SIGNAL = 0.69; EST_HUMAN HIT: BF675754.1, EVALUE 2.00e-01; SWISSPROT HIT: Q12986, EVALUE 4.00e-03
caagacagcacttatttgggcccaaaatggagaaattcaatatagtctttaaatcagaggtttccaaggttaatacacaaacctttcttctacattgatgcttctgacagtcacgcatcttaacacacttagtttcacacagataaggtttatgacaaggcattcgttttgtatgctttccacagcgacaatgcttttccacttcctggaagaataaaagaaatgctattaaaattgatttttgttaatattttttcctcacattgcaacttctacaattattaaaacataatgaacaaaaattttaacactaaatttgtataacaaactttaccaaaaaccaatttgaatttcctaaaacatttgcttatatcttactttgttccaaaaaggacttcatataaatttgttattaaattcagaaaactgatattgaatagttaaaaaaaaaaaaaatcacataataaaaccacttacatttcattacaaccataacatctgcaactcttgtctcagtaaagccaaaaaaactagattatctagtaagctaacttgtggacttggtactgtggtcaa

SEQ ID NO: 2822 - DNA, 555 bp, Homo sapiens
  MAP TO CHR5.1; EXPRESSED IN FETAL LIVER, SIGNAL = 1.5; EXPRESSED IN LUNG, SIGNAL = 1.2; EXPRESSED IN HELA, SIGNAL = 0.81; EXPRESSED IN BRAIN, SIGNAL = 1.5; EXPRESSED IN HEART, SIGNAL =   2; EXPRESSED IN ADULT LIVER, SIGNAL = 1.5; EXPRESSED IN BONE MARROW, SIGNAL = 1.8; NT HIT: AJ229042.1, EVALUE 5.30e-01; SWISSPROT HIT: P03159, EVALUE 9.00e+00
gtgttgctgccttcattttgccctcctaactgtttccaacatcaattttctcctattcttttggctcagaaattccctagttactggtccatcccaacacactgccttgtacattctcagcaagatgattactgactaattgggaaaacaatccaaactcgtgaggaaatgggtcataatgtgttttctctctgggcaacaaatagcaatccctggaccaccatggaagttatgttcctgaaaattactggggttgtcaaatccgtgcttagcaatgtcaaggtcttgtaacaaagaggagattggaggaaagtggcattacagataaatgtcttaatatatacttttgaaacacgaaaagattctagaaggtctctacctctggaacacattcatctatgcttaaaatacttccaatatcttcttaatagtttatgaaatatttctatcaacttctaaggcaaattctttctctagttttctactatgcaaaatctagattttctaaaattggggtcacattgaaagcctctctgctgaatctggcccgatata

SEQ ID NO: 2823 - DNA, 557 bp, Homo sapiens
  MAP TO CHR8.1; EXPRESSED IN FETAL LIVER, SIGNAL = 0.4; EXPRESSED IN BRAIN, SIGNAL = 0.53; EXPRESSED IN LUNG, SIGNAL = 0.76; EXPRESSED IN BONE MARROW, SIGNAL = 0.54; EXPRESSED IN HEART, SIGNAL = 0.76; EST_HUMAN HIT: BF793579.1, EVALUE 7.80e-01; SWISSPROT HIT: P27171, EVALUE 3.10e+00
atcccccaatttctacctggattttaacttcccatcattatcttcaagacttggagtacctgctggtaagaatcctcggaccagaactgtaacatctgctggaactgtttgctttcttcagtgaccacagactctccctcatttttcatcagcattttccttctgtttctataaccccatcaaaaccaaatatacccaggcttccccatccatcttaggaaacaagacaaaaccactttcatttagccttggcagcatgcccgcctccacctttctccttcctgttccctgtcccctccccaccatcaaactatcactccatctcaaccctcccctccaggcttaagctctctgaacttgtctctgctttctttcaccaaactcatttcttacatccctgcagttctgtttctgggactgtctcctttcaccgccttcccaaagatttcctcatagtcaaaatatttgagtcctctctctctctctctctcaccttccacatccaaattgtcctcaagaccttccaaatagaccctgcaagtgtcccctcactccat

SEQ ID NO: 2824 - DNA, 537 bp, Homo sapiens
  MAP TO CHR7.1; EXPRESSED IN PLACENTA, SIGNAL = 1.3; EXPRESSED IN FETAL LIVER, SIGNAL = 1.3; EXPRESSED IN LUNG, SIGNAL = 1.5; EXPRESSED IN BRAIN, SIGNAL = 1.4; EXPRESSED IN BONE MARROW, SIGNAL = 1.1; EST_HUMAN HIT: AA602506.1, EVALUE 0.00e+00; SWISSPROT HIT: P38470, EVALUE 6.60e+00
ttgtgaaaacaggagggaggaaaaaaaaaacaaaaatcctgacaagtactttatttttatttttacacatgtccttctatgtccatctgtcagtatctttatgtgcttgaaatctttttatgaatacatttttacattatattttcattataaacacaatatttcattagatactccatgtaagagttgcagcctttgtggtcagtgtgtgtatggttcagtgagggatggtgctgacctccccagaaaagacttctgcttctttagatattccagtattggattaggattgctcattctgggtataccagagccttacagggtgcctagaaatgggagccagtgccgggagaaggccaaaaaaaaaaaaaaaaaacaaacaaaaaaaaacagtggatggtggaggcagcattcgttgcagtaattccactcaagaatttgttgtctgacacttcacaaagctctgctaactcaaggtgaagccagctagcaacctgaaattgtgaatttagtgtggctggcgggataaccagaata

SEQ ID NO: 2825 - DNA, 579 bp, Homo sapiens
  MAP TO CHR2.1; EXPRESSED IN BONE MARROW, SIGNAL = 0.38; EXPRESSED IN FETAL LIVER, SIGNAL = 0.34; EXPRESSED IN BRAIN, SIGNAL = 0.34; NT HIT: gi15297472, EVALUE 0.00e+00; EST_HUMAN HIT: AL514510.1, EVALUE 1.00e-64; SWISSPROT HIT: Q9JJV1, EVALUE 3.20e+00
tgcccaatttcaaggatctcacaatcaaacaattcacacaatggaatttaaagtatatgtagaaatcttttatcattgtcataaagtatttggataatcaaggaaggtatgctcatagtacttcatattttttttccttctcttttaagctgagccattatctggatattgtggaagtaaacattgctcaccagatctctctacgttcagaagcattttttcatgcaatgacctctcaacacgagttgcaggactacctcaggaaaacttcccaggctgtaaaaatgcttcgagataaaattgcacagattgataaagtaatgtgtgaaggatcactccacattttaagactggcacttaccagaaataattgtgttaaagtatacaataagctgaagttaatggccactgtacaccagactcagcctacagtacaggtgttattatctacttctgaatttgttggagcattggacttaatagcaacaacacaagaggttctacagcaggaacttcagggcattcacagtttccggtatgttcattaagtaagccactagaaataatgttagaaatttt

SEQ ID NO: 2826 - DNA, 555 bp, Homo sapiens
  MAP TO CHRX.1; EXPRESSED IN BRAIN, SIGNAL =   1; EXPRESSED IN HEART, SIGNAL = 0.92; EXPRESSED IN ADULT LIVER, SIGNAL = 1.3; EXPRESSED IN BONE MARROW, SIGNAL = 1.2; EXPRESSED IN LUNG, SIGNAL = 0.71; EXPRESSED IN HELA, SIGNAL =   1; NT HIT: gi13649009, EVALUE 0.00e+00; EST_HUMAN HIT: AA382885.1, EVALUE 5.00e-02; SWISSPROT HIT: P24712, EVALUE 4.00e+00
tccatggaaagacatggtaacctaatggtatgtgttctgttcgtttcacaggtgcgattagagtggccaacagaccttgcagtaaatcctatggacaattcattgtatgtcttggataacaacattgtgctgcaaatttctgagaacaggcgtgttcggatcatcgcaggacgccccattcactgccaggtgccaggcatcgatcatttcctggtcagcaaggtagcaattcactccactctagagtcagcgagggccatcagtgtctcccacagcgggctgctcttcatagctgaaacagacgagaggaaagtaaaccgcattcagcaagtaaccaccaatggggagatctacatcatcgctggtgcccccactgactgtgactgcaaaattgatccaaactgtgactgtttttcaggtatgacctttttagcaattcaccagcttcccctctctgttttgaaaagaaaaacgtgccccagtaaagtcaaaaggaaaaggaaaagcaaagtgttacttgcaaacattggtatgagctagtggagaaagcgatgg

SEQ ID NO: 2827 - DNA, 583 bp, Homo sapiens
  MAP TO CHR2.1; EXPRESSED IN LUNG, SIGNAL = 2.1; EXPRESSED IN FETAL LIVER, SIGNAL = 1.3; EXPRESSED IN HELA, SIGNAL = 1.5; EXPRESSED IN BRAIN, SIGNAL = 1.5; EXPRESSED IN HEART, SIGNAL = 1.7; EXPRESSED IN BONE MARROW, SIGNAL = 1.5; EXPRESSED IN ADULT LIVER, SIGNAL = 2.9; SWISSPROT HIT: P47989, EVALUE 2.00e-26; NT HIT: gi16158343, EVALUE 7.00e-96; EST_HUMAN HIT: AL552489.1, EVALUE 1.00e-95
gactgtgcaccacacattcctcccatctctaaggaggcccagctacaagctatagctttaaggaggtttctcattattctcttgcaagttcgagtgtgtgcttcataccatgcacaatgaagggtggccattgatgcaaggctgcccggttaggagagagcccaacacctctcctctgtgcagaaccttccctgcagtttgccagcctatccctggcctcccctggactgagtggatgcttgaggggcatcataccagggtggtgaacttgtccacgcaggcattgcggatcttctccggggtggcagggctgtctagccggaagagttccttcacgttattacctgtgtgctgagctcgagctgcacggatggcatctttgatggcaaagaagatagaagcagccaggaagaggggcggctctccaacagcctgaacacagacagggcacagggcaggggctcaggcaggtggtcctgcctccacatcatcaagtggacctaggaggccaggcagcaaactctgcacgaggagggctggtggcaccaggaaagcactgatgggagccacaccaaatacagca

SEQ ID NO: 2828 - DNA, 596 bp, Homo sapiens
  MAP TO CHR22.1; EXPRESSED IN HELA, SIGNAL =   2; EXPRESSED IN BRAIN, SIGNAL =   2; EXPRESSED IN HEART, SIGNAL = 1.9; EXPRESSED IN BONE MARROW, SIGNAL = 1.8; EXPRESSED IN ADULT LIVER, SIGNAL = 2.9; EXPRESSED IN FETAL LIVER, SIGNAL = 1.9; EXPRESSED IN PLACENTA, SIGNAL = 2.4; SWISSPROT HIT: P98153, EVALUE 8.00e-40; NT HIT: L77570.1, EVALUE 0.00e+00; EST_HUMAN HIT: BF984969.1, EVALUE 1.00e-130
gaggctgggtctgacagaagtgtcagcccagagggacaggttggtgtggtgagggtgagacatgccacggagcacaccaggggtctcatggggatgccgaatgtggccgaggggtaggcagcggggcacaggtgtgtgcactcagggacggcaggcccagcctgggggtggggggctcaggagccaggcagcctgcccccagtgacttgtctctgttcccgttgcacacttttgatggcccagtgcaccacttcaacctcggccgcaggatccctggctttgattacggcccagacgggtttggcacgggcctcacgccgctgcatctttctgacgacggagagggtgggactttccatttccacgaccctccacctccctacacggcatacaagtacccggacatcggccagcccgacgaccctccgccgccctacgaggcctccatccacccggacagtgtgttctatgaccctgcaggtgcctgactccccagggagagggaacaccttgtcaagtaacctggcacgtggggctgagcccagcactcttgcccagctgcagaggcctagggacctcacttctttccggctttg

SEQ ID NO: 2829 - DNA, 516 bp, Homo sapiens
  MAP TO CHRX.1; EXPRESSED IN BRAIN, SIGNAL = 1.6; EXPRESSED IN ADULT LIVER, SIGNAL = 1.2; EXPRESSED IN BONE MARROW, SIGNAL = 0.7; EXPRESSED IN HEART, SIGNAL = 1.4; EXPRESSED IN FETAL LIVER, SIGNAL = 0.51; SWISSPROT HIT: Q9JJZ8, EVALUE 8.00e-15; NT HIT: AJ012582.1, EVALUE 0.00e+00; EST_HUMAN HIT: BI490383.1, EVALUE 0.00e+00
tgaatacgcccgagttaaggtcatgctgcaccttgtgcaggaggatggaattcttcttgccgatgcggtccaggcggtcgatggccaccgtctcgaaggcgcgccgcatcatggggtactcctccagcacctcgttgaagttgtccacgctcagcgaaaggaggcggcaataggtgttggcccgcacgctcgccatgcggtggccccgggtgagcaggcagatctctccgaagtaggagccatcgaacagcttcatctccttgttgcccttagcgagcacgctgaccacgccgtgctgaatgaagtacatcttcccgatggtgccttcgcggatgaggtagtcacccggctggaagacctcgaacttgagcttggtcagcatggccgtgacgaagttggggtcagcattggcgaacagcggcatggaggtcaccagcttccggcagttgaagttgacaatctcctcccgcaggggcccgttgagctcgcccaggatgctgtcctcgtcgaacatct

SEQ ID NO: 2830 - DNA, 523 bp, Homo sapiens
  MAP TO CHR7.1; EXPRESSED IN LUNG, SIGNAL = 0.59; EXPRESSED IN BRAIN, SIGNAL = 0.86; EXPRESSED IN BONE MARROW, SIGNAL = 0.89; EXPRESSED IN FETAL LIVER, SIGNAL = 0.73; NT HIT: L16900.1, EVALUE 3.20e-02; EST_HUMAN HIT: BF684915.1, EVALUE 7.30e-01; SWISSPROT HIT: P56134, EVALUE 4.80e+00
tggaagggaaacaagtcctgtcccatttcactccacataaaaatttaatgtactcatggaagaaagtatattaaaaaagaggaaagcatgagctgatcactgtgcttccactgacgagtcctctacagaaaggtgcaattctgcgagggctttcacatcttctgcaaatgccatcactaaggtgcctgttagcaatttaattatcacattatgagctttagaaaaagccagtctgctgtgctgcaggctgtgacgtggagctcggcagttcacccactttgcagcaaaacacttataaataaaatgagaatatagagagggaatcaaatttctttgctggaacacgatagcttgggaacaaatgttttcagggttccttgttgctgttgttattgttttaagttacagttatcatcttgctcttcatgaccttggagtaaaagtttttatcatgtttgggatgcattgaaggggtgtgtaatggtaggagggggttggaaacagagaggtgaggagttgctgg

SEQ ID NO: 2831 - DNA, 505 bp, Homo sapiens
  MAP TO CHR19.1; EXPRESSED IN HELA, SIGNAL =   1; EXPRESSED IN BRAIN, SIGNAL = 1.2; EXPRESSED IN LUNG, SIGNAL = 1.5; EXPRESSED IN HEART, SIGNAL = 1.9; EXPRESSED IN ADULT LIVER, SIGNAL = 1.2; EXPRESSED IN BONE MARROW, SIGNAL = 1.2; EXPRESSED IN FETAL LIVER, SIGNAL =   1; NT HIT: gi14763698, EVALUE 2.00e-86; EST_HUMAN HIT: BF688894.1, EVALUE 3.00e-86; SWISSPROT HIT: O08967, EVALUE 3.60e-02
gagcatcacatcaatccacgtagccgttgcatttgtcagatggtcctagttaatattacctctaaaggctgtagcgggccttacatgcaagctgctatgacttgctccctcgaggggctccaggctgtagaatcccccgccccttacatcagctgcccgtctctttgctccccaggccccacccaccccaccccaccctccaggccgcgaatcttggatctccggcagcatctggagggatggggccacaacccgaaaactgcccacatgtgcaggtgtctgggtgctgctgccgtggacccctgtgaagatgggcggccgcatcaagacctggaggaagcgatggttctgcttgaccgccaagcccgccgcttggcctactatgcgggtaagcccagcctgccaccatgggccccaggacgctggaattccactccggaggcctttcctcacaggcaccagaagtcctggcccccactttccatgttccccaggatccaaagtt

SEQ ID NO: 2832 - DNA, 593 bp, Homo sapiens
  MAP TO CHR7.1; EXPRESSED IN BONE MARROW, SIGNAL = 0.47; EXPRESSED IN HEART, SIGNAL = 0.82; EXPRESSED IN FETAL LIVER, SIGNAL = 0.54; EXPRESSED IN LUNG, SIGNAL = 0.94; EXPRESSED IN BRAIN, SIGNAL = 0.5; SWISSPROT HIT: P32806, EVALUE 9.90e+00; EST_HUMAN HIT: BE072393.1, EVALUE 5.30e-02
gaggatgccctcagaaacaccacactaaaaaagagtaaaacaaagataaagaaaattagtgaagtgcttcttgtcaacttggcattaatatttcctctagccatatttgtgatgtgcacttctatgttactcatctctctttacaagcacactcatcggatgcaacatggatctcatggctttagaaatgccaacacagaagcccatataaatgcattaaaaacagtgataacattcttttgcttctttatttcttattttgctgccttcatgacaaatatgacatttagtttaccttacagaagtcaccagttctttatgctgaaggacataatggcagcatatccctctggccactcggttataataatcttgagtaattctaagttccaacaatcatttagaagaattctctgcctcaaaaagaaactatgaagaagaagaacaatgtgaactatttctttccttgatttagattcaatggacttacttgggttttgtatgctgactcaccctctctctggtaattttctgccagtgtctgacccccaggacaagtgaggcactaattttgatgttggatgggtgggata

SEQ ID NO: 2833 - DNA, 595 bp, Homo sapiens
  MAP TO CHR5.1; EXPRESSED IN ADULT LIVER, SIGNAL = 0.88; EXPRESSED IN FETAL LIVER, SIGNAL = 0.88; EXPRESSED IN BRAIN, SIGNAL =   1; EXPRESSED IN HEART, SIGNAL = 0.95; SWISSPROT HIT: O60925, EVALUE 4.00e-25; NT HIT: gi12408673, EVALUE 4.00e-91; EST_HUMAN HIT: BG488693.1, EVALUE 7.00e-91
tgctttgaaacctaattgtgcaatacaaatgtagtgagttattacttttatggttcttgttttgaatctctggatttcatccttgactattgcatttatttcttttactactccttgagtacttgctacttaatatggttattacttaatatgcatttgatttgcttcacactgattgtatcttctgatgattgtaaattcagtatttagtatggtgacttgattgtttacagttatgttgacttttattgatgtttggtaaatttcacagctttgtctctggctagcatattttgttttaatatatttggatttgaggtaaatgtttcctgtaaaatgttttacctactaaatcatggacttgtttttattaggccttcacagagcttcaagccaaagttattgacactcaacagaaggtgaagctcgcagacatacagattgaacagctaaacagaacgaaaaagcatgcacatcttacagatacagagatcatgactttggtagatgagactaacatgtatgaaggtgtaggaagaatgtaagtaaaatgtgtccttaatggagttattttgggagtgcttttgtccgagtt

SEQ ID NO: 2834 - DNA, 500 bp, Homo sapiens
  MAP TO CHRX.1; EXPRESSED IN BRAIN, SIGNAL = 1.3; EXPRESSED IN HEART, SIGNAL = 1.7; EXPRESSED IN ADULT LIVER, SIGNAL = 1.8; EXPRESSED IN PLACENTA, SIGNAL = 6.6; EXPRESSED IN LUNG, SIGNAL = 4.4; EXPRESSED IN FETAL LIVER, SIGNAL = 1.2; SWISSPROT HIT: P21333, EVALUE 2.00e-48; NT HIT: L44140.1, EVALUE 0.00e+00; EST_HUMAN HIT: AW247540.1, EVALUE 0.00e+00
tccaggcatagccaaggtagacatgcctgccggctctttcctccacccccaaccccaccctggccaacgcaggagagcgagcactcggggtgtgagcaggcctacctggcactccagcttcagctctctccaggccagggcccccagctcggaccttgtgggctcccccttcccctaggggccccacggtgaactggaaggggctcccaggcacgtgctggcccttgtacttcacgctgactgtgtgtgtgcccatctcagcgggaacaaagcggatgcagtaggtgtggttctccccttccacgatctcggcctcatgggtcttgcccgatgggctggtcacctgggctgtcatatcctggatgctaatttctgcagggtggggatgggctagtgagcagcagccctgggctccacccctcctcttggggctgcttgagccccaggacccctccccaggcttcccacagcccctaccagggattttcaggctgaggtca

SEQ ID NO: 2835 - DNA, 587 bp, Homo sapiens
  MAP TO CHR6.1; EXPRESSED IN HELA, SIGNAL = 0.79; EXPRESSED IN BRAIN, SIGNAL = 0.63; EXPRESSED IN HEART, SIGNAL = 0.66; EXPRESSED IN BONE MARROW, SIGNAL = 0.75; SWISSPROT HIT: P38760, EVALUE 1.90e+00
tctggaaattagctgggctcttcttaaagcaatttttgtcttctctcacccttgtcttgacttttccttctttggttcatttccttcatgagataaatgaagagcgcaagagattgaggttccaaagaacatgtgattcgtgagtcatgtctattttttctctatagtgttcattgaaaattcattgttccagtagaagaaacagaaagttaaaatgaacattaaatactgcttttgctatttctgtaatacagcaataattatgaaaataatgcttctcatttgatttatgctgtataagttactatggtctgttggtcactgtctcattttatcctcacaaataccctccgagataactttattatttccatttcgtatacaagaaaactgaggccctgcgaggtcaaataaattagataatgcaggaaaaaaccttaacccagtgctcatacaaaataatccacagttaacatctttaaggaacttgcttgacatcacacacgtaggaactgtgatgaggactgtgaccttcatatgctgtggtcaatactcactccacctcagcagagcagccttaggccata

SEQ ID NO: 2836 - DNA, 579 bp, Homo sapiens
  MAP TO AC074271.8; EXPRESSED IN ADULT LIVER, SIGNAL =   7; EXPRESSED IN PLACENTA, SIGNAL = 4.7; EXPRESSED IN FETAL LIVER, SIGNAL = 4.9; EXPRESSED IN LUNG, SIGNAL =   5; EXPRESSED IN HELA, SIGNAL =   4; EXPRESSED IN BRAIN, SIGNAL = 5.9; EXPRESSED IN HEART, SIGNAL = 5.5; EXPRESSED IN BONE MARROW, SIGNAL =   6; NT HIT: gi15297844, EVALUE 4.00e-88; EST_HUMAN HIT: BG110737.1, EVALUE 0.00e+00
ctcaaacaacatgcaggcactttaacattagtacttccactgttattaagtacagactttatttctttactctgacaccttaaaacaaccctccatccccacaacctaattgaatgattaagtgtaaagtgaattactaagtcagtgtgccccaaatttctttagatcaccagtacataccacagcatcaaaccggttatgataaatttctgcctggctctgctcaatgtattgttgtttagcatgaataaaagctggtattcccccatacacccagccaatgatgcctgctgtagctgccgtcttacagatattagcaaggtcctttgaaattctctgctgttcactacaacatcaaaaagacaatgttgtttgggattagtttatggacattgctctccaagagactctataatcagaattaacccaaatgctaccaccacaacatttttcatcataggtagaattctcagatgaattaaacagttcagttatattaaaaggaacgtagtctcagacaaaacgaagctatggtgttagaattaggatagtggcaactcctgaaaagacaatgaccgg

SEQ ID NO: 2837 - DNA, 544 bp, Homo sapiens
  MAP TO CHR19.1; EXPRESSED IN HELA, SIGNAL =  10; EXPRESSED IN LUNG, SIGNAL =  10; EXPRESSED IN BRAIN, SIGNAL =   9; EXPRESSED IN HEART, SIGNAL =  10; EXPRESSED IN BONE MARROW, SIGNAL = 9.4; EXPRESSED IN ADULT LIVER, SIGNAL = 7.6; SWISSPROT HIT: O14813, EVALUE 2.60e-01; NT HIT: gi14785851, EVALUE 0.00e+00; EST_HUMAN HIT: BE275161.1, EVALUE 0.00e+00
catctagccacacaggagccatggaagtggcagagcccagcagccccactgaagaggaggaggaggaagaggagcactcggcagagcctcggccccgcactcgctccaatcctgaaggggctgaggaccgggcagtaggggcacaggccagcgtgggcagccgcagcgagggtgagggtgaggccgccagtgctgatgatgggagcctcaacacttcaggagccggccctaagtcctggcaggtgcccccgccagcccctgaggtccaaattcggacaccaagggtcaactgtccagagaaagtggtaagtagagggggtggcctggggctctgagatgctagggaacctagcatcttgtcttttgggattaacactgcaaacattccctttgtattcgttacctgtggctgccacaagtcaccgtggacttggtagctttcaacaagagaaatttattctctcacagttcttggggccagaagtcaggtgtcgccagggccatggcccctcaggaggctctaagggagggaattctttcttgc

SEQ ID NO: 2838 - DNA, 568 bp, Homo sapiens
  MAP TO CHR19.1; EXPRESSED IN HELA, SIGNAL = 0.49; EXPRESSED IN BRAIN, SIGNAL = 0.53; EXPRESSED IN BONE MARROW, SIGNAL = 0.49; EXPRESSED IN HEART, SIGNAL = 0.49; SWISSPROT HIT: Q09456, EVALUE 4.80e-01; NT HIT: gi16163266, EVALUE 0.00e+00; EST_HUMAN HIT: AU145954.1, EVALUE 0.00e+00
ctcagaggggtaagcaggtgtcagctacaagctcctttctgtcctctaagctctgcagaagcccctggaaaagggtcctggtgctgctgtccccaatgtacctttcatgccactgccatcctcctggaaggtgttccggctggagccctgctcctctgtctgctcactgccagaggaggccacgctgctctggggcgagagaggtgcgtgatcgggcgtggtaaaagcagcccgggccccaagctcctctggactcggccactcaccagggacctgggggcttgtagggatgagtgacatggagcgcttcagtgggctagggtggatttggcaggggagacctggccagagtgggagaaaagcaaaatattagacctggggacccaaccacaggagaccatccccctgccgtcagtgccaggatggcagtttggccccataacctgccaagaggaagggacctggggtccaagggtaactgcctaccagatatacctcattctcttacctccaacacccaacccatcagcaagctgtcagccactttcctgaatttctccagttccgc

SEQ ID NO: 2839 - DNA, 592 bp, Homo sapiens
  MAP TO CHR7.1; EXPRESSED IN LUNG, SIGNAL =   3; EXPRESSED IN HELA, SIGNAL = 1.3; EXPRESSED IN FETAL LIVER, SIGNAL = 1.8; EXPRESSED IN BRAIN, SIGNAL = 2.2; EXPRESSED IN HEART, SIGNAL = 2.6; EXPRESSED IN ADULT LIVER, SIGNAL =   2; NT HIT: J02846.1, EVALUE 3.60e-02; EST_HUMAN HIT: AA478691.1, EVALUE 3.00e-19
gtggaatgcagattcgtgtggttgttgagcacttgaaatgtggcttttccaaattgagattcattttaagattaaaatgtataccagatctcaaagacttcttgtgaaattaatgaaggttttcattgactacatgttaaaataaccgtggttgtatacattgggctaaataaaatatactattaaaattaactttctttcttttttacttttttaatgcagatgctagaaaacttaaaatgacctatgtggtttacattggacagtgctaagctagagggtgtcatttaactttttctttcttttattccctccccttgcaaataggtaccaaattacatatatatctgtcaaaatgatgtaggacctaaagtctctctgtaagttgatccttttgaccccatgattaggagcttcacaatgtggtaccacacctggaaacctccagaacaagatctcaaggaaacacaggaaattcctgaaacagcaaaaccccctatgtgaagacgtctgttattcctttgtgtatcaggagcatcactgttaattaactgttgatacacttaaaacagcttggttggcaatgtccttt

SEQ ID NO: 2840 - DNA, 597 bp, Homo sapiens
  MAP TO CHR19.1; EXPRESSED IN PLACENTA, SIGNAL = 1.8; EXPRESSED IN HELA, SIGNAL = 1.5; EXPRESSED IN LUNG, SIGNAL = 0.97; EXPRESSED IN BRAIN, SIGNAL = 0.51; EXPRESSED IN HEART, SIGNAL = 1.2; EXPRESSED IN ADULT LIVER, SIGNAL =   4; SWISSPROT HIT: O15235, EVALUE 1.00e-52; NT HIT: gi14756964, EVALUE 0.00e+00; EST_HUMAN HIT: BG830016.1, EVALUE 0.00e+00
gctacctgctccatggctaccctgaaccagatgcaccgcctggggccccccaagcggccgcctcggaagctgggccccacggaaggccggccgcagctgaagggtgtggtcctgtgcacgtttacccgcaagccgaagaagcccaactcagccaatcgcaagtgctgtcgagtgcggctcagcactggccgcgaggccgtctgcttcatccctggggagggccacaccctgcaggagcaccagattgtccttgtggagggcggccgcacccaggacctgccaggcgtcaagctcaccgttgtgcgtggcaagtacgactgtggccacgtgcagaagaagtgacggctgggggcacagtgggctgggcgcccctgcagaacatgaaccttccgctcctggctgccacagggtcctccgatgctggcctttgcgcctctagaggcagccactcatggattcaagtcctggctccgcctcttccatcaggaccactattaagccataggagtcctgggggtgcaaagggtgcccctctgtcaacacccttggctcctgtgtttagaggggtggcctgaaggaccttttctgctgggacaa

SEQ ID NO: 2841 - DNA, 563 bp, Homo sapiens
  MAP TO CHRX.1; EXPRESSED IN ADULT LIVER, SIGNAL = 0.42; EXPRESSED IN LUNG, SIGNAL =   1; EXPRESSED IN BRAIN, SIGNAL = 0.42; EST_HUMAN HIT: BI046727.1, EVALUE 3.00e-96; SWISSPROT HIT: O19004, EVALUE 2.00e-35; NT HIT: U01337.1, EVALUE 0.00e+00
atgcccctcccttgtaattcccagaacccccacaagaggcatccttctaagcccttgacacccccactcaaccccagcccagggacagatagatactgttagacttgagatctcggtggatgatgttcttggcatggaggtagctgtgggggtggaggcaggtggcggattggctgggggttacctcatttcccccaccctttccccccacccctccccaggctgggaggctcactccatgccctgggcagtctgccgggccacgtcgatgagctggaccatgtcgaagcgtgtgtcggccacatgcaggtgatggtagaggctggagccctcacaccactgtgtgatgatggcaaatcccggccgggtcatgaagcccataaacagcaagatgttgacatgtcgcgtcttcctgcaggcagggagggcagtgtcagaggtggggaggaaaaatagcaactgtcacttaccgagcatcaggagtggcactgttctttaccttcctcggtcatttattttcaccctgtcttttggggcactcaggaccaaagcattgccagatt

SEQ ID NO: 2842 - DNA, 591 bp, Homo sapiens
  MAP TO CHR12.1; EXPRESSED IN HELA, SIGNAL = 0.93; EXPRESSED IN BRAIN, SIGNAL = 1.1; EXPRESSED IN HEART, SIGNAL =   1; EXPRESSED IN BONE MARROW, SIGNAL = 1.1; EXPRESSED IN PLACENTA, SIGNAL = 1.1; EXPRESSED IN FETAL LIVER, SIGNAL = 0.93; EXPRESSED IN LUNG, SIGNAL = 1.1; EST_HUMAN HIT: R77309.1, EVALUE 0.00e+00; SWISSPROT HIT: Q04400, EVALUE 1.70e-01; NT HIT: AJ271002.1, EVALUE 1.00e-04
aaatcaccaacccctatcccgccccatgtcaccccctgtgctccttcccaggtgctgacctgacagcagtggaccctgttcggggcaagacggccctggaatgggcagtgctgaccgacagcttcgacaccgtgtggaggattcggcagctgctgaggcggccccaagtggagcagcttagccagcactacaagcccgagtggccggccttgtccgggctcgtggcccaggcccaggcccaggcccaggttgccccttcactcctagaacggctgcaggctaccttgagcctcccctttgccccgtctcctcaggaggggggtgttctggaccaccttgtgactgccacaaccagcctggccagtcccttcgtcaccactgcctgccacactctgtgccctgaccatccaccttcgctgggcacccgaagcaagtccgtgccagagctgttaggtactgccccgccccctcccctggttccccagtccccgccagggagtccccagaggtccccgtgggtcttcgtcccctaccagagccctcagggcatattgagcaagtgccttcagtggctacaacccagggatagca

SEQ ID NO: 2843 - DNA, 551 bp, Homo sapiens
  MAP TO CHR1.1; EXPRESSED IN ADULT LIVER, SIGNAL = 1.1; EXPRESSED IN FETAL LIVER, SIGNAL = 1.1; EXPRESSED IN HELA, SIGNAL =   2; EXPRESSED IN BRAIN, SIGNAL = 1.6; EXPRESSED IN BONE MARROW, SIGNAL = 1.4; EXPRESSED IN HEART, SIGNAL = 0.65; NT HIT: U61380.1, EVALUE 1.30e-01; EST_HUMAN HIT: BF935660.1, EVALUE 7.70e-01; SWISSPROT HIT: P05882, EVALUE 1.80e+00
tgagggtctgaaagggtgagaggctagaatatcaccatattgacataagggaagggaagaatgaaactaacctccctcccatttcctagattcaaaataggggcattattaccatgaacaatcgtgatctctctgcccctgtagaaatctcccagggtgacagtcgagccctgttttgaagctactactcgaacagtcctcctgctgtccaaacaatccaagtaggggtcccattccaggtttctcttgctgagagattgggcccgggtagaggacatgcccaaggattctcccatgcgatcctggcagtaggacttgaacttccactgcacaactgcaggctgatgggaggatgttgagaagtggcagcgaagcacagtgggctggaagagcatggccaccttcttcttgtcgggcactgtgacctgaaggccttcgaccatggctgcaaaacagaataaacatgtccgaacagtgtccatatcctggacctcaccttccatcacatgatcacacctttccatttcacttccctaacttgtgtcccctca

SEQ ID NO: 2844 - DNA, 586 bp, Homo sapiens
  MAP TO CHR12.1; EXPRESSED IN LUNG, SIGNAL = 1.1; EXPRESSED IN HELA, SIGNAL = 0.65; EXPRESSED IN BRAIN, SIGNAL = 0.65; EXPRESSED IN HEART, SIGNAL = 1.1; EXPRESSED IN BONE MARROW, SIGNAL = 0.64; NT HIT: AF101385.3, EVALUE 3.60e-02; EST_HUMAN HIT: BI005190.1, EVALUE 9.00e-04; SWISSPROT HIT: P42127, EVALUE 6.50e-01
gccggtgctaagtgattaggggcccactcaacagcagatgaggccagggcaggagtggacctccagataaactccccttctggccccccaccatctggctctattctggagggctagaatggtggctatcccactattgcactggctgcaatagcagtggcaggattctttggctttaatccacaacccctttctcccccaaacccaggcggcctctgtaggttcccatgacaacagcatgcctgggaaggaccagcttgaggaaaaaacagattttactgtaagaaaaaactggccagaagccacaggccgggcaggctgggacaggggctctgcagtggggctgggtcctgggacatggaccagagagaggagtgagcaccagctctgtgctagaagctgacacattttgagcacttacaatagccagatactattaaatgtgctgtgtatgtattgacttatttgatcctcatgacaatgaggtaggtaccattgttatccatgttttacaggtgaggtgacagaggtatggtgaggttcaaacctggcagtctgacgtcagtgcctgaattatggacccctt

SEQ ID NO: 2845 - DNA, 520 bp, Homo sapiens
  MAP TO CHR12.1; EXPRESSED IN ADULT LIVER, SIGNAL = 1.7; EXPRESSED IN HEART, SIGNAL = 1.7; EXPRESSED IN BONE MARROW, SIGNAL = 2.4; EXPRESSED IN LUNG, SIGNAL = 1.7; EXPRESSED IN FETAL LIVER, SIGNAL = 1.5; EXPRESSED IN BRAIN, SIGNAL = 1.7; EXPRESSED IN HELA, SIGNAL = 2.3; NT HIT: gi15302014, EVALUE 7.00e-68; EST_HUMAN HIT: BG982331.1, EVALUE 1.00e-67; SWISSPROT HIT: Q9QYY8, EVALUE 1.00e+00
ttgtggcatttctgagcaacagagattgggactcagggccagctttctaccccttcggcatacctggtgccccctgcagtgtccctgcctgcccggggcccctacctcctcagtgctgaggccaaagtcacagggcaccactgtgcggtacttgaagcgacagggcaggtcgtcgatgatgtcctcgtagtccagccggtaatactcatccaggtactcctcgaacgtcttgtcccctgctcgagacagagccaggctgctgggctatgccaggccccgcggtgccccctgcctacccacggcctgcccacctgggcctcaccgggttcaaacacgggcttctcctgccccacggccgcggcgaagggcgacttgcgcttcttcttgcccgtcaagggggcctcgcgctttttcttcctcggctggctggggtcgtagtcggcgtccatctgccaggacgcacaggtcagatcccaccagccccccgtcagggcccctgggactccctcaacccgtgata

SEQ ID NO: 2846 - DNA, 575 bp, Homo sapiens
  MAP TO CHR16.1; EXPRESSED IN ADULT LIVER, SIGNAL = 1.2; EXPRESSED IN BONE MARROW, SIGNAL = 1.2; EXPRESSED IN PLACENTA, SIGNAL = 1.3; EXPRESSED IN FETAL LIVER, SIGNAL = 1.4; EXPRESSED IN LUNG, SIGNAL = 1.3; EXPRESSED IN BRAIN, SIGNAL = 1.2; EXPRESSED IN HEART, SIGNAL = 1.6; SWISSPROT HIT: Q15046, EVALUE 9.00e-52; NT HIT: D31890.1, EVALUE 1.00e-103; EST_HUMAN HIT: D58129.1, EVALUE 0.00e+00
aaaaggaaggcaagggagaggaggaggcaagcattgcaaggcagctcatcacgtcaggcaaggaactctccttacctctaggaatcccagctcatctaagaaacttcttatatatgtgatgatcttagagcggatgataaatttctgcctcacaaagtcattcaggatcaagtccaagtatctctggcgataccttgtttcctaaaccaaaagcagcagttagaaatcactggtatgtctgatccaaaggtatgataaaacaaacagaaagctaggaggccacagctaggaggccaagaacgcttaccttgtctttgaggccaaagtgaagatgaggtaacatatgcaaacagggagacagcagtgtgatctcatacggaatgatgctcagctcacccttcttggttttaccaggattcccctgaactccaattatgtctccccgacgcagtttgttattaatatgaataaattcttcttctgatttataatttctgagtgaaaaagaaatgtaattcagtaacaacaattcaaatgaacactgaccactggtctcctctggaaccctcactcaa

SEQ ID NO: 2847 - DNA, 520 bp, Homo sapiens
  MAP TO CHR17.1; EXPRESSED IN ADULT LIVER, SIGNAL =   1; EXPRESSED IN PLACENTA, SIGNAL = 1.4; EXPRESSED IN FETAL LIVER, SIGNAL = 1.4; EXPRESSED IN LUNG, SIGNAL = 0.74; EXPRESSED IN HELA, SIGNAL = 1.6; EXPRESSED IN BRAIN, SIGNAL = 1.2; EXPRESSED IN BONE MARROW, SIGNAL = 1.4; SWISSPROT HIT: Q9NYC9, EVALUE 4.00e-27; NT HIT: Z83813.1, EVALUE 6.00e-47
atttaaggggcttctggcacagggtggcaggatactgacctgggccagacctgagtacattcggcccatggacttgtagtccaggccctcagagcagttgaccacaatgacatatatgcccagggccttgcccaggtccttgacggtctcggtcttgcctgtgcctgcagggcctttgggggagccccctcggtgcaggtgcaatgccgtggtcagtgtcatgtaacacctgagaattgaggacagaactagagtcagactcctggaagcctctctcagcttctgctgccccccaccccagccacctcattcatcccacatggcagacctgtccgtcaggggggtgatgacgagccggcccgagttacccaagtactcataattatactgaaattgcgtgttggtctggcggatgacacagtcatcaagatcctggggaaaacagcgcagaaaaagagagaggtgggcttggaaggagagttagagctgggacaatgactgagagtggggctcagagttg

SEQ ID NO: 2848 - DNA, 575 bp, Homo sapiens
  MAP TO CHR14.1; EXPRESSED IN BRAIN, SIGNAL = 0.87; EXPRESSED IN LUNG, SIGNAL = 2.2; EXPRESSED IN HEART, SIGNAL =   2; EXPRESSED IN BONE MARROW, SIGNAL = 0.94; SWISSPROT HIT: O43707, EVALUE 3.00e-21; NT HIT: gi14761643, EVALUE 9.00e-80; EST_HUMAN HIT: BF793918.1, EVALUE 1.00e-79
tccaaatccttcaggtgtcccacctggggctgagacaggatgggcaaaaggcctcatcccataaggcccttccctggcttctggaaggaggtgcagttggggcactggggaccctattccaggccttgaggcaggctgggcctcggcgtgctgccgccaccagtctgggcaggctgtggtgagagccaggtgatgatagtgtcctgagcccgcacgtacttgagctcctgggcaatggcggcgatctgctccacgcggtcctggtgcgcagccaggtcgctctcgaaggcctcgtgcttgcgaatgagggctttgatgtccgatagtgtggccgtctcgtagtcccggtgcttcagcatggcttccttccctggtaggagcagagagacgcttagaccacagcacggcagctgtggggcaggagtctggaggggctgtccaagcagagggagggaaagagagactgtggaccccacatccttccatgccaatgacagtggcatggaaacttccagaatcttcttccgtaccctccagggatctctaagcccaactgtaacctggatggacctgga

SEQ ID NO: 2849 - DNA, 593 bp, Homo sapiens
  MAP TO CHR5.1; EXPRESSED IN FETAL LIVER, SIGNAL = 0.87; EXPRESSED IN BRAIN, SIGNAL = 1.1; EXPRESSED IN HEART, SIGNAL = 1.1; EXPRESSED IN ADULT LIVER, SIGNAL = 1.3; EXPRESSED IN BONE MARROW, SIGNAL =   1; SWISSPROT HIT: O76082, EVALUE 2.00e-29; NT HIT: AB016625.1, EVALUE 0.00e+00; EST_HUMAN HIT: BI758502.1, EVALUE 7.00e-97
ctccaggttgaggaaagtgcatgtccttatagctgcaggtcccagcctcctttcagcaatcaatttggagggaaatcttggctatagccccttcccccacaataggaagtgatagaaactgactccccaaaaaatttgggaagaaagtatgtttgttttgctctcaatagctgcatgccatgggttggtacctactcctaccctctttcctttgcttctccagacttgtattatttggctacagtcctggtgatggtgggcaagtttggagtcacggctgccttttccatggtctacgtgtacacagccgagctgtatcccacagtggtgagaaacatgggtgtgggagtcagctccacagcatcccgcctgggcagcatcctgtctccctacttcgtttaccttggtaagtcccatgagccaagggcacactagagcaacgggatggaagtactaactggcttgaatgtgagctggaggttgcgtgttaacaggaaaacaagttcatacagtacatgggctccatccagtactggatctttggccgggaagggttcttgtcccagtgcactggccctcactttcaaatggaa

SEQ ID NO: 2850 - DNA, 537 bp, Homo sapiens
  MAP TO CHR19.1; EXPRESSED IN HELA, SIGNAL = 1.6; EXPRESSED IN BRAIN, SIGNAL = 1.4; EXPRESSED IN BONE MARROW, SIGNAL = 1.4; EXPRESSED IN FETAL LIVER, SIGNAL = 1.7; EXPRESSED IN LUNG, SIGNAL = 0.73; EST_HUMAN HIT: BG832005.1, EVALUE 0.00e+00; SWISSPROT HIT: P06487, EVALUE 8.60e+00; NT HIT: gi14761401, EVALUE 0.00e+00
tcctatttcttggacgcaggcactgcgtgggaagcggaccggccgggattgcagagctgggcgcgcacctcttgcagctctgtgcgcagttcctccagggcgccctgtggcggcgccgcctgcacctgcgcctgcagcgcttccagcgccagcgccaggtggcccacctcgtcccgcagcgcgttccaggcagcacgctgctcctcctccttgtggcgctgctgcgcctggtggcgccagtactccagcactaggcagccgccgcccacgatgaagatggtggcttcgcccagcagctctgcgcccagctcagctgccgcctcctcgttcagcggcttgatgaccgtgccccggaagcccatgatgcgcatcttggtccgcatctccacccagtgatacactgcgggggaagagaggggtcaggctgcgctctgggagccccctgcaagccccacccctctcacccagggaatgcagtcacctagcctgggtaacccaggggtcttttaaaagaccagatgattctagcgagcagcc

SEQ ID NO: 2851 - DNA, 595 bp, Homo sapiens
  MAP TO CHR2.1; EXPRESSED IN HELA, SIGNAL = 0.81; EXPRESSED IN BRAIN, SIGNAL = 0.76; EXPRESSED IN BONE MARROW, SIGNAL =   1; EXPRESSED IN FETAL LIVER, SIGNAL = 0.61; NT HIT: AE004279.1, EVALUE 8.90e+00
gagagctggaggagtgcttgtaactatactaagtttgccaaaccacttctcttgtaactctcagttttcatatactcatggcattttgctccaacatgttatatttaatcttagcacaagtatagatgttttgggtatgatttgtataagatacataatgaatttcacattaactttgggtaatccatcagggaagagatacttgtgacaccttaaaagttaaaaccaaaaaagtaaaatgaatacacaattctaagtacagtagagccaacccttcattcttgcgtggattctgtttgtggagctgccatcgataaagagactcctgtgtggatcaagcacacagactggctgattgattgactgattactatttgtattattttaccacaagcactggaagtgggagacagtatccgggtgttgtcacgtggttatggctttgactccttcttcattctattcttagctatcgaacttttctgatacatgacttaatgaaatgcaaaatttaatctaaatgcttttatggttcagagttgcattttttatggatagtgactgggcaatttttccacctcttggagcacaaaca

SEQ ID NO: 2852 - DNA, 526 bp, Homo sapiens
  MAP TO CHR3.1; EXPRESSED IN HELA, SIGNAL = 0.96; EXPRESSED IN FETAL LIVER, SIGNAL = 0.84; EXPRESSED IN BRAIN, SIGNAL = 0.98; EXPRESSED IN ADULT LIVER, SIGNAL = 0.82; EXPRESSED IN BONE MARROW, SIGNAL = 1.1; NT HIT: gi5453909, EVALUE 1.00e-125; EST_HUMAN HIT: BI822263.1, EVALUE 1.00e-125; SWISSPROT HIT: P51178, EVALUE 2.00e-39
ttatggcagcccaaagtacctaaaccagcttccatacccaagttgccctggggataaccacagccagtgtccacaagccaggcctggacccactgccaccaaaaggatactgctgtagcttctgacgctggtccatggagcctgagtggtggatgatcttgtgcagccccagcacccagtgctgggcatcagctggcgatggggcgatgaggtctagtgtattgcgctggtccttgaagacaatggagaagcagcggtcctcgggcacatcacgggcgaacttctccagaccctccgtgcggtgccccattcgcacctcctgaatgtcctcgatggagactgcgagagggggatggtggaggagagagggagagaatgctgttgagcagtccctgaccctgagccaaggccacagtagagaggggcatggcttgagacacagagccagggccggagctcaagccttgagccagaaggaaaggagaggggcaggaggttggacaagtgggggacaaaaaggagaaag

SEQ ID NO: 2853 - DNA, 563 bp, Homo sapiens
  MAP TO CHR16.1; EXPRESSED IN BONE MARROW, SIGNAL = 0.52; EXPRESSED IN BRAIN, SIGNAL = 0.46; SWISSPROT HIT: P17735, EVALUE 7.00e-23; NT HIT: X52519.1, EVALUE 0.00e+00; EST_HUMAN HIT: BG568198.1, EVALUE 0.00e+00
tcctgaccattttagggtggtccagtaccagactcaattgctctgaaagtaacagactcttctttttgcagtgctttgagtacccgaatttcatccgagtggtcatcacagtccccgaggtgatgatgctggaggcgtgcagccggatccaggagttctgtgagcagcactaccattgtgctgaaggcagccaggaggagtgtgataaataggcctgcatccattctcctgaggatgtgtcccatctagggaaggctggactaggccttgcggctcctcagggactcaggtggccctactgggagaggggcctcaaatgcaccatgtcaagggttcaagattgttcctgcttttccccaagtacaaccacacccacactcagatcctcctcattcacatcgcagattctcccttgctctgcgctgctagagtgactcactaattcattaatctgcctccctctcgtaagatttccttctttttttcttgaaagtaccaggtgaacaaagtttaccagaaagcagttgagacaagaaaataagagctcaggatgagggaaaaga

SEQ ID NO: 2854 - DNA, 538 bp, Homo sapiens
  MAP TO CHRX.1; EXPRESSED IN HELA, SIGNAL = 1.1; EXPRESSED IN BRAIN, SIGNAL = 0.96; EXPRESSED IN HEART, SIGNAL = 1.3; EXPRESSED IN BONE MARROW, SIGNAL = 0.97; EXPRESSED IN ADULT LIVER, SIGNAL = 0.86; EXPRESSED IN FETAL LIVER, SIGNAL = 0.86; EXPRESSED IN LUNG, SIGNAL = 1.6; SWISSPROT HIT: P51805, EVALUE 7.00e-25; NT HIT: L44140.1, EVALUE 0.00e+00; EST_HUMAN HIT: BF375954.1, EVALUE 6.00e-17
gcgttctcggtttctttgagccttctccaggttgggcctggagaagggtggccctgtgtgcagctgacaggtgctttccccgcagggctgccctgagatcctgcccagtggggacctcctgatccccgttggggtcatgcagcctcttaccttgcgggctaagaacctacctcagccgcagtcgggccagaagaactatgagtgcgtggtgcgggtgcaggggcggcagcagcgggtgcctgccgtgcgcttcaacagcagcagtgtgcagtgccagaacgcctcggtgaggtcccacccgctgcctcccttcggggtctgggctgtggcgtggtgtggatcgttcttgtctatgcccagctctctggcagggaactgtctgagtctcctgctagggattcctgtacctggaggaggggggcagctggcaaaaatcttgggtaggggttctgcacatcttatctggggtcccatgggttcctttcctccagtactcctatgaaggtgatgagcatggtgacaccgagctggacttctc

SEQ ID NO: 2855 - DNA, 562 bp, Homo sapiens
  MAP TO CHR20.1; EXPRESSED IN HEART, SIGNAL = 1.2; EXPRESSED IN BONE MARROW, SIGNAL = 1.2; EXPRESSED IN ADULT LIVER, SIGNAL = 1.2; EXPRESSED IN PLACENTA, SIGNAL = 1.4; EXPRESSED IN FETAL LIVER, SIGNAL = 1.1; EXPRESSED IN LUNG, SIGNAL = 1.6; EXPRESSED IN BRAIN, SIGNAL = 1.5; EXPRESSED IN HELA, SIGNAL = 1.3; EST_HUMAN HIT: BI118079.1, EVALUE 1.00e-118; SWISSPROT HIT: P19174, EVALUE 7.00e-59; NT HIT: gi14770868, EVALUE 1.00e-123
gaagagagtaagggccagggcccaggcggggtgtgcatgtgcctggagggcctggtgggtgcaaaaagagtatttaggtatccccccaacacttcctgggtgggcgggctctgtaagtgttttccctgtttggcccagagattggcacagaacgtgcttgctaccgggacatgtcatccttcccggaaaccaaggctgagaaatacgtgaacaaggccaaaggcaagaagttccttcagtacaatcgactgcagctctcccgcatctaccccaagggccagcgactggattcctccaactacgatcctttgcccatgtggatctgtggcagtcagcttgtggccctcaacttccagacccctggtgaggaagtcccctgtgaggagggtgaggaggggcactgtggggcagctggactggaatacaccataatctgcctcttccagacaagcctatgcagatgaaccaggccctcttcatgacgggcaggcactgtggctacgtgctgcagccaagcaccatgcgggatgaggccttcgacccctttgacaagagcagcctc

SEQ ID NO: 2856 - DNA, 562 bp, Homo sapiens
  MAP TO CHR5.1; EXPRESSED IN FETAL LIVER, SIGNAL = 0.5; EXPRESSED IN LUNG, SIGNAL = 0.67; EXPRESSED IN BRAIN, SIGNAL = 0.64; EXPRESSED IN HEART, SIGNAL = 0.88; EXPRESSED IN BONE MARROW, SIGNAL = 0.64; EST_HUMAN HIT: AW854545.1, EVALUE 5.00e-79; SWISSPROT HIT: P57078, EVALUE 1.10e+00; NT HIT: gi13386461, EVALUE 4.00e-79
gggggaagagaagactctggcctctaattataatctatcttataagtgacaaaaataaataaaacatcaaaacccttccacaattttaatcactaaagattatttctgcttacttgtgctaattcataataccctgctgaacaagccaaacacagcaggctttctccttcttctgtatgttcatttacacttctgccttcatctagcaatttacgaacagcattaacatccccatctgaacaagcttctgctagactgcgactggaaacaaaaccattcaacaattaaccgaaacaaaaagactcgggggtcctatgataaattatattaaatataaatagtcacacaaagaaaaatgttaatgcagtaaaagaaaaaattatatgaacatattacttgctgagcattttgtctgcaacttcaattattcatgtttatcaaccaagccagaaagccagtgagtgaatttgaaaccagctgtcatttttatcttttaaaatctcctaacatattacaacaaattttaaataaagttttttaaagcattagaccaagcatgtcc

SEQ ID NO: 2857 - DNA, 567 bp, Homo sapiens
  MAP TO CHR20.1; EXPRESSED IN FETAL LIVER, SIGNAL = 1.1; EXPRESSED IN LUNG, SIGNAL = 1.4; EXPRESSED IN BRAIN, SIGNAL = 0.94; EXPRESSED IN HEART, SIGNAL = 1.4; EXPRESSED IN ADULT LIVER, SIGNAL = 0.41; EXPRESSED IN BONE MARROW, SIGNAL = 0.91; EST_HUMAN HIT: AW851295.1, EVALUE 1.00e-89; SWISSPROT HIT: P19174, EVALUE 1.00e-25; NT HIT: gi13653671, EVALUE 7.00e-90
actgtggtcactggtctcccttagctcaccagggctctaacagctaactttggaggcttctcctctctcctggcctctttggtgtgaaacatttttcttgcactgctgagcagcctccataattgggccagctcgggactgcatcagttgccaccctttggtttccactgctgccacagctgtagaacccctctctgccccaccagtggctatggcctgcctcttttctgggatagtttttacagacaagaagcccccaggcccttggcttccaacagctcactgtgaggggctacttagacccagagaattgcagaatctgtttcactgtgcttgtcccccatcccgcaggtacccagtcatcctgtccattgaggaccactgcagcattgcccagcagagaaacatggcccaatacttcaagaaggtgctgggggacacactcctcaccaagcccgtggagatctctgccgacgggctcccctcacccaaccagcttaagaggaagatcctcatcaaggtggggtggcgggcttattgcggaagccccacacttctcagtgcctt

SEQ ID NO: 2858 - DNA, 600 bp, Homo sapiens
  MAP TO CHR5.1; EXPRESSED IN FETAL LIVER, SIGNAL = 1.1; EXPRESSED IN LUNG, SIGNAL = 1.4; EXPRESSED IN HELA, SIGNAL = 0.91; EXPRESSED IN BRAIN, SIGNAL = 1.3; EXPRESSED IN HEART, SIGNAL = 1.8; EXPRESSED IN BONE MARROW, SIGNAL = 1.5; EXPRESSED IN ADULT LIVER, SIGNAL = 2.2; SWISSPROT HIT: P37483, EVALUE 1.70e-01
acctgaatcatggagatgcccacccattcccctgaatttaaaagaagtaagtcaaatggtccttcagtcagaaaagtgatttcttagccaccaaggacaaaatagcgtctctggttaccaaccctaaagaatgtcttggcacattcctccctctggggctgagctgttttgtgtgctggccggccaggagctgctgggggtagggaatccagttttcagcttcccctttcaccagggggttggaagagcagccaagcagccagccttgccaactctctccccttctcacccaggggaagactgggaggccgaaattcctgaggatggttgtcccaacaaccggagagggtccagtgggcagcttgggtcctgcccactgggccaaaggctccagcagcaccacaggcttttcctgagtcaaggccagcctgggaaggtgacaggcccttcgggaatcaggtgctgtggatcaggtctgaacagcaccttggagccgtgctccttttgcggagtaactctgggtgcttttgtgagctctagcgaaggggccagcgtcctgtgtatttcacttcgtggtatgcaaaacaaatgcaccgattg

SEQ ID NO: 2859 - DNA, 541 bp, Homo sapiens
  MAP TO CHR11.1; EXPRESSED IN BONE MARROW, SIGNAL = 1.3; EXPRESSED IN HEART, SIGNAL =   1; EXPRESSED IN ADULT LIVER, SIGNAL = 1.2; EXPRESSED IN FETAL LIVER, SIGNAL = 1.3; EXPRESSED IN LUNG, SIGNAL = 1.1; EXPRESSED IN BRAIN, SIGNAL = 1.4; SWISSPROT HIT: P28659, EVALUE 1.00e-13; EST_HUMAN HIT: BE702500.1, EVALUE 0.00e+00; NT HIT: AF248648.1, EVALUE 2.00e-80
tttcttggaggcaaggacacaagatgtttctaaatctttaaaacgggaaaccaggaattcactttagttgcagcaaaagcctcaagatataaccagagatgcatgtccagagatacatatatatagagagagaaagagactaacaggactaaaagaaatagtactacctgaatttttacatataatttctatatgccaaaagttgtaaatgccactgtgtttgttggctagggacagcagaagaaggaacagctgggagcttgcacagtctgcagaaagcaaaccacaaagactcactgctaaatactggggtccaagagtatttagaccagcaaggtttccccacacagatggcgctgatttgctgcatctgctgctggagctgctgggccattctcttctgttctttgtccttctgtgtatcagcaaattttaccaccatgggtgatgagcaaccctgtgaaaagaccataacgaaagggtcaaattcctccatctgaaaagaagaaaaaaaatcttccttttggatgacatgcaggtt

SEQ ID NO: 2860 - DNA, 559 bp, Homo sapiens
  MAP TO CHR20.1; EXPRESSED IN LUNG, SIGNAL =   1; EXPRESSED IN BRAIN, SIGNAL = 1.1; EXPRESSED IN HEART, SIGNAL = 1.3; EXPRESSED IN BONE MARROW, SIGNAL = 1.1; SWISSPROT HIT: Q9FDF9, EVALUE 2.40e+00; NT HIT: gi11141900, EVALUE 5.30e-01; EST_HUMAN HIT: BI029384.1, EVALUE 2.00e-01
ccctttatcagaggcagcagtacaataaagcaacttctttgataccagaatggggaggagaaaagtgaatttgcaaagaatctactaatagttgacttggatgagaattttctctggggttttgagactccataaccatgatttgggggtgaaaaggagacccatcagaatgctcatcactttttaaagatgctagtggaaaactcagtgtcatagacaaaggtaattcttttccattgaagcccagccttttggtctaagtatcacttctcttactgaatggaacatctttaatctaaacaggttgctttggctttgtttcctcagtgaggtgttctcatcagagaaatctgttgtttagtgtatacaggttgatttggtgaaatgatatttgtgtgtggtgttatgtaaatagaggtatggcccatctttctgatagtagcatagtctataattaggatggacgtgcatgtaagcagagaggtgtgtgcgtgcatgcacatgtgcatgctgaggggcagggggcggagaggagtgtacgccagcctgtgttaaagtt

SEQ ID NO: 2861 - DNA, 525 bp, Homo sapiens
  MAP TO CHR17.1; EXPRESSED IN BRAIN, SIGNAL = 0.76; EXPRESSED IN BONE MARROW, SIGNAL = 0.82; SWISSPROT HIT: P80219, EVALUE 7.40e-01; NT HIT: AB038161.1, EVALUE 5.00e-01; EST_HUMAN HIT: AW851676.1, EVALUE 1.00e-116
ttccaggaccaggagatttgagctaggcttgggaccttctctttgctgggtctctccctggtcctgcctcctaagaaagagaaaacaagcaaatactctgtctacattcagatacgatgccttacatgagagtaagagagcaggaggaaactgctcagctgcctcattttcctcctggggtggaggtggatgattgtcttgccttcaatctttaagaggctgaagccagcctctgaccaccttgggcatgatggctggacccgcaatgtgcctgtcagtagaaggaagggagatttcgaaggctggagaggacagctttgtctcttcgcagcagcctgtgggctcccagccatatcctggctgagcgatagcacatccagcttgcttggggccagggctgaatcaccatgaatcccccacagcttggcagtggctgcttaaagagacccagggctgaaataacaggggaggttagaggctctcgctggaatcaggctaaatgagagaatggcaaagatgagggaa

SEQ ID NO: 2862 - DNA, 600 bp, Homo sapiens
  MAP TO CHR5.1; EXPRESSED IN BRAIN, SIGNAL = 2.2; EXPRESSED IN HEART, SIGNAL = 3.6; EXPRESSED IN ADULT LIVER, SIGNAL = 3.5; EXPRESSED IN BONE MARROW, SIGNAL = 2.6; EXPRESSED IN PLACENTA, SIGNAL =   2; EXPRESSED IN FETAL LIVER, SIGNAL = 2.1; EXPRESSED IN LUNG, SIGNAL = 2.5; SWISSPROT HIT: P49590, EVALUE 6.00e-17; NT HIT: gi16171280, EVALUE 2.00e-62; EST_HUMAN HIT: BG388600.1, EVALUE 2.00e-85
accttcagctcaaatgctggggtgtccatcccctttgctccatgacgtttaaagcagctgataaccaaatcaagaattttctccctcacaaccatatgctgaggactaagatccctggtaccctggaaaccaaaagcagccatagtgaaaacaaaaacaaaaaataagtccatttcagacaaggagttaaactacacttattatgtaatctcaggtctggagctgaaatctactgagttcaaatgactctgagccgcacctagtatctcaagaatagtatatatttttaaaatttactgtaaagaacattaaaaggggtcagagagacatgcaaggcagaggtcagtcctccaaggcactctaatgggatagggtaggcaaaaagtattacctttggggtcttgataataaaatttggtttctcttgatgtgctttcagttgggatgttaacactgcctctgcaacctggcagaagaatgaatgtgagatgtggcttctctggacactggccagacctgtggcatctctgaccctgttgaccaccaacctgcaaagactcttcaccctgagcaacaggaagccaaagcaccatttcatct

SEQ ID NO: 2863 - DNA, 584 bp, Homo sapiens
  MAP TO CHR19.1; EXPRESSED IN HEART, SIGNAL = 3.1; EXPRESSED IN PLACENTA, SIGNAL = 7.6; EXPRESSED IN FETAL LIVER, SIGNAL = 4.6; EXPRESSED IN LUNG, SIGNAL = 8.1; EXPRESSED IN BRAIN, SIGNAL = 2.2; NT HIT: gi14766237, EVALUE 3.00e-98; SWISSPROT HIT: P11249, EVALUE 9.00e-32; EST_HUMAN HIT: BI911087.1, EVALUE 0.00e+00
atgggattacaggcgttgagctaccgcacccgttcgatgtctgattaattcttgagatgcacgatgtcccaagaggcgcaaatccactccagaccccacgtagccccggcctctccatacctgcccacagtagacaatctcccctgaagacttcttcatcttctttaactgagatacaaagtaccagaagcgggacttggcgacgacatgattaggcgcaaagattcgcatgcggtagaggggcggcgtgtggcatttgggggtgggcaggcagcgacccactaccttgtactctcgtagctgaaaggaaacaggagtgagggtaaggccagcacccagaggcaactgtggagatccacctcactccctttcctacatctagtgaccacagattcgggaagcaggaggcagggccaccctagggcctccatgtggattcttggtgactgtaggtcacactcccgaccacaactttatacacaaaatgaactgaggagagggaggtctccagggaggattaattgagttgcctgcctctcctttgcctgggctaagggtttcagaccaggaaagctgtggcttag

SEQ ID NO: 2864 - DNA, 586 bp, Homo sapiens
  MAP TO CHR7.1; EXPRESSED IN ADULT LIVER, SIGNAL = 3.7; EXPRESSED IN PLACENTA, SIGNAL = 5.3; EXPRESSED IN FETAL LIVER, SIGNAL = 4.2; EXPRESSED IN LUNG, SIGNAL = 1.9; EXPRESSED IN HELA, SIGNAL = 8.5; EXPRESSED IN BRAIN, SIGNAL = 4.7; EST_HUMAN HIT: BE745983.1, EVALUE 0.00e+00; NT HIT: gi15309022, EVALUE 0.00e+00; SWISSPROT HIT: P29400, EVALUE 7.00e-03
cacaagagtgaaggctgctggtccacacccacctggcctcggtgacatcagcagggtttcccctgcacaccttctccagctgcacatagaccgagcagttgacccggctccagtcggggtcgcagacggctaggaagttgggcctcagacgcccaatcatgtacttggccaggtctgtcagagactggctcacggcagccccaaacaggaaggtccccagcaccttgtatacagcagccacgtagttgttgaagtccgagcgagaatagagccggtctgtgtacaccaggtaggcttccccggccgagacctgcaagagcagccgcaggaaccagtgggggtctcggtcggcccaggggccctcactcctccgcacgggcctccccaatggctgctggagagctggggactctgaagggggccctattacccacaggtaccactcagggcaaggctgtgtcccccggccccacacagacctccagggcagggctgtgccacccccccatcaggcccccagggtaaagctggccccaccccatccccctacccagtccctctgagcccctcctgccttacaaggatg

SEQ ID NO: 2865 - DNA, 578 bp, Homo sapiens
  MAP TO AP000850.3; EXPRESSED IN BRAIN, SIGNAL = 0.82; EXPRESSED IN ADULT LIVER, SIGNAL = 0.66; EXPRESSED IN BONE MARROW, SIGNAL = 0.9; EXPRESSED IN FETAL LIVER, SIGNAL = 0.67; EST_HUMAN HIT: H45899.1, EVALUE 3.00e-06; NT HIT: X14445.1, EVALUE 0.00e+00; SWISSPROT HIT: P11487, EVALUE 3.00e-73
tcttcagttcccactggaccctgatttgagctggctctggaaatagctgagaacccagacgcgggacgcaggggcaagggctcaaggaggagagtcagagtcaagaggctgccacgccaagatgtcgccaggagctctggcggtggccaccaggcccagctagtgcgcactggcctccagctgggagcccagtctcgaagcctgaacgtgagagggctccaggttatccgggctctgcttctgccgccgccgtcggggctggacccccttaccagggggtctgggcagcccactctgtagctgccgcaccatctcgtggtccctgtggtccagcacgcggggcaggaacagggaggacttctgtgtgcggcgggtcttgaagcccctgcggggccggcccttgccgttcacagacacgtaccacagtctctcggcgctgggctgccggcgggccccaggcgtactagacaccgtccggtacagccgggaggcatacgtattatagcccagctcgtggatccgctccacaaactcgcactcggcgctgtagtgctcctgcggggatgagatatcatggt

SEQ ID NO: 2866 - DNA, 599 bp, Homo sapiens
  MAP TO CHR22.1; EXPRESSED IN PLACENTA, SIGNAL = 7.4; EXPRESSED IN FETAL LIVER, SIGNAL = 6.2; EXPRESSED IN LUNG, SIGNAL = 2.6; EXPRESSED IN HELA, SIGNAL = 6.2; EXPRESSED IN BRAIN, SIGNAL =   6; EXPRESSED IN HEART, SIGNAL = 3.3; EXPRESSED IN BONE MARROW, SIGNAL = 5.2; EST_HUMAN HIT: BF732879.1, EVALUE 0.00e+00; NT HIT: AF118569.1, EVALUE 5.70e-01; SWISSPROT HIT: Q9P2J3, EVALUE 1.00e-10
gttgccaccttggtcagtgggcttgtgggggagctggcagcctcgtcccagtgggtgctgggctttattctagccttggctttgcaggtggcctgctacagctgcacgtctggacagtggtcatctgtctgcccactccctgctgggcacggtgagcctggcattgctgtgctggacaacaggatctatgtgttaggtggccgctcacacaaccgcggcagccgcacaggctacgtgcacatttacgatgtggagaaggactgctgggaggaagggccccagctggacaactccatctcaggcctggcggcctgtgtgctcaccctgccccgctccctgctccttgagccgccccgcgggacccctgaccgcagccaggccgacccggactttgcctctgaggtgatgagtgtgtctgactgggaggagtttgacaactccagtgaggactaggctccctgtgcctggcatcagagggaagggaggctggggctgcagggcagtgaaacccacgcagcctaggccagagcactttactccaggcagggcccctgcccctgttggccacagcttatgggccctgccctctttcttcacac

SEQ ID NO: 2867 - DNA, 570 bp, Homo sapiens
  MAP TO CHR17.1; EXPRESSED IN BRAIN, SIGNAL = 0.58; EXPRESSED IN ADULT LIVER, SIGNAL = 1.3; EXPRESSED IN BONE MARROW, SIGNAL = 0.53; EXPRESSED IN HEART, SIGNAL =   1; EXPRESSED IN FETAL LIVER, SIGNAL = 0.63; EXPRESSED IN LUNG, SIGNAL = 1.2; SWISSPROT HIT: Q57753, EVALUE 1.90e+00; EST_HUMAN HIT: BF352092.1, EVALUE 2.00e-47
accaaggctgtctgtggtggtagaaatcgagaaaaagagcaaggaataaaagatattttagaagaaagcattgagaagacttggtgaaaaattgaattacctactaactggtgcactaaattttatatcatcaaactctatgtacctagaattggtttaactatgttttcaaaatttttgacagttcagacactgatacgtgactgtcaagttatcagagagactaaagaagaccagattgcagagctgaaaaagatatgtgaacaaagtacggaatctctaaataatgactgggaaaaaaaggtaagctacataaaatactaatggaaaacataaaagtttatgcttccaagtaacatatttaattataaaagtaatagatttcacagaatatacagaaaagtttaaaaaataactaaaattccaggctgtttagaaatagctactgttcatgttttggtatattttcttctggaagtctatggtctataaaatagttttcatttagaaaatattcttttgactagctcttgaatttaattaatgttctggatttcttatcagccaaca

SEQ ID NO: 2868 - DNA, 547 bp, Homo sapiens
  MAP TO CHR11.1; EXPRESSED IN BONE MARROW, SIGNAL = 0.85; EXPRESSED IN HEART, SIGNAL = 0.58; EXPRESSED IN ADULT LIVER, SIGNAL = 0.63; EXPRESSED IN FETAL LIVER, SIGNAL = 0.87; EXPRESSED IN HELA, SIGNAL = 1.2; EXPRESSED IN LUNG, SIGNAL = 0.97; EXPRESSED IN BRAIN, SIGNAL =   1; SWISSPROT HIT: O02626, EVALUE 2.00e-19; EST_HUMAN HIT: BE783553.1, EVALUE 0.00e+00; NT HIT: gi4505070, EVALUE 0.00e+00
tctccccttgatgttggaagcctgttaagtgatggctttgggaggtgttctaagactttggatcatgggaatccttaccctatgggtctcagattatctcatcatctgcttccccagggttgccatggtacggttcttcaattccgccaacgtgctgcagggatttcagatgcacacgcgtaccctgcgcctctttcctcggcctgtggtagcttttcaagctggctcctttctagcctcacgtccccggcagactccttttgccgagaaattggccaggactcaggctgtggagtactttggggaatggatccttaaccccaccaactatgcctttcagcgaattcacaacagtgagtctacctgccctctgctccgctctgccttgtgcctctgtcctcctgatggactttgatttttcctttgctaatgtttgacctgtgccttctatcctggctctgctttagactttttcctgcctttctttcaggcgttgcttgcctttttttccttgctgctgactttctgttcttttccctcatggggt

SEQ ID NO: 2869 - DNA, 584 bp, Homo sapiens
  MAP TO CHR1.1; EXPRESSED IN FETAL LIVER, SIGNAL = 0.44; EXPRESSED IN BRAIN, SIGNAL = 0.49; EXPRESSED IN BONE MARROW, SIGNAL = 0.55; NT HIT: AY028778.1, EVALUE 2.00e-90; SWISSPROT HIT: Q05594, EVALUE 1.50e+00
gacccccaaggattgatacctgaagttggtggccaaggattcagtgaggggaggtgaggagccatgcttgggatgagataagtgcacatgaactaccttctcctaatgcaagttgcttaccactcaggggtacctcgctagagagagtcggggctgaaatccagcccgcattccactcaccaagctggttaccaggcgtggggctgcatttgtccagagggtggatgaattttcttcccaaaagactctgtcacctagccaagctgtgtacctgtgtggttacatctgcccagaggggccctttcaccttactcaaatactcatgggagtgcttttttctaatccccacgaaggcgctatatgagctagtggtggaactgctccctcaccttcacaaaagggaaggctggcccgggactgaagggttcgttctcatgttccagctggtagcgcacgtactcctccacgccctgctccgtgtagatctgctgctcctcgtccatgcgaaacaaggctcgggaggacacagcgatggtgactgcattctgaggcttgggctgcagaggtatgggagaaggggttgt

SEQ ID NO: 2870 - DNA, 510 bp, Homo sapiens
  MAP TO CHR5.1; EXPRESSED IN FETAL LIVER, SIGNAL = 1.5; EXPRESSED IN LUNG, SIGNAL = 0.88; EXPRESSED IN HELA, SIGNAL = 1.8; EXPRESSED IN BRAIN, SIGNAL = 1.6; EXPRESSED IN HEART, SIGNAL = 1.2; EXPRESSED IN BONE MARROW, SIGNAL = 1.5; NT HIT: gi11417364, EVALUE 0.00e+00; SWISSPROT HIT: O60383, EVALUE 7.00e-86; EST_HUMAN HIT: AW770109.1, EVALUE 1.00e-88
tgcctatcctgtgggagaagaggctgctgaggatgggagatcttcccatcaccgtcaccgcagaggtcaggaaactgtcagttctgaattgaagaagcccttgggcccagcttccttcaatctgagtgaatacttcagacaatttcttcttccccaaaatgagtgtgagctccatgactttagacttagctttagtcagctgaagtgggacaactggattgtggctccgcacaggtacaaccctcgatactgtaaaggggactgtccaagggcagttggacatcggtatggctctccagttcacaccatggtacagaacatcatctatgagaagctggactcctcagtgccaagaccgtcatgtgtacctgccaaatacagccccttgagtgttttgaccattgagcccgatggctcaattgcctataaagagtacgaagatatgatagctacaaagtgcacctgtcgttaacaaatggtcctcttaaaaccttgagcctatttggcaaa

SEQ ID NO: 2871 - DNA, 540 bp, Homo sapiens
  MAP TO CHR11.1; EXPRESSED IN FETAL LIVER, SIGNAL = 0.36; EXPRESSED IN BRAIN, SIGNAL = 0.31; EXPRESSED IN BONE MARROW, SIGNAL = 0.34; NT HIT: gi14720994, EVALUE 8.00e+00; EST_HUMAN HIT: AW027784.1, EVALUE 7.60e-01
gtgtttctgtgcatcgttgggaggcttgaactaagcagaaggagtttagctctgccgaccttttactctcctacacaggtaacaatggagactacagatcattttcctaagctttccctaattcctctattccttaacaaaaccaattccactttgggtacatcttgtaggcccagaatgctctctgacacatcttcctccagttaatatgagttttgattctgcttaagtcacacagctgcagtggcatgctgtctagaaatagtttgtgttggtattcaagctgaacaaaccctgatttctatttatgacactcccttctgactctttgattccaatcaatgcactgaaaataaaactcagaccctgaattaaaaaaaaaacataggctagataggaacaaggcttacaatacataaccttgtccacgctaaagctgaaagagggaaaaagtttaatggcccttcctctgccacctctcttctcacctatctcagtatttttaaatattgatgaaaaccacaaattgaacgcctcctt

SEQ ID NO: 2872 - DNA, 529 bp, Homo sapiens
  MAP TO CHR11.1; EXPRESSED IN HELA, SIGNAL = 0.51; EXPRESSED IN BRAIN, SIGNAL = 0.75; EXPRESSED IN BONE MARROW, SIGNAL = 0.76; EXPRESSED IN ADULT LIVER, SIGNAL = 0.67; EXPRESSED IN FETAL LIVER, SIGNAL = 0.56; SWISSPROT HIT: P15265, EVALUE 1.50e-01; NT HIT: AF091492.1, EVALUE 0.00e+00
ggaggtctctagggccaaacagaggcggtgcaggacccacatctctagggcaaacggccccccaggggttctatctctgaggaagctcaacacagaagtccagaccagcctggcagggagggatgctggcctcacccagtagggctgagggagattgggaggagggctcatctcctcccaggtacacacctgtgagccctgagtgggagtcaggggagacagagcttgacaagctgggaggagagctgtctgtctgcctgtctgtcttccaagtggaagcttggggtggagcaggcaggtagaggctgcctcacttgtcagaattagcaagttccacagttgggcaacactcagccacacatcagatacagacacacgtgtgcacacgcgtcctgcctccagactgatagggtcacacctgcacttacacaggctgcatggtgacatgagtacacagggacacacatatgcaaggcactcagccgcacatggggcaggcacctggccctctactcatccccgaaaagca

SEQ ID NO: 2873 - DNA, 509 bp, Homo sapiens
  MAP TO AP001267.3; EXPRESSED IN HELA, SIGNAL = 3.9; EXPRESSED IN BRAIN, SIGNAL = 2.6; EXPRESSED IN BONE MARROW, SIGNAL = 4.4; EXPRESSED IN PLACENTA, SIGNAL = 3.6; EXPRESSED IN FETAL LIVER, SIGNAL = 2.9; EXPRESSED IN LUNG, SIGNAL = 1.2; NT HIT: gi16183763, EVALUE 5.00e-78; SWISSPROT HIT: Q14139, EVALUE 6.00e-22; EST_HUMAN HIT: AV723694.1, EVALUE 9.00e-96
gcacagctgaggtgacaatctgattttttttgcatggatttttaggagatggggtcttgctatcttgccaaggctggagtgtagtggctatccacaggcatgatcatagcacactgcagcttcaaactcctgggcttaagtgatcctctagccttaggctcttaagtagctgggactacaggcttgagccatcatgcctggctgacaacgtggttcttaatgaaatcagcaaacaattcctcctcttcctcaccttgattctctctgccaagttgctgaaagccataatcatattcccaggcttatttattttcttcaagactcgaactgtctgtgcaaagagagttggggaataggaacgtccatccttgggcacagtggcacagaaattctcctcatccctggaacattagcatcagaaaaaaactgatcaccagagggttggtcaatggaagagacaataggtaggctgcagaacaagcattctcaccacttaaaagccatgaaca

SEQ ID NO: 2874 - DNA, 557 bp, Homo sapiens
  MAP TO CHR11.1; EXPRESSED IN HELA, SIGNAL = 0.48; EXPRESSED IN BRAIN, SIGNAL = 0.49; EXPRESSED IN BONE MARROW, SIGNAL = 0.52; EXPRESSED IN HEART, SIGNAL = 0.59; EST_HUMAN HIT: BF745458.1, EVALUE 2.00e-01; NT HIT: AB025413.1, EVALUE 3.00e-73; SWISSPROT HIT: O07824, EVALUE 4.10e-02
tgaggtcagaaaaattggggaaccatcacccaaaataggggcatcatccccataagatatttttgcttggattctaaagggccaggggttcatctgtacatctccagctactcataggaagaagaaaatgctcaccagttggccatgtctttgttttctagtcacagtccagcacacaaatactacctggccacagaccccatgagtggggccgtcttcctttctgacagcaacagccggcgggtctttaaaatcaagtccactgtggtggtgaaggaccttgtcaagaactctgaggtggttgcggggacaggtgaccagtgcctcccctttgatgacactcgctgcggggatggtgggaaggccacagaagccacactcaccaatcccaggggtaaggccttgccttagagacattgtcaataacatttattggggtattttccttttcagaaaaacatgcatgattaatattgcaaaaatttttggaaaataccaagaaatatatggaggatggtaaaaactgtgataattccacctgccagaaatactcccag

SEQ ID NO: 2875 - DNA, 526 bp, Homo sapiens
  MAP TO CHR11.1; EXPRESSED IN BONE MARROW, SIGNAL = 1.1; EXPRESSED IN PLACENTA, SIGNAL =   2; EXPRESSED IN HELA, SIGNAL = 1.7; EXPRESSED IN FETAL LIVER, SIGNAL = 1.5; EXPRESSED IN LUNG, SIGNAL = 2.7; EXPRESSED IN BRAIN, SIGNAL = 1.2; EXPRESSED IN HEART, SIGNAL = 2.6; SWISSPROT HIT: P11369, EVALUE 4.00e-58; EST_HUMAN HIT: BE122677.1, EVALUE 1.00e-73; NT HIT: AF091216.1, EVALUE 2.00e-96
ggacctccacatgaaaccagatacactgaatctaatagaagagaaagtgggaaagagccttgaattcatgggcacaggggaacatttcctgaacagaacaccaatggtttatgctctaagatccacaatagacaaatgggacctcataaaactgcaaagcttctgtaaggcaaaggacactgtcaataggacaaaactgtcaataggaaccaacagattgggaaaagatcttcaccaatcctacatctgatagaggactaatatccaatctacacaaagaactcaagaaattaagactccagtgaaccaaataaccctattaaaaaatggggtacagaactaaacaaagaattctcaactgaggaatatctaatggctgagaagcacctaaagaaatgttcaacatccttagtcatcagagaaatgaaaatcaaaatgaccctgagattccacctcacaccagtcagaatggttaatataaaaaactcaggtgacagcagatgctggcgaggatggtgagaaagag

SEQ ID NO: 2876 - DNA, 535 bp, Homo sapiens
  MAP TO CHR17.1; EXPRESSED IN FETAL LIVER, SIGNAL = 0.37; EXPRESSED IN BRAIN, SIGNAL = 0.43; EXPRESSED IN BONE MARROW, SIGNAL = 0.43; NT HIT: Y12488.1, EVALUE 7.00e-68; SWISSPROT HIT: Q05860, EVALUE 6.50e+00
gtgtggtgtgaaacacaggccgagcaggtcgaggaacaagggcttctgtatagtcagccaccatcttgctatgtgaccttggcctccaacttctattagcctagaaagggtgggcacccagtgtgggcttaggggaccttcccacccagaggactccaagtccccatcatcttcagccctttcctcctttcccagcttcagctcctcccaagtgtataggatgccaagtaattgccccacactggcatgggatggaggagttttaaaggagaaagaaaagagccccagagcagccaggcagctcccaggagtcaccaggcaagacagagcaagtggctgcccagcgcccagctccatccacctgcagcctggcactgagacaggccctgcctgtggagcaggttctgcacccggctctctggcactggccctgatctcagccaagccagggaggaaggcaagggagaggggctgggtcagactgctggctttgcagggaaaagaaagagatagagggaagcaaagagaaggcatg

SEQ ID NO: 2877 - DNA, 598 bp, Homo sapiens
  MAP TO CHR5.1; EXPRESSED IN BONE MARROW, SIGNAL = 0.45; EXPRESSED IN FETAL LIVER, SIGNAL = 0.36; EXPRESSED IN BRAIN, SIGNAL = 0.51; EXPRESSED IN LUNG, SIGNAL = 0.66; SWISSPROT HIT: O13681, EVALUE 4.40e+00; EST_HUMAN HIT: H10604.1, EVALUE 2.00e-97
ctccctggggtaattggaagttcttgcatataaagttggttaaatagtaataattatgagttaaccacagaaaatttcagaaaactttaatttttttccattggaatcagcatggatatgtgtatatggatggttcaataaatatacttttatatacatgtttcacagaaattttacattccatcttcaaactgcagaaatagatttttttttttttacaagccaaaaaataactgccataacttttatgacttcatgcaaaaaaaggggggaagagtaaggggcaaaagggaattagttgttcaaggttgagtgtccagtaagaagtaaaaatgttacattaaggaagcgattgcttaacacgctgcttaaggtggtagccagacaaatccttaactgcagcattaaggccataccaagtttatacatatatacaaagaaatttccatataaaagacatactatcacattttcttcttcataaggatgaggaactttgtaattctgacctgattttccaggccaattaattaaaatgtccccaggctgctttttagaagtatcttctactttggctagctgtcagagttgccgctat

SEQ ID NO: 2878 - DNA, 515 bp, Homo sapiens
  MAP TO CHR5.1; EXPRESSED IN FETAL LIVER, SIGNAL = 0.42; EXPRESSED IN BRAIN, SIGNAL = 0.5; EXPRESSED IN LUNG, SIGNAL = 0.61; EXPRESSED IN BONE MARROW, SIGNAL = 0.57; SWISSPROT HIT: P12545, EVALUE 6.20e+00; NT HIT: L28703.1, EVALUE 4.90e-01
tccccacatcacttttcctctataaacagattcttaggcttcattcatttcctttagacaaggaagtttcagtctccgtgacctatatggaatgaaacgctagaggcaactggtctttgaggttttgtctgctatttctctcgtttacacatctctgtgcatgatttatcctaggagacaatactggggattctatctaattcacattcaaagctgaggtttttccagggcattttctctcattccatttggcacagtagtaactgtgtttgacaacatctgccttacagcaccattctgcagctccatctgacacttcattctcgttcacatgctcttcctgcctgtcttctgagggagatgttttcacaacagcgagaagacagtaaggacgaaccagagcggcacttgcccaacgaatatacgtcatgaacccaccaaatggcttcactgacctccttctccaatttatccaaagacttttgacataagccagcctttaaaccagcctgttg

SEQ ID NO: 2879 - DNA, 595 bp, Homo sapiens
  MAP TO CHR5.1; EXPRESSED IN LUNG, SIGNAL = 0.61; EXPRESSED IN BRAIN, SIGNAL = 0.46; EXPRESSED IN BONE MARROW, SIGNAL = 0.55; EXPRESSED IN HEART, SIGNAL = 0.65; SWISSPROT HIT: P10262, EVALUE 8.70e-01; EST_HUMAN HIT: H15895.1, EVALUE 1.40e-02
tgcctctgtgcctgtaactggtcctgaacagcccaggttacccatctggacttgctggggatttcagaatgcctcctctccaacatcactttgttggcctggaatgaaactgggagagagggtgggatagggaagaaaaaaggggaaaagggagacataaaacgaagtagagttggcaaagagtcacgctcctgtcaaacgagtaaactcagaacactgattgcactagagatagcaatgtcctgggtcaagcagagctttttttcaagcaatctggcagccctttttagtaataggaggtaaatcattctgacgttccttgctatccaaagcattaatcatgttgaattcctttgttgttctggggtctggatcaactgtaattctacaggaattccattgtaatctagtattaattaatctctgtgttatatagagtggtgccaaaaacctttctctgcatttgtttgcttgtacatcagttattagctttgtgaatacctaactctagctggggaacagttactcctctctctcgctctttttttcctctcagtcttggaaattgtcattttccttgggtaggaactagggc

SEQ ID NO: 2880 - DNA, 561 bp, Homo sapiens
  MAP TO CHR18.1; EXPRESSED IN HEART, SIGNAL = 0.69; EXPRESSED IN HELA, SIGNAL = 0.58; EXPRESSED IN BRAIN, SIGNAL = 0.63; SWISSPROT HIT: P06564, EVALUE 1.40e+00
aggacacacatggggctaagggagaaccagtagccctcggctgaatcatgtttgtgcatcactcgtggtctcagcagcatgggctgcctctgcctcccatgaccaggccccccgtgaacctcgagccactgagctgcccgcttcgtctgtgggtctaaatatagcggttgagatgcgcactctggaattggatttgatgtagccctctggactcgagctaacttttggggagtagttttcttgggagcctgccagtccaattcctccctcatgaacactaattaccgcacagaccttctccatgaaatcggtgctgaagccatttccatccaggcggctctccaagacgaaatttttctactgggaaccgacagccgcaaataaacctaccatctacttagcaacagagagcaagagcgggagggaggaaggaagggggggcagggagagtgggagggagaaaggagagggagggctctgcttcttttcttcctcctgttctttatttttcaaaaaggatgtaatcatctctcaccgggaaggtggtacagggcatctcat

SEQ ID NO: 2881 - DNA, 530 bp, Homo sapiens
  MAP TO CHR12.1; EXPRESSED IN BRAIN, SIGNAL = 0.63; EXPRESSED IN LUNG, SIGNAL =   1; EXPRESSED IN BONE MARROW, SIGNAL = 0.69; EXPRESSED IN HEART, SIGNAL = 0.75; NT HIT: gi14755147, EVALUE 1.00e-108; SWISSPROT HIT: P38426, EVALUE 1.90e-01; EST_HUMAN HIT: AI827707.1, EVALUE 1.00e-107
aaacgggacaaacttaaaatgctaggaattattactcagaatgcttagtgttgggaattattggtgaaggagtagaataccacttctgtactcactgtaatttaaccttagttttgcttatgcctgcaggtgtggcttacattctaaagcttttggatcagtatcgggagtttgattcacttcactggttccagtctgttagagagaaatacctgaaggagataagagcagttgctaagcaacagaatgtacagtcagccagtcaagatgaaaaactcttacaaaccatgaatctcactcagaagcgactggatgtctatctacaggtagagaggagcctaagagtcacatctgctttgacttaccatttgatatccatgacttcttaatgtctgaaaagcagaagccatatagaaactaccattttcacaagtgagatgaatagtggcaaaaagattatattttaaaatgagtgctatttggaagccatttgactcacatcttaaaaatgggcgggttacttatttcag

SEQ ID NO: 2882 - DNA, 571 bp, Homo sapiens
  MAP TO CHR5.1; EXPRESSED IN BONE MARROW, SIGNAL = 0.66; EXPRESSED IN BRAIN, SIGNAL = 0.73; NT HIT: L17000.1, EVALUE 1.00e-81; SWISSPROT HIT: Q16566, EVALUE 3.00e-23; EST_HUMAN HIT: BG719489.1, EVALUE 1.00e-82
tcaaagcaggattttccctggtgccttaagaaatagataatagtattagatgaagaacggtagaactattattgatagatcaagatgagataaattttttgaaaacaaaacaaaacaaaacaaaatatatgctatcttaccttaagcttacgccgggcattgaattcttggagcttcttttgagcggtatccatgtgtacaaaattggctgctttacctgtgacccacggatgctggagagcttgaaatgtagtcagccgtttctttggatccaaaacaattaattttctgacctgaaataataaagaaccataaacttagcgaggtttttaggatgacctgggcttgccctcagcttacaaacttccagatcttattccatttcccagcagtaccactaaatatatgtgagaaaaaaattgtttaagtcctcaggggccactgtaggtaggcacagcttcaggtagcagtagctgagggagtatgagaagacagggccatgtaccacctgagacccccaaagtggcagacggctttccaacagaagtcaagaaacagctcctcacttgcc

SEQ ID NO: 2883 - DNA, 509 bp, Homo sapiens
  MAP TO CHR7.1; EXPRESSED IN ADULT LIVER, SIGNAL = 0.46; EXPRESSED IN BONE MARROW, SIGNAL = 0.7; EXPRESSED IN FETAL LIVER, SIGNAL = 0.52; EXPRESSED IN BRAIN, SIGNAL = 0.61; EXPRESSED IN LUNG, SIGNAL = 0.93; EXPRESSED IN HEART, SIGNAL = 0.77; NT HIT: AF132485.1, EVALUE 3.00e-45; SWISSPROT HIT: Q60462, EVALUE 6.30e-02; EST_HUMAN HIT: BF106304.1, EVALUE 0.00e+00
tcatttctgggatcaggaggaatggtccactttcctgataaaaattgcaccatatgttttttggataattcattttctttgtggaaaaagggagtgagctgaagaatctggatagtgtaaagaccaacttctatttcacccaagaaacaagctgtgttatacatgtcatatcgtctctgggacttctgtggtgaccagttctcggtttcatagtttttactatcagtttgcctttgggattctttgaaagctcttgaggctttttccgcagcttctaggagatgtgttaggtcattaacagtaatgctcctacagtttttgttcccatccaaccaccatttgatttcacttttgtagacttgacctagtgtatctgaaatataggaatttttaggtgctttcattttggcctgacgtgcccagtccagagctgtgttaaagtccttctctttaatgtagaaatgtcttgctaaggcttgacaaatgaatgcattttgtgggaatcgtct

SEQ ID NO: 2884 - DNA, 523 bp, Homo sapiens
  MAP TO CHR12.1; EXPRESSED IN ADULT LIVER, SIGNAL =   5; EXPRESSED IN BONE MARROW, SIGNAL = 6.1; EXPRESSED IN PLACENTA, SIGNAL = 5.7; EXPRESSED IN HELA, SIGNAL = 6.4; EXPRESSED IN BRAIN, SIGNAL = 5.6; EXPRESSED IN LUNG, SIGNAL = 3.1; EXPRESSED IN HEART, SIGNAL = 2.9; SWISSPROT HIT: Q9XFY6, EVALUE 7.30e-01; EST_HUMAN HIT: BF725163.1, EVALUE 1.20e-02; NT HIT: gi16187240, EVALUE 8.00e-03
ggagaagcaaggaaaggaggagagacagaagtatatactgagctggtagttgggggaagggttggcgggtggggagaagggaagagaggagtctgggccaaggccagaggtgtctccctggggagtcctcggagcgggcagccggacgtcgctccatccttcccgcctgacggatgcgtctgctgcgcaggcacaagctgtcgggccaggccctgccaaggcagaacagtggcgcttctgtgcgcgctgctccgctccgctccggaggatggggcccgcccgggaagccagggagtgatggagaaagcagacgtcccagaacaggagccgtggggtcacagaagcacgcctgcctcccgaaacaaggggcacaggacgaggtgggaggggaccgggaatcaacgcgggggagcgtttgggggaattgttggtcgaaagaagagaggcagaaggacgcgcgctgaaggagcctggggatgaagagctcgatgatttggccacaagccccctcacctttaagaac

SEQ ID NO: 2885 - DNA, 566 bp, Homo sapiens
  MAP TO CHR20.1; EXPRESSED IN PLACENTA, SIGNAL = 1.5; EXPRESSED IN LUNG, SIGNAL = 1.4; EXPRESSED IN BRAIN, SIGNAL = 1.1; EXPRESSED IN BONE MARROW, SIGNAL = 1.4; EXPRESSED IN HEART, SIGNAL = 1.1; SWISSPROT HIT: Q02252, EVALUE 1.40e+00; EST_HUMAN HIT: BE387556.1, EVALUE 0.00e+00; NT HIT: gi14772423, EVALUE 1.00e-38
acacccaccagatcctcatcatgtctataaggaaactgtggcccagagaggtcattgttcttgtcctagtcatctacagtgtgcaggggaaagagtcccttgagttttatagccaggattcaaacctggctctgaatgatgccaaaagtcatgttctcatccaagaccctgtactggttcccgagaaagctgcttcaaatgttgcagagagatgccttctgacctgatggtgtgggacagggccaggattcccagcacgaagaaatacatggacagcaggaggttgatgtactcctgggagaatatctgaggcagaaatacaaagagaaacaggaagttagggttgccagtggctgtgaggaaaccagagtccctgcgtctcttctggaggttggtctcacccttcttgagtcgggggacagtcaggaagagtctcagacaatactagtggcattctagtttctgcagctgtgggggaaaggtgagaaacctcaagcccccagctgtacctcgcaaaggggtttgtaagtttacatttagtggctccattatctggagggaggcaa

SEQ ID NO: 2886 - DNA, 557 bp, Homo sapiens
  MAP TO CHR9.1; EXPRESSED IN PLACENTA, SIGNAL = 1.9; EXPRESSED IN LUNG, SIGNAL = 1.2; EXPRESSED IN FETAL LIVER, SIGNAL = 1.1; EXPRESSED IN BRAIN, SIGNAL =   1; NT HIT: gi4758269, EVALUE 0.00e+00; SWISSPROT HIT: Q14249, EVALUE 3.00e-47; EST_HUMAN HIT: AL522870.1, EVALUE 0.00e+00
tgaagcagcagtgaaaccaggggctctgcaggtcacttgggacggacgccaccagacttgtctccaaaaatcaccacctttaatactccccggcctgcacacacccacagtctcactgggctccaccctcacttactgcccgccgtgatggccttgaggctgcctgcccgcgccaggatgtttggcacaaagagcagccccgaagcccgctcaatgctctcgatgggcaccaggaagcgctccagtgggatggcctcatccacaggtgcgttgggcatcacgtaggtgcggagctcaatttgcccacctgctgcctccaggatcagcaccttgaagaagtgtgtgggcactgccacgtggttcttgccgatgacctggtactttacgtaggatttcccatcagcctctgtcctgtgggcagacccaggcacacgtgggcagggggcctggatgaacccaaagccacctcttccaggcagccttccctgatctgtcctctaacttctgtcaacctgcaggaccacgccctcactgtgagacttctgtagcctgcctgg

SEQ ID NO: 2887 - DNA, 510 bp, Homo sapiens
  MAP TO CHR5.1; EXPRESSED IN LUNG, SIGNAL = 0.69; EXPRESSED IN FETAL LIVER, SIGNAL = 0.67; EXPRESSED IN HELA, SIGNAL = 0.55; EXPRESSED IN BRAIN, SIGNAL = 0.66; NT HIT: gi14861872, EVALUE 0.00e+00; SWISSPROT HIT: Q9Y5H8, EVALUE 9.00e-86; EST_HUMAN HIT: AI651536.1, EVALUE 0.00e+00
tcaacaacgaatttgttccgatatctgcatctgatgcgccctctagcgaaaaccgagagccaggctgtcgggattcggaaataaacagattctttacagccattggaaaaactggcgcgttgtcattaatgtccttcacttccacctccacatggaaaacctgcagcggcctgtccacgatcacctccaggtggatgctgcactccgcgctccgcccgcacagttcctcgcggtctatccgagaattcacaaacaaaatgccattctgcagatttacctccagaaggtccccgtgtcttttggacgccacccggaacaggcgcggcaccagctccgccagctccagccccaggtcctgcgcgatgcggcccacgaaggtgccatgcttggcctcctcagagacggagtagtggagctggccgctccccacctccgaggctgcgaggagcagaagagaaagcagcaggcactgggctccaggatcttctcgccaggagaacaacattgcaa

SEQ ID NO: 2888 - DNA, 551 bp, Homo sapiens
  MAP TO CHR2.1; EXPRESSED IN LUNG, SIGNAL =   1; EXPRESSED IN BRAIN, SIGNAL = 0.9; EXPRESSED IN HEART, SIGNAL = 0.94; EXPRESSED IN BONE MARROW, SIGNAL = 0.75; NT HIT: gi9910369, EVALUE 1.00e-75; SWISSPROT HIT: P75586, EVALUE 9.10e-02; EST_HUMAN HIT: AW504958.1, EVALUE 2.00e-75
ggagtctcatgactggcctctgggctcttgtctgacttgctgcattgtcccacagggaagtcccacctggccatcgtgcagaaggtaaacaacgagggtgagggtgaccccttctacgaggtcctgggcctggtcaccctggaggacgtgatcgaggagatcatcaagtcggagatcctggacgagtccgacatgtacagtgagtccagccttccacagggcccaggacccctttcctgcttggatcgaaacttggtgtccctagctggaagggccatagtgcagggacacaggaggcctagcatccagaggcccagtggctgggtgccctgcactggccggggtgagcagggagcaggttgctgagagcagtgcccggaggctgccttcaccctcggcctttgtgcctcggcgtcagcccaggaccctgccagccagagcctgctgctcctgcgtgggactaggggctggagagcaggagctgcggggcgggttccagtctcttcctaagtcctcaggggtctgtgttctcaattccacgctcttcttcc

SEQ ID NO: 2889 - DNA, 577 bp, Homo sapiens
  MAP TO CHR14.1; EXPRESSED IN BONE MARROW, SIGNAL = 3.9; EXPRESSED IN ADULT LIVER, SIGNAL = 1.8; EXPRESSED IN PLACENTA, SIGNAL = 4.4; EXPRESSED IN FETAL LIVER, SIGNAL =   3; EXPRESSED IN LUNG, SIGNAL =   3; EXPRESSED IN BRAIN, SIGNAL = 2.4; EXPRESSED IN HEART, SIGNAL = 1.8; NT HIT: X04948.1, EVALUE 0.00e+00; SWISSPROT HIT: P01739, EVALUE 9.00e-09; EST_HUMAN HIT: AA376749.1, EVALUE 5.20e-02
aggggtgaacagtcaacagggagaagaggatcctcaggccttgagcatccaggagggtgaaaatgccaccatgaactgcagttacaaaactagtataaacaatttacagtggtatagacaaaattcaggtagaggccttgtccacctaattttaatacgttcaaatgaaagagagaaacacagtggaagattaagagtcacgcttgacacttccaagaaaagcagttccttgttgatcacggcttcccgggcagcagacactgcttcttacttctgtgctacggacgcacagtgttccccaggaacctgcagcctctacgcaaaccctgccaaagcagcttcttagaagccctaatagtgggtagaattagtggttatgtctttcagtcaagaagagtctacaaacagctggcaaagtaaaaggggaactctttcaaattcgtgattttttaaaaagcatcttggactaggggaaaaggcatgaaatttggaacaggaaatggaaatgccaggctcagttctgctaatcctggctacatagggacattgtcagtgtagcagccttcaatttcctcac

SEQ ID NO: 2890 - DNA, 547 bp, Homo sapiens
  MAP TO CHR17.1; EXPRESSED IN BRAIN, SIGNAL = 1.3; EXPRESSED IN HEART, SIGNAL = 1.6; EXPRESSED IN ADULT LIVER, SIGNAL = 4.9; EXPRESSED IN PLACENTA, SIGNAL = 8.5; EXPRESSED IN LUNG, SIGNAL = 3.3; NT HIT: AF001689.1, EVALUE 0.00e+00; SWISSPROT HIT: P29316, EVALUE 8.00e-11; EST_HUMAN HIT: BI766881.1, EVALUE 1.00e-118
ttcaaccgggctacattacccgcccctctctccgcagcgtggttttgcgatggggtatgtgtaaaattcgtaggacattttctggaaagtatcaagcgttcattcagtgctactttgtttcatagtcgtatccctggagttacttagagttggtcgctttcgcctctggtatcgtgcatatgatggaaaagttttaatctcctgacacttgtgatgtcttcaaaggaaccactgatgcacctgtggccagggtggcccactgcagttcttggggccggaagtgaccgatttctaaatcccgcacccacgttttctttccttttctcccagctcctgcccctcctaaagctgaagccaaagcgaaggctttaaaggccaagaaggcagtgttgaaaggtgtccacagccacaaaaagaagaagatccgcacgtcacccacccttccggcgggccgaagacactgcgactccggagacagcccaaatatcctcggaagagcgctcccaggagaaacaagtcagtactgccccctgtacccatgaaaaga

SEQ ID NO: 2891 - DNA, 517 bp, Homo sapiens
  MAP TO CHR17.1; EXPRESSED IN PLACENTA, SIGNAL = 1.4; EXPRESSED IN FETAL LIVER, SIGNAL = 1.1; EXPRESSED IN BONE MARROW, SIGNAL = 1.3; EXPRESSED IN ADULT LIVER, SIGNAL = 0.91; EXPRESSED IN LUNG, SIGNAL = 1.1; EXPRESSED IN HEART, SIGNAL = 1.1; EXPRESSED IN BRAIN, SIGNAL = 1.3; EXPRESSED IN HELA, SIGNAL = 1.4; SWISSPROT HIT: P48778, EVALUE 1.10e-01; EST_HUMAN HIT: BE905215.1, EVALUE 1.00e-115; NT HIT: AF407579.1, EVALUE 8.00e-74
ttccccaaattctcaacctggtgccttcacagaacttgccagcactggtgctgaagatcatgagtggcacctttgcacctatctctgaccggtacagccctgagcttcgccagctggtcctgagtctactcagcctggagcctgcccagcggccaccactcagccacatcatggcacagcccctctgcatccgtgccctcctcaacctccacaccgacgtgggcagtgtccgcatgcggaggcctgtgcagggacagcgagcggtcctgggcggcagggtgtgggcacccagtgggagcacaggaggtctgaggcagagggaaacctggggcaagtcctcccttcctgcatgtaggaatgtcaggagggtctttgtccttaggcccccatctgtcctgcagggcagagaagtccgtggcccccagcaacacagggagcaggaccaccagtgtccgctgcagaggtaagtgggaagaggccgccagtccccatggatgccacaccattcccatcagtt

SEQ ID NO: 2892 - DNA, 555 bp, Homo sapiens
  MAP TO CHR18.1; EXPRESSED IN HEART, SIGNAL = 3.8; EXPRESSED IN FETAL LIVER, SIGNAL = 7.5; EXPRESSED IN LUNG, SIGNAL = 3.2; EXPRESSED IN BRAIN, SIGNAL = 6.8; EXPRESSED IN BONE MARROW, SIGNAL = 8.3; EXPRESSED IN ADULT LIVER, SIGNAL = 6.8; EXPRESSED IN PLACENTA, SIGNAL = 6.8; EXPRESSED IN HELA, SIGNAL = 7.7; NT HIT: gi16158912, EVALUE 0.00e+00; SWISSPROT HIT: P93471, EVALUE 6.00e-09; EST_HUMAN HIT: AL558883.1, EVALUE 6.00e-88
ccagtgctggtataggaggcagcagctgtagcctaggcagcagcaggaagcaacctctgcttgcccctcccctctccaacaggctcatcaactcatataaggacaacagcaatgatttcatatgccccatctgctttgatatgattgaagaggcatacacgacaaaataaggccacagcttttgctataagtagattcactagagttcggaggacaataatatatgtaccaagtataactatgttgtggacaatactaaccatctgtttcctaatttgttggtgaatgagctcattctcaaacagaagcaaagatttgaggaagaggttcaaattggaccactcagtgagtagcaccaatggccacaggtggtgaatatttcaagatttgttgggaactgaccaagataaccttgatttggccaatatcaacctcatgttggagttactagttcagaagaaacaactggaagcagaatcacatgcagcccaactacagaatcttatacaattcctcaaggttgcaagaagaaataggagagagcaactgggacac

SEQ ID NO: 2893 - DNA, 586 bp, Homo sapiens
  MAP TO CHR14.1; EXPRESSED IN FETAL LIVER, SIGNAL = 6.1; EXPRESSED IN PLACENTA, SIGNAL = 7.1; EXPRESSED IN LUNG, SIGNAL = 3.2; EXPRESSED IN BRAIN, SIGNAL =   6; EXPRESSED IN HELA, SIGNAL = 7.1; EXPRESSED IN HEART, SIGNAL =   3; EXPRESSED IN BONE MARROW, SIGNAL = 6.8; EXPRESSED IN ADULT LIVER, SIGNAL = 6.1; NT HIT: AL163206.2, EVALUE 8.70e+00; SWISSPROT HIT: P45554, EVALUE 1.10e+00; EST_HUMAN HIT: AA016132.1, EVALUE 5.30e-02
ttttgtatgaccacctgtcccgttttttcccttccctgaaagtggtacataagtaagtgcccatttgtaataaaatttctaatgacagtctttccacaacttagctggaaaatatatggtggtgtctgagtctgcagaggttgcttataaaaacagaaatgagcttagtgaatcatttttcattcatagccttttcaaatgtcttagtcagagtaagctaaagattagagaaggtaagcgagaagagaggttcagatgcgtcaacattattcaaactatgaagatcatatgtggctttttcttagagatttgggtattattattttctaatctcttgatagcttttcagttcagggaagatttttcatgaatagtcactctcttttcttgattagacccaaatgcaatagcttcttcagagataatatggtttgtgcttacattgctccaagataaatctaagacaatatgctacaaattcattgtattgctcttcatgaagtgctatagcattagatgatgtggaaatgcataaaatattttctttgagtaaaaaatgttaaaaacgagtggcccttaaagtctg

SEQ ID NO: 2894 - DNA, 500 bp, Homo sapiens
  MAP TO CHR7.1; EXPRESSED IN LUNG, SIGNAL = 0.78; EXPRESSED IN HELA, SIGNAL = 0.83; EXPRESSED IN BRAIN, SIGNAL = 0.69; EXPRESSED IN BONE MARROW, SIGNAL = 0.7; SWISSPROT HIT: P07942, EVALUE 2.00e-23; NT HIT: M61918.1, EVALUE 2.00e-77; EST_HUMAN HIT: BI195724.1, EVALUE 2.00e-72
agtgctccaggcagtcaatctgtcagaggccataattacaggacagagaagtgaatcataattacaaacacccaggaacctgtaagctccacccaagttatcaatcacactcaacggaacttgtccccacaccaaccacataccattttcagattgccaccaaatcttaaggcggtttggagcaaatgtagtgaccacattttcaatgagatggctgtcaggattcagggtctcatgataaggatcttgggaattgcatatgaagcattttttgtcctcctacaaacaaagttgagttcatcagtctagaaagcaatctcattaaaaacatttttaattaaaaaaaccccatgaagctcctaatacaaaaatcaacctattagcttcaagaaaaataattgtgtgaaaattgcttaggagatttgtatcacatctttcacttttaacttgctgagtctaaaatagtcttgaaaataatttcctccttccttgcaaattca

SEQ ID NO: 2895 - DNA, 506 bp, Homo sapiens
  MAP TO CHR17.1; EXPRESSED IN LUNG, SIGNAL = 0.59; EXPRESSED IN BRAIN, SIGNAL = 0.42; EXPRESSED IN HEART, SIGNAL = 0.69; SWISSPROT HIT: P13369, EVALUE 1.60e+00; NT HIT: gi16164950, EVALUE 4.00e-88; EST_HUMAN HIT: BF794728.1, EVALUE 5.00e-88
ctgacctccaggaaaagtggaggagacagaagagagaattacctgcatgggcgctccgcaactgttgcaacagaatgcttcccacctgggccctgcagccatcctgtgtgcctcagtttgacaagctggacaggcgcagtcaaagaaatactgagacctcagcttctgctgcctttcggcaacccccatccggctcttgtgaggccctggagggagatcaccgtcagccaatattgaaagcaagagagtcaaacactacgtaaaaaccttcagcttagcagagggtctggacaattacctatcatgtgacagctaacctttacccaaatatttgtggaactggatactaaaataagcttccaagttgctgagacaggaagaaagagaagccaagaagttgttcctagcccattttcagaataggaagtttatagtgattaaacagcgagacatagtttagccgcaatagggccctagcacgaaggccattccttccatcctccctt

SEQ ID NO: 2896 - DNA, 515 bp, Homo sapiens
  MAP TO CHR10.1; EXPRESSED IN LUNG, SIGNAL = 1.6; EXPRESSED IN PLACENTA, SIGNAL = 1.3; EXPRESSED IN FETAL LIVER, SIGNAL = 0.95; EXPRESSED IN HELA, SIGNAL = 1.6; EXPRESSED IN BRAIN, SIGNAL = 0.59; EXPRESSED IN BONE MARROW, SIGNAL = 0.64; SWISSPROT HIT: Q99612, EVALUE 2.00e-22; NT HIT: U51869.1, EVALUE 1.00e-100; EST_HUMAN HIT: AU120604.1, EVALUE 0.00e+00
gaaactgcatgccttccttcgaatgtgccctgcacacctactcaaccctggtgcatcacattcccaaggccccacgctccttgcccagcattgtcctcaggcacgtacctgtcacagtgggagcatttaaaaggcttggccccggtgtgctttcggaagtgcctggttaactcatcacttcttgcaaaacgccactcacacccttcccatgagcatctgtaaggcttttctcctggggagagagcacaggacaagcagcccatgacttcactgacccgcagacggaaaggggaaattcaacaacacacacagtggtgggatgcaaggccagggacccagtggcttctggcatcggtaacacacaacaactggcagcctcagagagacaacagcagctctctcctgacccagtctcaggcctcccactgctgtccaagggacacagcttcagccaagcccatggtgctgtcatcaaagttaacgtggaagaacgaccacgactcagaccagcaaaa

SEQ ID NO: 2897 - DNA, 558 bp, Homo sapiens
  MAP TO CHRX.1; EXPRESSED IN ADULT LIVER, SIGNAL = 1.1; EXPRESSED IN BONE MARROW, SIGNAL = 1.4; EXPRESSED IN PLACENTA, SIGNAL = 1.7; EXPRESSED IN FETAL LIVER, SIGNAL = 1.3; EXPRESSED IN LUNG, SIGNAL = 1.5; EXPRESSED IN HELA, SIGNAL = 1.4; EXPRESSED IN BRAIN, SIGNAL = 1.2; EXPRESSED IN HEART, SIGNAL = 1.4; EST_HUMAN HIT: BE077421.1, EVALUE 3.00e-77; SWISSPROT HIT: Q13474, EVALUE 7.00e-23; NT HIT: gi14757195, EVALUE 1.00e-75
tctgtctgcctcaagaacccacacagatttctgctatcatcacacccaccggttctcatcttccaagtgggccaggatcttctgtagctcccctttgctttctgtggccacactgcatggagcctgctgtccaaaggctggctcccggtctgtgatggggctggagtgccgcagcaggtactggtcctcgtctctgcatgggtgtggggaaagcagagtaggtgaccagttgttgaacagagaaacaactcagctctcagctcaggccccaggaaatgcatgctggaggattcacttctaagtcacatcgagagggaaaggacatatactgaggcttgagagggatgaaagtgttcaaaggaggcagaggctgtggttgggggtattgagagagtgttttcaggatgcaggtatctgggttctacttacagcccacccccctccccgggaaacaatgagcaaatcatttccctttctgtgctgttcccctactctaccctcctttgtttcctcttcctctagagggatctgggtcccagtcagggcagattgatccat

SEQ ID NO: 2898 - DNA, 525 bp, Homo sapiens
  MAP TO CHR11.1; EXPRESSED IN FETAL LIVER, SIGNAL = 7.9; EXPRESSED IN LUNG, SIGNAL = 4.7; EXPRESSED IN HELA, SIGNAL = 6.9; EXPRESSED IN BRAIN, SIGNAL = 7.5; EXPRESSED IN BONE MARROW, SIGNAL = 8.8; EXPRESSED IN ADULT LIVER, SIGNAL = 6.4; EXPRESSED IN PLACENTA, SIGNAL = 9.2; EXPRESSED IN HEART, SIGNAL = 5.4; NT HIT: AF134404.1, EVALUE 2.00e-65; SWISSPROT HIT: P21917, EVALUE 6.50e-02; EST_HUMAN HIT: BG168068.1, EVALUE 1.00e-76
ctaggagccagatggcaaagcagggatgaggccctgacggggctgccaggtgggggatggtgccgtggggtcagggatctgcaacggcctcctcacatgtgccccgccggcttccggcagctggcagccacctgcaacgtggagccctcacttttcaccaactggttcagcgggcacctcaacttccagatcgagcaccagtgagtgtgggtgctgggggccagtgggaggtggggagggggtcctgggaggggatcctgggaggggacccgtgggtggggcctctctctggaatctcccacttcaggtgccagcatacgctccccacccccagcctcttccccaggatgccgagacacaactacagccgggtggccccgctggtcaagtcgctgtgtgccaagcacggcctcagctacgaagtgaagcccttcctcaccgcgctggtggacatcgtcaggtgaggctgcagcccggcccctctgttctggtggcttccccagggcctatgcctacccttgtcca

SEQ ID NO: 2899 - DNA, 574 bp, Homo sapiens
  MAP TO CHR9.1; EXPRESSED IN BONE MARROW, SIGNAL = 0.39; EXPRESSED IN FETAL LIVER, SIGNAL = 0.34; EXPRESSED IN BRAIN, SIGNAL = 0.38; NT HIT: D14689.1, EVALUE 3.00e-67; SWISSPROT HIT: P35658, EVALUE 1.00e-18; EST_HUMAN HIT: BF929129.1, EVALUE 5.00e-67
gaggaaccaatgcaaagctctaaccaacatggctttttcttttttcttcttcttcttctttttttttttttttttttttttagattaattgggaatcttggctactggaggattctagtcgagctgaattgcctgtgacagacaagagtgatgactccttgcccatgggagttgtcgtagactatacaaaccaagtggaaatcaccatcagtaagtgtagcctggtagttagtgcagaaatagtcttctttctagttagggttaatattgaaacaccagttacatgttactgacagagtctactctgctgggcacttgtagcttctggcagcacatttctccctgaagagtgataacaggctgcgttgtgacaacactaaactgatttgaatggatgttcgttgatgagaccaaggccaaacactgtatgtatgtgtgggtgcatgtttgcacacttgcacatgtctgggtgtactttagaatctggttgaaatatagaacatcaggattttatggcttggtttctttgtccaatccaattccctggtgacctcccaaagaagcaatacccgaa

SEQ ID NO: 2900 - DNA, 571 bp, Homo sapiens
  MAP TO CHR2.1; EXPRESSED IN BRAIN, SIGNAL = 0.35; EXPRESSED IN HEART, SIGNAL = 0.63; NT HIT: X92412.1, EVALUE 0.00e+00; SWISSPROT HIT: Q02173, EVALUE 6.00e-20; EST_HUMAN HIT: H67600.1, EVALUE 0.00e+00
ccaaccaaaacctaaggaaaacacaaatatatgagtcattgttttaacgtattcatattgccatatcgtgttaacctctgtcttgctgcaggtattcctggacccccagaaacattacagatatttgatgtttcccgtgatggcatgacacttacttggtacccaccagaggatgacggtggctcccaagtgactggatatattgtggagcgcaaagaagtgagagcagatcgatgggtccgtgtaaataaagtacctgtgacaatgacacggtaccgctccactggccttactgaaggcttagaatatgaacaccgtgtcacagccattaatgcaagagggtctgggaaaccaagtcgtccttccaaacccatcgttgccatggatccaattggtaaggacattttgtatcagtcaaattgattgagttacaatttatatgtgggaaaattcacctttttgaaatatatagttctatgacttttgaaaaatgtactgttttgtaatcaccaccacaatcaaaatgtggaatatttttattaccccgtaaagttcccttgtgtccgtttgt

SEQ ID NO: 2901 - DNA, 589 bp, Homo sapiens
  MAP TO CHR13.1; EXPRESSED IN FETAL LIVER, SIGNAL = 2.4; EXPRESSED IN HELA, SIGNAL = 2.6; EXPRESSED IN BRAIN, SIGNAL = 2.6; EXPRESSED IN HEART, SIGNAL = 1.2; EXPRESSED IN ADULT LIVER, SIGNAL = 2.2; EXPRESSED IN PLACENTA, SIGNAL = 2.3; NT HIT: gi5453659, EVALUE 5.00e-94; EST_HUMAN HIT: AL544016.1, EVALUE 1.00e-92
gaaaagcagccaaaaagcagactgtgctgggaggaaaaagcccaggtggcctggggtgaaaagccaaactccccaaggcgccgcagaccaccagggactctggacttcatcataagaacaagaagaaaccactaaaaggtttgaggtggggctcctgggctgtactttaaaataaggagaggctgaattccaagtgttcacagaaaagctgtattaacatagatccttactcaccacccgtatccccttctctcctggaccttgtcatgttgcgagacacagcactggggacaccttttgaggtagtggcttgtgaagaaggctgatttgcagttaaagtccatgcgagtcgtgaccccaactgctgtcgaaggcaatctcctactcctggagcttgattagactgtctaaaaaaagaaacatgtattatcttctaataggctattcgctgaagagacaaaagtgtccctagaaatttctcttgtattactatcgtgaattacataaatttataaatctggtatagctgataccatgactttaccctaaccgaatatatcaataacagacagtcccaagtcccttgaac

SEQ ID NO: 2902 - DNA, 572 bp, Homo sapiens
  MAP TO CHR17.1; EXPRESSED IN HEART, SIGNAL = 0.63; EXPRESSED IN FETAL LIVER, SIGNAL = 0.48; EXPRESSED IN BRAIN, SIGNAL = 0.37; EXPRESSED IN LUNG, SIGNAL = 0.66; SWISSPROT HIT: Q60793, EVALUE 1.90e+00; NT HIT: gi7661903, EVALUE 1.00e-111; EST_HUMAN HIT: BE171037.1, EVALUE 1.00e-110
cctcccttcactccactcacttagaggctgttctcacgttgatatccaagtcacccttgaacacaaactgaccaggtttccaatgaaaagacaggtggctccactcccagtgcatattttcagttgtgttgtatggatcctatgaccacccccgagaatttggtgagatataggtaagaaaaccatcctcatctcccaaatcagcacctgtctctcttcccacatgtgctatacagacctcaaccataccatcctgataggataaaagtatcatgacacccctcacctcagtggccagctggtgcaggttcgcctgttcaatgtccatgtgccagtctccatggaacagaagacggctcttgtcccaccagggcaaaggtgggctggggtcagctgagggcttggtcaagaggtccacacactggccaattagtgtccaggctggatcccagcatgggccccacaccactgtgtactggaatatttccgctggggtagaggaacaaaggctataacttgttcacaacattacccctctcttcctccttcactccagaagggtctcagctcac

SEQ ID NO: 2903 - DNA, 575 bp, Homo sapiens
  MAP TO CHR1.1; EXPRESSED IN FETAL LIVER, SIGNAL = 0.86; EXPRESSED IN BRAIN, SIGNAL = 0.8; EXPRESSED IN LUNG, SIGNAL = 1.4; EXPRESSED IN HEART, SIGNAL = 1.2; EXPRESSED IN BONE MARROW, SIGNAL = 0.68; SWISSPROT HIT: Q02440, EVALUE 2.00e-03; NT HIT: U87863.1, EVALUE 5.50e-01; EST_HUMAN HIT: AI810853.1, EVALUE 8.10e-01
ctctttgggcctttgtcatcatctctgaaatggcgagttgcacctattgctttctacgagccattttggctttaccacacaagagtttaacatcttaaatgatatttataaaagggtatgtgcatcctcccttcatttggtcaagacactgcaaagagtgaatgtttggaaagtaaaagaagggacggggttgtgaggcccatgtgcctatgtgcagttttctgttgaggcttcaccctttgccctcctccctgagattcttggaccttcttcccacagcccctcccaccagctcccatgcaaccgcaccccaactaggggatgccctgcctccctgcagatgtttccagtttgcagacagcatagagttcacgttggtcatttgttccatttgctcagaaacaacagctagcattattggcaggaaatggagagggcgccaactccgagataacacaaaaagccctagtcatgggcactaggcgtgggtggggtagagggagggagggggcataggatggaccatctgcagtgacctagagttctgttggccctgctgaagtcacggtcactga

SEQ ID NO: 2904 - DNA, 596 bp, Homo sapiens
  MAP TO AL162413.6; EXPRESSED IN LUNG, SIGNAL = 1.5; EXPRESSED IN BRAIN, SIGNAL = 1.1; EXPRESSED IN BONE MARROW, SIGNAL = 0.8; EXPRESSED IN HEART, SIGNAL = 0.75; EXPRESSED IN FETAL LIVER, SIGNAL = 0.62; SWISSPROT HIT: O55131, EVALUE 5.00e-20; NT HIT: AJ223786.1, EVALUE 1.00e-57; EST_HUMAN HIT: BG193979.1, EVALUE 0.00e+00
aactggacatgtcttccactggtaaattcattttgcctatttgaaaatattgattattgtccgttaacagtcatcagttaattcatatgtagaattgcaacttaattgtttatttgcattctatagctggcagcctgttatcgattacattgatagtaaatttgaggactacctaaatgcagaatcatgcgtgaacagacatcagatgcctgataacagggtgcagtgttgttcatacttcattgctccttcaggacatgggtcagtaccttgatacttctgattcctttttgttgttgttgcttactgttatctgtatgtgcatattttagtaatcttgaagtttgtgaagtacatacaactatcccattatgaagtaccaaatttcatgtagaaatgtcttagttgaaaagcctttttaagtcctgtataagctaagtgattttactccttagttctttattcataaggattttccctgcttcatggaaataaacagtgttgccaccatggtttgaggtctcaatgtagcaaatttagctttcatgttgaccactctgctactaattgaactaccaaatgaagacaagcagcca

SEQ ID NO: 2905 - DNA, 577 bp, Homo sapiens
  MAP TO CHR7.1; EXPRESSED IN HELA, SIGNAL = 2.8; EXPRESSED IN LUNG, SIGNAL = 1.5; EXPRESSED IN BRAIN, SIGNAL = 1.7; EXPRESSED IN HEART, SIGNAL = 2.2; EXPRESSED IN ADULT LIVER, SIGNAL = 0.77; EXPRESSED IN BONE MARROW, SIGNAL = 1.8; EXPRESSED IN PLACENTA, SIGNAL = 2.7; EXPRESSED IN FETAL LIVER, SIGNAL = 1.7; EST_HUMAN HIT: BG002991.1, EVALUE 0.00e+00; SWISSPROT HIT: P00533, EVALUE 1.00e-18; NT HIT: U48726.1, EVALUE 0.00e+00
aaaggaggatggagcctttccatcacccctcaagaggacctggaccgcctgtgtgaggcccgagcacctggtgccaccgtcatcaccttcctttcatgctctcttccccaggtaattatgtggtgacagatcacggctcgtgcgtccgagcctgtggggccgacagctatgagatggaggaagacggcgtccgcaagtgtaagaagtgcgaagggccttgccgcaaaggtaggaagcccgccggtgtgcggacgaggcttgttctcggctgctgaggctgggctctcatgccacctccaaaggaacacatcttcctcttctcattaaaaaacaactatacatatcgtttctttaaaacagaagataaagctgtaaagctaggttaggcaatgggaaggcactgaaggttgtgacggggtggggggctctgatgagaacagtcacagagccagccccgctcagcagctgccaggtgcccagccctggggagaatccagggaaggcagagctggaagcagtgcagctccaagcggcccatgggaaataatgaggagaacgcaaggtcagtgtgaggtga

SEQ ID NO: 2906 - DNA, 542 bp, Homo sapiens
  MAP TO CHR7.1; EXPRESSED IN HEART, SIGNAL = 0.84; EXPRESSED IN BONE MARROW, SIGNAL = 0.72; EXPRESSED IN FETAL LIVER, SIGNAL = 0.84; EXPRESSED IN BRAIN, SIGNAL = 0.76; SWISSPROT HIT: Q99996, EVALUE 3.00e-65; NT HIT: AJ010770.1, EVALUE 0.00e+00; EST_HUMAN HIT: AW513069.1, EVALUE 0.00e+00
caagttcttaaatttgattttctcgtaccaggatctgaagttttcacttgagagtcagaaacaaaggaatcttcagctaaatctacttttggaacaacagaaacaactactgaacgaatcccagcaaaaaatagaatcacagagaatgctatatgatgcccagttgtcagaagaacaaggtcgaaacttagagcttcaggtacttcttgaatctgagaaagttcgaattcgggaaatgagtagtaccctagatagggagcgggaattgcacgcacagctgcagagcagtgatggtactggacagtctcggccacccttgccctcagaggacctactgaaagagctgcagaaacagctagaggaaaaacacagtcgcatagtagaattgttaaatgagactgaaaaatataaactggattctttgcaaacacgacagcaaatggaaaaagataggcaggttcacaggaaaacactgcagacagaacaggaggccaacactgagggacagaaaaaaatgcatgagctccagtccaaagtggaag

SEQ ID NO: 2907 - DNA, 550 bp, Homo sapiens
  MAP TO CHR4.1; EXPRESSED IN FETAL LIVER, SIGNAL = 0.45; EXPRESSED IN BRAIN, SIGNAL = 0.4; EXPRESSED IN HEART, SIGNAL = 0.59; SWISSPROT HIT: P14714, EVALUE 1.00e+00
atcctgtcagccacaagtccccactggcccattgtgccttgctcactacattaattccagagccttatggtctgctcacagcttggattacgggacctgcctaggaccttgggggcagccctgcaccaaggctttgaaatcccagatttcccagtggcaaagatgggtggtgatgaatgtttatgactccaaaggaccactgtgaagattaatgacttgtgttttgcaaagtgtttttaaatccccagatgagagctgctcatacagctggcttctgcatgattagcatttgcttgctttaaattggttactactgccatatttcaagacccaaaaaaaagacccagattaaaggcaatgcccaggagcccactgatagcttttagattgtacttccccagaggctgatgagctgacagagatagaacactcctattcagcaccaccttttgagagatacattgcatctttactttcagatgtgggatcaagagcataaaagtcacatttgaactaacatctgatgtctcccttgataccatgctgcaga

SEQ ID NO: 2908 - DNA, 552 bp, Homo sapiens
  MAP TO CHR3.1; EXPRESSED IN FETAL LIVER, SIGNAL = 0.49; EXPRESSED IN HELA, SIGNAL = 0.44; EXPRESSED IN BRAIN, SIGNAL = 0.33; EXPRESSED IN HEART, SIGNAL = 0.64; EXPRESSED IN BONE MARROW, SIGNAL = 0.41; NT HIT: gi13644216, EVALUE 0.00e+00; SWISSPROT HIT: O75030, EVALUE 7.00e-51; EST_HUMAN HIT: BG569995.1, EVALUE 0.00e+00
tctaatgacgcgcatctaccattatagtatcatatagagtggtttcacaggcttaaaagtcctctgtgctctgcctatttcagtgttttatctttactcttattataggaacttgaaatgcaggctcgagctcatggactttcccttattccatccacgggtctctgctctccagatttggtgaatcggatcatcaagcaagaacccgctcttgagaactgcagccaagacctccttcagcatcatgcagacctaacctgtacaacaactctcgatctcacggatggcaccatcaccttcaacaacaacctcggaactgggactgaggccaaccaagcctatagtgtccccacaaaaatgggatccaaactggaagacatcctgatggacgacaccctttctcccgtcggtgtcactgatccactcctttcctcagtgtcccccggagcttccaaaacaagcagccggaggagcagtatgagcatggaagagacggagcacacttgttagcgaatcctccctgcactgcattcgcacaaactgcttcctttc

SEQ ID NO: 2909 - DNA, 400 bp, Homo sapiens
  MAP TO CHR17.1; EXPRESSED IN HELA, SIGNAL = 0.51; EXPRESSED IN BRAIN, SIGNAL = 0.66; EXPRESSED IN LUNG, SIGNAL =   1; EXPRESSED IN HEART, SIGNAL = 0.82; EXPRESSED IN FETAL LIVER, SIGNAL = 1.2; NT HIT: gi14770105, EVALUE 9.00e-70; SWISSPROT HIT: Q9Y5A6, EVALUE 1.90e+00; EST_HUMAN HIT: BF316153.1, EVALUE 3.00e-64
ccatactggcctttccagtgtggcacctctgatgaaaaactaaattggctgtcccaaaacatcaaacaccctctgtgaatcaggccaagctcttccctcctggtctacaaggctgggtgggatgggtctgtctgcctccaacctcatctagagcctgcagaatcttgtgaaacctcttttggcacctcaggccaacagagcgggggtccaggggctcaccaggacaggcagaggtcagcatgggcagggtgcgttcctcctcactgtgctggcgatagacgcacgaattctttttgactctccaggatactaaaatccgcagctatcgtcgtatcaaatacatagtgcacccctgcaggagagaggagcatattcagcttaaatcacgtactaaaagatc

SEQ ID NO: 2910 - DNA, 523 bp, Homo sapiens
  MAP TO CHR5.1; EXPRESSED IN LUNG, SIGNAL = 7.5; EXPRESSED IN BRAIN, SIGNAL = 8.7; EXPRESSED IN HEART, SIGNAL = 9.8; EXPRESSED IN ADULT LIVER, SIGNAL = 7.3; EXPRESSED IN BONE MARROW, SIGNAL =  12; EXPRESSED IN FETAL LIVER, SIGNAL = 9.7; SWISSPROT HIT: P49248, EVALUE 6.30e+00
attcctggcatcacttttggtgcacattctgatataatcaacatccattcaagagggcctttttctgcagaggaattcatcaccagaaatactgcacatgaggatataatatacaaaatatctgtacaatacagcttcttaagcaattatcctgtaccgctgggtcacattatgcaacttaatatttcccataacaaaaatagagttctgggatttttaaaatgcgtatgttgttaagttttactttaatcatttgtggcattcttttatattactttactattgcatgtcaaagtaatcagtgaaattaaattttttaaaacttgcattgaaaattaactcacatcagaaataggattaagaccagggcttcatggttctaaagctgaactaagtggaggaaaagacgttccacagggggacatttcacttgacttaacacacgtcagtgggcttgaatgatttctgagaattttccatcagtgttttcagaaatagcctttggtggtctgctttctcgatc

SEQ ID NO: 2911 - DNA, 599 bp, Homo sapiens
  MAP TO CHR6.1; EXPRESSED IN ADULT LIVER, SIGNAL = 1.9; EXPRESSED IN BONE MARROW, SIGNAL = 2.1; EXPRESSED IN PLACENTA, SIGNAL = 1.2; EXPRESSED IN FETAL LIVER, SIGNAL = 1.6; EXPRESSED IN BRAIN, SIGNAL = 1.8; EXPRESSED IN LUNG, SIGNAL = 2.6; EXPRESSED IN HEART, SIGNAL = 2.4; NT HIT: gi4506792, EVALUE 0.00e+00; EST_HUMAN HIT: AI554763.1, EVALUE 0.00e+00
actgtccggcttgatttttggacaggaatactattctgagaagatgctccgtatttattctggcctctttatattaaataaaaatcaaaataaaactaaaataaaatgaggcatttacattgaaatcatgtttttactccccccatttaaatgaggtgtggggggaaagaaggtgaaataatttttttttttgtccccataatgagtcctgtttgattggtagcctggatcccttgttacaaacacttcgtgttcaagattatattctttgggtttataggaacaggaagtgctgaaaatgtcaaacatcatctctgaagaaaaagaagttgcaatggcttaagagtttagactaagaagggagctcagagaagtactttcagcataggaatgaacagtattctcaaatcgcagaataccgagttcccctccctcagacgagggctatatgtaacaaaaataacaataagcataggtatagtttaagagccttttacgtagtaattcttccaggccataaccatacaaatctgatcatttagacatgacaaatttctatatacaaaaaaacatgtaactttcaacccttctctgctttt

SEQ ID NO: 2912 - DNA, 575 bp, Homo sapiens
  MAP TO CHR19.1; EXPRESSED IN HEART, SIGNAL =  14; EXPRESSED IN BONE MARROW, SIGNAL =  12; EXPRESSED IN ADULT LIVER, SIGNAL =  30; EXPRESSED IN PLACENTA, SIGNAL =  17; EXPRESSED IN FETAL LIVER, SIGNAL =  12; EXPRESSED IN BRAIN, SIGNAL =  18; EXPRESSED IN LUNG, SIGNAL = 5.7; EST_HUMAN HIT: AI343512.1, EVALUE 0.00e+00; SWISSPROT HIT: P91623, EVALUE 1.40e+00; NT HIT: gi15308521, EVALUE 0.00e+00
gttttctgaagctgttcggcgttggccggccccatgtccacatgtcattggtgcccagtaggcatttgcagaacggacagactgtggcgactgagactccagcatcctgggctgggggcggccagggccctgactgtcgtcctggccctctgacgtgagccatgtgctgtctgcttgcagcaggcaggatgtcggccgccactgtgctgtcccgggagccctacatgtgtgcacagtgcaagacggacttcacgtgccgctggcgggaggagaagagcggcgccatcatgtgtgagaactgcatgacaaccaaccagaagaaggcgctcaaggtggagcacaccagccggctgaaggccgcctttgtgaaggcgctgcagcaggaacaggagattgagcagcggctcctgcagcagggcacggcccctgcacaggccaaggccgagcccaccgctgccccacaccccgtgctgaagcaggtgagcctggcctgctgccggcagtgccgtccctaggaggcagaggccgttccgcgatccaccccacgcctgcgctgcaccgcctgattgttaact

SEQ ID NO: 2913 - DNA, 598 bp, Homo sapiens
  MAP TO CHR11.1; EXPRESSED IN ADULT LIVER, SIGNAL = 2.3; EXPRESSED IN FETAL LIVER, SIGNAL = 1.6; EXPRESSED IN LUNG, SIGNAL = 3.2; EXPRESSED IN PLACENTA, SIGNAL = 2.3; EXPRESSED IN BRAIN, SIGNAL = 1.7; EXPRESSED IN BONE MARROW, SIGNAL = 1.8; EXPRESSED IN HEART, SIGNAL = 2.1; EST_HUMAN HIT: BF982807.1, EVALUE 6.00e-42; SWISSPROT HIT: Q14139, EVALUE 2.00e-64; NT HIT: gi16183763, EVALUE 0.00e+00
cgaaatagctcgtttctgcctcatctttttttgagaaaggaactctgtgaaaaaggataagggagtgaatgctttacacgttacacacacacacacacacagttttgagaagcctggttctctcctacctctcatgtgtacatttttaatttttcgttcttcatcattcaactccttgagggcacagtatgtgggattaaaggtgaggagccgagaggatctgggtttgcaaaatggctggcatagcttcaggagagcagcacccagattcagaaagaaagcatctgaggcatacatttggaaaaagatttctggcatctgattggcccaaatcttggtgcggcctgcatttgcatgcaaacagtttccaagccaggacaagatacagtgtttggtttctggagagagctggagtaagttcttcagcatctggtagatcttttcgtggaactgagccatgaactgttcaaccagaaaacacaaccacagaacgtttcacaatcctaatagtttttattcccaaaccttagcaactggcagtttccaaaaatatgctaatcctaatctttcccctcactctctgtgcctcatcccctaa

SEQ ID NO: 2914 - DNA, 563 bp, Homo sapiens
  MAP TO CHR9.1; EXPRESSED IN FETAL LIVER, SIGNAL =   2; EXPRESSED IN LUNG, SIGNAL = 2.4; EXPRESSED IN HELA, SIGNAL = 1.7; EXPRESSED IN BRAIN, SIGNAL =   2; EXPRESSED IN HEART, SIGNAL =   2; EXPRESSED IN BONE MARROW, SIGNAL =   2; SWISSPROT HIT: P08071, EVALUE 5.40e+00; EST_HUMAN HIT: BG230521.1, EVALUE 7.90e-01
ggattgatggatgaacccagtgtggcaaaaccctgatcattgttgatgctggaaatgggggcccactctgttctctttttgcagtttttttttttgtctaaattaaggaaatatgtatacaaatccctaagcagtggggcctacatgaaacaagcgcgtatctgcttaagtaagagcttccttgaggctaataggctttagtccaaccacctgggtaaaacaggctcttgatttaagctgatgataaatgcagagccaacaaccaaaggaagcttcccttctcacactctgaagtttgtgtcagctgcactaggcttgttcccacatggccttttagtgtcctccagccaaaaaacagcaagctctcttgactggagtttcactctcttcacaagcaatctaggaccctgtgaatttcggatgaaacccaacagctgtgctaaacaaatatttccaaggctctcttccaggcactgcaaaaaacacccaaagcccctctaatccctattttaaaacagtaactgttcatgacccactatctcacccctatccaagactgggtt

SEQ ID NO: 2915 - DNA, 568 bp, Homo sapiens
  MAP TO CHR11.1; EXPRESSED IN PLACENTA, SIGNAL =   6; EXPRESSED IN FETAL LIVER, SIGNAL =   4; EXPRESSED IN LUNG, SIGNAL = 5.6; EXPRESSED IN HELA, SIGNAL = 4.6; EXPRESSED IN BRAIN, SIGNAL = 4.1; EXPRESSED IN BONE MARROW, SIGNAL = 4.3; EXPRESSED IN HEART, SIGNAL = 4.5; EST_HUMAN HIT: BF221613.1, EVALUE 2.00e-35; SWISSPROT HIT: P87154, EVALUE 8.20e-01
cttctgctgcctacctcctggttctcccctgctagaccttacatatgcaaaggtagctttgcattagctagcacagtagagaaggctaatcagagatccacatctctgtttcagagttggaggttgagatgcaagagtgactcagctggcatcagctctgtagcagtctcagcctgcaggccttcaggaagtaagtcctccaggcctgcatctccctctgtggcaaattgccactaaactctgctgtttatcaacccagtaccaaacacagtaggatgagtctgctgtttcactgttttcaacaaacccaaaaacacagaagccagattacatgatgggatagtattacaacagtgtattagatacagtatctcccttaagaagcttacagtttagtaaggaaataaatgtaaatatagcattagagtgcaatgatgtgtgctacaagaagcatcgacaggagggtaaagggaagcaattcgggaaaatcagaaaaaaacttctctgaaaaggtgatgaagtggttttgaaagtggatgtgctaggtagaaagtgccaggaatgaagg

SEQ ID NO: 2916 - DNA, 527 bp, Homo sapiens
  MAP TO CHR17.1; EXPRESSED IN BRAIN, SIGNAL = 1.2; EXPRESSED IN HEART, SIGNAL = 0.99; EXPRESSED IN ADULT LIVER, SIGNAL = 1.5; EXPRESSED IN BONE MARROW, SIGNAL = 1.3; EXPRESSED IN PLACENTA, SIGNAL = 1.4; EXPRESSED IN FETAL LIVER, SIGNAL = 1.2; EXPRESSED IN LUNG, SIGNAL = 0.71; NT HIT: AY051598.1, EVALUE 5.00e-01; EST_HUMAN HIT: BG111607.1, EVALUE 2.90e+00; SWISSPROT HIT: Q9UMQ3, EVALUE 3.70e+00
cattcccacccattttcaagtcctcgtattacaaataaacattgagcacatactatgcacaaaacaattttggtctgtgtatttttcccataatactttcatatttcatttatttctctatgtcttctactcccctaaaaagccattattctgaaatgaaacttttttttgttttttagaagcaagctcaaggcacgctttctcaccttcaagcccagtccatgttcttaaagttgcagagagttgtctttcagggtccccttcaatgccaacgcccccccctccaccaccaccaattttcaagggacaataaatcatctatttccacactgaaactgaaactgacaactgctgagagcgtctgccaaagggtgtgtcatagccaaaggcagttagagtccctaccagcatcctgttctcagacttggggacctgagataccactggaatttgcctaaatgccagaatcaataacagagctcccagtggaaagttcaggatgtcccccagaccactccctcaacctg

SEQ ID NO: 2917 - DNA, 599 bp, Homo sapiens
  MAP TO CHR19.1; EXPRESSED IN FETAL LIVER, SIGNAL = 3.2; EXPRESSED IN LUNG, SIGNAL = 1.5; EXPRESSED IN BRAIN, SIGNAL = 2.1; EXPRESSED IN BONE MARROW, SIGNAL = 1.8; EXPRESSED IN ADULT LIVER, SIGNAL = 3.4; NT HIT: gi14763816, EVALUE 1.00e-102; EST_HUMAN HIT: BI030837.1, EVALUE 0.00e+00; SWISSPROT HIT: Q63570, EVALUE 8.00e-21
gtttgctgctgcctagcacatggtaggaaatagttgttaagtggacagatgaatgaatgaggtgtccttagcacacctgtggtagagcccacgatggctgtattctgatccacagcctccagaaattgtccgatgaccagcgggatgctttggattcgcttcacctcctcctgggcatggagaaattcctttttcaggttcttttgctcatctttgatgtattcctcctgcacctccaggaactccagctcttgctgcagcttctgcgagcagagaggggacagaaggggatggctccagacttgctgatccagagagtggtggaaagtggggaagagtatgagatgtcaggtcctgtgcaaggtctgggttgggggtcgaatgtaccttgtagcggctgtacaggtcctccaggtcctcaggctcagggcccaggaaggacaggccggtctggggccgggacacggacagtgctgggatctcatcctagacgaaaggggataactcacattggaagaagacagtcctctcatgaaagcttcccaacttcactaatgtttgttcccctccccacttcaccctgatgtcacttagcccct

SEQ ID NO: 2918 - DNA, 560 bp, Homo sapiens
  MAP TO CHR7.1; EXPRESSED IN HELA, SIGNAL = 6.6; EXPRESSED IN BRAIN, SIGNAL = 8.8; EXPRESSED IN HEART, SIGNAL = 8.5; EXPRESSED IN ADULT LIVER, SIGNAL =  13; EXPRESSED IN BONE MARROW, SIGNAL = 7.6; EXPRESSED IN PLACENTA, SIGNAL = 8.9; EXPRESSED IN FETAL LIVER, SIGNAL = 7.2; EXPRESSED IN LUNG, SIGNAL = 8.1; NT HIT: Y16000.1, EVALUE 3.00e-92; EST_HUMAN HIT: BE708261.1, EVALUE 1.00e-118; SWISSPROT HIT: O95178, EVALUE 2.00e-24
gctagcaccccagaatcaacacattcaaatttctagtgcaaaataatgaatcttcactaattgaaaaccaaaattagcctcttgtcagttttggtcagtttttgctgctacacatgaagcaagcttagtaaaaagtgagtatttcaagggattgtgaacttctgtctatatttcagtggagatgagaaacattagcgttggttctaggatgtaactcagaggagttttggatgacttaacgctttgagaatgtagcacgctgtctgccatgttgttttgtcttgcagtgccggtggtggtgtgcacattgagccccggtatagacagttcccccagctgaccagatcccaggtgttccagagcgagttcttcagcggactcatgtggttctggattctctggcgcttttggcatgactcagaagaggtgctggtaagtgcaggagaagagcacttgtcgttttttgggtgggggagggaggatgtattaatagcttgtttatttttctgttgtagaccatttttctgtctggacatcgccctttgccaccactttttcca

SEQ ID NO: 2919 - DNA, 577 bp, Homo sapiens
  MAP TO CHRX.1; EXPRESSED IN HELA, SIGNAL = 4.3; EXPRESSED IN BRAIN, SIGNAL = 5.1; EXPRESSED IN PLACENTA, SIGNAL = 5.9; EXPRESSED IN LUNG, SIGNAL = 5.6; EXPRESSED IN HEART, SIGNAL = 4.5; EXPRESSED IN BONE MARROW, SIGNAL = 6.2; EXPRESSED IN ADULT LIVER, SIGNAL = 2.4; EXPRESSED IN FETAL LIVER, SIGNAL = 4.7; NT HIT: gi14762134, EVALUE 0.00e+00; SWISSPROT HIT: O15550, EVALUE 1.00e-91; EST_HUMAN HIT: AL041376.1, EVALUE 0.00e+00
acctcaggtggacaacaaggcattaccttaaccaaagagagcaagccttcaggaaacatattgacggtgcctgaaacaagcaggcacactggagagacacctaacagcactgccagtgtcgagggacttcctaatcatgtccatcagatgacggcagatgctgtttgcagtcctagccatggagattctaagtcaccaggtttactaagttcagacaatcctcagctctctgccttgttgatgggaaaagccaataacaatgtgggtactggaacctgtgacaaagtcaataacatccacccagctgttcatacaagactgataactctgttgcctcttcaccatcttcagccatttcaacagcaaccccttctccaaaatccactgagcagacaaccacaaacagtgttaccagccttaacagccctcacagtgggctacacacaattaatggagaagggatggaagaatctcagagccccatgaaaacagatctgcttctggttaaccacaaacctagtccacagatcataccatcaatgtctgtgtccatataccccagctcagcagaagttct

SEQ ID NO: 2920 - DNA, 531 bp, Homo sapiens
  MAP TO CHR19.1; EXPRESSED IN HELA, SIGNAL =   6; EXPRESSED IN BRAIN, SIGNAL = 6.3; EXPRESSED IN LUNG, SIGNAL = 2.9; EXPRESSED IN HEART, SIGNAL =   3; EXPRESSED IN ADULT LIVER, SIGNAL = 5.1; EXPRESSED IN BONE MARROW, SIGNAL = 6.8; EXPRESSED IN PLACENTA, SIGNAL = 5.5; EXPRESSED IN FETAL LIVER, SIGNAL = 5.3; NT HIT: AE004675.1, EVALUE 2.00e+00; EST_HUMAN HIT: BG419149.1, EVALUE 1.90e-01; SWISSPROT HIT: Q92072, EVALUE 7.50e-01
ttgctggtctgtggtctcacggggcccagggagggcccccatgcggccgatggactcctcctgcaggccaccttcaccagggccggcgtcttagtcaccccgcttcctgttgatttcgaggcggccttggggaggatggttccagtcctcagggccacccgacaccaagactggctcaggagagcacccagctcaccctgacacagggcctggctcagagccacccactcctcctccgtcaaagccttgctaagcacctcggccaatttaccctgcatgaccttggtgagttccgcccgcagctcgccccgggacagggctcgggacagggtcaggcgcagctcactccaggacagcgccttcaccagcgccatgctcagcatgctctggggcagggctttggtgacagtggcacccaggacctccttggacagggcctggttcagagctgcccagacttctccctgggagagggctttggccaacagagtgcggagatcctcctgggatgccagcacaccagctacttca

SEQ ID NO: 2921 - DNA, 558 bp, Homo sapiens
  MAP TO CHR17.1; EXPRESSED IN LUNG, SIGNAL = 2.7; EXPRESSED IN BRAIN, SIGNAL = 5.6; EXPRESSED IN PLACENTA, SIGNAL = 4.2; EXPRESSED IN FETAL LIVER, SIGNAL =   8; EXPRESSED IN HELA, SIGNAL = 5.9; EXPRESSED IN HEART, SIGNAL = 2.6; EXPRESSED IN BONE MARROW, SIGNAL = 6.6; EXPRESSED IN ADULT LIVER, SIGNAL = 3.1; SWISSPROT HIT: P39193, EVALUE 6.00e-03; NT HIT: gi14770105, EVALUE 0.00e+00; EST_HUMAN HIT: BE301543.1, EVALUE 0.00e+00
tccaataaacggggtagcagggaactcggagaaaccaaagtaatccattgagcggttttcttaagtgtctttaatactccactcagggcagcccctccctctactgagaggctcttggctctggccccaagagcagctggaaggccctggcctgacttcaccacttgatgtccaggctgtgtgtgccacgctcctggctctggtacgtggtatgcagcacctctcgggccttgggggagttgatcccctccagccactcctggtacagctcctgcacgtgtgcactggactccggacgccgcacagggatgtcagcgtaaatgccttccatctgccgcagcagggccttatccgcatgtccgtctggagtctgggcttgcctctgccatttaagcatcctgaaagataaacacaggtaagtttatcctgggctcaggcgatctttctgccttagcttcctgagcagctagaactacagacacacaccaccttgcccggctgatttttaaattttttgtagagattgggcgggaggggcgggtgttgctatgttgctca

SEQ ID NO: 2922 - DNA, 519 bp, Homo sapiens
  MAP TO CHR11.1; EXPRESSED IN HEART, SIGNAL = 0.83; EXPRESSED IN BONE MARROW, SIGNAL = 0.49; EXPRESSED IN FETAL LIVER, SIGNAL = 0.56; EXPRESSED IN LUNG, SIGNAL = 0.87; EXPRESSED IN BRAIN, SIGNAL = 0.58; EST_HUMAN HIT: BI034632.1, EVALUE 7.30e-01; SWISSPROT HIT: P98082, EVALUE 7.20e-01
gagggctttccattctcctcctgggcccccctctccaccaaggcagtatccagcccccagggtccagactgagcttccctcctaccgcagggcagggtcagctggtcaacctgggtccagccctgcccctcggcttcccacctgggcccagcagttattgatgttctcagagtggcctgaggcagggcgagatctggagtcatcaaaggaagattaaattatgctccaaggcagccaaggggttgttttaggaagattttcgactgtgaggcttgcagtgagctgggctgccgccctgagctccccctgttctgggcatttggcctcttggagattttctggttcctaattggcttgggttatccatctgttcctgtcctagtggaatgttgtttaaaggagcctggtgactccccgctgaggctgctggagttaagccagagtatacatatctgaactgcccagccaggggcagctgcatccgggcagcgccccccaacccctaatggatgtgattgg

SEQ ID NO: 2923 - DNA, 546 bp, Homo sapiens
  MAP TO CHR5.1; EXPRESSED IN BONE MARROW, SIGNAL = 4.6; EXPRESSED IN ADULT LIVER, SIGNAL = 3.3; EXPRESSED IN PLACENTA, SIGNAL = 3.8; EXPRESSED IN FETAL LIVER, SIGNAL = 4.3; EXPRESSED IN BRAIN, SIGNAL =   5; EXPRESSED IN HELA, SIGNAL = 4.5; EXPRESSED IN LUNG, SIGNAL = 2.5; EST_HUMAN HIT: AI698086.1, EVALUE 1.00e-109; SWISSPROT HIT: Q05319, EVALUE 2.00e-13; NT HIT: AB049453.1, EVALUE 8.00e-03
aacaagacatgggcaagacctgtggacagaaagataccatgagggtacacgcaacgtaagatgggaataaacggatacacatgtgacctttccttgaacaggaagatccaaaattatgaagatactatgacgatatccgttctccctaaatcaagataggcacgtacatcatcttctacctttctgccccgaaaataccttgtagcttaggaacggtgacccagtcaagaggcacggtactgagggcctgcatcgatttggtgggggtgctgaccacagggctctcaggactggtgggccaggctgtgctgggggcggcaggggcaggagccatggtgggggccagaggcatgctggctttggtggtggcctccaggatccagtcacgtagcctggtgactcgggcatagacccctggacgccgggcttccgcacacccgattccccagctcacgatgccagccagaaagaaccggccagagggctcctcgcagaccaggggtcctcctgagtcaccctaggaaaccaacacacaccctcaggatg

SEQ ID NO: 2924 - DNA, 546 bp, Homo sapiens
  MAP TO CHR17.1; EXPRESSED IN ADULT LIVER, SIGNAL = 1.6; EXPRESSED IN FETAL LIVER, SIGNAL = 1.9; EXPRESSED IN LUNG, SIGNAL =   1; EXPRESSED IN PLACENTA, SIGNAL = 1.9; EXPRESSED IN BRAIN, SIGNAL = 2.1; EXPRESSED IN HELA, SIGNAL =   2; EXPRESSED IN HEART, SIGNAL = 1.1; EXPRESSED IN BONE MARROW, SIGNAL = 2.3; NT HIT: AF079445.1, EVALUE 8.00e-03; EST_HUMAN HIT: AW170245.1, EVALUE 1.20e-02; SWISSPROT HIT: O66402, EVALUE 5.10e+00
cttcgaaactggcattagccgactgtaatatttaaaaacaacaacaaaatctaaataaataaagtagggctacaagacttcagttgaaaccagaaccagttgtccaagtgccttatcaggaatgatccgagccccgagatggaggtgaagtgaatgaagtaagcgagctagaaaatcagatcctcagaacaggcaaatctacccttctcaggttcttatgcatttggaaaaggtctactgcatttgggattatttgactttaaaaaaaaagaaaaactggtgactactgacttcattttccttaaaagtatagatagatatgtatacacatatagctgtacaaatacacattccaaataaattagaaaatgatatgattagtttagcatggtggttgcagtcacttgcacgaaaaaaaaaaaaaggaagaaagatctaactgcctgtttctggctatttaaggaatttaaaggactccacacaggtttatcctagtaatgcattctgagtttggaaacttaatatccgccatcctgatcaaaaatg

SEQ ID NO: 2925 - DNA, 554 bp, Homo sapiens
  MAP TO CHR14.1; EXPRESSED IN HELA, SIGNAL = 2.7; EXPRESSED IN BRAIN, SIGNAL = 2.6; EXPRESSED IN HEART, SIGNAL = 0.93; EXPRESSED IN ADULT LIVER, SIGNAL = 2.4; EXPRESSED IN BONE MARROW, SIGNAL =  14; EXPRESSED IN PLACENTA, SIGNAL = 2.8; EXPRESSED IN FETAL LIVER, SIGNAL = 2.1; EXPRESSED IN LUNG, SIGNAL = 9.2; NT HIT: M99637.1, EVALUE 0.00e+00; EST_HUMAN HIT: AW405627.1, EVALUE 0.00e+00; SWISSPROT HIT: P23083, EVALUE 7.00e-47
tattgagtgtggcctttcccactgtgaattcggcttctacaattcttgaattgaatatatctcttaaaattagagtgtgtacttgtttctattgttatttttttctcaaatatataacccattttcaaaaaagccttaaacctgataacccctgtcatctcctcagcccagcacagctgccttctcccctagggtttctgactctctgaggatgtggtttttcacactgtgcctctcgcacagtaatacacggccgtgtcctcagatctcaggctgctcagctccatgtaggctgtgcttatggaggtgttcctggtcatggtgactctgccctggaacttctgtgcatagcctgtgttaccactgttagggttcatccatcccatccactcaagcccttgtccagtggcctgtcgcacccagttgatatcataactggtgaaggtgtatccagaagccttgcaggagaccttcactgaggccccaggcttcttcacctcagccccagactgcaccagctgcacctgggagtgggcacctgtggagagaacaca

SEQ ID NO: 2926 - DNA, 600 bp, Homo sapiens
  MAP TO CHR7.1; EXPRESSED IN BRAIN, SIGNAL = 0.93; EXPRESSED IN LUNG, SIGNAL = 0.62; EXPRESSED IN HEART, SIGNAL = 0.74; EXPRESSED IN ADULT LIVER, SIGNAL = 0.96; EST_HUMAN HIT: AA947667.1, EVALUE 3.30e+00; SWISSPROT HIT: O13764, EVALUE 3.40e+00
atccttcctccacaaccctctcaataaaattataacaaagaacaagccactacataattccccttccacttactgtagaagaagaacaactcttaatattaattgtgagggtttcaccagagtattgtctaattaaagatgaccagagaagcggcagcctcagagactcctttaatttgacatcctgaatacgtagcatgtttaagagtagttctcaggggtagttccacaatctattccatttgtataaacctccagaacttcactgagacaataggagtatgtaaaggaataacttgcttccatgaagaacaaatatttactgcatttgcttgcattgtttctcaactttttagtaaatattttatttctgaaatgaaagaactgttttgtgcaaaaattccttcaagatgcagatttcagtgaacttggggttccagccattgcagccttgagtataatttccacctgaaggttgaagagatgtgagcaacacttaggcaccccttctatattttcagcaaatagtgtttttaatgcttctttgttcttcccttgttaaatcttcagattagtaactgctgattaatgccccaaaga

SEQ ID NO: 2927 - DNA, 501 bp, Homo sapiens
  MAP TO CHR19.1; EXPRESSED IN FETAL LIVER, SIGNAL = 5.2; EXPRESSED IN BRAIN, SIGNAL = 5.9; EXPRESSED IN LUNG, SIGNAL = 2.4; EXPRESSED IN HEART, SIGNAL = 2.9; EXPRESSED IN BONE MARROW, SIGNAL = 6.7; NT HIT: gi11545919, EVALUE 1.00e-115; EST_HUMAN HIT: AV748766.1, EVALUE 0.00e+00; SWISSPROT HIT: Q63622, EVALUE 1.00e-10
tctgtaacattgcccagcacagggctagccatacagacaacactcagtgtgtgttgagtgaatgtcaaaagcaggggctatgctacgttagacagactgtgtcccccagtcctgcctcagccctccactcaccacaccgttcaccgacaacagttgatccccacgcttgaggcctccatggcggtcagccacaccccctgggatgacccgggagatgtagatgggcgagttttgctctttgccacccatgatgttgaagcctaggccctcatccgtcttgggtagctccactaccctgggatgtgcgtggccctcgctggctgtgaaggcagccactgtggcctgggagagagaaagcgactgaagatgagggccccttccaggtaggcatgaaagctggggtgggggatgtggaccgaggacagcgatttagcctgggttactatccccaagcatgggacacttgtcatggcacaatgcacgatccccctgtaatgactg

SEQ ID NO: 2928 - DNA, 600 bp, Homo sapiens
  MAP TO CHR7.1; EXPRESSED IN FETAL LIVER, SIGNAL = 1.6; EXPRESSED IN LUNG, SIGNAL = 1.2; EXPRESSED IN BRAIN, SIGNAL =   1; EXPRESSED IN HEART, SIGNAL = 1.2; EXPRESSED IN BONE MARROW, SIGNAL = 1.5; EXPRESSED IN ADULT LIVER, SIGNAL = 2.9; NT HIT: gi14739706, EVALUE 1.00e-111; EST_HUMAN HIT: BF969062.1, EVALUE 3.00e-03; SWISSPROT HIT: P21439, EVALUE 7.00e-28
ggtttgtgaaacagggatgacatttgtccaaacagtagcatttggacatgaagtaaaatgaaatgcactttgaatattcagaagttctttatcataactatgttaagtgctttctataggctcaacgttttatgttaatcaccttatatttaagttctagacattaatacagtaaaatatttcatacacaattgacaattattagttgtagtgggcacaaacatttaattattaaagcctgcatatcatgataaataattcaaataaaacacatgtctaaaaacaacacttaacaccaattgaaatcttatttgacctacctttccagcagcttccagttcttttttatctcttttggcatttccagccaacaatttcatttcaacaattcctgacacagcaataattggaacaactgctaatagcaatagggttaactgccaaccgtagataaatgatatgataataccagttccaaggttagctatattctgtgcaattaaagccaacctggttcctgtggcctgggagagaaaaagcacaaagcaactgtagttttaagctccaaatgcatgcgctccagccttagcctcttggtca

SEQ ID NO: 2929 - DNA, 519 bp, Homo sapiens
  MAP TO CHR18.1; EXPRESSED IN FETAL LIVER, SIGNAL = 3.3; EXPRESSED IN LUNG, SIGNAL = 2.4; EXPRESSED IN BRAIN, SIGNAL =   3; EXPRESSED IN HEART, SIGNAL = 3.4; EXPRESSED IN ADULT LIVER, SIGNAL = 2.6; EXPRESSED IN BONE MARROW, SIGNAL = 2.9; SWISSPROT HIT: O95948, EVALUE 3.00e-50; NT HIT: gi4758847, EVALUE 0.00e+00; EST_HUMAN HIT: BG055295.1, EVALUE 0.00e+00
aagtaggggaagagcggaagagaaagagaaaatggaagaagaaataaaaacgagaagaaagaggacgtgtataggaaagagaaggaaagaatcaagagaagtgactcggcgcgcagacttgggccacaagcaccggacccggagccctcttcccagcagcctggcccctggctagccccggccttacctgccaggcgtaaggcggacatgcgctggaactcgggctcctgaagccacttccacatcctgcggaaggtctccctgccagatttgagtttactccacggttttggattccggagcaggtcggagagagtcccctgagaccggcacagcaccctctgcgcaaagatcgcctgggggatactgtagcgcttcagctccgctgtgatgcgctgggccacctctttggtgttgatttcttccagctggcccgacgtggccacctgcgagcccgatgaggacgagggtggccgctcgcgactgggtgccagcaccggcccgtgagactgagtgtgg

SEQ ID NO: 2930 - DNA, 520 bp, Homo sapiens
  MAP TO CHR19.1; EXPRESSED IN HELA, SIGNAL =   6; EXPRESSED IN BRAIN, SIGNAL = 8.7; EXPRESSED IN LUNG, SIGNAL = 4.5; EXPRESSED IN HEART, SIGNAL = 4.7; EXPRESSED IN ADULT LIVER, SIGNAL = 8.1; EXPRESSED IN BONE MARROW, SIGNAL = 9.6; EXPRESSED IN PLACENTA, SIGNAL = 6.8; EXPRESSED IN FETAL LIVER, SIGNAL = 7.3; EST_HUMAN HIT: BG992788.1, EVALUE 1.00e-104; SWISSPROT HIT: P57999, EVALUE 3.00e-15; NT HIT: gi16163229, EVALUE 0.00e+00
ttcaatccactatcaggccctattattctaccaactttagagatacaaaaagtgaagccctaagaggtgtggtcacacagatcttcagcatcaggcatgggcttgaactagggtcctacccctactcaaagtctactttctgaagcgtggcctgcctctctcacctcccaggtgaacggtgtggacatgaagctgcccgtggtgctggccaacggccagatccgtgcctcccagcatggttcagatgttgtgattgagaccgacttcggcctgcgtgtggcctacgaccttgtgtactatgtgcgggtcaccgtccccggaaactactaccagcagatgtgtggcctgtgtgggaactacaacggcgaccccaaggatgacttccagaagcccaatggctcacaggcaggcaacgccaatgagttcggcaactcctgggaggaggtggtgcccgactctccctgcctgccgcccaccccttgcccgccggggagcgaggactgtatccccagccacaagt

SEQ ID NO: 2931 - DNA, 504 bp, Homo sapiens
  MAP TO CHR17.1; EXPRESSED IN LUNG, SIGNAL = 0.71; EXPRESSED IN HELA, SIGNAL = 2.1; EXPRESSED IN BRAIN, SIGNAL = 1.3; EXPRESSED IN PLACENTA, SIGNAL =   2; EXPRESSED IN FETAL LIVER, SIGNAL = 1.4; EXPRESSED IN HEART, SIGNAL = 0.49; EXPRESSED IN BONE MARROW, SIGNAL = 1.7; EXPRESSED IN ADULT LIVER, SIGNAL = 0.89; EST_HUMAN HIT: BI913280.1, EVALUE 8.00e-50; SWISSPROT HIT: Q08885, EVALUE 4.60e+00; NT HIT: gi15313676, EVALUE 6.00e-50
gcagtcaactctggaaagggcttccctcacccctttctaacttctgtgggtaagggtgtcagtctttagggctgaacagattcagtgtctctcccagcttcctggctggctcacctgtcccgatgtagagggttcgatagcacatgttcacagctcctcccaaccctaagagggggtagaacacagctcgggcctgtacctcctttctttgcactacaagacaaacataggaataggatcattcagaaactcagatcctgtgatccaaacataaaccaacaaaatctggacctttggctcatggcctggagaaaatcccgctggatgactcatctttccaaactcacatccaacactgagctgcggcagggtaaggctttctctccccacccacagcatttccaacacagggtacagaggaccatctttgaagatggtcagagaagtcagagatgacagtactgtgtaagttcctgggctcctggctggctaatccgggatatt

SEQ ID NO: 2932 - DNA, 545 bp, Homo sapiens
  MAP TO CHR2.1; EXPRESSED IN ADULT LIVER, SIGNAL = 1.9; EXPRESSED IN PLACENTA, SIGNAL = 3.6; EXPRESSED IN BRAIN, SIGNAL = 1.8; EXPRESSED IN LUNG, SIGNAL = 2.6; EXPRESSED IN BONE MARROW, SIGNAL = 2.7; EXPRESSED IN HEART, SIGNAL =   2; NT HIT: M15918.1, EVALUE 0.00e+00; EST_HUMAN HIT: AU117205.1, EVALUE 0.00e+00; SWISSPROT HIT: P08578, EVALUE 8.00e-16
caatcccatagcatttattgccatcttgtaataacataagggtaatcaaaacaatatgaataaatgttcatattggacaaaggacagctaaaaacaaactgtatccttctcaacaatttctcacttcattgatcatttctagctggagacactttgtagcagaggaatacctccttttagcatgatccgacccagttgttttcttgactttgttttagaatgaatctcttccgcatcatctaataacaaggttcgtatactcattaaaaccaatgatacagccttctgtccgcatattcacttgctcatagagccacacctgaatctgcgatctattttgtaagtatctgaagatgaggttgatgggcgcatcttcaccttctgcactttctggccctggccatggtatgccatggtggaatttcacaaagagcacacccgcacgctgcctctgagagcaacttccagaatcaagacaccgtctcttaaaagaaaaaaaaaaaaactaaaaagaataagatgtaggcttagggcttcctcccctg

SEQ ID NO: 2933 - DNA, 569 bp, Homo sapiens
  MAP TO CHR7.1; EXPRESSED IN HEART, SIGNAL = 0.61; EXPRESSED IN ADULT LIVER, SIGNAL = 1.6; EXPRESSED IN BONE MARROW, SIGNAL = 0.63; EXPRESSED IN FETAL LIVER, SIGNAL = 1.8; EXPRESSED IN BRAIN, SIGNAL = 0.81; EXPRESSED IN LUNG, SIGNAL = 0.57; NT HIT: U51691.1, EVALUE 0.00e+00; EST_HUMAN HIT: BF792081.1, EVALUE 2.00e-91; SWISSPROT HIT: Q16850, EVALUE 2.00e-29
tccctatgaggaaagggagagataatttgtaaacacaattcggaatattttgacagagacaaatatgttatcagaacaaacatttccaatctaaaatataatcatcttaccagctccaaatggcacataggcaaacttttcccctgatgctgggttatcctgtaagtagcgatcaggattaaagtccaggcgttctacccatgagtctttaagtctttgattgacagtgggagaaacacacacctgatgtcctggaggaatggtataccctgccacagtctataaacaaaagccacacatttcattagagaatttaaaaatgtgctgacaaataatcagatcattgtgtaataaagcatgaatatacatgggatactcagatgctccttgacttatgataggtttacatcctgataaatccatcataaagtcaaaaaattataagttgaatcacataaatcaagaaccatctgtacatatatttaaaaactggctagataataggcaaactaaaaattattttaactcaagatgatttccagtgagccagcgttgggttggaagtacac

SEQ ID NO: 2934 - DNA, 600 bp, Homo sapiens
  MAP TO CHR7.1; EXPRESSED IN FETAL LIVER, SIGNAL = 5.9; EXPRESSED IN LUNG, SIGNAL = 3.4; EXPRESSED IN BRAIN, SIGNAL = 6.3; EXPRESSED IN HELA, SIGNAL = 5.7; EXPRESSED IN HEART, SIGNAL = 3.5; EXPRESSED IN ADULT LIVER, SIGNAL = 5.5; EXPRESSED IN BONE MARROW, SIGNAL = 7.6; EXPRESSED IN PLACENTA, SIGNAL =   4; NT HIT: AJ289880.1, EVALUE 1.00e-05; EST_HUMAN HIT: T93956.1, EVALUE 4.00e-06; SWISSPROT HIT: P76547, EVALUE 1.20e+00
ggatgagaagctgaagcaggtctttccccctttattaacattccatccatctttcaagttccatttcaaattccatttggagaaattaggaaacaccttctggaggagctggcattcatctcttcccctcagctcccacaagtctttataattttattatggcatttatcacattccatcctgtcctgtagttataggccatctatctctttcactgcacagtaactttcctgagaggaagaagaacaatccattcattttggaatcccctatagcacaaagcatagtacctggcacagagtagatgctcagtaaatatttgttaagttggaataatcacttttttttaaaaaaaaaaaagactgctgttatataattattcaccatcctatttgcccactgatttttccagctgagaaggataattttggggataaccatgaagcaagcccaagctccatgaatcaaaggtagaatgttctttattcttggatggagatggaatacagagcaatagaatactacagcaaccacagttagctggtatttataaacaccaatcctgccattgtactaccatgtgaccccaaacaagctctg

SEQ ID NO: 2935 - DNA, 592 bp, Homo sapiens
  MAP TO CHR7.1; EXPRESSED IN HEART, SIGNAL = 2.2; EXPRESSED IN ADULT LIVER, SIGNAL = 3.9; EXPRESSED IN BONE MARROW, SIGNAL = 4.2; EXPRESSED IN FETAL LIVER, SIGNAL = 3.2; EXPRESSED IN PLACENTA, SIGNAL = 3.6; EXPRESSED IN LUNG, SIGNAL =   2; EXPRESSED IN BRAIN, SIGNAL =   4; EXPRESSED IN HELA, SIGNAL = 3.5; NT HIT: AB051545.1, EVALUE 0.00e+00; EST_HUMAN HIT: AI274589.1, EVALUE 6.00e-82; SWISSPROT HIT: P49746, EVALUE 1.30e-01
gaatcaccataccctggagcctttaaaaaaaatacaaaaaaagagagagaaagaaaagaaatgggggtggggggaagcatcaaatttaaaaaaaaagtttcaaggcaatgtgaagaaaatcaaggcaagtgagaagagaggccatattctttaaaaagcgtataacatttcaatccctttacctgatgctgttaccaggaggctgtctgaggcacctggtctacaggatgaggcactaacggggtttatggaagagcaaaaggcaatggtggtaggaatgacaagggaactgtctgaacatgcaggttggttcagtccgggggttgcagcaggccaggcacccacctgagacgtggccagggctgaaacggcacagcctgcaggtgccacagttaaatctatggatggttttggtggcagctgaggggaggatgacttaggaaggttctcctcattgatcaccctgttcccttgtggcaaactggaaggagtcgaagccacagttttgttatcaactttggcccctgtgttcgaggccctgctgctgtctataataaccttgagttgggggtgtggtggagaaggagtttgg

SEQ ID NO: 2936 - DNA, 556 bp, Homo sapiens
  MAP TO CHR19.1; EXPRESSED IN HEART, SIGNAL = 1.2; EXPRESSED IN ADULT LIVER, SIGNAL = 1.2; EXPRESSED IN BONE MARROW, SIGNAL = 2.1; EXPRESSED IN PLACENTA, SIGNAL = 1.8; EXPRESSED IN FETAL LIVER, SIGNAL = 1.6; EXPRESSED IN BRAIN, SIGNAL = 1.9; EXPRESSED IN LUNG, SIGNAL =   1; SWISSPROT HIT: O00268, EVALUE 5.30e-02; EST_HUMAN HIT: BF309606.1, EVALUE 0.00e+00; NT HIT: AF305781.1, EVALUE 1.00e-125
cagaaggaggtggtgctctcgggggactgggctgtaggctcccaccgatcgatcggcgacgagcagatgagttcccgaggccaggaggctgaggagggaagccagggctcagagaccagcgcccggtgcagagtccccgctgctgccaccgcggcagaaggcacggtgccggattcaaggtgacggcagtgcctggctccattctcctcaagttgccatagcagcctctctcccaacaagcagcttctccgggagccctcagccgggagggacgtcattgttctctcctgcccgtgtggtgcaaggagacccaccggacagagaactttcccgagcccggggtccgctgaccacgtgggtgcacccatgctgcctggagccaggcacagggacaggtccccacggccacagggaatcctctgggcagctgaggggagcgtccaggcccagaagcagctgcagccaagcgtgtccttggagccgtccatgcgtctgtccgcctgctgccggtcgccactggaggtgcgtgtgttttggctgaattcccaagtccttg

SEQ ID NO: 2937 - DNA, 597 bp, Homo sapiens
  MAP TO CHR19.1; EXPRESSED IN LUNG, SIGNAL =   1; EXPRESSED IN BRAIN, SIGNAL = 1.1; EXPRESSED IN HEART, SIGNAL = 1.2; EXPRESSED IN ADULT LIVER, SIGNAL = 1.7; EXPRESSED IN BONE MARROW, SIGNAL = 1.2; EST_HUMAN HIT: AI206718.1, EVALUE 0.00e+00; SWISSPROT HIT: O14753, EVALUE 2.00e-18; NT HIT: Z23102.1, EVALUE 0.00e+00
tttagtccagagcccattgccctctctgtccagccctcccctctgcgcccatctgtgcagggatccggcccttccgctgcagtgcttgcgggaaagcgtttacgcagcgctgctccctggaagctcaccttgctaaggtgcatggacagccggccagctacgcttaccgtgagcgccgcgagaagctgcacgtgtgcgaggactgcggcttcaccagctcccggcccgacacctacgcacagcaccgcgccctgcaccgcgcagcctgatacggtgtgccagcgtcctccccacgaggcaaataaacacagaaaactcacgcatggaatctggtgtttattacactcgggggagagaggaggtcactcggtccagcggtggccgcagtgtggggctgtgcacacgtagtaaaggcgcatggcgtcctggcagaaatgatgcatggttaggaaggatttggacccagcagcgccttaccccaaaagaacaggcaagagaacttcaccaataggtaagggcccggcagagttccaagaagcgcagggtcacccacattgatatccccgcccccagaaaggaccaaacaagccccagata

SEQ ID NO: 2938 - DNA, 581 bp, Homo sapiens
  MAP TO CHR2.1; EXPRESSED IN BRAIN, SIGNAL = 0.76; EXPRESSED IN BONE MARROW, SIGNAL = 0.81; EST_HUMAN HIT: BG250862.1, EVALUE 0.00e+00; SWISSPROT HIT: O51645, EVALUE 3.30e+00; NT HIT: gi16159438, EVALUE 0.00e+00
tggctttcacctgatgttattgaaggttcttcttccaacattatttctctaacaatcaagctaatggcatactgatcagactttgaagaaggaagaaatgttgtatcagtgagtttttgttttcctaccaaaattagtaatagttggtctgtcaagaaacatatcccttttggtctttcagtgttctctaatcgaatttgctggatgtttgggactgaagatggaatgacagagtagatcaaaattatattacaagtgttggaagccactgccactacgtgggctttaagattaaatgctatcagatcaggaaccagaatgcctggaatagtgacttttctcgtcatggtaactgccttcttaaaggtcacaaggaccaaatgtgaagaatcttggccagttcctgtcaagtagtccttttttcttagacaaataagagaattaccctcagacttatgttgattgaaatgtatgtgagttagatccagaggttctaaataggaagaagaaactgatacttcagaatttgtttcagaatcagttgcctctttatccatagagcgtacttcaccaataactgg

SEQ ID NO: 2939 - DNA, 555 bp, Homo sapiens
  MAP TO CHR3.1; EXPRESSED IN ADULT LIVER, SIGNAL = 3.8; EXPRESSED IN PLACENTA, SIGNAL =   3; EXPRESSED IN FETAL LIVER, SIGNAL = 3.8; EXPRESSED IN HELA, SIGNAL = 3.8; EXPRESSED IN BRAIN, SIGNAL =   4; EXPRESSED IN BONE MARROW, SIGNAL = 3.7; EXPRESSED IN HEART, SIGNAL = 2.5; NT HIT: AF223391.1, EVALUE 1.00e-127; EST_HUMAN HIT: AL042368.1, EVALUE 0.00e+00; SWISSPROT HIT: P08548, EVALUE 3.00e-56
taaaaaggtttgggggaaggggagggatgttggtgataccaagaagcttttttggggcggcttgtctctaacacctccctaaatcattttatgaagccagtatcacccaaataccaaaaccagggaaaggacataaccaaaatagaaaactacagaccaatatccctgatgaacataggtgctaaaatccttaacaaaatactagctaactgaatccaataacatatcaaaaagataatccaccatgatcaagtgagtttcataccagggatgcagggatggtttaacatatgcaagtcaataaatgtgatacatcacataaacagaattaaaaacaaaaatcacatgatcatctcaatagaggcagaaaaagcatttgacaaaatccagcattgctttatgattaaaactctcagcaaggtcagcatacaagggacatacgtcaacataataaaagccatctatgacagacccacagctgacctaatgctgaataggaaaaagttgaaagcattccctctgagaactggcacaagaaaaggatgcccactctca

SEQ ID NO: 2940 - DNA, 534 bp, Homo sapiens
  MAP TO CHR7.1; EXPRESSED IN HEART, SIGNAL = 2.1; EXPRESSED IN LUNG, SIGNAL = 1.9; EXPRESSED IN BONE MARROW, SIGNAL = 4.8; EXPRESSED IN ADULT LIVER, SIGNAL = 4.8; EXPRESSED IN FETAL LIVER, SIGNAL = 4.5; EXPRESSED IN PLACENTA, SIGNAL = 4.7; EXPRESSED IN BRAIN, SIGNAL = 3.9; EXPRESSED IN HELA, SIGNAL = 3.7; NT HIT: gi16161900, EVALUE 0.00e+00; EST_HUMAN HIT: BI603546.1, EVALUE 0.00e+00; SWISSPROT HIT: P47898, EVALUE 1.00e-100
ttattctcaccttgctgggctttctggtggcggcgacgttcgcctggaacctgctggtgctggcgaccatcctccgtgtacgcaccttccaccgcgtgccccacaacctggtggcatccatggccgtctcggatgtcctggtggccgcgctggtcatgccgctgagcctggtgcacgagctgtccgggcgccgctggcagctaggtcggaggctgtgccagctttggatcgcgtgcgacgtgctttgctgcacggccagcatctggaacgtgacggccatagccctggaccgctactggtccatcacgcgccacatggaatacacgctccgcacccgcaagtgcgtctccaacgtcatgatcgcgctcacctgggcactctccgctgtcatctctctggccccgctgctttttggctggggagagacgtactctgagggcagcgaggagtgccaggtaagccgcgagccttcctacgccgtgttctccaccgtaggcgccttctacctgccgctctgtgtggtgctcttcgtgt

SEQ ID NO: 2941 - DNA, 588 bp, Homo sapiens
  MAP TO CHR14.1; EXPRESSED IN BRAIN, SIGNAL = 0.97; EXPRESSED IN LUNG, SIGNAL =   1; EXPRESSED IN HEART, SIGNAL = 0.75; EXPRESSED IN ADULT LIVER, SIGNAL = 1.2; EXPRESSED IN PLACENTA, SIGNAL = 2.5; NT HIT: AF111170.3, EVALUE 0.00e+00; EST_HUMAN HIT: AA463972.1, EVALUE 0.00e+00; SWISSPROT HIT: Q92997, EVALUE 1.30e-01
tcaagtcaccggttagggtccttaatcacatcgacaacacccaccccacctggcgagtacaacgtgatcagggaagggatgccctgctgcgggaggggccacgggcgtgcacaccaggtgggaatccgggtgggagagggcatcccagagtcctgcctactggagggctggagggagcagagtggagagggtgggttggagggtggtagaagggccagggggccagcggggccagcgtgggtgactcagcagaccctgtctcaacccgtaggtctggagtgggactgactggctccagacagaccatgttctacacagaggtgacagatgcccagcgtagcggtccaggtgggggcctggtggaggagggtgagctcattgaggtggtgcacctgcccctggaaggcgcccaggcctttgcagacgacccggacatccccaagaccctcggcgtcatctttggtgtctcatggttcctcagccaggtggcccccaacctggatctccagtgagactccagggttctagacagaggccagtcttggccactcaccccacaccccgcggaccccaataaaggcttgcata

SEQ ID NO: 2942 - DNA, 535 bp, Homo sapiens
  MAP TO CHR5.1; EXPRESSED IN LUNG, SIGNAL = 1.7; EXPRESSED IN BRAIN, SIGNAL = 1.8; EXPRESSED IN HELA, SIGNAL =   4; EXPRESSED IN HEART, SIGNAL = 1.7; EXPRESSED IN ADULT LIVER, SIGNAL = 2.7; EXPRESSED IN BONE MARROW, SIGNAL = 2.7; EXPRESSED IN PLACENTA, SIGNAL = 2.2; EXPRESSED IN FETAL LIVER, SIGNAL = 2.6; SWISSPROT HIT: O76082, EVALUE 6.00e-24; NT HIT: AB016625.1, EVALUE 0.00e+00; EST_HUMAN HIT: BE830321.1, EVALUE 1.00e-124
tagcatgggcactgtgagaccgagactgtccctggcagccagtattctggcaacactgttcacacccacttactggatggatcttgagaaagccccacttggtggagcccattcctgctgcccttttccagctggttatctgtcactctccttttcttcccaggtttggccggaagaatgtgctgttcgtgaccatgggcatgcagacaggcttcagcttcctgcagatcttctcgaagaattttgagatgtttgtcgtgctgtttgtccttgtaggcatgggccagatctccaactatgtggcagcatttgtcctgggtatggccatcaggttggagttgagtacttgatcctgtatttcaccatcatcccatcacctacctttctggagacagctgtgatgtccctcaagggggacagggtttctaacaaaactagccagagcttcctggtgaaccttacttacaggcagggaaactgagccagacatgagaccagcctggggtccccagcagcacaatggcctgacttctga

SEQ ID NO: 2943 - DNA, 600 bp, Homo sapiens
  MAP TO CHR18.1; EXPRESSED IN ADULT LIVER, SIGNAL = 2.5; EXPRESSED IN PLACENTA, SIGNAL = 2.6; EXPRESSED IN FETAL LIVER, SIGNAL = 2.4; EXPRESSED IN LUNG, SIGNAL = 1.4; EXPRESSED IN HELA, SIGNAL = 2.8; EXPRESSED IN BRAIN, SIGNAL = 2.7; EXPRESSED IN HEART, SIGNAL = 1.7; EST_HUMAN HIT: BE091224.1, EVALUE 7.00e-57; NT HIT: gi14764610, EVALUE 0.00e+00
actgcaggaaagcatatgggtgtgtgtgtctctcctccctgtgattctttaaattccagctgtaattctcttctatataggtcctgatcaggtacctctcagggaagaatttgagcaaattatgctgaaagctatgcaagaatttactctgagagaaagagccctgcagataggtgctcagtgtgtccctgtgtcaccaggacaactcccctggcttgctagattaattgccagcgtatctcaagacttggttcatgtggttgtgacccagaactctttggcggagggcatttcagagaccttaaggactctcagtgaaatgagacactatcaaaggctgccagattatgtggtggtaatttgtgcatcgaaaatcagaggaaatgaattttgtgtggtagtgttaggtgagtaatttttttgttttttgtttgtttaatcaattcattcgaccatttttccatttaaaaatgtgtgttatgtgtttcaggcatccacataatcaacctctgattaattgctggagcttgggctcatcctcctaattttaactttccctttccttctcagatcaggttttgtgtagccctcagtttggct

SEQ ID NO: 2944 - DNA, 560 bp, Homo sapiens
  MAP TO CHR19.1; EXPRESSED IN FETAL LIVER, SIGNAL = 3.2; EXPRESSED IN HELA, SIGNAL = 2.7; EXPRESSED IN BRAIN, SIGNAL = 4.1; EXPRESSED IN LUNG, SIGNAL = 1.9; EXPRESSED IN HEART, SIGNAL = 1.8; EXPRESSED IN ADULT LIVER, SIGNAL = 3.6; EXPRESSED IN BONE MARROW, SIGNAL = 3.8; EXPRESSED IN PLACENTA, SIGNAL = 2.3; SWISSPROT HIT: O95897, EVALUE 8.00e-35; EST_HUMAN HIT: BI907480.1, EVALUE 1.00e-122; NT HIT: gi15302126, EVALUE 1.00e-122
gatcaagttgggaaagctgggaccagggatgagggaagactcaaaaatctggtcccaatatgttgttcagttgtgagtgaggggttagaggccaagggtcagggccatttccagcttctggactcaagtgtagccttaggtaggaaggtcaagggttgaggtttaaaagttagaggtcaaaactgtgtccagcttctaggcacaaacaggtgatactggagttgggtgtggcagtcagagatcaggggtcagggtcaagggccaaggcatacccagcttctgggcgcaggcgtggagccgggcctccagggccatcacccgttgctgcaggtcctcatacccgtaggcacccatctcctcctgaatggccgccagactgccggagagattcctcacctcctcccgcaagcgtacaatggtccgcgtgtctgccttgtactgctccaggaccgagctcaggggcaacagttccgtcatcctgtccttcagctcctgtgcatcaagatggaaccatggccaagcctgacccctggcctttgacccagacatgactccaacct

SEQ ID NO: 2945 - DNA, 592 bp, Homo sapiens
  MAP TO CHR4.1; EXPRESSED IN BONE MARROW, SIGNAL = 1.8; EXPRESSED IN HEART, SIGNAL = 0.68; EXPRESSED IN ADULT LIVER, SIGNAL = 1.6; EXPRESSED IN PLACENTA, SIGNAL = 2.3; EXPRESSED IN FETAL LIVER, SIGNAL = 1.7; EXPRESSED IN HELA, SIGNAL = 2.7; EXPRESSED IN BRAIN, SIGNAL = 1.7; SWISSPROT HIT: P40222, EVALUE 5.70e+00; EST_HUMAN HIT: D44640.1, EVALUE 0.00e+00; NT HIT: AE002293.1, EVALUE 2.20e+00
atgcctgaagagaggagacggggaggggggaggggaggggagcaaggcgcatagacaggtagtgaggacagggcagtgagtacctttctaaaagagagagatttagcgggactaaaggtctgctctgtaagctcgagcccttcgatagtttccgtacagtcagagagaggtgcatcctgaaacagtaaactgagtcaccagagcacaccaggcccagcctgtgaaatatcagctgagagcacaggatggagctggctaagagcatgcagcagggacagctgtcaacagtaagtgtggcagtgatgatggcaggacgtgcagacactgaacacgaaaccaggaccacggctggacaaatccaacaatcgtctacccctgcagagtcaggtgttaaagcattaggtggcatattagttttcagagataactacttacacaattatcttcaatgtgccacaaggtagagtcattttgtagaaatgtgtgtaaatgtgcaccacacttacaggcacccacccctctgcaacccaagcagcactttgttgcagacagcaatatgtaccagaacaagagtccctaaacccaccctctc

SEQ ID NO: 2946 - DNA, 599 bp, Homo sapiens
  MAP TO CHR12.1; EXPRESSED IN HEART, SIGNAL = 0.65; EXPRESSED IN ADULT LIVER, SIGNAL = 0.77; EXPRESSED IN FETAL LIVER, SIGNAL = 0.74; EXPRESSED IN HELA, SIGNAL = 0.52; EXPRESSED IN BRAIN, SIGNAL = 0.66; EXPRESSED IN LUNG, SIGNAL = 0.59; NT HIT: gi5032222, EVALUE 7.00e-59; SWISSPROT HIT: O33813, EVALUE 5.90e+00; EST_HUMAN HIT: AI240387.1, EVALUE 6.00e-05
agatggctcaggagtcgaagttcaccatgttgtctacatttgttctttgctcctagacatgatggaaaaaaatgctctgctgttttcttgttgcttttcatggttttagcatcatgttcctattctcgctcaaatcaataatccactgtacaaagtctggcattttgtactgaagccaagtataagaaagttttaactaatgcacgtatggggtcgctgttttaactaacacacgtatggggtcgctgttttgttgcctcgtttttttaggtgcacttttcaaggagattgtgtacattcagagaacttagaaaactggctggatatttcgtctggagcaaaaaagtgccctaaaattcagataattcgaagcagtaaagaaaaggtaagaggaaagattttaatttgtcctcgttgtattgtctcattttgcacagcggatgctaaatttcttctgtgtgtaaaatatccattagcaatcaaacatgcttagtgatagcactccattcatttagcactcattaacgaatattgagtgcccaccagatgccatccactctgcaaggtgctggggatacagcggtaaccaagtcacatca

SEQ ID NO: 2947 - DNA, 532 bp, Homo sapiens
  MAP TO CHR7.1; EXPRESSED IN LUNG, SIGNAL = 0.82; EXPRESSED IN BRAIN, SIGNAL = 0.64; EXPRESSED IN HEART, SIGNAL =   1; EXPRESSED IN BONE MARROW, SIGNAL = 0.56; NT HIT: gi16161685, EVALUE 6.00e-84; SWISSPROT HIT: P33334, EVALUE 3.80e+00; EST_HUMAN HIT: BE908284.1, EVALUE 8.00e-84
aaacagatgtgcttcctccctatgtttaggacaacttagaaaatggaccttttaccttatgaaatcttcttcctcctctctttttggcctcagctgtttgggttgagccatattcatccagtttggtagagatttcaagagtctgctgatatcatcatcttttgcccaggatgcactgatgacaagtttttcttctgactggacaatacccctaaacacagccaatagaaaagagacactgtagcatgatgcctggtattcagttagcattttcatctacctttgctgcaggaaaaaagaaatcacactcatctctcctttgaacataatccattatctaagttggagtccatgatacccattaataggtcacattactgggaaacaacatttctagatttcattcttagtttcttagttgttgagtaatcgtgacagttgaaaaaactaattagctcctcttaccatatttgatcccttaggataaataaaagcatatggtatgttttgggggggaccttttaagaaaatg

SEQ ID NO: 2948 - DNA, 516 bp, Homo sapiens
  MAP TO CHR13.1; EXPRESSED IN BRAIN, SIGNAL = 0.65; EXPRESSED IN BONE MARROW, SIGNAL = 0.57; EXPRESSED IN HEART, SIGNAL = 1.1; EXPRESSED IN ADULT LIVER, SIGNAL = 0.63; EXPRESSED IN FETAL LIVER, SIGNAL = 0.75; EXPRESSED IN LUNG, SIGNAL = 1.2; NT HIT: AF130309.2, EVALUE 1.90e+00; SWISSPROT HIT: Q07014, EVALUE 9.40e-01; EST_HUMAN HIT: BE901003.1, EVALUE 2.90e+00
gcaaagagaaagggctgatggtggaaaagattgccagaagtcagattctagacaccactgaagaacaaacatacactcattcctctaagctgatttcagagaggtcctccctgctcaggaacacatccagctcttttttcaagggtgtgattagcaggaagagatgactgcactttatgaataagaaagcttcatttgagaaacaaagatcccaccagctataactgcaataacaaccttgacattcagccgatgccagagtgtgattactctcaaggaggcttgcctagccaaatgatgacagtcacagatgggccccgcgaagggggtccagtgagatccttggtgaggtccaagcacatgaatgtgtgcacatagcatccctggatggggaactttccttcccaatagtccactgcaaaatacggtggagaatgagcatccttccaagaccaaagaggttcttggagaagaacaaaggcaattaggcagaaaagggaagttggtctttgggtt

SEQ ID NO: 2949 - DNA, 520 bp, Homo sapiens
  MAP TO CHR19.1; EXPRESSED IN HELA, SIGNAL = 1.2; EXPRESSED IN BRAIN, SIGNAL =   1; EXPRESSED IN LUNG, SIGNAL = 0.67; EXPRESSED IN BONE MARROW, SIGNAL = 0.93; EXPRESSED IN HEART, SIGNAL = 0.7; EXPRESSED IN ADULT LIVER, SIGNAL = 0.93; EXPRESSED IN FETAL LIVER, SIGNAL =   1; NT HIT: gi14758921, EVALUE 1.00e-91; SWISSPROT HIT: P35269, EVALUE 8.00e-24; EST_HUMAN HIT: BE349278.1, EVALUE 1.00e-91
gccctaaggcctcctatctgtttcctcctgaactgacagctctgagacggccgagtggggtctgccctggttacccctgagtccccagctcccagcacagggcctggtgatatatccatggcaaggcaccccatttccctcacttctgtccccagccaccacccagcccactcacctctcccactcctcctcggcctcctcggcagtgagcgtgcgatgccgggccagcggtgtgaaattgtaccagttgtgcacggggaaggcctcgaaggccccgtcggggcactgggtgaagatgtagtaggacgtgttctctgttacgcctcccttcttgatgcccttgaacctgcagggagccacggtcatggcctggcccatagggaccagccccagcccccccgtgtccccccggggcctgcctcctttatggcacttgccataggaggaagaccaagaaatgcccatgaggcctgggcaggcccttcaaccacctgggcctcgtcaatttccacatctgggg

SEQ ID NO: 2950 - DNA, 585 bp, Homo sapiens
  MAP TO CHR12.1; EXPRESSED IN PLACENTA, SIGNAL = 9.5; EXPRESSED IN HELA, SIGNAL =  12; EXPRESSED IN FETAL LIVER, SIGNAL =  10; EXPRESSED IN BRAIN, SIGNAL =  10; EXPRESSED IN LUNG, SIGNAL = 4.4; EXPRESSED IN HEART, SIGNAL = 5.7; EXPRESSED IN ADULT LIVER, SIGNAL =  11; EXPRESSED IN BONE MARROW, SIGNAL = 8.2; SWISSPROT HIT: P10357, EVALUE 5.00e-03; EST_HUMAN HIT: BE221868.1, EVALUE 0.00e+00; NT HIT: U83999.1, EVALUE 1.40e-01
taatatatgctccgcagcccaactccagaaatcgcaataaaagttaaaacctcccctactgttttttttttaattatgatatgggaaagaggagcaggatttatagagctgaactctcagtgtatgaatgtttgagacttgcgggaggaagaaaaggcaagagctcgccaaggcgagccttggtctctgagatctctcgtcggctgctggggctccggctcagcctggcagatccgctgtggcctctctgggacctcgccccggcccacggcctgacttcggctcggagatgcagcccttcccgagaacaggtgaagaagacggcggcagcggggactgggggcttcgggtgggaacgccagggctcagggctttgtgtgggtcgtgcagggggcgaggttcgaagtcctgggctggaccgcagcacgagtgtggcccggacggctgcgtggccagaaggggtgttcgggcagggtgcgagagcaccggcaaggtggattgtgtatggactttggccgcagacagagcagagcgggctcccgggctgtggccggcggcgaggcgggcaaccgcatgttgagtcta

SEQ ID NO: 2951 - DNA, 564 bp, Homo sapiens
  MAP TO CHR7.1; EXPRESSED IN BRAIN, SIGNAL = 0.82; EXPRESSED IN FETAL LIVER, SIGNAL = 0.61; EXPRESSED IN HELA, SIGNAL = 0.72; SWISSPROT HIT: O00291, EVALUE 2.00e-15; EST_HUMAN HIT: BE536401.1, EVALUE 4.00e-64; NT HIT: AF052286.1, EVALUE 0.00e+00
cagggaaggatgcagagaagagctcaacagggtgggtaagaaaagggtccctttggaaaggctacctgtctcttcgatctgtgatttgccggaaatggttgaggccacaacgccggcagtggcctggttcactccccgagaggcctgctgcagctgggctaggttggggctgtccttatcagctttcacctaccaggacaaagcagatttaggttcatacaacacctagagcaacaaggactgaatcagataattgctctgatggttcttagcaaacatatgtgggccaaacggcaatcaccaatcagcttctcaaaatctgctgactatagtcagctcctgacatatctatcatataaaaagttattcctggcttctttgcttggtggatcccaaactctaagcattatcacttatttggacaatgtgcccagttgtggaaaccaatttgggatgacaagaaataaggacaaataaagaacactctgggatactgtgaaactcttaaaaaggatttggggcacactttacatgagaatcagttgggggcattgatgatattga

SEQ ID NO: 2952 - DNA, 500 bp, Homo sapiens
  MAP TO CHR7.1; EXPRESSED IN BRAIN, SIGNAL = 0.85; EXPRESSED IN HEART, SIGNAL = 1.6; EXPRESSED IN ADULT LIVER, SIGNAL = 1.4; EXPRESSED IN FETAL LIVER, SIGNAL = 0.97; EXPRESSED IN LUNG, SIGNAL = 1.8; EXPRESSED IN HELA, SIGNAL = 0.73; SWISSPROT HIT: Q09461, EVALUE 2.40e-01; EST_HUMAN HIT: AI692194.1, EVALUE 9.00e-56; NT HIT: gi10047121, EVALUE 6.00e-56
ttttcctttgtcccgttgtccttgtcaggttttggaattatagtcctactttattgatgcatagttttttttgtttataggactactagaatattactgagaattttgcattaaaaaaagaaatcccaccctagtgggtgtctaagtagaaagcaaggtatgtcaaggttagaatttgtctatcccctgaatatataacctcataactcttttattaaagtccacattttatttctaaatatgtgttcatttcattctctgtttttatagcaatgtactggtataactatgaaattttaaagaagtggttatgtgagaaatctggtttatatgagccaacatttatgatcaactttacttcaggggcattgtctggttctgtaagtttattcttttgttgttaatattccagaagaataattgttgtattaaaacaaaacaaaatatagcatctcatgtatattgagatccactttggctgcactgcttgaaaatttgtc

SEQ ID NO: 2953 - DNA, 589 bp, Homo sapiens
  MAP TO CHR2.1; EXPRESSED IN FETAL LIVER, SIGNAL =   2; EXPRESSED IN LUNG, SIGNAL = 0.69; EXPRESSED IN HELA, SIGNAL = 2.3; EXPRESSED IN BRAIN, SIGNAL = 1.9; EXPRESSED IN HEART, SIGNAL = 0.71; EXPRESSED IN BONE MARROW, SIGNAL = 1.9; EXPRESSED IN PLACENTA, SIGNAL = 2.2; NT HIT: gi13638071, EVALUE 2.00e-99; EST_HUMAN HIT: AI626062.1, EVALUE 8.30e-01; SWISSPROT HIT: O95754, EVALUE 1.00e-30
tgtgtggctctctgtccttgcatttgtatgtatctgtctccccatctgtctgtctgccctgaagtcagggaggaaacttaaattggtctccatgctccttgcccaatgatgatcatctaaagagaacctcccatgtgtttgtcaccccagggggacctcgggggccggaagaccctccagcagagatggacgacgtttttgaaagctgacctgctctgtccagggcctgagcatggccgggcctccagtgtcctgcaggatgttgctgtgcttcgacctgagcttggggcagggactcccatcttttatggcatcttttcttcccagtggtgaggggtcttggtgtggaggagagttacagggtgggagatatgtggggttggcacaatgtcagtgttgtctcttccagagggggcaggctctcccgcctttggctgcatggctccctgtgcgtttctcgggggtcatctcatttgacaagggatgagttgctatcccccagacccctccatatatccagctccaacctgtgaattccagggagggggctactatctctgctgtctgtgccttccgaccacaagacatt

SEQ ID NO: 2954 - DNA, 575 bp, Homo sapiens
  MAP TO CHR16.1; EXPRESSED IN HELA, SIGNAL = 1.9; EXPRESSED IN BRAIN, SIGNAL = 1.6; EXPRESSED IN BONE MARROW, SIGNAL = 1.8; EXPRESSED IN HEART, SIGNAL = 1.1; EXPRESSED IN ADULT LIVER, SIGNAL = 1.8; EXPRESSED IN PLACENTA, SIGNAL = 1.6; NT HIT: gi14776737, EVALUE 0.00e+00; EST_HUMAN HIT: BG341224.1, EVALUE 0.00e+00; SWISSPROT HIT: Q9P2Y4, EVALUE 3.00e-06
tttgcgggaaaataaaccactggtcccagagcagaggaaggctacttgagccggacaccaagcccgcctccagcaccaagggcgggcagcaccctccgaccctcccatgcgggtgcacacgaagggtgaggctgacacagccactgcggagtccaggctgctagaggtgctcatcctcactgccgtcctcaggtgggttcgggcttcaccgcctggccctctgtggtcacagaggggctcggtggcccaggtggtggttccgcctccaggggcagggccttgtcctgggtctgtgtcagcgggtgcaccatggacatgtgtacattgaggttgtgggccttctcaaaccgccggccacactggtcacaggcaaagtccagctcagtctcagccttgtgtttggtcatgtggtacttgagggatgcccgctgcctgcactggaacccacagacctcacacctgggggacagaggcagataagaaggtgcgagggccacagccctgggagggggtcctgactcacacttactgcaaaggcttggctcccgaatgtcgcatttggtggacgagaaggt

SEQ ID NO: 2955 - DNA, 522 bp, Homo sapiens
  MAP TO CHR17.1; EXPRESSED IN LUNG, SIGNAL = 1.2; EXPRESSED IN BRAIN, SIGNAL = 0.7; EXPRESSED IN HEART, SIGNAL =   1; EXPRESSED IN BONE MARROW, SIGNAL = 0.61; SWISSPROT HIT: Q01202, EVALUE 2.10e+00; NT HIT: X80388.1, EVALUE 5.00e-01; EST_HUMAN HIT: T50232.1, EVALUE 4.70e-02
cctaaaggtctgcaaggctgatgggtcatttatacctgagtgttgcatagagattgggaaacctgggggtagtgtaaaaagaattaagtttgcttggggaaggacttttttgtgtgtcatccagtctagctggagaacaagtgggagggtagaatgaggtccagatggtctcttcccgagctgaaactcccccatgacggggcctgactctaggtgcagatgattgtgaatgagttcaaggcatccactctgaccattggctggcgagcccaagagatgtcagagaagctgctggtacgcattagtggcaaacgggtatacagggacctggaatttgaagaggaccaaagagagcatcgggcagctgtacagcagaaattgatgaacctgcaccaggatgtggtgaccatcatgaccaactcctatgaggtcttcaagaatgatggtcctgaggtagggttcctgtggccaggatgttgtggttggaaaaaccacagtcccccagttccatcaggccattct

SEQ ID NO: 2956 - DNA, 599 bp, Homo sapiens
  MAP TO CHR7.1; EXPRESSED IN PLACENTA, SIGNAL = 1.4; EXPRESSED IN HELA, SIGNAL = 0.97; EXPRESSED IN BRAIN, SIGNAL = 0.67; EXPRESSED IN LUNG, SIGNAL = 0.94; EXPRESSED IN BONE MARROW, SIGNAL = 0.68; EST_HUMAN HIT: AA523622.1, EVALUE 0.00e+00; SWISSPROT HIT: P42575, EVALUE 5.90e+00; NT HIT: gi16161685, EVALUE 1.00e-121
ggaactgcctgcatgttaatgagattcaccatctctcatatccaaagctaaccgtttttttttttaattttccttaaagatcttaaggaacttccattatccaactacattaaatctaaatttccctagtgcctatttattttcttttgttttgtccctgatgaatatggaaacagatggtaattcttcttttttaaatttatgacacttgccaagtcaatgaaaattgctgataaaaatagtaagttcaaagtgtattattacctgtaggagaggccgctgcactcccagcaccttcatggtgtctgcgttggccagaatcttcaaagggtcagatgttttagtgactccttcaatctccttgttgatctcagccaagacttgattgagaaagatgtttttgatgtacacggtgagaaactctcgaagaggacactgtttggctgggccaagacccagagcatgctcaatctcctgaataaatctggaggacaaacagtaagaaggttattaaatttatgaggaaaatgttatataaatacgacatgaggacatgagtatatctagtgttggctatttctgtgaagagggcaggtcat

SEQ ID NO: 2957 - DNA, 536 bp, Homo sapiens
  MAP TO CHR13.1; EXPRESSED IN HEART, SIGNAL = 0.68; EXPRESSED IN BONE MARROW, SIGNAL = 0.49; EXPRESSED IN HELA, SIGNAL = 0.39; EXPRESSED IN FETAL LIVER, SIGNAL = 0.59; EXPRESSED IN LUNG, SIGNAL = 0.72; EXPRESSED IN BRAIN, SIGNAL = 0.44; EST_HUMAN HIT: AA765738.1, EVALUE 6.00e-97; SWISSPROT HIT: P51587, EVALUE 2.00e-31; NT HIT: X95172.1, EVALUE 0.00e+00
aggatcatttttgccgtagggaaatagaattattaatagtttgaggcacctgagaatattatgtgagaaactgattacattaaccacacccttaagatgagctctaattttgttgtatttgtcctgtttaaagccatctagttacaatagatggaacttttttgttctgattgctttttattccaatatcttaaatggtcacagggttatttcagtgaagagcagttaagagccttgaataatcacaggcaaatgttgaatgataagaaacaagctcagatccagttggaaattaggaaggccatggaatctgctgaacaaaaggaacaaggtttatcaagggatgtcacaaccgtgtggaagttgcgtattgtaagctattcaaaaaaagaaaaagattcaggtaagtatgtaaatgctttgtttttatcagttttattaacttaaaaaatgaccttactaacaaaatgattataaatccagataaagtataaagttagtttatatcagagaagcaaaatccactactaatgccc

SEQ ID NO: 2958 - DNA, 514 bp, Homo sapiens
  MAP TO CHR17.1; EXPRESSED IN HEART, SIGNAL = 2.2; EXPRESSED IN LUNG, SIGNAL = 2.3; EXPRESSED IN BRAIN, SIGNAL = 2.3; EXPRESSED IN BONE MARROW, SIGNAL = 2.3; EXPRESSED IN ADULT LIVER, SIGNAL = 2.1; EXPRESSED IN FETAL LIVER, SIGNAL = 2.8; EXPRESSED IN PLACENTA, SIGNAL = 2.3; EXPRESSED IN HELA, SIGNAL = 2.8; SWISSPROT HIT: O43502, EVALUE 2.00e-25; EST_HUMAN HIT: AI198187.1, EVALUE 0.00e+00; NT HIT: gi14769861, EVALUE 2.00e-89
gacatttctgttgccttggggagtatatttacatttataaaactttagtgatacctaacttgtcattatctggagttcaaaaacactaccttagatcatcatcatgatttggttgtttgtcatctttctgttgacagtatgcagttggcagtagatgtgcagataccagaatgttttggaggagtggcaggtgaagcagtttttattgatacagagggaagttttatggttgatagagtggtagaccttgctactgcctgcattcagcaccttcagcttatagcagaaaaacacaagggagagggtaagttagtaaatgatcttctttttttctgtattaataaaagtaatttgcatttgtgcccatctgagacctcagcaacactccatttggaatgtgaagcctaattactggacagttaactagtgttaaactcttttactactgttacaaaatgagaaatgccacagcctggactggcttttttttgttccccttttatggccctcactt

SEQ ID NO: 2959 - DNA, 527 bp, Homo sapiens
  MAP TO CHR5.1; EXPRESSED IN LUNG, SIGNAL = 0.84; EXPRESSED IN HELA, SIGNAL = 1.2; EXPRESSED IN BRAIN, SIGNAL = 1.4; EXPRESSED IN BONE MARROW, SIGNAL = 1.5; NT HIT: gi14781269, EVALUE 1.00e-100; SWISSPROT HIT: O76082, EVALUE 2.00e-22; EST_HUMAN HIT: AA428395.1, EVALUE 1.00e-100
agctccatctttgtccatgcccaaatattaggacatttgaagagaaaatgctattttgggaatatatttatgttaataaaagtactcccactgaagcaaaaaggacaataaaaataactgatataagaaagtatcacttctaaaagcaccattgtttataccgggtctcttttccagattattacttcttatccattggtctggtcatgctgggaaaatttgggatcacctctgctttctccatgctgtatgtcttcactgctgagctctacccaaccctggtcaggaacatggcggtgggggtcacatccacggcctccagagtgggcagcatcattgccccctactttgtttacctcggtgagctgcatcttgtgcatttgttcttcctttaaattagttttcaatgtaaaagtaagattttcattgtgaaaacgtcaaatagcatagaatgtactggaaaaaagtacaagttcacctctcctctcccaggaggagctctagaaagccaatcacaaactggtgag

SEQ ID NO: 2960 - DNA, 584 bp, Homo sapiens
  MAP TO CHR6.1; EXPRESSED IN LUNG, SIGNAL = 1.5; EXPRESSED IN HELA, SIGNAL =   3; EXPRESSED IN BRAIN, SIGNAL = 3.3; EXPRESSED IN ADULT LIVER, SIGNAL = 1.7; EXPRESSED IN BONE MARROW, SIGNAL = 3.5; EXPRESSED IN HEART, SIGNAL = 1.7; EXPRESSED IN FETAL LIVER, SIGNAL = 2.7; EXPRESSED IN PLACENTA, SIGNAL = 3.3; NT HIT: gi14782528, EVALUE 0.00e+00; SWISSPROT HIT: P31695, EVALUE 3.00e-49
ggagacaggggtgttagcagacattggggtgtctggactaccatccaggacttgactaagctcattgctccacagctgcccccacttagcaaccaaagccctagagggcacaaaatatggggaattctttctagggtgaagaaaagagtcaggttttagggaggtcctgagtccccctctccttaccccacagtccagcctatgaccagtactgccatgatcacttccacaacgggcactgtgagaaaggctgcaacactgcagagtgtggctgggatggaggtgactgcaggcctgaagatggggacccagagtgggggccctccctggccctgctggtggtactgagccccccagccctagaccagcagctgtttgccctggcccgggtgctgtccctgactctgagggtaggactctgggtaaggaaggatcgtgatggcagggacatggtgtacccctatcctggggcccgggctgaagaaaagctaggaggaactcgggaccccacctatcaggagagagcagcccctcaaacacagcccctgggcaaggagaccgactccctcagtgctgggtaagaa

SEQ ID NO: 2961 - DNA, 587 bp, Homo sapiens
  MAP TO CHR6.1; EXPRESSED IN HEART, SIGNAL = 2.6; EXPRESSED IN ADULT LIVER, SIGNAL = 4.4; EXPRESSED IN HELA, SIGNAL = 3.1; EXPRESSED IN BRAIN, SIGNAL = 4.2; EXPRESSED IN BONE MARROW, SIGNAL = 4.4; EXPRESSED IN FETAL LIVER, SIGNAL = 3.5; EXPRESSED IN PLACENTA, SIGNAL =   3; EXPRESSED IN LUNG, SIGNAL = 2.5; NT HIT: gi4809281, EVALUE 1.00e-108; EST_HUMAN HIT: R67103.1, EVALUE 3.00e-99; SWISSPROT HIT: P22004, EVALUE 1.00e-17
tttctggaaacacaggctccccacaaacccacctgaagcactggagacccgcgccacgtcctgggactgggtagagcgattacgactctgttgtcggcgccggctggaggctgacctggtggtgcgcacgtggacctcactcactttgaagaaagccaccatgaagggctgcttatcgtaagggccgtctctgcccaccaggcctgcggctcgggggtggacgtggactcctttaatgcaaatcaaagcatgcatctctttattccacagaaacttgttcctgtagctacaacagttaagggatacttcctagtttcctaagtgctaatccttaagaatgagtgtgaagaagaagatcatgtatccccaaaccttgcctggcacccatgggatggcatcttttggcagaatcaaagcactcctttcaaagtttcagaatcacatgaaggagtggcgtgaactcctgggctctcctgtttctgctagattatgaatctgcagttaccctgccctccctggtggacagatcagcagtggggacctcaagctgctggctctgatgctgcaggaggagtgggtactgcaaa

SEQ ID NO: 2962 - DNA, 585 bp, Homo sapiens
  MAP TO CHR7.1; EXPRESSED IN HEART, SIGNAL = 6.4; EXPRESSED IN FETAL LIVER, SIGNAL = 5.9; EXPRESSED IN BONE MARROW, SIGNAL = 7.1; EXPRESSED IN ADULT LIVER, SIGNAL = 4.9; EXPRESSED IN PLACENTA, SIGNAL = 4.1; EXPRESSED IN LUNG, SIGNAL = 4.5; EXPRESSED IN BRAIN, SIGNAL =   7; EXPRESSED IN HELA, SIGNAL =   4; NT HIT: AB033111.1, EVALUE 0.00e+00; EST_HUMAN HIT: BF568251.1, EVALUE 0.00e+00; SWISSPROT HIT: Q9UDV7, EVALUE 3.00e-46
gatcacttccttgggaagccccagttgggatgtgcttaccttgggaacttctccattgctgccggggggcagccgcaggatccagaaatttctgtttttcagcaggttctccatgttctccagccgcctctgcagcagcccatactcctgcagcagggtccccaacacgacccacttgctctccagatggttcgcgaactccacggctgtcttctcgcagtcggctatcttcttttcatttgtccccgtcctgccttccagggtcagtagcctcatggcctgggcctccagcttcctctccactgcttggacggcagcccacacagccaagcgggtgatctctgccgtggggagcggctgttccttctggactgcagaagagatctggaaaggggtgtccttttgggaaaccgggctctggagcagcgggtccatgtcagtctcgggaactgttggggaaagggtcagggggtctttctcaggagcttcaggggagtgaacgggggcttcctggtggtggggggagtgggagagaagggagacttcttgttcagcagcagctgggggtggatactgggtcccttc

SEQ ID NO: 2963 - DNA, 588 bp, Homo sapiens
  MAP TO CHR19.1; EXPRESSED IN ADULT LIVER, SIGNAL = 0.57; EXPRESSED IN BONE MARROW, SIGNAL = 0.8; EXPRESSED IN FETAL LIVER, SIGNAL = 0.74; EXPRESSED IN HELA, SIGNAL = 0.64; EXPRESSED IN BRAIN, SIGNAL = 0.89; EXPRESSED IN HEART, SIGNAL =   1; EST_HUMAN HIT: BE855571.1, EVALUE 0.00e+00; SWISSPROT HIT: Q05469, EVALUE 4.00e-83; NT HIT: gi11525931, EVALUE 0.00e+00
cggaggacaacatagccttcttctcgagccagggtcctggggaaacggcccagcggctgtcaggcgtttttgccggtgtacgggagcaggcgctggggctggagccggccctgggccgcctgctgggtgtggcgcacctctttgacctggacccagagacaccggccaacgggtaccgcagcctagtgcacacagcccgctgctgcctggcgcacctcctgcacaaatcccgctatgtggcctccaaccgccgcagcatcttcttccgcaccagccacaacctggccgagctggaggcctacctggctgccctcacccagctccgcgctctggtctactacgcccagcgcctgctggttaccaatcggccgggggtactcttctttgagggcgacgaggggctcaccgccgacttcctccgggagtatgtcacgctgcataagggatgcttctatggccgctgcctgggcttccaggtgagccccctgccccgtgcccctctgggcccacaatgaaggcacctggtggcccctggcctggcctatagtatggtaaagtaaccagtggtcagcattatcggactcagca

SEQ ID NO: 2964 - DNA, 579 bp, Homo sapiens
  MAP TO CHR7.1; EXPRESSED IN LUNG, SIGNAL = 0.65; EXPRESSED IN ADULT LIVER, SIGNAL = 2.6; EXPRESSED IN BONE MARROW, SIGNAL = 0.71; EXPRESSED IN BRAIN, SIGNAL = 0.69; NT HIT: gi11967996, EVALUE 6.00e-87; SWISSPROT HIT: P34535, EVALUE 2.00e-06; EST_HUMAN HIT: W46782.1, EVALUE 1.00e-86
cgttgatcttcacaaaaaccctaacaggaagatgatactatcactgtattacagataaggaagctaaggcttaatgaaggaattttgcacaaagtaggggatcaataatttgacctctaaggttttacaaatttgggaaactaaatagctgaagatgtaatattaactcaaatgtcaaaattatttagtagaaagaggaaaaaatacccataaacctcaggattacctagggccttgaaaagttcttctcgaactgcagaggtgaattttcggaccagacacaatgttgtcacaatagcaaaaagcaaattgtaggataatacaatatagaaatttcccagccaattaaaccttccaaagtcgccaagtagatcaaatctagtgattcctgttaaaaataaataaaatagcccttaatgaaatcaggttaagacatatttagtgtgctacaagtaaagtacaagttagatcgaattctatggactttctcacttctgtgacgtgagatgctctaatgaataaatcctaatttaaaatatgtaactattatctagtgggacagcctcaagccagacctaa

SEQ ID NO: 2965 - DNA, 562 bp, Homo sapiens
  MAP TO CHR7.1; EXPRESSED IN LUNG, SIGNAL = 0.67; EXPRESSED IN HELA, SIGNAL = 0.86; EXPRESSED IN BRAIN, SIGNAL = 1.5; NT HIT: M96859.1, EVALUE 2.00e-83; SWISSPROT HIT: P42658, EVALUE 1.00e-29; EST_HUMAN HIT: AI370936.1, EVALUE 4.00e-83
ttgagctttggttaatggggttttcctgtgctggacttagtcatcagcatcagacatttcttgagcccccatggaatggaagcatgtgcagaacacagtgaaggttcctcaaaggttgtagcagataaggggctctgcagggactcgtttctttcctggccacctcatgttcctgctggtgcagctccaatttccactcacttgttactattcacatttctctactctgttttcccttagaggagattttgaagacacacatcgcacactggtggtctccggatggcacgagactcgcctacgccgccatcaatgattcccgtgtccccatcatggagctcccaacttacaccggctccatctaccccaccgtgaagccctaccactatcccaaggtaggcaaagggacaccgcacagcaaattctttatattattcatgaacaccccaaccctgctcactcagtgtgcagacgtgatcatcagacatgtgtatgagcaaagcagttaacacaagaaagactaatcatgtctcattacattgcattacattcccgcctctgt

SEQ ID NO: 2966 - DNA, 506 bp, Homo sapiens
  MAP TO CHR1.1; EXPRESSED IN LUNG, SIGNAL = 2.4; EXPRESSED IN HEART, SIGNAL = 2.4; EXPRESSED IN ADULT LIVER, SIGNAL = 4.1; EXPRESSED IN BRAIN, SIGNAL = 4.4; EXPRESSED IN HELA, SIGNAL = 3.1; EXPRESSED IN BONE MARROW, SIGNAL = 5.1; EXPRESSED IN FETAL LIVER, SIGNAL = 3.8; EXPRESSED IN PLACENTA, SIGNAL = 3.7; NT HIT: gi13626319, EVALUE 9.00e-49; SWISSPROT HIT: Q60596, EVALUE 2.10e+00; EST_HUMAN HIT: AA642831.1, EVALUE 9.00e-53
gggtcttctcccctctgaaggaaattctaacagcaggccttaggatgaaagtagaggaaacgtgcttcagttaaggttttctccagggaaaagaaatcggcccagcaagatgcacagagcaccgttacgaccacgcacaccgaaggtcgcacacgacccttttcctgtataacagtgccagcctgccgacgaccaggagcgcagctttcactattgtgttagccccggcggcggaaggactgagcctcactgcaacgttaaagagtccttctttgttcagccccagtcggggacgcagggcgcggtgttcctccgcgctcgccgcgcagtccctgcccccccgcggctttggagagctgccattcggcaccggagtcgctccgcgctcccagaatgcaccggcagtccgcgggaaaccaaaatggcgaggggctgtattgaagtgggctgtgtttgaggccggtgtaagaacgctcattctacccccaacccttgtctccaaggac

SEQ ID NO: 2967 - DNA, 536 bp, Homo sapiens
  MAP TO CHR16.1; EXPRESSED IN BRAIN, SIGNAL = 0.61; EXPRESSED IN BONE MARROW, SIGNAL = 0.65; EXPRESSED IN HEART, SIGNAL = 0.72; EXPRESSED IN LUNG, SIGNAL = 0.65; NT HIT: gi14779804, EVALUE 1.00e-106; SWISSPROT HIT: O82922, EVALUE 3.40e-01; EST_HUMAN HIT: AU135447.1, EVALUE 5.00e-73
ttttctgttttctgttttcatgtttctattataggctgtgtgtctcagcacttgctatggatagctttgcagagggggtgggagctgtgtatggcatgtttgatggagaccgaaatgaggagctcccgcgcctgctgcagtgtacgatggcagatgtgcttttagaagaggtacagcagtcaactaatgacacagttttcatggctaacaccttcttggtatctcacaggtaagcaggtgggttgaaaaatccctaactcagttctacttttggaaaatatatttttctaaaccagaaggtcagggtctaaattatggatacaggatcaaggagagaactcacgttgttgtcttctatgatcattctctatatgagcatggagtgcggggacttcggctctttcaaaagcctgtgggggtcatctgttttctctgttgaatccaaaggctgctgaggatctgggaagcccagaatttatgtgcaaaatgttgtgtgtgtatatatatgtggttgtacattttgaggaggaaggtgg

SEQ ID NO: 2968 - DNA, 502 bp, Homo sapiens
  MAP TO CHR7.1; EXPRESSED IN BONE MARROW, SIGNAL = 0.58; EXPRESSED IN FETAL LIVER, SIGNAL = 0.53; EXPRESSED IN LUNG, SIGNAL = 0.64; EXPRESSED IN HELA, SIGNAL = 0.51; EXPRESSED IN BRAIN, SIGNAL = 0.62; EXPRESSED IN HEART, SIGNAL = 0.77; NT HIT: AF260225.1, EVALUE 7.40e+00; EST_HUMAN HIT: BE146746.1, EVALUE 7.00e-41
atctagttgctgccattgggttgactcgccctgcctctctctgtgtggtggttttcctcataatgtatattccattagcacagtgaagattgagttcagtccaccagaggggttaatttcaggattttaagtgcttttgaagattggtccccaattgactttctttcagcacctctactctgattcaggcttttctgaatatcttcctttcatagtagttcaggtatcttgattcattgaagtttatagttgcagtttttactgaggggtatatatatatattttactgttgtcgaccttgttggttgtcagattatttctttgcttggaactaattttaaaatcaattagagatctctcccttcatctttctcttttatttatgagatactgattgcagagctacctacactgtgtttagataaattactttttttttttttttttttttttacataacatttatattcaaggcaagtttagtgcagtcatccagtgcttc

SEQ ID NO: 2969 - DNA, 558 bp, Homo sapiens
  MAP TO CHR17.1; EXPRESSED IN LUNG, SIGNAL = 0.99; EXPRESSED IN BRAIN, SIGNAL = 0.65; EXPRESSED IN HEART, SIGNAL = 0.82; EXPRESSED IN BONE MARROW, SIGNAL = 0.78; EST_HUMAN HIT: BI333114.1, EVALUE 2.00e-93; NT HIT: gi14786067, EVALUE 2.00e-93; SWISSPROT HIT: P42229, EVALUE 1.00e-26
ccttcttgccctagtttcccttcttaccctagtttggggtttggggtttggggtctgtagtattggtgtttcctaatgcctgtggtcttctcccatcctctcttccccgagttatttccattccatctgtctccagtgcagctctccggctgggatcctggttgacgccatgtcccagaagcaccttcagatcaaccagacatttgaggagctgcgactggtcacgcaggacacagagaatgagctgaagaaactgcagcagactcaggagtacttcatcatccagtaccaggagagcctgaggatccaaggtgaggcgcggtggaggcagtgtgcatccggagggtgggagtgaggaacattctatggactcctagagggtagagctgggtcagtgtccatctcctcagcactttgcccaaagcctggtagaagcaatggctcccggtgattgagcccctgccgtgggtcacacttggcacacattatttaattcaaccctctcaacaagcctatgaagtgaacagttgtgttatccccccttttgcagatggtaaa

SEQ ID NO: 2970 - DNA, 584 bp, Homo sapiens
  MAP TO CHR19.1; EXPRESSED IN PLACENTA, SIGNAL = 1.7; EXPRESSED IN FETAL LIVER, SIGNAL = 1.9; EXPRESSED IN LUNG, SIGNAL = 2.3; EXPRESSED IN HELA, SIGNAL = 2.7; EXPRESSED IN BRAIN, SIGNAL = 2.1; EXPRESSED IN HEART, SIGNAL = 2.6; EXPRESSED IN ADULT LIVER, SIGNAL = 1.7; EXPRESSED IN BONE MARROW, SIGNAL = 1.7; SWISSPROT HIT: Q9ZCI1, EVALUE 1.00e-03; EST_HUMAN HIT: BG744165.1, EVALUE 0.00e+00; NT HIT: AF361481.1, EVALUE 0.00e+00
aacaagtcggacctgctgtccccggagggcccaggtcccggtcctgacctgcccccgcacctgctgctgtcctgtctgacgggagaggggctggacggcctcctggaggcgctgaggaaggagctagctgcagtgtgagccccctcccactcccagcctcccctgacccacagtttaagtgtgggtccctcaacttcaatttctgaacctacaaaatgggtacaaccatttccccttcaagggatggttgtaaaaggtcgggagagaccatgtctcttgtctcttccaggtgtggggacccgtccacagatcccccgctgctgacccgagcaaggcaccagcaccacctccagggttgcctggatgccctcggccactacaagcagtcaaaagacctggccctggcggcagaggcgctgcgggtggcccggggtcacctgacccggctcacaggtggagggggtaccgaggagatcctggacatcatcttccaggacttctgtgtgggcaagtgacgggatccagggaagtcgcacccaagctgcgtggagacccaggagcctcgggggatctggaaacagttt

SEQ ID NO: 2971 - DNA, 516 bp, Homo sapiens
  MAP TO CHRX.1; EXPRESSED IN BRAIN, SIGNAL = 0.87; EXPRESSED IN HEART, SIGNAL = 0.9; EXPRESSED IN BONE MARROW, SIGNAL = 0.78; EXPRESSED IN FETAL LIVER, SIGNAL =   1; EXPRESSED IN HELA, SIGNAL =   1; EXPRESSED IN LUNG, SIGNAL = 1.1; NT HIT: gi14764091, EVALUE 1.00e-125; SWISSPROT HIT: Q93008, EVALUE 3.00e-40; EST_HUMAN HIT: AU133527.1, EVALUE 1.00e-125
tgcttgtgacttcgacttccaggaaacacaatttatttgtaaacatctcatcatttagaaagaaagctgtgcaattacctgactagaaggtccaggagaggcaaaaggtgaaggacatggcccatcttgcaaggaaaaatgtgcaataaagactataagttttgcaaacgcacccctcacttctgcactagggcactccagaaggtattcggagaagcgatttgaaacattaaaaaggacgttatgagcaaaccaaaaacgtacattcttgctgtgacgaaggagaatacacaatgcatcatacctaaaataaaacaaaaaaacctatgactattaagtcaataacttgttctctatagtaaaaggatgagtctcattgaaccaaaaaaaaaagacaaagatcttcctctactgctggagagaaccagcaaaggttgcttctaatattaaaacaatagataaatactatgacttggtctattctctcagagttaccaaacaggtgaaagcttgtcc

SEQ ID NO: 2972 - DNA, 515 bp, Homo sapiens
  MAP TO CHR19.1; EXPRESSED IN PLACENTA, SIGNAL = 4.7; EXPRESSED IN FETAL LIVER, SIGNAL = 1.3; EXPRESSED IN HEART, SIGNAL = 1.5; EXPRESSED IN LUNG, SIGNAL = 1.6; EXPRESSED IN BRAIN, SIGNAL = 1.3; EXPRESSED IN HELA, SIGNAL = 1.4; EXPRESSED IN BONE MARROW, SIGNAL = 1.1; EXPRESSED IN ADULT LIVER, SIGNAL = 0.82; NT HIT: gi14766010, EVALUE 1.00e-119; SWISSPROT HIT: Q96348, EVALUE 5.00e-33; EST_HUMAN HIT: AL514538.1, EVALUE 1.00e-119
tctgtgggtacaagggaagccccagcagctgcaggccctgcggccccacaagccaggtgctcgcggcccaggcccccttcctgcactcggcagctccctaggcccacgcaccttgaggccggagccaatgaggaagtccacaagcacggacttgactttggtctggcctgacttgaagtcatctccgcccacaaaaacccggtgctgccacgcgagctcaagagctccgggcaccagggtgttctgcggagacccattgaggaaggcacagccctccaggatgctggccacggcgaagagcgtggagggcgacacctccagaccgagctgtgggcaaggcgggcagtcagcacagagctgtgtctgtgactggccctgcctgacccgctccacccgggcgttcgcccacctcaatggtgcgcagcaggttctcggctgtgtcgttgaggcctggaatcacctcacagaagcgctccgtgttcgccgtccacagcactatgactttgtccagcccc

SEQ ID NO: 2973 - DNA, 524 bp, Homo sapiens
  MAP TO CHR14.1; EXPRESSED IN HEART, SIGNAL = 0.89; EXPRESSED IN BONE MARROW, SIGNAL = 0.57; EXPRESSED IN ADULT LIVER, SIGNAL = 0.6; EXPRESSED IN LUNG, SIGNAL = 0.84; EXPRESSED IN HELA, SIGNAL = 0.66; EXPRESSED IN BRAIN, SIGNAL = 0.55; NT HIT: gi6005809, EVALUE 4.00e-94; SWISSPROT HIT: O18964, EVALUE 7.90e-02; EST_HUMAN HIT: AL582504.1, EVALUE 6.00e-94
ccctgacatttctagacggcatcccccaagacttagggccctggttcggaagtcccaggccagctacaagccacgccccctgaggccccgtcctgaaccaccccctagcccgcccctccctgtgcggcccgcagcaggtgctgttcccactgccgacgcctctgtccgtgttcgcgctgctgaccgggccaggctctgagctgcccgctgtgtgcatcggcgtgagccccgggcggccggggaagtcggtgctcttccacacggtgcgctttggcgcgctctcttgctggctgggcgagatgagcaccggtgagtggggcggagtcttgctgagggcggggcttatcagatccggaggggcggagctggaggcggggcttcgcttagcctgaggcactacgggactgagaaagggctggaagggcggagaagggagaatggcaggttttagttaactggggagattgatgatggggtgggaccgggatggtgggcggggtttagcccacttgcttgtgaactga

SEQ ID NO: 2974 - DNA, 555 bp, Homo sapiens
  MAP TO CHR19.1; EXPRESSED IN BRAIN, SIGNAL = 0.31; EXPRESSED IN HEART, SIGNAL = 0.64; EXPRESSED IN BONE MARROW, SIGNAL = 0.37; EXPRESSED IN FETAL LIVER, SIGNAL = 0.3; NT HIT: gi13652274, EVALUE 7.00e-22; SWISSPROT HIT: P52737, EVALUE 2.00e-69; EST_HUMAN HIT: BG531250.1, EVALUE 3.00e-25
tgcactcgaaagcctgtaaggaaactgaagggttttccacattctttacattcatagggtttctctccagtatgaattcgttcatgtatatgaatataactggaactactgaaggctttaccacactgtttacattcataaggtttctctccagtgtgggttctttcatgtatctggaaacctgcaagagtaatgtatgttttcccacattttttacattcatactgtttctttgcagtgtgcatcctttcatgtcttcgggcagaactgcaacaataaaaggctttcccacattccttacatttgtagggtttctctccagtatgagtcctttcatgtctttgagctgagtagtagtatctaaatgcttttccacattttttacactcaaagggtttatctccagtgtgagtactttcatgtgcttgaaaacctaaaggagacaagtaagttttcccacacagtttacattcatagtgtttctgtgcagtgtgattcctctcatgtttttgagcagtacaatggtaactgaaggctttcccacattccttgcat

SEQ ID NO: 2975 - DNA, 597 bp, Homo sapiens
  MAP TO CHR2.1; EXPRESSED IN BRAIN, SIGNAL = 1.7; EXPRESSED IN LUNG, SIGNAL = 1.4; EXPRESSED IN HEART, SIGNAL = 1.6; EXPRESSED IN ADULT LIVER, SIGNAL = 2.5; EXPRESSED IN BONE MARROW, SIGNAL =   2; EXPRESSED IN PLACENTA, SIGNAL = 1.6; EXPRESSED IN FETAL LIVER, SIGNAL = 2.3; EST_HUMAN HIT: BG104295.1, EVALUE 1.00e-79; NT HIT: Z46604.1, EVALUE 0.00e+00; SWISSPROT HIT: P52789, EVALUE 6.00e-25
attcctggagggacttggagttttaagtctcggttggttcctggaagaattttgcccaaaattaatagtggcccttcctttctctgcagaacacggagagttcctggctctggatcttggagggaccaacttccgtgtgctttgggtgaaagtaacggacaatgggctccagaaggtggagatggagaatcagatctatgccatccctgaggacatcatgcgaggcagtggcacccaggtatgacccttctctcagggcagcccctggtgacaaaaaacttccttggcatgttctttctgtactttctccagccgctcccagcgtgtggataggcagtcacccaagacactcatggatgccagcacagctgtaagggctccctctcagccggagctcaggctgttctggttgtattttatacccaacatgtactcagtattaaaaggagtgactagagaagaagcatgaaatccaagtaagacgctgttcagtgttgtcacatctcgggcctcagggcttggaagaggtcaagccctctgattcgtggtcggctgttccctctcccacacaaggctccctcctgggaaaggaatttc

SEQ ID NO: 2976 - DNA, 573 bp, Homo sapiens
  MAP TO CHR12.1; EXPRESSED IN ADULT LIVER, SIGNAL = 0.96; EXPRESSED IN HELA, SIGNAL = 1.2; EXPRESSED IN FETAL LIVER, SIGNAL = 0.96; EXPRESSED IN LUNG, SIGNAL = 0.99; EXPRESSED IN BRAIN, SIGNAL = 0.94; EXPRESSED IN HEART, SIGNAL = 1.3; NT HIT: AF250226.1, EVALUE 2.00e-84; SWISSPROT HIT: O43306, EVALUE 2.00e-27; EST_HUMAN HIT: AI804119.1, EVALUE 0.00e+00
agggtacatggcttcaccaggtaccttgcaaccctttccctccttggttaccctgatatacccctccacttttgcagttcacctgtaaccacacccccatacggagctgtgcagcccggatgctgaatttaacacctgctgacatcactgcctgccacctgcagcagctcaattactctctgggcctggatgctcccctgtgtgagggcaccatgcccacctgcagctttcctgaggtgttcgagcagtgctcaggcggtgggggggctgtcctggcacagacattggcccttctgtgccaggcctggtgatgggcgctggggacccaggaactcaccagagtctcccacactaggagcaaccaggggccctggtgtgttgtaggggctgggcatggaaggtggaggatatgggggtttgaggggtgtggtgggaaggttaggtcaggcaggagagtgcagggctctccctgcccaagggtgctgtggcctctgccttcacccaacgctgcctctgccacccccgcagtacttcatcgggaacatgctgctgagtctcttggccagctctgtc

SEQ ID NO: 2977 - DNA, 501 bp, Homo sapiens
  MAP TO CHR19.1; EXPRESSED IN LUNG, SIGNAL = 1.5; EXPRESSED IN HEART, SIGNAL = 1.7; EXPRESSED IN PLACENTA, SIGNAL = 3.1; EXPRESSED IN FETAL LIVER, SIGNAL = 2.7; EXPRESSED IN HELA, SIGNAL = 2.8; EXPRESSED IN BRAIN, SIGNAL = 2.9; NT HIT: AF305734.1, EVALUE 0.00e+00; SWISSPROT HIT: Q11122, EVALUE 1.00e-03; EST_HUMAN HIT: BG115017.1, EVALUE 7.00e-72
tttaatcatggcttcctggggccagaggatgaccagtttgggatagggatcatgtccccaaggcagctgtactcaccatgactccagtgcacaggcagacgatcttgccccacatggtgcccggcaccacgtcaccatagccgatggtcaggaatgtgatggggatcagccaaagtgtgtctgaaaggtgcccagtggcattaacagcctgcctatggggaagggtaggttagttctaaaaccccaccatagaggtttccatgatattcactccccttccctctataccctcccatccccttccctctggttccctcccttcccctcccagtatacacccatagtcctaagaatcacctggacaaaaagccattaagttctgagctttggaaagcctgcatggcctcctctctgctgtgtgacctgggcaagttgcttagccactctgggatttgagactgggtctggccaatcccaatgccggtatggtctcagctaggc

SEQ ID NO: 2978 - DNA, 575 bp, Homo sapiens
  MAP TO CHR20.1; EXPRESSED IN BRAIN, SIGNAL = 0.67; EXPRESSED IN HEART, SIGNAL = 0.67; EXPRESSED IN BONE MARROW, SIGNAL = 0.71; NT HIT: AE006588.1, EVALUE 5.50e-01; SWISSPROT HIT: Q06610, EVALUE 8.40e-01; EST_HUMAN HIT: AW368909.1, EVALUE 8.10e-01
agagaccaagatgtgggctgctgagcccgtgcccgcaatattggctgctgccccactatggaggatgggaggggggatgagaggtcttggagatagggatcccatggatgacaaaggtgcttcaaacacccctgcaggaataagtcacctgggtttagatgcaaaggaggccaggcatgaagggtggctttagacaaggcattgagctgctctgcaccttggattcccttctgagaaagtggccagtcaccattatgagcactactgatctgaactgcagagagagagagagaggtccctgggctagtgagcagtgaccgggttatgcttatgtgcttgagtgagcaggaacacaaaacagggcactgcctcccagcggcaacctccactgacatgttggacaagacgttcaaccccttccccgaggccaaaatgacacttgtcctccaaaaccagccccttctcagtatggaaacctccccatggggtcacaagatgggtaaatggcacatgattgaaacgcttgggttcttcgtcccgggaggcagtcatgtcctcctcctgatttttggcac

SEQ ID NO: 2979 - DNA, 537 bp, Homo sapiens
  MAP TO CHR6.1; EXPRESSED IN ADULT LIVER, SIGNAL = 0.97; EXPRESSED IN PLACENTA, SIGNAL = 2.3; EXPRESSED IN FETAL LIVER, SIGNAL = 1.3; EXPRESSED IN LUNG, SIGNAL =   1; EXPRESSED IN HEART, SIGNAL = 0.53; EXPRESSED IN BRAIN, SIGNAL = 1.1; EXPRESSED IN HELA, SIGNAL = 3.1; EXPRESSED IN BONE MARROW, SIGNAL = 1.2; NT HIT: gi4508004, EVALUE 0.00e+00; SWISSPROT HIT: P19474, EVALUE 8.00e-30; EST_HUMAN HIT: AI765855.1, EVALUE 0.00e+00
aagtcctcaccagtgaacggagacctctctgaactaaggataccatggccacgtcagccccactacggagcctggaagaggaggtgacctgctccatctgtcttgattacctgcgggaccctgtgaccattgactgtggccacgtcttctgccgcagctgcaccacagacgtccgccccatctcagggagccgccccgtctgcccactctgcaagaagccttttaagaaggagaacatccgacccgtgtggcaactggccagcctggtggagaacattgagcggctgaaggtggacaagggcaggcagccgggagaggtgacccgggagcagcaggatgcaaagttgtgcgagcgacaccgagagaagctgcactactactgtgaggacgacgggaagctgctgtgcgtgatgtgccgggagtcccgggagcacaggccccacacggccgtcctcatggagaaggccgcccagccccacagggtaagccctcttcacccccgagggtgccttgccaccttctctggatgctccacct

SEQ ID NO: 2980 - DNA, 556 bp, Homo sapiens
  MAP TO CHR10.1; EXPRESSED IN ADULT LIVER, SIGNAL = 7.3; EXPRESSED IN PLACENTA, SIGNAL = 4.1; EXPRESSED IN LUNG, SIGNAL = 3.1; EXPRESSED IN BRAIN, SIGNAL = 2.8; EXPRESSED IN HEART, SIGNAL = 5.4; NT HIT: gi15298269, EVALUE 0.00e+00; SWISSPROT HIT: P18669, EVALUE 3.00e-22; EST_HUMAN HIT: BE888559.1, EVALUE 0.00e+00
agagcagaggacagactccgctcatggggacagacaggctctgttgcttctcctcactggtcatggcttagcatggttcctccccaaagtccttagtaaacaaagcactcgcaaaaacccaagtcactacttttaaactctgttggataaggggagcttttccatagcttagactgagaacctgtgctctagaactgctattctgactagattgtatgaagggagtgggtgcaggcgacaaaatggctaaaatgaaaatgggagccactggtccccgtctgcagctacaactcaagatgtctacagatgtggtcagtgtgacatgtgcaggtgggaggggcagagggacaagacgggcagggagggtgctcctggggacagtatcctccccgccggccttcacttcttggccttgccctgggcagccacagcttccatggctttgcgcaccgtctcttcatcccccagaaactgcatgggcttgataggcttcaagttcttgtccaattcatagacaatgggaataccagtcggcaggttcagctccatgatagcc

SEQ ID NO: 2981 - DNA, 532 bp, Homo sapiens
  MAP TO CHR1.1; EXPRESSED IN BRAIN, SIGNAL = 0.98; EXPRESSED IN HEART, SIGNAL = 6.6; EXPRESSED IN BONE MARROW, SIGNAL = 0.39; NT HIT: gi5454031, EVALUE 1.00e-81; SWISSPROT HIT: P23297, EVALUE 8.00e-09; EST_HUMAN HIT: AW959699.1, EVALUE 3.00e-83
caggcctgcacttaggtctcttggggtttccctcacattgtaaaatctcagggaaagatcaattgcagtagggctctaatcccacagctatttgagctgtcagccagggccagtcctgagggttcccctcacctagaccccaggtactccgggcctggtcctcagctcacttccatgatgggggtgggtaggtgcactgctgcaatgggctctgagctggagacggcgatggagaccctcatcaacgtgttccacgcccactcgggcaaagagggggacaagtacaagctgagcaagaaggagctgaaagagctgctgcagacggagctctctggcttcctggatgtgagcatagagtggtggagtgggagtggagtgggtgaaggttgggggaatggggtggacacccccttgctatctccccaccccacctccagctcagcctagcctctttctttcctttaccaggcttctctcctgggtttttccaggctcccctactcctcctgggtcaagtcaaaatgccctggtt

SEQ ID NO: 2982 - DNA, 584 bp, Homo sapiens
  MAP TO CHR22.1; EXPRESSED IN HELA, SIGNAL = 0.78; EXPRESSED IN BRAIN, SIGNAL = 0.81; EXPRESSED IN LUNG, SIGNAL = 0.84; EXPRESSED IN HEART, SIGNAL = 1.2; NT HIT: gi14777116, EVALUE 1.00e-108; SWISSPROT HIT: O00192, EVALUE 1.00e-45; EST_HUMAN HIT: BE869016.1, EVALUE 1.00e-108
ctgtcccaactggaggtagctccagtccccccggccctgtctctgaagctcagcgccctgctcacaggggctcctgtgaccgcctgcacacaggcggtctccaggggctctcctggcagtgcccctcgccctcgcgggatccctgctccttcctggagaggtggggcagaggtgtgttctgacacctagtcctgcccctcagggagctacgccatggctgagcttgtgcggaatgtgcgcaatgcacaggctccgccgcgaccgggggcctgcctggaggaagacaccgtggtggcggtgctcaacaccatccacgaaatcgtgtccgacagcctggataacgcgcgctcgctcctgcaggcacgcggggtgccagcgttggtggctctcgtggcctccaggtgtggaggggcggggtcggtggcttggggagccgcggaggtgggggaggggccaccactgaccccgcccccggccccacagccaatcggtacgcgaagcgaaggcggcgtcacacgtgctgcagacagtgtggagctacaaggagctgcgtggtaccttgcagaaagatggttggaccaagg

SEQ ID NO: 2983 - DNA, 512 bp, Homo sapiens
  MAP TO CHR17.1; EXPRESSED IN BRAIN, SIGNAL = 0.63; SWISSPROT HIT: P02446, EVALUE 2.00e-24; EST_HUMAN HIT: BG182681.1, EVALUE 4.00e-24; NT HIT: gi13994361, EVALUE 1.00e-26
gcaagctctttggctagcagcaaggtggttcacactctggatgcaggtggtgacagagagcccgctcagggttggagctgggtggcatttgttgagcagtcaacaggatggcacataggagtcaggcatgcagccaggcaggggccaggttcacagcaggtgggctgaaggaggctgatctcatgaggacaggtgctgggtaggcagacttcacattgacagcttatgtcagaggggcagatagtggtggccaggccagtggggacgctgcagcatccttggagataggaatcacagcaagacatagtgacagtggaccaggacaatgttttgtggcaaaggaaggctttcttctacaaggttgtcctctatgggtcttttatatccacctatctcagggaacacggcttctgtccatcagaatgttggacggaacatccttgttgctgtttacctaattctgtaaaaataactcactaacttcttatgtatcagacaggggatgagctctc

SEQ ID NO: 2984 - DNA, 551 bp, Homo sapiens
  MAP TO CHR6.1; EXPRESSED IN PLACENTA, SIGNAL =  46; EXPRESSED IN LUNG, SIGNAL =  26; EXPRESSED IN BRAIN, SIGNAL = 4.2; NT HIT: gi14760223, EVALUE 0.00e+00; SWISSPROT HIT: P46776, EVALUE 3.00e-62; EST_HUMAN HIT: AW162462.1, EVALUE 0.00e+00
tccgcaaagacttcacacagcaattacctcctctctctccttcacctgctttccctgtctgctgggtcattatcaccacaccaatatgctctgggatttctcattttggtctcacatttccagtattccatttttcttcttcttcttcttctttttttttttttaagtagttagcatttaatgaaactccctccatgcggcttcaagccaccaggacacaggcccccccaacactcttaatcttctcctcagctcttctgctgaagaatttggcctgcacggtgacagcctgcttggggagctttccctttcccagaactttgtagtagccagatcgcaccacatcaatgatgggagcagccccagtcttgtttttagcagcattcacccgtgtctgttcactgaccaaagtccacaatttgtcaaggttgacagttgggcagaagctctggttcctctttaagtggtaatgcttcataccaactttcccaaagtagcctgggtggtatttgtcgaagttgatccggtggtgatgcagaccaccagcatta

SEQ ID NO: 2985 - DNA, 529 bp, Homo sapiens
  MAP TO CHR5.1; EXPRESSED IN HEART, SIGNAL = 0.55; EXPRESSED IN BONE MARROW, SIGNAL =   1; EXPRESSED IN FETAL LIVER, SIGNAL = 0.88; EXPRESSED IN BRAIN, SIGNAL = 0.89; NT HIT: gi14861871, EVALUE 0.00e+00; SWISSPROT HIT: Q9Y5F3, EVALUE 4.00e-17; EST_HUMAN HIT: BG822174.1, EVALUE 1.00e-45
tagacgggaaagcaggaaagctgtgcagaaattctgacctgaaacgcttcgcatccggtctctgcttgttgaaggaccttcaccgctatttctgagaagagcaaaagtgatgcagatctgttcttcctcttcttaatcccagagaagttcctaataagccagtaatggcgcctccgcagaggcatccgcagcgcagcgagcaggtcctgctcctcacgctcctggggacgctgtggggggccgcggcagcgcagatccgctactctattcccgaggagctggagaaaggctccttcgtaggcaacatcgtcaaggatctgggactggagccccaggagttggcggagcacggagtccgcatcgtctccagaggtaggatgcagcttttctctctgaatccgcgaaacggcagcttggtcaccgcgggtaggatagaccgcgaggagctctgtgctcagagcccgcggtgtctggtgagttttaacatccttgtcgaggataaactgaatctttatcccgtggaagtgga

SEQ ID NO: 2986 - DNA, 538 bp, Homo sapiens
  MAP TO CHR9.1; EXPRESSED IN FETAL LIVER, SIGNAL = 0.76; EXPRESSED IN BRAIN, SIGNAL = 0.62; EXPRESSED IN LUNG, SIGNAL = 0.57; EXPRESSED IN HEART, SIGNAL = 0.68; EXPRESSED IN BONE MARROW, SIGNAL = 0.88; NT HIT: gi14744240, EVALUE 0.00e+00; SWISSPROT HIT: Q15406, EVALUE 2.00e-44; EST_HUMAN HIT: BE731749.1, EVALUE 3.00e-03
ggcctatgaggtgtagtgcctatcctctgaagggccaggcaactctgccttacagggatgacaattgtttggttgtttggtatttcctccccagccaggaggcctcacctgtgtagttcttcatcggagggcgagtacttggcagtgacatcagccagttccccaaagatctgcttgctgtaaacggtgagggaagacagcaggattagctcctgccacgtagagctcaagaggcacgtgtaatccttgattgagagctcgcagaagaaaggcagtttcttgatccaggcaatctgcctaaagagcagctcgtcggccaggcggcaaagcagggcaaatagttctgcctgtgtcacagcgtatctgaggggcagggacaggggaaagtcacttccattggtcagagggtgaggataagggtacagagagaaggtagtcccaagggcacaaagggaccctggcaatgggctccttgctccatgcccacgggtctccagttccattcagtgtgattttctgataaagggggaaggctgag

SEQ ID NO: 2987 - DNA, 566 bp, Homo sapiens
  MAP TO CHR12.1; EXPRESSED IN HELA, SIGNAL = 1.9; EXPRESSED IN BRAIN, SIGNAL = 2.6; EXPRESSED IN LUNG, SIGNAL = 2.6; EXPRESSED IN HEART, SIGNAL = 2.5; EXPRESSED IN BONE MARROW, SIGNAL =   3; EXPRESSED IN ADULT LIVER, SIGNAL = 0.65; EXPRESSED IN PLACENTA, SIGNAL = 2.1; NT HIT: gi14768035, EVALUE 1.00e-109; SWISSPROT HIT: P23588, EVALUE 9.40e-02; EST_HUMAN HIT: BG403735.1, EVALUE 1.00e-109
gagatctggactgggctgagccaccaaaccatcctcactggcactgaacttttgacttccttggtttaaactgggtatccaaagatcgaccactgactagcatctaaaacctactcttcagaggaagggcacagatggaagtggagagaagaggaggcactacgctctctcttaagcatatccagcttgagtctccaaggctgcttccacaagaaaacaaaactcagcagctgaggtcaccaccctcgtcaccacaagcactcaggggcacaccctgtccaagcactcaggggcacccctgggccatccctgcagccagcaaacaaggactaacccaaagccttgagcctagagggcatgacacaggcagccaaggacaagaaggggttcttgatcctgggagcagccaggggagacttcagcaagggcagaaaagagtcgaccaaaacagggatgtactgggtcaggccggacgggttcttggccaggatgatgtccagcagtccaagcgccgcctccagctccccatccagctgcaagcagagttgtccagaaggcaggtcagc

SEQ ID NO: 2988 - DNA, 503 bp, Homo sapiens
  MAP TO CHR22.1; EXPRESSED IN BONE MARROW, SIGNAL = 0.51; EXPRESSED IN HEART, SIGNAL = 0.82; EXPRESSED IN LUNG, SIGNAL = 0.78; EXPRESSED IN BRAIN, SIGNAL = 0.49; NT HIT: L77570.1, EVALUE 0.00e+00; SWISSPROT HIT: O35099, EVALUE 4.10e-01; EST_HUMAN HIT: AW246142.1, EVALUE 8.00e-47
atggagacttggaacggatgcgccagattgccatcaagtttggctctgccttgggcaagatgtcccgggagcccccgccaccctgtatgaggaccctgtgggtggcggagaggggaaagcctgctgaactgtcgcttcaggctcactctaattcttatccccctctcttcccctagatgtgactccagccacatttgaaacccctgaggtgcatgcaggcactggagtggtgggcaacaagcccaggccccgcggccgaggcctggaggatggtgagtgagggtgccctctttaagtcacatggtcaggattgcctgggaatcttagcctgtgaggccctgagggggtggtccagagggctgcaggccacatcttgttcctgaggggtcttgcgtaaatagcagcctgtgaagtcaaaggacattggtctaggtggtagaacatctgggtccagctcccacacatggctcgcctctgtgaaatgggactctcaccagctcttg

SEQ ID NO: 2989 - DNA, 536 bp, Homo sapiens
  MAP TO CHR3.1; EXPRESSED IN LUNG, SIGNAL = 0.77; EXPRESSED IN BRAIN, SIGNAL = 0.77; EXPRESSED IN HEART, SIGNAL =   1; EXPRESSED IN BONE MARROW, SIGNAL = 0.86; NT HIT: AF092878.1, EVALUE 8.00e-03; SWISSPROT HIT: Q09332, EVALUE 2.20e+00; EST_HUMAN HIT: BI668735.1, EVALUE 1.20e-02
cctggttagcctctgagcacatatttttctctctgaaaatcatatgagcaggtttactcttcatatattccacatatattcttgcacttgtcactgcaggaacatatgcacaccatctgtttttatgaagccagtaggactgcatctcaggatttaaagccaaagcaccgaaaaaattgtccaccaaacctcacacattatgtattaagaaaaggaaactttagtgactaaaacagaaggaaaagtttgcacaatgcaatttaacactgtaaaaaacactgtacctaagaaatgtcccctgagttggtctgaggaggaatgaacatttttcttgatgtccattagtaaatggattagcgatgctaacaggtgcgtcctccagcttcctcgagcccaggtcctgctggcagagagggcagcactggggcacactgaagctgtagatgtatttctcacagtggttgaatttaattaaagccttcccagcctctgcgcagtgcatagctttcgcctcctggaatgctaggggaggtttc

SEQ ID NO: 2990 - DNA, 544 bp, Homo sapiens
  MAP TO CHR5.1; EXPRESSED IN BONE MARROW, SIGNAL = 0.71; EXPRESSED IN FETAL LIVER, SIGNAL = 0.64; EXPRESSED IN HELA, SIGNAL = 0.6; EXPRESSED IN BRAIN, SIGNAL = 0.85; NT HIT: gi14861872, EVALUE 0.00e+00; SWISSPROT HIT: Q9Y5I2, EVALUE 3.00e-86; EST_HUMAN HIT: AI651536.1, EVALUE 0.00e+00
atgcgttctctccaacatccgcatcagatgcgccttctagtggaaatcgagagtcaagcagtctggattcaggtattgagagcttttgttctgttacggagaacctgggcgggttgtcgttaatgtccttcacttccacgtccacatggaaaacctgcagcggcctgtccacgatcacctccaggtggatgctgcactccacgctccgcccgcacagctcctcgcggtcaatccgagaattcacaaacaaaatgccattctgcagatttacctccagaaggtccccgtgtcttttggacgccacccggaacaggcgctgcaccagctccgccagctccagccccaggtcctgcgcgatgcggcccacgaaggtgccgtgtctggcctcctcgtagactgagtagtggagctggccgctccccacctcccaggctgcgaggagaagaagcgagagcagcagacactggacccccaggcagctacatctggaaaccatcttatccttctcttgttttacaaatcgacgaatcagcggtctagaacg

SEQ ID NO: 2991 - DNA, 514 bp, Homo sapiens
  MAP TO CHR19.1; EXPRESSED IN PLACENTA, SIGNAL = 5.9; EXPRESSED IN LUNG, SIGNAL = 3.8; EXPRESSED IN BRAIN, SIGNAL = 4.3; EXPRESSED IN HEART, SIGNAL =   5; SWISSPROT HIT: P34248, EVALUE 2.00e-04; EST_HUMAN HIT: AW955165.1, EVALUE 1.00e-123; NT HIT: gi14785934, EVALUE 9.00e-86
ctccctgtccctctccttgccctggcccttccatgtcctcggtgaccctggctccggtagggtcagggtgggattgtggcccaggaggtgccggaaggatccatgtactttggggagcctgtggccctgccggctgaacccccactgtacctctcccgtcctcgcacacccctgccctccaccaaccccagcccgctcacgttcttcccagggaaatgggtggtggccctggcctgcctggctgaggtgatgcctcctctgtccccacagcctatggcgttggcctccttgtgacattcgtggcactggccctgatgcagcgtggccagcccgctctcctctacctggtgccctgcacgctggtgacgagctgcgctgtggcgctctggcgccgggagctgggcgtgttctggacgggcagcggctttgcggtgaataccagtttgctctgactgtgagaaatactcgcctagtgagccctaactagagttaaagttgagtgagacctccagcc

SEQ ID NO: 2992 - DNA, 591 bp, Homo sapiens
  MAP TO AP001878.2; EXPRESSED IN BONE MARROW, SIGNAL =  12; EXPRESSED IN HEART, SIGNAL =   6; EXPRESSED IN ADULT LIVER, SIGNAL = 7.8; EXPRESSED IN HELA, SIGNAL = 5.9; EXPRESSED IN BRAIN, SIGNAL = 9.5; EXPRESSED IN LUNG, SIGNAL = 5.7; NT HIT: gi14781052, EVALUE 2.00e-80; SWISSPROT HIT: P35611, EVALUE 1.00e-23; EST_HUMAN HIT: BG824217.1, EVALUE 1.00e-79
ttgagagacggaaggctttggtcagactaagaaagaaaacatcatcattcttaggtttttaagcataaaaataattttagaaactgcatataatctggtaaacacttagttgttttattaggttagcacgcaagaaagaaattttcaagaactgctgttcctgtaacttttaacccaaactggctgattctcaggttattacactctgtagtcaggaatcagaagaggtattccaagacttactgaagctcagcctgcttccctcttctcctaaatggaaagaggtggtgccagacacaaaatatttcatttatcgttcagttactagcccatttaatactcactgtgatatgattgtagataagctgagaccacccaaagagatctgctagtctataaaacgctgccaatttacaccgtaataacttctctcctttgtcatacgcaatagaatcagatcctctaagatcgttcacaggagtcaccataccaagacctgaaataaagaaaaacaaaactcagccaggtgcagtggtatacgcctgtagtcctagttactcagaaggctaaggcaggaggatcacttgaagc

SEQ ID NO: 2993 - DNA, 561 bp, Homo sapiens
  MAP TO CHR7.1; EXPRESSED IN HELA, SIGNAL = 1.4; EXPRESSED IN BRAIN, SIGNAL = 0.65; EXPRESSED IN LUNG, SIGNAL = 0.64; NT HIT: gi14752528, EVALUE 0.00e+00; SWISSPROT HIT: P08581, EVALUE 5.00e-62; EST_HUMAN HIT: AI302817.1, EVALUE 0.00e+00
ctcctctgggagctgatgacaagaggagccccaccttatcctgacgtaaacacctttgatataactgtttacttgttgcaagggagaagactcctacaacccgaatactgcccagaccccttgtaagtagtctttctgtacctcttacgttctttacttttacagaaatgcctgccttcaaagggtctcttacagcatgtctttctttttggaacagatatgaagtaatgctaaaatgctggcaccctaaagccgaaatgcgcccatccttttctgaactggtgtcccggatatcagcgatcttctctactttcattggggagcactatgtccatgtgaacgctacttatgtgaacgtaaaatgtgtcgctccgtatccttctctgttgtcatcagaagataacgctgatgatgaggtggacacacgaccagcctccttctgggagacatcatagtgctagtactatgtcaaagcaacagtccacactttgtccaatggttttttcactgcctgacctttaaaaggccatcgatattctttgctcttgccaaaattgcact

SEQ ID NO: 2994 - DNA, 518 bp, Homo sapiens
  MAP TO CHR22.1; EXPRESSED IN LUNG, SIGNAL = 3.2; EXPRESSED IN HELA, SIGNAL = 3.7; EXPRESSED IN BRAIN, SIGNAL = 3.9; EXPRESSED IN HEART, SIGNAL = 2.5; EXPRESSED IN BONE MARROW, SIGNAL = 3.7; NT HIT: gi15318086, EVALUE 0.00e+00; SWISSPROT HIT: Q9Y6J0, EVALUE 1.00e-61; EST_HUMAN HIT: BI861635.1, EVALUE 0.00e+00
ctgtcttagctctgcccaccaaccttcaaagatgcccagctgccctgggaagatccaagcccccttggcccggcagccactcacccggtgggtcttgctgtaggtgtagaggaaggccagacggtagagactcttatagtgctgggggaagcggctcaggcacaggcggaaggaggcgatgcactgctctgtgagaaactgccgctgctcctcagcaccagccggcagcccctgggggaaggccactggctcccctgggaggtcccctctcttcttcccatcccacagggtgggtgtggatgctgagggcttgccagggatgcaagcagaggctggggtttctgcagcaggcttctggacaccttgctctgcagcccggaagccttctgtactctccaatgactcctcgttttttcctacagttgagaagaagggaaagaaagtcaccctggttttaggccctgtccatgcagtggtctaccaccagtaacggaggcgccttggtgaagtgatcagca

SEQ ID NO: 2995 - DNA, 556 bp, Homo sapiens
  MAP TO CHR4.1; EXPRESSED IN FETAL LIVER, SIGNAL = 0.52; EXPRESSED IN BRAIN, SIGNAL = 0.63; EXPRESSED IN ADULT LIVER, SIGNAL = 0.88; EXPRESSED IN BONE MARROW, SIGNAL = 0.69; NT HIT: gi16157280, EVALUE 7.00e-96; SWISSPROT HIT: P42680, EVALUE 1.00e-24; EST_HUMAN HIT: AV714704.1, EVALUE 3.00e-77
gcttccatttatggctggtgaaattagtctcattacacgatagttacgacttatctacttctcactcaacacttgactcccacctacccactgcatatcacacacatagagggaatacttacccatatttatctcttgctctccaccaatgaacatcattcttttctaaaatgagatactcttggcctctctctaatctgagatcatgtccttctgctgcttggaaatcatacatggctacaacgatttcttcactattatcttcttcttctagtggaattggtgggggaggccttcgctagacaaggaagataacatttgaaagtttagtcttctatatgaaactgatcatgaatcaaaacactaaatgagtcatacatcaccacagaataaactagaaacttcaagtctacttactataatccaacaaactctcatgaagaagagtattataattcctgtttcataactaaggtaacaatgatttaattaacccactcaaagtcactcatatcagatcaagtcttgaatgagtccaaagtgcatgtttcctcca

SEQ ID NO: 2996 - DNA, 586 bp, Homo sapiens
  MAP TO CHR8.1; EXPRESSED IN HELA, SIGNAL = 0.82; EXPRESSED IN BRAIN, SIGNAL = 0.94; EXPRESSED IN BONE MARROW, SIGNAL = 0.98; EXPRESSED IN HEART, SIGNAL = 1.1; EXPRESSED IN ADULT LIVER, SIGNAL = 0.94; EXPRESSED IN FETAL LIVER, SIGNAL = 0.9; EXPRESSED IN LUNG, SIGNAL = 0.89; SWISSPROT HIT: P24892, EVALUE 3.80e-01
  unsure 545
gggaggcaaacacagagaagaagctgctaagagtgctgatactgaacatgcaaatcaaagggcttatagcaacagcagaaagtcaagatggcaggtttggtaataacacagctactgacttgcaaacactccaaaaatgcttgctgaactgaattaaatagttcacagcttgaagtaggaaaaaccatgatgagcaagactggaaaaggtggtacctctaatctgtaaaaataataacagcaataaagagaaaactatgaaggaaatagagttggaatatttcaaaacaaaaggccaacacaaaaagaagataatatttacttagcttggcttcatcagctaactcagaaaaatccctcatgaaagcaaagcacaagactcggtttctccttgagaccctgtttgttagctctgtctccgcacagcgatacagtttgcacaggggattctgccacagttctgccacctgtactctgatattttctcagtgatcatgtgggtcctctctctgtgtccagaggagtcaattaaaaagacattcatanattgaatgtctaggtttcacacatccacatcctcagaagca

SEQ ID NO: 2997 - DNA, 570 bp, Homo sapiens
  MAP TO CHR2.1; EXPRESSED IN BRAIN, SIGNAL = 0.82; EXPRESSED IN HELA, SIGNAL = 0.58; EXPRESSED IN BONE MARROW, SIGNAL = 0.78; EXPRESSED IN HEART, SIGNAL = 1.2; EXPRESSED IN LUNG, SIGNAL = 0.93; SWISSPROT HIT: P08620, EVALUE 6.00e-27; NT HIT: J02986.1, EVALUE 0.00e+00; EST_HUMAN HIT: AW340506.1, EVALUE 0.00e+00
gacagaagggggttctgacccctggcttcaggctgggtaccttgcccaagaggtgccccagccctgacactgccctgctttgctgcagcccttcttcaccgatgagtgcacgttcaaggagattctccttcccaacaactacaacgcctacgagtcctacaagtaccccggcatgttcatcgccctgagcaagaatgggaagaccaagaaggggaaccgagtgtcgcccaccatgaaggtcacccacttcctccccaggctgtgaccctccagaggacccttgcctcagcctcgggaagcccctgggagggcagtgccgagggtcaccttggtgcactttcttcggatgaagagtttaatgcaagagtaggtgtaagatatttaaattaattatttaaatgtgtatatattgccaccaaattatttatagttctgcgggtgtgttttttaattttctggggggaaaaaaagacaaaacaaaaaaccaactctgacttttctggtgcaacagtggagaatcttaccattggatttctttaacttgtcaaaagttgtcacgagtgtgctgct

SEQ ID NO: 2998 - DNA, 458 bp, Homo sapiens
  MAP TO CHR3.1; EXPRESSED IN PLACENTA, SIGNAL = 5.5; EXPRESSED IN LUNG, SIGNAL = 9.2; EXPRESSED IN BRAIN, SIGNAL = 2.7; EXPRESSED IN HEART, SIGNAL = 3.9; EST_HUMAN HIT: BE844236.1, EVALUE 3.00e-86; SWISSPROT HIT: P22122, EVALUE 1.00e-24; NT HIT: gi15294695, EVALUE 8.00e-86
agatggcaggatgagaatggattcttctttccaacatttttgttatatggtatactgaagaggcaaaaagctctaattctctacatgctccataaatattctaacatggaaaatggcatcagttgttatgaaaagtatactcacctgctttccatccacctcgatatctgccacatagttctcaaacactgtgggcacatacacctctgggaactggtccttgctgaagactatgagcaagcatgtctttccacaggctccatcaccaacaatcaccagtttcttccggatggcagccattgctgaaacacaaaacacagatattacctgcaatgcacaagaagtcataggtagcttacaggatgacacatgctttggtaaccatggggcataaacctctattagcatactcaaattcaaacttctagtacgccgatccacctggcaccaaaaggtta

SEQ ID NO: 2999 - DNA, 562 bp, Homo sapiens
  MAP TO CHRX.1; EXPRESSED IN LUNG, SIGNAL = 0.94; EXPRESSED IN HELA, SIGNAL = 1.1; EXPRESSED IN BRAIN, SIGNAL = 0.83; EXPRESSED IN BONE MARROW, SIGNAL = 0.95; EXPRESSED IN PLACENTA, SIGNAL = 1.1; NT HIT: gi13649009, EVALUE 1.00e-120; SWISSPROT HIT: P52383, EVALUE 4.10e+00
agggttttggctttccagagaagtcctaaaaagaaatgaacgtggattatgtggaatgggaagtaacctgatccttagaagatatcttcctttcgtagttcaggaaaaacatgaccattgttcactaaggaataaaataaatacatatgtacctgctgtcaaatgacacctcaggaggaatgacatgagtactgtccttgccaatgaggaatttgattcgatcataaaaaagtcttgaagtgtgctgagagaagagagtttggctttgctgaatgaggtcaagaggatctggtgagccctggcagagaggacttatataacagttgctttgttgacaacagtcaggatccacacagtcggttaaaccatctggaaataaaacccaaaaccaatattgattatttagcttcaagagaaaaatatagtttaaaatatacataaatggagaaaattctaaaatatagccaaagataatcaaccttgttttgagttcagaatttgttaaattcacatttttcatgaattatcactcactctgagttcacatggcacctcagagaaa

SEQ ID NO: 3000 - DNA, 543 bp, Homo sapiens
  MAP TO CHR17.1; EXPRESSED IN BONE MARROW, SIGNAL = 0.53; EXPRESSED IN ADULT LIVER, SIGNAL = 0.59; EXPRESSED IN FETAL LIVER, SIGNAL = 0.54; EXPRESSED IN BRAIN, SIGNAL = 0.57; EXPRESSED IN LUNG, SIGNAL = 0.57; EXPRESSED IN HEART, SIGNAL = 0.49; NT HIT: gi11426182, EVALUE 2.00e-99; EST_HUMAN HIT: AL589307.1, EVALUE 0.00e+00; SWISSPROT HIT: Q9JHD2, EVALUE 6.00e-31
cagagccatctggagtagggggtcgagggggagacaggtgagggcggaaaccactgaacccaggctgggcctgcaagcctcccccgaagctgcccctggctgggcctacctggtgtaattgaccttgtaggtagccacgtcctcagcctgagacctctgccgaaactgggcaggtgtctcaagcttccagtagttaaggcagagcaagaacatctttgagagctcgaacatcgtctgccgctcccggggagccaggtgactaaacttgtactgcacaaagttcagcacaccctgagaaggggtgggtgggggataaaaccaggaatgaggtgtgagcagcccgcagggccttcttagacaaaggaagatgctccctggccagggacaaggttctccttctcctctctctctcgggtgctctctatagaaaagctctgccccctccctaccaccatgcccaccctgaggttagcacaaaacacccttccttctctgaacctccccagtgttctcagcttgaggagaatggagaacacaggctcc

SEQ ID NO: 3001 - DNA, 548 bp, Homo sapiens
  MAP TO CHR16.1; EXPRESSED IN BRAIN, SIGNAL = 0.56; EXPRESSED IN BONE MARROW, SIGNAL = 0.53; EXPRESSED IN HELA, SIGNAL = 0.43; NT HIT: X72218.1, EVALUE 3.30e-02; EST_HUMAN HIT: BF900127.1, EVALUE 7.00e-35
caaggttaggctgcaggaagctgcagatctctctacccaaagtcctgtgattcaatgcattgcctcttcagatccttcaccagcaccctctcccagcacacactgcaaaaccacacgatgccatgacagtttgcaaaatcagcagccaaattatagtcctttataaatagggtagtaacttacacaacaaccaatttatttgcgataccctgctgtacataagaaaaacaccatgcactctaatatatatcccaaaagactcctttatgttccacagcacactgtgttacagcatcttgttctatggccattcactcattcagtaagaattcctgagcacctataatgtgctaaaccctatgctaggcactgggatttgacacagagaaagtcacaatcttaaagtagtcaaaaagacaggcatgagattgaacatgttattacagcctgtgatgaatttcttgatgggacagtagcagatatctactcaggaatcaacaagagcctccctgagcggttgatgttctactgatttgatgagggggaaa

SEQ ID NO: 3002 - DNA, 551 bp, Homo sapiens
  MAP TO CHR13.1; EXPRESSED IN HELA, SIGNAL =   1; EXPRESSED IN BRAIN, SIGNAL = 0.99; EXPRESSED IN BONE MARROW, SIGNAL = 1.2; EXPRESSED IN ADULT LIVER, SIGNAL = 0.87; EXPRESSED IN FETAL LIVER, SIGNAL = 0.84; EXPRESSED IN LUNG, SIGNAL = 1.4; NT HIT: gi15612563, EVALUE 5.20e-01; EST_HUMAN HIT: BG036901.1, EVALUE 0.00e+00
cagaaaagctgagctaaaactggatgagttaaatcacaaacctgaaactgtggaatcgtcatttcaaagcacttggtctttacttggcctgaatgatctgccacttttagcatcactgcaacgtaaggatacttaagagatctgcaagtgtctgagctcacagccatacccagtttccactgaaaatctacaagctttaataagacaggacaaaataatacattagtagtaacattacctggaatgcagatatttattcaattttactgcagttacactcaacttttagtttcaacgctggtcatatttacataaagtatcttcattttaatactgctagaggaacaataatcaaatgaaaaaatggagaggttataagggatataaacagttaaaaaacaccatcatagtttaaaatggaaaaaacaaaaagtgaaaaaaaaaaatctcccctccaatgtataacggaagtggaaggaagatgtggcagtattggtttcctttaacaggcttggagtatcttttagttcactttgctgttccatgctcaa

SEQ ID NO: 3003 - DNA, 544 bp, Homo sapiens
  MAP TO CHR11.1; EXPRESSED IN LUNG, SIGNAL = 0.91; EXPRESSED IN HELA, SIGNAL = 0.71; EXPRESSED IN BRAIN, SIGNAL = 0.77; EXPRESSED IN BONE MARROW, SIGNAL = 0.81; EXPRESSED IN HEART, SIGNAL = 0.83; EXPRESSED IN ADULT LIVER, SIGNAL = 0.92; NT HIT: Z69749.1, EVALUE 0.00e+00; SWISSPROT HIT: Q03164, EVALUE 1.00e-44; EST_HUMAN HIT: W93223.1, EVALUE 1.00e-130
tggctaatggctgcatactgaactaaacatttccattattgttgtctactattccaatagaacatttccattgttgcagaacattctattaatgacagcatggccccagagtatttcttatttaagcacagcccacaccacaaaatctaactgtaacaagtcttgcaactcaattacaaccacattcagtttcctgatgtatctctgcaacaaactagggataaataagcaacctttatggttgagaggtcaacatctcagagtgaaacacccacttacttgcagcactgcttctttatattgcgaccaccaaacttgggcttatctaagcaattagtacaaacaccacagtcctcaggcacctggcagccgggacactgcccacaccgcctcgatcgacgtcctttctttactggaggttcctggggtgccttgtttctagtgacaggtttaattggtttgatgggtggagcaagaggttcagcatcttctgagccagcaattgatgacttgtctgttaaagaaatgtggcattagttccaag

SEQ ID NO: 3004 - DNA, 579 bp, Homo sapiens
  MAP TO CHR5.1; EXPRESSED IN LUNG, SIGNAL = 0.77; EXPRESSED IN BRAIN, SIGNAL = 0.65; EXPRESSED IN HEART, SIGNAL = 0.52; EXPRESSED IN ADULT LIVER, SIGNAL = 1.1; EXPRESSED IN BONE MARROW, SIGNAL = 0.65; NT HIT: gi14781183, EVALUE 7.00e-96; SWISSPROT HIT: P16522, EVALUE 1.10e-02; EST_HUMAN HIT: H59410.1, EVALUE 1.00e-95
tcaaatccaagcaagggaagcagctcaccctgacataaagaaggttggagaatgtgtccatattttcaatcctgtaagggtcttgtttccttagctcattaaaaatggagagggctttgtcaatatctgcagaaagaagatagttcagaaaacagcacaatgcacctgtcagggtctgatagtatttcattgtctttattcactcacctctgatattgtgataggcaactgcaatttgggaaacaatatacgagctcttagagaagcccacatcaatgagattctgatacttttgcagggcctcctctatcaactgcaactctgtgtatatatgagccagaaaaaactctttcatccaggtgtctggcaaagacaggaacttcagctggcagcaggagagagagggacacacttaatataacttgacctctctctcaaacaaacatccaggaactatctttattatctaaaggaatttatcactaaaattttattagaacacctagtaatgaaaacaggacagtccaattaactgaatatgacttacaagcataatagggaggaacagcctagttggga

SEQ ID NO: 3005 - DNA, 549 bp, Homo sapiens
  MAP TO CHR7.1; EXPRESSED IN FETAL LIVER, SIGNAL = 2.1; EXPRESSED IN HELA, SIGNAL = 1.9; EXPRESSED IN BRAIN, SIGNAL = 2.5; EXPRESSED IN HEART, SIGNAL = 3.2; EXPRESSED IN BONE MARROW, SIGNAL = 2.5; EXPRESSED IN LUNG, SIGNAL = 3.4; NT HIT: gi14752053, EVALUE 1.00e-84; SWISSPROT HIT: Q9ULJ8, EVALUE 5.00e-23; EST_HUMAN HIT: BG108643.1, EVALUE 6.00e-23
ttggttacaggctgtcatggtggtcacctgatccttacctgatgttactggttaccttgagattttatcagtgtctgtggtctcttcatcagttctctccaaaggtttctctcactgattatctttcaatattcttagacttgaatgaagcagtcccagagacagagcgcctggattcaaaagcactgaaaactcgagcccagctctctgtgaagaacagacgccagagaccctctaggacaagactgtatgatagtgttagttccacagatggggaggacagtctagagagaaaggtgagcacccttgaccgtttcctgatttgtactgttggagtatatcattgttcctacagcttattgaagattatgatttttctgcaaacagagtctatgtcctagttggtaagcagctagaatagttcacgtctttgtctcctgaattctttatattgttgtaattcaaaatattttgtctattcattcagtgaactaaccaagagcattatctgtattgtcatatttcatgatggtgcttttgatattcagc

SEQ ID NO: 3006 - DNA, 537 bp, Homo sapiens
  MAP TO CHR19.1; EXPRESSED IN FETAL LIVER, SIGNAL = 0.35; EXPRESSED IN BRAIN, SIGNAL = 0.54; EXPRESSED IN HEART, SIGNAL = 0.63; SWISSPROT HIT: Q63425, EVALUE 2.00e-67; EST_HUMAN HIT: AA984421.1, EVALUE 2.00e-22; NT HIT: gi14787062, EVALUE 0.00e+00
agtgcagcttccaaaagtcccagagatgaagctccctgagatgaaactccctgaggtgaaactcccgaaggtgcccgagatggctgtgcccgatgtgcacctcccggaagtgcagctcccgaaagtcccagagatgaaactccctaaaatgcctgagatggctgtgccagaggttcgactccccgaggtgcagctgccaaaagtctcagagatgaaactccccaaggtgcctgaaatggccgtgcccgatgtgcacctcccagaggtgcagctgcccaaagtctgtgaaatgaaagtccctgacatgaagctcccagagataaaactccccaaggtgcctgagatggctgtgcccgatgtgcacctccccgaggtgcagctgccgaaagtgtcagagattcggctgccggaaatgcaagtgccgaaggttcccgacgtgcatcttccgaaggcaccagaggtgaagctgcccagggctccggaggtgcagctaaaggccaccaaggcagaacaggcagaagggatggaatttggctt

SEQ ID NO: 3007 - DNA, 585 bp, Homo sapiens
  MAP TO CHR1.1; EXPRESSED IN HEART, SIGNAL = 0.91; EXPRESSED IN PLACENTA, SIGNAL = 1.3; EXPRESSED IN LUNG, SIGNAL = 0.73; EXPRESSED IN BRAIN, SIGNAL = 0.77; SWISSPROT HIT: O14896, EVALUE 2.00e-37; NT HIT: gi13635795, EVALUE 1.00e-113; EST_HUMAN HIT: BE540926.1, EVALUE 1.00e-113
gctctgggcaatgataggactcactgtggtttcttgttctcaggcctgggctgtagagacagggaagtaccaggaaggggtggatgaccctgacccagctaaatggaaggcccagctgcgctgtgctctcaataagagcagagaattcaacctgatgtatgatggcaccaaggaggtgcccatgaacccagtgaagatatatcaagtgtgtgacatccctcagccccagggctcgatcattaacccaggtgaggccccaggtgctggggagaaggtgggcagcatgccagattctgggctgcactcttaagagatagtcaacttgaaaacagcctgatttacacagtttaagatggataaagcaagaaagcctttctctgggaaggacccagaaaacaaaagatgcagactcagcaaaatcttgcttacttaggggaatgttttttaacctggttacttaaagcattagaaagtggaggggtatacagttctactgtaaaagtagcctcttttgggattcaagaggccaggtagttttgaaggagaagggattaaagcttaaaaggtttgcgttctaaacctggc

SEQ ID NO: 3008 - DNA, 514 bp, Homo sapiens
  MAP TO CHR17.1; EXPRESSED IN FETAL LIVER, SIGNAL = 0.69; EXPRESSED IN HELA, SIGNAL = 0.64; EXPRESSED IN BRAIN, SIGNAL = 0.62; SWISSPROT HIT: P02976, EVALUE 8.30e-02; NT HIT: AB018275.2, EVALUE 0.00e+00; EST_HUMAN HIT: AW819796.1, EVALUE 0.00e+00
ttcctccttcgcaacatttcccctacactcatcttcctctactctcagttgttctacctggttgaggacttcttcctcctccacccgactggcggattctttgctaacagtctgcaaacgtcgtccaggctgatagatctgcaggtcgggtttctttgttcttttgataatttttagactacgatcctcttgtccagcagtcctaggaaaggattcttgtccccgattattttctgggtctataggaccattctgctcttggttgttcagttccttgcagacatctttaacgggctgtgtaccattttcaacagcagagcaatctcggtcattaacaatttcatctttgaattcctcactcccagggggttccttgattttgggcttgttccttagccgagaaaggccaggcttatagatttccagatctggacgcctgttatctttgcgcggcctggcctcctttaattccttcatgttttctgttatgtcggggaaagagtttgggagggaa

SEQ ID NO: 3009 - DNA, 575 bp, Homo sapiens
  MAP TO CHR3.1; EXPRESSED IN BONE MARROW, SIGNAL = 0.91; EXPRESSED IN FETAL LIVER, SIGNAL = 0.61; EXPRESSED IN BRAIN, SIGNAL = 0.52; EXPRESSED IN LUNG, SIGNAL = 0.87; EXPRESSED IN HEART, SIGNAL = 0.83; SWISSPROT HIT: P46976, EVALUE 8.00e-27; NT HIT: AF065481.1, EVALUE 0.00e+00; EST_HUMAN HIT: BG185165.1, EVALUE 0.00e+00
tgctgcttcacaacttttgcccagttctcacctcttatcctaaaaaagcctctcatctgataagttttaatgaaaacctctagcaactgtaacagacttttctcaacccagctctagatactaagtatcagaaacaaggcttgtgaagtggatgtgttcacagaaaaatgcagtgtttctactggaggtaagtgtcaagtttcctcttgatgttgtcaaaggaatctgctcccatataatcagcctggccctgttcccatcgttccttccgttcttccgaggatacaaacggctgtgccatagctgggatctccccaagggacagatgtgatatggctcctgagacatcttcctagaaaggaaagcataattgactctatgagagctgaaaatcaaactgttttaaagaatgcaataaattgaagacagaaaagccaggatgaatcatcatgcaaagtagcaaaaactgaaaagtattacatgaaacaaacaaaaaagacacaaaaatatagattatatgattttttcctaacaaaatgaagacttcttgactcagtgaaaacattgggagaaca

SEQ ID NO: 3010 - DNA, 526 bp, Homo sapiens
  MAP TO CHR2.1; EXPRESSED IN HELA, SIGNAL = 0.67; EXPRESSED IN BRAIN, SIGNAL = 0.77; EXPRESSED IN HEART, SIGNAL = 1.3; EXPRESSED IN LUNG, SIGNAL =   1; SWISSPROT HIT: Q9Y2G4, EVALUE 4.00e-04; NT HIT: gi14739596, EVALUE 1.30e-01; EST_HUMAN HIT: BE151690.1, EVALUE 4.00e-30
gccccatagagcagcagtagcttcatggctttgtagctgccgtgccgcacggcctcgtgcagagccgtgtccccttcctgctgagaacgcaggcagtcaagcttctgcctccgcgtgctgccctcctcatgcaggaaggtcagggctgctgtcaccgagcagacagcacctctggtcctggctggggctcctcagtccctgctcctctggagctgtccgagccggaaaagaccaagcgcctgccttaccttatcctgtgcgttcaggtgggcgccacactcgatgaggtgctccaggcagtcggggtgccgggtgcgcactgccacgtgcaggggggtgctcccgatctgagagcaagtgggggtcagtgctgggtctggattggtgaggcctccctaacccatgggactacgtgctctcttctccaggaacagcgtctgctcccgtgttcccgacaggcccccaaagcaccgtgcccctcaccttgtcccgggcattgacccgggctccctggttaagcagctgt

SEQ ID NO: 3011 - DNA, 524 bp, Homo sapiens
  MAP TO CHR12.1; EXPRESSED IN HEART, SIGNAL = 0.55; EXPRESSED IN HELA, SIGNAL = 1.6; EXPRESSED IN LUNG, SIGNAL = 0.82; EXPRESSED IN BRAIN, SIGNAL =   1; SWISSPROT HIT: P00973, EVALUE 1.00e-50; NT HIT: M11806.1, EVALUE 0.00e+00; EST_HUMAN HIT: AV695952.1, EVALUE 0.00e+00
aatgccttcagaacagtggctagtgctccataatgttagtgattgctcctgtcattttatttagggaggtttgcctcactaagcatcaattattatttttgtcgtctttttcagggtggctcctcaggcaagggcaccaccctcagaggccgatctgacgctgacctggttgtcttcctcagtcctctcaccacttttcaggatcagttaaatcgccggggagagttcatccaggaaattaggagacagctggaagcctgtcaaagagagagagcattttccgtgaagtttgaggtccaggctccacgctggggcaacccccgtgcgctcagcttcgtactgagttcgctccagctcggggagggggtggagttcgatgtgctgcctgcctttgatgccctgggtgagagctcccagcttctttttctccctcttcccatttctgagcagaaatctcccacagtttgagagctttttgccccaacagggcatctctctaaagcagggtgggaggagatcttagg

SEQ ID NO: 3012 - DNA, 593 bp, Homo sapiens
  MAP TO CHR19.1; EXPRESSED IN LUNG, SIGNAL = 0.75; EXPRESSED IN FETAL LIVER, SIGNAL = 0.65; EXPRESSED IN BRAIN, SIGNAL = 0.61; EXPRESSED IN HEART, SIGNAL = 0.66; EXPRESSED IN ADULT LIVER, SIGNAL = 0.98; NT HIT: gi14763343, EVALUE 1.00e-102; SWISSPROT HIT: P13290, EVALUE 2.30e-01; EST_HUMAN HIT: AA906192.1, EVALUE 1.00e-103
acagctctcctccccttagccccatctcgagggaaattctgcctctggcctcagccgggacagctctgagccatgggactcagagatctccacacactgggccaagaactcagggctagaatcttatagaaccaggaaaaggggactctccccctaaaaatgcaaacacggtttgtggggccccaagctcttttgtgggggcggggccagggtgttacctggggaagcctgagcgcacatggagcccgtccacgttctggctgaccaggaagcggaggaggcccacgcgctccagctgcaccagcgccatgtgggtctgcgtgggccgcgcgctctcaaaggtggtgtcgaacttgggggccagacctcgctcctccatggtccagactccgtggggacccctgaaggtggcaggccgggagagatggacggggagaggggaacagaaaaagagacagagggagaatcagagaggtatagagagaaagttggagagagagaaaatcaggagacagagagagacagggagacagagagagggaatcagaaacagaaatagagggtgagttgcaagaacagggagagggggatag

SEQ ID NO: 3013 - DNA, 592 bp, Homo sapiens
  MAP TO CHR1.1; EXPRESSED IN BONE MARROW, SIGNAL = 0.49; EXPRESSED IN PLACENTA, SIGNAL = 1.3; EXPRESSED IN HELA, SIGNAL = 0.6; EXPRESSED IN LUNG, SIGNAL = 1.1; EXPRESSED IN BRAIN, SIGNAL = 0.6; EXPRESSED IN HEART, SIGNAL = 0.94; NT HIT: gi14720593, EVALUE 0.00e+00; SWISSPROT HIT: P51805, EVALUE 1.00e-35; EST_HUMAN HIT: AU119341.1, EVALUE 0.00e+00
aatcatctgacttccacgggcacaaagccacccttcctcccgcagcagggggtgtggcagggaggggagtgggaggtcctgaagagatgacagacaccgtcgtctgagtccttagtcagtgatgactatagagcggggaatgggcagggagacaagggcatgggcctgtcctgagggtgctactgacctctccacccagctcttgtagctggggatgtccttggcatagagcagcttgttggagggggagtccttgcccagccggtgctctgacgttgaacaagagtccatgaaggtctgggccaccacagagaggcaggcgtccgtgatgctgcccttgtggatgtcaaacacgaactgggggttcttaatcacgttcacccagaagcgcagagggaggctgtggggaaaggcagagaagacttgagaatgcatgcgggccgtgccccttctgctgcccactgatattcttccccatcaaaggtcaaattgtccacctgaaggggcaaaggagtaaaatggaagaaaatgggtccagccagggttaatttagccaaagctgttactgacctgggagaaatggaaggagagg

SEQ ID NO: 3014 - DNA, 534 bp, Homo sapiens
  MAP TO CHR4.1; EXPRESSED IN BONE MARROW, SIGNAL = 0.85; EXPRESSED IN FETAL LIVER, SIGNAL = 0.84; EXPRESSED IN LUNG, SIGNAL =   1; EXPRESSED IN HELA, SIGNAL = 0.59; EXPRESSED IN BRAIN, SIGNAL = 0.81; EXPRESSED IN HEART, SIGNAL = 0.96; NT HIT: D50004.1, EVALUE 0.00e+00; SWISSPROT HIT: P16234, EVALUE 2.00e-47; EST_HUMAN HIT: AW605347.1, EVALUE 0.00e+00
acgcaccttatgattttgcctgttactcttatttaaagaaggaaggagatgatacaagtaccttttaaagcataaacattaaatgggatggtctggaacttctttcctttgacggtggcctcacagatatagggccctacagtgaaggtcccattaaagccctgtctgctgtcgtaggaggcaggtaccaccccctcactgttgtgtaaggttacaggagtctcgggatcagttgtgcgacaaggtataatggcagaatcatcatcctccacgatgactaaataatccgtcattcctagaggtacaaaggctacatctgggtctgtggtttaaaaaagaatgaagactctattagacattaatttcacctttacacataaatccagaaaaactatcccactggcattattgatattaggtatgaagttcacctttacacatatatccagaagaattgccccactggcattagttatcatgacagctacaaagtgatttttaagtatgaataataccaaattgcctgtctcctga

SEQ ID NO: 3015 - DNA, 595 bp, Homo sapiens
  MAP TO CHR14.1; EXPRESSED IN PLACENTA, SIGNAL = 1.3; EXPRESSED IN FETAL LIVER, SIGNAL = 1.4; EXPRESSED IN LUNG, SIGNAL = 1.3; EXPRESSED IN HELA, SIGNAL = 1.4; EXPRESSED IN BRAIN, SIGNAL = 1.6; EXPRESSED IN HEART, SIGNAL = 1.6; EXPRESSED IN ADULT LIVER, SIGNAL = 1.4; EXPRESSED IN BONE MARROW, SIGNAL = 1.7; SWISSPROT HIT: P26770, EVALUE 8.00e-21; EST_HUMAN HIT: BG979930.1, EVALUE 0.00e+00; NT HIT: gi9506372, EVALUE 2.00e-43
aaccaattcttggattccccccaacctctcaatcctgagaccactaccacgtactcaactctgggtacccccttcaacatgccaaaagtggaaagagccacagccatccagcccttggggaaactcttctgagaaagagatctgtatgaaagacagttagccccatatcaagtgaaaggagtccctagatctgatctagacactaccccaccttggaagttcttcaggaataccccgctcgctgcccacttttcccaactccctcctacccttctgacctctaaccaggttcctctgcacacccacatacacactcccaggagcatgaatgcatgcggatcaagatcctgggggactgttactactgtgtctctgggctgccactctcactgccagaccatgccatcaactgcgtgcgcatgggcctggacatgtgccgggccatcaggtcagctcaggcggtggtcaagaggaatgctgagggtggatgtggggggcagcaggcagctgacagaagtcctctttgtgagaatctggggtgtctcacaggcagggctgagggtaggactcagattgtcccacacacacactgctc

SEQ ID NO: 3016 - DNA, 565 bp, Homo sapiens
  MAP TO CHR11.1; EXPRESSED IN HELA, SIGNAL = 1.5; EXPRESSED IN BRAIN, SIGNAL = 1.9; EXPRESSED IN BONE MARROW, SIGNAL = 0.99; EXPRESSED IN HEART, SIGNAL = 1.3; EXPRESSED IN PLACENTA, SIGNAL = 1.3; EXPRESSED IN FETAL LIVER, SIGNAL = 1.4; EXPRESSED IN LUNG, SIGNAL = 1.6; NT HIT: gi15312470, EVALUE 2.00e-65; SWISSPROT HIT: P12056, EVALUE 1.40e+00; EST_HUMAN HIT: AW384500.1, EVALUE 3.00e-65
ctagcccacctcaacagctccccagccaacacctttacctggctgatgagcagagatccttcgttggacttccttccgggaattgtctctttttcggatgttaacctgtggaggaaaaactactgagcagccaggactgacttccctcactaacaatcaggaccctcatgccttaatccccaacatacccctgaccacccacaaagatcaaagggacaaaagggggtccttgcccctttcgacctgcaaagagaagcggtgtcggggccagatgcccccccacacccactgcatgtagctgaagagcacgatgacgctgaggaaggtgaagttgctggcaacacctatgaaggcgcaggtcatcgggaagttgtatagcaggtatctgaggcaggaagtagggacaagaaggtagtagcagttaccagagagcaccagccttctcatgtcccagaaataatttctagggcaattcaagtgagtttggttacagctggctctgtcacccctgcctcccacccacacagtttccagaacctgctataccaggttctaacaaaggcca

SEQ ID NO: 3017 - DNA, 513 bp, Homo sapiens
  MAP TO CHR19.1; EXPRESSED IN FETAL LIVER, SIGNAL = 2.9; EXPRESSED IN LUNG, SIGNAL = 3.7; EXPRESSED IN HELA, SIGNAL = 2.2; EXPRESSED IN BRAIN, SIGNAL = 2.3; EXPRESSED IN BONE MARROW, SIGNAL =   2; SWISSPROT HIT: Q92692, EVALUE 5.00e-49; NT HIT: AF044963.1, EVALUE 0.00e+00; EST_HUMAN HIT: BI829789.1, EVALUE 0.00e+00
atggcaggaaggtagtgcagaatttggcttcagggaacccacgtagacaacattcagagacaatgtagacagtgctttagagaagccagtgtaggcagttttgatgggggaggggtcacccccgatacactcacagcgtacagagagggtcacaggtatcagggctggttcctcgaagctctcatgctccactttgcaggtgaccgtgacaccatctgctcggcccgagggcaccaaggtgaagcggctggtgacagtgacagttccggccagggtccctgacacctgagtctctttggcttcccagtccagggatgagagccaggagatccgggcaggtgggcggccctctttggagatgcagagggccactgtcgtagggtcctggctgaacgtgaccttctgggcctcagcttggttcttgggcttggctggggagaggaggagagggggtgcgtcactcctcaccggcagtcattcaacaaacactcagcagaggagcagggtggttag

SEQ ID NO: 3018 - DNA, 584 bp, Homo sapiens
  MAP TO CHRX.1; EXPRESSED IN FETAL LIVER, SIGNAL = 2.1; EXPRESSED IN LUNG, SIGNAL = 4.3; EXPRESSED IN BRAIN, SIGNAL = 1.3; EXPRESSED IN HEART, SIGNAL = 0.99; SWISSPROT HIT: Q02410, EVALUE 5.00e-09; NT HIT: gi5032082, EVALUE 0.00e+00; EST_HUMAN HIT: BI858427.1, EVALUE 0.00e+00
tggaaaaattggactcaggcttaaatcaatagataatggtatatttgttcagctagtccaggctaattctccagcctcattggttggtctgagaattgaggaccaagtactccagattaatagtgaaaactgtgcagggtagagctctgataaagcacacaaggtgctcaaacagaattttggagagattaccatgaccattcatgacaggccgtttgaatggacgattaccatgcataaggatagcactggacatgttggttttatctttaaaaatggacaaataacatccatagtgaaagatagctctgcagccagaaatggtcttctcacagaacataacatctgtgaaatcaatggacagaatgtcattgaatcgaaggactctcaaactgcagacatactgtcaacatctgggactgtagttactattacaatcatgcctgcttttatctttgaacatattattaagcagatggcaccaagcattatgaaaagcctaatggaccacaccatttctgaggtttaaaattcacggcaccatggaaatataactgaacgtctccagtttccttctttggcaa

SEQ ID NO: 3019 - DNA, 501 bp, Homo sapiens
  MAP TO CHR5.1; EXPRESSED IN BRAIN, SIGNAL = 1.4; EXPRESSED IN HEART, SIGNAL = 1.1; EXPRESSED IN BONE MARROW, SIGNAL = 1.3; EXPRESSED IN ADULT LIVER, SIGNAL = 1.5; EXPRESSED IN FETAL LIVER, SIGNAL = 1.1; EXPRESSED IN LUNG, SIGNAL = 0.88; SWISSPROT HIT: P26431, EVALUE 6.00e+00; NT HIT: U80983.1, EVALUE 1.20e-01; EST_HUMAN HIT: BG203547.1, EVALUE 4.50e-02
agtttctttccccatccaccagtggacgtcgcctttcttcctctccctcttgcagagactgccccctgctgcgggtgttggctggtgaagttgttggtgaggaggcggagggctctttgccctggattgtctcatggctcttggaaggaaacaactacagtggcctacttcttcgcctggacccccaaggtggccagggggagagtgtggagttctttgggaagctctgagatctgtccttaggcctgcctcacccatcacgcaaccggcctcagccccaacctcagcccagagagagcgtctgaccctccaagagggccccagagtgcctaggctgacagagactggagaggcaaagtaaggtcaatagtgaaagtaacccctcacccttcagagaccttaaaccacttaccaagcatttttgcacaaatgcctttgattcttaccacaaccccatgaggcagatataatttacaaataaggaaagagaggcaggcctaa

SEQ ID NO: 3020 - DNA, 533 bp, Homo sapiens
  MAP TO CHR6.1; EXPRESSED IN LUNG, SIGNAL = 1.8; EXPRESSED IN HELA, SIGNAL = 3.5; EXPRESSED IN BRAIN, SIGNAL = 3.2; EXPRESSED IN BONE MARROW, SIGNAL = 3.8; EXPRESSED IN PLACENTA, SIGNAL = 3.7; EXPRESSED IN FETAL LIVER, SIGNAL = 3.1; SWISSPROT HIT: O51082, EVALUE 2.90e+00; EST_HUMAN HIT: AA584126.1, EVALUE 4.80e-02
acatgtgtaccacacctgcctacatgttttgtcactggtgagatgtgacaaaatgatctctacttaccctatctttgaaagcccatgattttagtgattgtttctaaatataaatattatcagcttctcaagacaaaattcattttattctctatatctatgtctatatcagtataaaatccgtgtgtgtgtgtgtgtgtgtgtttgtgtgtgtgtgtgaggatcaaaaactcatgatgaataacaggctttaaatttttttattcgttagcatatttccccaagccaacataattcttgtttttctctttttagaataagctcttgccatcatgttggtcagatagaagaagagccatctcatcttttgtttgttagagggtttcaattatttaataagagcaagtaattaagacattaagaattaaagtggctccaagaagagctctgagactcagaactgcagagtgttgcctaggtttctaagtttggatttcaacagaagtgtgaaaagtttctgctgctgcttcctt

SEQ ID NO: 3021 - DNA, 592 bp, Homo sapiens
  MAP TO CHR5.1; EXPRESSED IN PLACENTA, SIGNAL =  14; EXPRESSED IN FETAL LIVER, SIGNAL =  12; EXPRESSED IN LUNG, SIGNAL =  12; EXPRESSED IN HELA, SIGNAL =  11; EXPRESSED IN BRAIN, SIGNAL =  15; EXPRESSED IN HEART, SIGNAL =  18; EXPRESSED IN BONE MARROW, SIGNAL =  17; NT HIT: gi14728640, EVALUE 0.00e+00; SWISSPROT HIT: Q14155, EVALUE 1.50e-02; EST_HUMAN HIT: AW178011.1, EVALUE 1.00e-109
tcagaaaatccgtgaaacccctaaaattgtacacaaaattttgtatgtctgtgtctgtttcctttttcattgtaaagaaagttcaggacagctttcatcagaaggcttatattccacaaaaggttcagaacctttggtttaaacttctagaatgatgtaacttaataagtgattgtactcattgtccaagcttccttcatacacacacacacacacacacacacacacacacacacaccccacacacacatctgccgcctgctctatctgtaatgccatctcttctcgctttctctccccttcctgtacagttcacccatctcaggagcctggctggttggaggggactctgaacggaaagactggcctcatccctgagaattacgtggagttcctctaaccgtgggccccagcagaactgctgagctttacatggtatccatgacaactgctgattccagtgtcgaggccatttctctttgccactgagaaatgcagcgtgactgactctgttgctacctgtcaacatgaatgtttctgtgagctctggtgtcactcatctccatgatcatctcagccaacatgcatcagt

SEQ ID NO: 3022 - DNA, 556 bp, Homo sapiens
  MAP TO CHR20.1; EXPRESSED IN PLACENTA, SIGNAL =  83; EXPRESSED IN LUNG, SIGNAL =  71; EXPRESSED IN BRAIN, SIGNAL = 7.6; EXPRESSED IN HEART, SIGNAL =   5; SWISSPROT HIT: P02792, EVALUE 1.00e-80; EST_HUMAN HIT: BE748742.1, EVALUE 0.00e+00; NT HIT: gi16194881, EVALUE 0.00e+00
ccgtttttgtcgttagctccttcttggcgaccaaccatgagctcccagattcgtcaaaattattccaccgacgtggaggcagccgtcaacagcctggtcaatttgtacctgcaggcctcctacacctacctctctctgggcttctatttcgaccgcgatgatgcggctctggaaggcgtgagccacttcttccgcgaattgaccgaggagaagcgcgagggctacgagcgtctcctgaagatgcaaaaccagcgtggcggccgcgctctcttccaggacatcaagaagccagctgaagatgagtggggtaaaaccccagatgccatgaaagctgccatggccctggagaaaaagctgaaccaggcccttttggatcttcatgccctggattctgcccacatggacccccatctctgtgacttcctggagactcacttcctagatgaggaagtgaagctcatcaagaagatgggtgaccacctgacgaacctccacaggctgggaggcccagaggctgggctgggcgagtatctcttcgaaaggctcactctcaagc

SEQ ID NO: 3023 - DNA, 553 bp, Homo sapiens
  MAP TO CHR1.1; EXPRESSED IN FETAL LIVER, SIGNAL = 1.1; EXPRESSED IN HELA, SIGNAL = 0.88; EXPRESSED IN BRAIN, SIGNAL = 1.3; EXPRESSED IN LUNG, SIGNAL = 1.2; EXPRESSED IN HEART, SIGNAL = 1.4; EXPRESSED IN ADULT LIVER, SIGNAL = 0.77; SWISSPROT HIT: Q9Z207, EVALUE 9.00e-03; EST_HUMAN HIT: R06504.1, EVALUE 6.00e-60; NT HIT: AF091107.1, EVALUE 0.00e+00
gtgtgtgtgtgtgatgcctgacaagccccagagagccaaagacctgagtggagatcttgtgacttctcaaaagggggattggaaggttcgagaaggagctgtggtcagccttgctctcccttaaggctgtggtaaccacactaggcatagcataggcctgcgccccgtccctccttccctcctccgcgcctctcctttctctttctcccccctctaccccgctccctggcctgctcctggtgacaccgttggcccccttccagggctgagggaagccagcgggggccccttcctggaagcccacctgcaggccggcttgctgggaaggggctgctctcgcagaggctcccgcccgccctgcagccgtttcctggaagcagtcgctgtgggtattctgttccttgtcagcactgtgcttgcaaagaaagcagacactgtgctccttgtccttagggagccccgctccatcacccaacacctggctggacacaggcgggaggccgggtccgcggggagcggcgcggggctggggccggaccagtaaacacacacg

SEQ ID NO: 3024 - DNA, 598 bp, Homo sapiens
  MAP TO CHR7.1; EXPRESSED IN BRAIN, SIGNAL = 0.74; EXPRESSED IN ADULT LIVER, SIGNAL = 0.42; EXPRESSED IN BONE MARROW, SIGNAL = 0.74; SWISSPROT HIT: P26371, EVALUE 3.90e-01; EST_HUMAN HIT: AA422100.1, EVALUE 5.40e-02; NT HIT: gi4826977, EVALUE 1.00e-114
tcctggaaactaatgcgaggaccatcaggtgggtagttacctgggtttgctgaagtctgaaaagtacatctctgctagcaggtgccactggatgcccccattgttgctgtactgaaggaggacgccctcctctctgctgtcaggcttgttgcatgaagcactctctccgcctatctggatgtagaactggacaaagtccacccaagaagtatccaggtcccaactcaccagctgtcttttcccagcctttcagaaaagaagaaaaatcaaattcagtaatctgggagttctttggcattttgttgtttcagttccaaattcacatggacatcttagcactatgtggaaatggtctcgtccccatttattgtggagagagggcagtcatgccatttagttgtttctgatccgactacggtaactgttgctggatacctttggttaatgtctacattactgattcccaggctgggttatgagagacccttgggaattgctaattacaccaagagtactaaaaagctttttaaaattttaacgaaaacactctgaatccttactttgcatatttcctctaggcagaaccatgcagatgaaa

SEQ ID NO: 3025 - DNA, 537 bp, Homo sapiens
  MAP TO CHR14.1; EXPRESSED IN PLACENTA, SIGNAL = 3.1; EXPRESSED IN FETAL LIVER, SIGNAL = 4.5; EXPRESSED IN LUNG, SIGNAL = 6.4; EXPRESSED IN BRAIN, SIGNAL =  11; EXPRESSED IN HEART, SIGNAL =   9; EXPRESSED IN BONE MARROW, SIGNAL = 3.5; EXPRESSED IN ADULT LIVER, SIGNAL = 3.1; NT HIT: X15334.1, EVALUE 0.00e+00; SWISSPROT HIT: P12277, EVALUE 6.00e-62; EST_HUMAN HIT: AA608630.1, EVALUE 1.00e-104
gccttctccctcataccctcttctccgtctgcagattgaaactctcttcaagtctaaggactatgagttcatgtggaaccctcacctgggctacatcctcacctgcccatccaacctgggcaccgggctgcgggcaggtgtgcatatcaagctgcccaacctgggcaagcatgagaagttctcggaggtgcttaagcggctgcgacttcagaagcgaggcacaggtgagcagggcaggtgctgcggcttcccgtggcctttgggcagccctgtttcctccgccctgacttgctgtctccccaggcggtgtggacacggctgcggtgggcggggtcttcgacgtctccaacgctgaccgcctgggcttctcagaggtggagctggtgcagatggtggtggacggagtgaagctgctcatcgagatggagcagcggctggagcagggccaggccatcgacgacctcatgcctgcccagaaatgaagcccggcccacacccgacaccagccctgctgcttcctaacttattgcctgggca

SEQ ID NO: 3026 - DNA, 587 bp, Homo sapiens
  MAP TO CHR12.1; EXPRESSED IN HELA, SIGNAL = 3.1; EXPRESSED IN BRAIN, SIGNAL = 1.7; EXPRESSED IN BONE MARROW, SIGNAL = 1.5; EXPRESSED IN ADULT LIVER, SIGNAL = 2.4; EXPRESSED IN HEART, SIGNAL = 1.7; EXPRESSED IN LUNG, SIGNAL = 3.5; EXPRESSED IN FETAL LIVER, SIGNAL = 1.5; EXPRESSED IN PLACENTA, SIGNAL = 2.9; NT HIT: M25856.1, EVALUE 0.00e+00; SWISSPROT HIT: P04275, EVALUE 3.00e-68; EST_HUMAN HIT: AU141516.1, EVALUE 0.00e+00
ccagttagctggtctccaggattttcagaggtaacttggagactcaccacagaaatcaggtgtcctccagtcaacgcagaccccgttggtccgacagaggtgggcataagaggcgatcacctcacacacttgctcctggtggcaactgtcctgctggcagatggcatagaatgtggctggagccaggaccttgtggcattcagcaaacagtggtaagaggaggacctggcagtgggagctgtcggggacaagacactgctcctccaggatgggctggcacgtctgccctggccgctgcacagtccattcctgaacaagtgttttccagtctgtggtgactgtgccatccctcagcatgaagtcattggctccgttctcatcacagatccctagagaaacaaacaaacaaaaaaaagataaactgagtggccctgggtacaaaaacattgatgccagagacaggccattcttgatcctcaccagaatctgaccctcgctactagaccctgaaatataagcatccaagagcctcagagtagagcaagtaaggtttataaatgtatagcagggggagaagaggagttgag

SEQ ID NO: 3027 - DNA, 518 bp, Homo sapiens
  MAP TO CHR7.1; EXPRESSED IN PLACENTA, SIGNAL = 3.2; EXPRESSED IN FETAL LIVER, SIGNAL = 2.9; EXPRESSED IN LUNG, SIGNAL = 3.6; EXPRESSED IN HELA, SIGNAL = 2.7; EXPRESSED IN BRAIN, SIGNAL = 2.8; EXPRESSED IN BONE MARROW, SIGNAL = 3.3; NT HIT: gi14758449, EVALUE 1.20e-01; SWISSPROT HIT: P39814, EVALUE 4.80e+00; EST_HUMAN HIT: BE326609.1, EVALUE 1.80e-01
tttaggccctgaagcaaatggttctttcccccttttctaatttcctcctttccagacagtggggcttggctttttatcaaggaatcaaatgcccaccctatgggccttctgggactttttccaacctaaatacatttctttcctgtgaatgtgtaatcatttgcaagtgagtacacagctgaaaacctgttgataggaaatgctagaagagccagttctttttctgtggtgccaaatgtatcttggataaaaagaattaataattatgacttgctatttacttataattgcaatcaaaattcaagaggaaaaaggagattgccctttcttaggtagggtgtcatatgatatctgcacttcagtggaattgtactgaattcagaatacagtcctaggctttgaatttcaattagattccatccacttgaaatatggttccatgttaaacacaaacaaaaaaatctaaaaatgagtatgatggtctagcttcatggcttactgggagacagaacccaaaa

SEQ ID NO: 3028 - DNA, 593 bp, Homo sapiens
  MAP TO CHR4.1; EXPRESSED IN LUNG, SIGNAL = 0.98; EXPRESSED IN HELA, SIGNAL = 0.82; EXPRESSED IN BRAIN, SIGNAL = 0.76; EXPRESSED IN HEART, SIGNAL = 0.9; EXPRESSED IN FETAL LIVER, SIGNAL = 0.81; NT HIT: AL163246.2, EVALUE 0.00e+00; SWISSPROT HIT: P23074, EVALUE 8.00e-19; EST_HUMAN HIT: AA403053.1, EVALUE 1.00e-123
ggaagcaaaaagtgatcaaggtctctctgaataaaattatgatagaaagcaggagagttgatatacccctgaggtaggatagtaaaggtatattgctggctttgccagctgaaggcaaattgcttctggtgggtcttatggacaggaatggagaaaaagacatttgccaagtcagtggctgcataccaggtaccaggagatgtgttaatttgctcaagcaatgaaaccacatctggtacagcagctgcaattggagttgcctcttggttaagcttatgataatccactgtcattctccaagatccatctgtcttctgcacaggccaaatgggagagttgaaccggaatgtggtgggaatcaccacccctgcgtctttcaagtccttgatagtggcgctaatttccacaatccctccagggatgcaatattgtttttgatttactatttttctaggtagaggcagctttagtggcctccatttggccttttccaccataatagccctcaccctaccagtcagggagccagtgtggggattctgccggctgttaagaatgtctatgccaattttgcattctggcagtggggttat

SEQ ID NO: 3029 - DNA, 551 bp, Homo sapiens
  MAP TO CHR20.1; EXPRESSED IN FETAL LIVER, SIGNAL = 0.69; EXPRESSED IN BRAIN, SIGNAL = 0.61; EXPRESSED IN HEART, SIGNAL = 0.69; EXPRESSED IN BONE MARROW, SIGNAL = 0.69; EXPRESSED IN ADULT LIVER, SIGNAL = 0.83; EXPRESSED IN LUNG, SIGNAL = 0.77; EST_HUMAN HIT: AI074816.1, EVALUE 2.00e-01
cggttgtcatgctgtttttgagccgtttaaatagactgtgaagaaaaacatgtttgtcttcaggaaatgttgattgattacggaagaaagaaatttttgtgataggaatgtttgcatatttgttgtttttgttgttcttgctctttttgttttggaggtggaacatcatcagagaagcactcctacattcattcttccagcctcactttttcttctcaaattgagactaataattcaaacctatctgtatttcaaagaaggccaagatttccctttttcattttaatgagctatactacagttaagctgaatattaaattattacccacttggtgatcaaatatactgtcaatgttaccactggctctttgtttgaacccaaatgaagtgtggatttttattttgatcaatgacagctttctgagatctgcagttatgcttgattgggacaggctgtgacagccaatgcagtagccggcagacaattctttaatatatgaatctgactgacccaattatccatcccccacccccaaagcaaaaagcatctc

SEQ ID NO: 3030 - DNA, 600 bp, Homo sapiens
  MAP TO AC009789.19; EXPRESSED IN PLACENTA, SIGNAL = 6.1; EXPRESSED IN FETAL LIVER, SIGNAL = 5.7; EXPRESSED IN LUNG, SIGNAL = 4.5; EXPRESSED IN HELA, SIGNAL = 5.9; EXPRESSED IN BRAIN, SIGNAL = 6.3; EXPRESSED IN HEART, SIGNAL = 4.3; NT HIT: AF287967.1, EVALUE 0.00e+00; SWISSPROT HIT: Q61220, EVALUE 2.60e+00; EST_HUMAN HIT: BF996393.1, EVALUE 0.00e+00
agcaggaggagaagggagagaggagaggtgggctgtgggtaagtgtgtgtccatgggggttagggagctgcagatgtagtaggtatggatgtgagtgtgggagacagacggagacctcactactgttccattggtgggttgagggggaacttattttgcaggaaaatttctcctcctgaaggggaaggtcatagtggtcctttgagcctgaaatcgaaagacccccttccccctcccggtcacgtgattcattaaataattaatgccgaggttgcagaatagatatgtattcgtcaggaaaatcgcaggctcggtctccctgtttctgacgtgcaattcaactgtcctttgaaaaacaagcctgtaccccgagaaaaaaaaagagagagggggagagagagagggagagagagagagagaaagaaagggagacagcaataaaacagccccgcagccggagccacaccgcgggctggggtattgtaagtagaagggatttctcactacctaccgcgtcttatatgtccatgtaaatttattgtttgttattaatgttattgtcgtaaaatgtgacaaatagccatcttcatttcctgccat

SEQ ID NO: 3031 - DNA, 514 bp, Homo sapiens
  MAP TO CHR16.1; EXPRESSED IN BRAIN, SIGNAL = 0.58; EXPRESSED IN HEART, SIGNAL = 0.73; EXPRESSED IN LUNG, SIGNAL = 0.63; EXPRESSED IN FETAL LIVER, SIGNAL = 0.52; EST_HUMAN HIT: BG105325.1, EVALUE 4.60e-02; NT HIT: AB023148.1, EVALUE 1.00e-130; SWISSPROT HIT: P49595, EVALUE 6.30e-02
cttttcctcagcgagagtggaaggcagaactgtctccaccaccatcagccacagcaagtctgcatttaggtggataagggtaaggctggttcacgatcacatggtaaaaaaaaaaaaaaaaaaaaagaagggatgtacgtgcaggaccaccactttcttctaaaactagccaccacgtcttcttttccttttctttctgaacaggaaattaggaatggctggccagaagttgggctcctccgctctcctgtgctacatccgccctgacactgccgatccagcaagtagctttagcttgactgtagccaatgttggcacgtgccaagcagtcctgtgccgaggtgggaagccagtgcccctctctaaagtcttcagcctggagcaggacccagaggaggctcaaagggtgaaggaccaaaaagccatcatcacagaggtgtgttccgctccccgccagtcacttctgctccccaaatcagtggaggctgctttgtgtagaggtgatgaaggccca

SEQ ID NO: 3032 - DNA, 515 bp, Homo sapiens
  MAP TO CHR19.1; EXPRESSED IN FETAL LIVER, SIGNAL = 0.94; EXPRESSED IN LUNG, SIGNAL = 0.82; EXPRESSED IN HELA, SIGNAL = 1.2; EXPRESSED IN BRAIN, SIGNAL = 1.6; EXPRESSED IN HEART, SIGNAL = 0.77; SWISSPROT HIT: P30754, EVALUE 4.80e-02; EST_HUMAN HIT: BF875871.1, EVALUE 1.00e-94; NT HIT: gi14757401, EVALUE 2.00e-96
gtcattgtcctaccatggggtgggaaaaaaccttggattgggaggttggactgtacccctctcatgcacagtgggaaggggccagagggcctgactcttccctcacctgcccatggccccagatcctggcatatggcgacatgaaccacgagtgggtggggaacgactggctgcccagcctggggctgccccaataccgcagctacttcatggagtcgctggtggacgctcgaatgttagatcaccttaacaagaaggagctccggggccaactcaagatggtggacagctttcacaggtgggggctgcctggccagtggggacagtccaaagggaagccccaccccagagagtctttggccaataggattggccatgggagattcccaggcttatcttggcccttttagcctgagttctcaggaaatcctgactctgtgctcctttcaccaatgagatggtccacaggaaaagttcagatcctgaaatggcttggctagttaaccctggacccc

SEQ ID NO: 3033 - DNA, 550 bp, Homo sapiens
  MAP TO CHR17.1; EXPRESSED IN PLACENTA, SIGNAL = 3.3; EXPRESSED IN FETAL LIVER, SIGNAL = 3.2; EXPRESSED IN LUNG, SIGNAL = 3.1; EXPRESSED IN HELA, SIGNAL = 2.6; EXPRESSED IN BRAIN, SIGNAL = 3.7; EXPRESSED IN HEART, SIGNAL =   5; EXPRESSED IN ADULT LIVER, SIGNAL = 3.3; EXPRESSED IN BONE MARROW, SIGNAL = 3.2; SWISSPROT HIT: P08572, EVALUE 1.00e+00; EST_HUMAN HIT: AL542131.1, EVALUE 0.00e+00; NT HIT: U82695.2, EVALUE 8.20e+00
cctggctgtttccatcagagccctcggacactcccagcccgggctgagcacgcatcgtcgctccccggcggatacaagggggctccgccatccgctcccgtcagttcggcctccatctcctgggacccgcgccggcagccaggccaggcctctgagtggccccagagccctggctggactcgtccacggcggcagcgatctgcccggggtctcggaggccatcccttcagagtcggccctgtgctcgccaccgtcacctgctggttggattccggaaacccactgtctgaagaccacagaggggtgtcgctgaccaccccaaatcggatacgtccagacctcaagctcccttcccctctctggctgccctctgctcttttcatctcttctctcaaccttttggggatttctgtgtcctgacaccacctccccatccaccaccaaagtagccggggtgagccccaaaccttactgggtgtgctccacctgtgcctccaacccagcgaatctgacagcttcgacccaattctgcacacacccaggaagttct

SEQ ID NO: 3034 - DNA, 579 bp, Homo sapiens
  MAP TO CHR7.1; EXPRESSED IN HELA, SIGNAL = 0.5; EXPRESSED IN BRAIN, SIGNAL = 0.65; EXPRESSED IN BONE MARROW, SIGNAL = 0.62; EXPRESSED IN FETAL LIVER, SIGNAL = 0.61; NT HIT: M29440.1, EVALUE 0.00e+00; SWISSPROT HIT: P08183, EVALUE 6.00e-21; EST_HUMAN HIT: BF969062.1, EVALUE 1.00e-109
agtccaagaactggctttgctactttctgtaagtttctaatttactgaataagcatgaaaaagattgctttgaggaatggttataaacacattcttagagcatagtaagcagtagggagtaacaaaataacactgattagaatactttactctacttaattaatcaatcatatttagtttgactcaccttcccagaaccttctagttctttcttatctttcagtgcttgtccagacaacattttcatttcaacaactcctgctattgcaatgatgggtacaattgctaagagtaacagtgttagttgccaaccatagatgaaggatataattattcctgtcccaagatttgctatattctgggtaattacagcaagcctggaacctatagcctgcaaaacaaaacaaattagagaaattttaaaaatattatcttcacaactcatgcttctattttctgaaaactcaccttcatgagactatattcattattttatcagtaatgaactaaaaagtaaaggtctacttgtaagtttattgagtttctacagtaagaatttccatgacttcagaatgctga

SEQ ID NO: 3035 - DNA, 526 bp, Homo sapiens
  MAP TO CHR17.1; EXPRESSED IN BRAIN, SIGNAL = 0.53; EXPRESSED IN BONE MARROW, SIGNAL = 0.46; NT HIT: M33771.1, EVALUE 5.00e-01; SWISSPROT HIT: P41990, EVALUE 4.30e-01; EST_HUMAN HIT: T31587.1, EVALUE 7.40e-01
tgagctatgtgtcctgcctgaaacagtgttctgcatgtaaggggcacattgcctgaaatcatagcctccaagaaatggtgttcttgcctcattgctctggggggaacaatggcccctgtttgtttaatctcagcccattgtggcagccttgactgcacagagctcacctgtgattcatgtgaatgtcacttgagctcccaggagtttgcagccataattcaacattttgttaatagccacttaaaatgtccctgaaatagctaacaggcccgggggaatgaagtattctgctaggaaatcattccaagaaagccatcttggcccaaactttagaagattctattacttccaatgccttcttgcactctgtgaaaatacaaatgggcatctctcagggacaccaaggaaaaagtggaaactgaaattacctacacatcatagtgggcatgctggagaccctgcccaatcactcctgctccaagagaggcccctcaactgctatatcccgtgaggaaggggaaataca

SEQ ID NO: 3036 - DNA, 558 bp, Homo sapiens
  MAP TO CHR7.1; EXPRESSED IN HELA, SIGNAL = 1.4; EXPRESSED IN BRAIN, SIGNAL = 0.88; EXPRESSED IN BONE MARROW, SIGNAL =   1; NT HIT: AF038035.1, EVALUE 8.30e+00; SWISSPROT HIT: P52918, EVALUE 4.00e+00; EST_HUMAN HIT: BF666085.1, EVALUE 2.00e-01
gaattccgtgtcaaaggctcaaaatctcattttactttttatacatcttgggacctgcaaaagtgacttcacttctctggaactcttttctctcatctagaaaatgtaaagatgaatactaacctgctttgatcaaaagcttgttacatgggggaaaaaatacatttgtaaaggtctttggaaaatacaaagagctatagaaatgttagataataaaggttttgtccaagcaagactggaatggctacttctcctcattttgaccttctgttgaactcaccttcctcttcaggctacaaaagaaggaaccctatatttcctctctaaggaagtttttaaaatacattttaaaatgccttttatattcatgtttcaagttctgctggaactggcttttccccccccattatatatacaagataatgaggaattcagaagaaccacctgctgatgaaaacattcacaagctggcctgctgcccagcaaggatgagtccaatccataagcaactggagaaatctgcctcctttaacacaagcagtcgggtccctaatcttg

SEQ ID NO: 3037 - DNA, 567 bp, Homo sapiens
  MAP TO CHR5.1; EXPRESSED IN FETAL LIVER, SIGNAL = 0.53; EXPRESSED IN HELA, SIGNAL = 0.59; EXPRESSED IN BRAIN, SIGNAL = 0.72; EXPRESSED IN BONE MARROW, SIGNAL = 0.68; EXPRESSED IN ADULT LIVER, SIGNAL = 0.63; EST_HUMAN HIT: BG107176.1, EVALUE 8.00e-01; NT HIT: U10330.1, EVALUE 5.40e-01
aaccatgcccaaaatacagccgggaaacggagggtaggtggcatttccccctcctgcagggaaatgctgcatgacatgcatagatgctgtatgacatttatgcatgtatcagcagtcaaccccaaatagttgagggcatgaatgagtgcgggggcccctgacagaaaactgagcaggaagagaagccagacaaatcactgtcatggtccaaagaacagtgagaatcccatgggaatgcagcttccaagcagatcccatgagaacatctgggatgaagacactcacgccaggccctaaacccagattcattagtaagagtgcggcatttcttctcatttttaaatttatcttctcatacaccacaagtatgattttcttgccttctgcacattttcttaccgggagtaggaaaaggatggtggagaatgaacattaagctgtacattgaggtgctttctcccggataccttctcatttggggttactcaactacaagcaacagaaactcattctgcctaatttaagcagagaggaaggtgacataggagagtgaagggcttgtgggta

SEQ ID NO: 3038 - DNA, 501 bp, Homo sapiens
  MAP TO CHR14.1; EXPRESSED IN FETAL LIVER, SIGNAL = 0.56; EXPRESSED IN BRAIN, SIGNAL = 0.46; EXPRESSED IN HEART, SIGNAL = 0.69; EST_HUMAN HIT: BI046916.1, EVALUE 1.00e-73; NT HIT: gi14783127, EVALUE 4.80e-01; SWISSPROT HIT: P30531, EVALUE 4.60e+00
ttctgctttgtcactgtgggctgcaggagggagacggagacctagcatctctggtcataaagtccttcctgcgtcacagggacccctcccagccgccaggatgtggggcggtaggtgaatgaatgatggatattgttcaggaggtgacctaagcacccaggaatgtggcagcagtgggctttaatgagccattcatcaatgattccctccctcaacccgaagaggcaaagccctctctactctggggcgctgattaagaaacaaacattcggcagacacagggcaaccgagtggttccagtgggcagagcgatggtgagctggagggaagaaagggccttggtgggatgcggctgacccagctgaacaaactcgccttctcttttcttcctgccttcctgttacaaaacatgttctcagaactgaagggggtggagggaaatggctgttggaagctggaattccactaagcccagaataaagggagtctcttgcaaagtcg

SEQ ID NO: 3039 - DNA, 546 bp, Homo sapiens
  MAP TO CHR6.1; EXPRESSED IN BRAIN, SIGNAL = 0.77; EXPRESSED IN HEART, SIGNAL =   1; EXPRESSED IN BONE MARROW, SIGNAL = 0.76; EXPRESSED IN LUNG, SIGNAL = 0.95; EXPRESSED IN FETAL LIVER, SIGNAL = 0.64; SWISSPROT HIT: Q06430, EVALUE 1.00e-33; EST_HUMAN HIT: AI654230.1, EVALUE 2.00e-57; NT HIT: L41607.1, EVALUE 0.00e+00
acccagccatcctgttagtgtatttcacagtgtccagtggatattttaagtataattacgtagccaggtcctgaagctataaacgtggtcctgaaacggttaacattacgaaggcaaaagtctctcacaaaaacaggctcctcttcccagctgcagtttcccttcagtcatgagtagctcatgaatagctcaaaaataccagctgggttgtatcgcagtttcactctgattgagggttctttcgcgatgcctcagttctaggcattccacagtaagggggtaggtattaagctcaaacttgttagcaaacaggcttggtgaattaaccagccactttaagtctccgtttccatagatacaaataccatgtacatagtggcctgcaaaagaaagaacaagaaacagagtcaaaacatgcttgctttcaaaagggtgatgaacttacagaatactagaggtactctccgactaactacaactgtgccaatggtacaggattcaaatgaaatatgattgtgcagtctcagcccacaaagaactggaact

SEQ ID NO: 3040 - DNA, 526 bp, Homo sapiens
  MAP TO CHR1.1; EXPRESSED IN PLACENTA, SIGNAL = 1.7; EXPRESSED IN FETAL LIVER, SIGNAL = 0.8; EXPRESSED IN LUNG, SIGNAL = 0.88; EXPRESSED IN HELA, SIGNAL = 1.2; EXPRESSED IN BRAIN, SIGNAL =   1; EXPRESSED IN HEART, SIGNAL = 1.2; EXPRESSED IN BONE MARROW, SIGNAL = 0.97; NT HIT: gi16158658, EVALUE 9.00e-86; SWISSPROT HIT: P12936, EVALUE 1.90e-01; EST_HUMAN HIT: BE926421.1, EVALUE 1.00e-85
ctcttgccctggtttctcagtgagcccaatgggagcagagctgacggggaggggaaggcctgactcaccattcggaactgtgcctgggcctgctgcagcaggctctcctgctcagactgggcaatgctgacgaagatgccaacctctgggttgaactgcaggatgctgccttgcaggcgggcgatgaaatgaccaaagctgcggatgcagcagatgcgcaccactgactgtggggagatacaggagcccagcgctgctgagcagggccctctagacccaccctgccctccaggaccctccactcccaccctcccacctccctgctggcccagccacctcagccaacaagggctccaggggaagatttgtggtctatggggtgggaaggagaaacactaaggcccagagcctctaactgccagaaaacgagtaggtacagcaagaaaactcctaggaggaccagaaaaccaggacttgggctaagaaacaagagcaaaggacactgggctggaagtgaggagacctg

SEQ ID NO: 3041 - DNA, 555 bp, Homo sapiens
  MAP TO CHR7.1; EXPRESSED IN PLACENTA, SIGNAL = 3.3; EXPRESSED IN FETAL LIVER, SIGNAL =   3; EXPRESSED IN LUNG, SIGNAL = 2.4; EXPRESSED IN HELA, SIGNAL = 3.3; EXPRESSED IN BRAIN, SIGNAL = 3.5; EXPRESSED IN BONE MARROW, SIGNAL = 3.5; EXPRESSED IN ADULT LIVER, SIGNAL = 2.7; SWISSPROT HIT: P80046, EVALUE 6.90e+00; NT HIT: AB051545.1, EVALUE 1.00e-112; EST_HUMAN HIT: BI032159.1, EVALUE 1.00e-112
caacacaaatcacagcagggataatgcagtttcactgattaaagcaaaatacatttccgtttctcaaagatacggactgttcaaaataatgcatttatttagtatccaagctggggttttgtgaaccagcaccaactttacttggaggtctagaattcaaacattaaccagtaattaaaatcacagttctggaacactgctataagatgtatatttttctaattacaaagaaagaaagctctctaaaaacagcttttaaaaggtatttcacaagggtgtgaatttcctctcctctctgcagaaacccacatacctgctctggggaggggacagccatgcagtacagctttatttagcaagatgctgagagcagctttgaccacagcctgctgtccttggctagggtgtcttttagcagttgtctgcccaaagccaggttgtcttttcacagaggctcttgacaatattgcttcttgaactctgggtgcgatgacgccattccacagcttagacatccacctagcaggagagggaccgattcatcccttaggagca

SEQ ID NO: 3042 - DNA, 518 bp, Homo sapiens
  MAP TO CHR17.1; EXPRESSED IN BRAIN, SIGNAL = 0.79; EXPRESSED IN BONE MARROW, SIGNAL = 0.93; EXPRESSED IN LUNG, SIGNAL = 0.86; EST_HUMAN HIT: BE549944.1, EVALUE 0.00e+00; SWISSPROT HIT: Q62981, EVALUE 6.00e-90; NT HIT: X81804.1, EVALUE 0.00e+00
cgttttgctaaatccaaggcattcatagagaactttaatgagtatgaattctctggtgtctaatgtgatgcgacttttggctgaaagctttcccacattcactacactgataaggtttttcaccagtatggattctcatgtgcagagcaagggttgagaactgagaaaaggctttcccacattcattacaaccatagggtttctcacctgtatggcttctcatatgcacagtaagagatgagctttgacagaaggctttcccacagaccttacactcataaggcttatcacctgtatgaattctcacatgtacaataagtgatgtgattcgagagaaggcttttccacatttattacattcatagggtttctctcctgtatgaatattgtgatgtttaatgaggtattgcttctgcctgaagattgttccacattcattacatttgtagggtttctctccaatatgaattttctcatgctctgtgagatttgacttgccactgaaggctttcccacat

SEQ ID NO: 3043 - DNA, 505 bp, Homo sapiens
  MAP TO CHR19.1; EXPRESSED IN HELA, SIGNAL = 0.87; EXPRESSED IN BRAIN, SIGNAL = 1.1; EXPRESSED IN HEART, SIGNAL = 0.96; EXPRESSED IN ADULT LIVER, SIGNAL = 0.72; EXPRESSED IN BONE MARROW, SIGNAL = 1.2; EXPRESSED IN FETAL LIVER, SIGNAL = 0.84; EST_HUMAN HIT: T84680.1, EVALUE 5.00e-05; SWISSPROT HIT: O10341, EVALUE 1.60e-02
caggagagaccgagatcaggttgggattggagatgtggatgagcttgcagtggtctgggctgatgacaggattgtgtttggggtcaaggactagattggggttgcactggttggggttgggcttggggacatgccatatggaaagaccgttctctaatacagatgctgagcgttggaggtgatggattccgcaaaccgaggtcagggccgctgcagaaggttagggactccggggaaaaggctggcagtgaggaagaggaggaggggctcaaagagggaagctctggtggccaagacatcctgcgggcctgagaggctgggggcttgagggatgcctcggaagtgagtcaggggctgggcactgggaggcagacagagggttggagggggcaggatgtcagcaccagtttgcagaggcgggtgttggagccaggaaggggaaagacgtcggagacagttttgggaaaatgttgcagccaggtttggggatgttggatccagtttg

SEQ ID NO: 3044 - DNA, 597 bp, Homo sapiens
  MAP TO CHR14.1; EXPRESSED IN ADULT LIVER, SIGNAL = 4.4; EXPRESSED IN PLACENTA, SIGNAL = 7.5; EXPRESSED IN FETAL LIVER, SIGNAL =   4; EXPRESSED IN HELA, SIGNAL = 8.4; EXPRESSED IN BRAIN, SIGNAL = 5.3; EXPRESSED IN HEART, SIGNAL =   4; EXPRESSED IN BONE MARROW, SIGNAL = 4.3; EXPRESSED IN LUNG, SIGNAL = 2.9; EST_HUMAN HIT: BI906722.1, EVALUE 5.00e-67; SWISSPROT HIT: P01739, EVALUE 5.00e-29; NT HIT: L11159.1, EVALUE 0.00e+00
gttgagctgtgagtttggggcatctttatataggaaaataatgtacagtatctggagttactgtctattctagatctataggtagaagcatgattttttttctaactaagggaaagtaggggcaccagtgaaaagaggatttaaattctggggagtaagcatctattacccagccagtcttctctgtctgaccactgtctttttcacaggggtttggagccaacagaaggaggtggagcagaattctggacccctcagtgttccagagggagccattgcctctctcaactgcacttacagtgaccgaggttcccagtccttcttctggtacagacaatattctgggaaaagccctgagttgataatgttcatatactccaatggtgacaaagaagatggaaggtttacagcacagctcaataaagccagccagtatgtttctctgctcatcagagactcccagcccagtgattcagccacctacctctgtgccgtgaacacacagtgctccccagacacctgcagtctgtacccaaacctgccatgccccaggaatgcctgatgtagagcttagactgcagggtagtgaaactcccc

SEQ ID NO: 3045 - DNA, 568 bp, Homo sapiens
  MAP TO CHR18.1; EXPRESSED IN PLACENTA, SIGNAL = 3.2; EXPRESSED IN FETAL LIVER, SIGNAL = 2.5; EXPRESSED IN HELA, SIGNAL = 2.5; EXPRESSED IN BRAIN, SIGNAL =   3; EXPRESSED IN LUNG, SIGNAL = 1.9; EXPRESSED IN ADULT LIVER, SIGNAL = 3.6; EXPRESSED IN HEART, SIGNAL = 2.3; EST_HUMAN HIT: BE336624.1, EVALUE 1.00e-95; SWISSPROT HIT: P70030, EVALUE 1.40e+00; NT HIT: gi15306844, EVALUE 0.00e+00
ctgctgcctgagtgctagtgccttgttttctgttgaaggtaccccaggctgcacagcatggtcgtccgctgctatcttctcatccagcagtactctgaggccctgatggctctcaccaccatggcgtcactccgcgaccacagcacaccagaaacactcagcattatggatgacctcatcagctccccaggcaaaaacaaaagtgggaggggacacatgctcattatcagggtgccctcggtgcagctggcgatgttagccaaggagcggctacaggaggtgcgcgacaaactgggtctgcagtatcggtttgagatcatccttgggaacccggccaccgaactcagtgttgcaactcactttgtggcgcgattaaaggttagcaatggacagacatttctcctttaaaataccatttgtttctcttttctaggaatcctacataggtggctcaggggcctgagtttaatagaatcacatgtgtgattccatgacaatgataaggctaaattaagggacatattcactttcttaattagaaccagtttgtaaagattgcccagccctt

SEQ ID NO: 3046 - DNA, 578 bp, Homo sapiens
  MAP TO CHR11.1; EXPRESSED IN BRAIN, SIGNAL = 1.1; EXPRESSED IN HEART, SIGNAL = 1.4; EXPRESSED IN ADULT LIVER, SIGNAL = 1.9; EXPRESSED IN BONE MARROW, SIGNAL = 1.1; EXPRESSED IN PLACENTA, SIGNAL = 1.5; EXPRESSED IN LUNG, SIGNAL = 1.6; NT HIT: gi14773489, EVALUE 0.00e+00; SWISSPROT HIT: P39188, EVALUE 3.30e-02; EST_HUMAN HIT: AI499710.1, EVALUE 0.00e+00
tagatgcccagtgaaaacccctcaccccaatctctgccctgcctgcaggagccctcgtactcggtgctggtcttctcttctctctccggtctgtgcgctcagtggtgcttcgagctggagggcagcaggtgaccctcaccactcatgccccctttggcttgggggcccatttcacagttcctttgaagcaggtatcttgcatggcccaccggggtgaagtccctgccatgctacctctgaaagtcaaaggccgacgcttctatttcctcttggacaaaactggacacttccctaacacaaaactctttgacaatactgtgggtgcctaccggagcttgtgaagaaatgacctcaagtcactcacctctccaagaggaggataaaaactgaaccttggggagccaggtgtgttggttcacacctgttgtaatcccagcactttgggagggtgaggcaggagcactgctcgagcccaggctgggcaacatagcgagaccttgtctctatttacaaaaaaaaaaacaaaaaaaaacgccaatcttagaatggagtaacaaccagggtcacacaaggaggtc

SEQ ID NO: 3047 - DNA, 540 bp, Homo sapiens
  MAP TO CHRX.1; EXPRESSED IN HEART, SIGNAL = 0.45; EXPRESSED IN ADULT LIVER, SIGNAL = 0.68; EXPRESSED IN FETAL LIVER, SIGNAL = 0.54; EXPRESSED IN BRAIN, SIGNAL = 0.59; NT HIT: L44140.1, EVALUE 0.00e+00; SWISSPROT HIT: P51805, EVALUE 4.00e-38; EST_HUMAN HIT: AU131481.1, EVALUE 1.00e-129
tctcggacacacaactcctgtgcgactcacccagccagactggccggcagcctgtcatggtaggtggggatggggagaccccctgggcagcccagggtgggcgtggtggtcagctcacctcaggcctgtccccacaggtgctggtgggtggcctggagttctggctgggcaccctgcacatctcggcagagcgggcgctgaccctaccggccatgatggggctggcggcggggggtgggctcctgctgctggccatcacagccgtgctggtggcgtacaagcgcaagactcaggacgcggaccgtaccctcaagcgtctgcagctgcagatggacaacctggagtcccgtgtggccctggagtgcaaggaaggtgcctgaggcggggcgggatgtggtgtggaagctggggacctccctcctgcccactcattccctctctccaccccccagcttttgcagagctgcagacggacatcaatgagctgactaaccacatggacgaggtgcagatccccttcctggactaccggacttacgc

SEQ ID NO: 3048 - DNA, 530 bp, Homo sapiens
  MAP TO CHR17.1; EXPRESSED IN BRAIN, SIGNAL = 0.41; EXPRESSED IN HEART, SIGNAL = 0.56; EXPRESSED IN BONE MARROW, SIGNAL = 0.35; NT HIT: gi14770914, EVALUE 3.00e-70; SWISSPROT HIT: Q15027, EVALUE 8.60e-02; EST_HUMAN HIT: AA515579.1, EVALUE 2.90e+00
gccattacgcctgtcctaacttctctgcttgatccgtgtcctaggtccagttcctggtagatcatggggccatgatcgagcacgttgactacagtggaatgcgccctttggatagggcagtggggtgccggaacacttctgttgttgtcactcttctgaagaaaggagccaagataggtaggagaagggaagaggatgttggccatctgtgcccaggggccagactggtccagtggtctggctgccctgggtatttggtgtgagtgtatatagttccccctcctccctggcccaattattgtccaagtgaacagagaggctcttggcccagggaaagcgccatctgagccatggtctgcagtcccctgtgtccagaaccacgtggttctctaccatgtcccttgtagccttagccaggaggctgctctggccttaagcacctctcagcactgcctctgttccagccccactctatcagcatcctggatctctgcgctgccgtgagcctttgctttcccttgctctgaatg

SEQ ID NO: 3049 - DNA, 524 bp, Homo sapiens
  MAP TO CHR6.1; EXPRESSED IN PLACENTA, SIGNAL = 2.6; EXPRESSED IN FETAL LIVER, SIGNAL = 3.1; EXPRESSED IN BRAIN, SIGNAL = 3.4; EXPRESSED IN HELA, SIGNAL = 3.2; EXPRESSED IN LUNG, SIGNAL =   2; EXPRESSED IN HEART, SIGNAL = 1.8; EXPRESSED IN ADULT LIVER, SIGNAL = 4.8; EXPRESSED IN BONE MARROW, SIGNAL = 4.3; SWISSPROT HIT: P46013, EVALUE 2.50e-01; NT HIT: gi7661965, EVALUE 0.00e+00; EST_HUMAN HIT: BG539279.1, EVALUE 7.30e-01
tgtctcctcattctccctgccaatatacaaacttacctacttcctcctccgagtcctcagccaacagaagcctctggggttgagtttctccctgtactctgggtgtctcttctactgtcagagggccccgggagacaaagggcagagagacatccaggcgatggtactggcagagcaagtcagcaaagagaatcaattcctggtccctcagacggtgactcaccccagggctcaaaaccttaggaggtctcaggatttgagtaccattaaggctcccacagtctcggaggataggtgccttgtcccaggctaagatttcaatctctgcatgttgtttggagatagatggaaagggcagggccacagagcagtcaggcattcggcctaccacattcttcccgaggtgtagtgggaaatctaagaattagagaggtagataagctccaagatcagagtcctggcctgtcattaggaaaaagtgcctattaggtactctactactcactcaaggcctccatatgcat

SEQ ID NO: 3050 - DNA, 515 bp, Homo sapiens
  MAP TO CHR17.1; EXPRESSED IN LUNG, SIGNAL = 4.3; EXPRESSED IN PLACENTA, SIGNAL = 4.2; EXPRESSED IN FETAL LIVER, SIGNAL = 3.5; EXPRESSED IN BRAIN, SIGNAL = 4.6; EXPRESSED IN HEART, SIGNAL =   4; EXPRESSED IN ADULT LIVER, SIGNAL = 3.8; EXPRESSED IN BONE MARROW, SIGNAL = 5.2; EST_HUMAN HIT: BI546006.1, EVALUE 0.00e+00; SWISSPROT HIT: P45700, EVALUE 1.20e+00; NT HIT: AJ310932.1, EVALUE 4.90e-01
cagaggaatggagaacaggccagttgagactggtcatttttaacttctcccaaagactgagaccccactcagggattccactgacttaccttcagctgctgctgccccctaatgggcctaatgggaaactctggtagaaagaggttgatgaactgaggcactggccactctggcagaggcttctctaccagtactggggctggctttagggattcctggtgcagatagtggtgcccccgtagttcccagagttcttccagatctgacctgatggttcccaaacctgtccagaggctcttccagcctcgggcccagggaccccggatgttgccaccctgctgagaaccaagggagccactctaaactttctgctcctgaggcatagcaggttccacccatcttactaggcactccctccccttaagtctcaacccctagaggtacatttttgagcatgaggcaaaattcccattacccttgctttgtgctaagccccagatttcctgggcacaatt

SEQ ID NO: 3051 - DNA, 593 bp, Homo sapiens
  MAP TO CHR19.1; EXPRESSED IN BONE MARROW, SIGNAL = 1.6; EXPRESSED IN PLACENTA, SIGNAL = 1.4; EXPRESSED IN FETAL LIVER, SIGNAL = 1.6; EXPRESSED IN BRAIN, SIGNAL = 1.8; EXPRESSED IN HEART, SIGNAL = 1.8; EST_HUMAN HIT: AA604207.1, EVALUE 1.00e-117; SWISSPROT HIT: P31751, EVALUE 4.00e-13; NT HIT: gi14763788, EVALUE 1.00e-63
gaatgagggcagaagctcagcccaacttccccagtgtgagtcccatgtggtgtgcatgccacaggtcagcctggcgcacaccctgccactaaccttgatgtcgcggtataccacgtcccgcgagtgcaagtactcaagagccgagacaatctctgcaccataaaaccgggcccgctcctctgtgaagacacgctcccgggacaggtggaagaacagctgcaggaggaaggggtggggagaggaggtcaggccccagcccacccacctgccctcaccttcccagccccctgccccagcgcagtgatgtggtgacacctgtatcatgaaccagcaagtgacagctagagggaccaatcaaggcagagcgcagaagctcataagtgacacagagctggggggaagggcgagggtctgccaggaggcacccatgagagggtatgggagagacatccgagacaggagggaggatggcatggaggcaaaaagaagcacacgtcatgaccaagtaacaataggccatgggcaagcccagatcagacagatgagcaaaccacgcatcccaaagcaggtgtgccaaccactgcacagagaag

SEQ ID NO: 3052 - DNA, 535 bp, Homo sapiens
  MAP TO CHR13.1; EXPRESSED IN PLACENTA, SIGNAL = 1.4; EXPRESSED IN FETAL LIVER, SIGNAL = 1.4; EXPRESSED IN BRAIN, SIGNAL = 1.8; EXPRESSED IN HELA, SIGNAL = 1.6; EXPRESSED IN LUNG, SIGNAL = 0.86; EXPRESSED IN HEART, SIGNAL =   1; EXPRESSED IN ADULT LIVER, SIGNAL = 2.2; EXPRESSED IN BONE MARROW, SIGNAL =   2; SWISSPROT HIT: P76463, EVALUE 3.80e+00; NT HIT: AF084363.1, EVALUE 7.90e+00; EST_HUMAN HIT: BF765923.1, EVALUE 0.00e+00
accaaagggtcacactaccggaatttataaagcagaatgagaaactgacagaaatagggaagaggacatctcaagggcttttcttgttaagcgtcgttgctatacatcagcttagtactccaggctcatcgggggacagatggagaaatcacaacttgccaaatgtttattatatgtgcagatggctgtttctgttttgaatcttccattcttttatttccccatcgatttgtgtagatatgaacagttgctcccttaaggctttatcctgtgtaattagggttcctccggtacagcacttcactctctctccatccaccccttccttttcatatggtcagcgcagctccatccctgagtgtgtctgctcacatttaccttcccatgccactccacccacaatcttgccagtgtaactcagaatgtccttgctgataaccattcagtgaaagacaaggtgaaccaaagctttgtggttaaaataagctggactcaaactcaactcctgaggggtgcccagcaaatgaacactcct

SEQ ID NO: 3053 - DNA, 518 bp, Homo sapiens
  MAP TO CHR15.1; EXPRESSED IN LUNG, SIGNAL = 2.6; EXPRESSED IN FETAL LIVER, SIGNAL = 2.2; EXPRESSED IN BRAIN, SIGNAL = 2.3; EXPRESSED IN HEART, SIGNAL = 2.5; EXPRESSED IN ADULT LIVER, SIGNAL = 1.8; EXPRESSED IN BONE MARROW, SIGNAL = 2.8; NT HIT: D38076.1, EVALUE 2.00e-83; SWISSPROT HIT: P43487, EVALUE 7.00e-25; EST_HUMAN HIT: BF896290.1, EVALUE 4.00e-95
agaggcacgtctgaaaaacgtatttctggttttaaattcaacaaacacaccacaaacttgcactccatgaaataacacgctccccagttcccaatcagccctgaatcttcccaaaggtcccaggccaagctgctggggactgtcgaggtggtcgttcatgccacctactgtagtggttggcacagatcttcagggtcttgtccctccgcatgaggaggcggatggcccctttctccttgtgcttcaggagcttgacgtcaccagtgcctcgctccttccattctgggagatcgttctcagaggcaaatcggaacagttttgcccgcctgcaagaaaagccgtgaggttaagagtgcagacctgcagcccacatgcagggcctgcgcaggaggacacaggacaactctgcactgcaggaccccatgcctccacgaacgccccagcccttcttcaggctccaagaactgcccgtcacaacaccaccagaaagcgcagcagcccaacaaactccaggtcat

SEQ ID NO: 3054 - DNA, 559 bp, Homo sapiens
  MAP TO CHR5.1; EXPRESSED IN FETAL LIVER, SIGNAL = 0.77; EXPRESSED IN LUNG, SIGNAL = 0.73; EXPRESSED IN BRAIN, SIGNAL = 0.94; EXPRESSED IN BONE MARROW, SIGNAL = 0.99; NT HIT: gi14861871, EVALUE 0.00e+00; SWISSPROT HIT: P03302, EVALUE 1.40e+00; EST_HUMAN HIT: T05576.1, EVALUE 1.00e-128
tgcacttggtctttgctgacagcttgcaggaggtgctgccggatatcactgaccgccctgtaccctctgacccccaggctgagctgcagttttacctagtggtggccttggccttgatctcagtgctcttcctcctggccgtgattctggccgttgccttgcgcctgcgacgctcctccagccctgccgcctggagctgcttccaacctggtctctgtgtcaagtctggacctgtggttccccccaactacagtcaggggactttgccttattcctacaacctatgtgttgcacatacaggaaagacggagtttaatttcctaaaatgtagtgagcaattgagttcaggacaagacatactttgtggtgattcatctggggccttatttccactttgtaattccagcgagtcgacttcccatcctgagttggtgagtttcatttatgtctattctttttcattacccacccaattttctgtatttacatgaaactatcgtacattttcaagtccaatgagttgtcttagggaagtcagagctgctcagaaagctgtcct

SEQ ID NO: 3055 - DNA, 594 bp, Homo sapiens
  MAP TO AC011772.3; EXPRESSED IN ADULT LIVER, SIGNAL = 1.9; EXPRESSED IN FETAL LIVER, SIGNAL = 1.4; EXPRESSED IN PLACENTA, SIGNAL = 8.5; EXPRESSED IN HELA, SIGNAL = 1.4; EXPRESSED IN BRAIN, SIGNAL = 1.4; EXPRESSED IN HEART, SIGNAL = 1.2; EXPRESSED IN BONE MARROW, SIGNAL = 0.95; NT HIT: gi4506310, EVALUE 7.00e-96; SWISSPROT HIT: P10586, EVALUE 2.00e-30; EST_HUMAN HIT: BE392669.1, EVALUE 1.00e-95
gagaagcaggtcaaccttggctcttaccccaccccacccgctttctccattctttgcagtccatcgaccctggacagcagttcacgtgggagaattcaaacctggaggtgaacaagcccaagaaccgctatgcgaatgtcatcgcctacgaccactctcgagtcatccttacctctatcgatggtgagccaagggggtgcccctcccatccccttgctctcccccttgctagctagggcaacatgtcattctacagaggatgtccacgagtctcaggggtgcactgaggcatggtgggctgggctggggaccctgtagtaatgccctcccacctcctttcttatccataggcgtccccgggagtgactacatcaatgccaactacatcgatggctaccgcaagcagaatgcctacatcgccacgcagggccccctgcccgagaccatgggcgatttctggagaatggtgtgggaacagcgcacggccactgtggtcatgatgacacggctggaggagaagtcccgggtgaggctgcagggccctgccaggaggcgggtgggaaatgcccagccacaaggtgatacagggcacct

SEQ ID NO: 3056 - DNA, 570 bp, Homo sapiens
  MAP TO CHR2.1; EXPRESSED IN HEART, SIGNAL = 6.9; EXPRESSED IN BONE MARROW, SIGNAL = 1.4; EXPRESSED IN PLACENTA, SIGNAL = 1.3; EXPRESSED IN FETAL LIVER, SIGNAL = 1.1; EXPRESSED IN LUNG, SIGNAL = 0.63; EXPRESSED IN HELA, SIGNAL = 1.2; EXPRESSED IN BRAIN, SIGNAL = 1.3; EST_HUMAN HIT: AL596747.1, EVALUE 6.00e-94; NT HIT: AJ277892.1, EVALUE 0.00e+00
gcatgaaacaaacgcaaaagaataaaatcaaagcacattgttactatcagtcatccttaaaagtgctttaaagtaaagtgctgcctgttgttaatattgtttcagaagtaactataatggaagagaaagaaagggcttataccctagaagaagaagctgtttcagtacaacgggaagaagaatatgaggaatatgaagaatatgattataaagaatttgaggagtatgaaccaacagaagaatatgaccaatatgaagaatacgaggagcgggagtatgaacgatatgaagagcatgaagaatacatcacaggtatgagcaaaactgcaaactcaaaaccacactaaatatgtgcacactcaaacaagataaaacaagataaatcataacaagataaaaatttggatacccaaagaaatttggaaagaactttgtttcatttcgcaaatgcggaattttcttctttgataacttctagaaaaaattttaaaaaccctctataaatcttaaggttattgttagacttttgttccgggaataatctaatacccccctcatttttgctcgtat

SEQ ID NO: 3057 - DNA, 520 bp, Homo sapiens
  MAP TO CHR19.1; EXPRESSED IN HELA, SIGNAL = 6.8; EXPRESSED IN BRAIN, SIGNAL = 5.2; EXPRESSED IN HEART, SIGNAL = 4.8; EXPRESSED IN ADULT LIVER, SIGNAL =  10; EXPRESSED IN BONE MARROW, SIGNAL =   5; EXPRESSED IN FETAL LIVER, SIGNAL = 5.7; EXPRESSED IN LUNG, SIGNAL = 3.6; EST_HUMAN HIT: BG741022.1, EVALUE 1.00e-108; SWISSPROT HIT: Q99541, EVALUE 4.00e-08
gacaggtggctaggctgaagatgacccccaggagtgtcatgcagatagaccaaggaggatgggacagggggcggtgggggggtggcaagccacagctcccagggacacgggccagggcactcacgctggggctgcaggtgctcgagcagcggctgggcgtggtccagggcacgggtggtcaggccgcacacgcagttctcagccaggcggcaggcggagcccagcagcgggtgcctgtccttggctgcactgtaaacatcgcagaccgcggtgcacgtggccctgaccaggggcagagccaccacacgctgcaccacgttctgcgggaagggtcggcatcagggggaccctgggggaagtggggccctagccacacctcaacctacttcccctctctgggccaggacgagggatgggagagtggaaggatggagtactgagcaccccgccacgtagaggcagtgaagataaacgtggatgtgagaatgtcatggttcctgcactcacaggctcctcttcc

SEQ ID NO: 3058 - DNA, 509 bp, Homo sapiens
  MAP TO CHR9.1; EXPRESSED IN PLACENTA, SIGNAL = 2.6; EXPRESSED IN LUNG, SIGNAL = 1.4; EXPRESSED IN HELA, SIGNAL = 3.5; EXPRESSED IN BRAIN, SIGNAL = 2.5; EXPRESSED IN HEART, SIGNAL = 2.1; EXPRESSED IN ADULT LIVER, SIGNAL = 3.4; EXPRESSED IN BONE MARROW, SIGNAL = 2.4; EST_HUMAN HIT: AW160799.1, EVALUE 0.00e+00; SWISSPROT HIT: Q12948, EVALUE 1.10e-01; NT HIT: gi14739836, EVALUE 4.00e-54
ccctgaaggaaagaagagggtgagcagagatcccatctggccagacacgccgcccctcggtcctgaaggcatctccataaaccacgaccctcaggatcctcggagaatcacatggggaccatgacctctgaccccagtcctctccaaaagttggaatttcgctcttttccagcggagaacccaggtaatctctgtcctgaccctctggaaaggttgcctcgctctcaccctcagcaaaagggccccagtgccccgcgccgcgcgcgccagcatttcccaccgccgcagcgacctccggaaccaacgagacgagcggagcggtcgctcccagaagcctacccgagcctttcctcttgcagttccgctcccccggatgtacttccggcagctccctcccccgcttcaacactcacccaatcagcgttacttggtcgaacggcgcgtcaagttgttccctgggaaacgcagaccttctagagaagggcgaaggctgtggttgttctgggttt

SEQ ID NO: 3059 - DNA, 518 bp, Homo sapiens
  MAP TO CHR17.1; EXPRESSED IN BRAIN, SIGNAL = 0.55; EXPRESSED IN HEART, SIGNAL = 0.46; EXPRESSED IN BONE MARROW, SIGNAL = 0.55; EST_HUMAN HIT: BG401592.1, EVALUE 2.00e-75; NT HIT: AF153809.1, EVALUE 2.00e-71
tggaaacagagtgttgctgctccccaaacacagatgccagcaagagcaaaacataggctgaatgacattgtatccatagcaataatagcacttacctttattcactctccccacagagaatctatgagctaggtgctttcagctgggcaatggtagagaatgctctttagttaataataaaggaaagaaaagctccagacaccaagaacctgggttaaccattgacaccggtttgttcctacagttcctccctgggaatctacataggtagcccctggcgtcttatcaagcaagccatagccagtcagctgtggcagtgattacgtcaccacctctgtacctctggaggaggtacagtgtgaaggtcacccaagtatatcctgactaagtttttacttgatcagggatacaaaggaggaagatttgctgggccagaactatgctcaacaatgcctgtaagtgactcaaatatttacagacaggattgttgagagacgacctatggaaatgctcctgct

SEQ ID NO: 3060 - DNA, 600 bp, Homo sapiens
  MAP TO CHR16.1; EXPRESSED IN ADULT LIVER, SIGNAL = 0.44; EXPRESSED IN FETAL LIVER, SIGNAL = 0.55; EXPRESSED IN BRAIN, SIGNAL = 0.59; EXPRESSED IN HEART, SIGNAL = 0.58; NT HIT: gi15317709, EVALUE 0.00e+00; EST_HUMAN HIT: AW410055.1, EVALUE 0.00e+00; SWISSPROT HIT: P39219, EVALUE 2.00e-05
atctccctagagtcccgctgtgcagctgacaccccctgccccagccccacggctctcagctgtccggttccagcgtccactccgacagccactgcaggcaggggccccgctgtgcctcagtctcagggggcttggttgggggtggaggaggccggccgggcccaggcaggagtgcggaggggctgcctggcctggggcccctatcctcggggtcagggtcgggggtggcccgtaaggcctgcacgagctggtccagcgactgcagcagtgtgtgggggctccagcaggcatccagggagggcaggaaggggtcaggcgtgcagacctccacacactcggtgtccgtggggatgcgcaggtagaaagcgtgcagcatcattctgaacggccggtcctcccggcccgagacttctccgtaggtcaggtcgcccaccacggggtggcccagggcactgcagtgcacgcgcagctggtgtgtccggcctgcgggatgagggcggtgccggatcaagctgggagcggggccgatccacacctatctccctgaccaggacccacctcccgtcatgaccccgctgcagtcttgaagcagcctcttgg

SEQ ID NO: 3061 - DNA, 591 bp, Homo sapiens
  MAP TO CHR12.1; EXPRESSED IN BRAIN, SIGNAL = 0.66; EXPRESSED IN BONE MARROW, SIGNAL = 0.9; EXPRESSED IN FETAL LIVER, SIGNAL = 0.99; SWISSPROT HIT: Q03018, EVALUE 9.00e-07; NT HIT: AB055802.1, EVALUE 0.00e+00; EST_HUMAN HIT: AI458447.1, EVALUE 0.00e+00
tcttccccaagcactcaaacttgatctgctgtaacctgttcctgtcagcttacagtaccacatagtaggaagggggcagtcatgccgtgtctttaaatgttctcagataaactacgcaaaacagggtttaaatgatgtatctttattatactgaggttaaatcaaaaggaaatgtttcatataaaacactggggaaaatcactttaaaagagttatcctaaggattaaatctaaccttggaggtagaacagttatgaggcttctagcatcaataagacagctccatggggttaccgcagagagacaggcaagccataggctataggtgcagccccaataagatacttgagtcggggagcttggcgggcctggtttacatagtagagaaggggggcccctgggcctgctccaagccagccttgcagcagagcttccgtgtagcggtcaatgtcgcggtcagtcacatcccagagattacccagaaacaaggggctgggaaaagaaaaggaggaaatacaaagtaagggctctaaaacagaatacataggaaaacaccattggtggtgggggtgggtgagtggagaggattga

SEQ ID NO: 3062 - DNA, 517 bp, Homo sapiens
  MAP TO CHR18.1; EXPRESSED IN HELA, SIGNAL = 0.7; EXPRESSED IN BRAIN, SIGNAL = 1.1; EXPRESSED IN HEART, SIGNAL =   1; EXPRESSED IN BONE MARROW, SIGNAL = 1.3; EXPRESSED IN ADULT LIVER, SIGNAL = 1.3; EXPRESSED IN FETAL LIVER, SIGNAL =   1; EXPRESSED IN LUNG, SIGNAL = 0.75; SWISSPROT HIT: Q14585, EVALUE 6.00e-57; NT HIT: gi9966870, EVALUE 5.00e-35; EST_HUMAN HIT: BE538500.1, EVALUE 1.00e-51
taaaggctttgccacattccttacatctgaaaggtttctctccggtatggattctctggtgttgagtaaggtatgaccccctgttaaaggctttgccacattcttcacatttgaaagctctctctccagtatggattctctgatgttgagtaaggtatgagcctctgttaaaagctttgccacattccttacacttgaaaggcttctctccagtatggattctctgatgttgagcaaggtgtgaactcttgttaaaggctttgtcacattttttacatttgtaaggtttctctccagtatgaattttctgatgtccaagatgtaagcccctggtaaaagctttgccacgttctttatatttcactgatttttctccagtgttaattatcttatgtccctttagatgtgattgactaaagactattatacattttttattacatctttgtgagctctctccaatataaattctttgatgttgagtaagctttgagaatgggtcagaagtttcaccaca

SEQ ID NO: 3063 - DNA, 546 bp, Homo sapiens
  MAP TO CHR2.1; EXPRESSED IN HEART, SIGNAL = 0.93; EXPRESSED IN BONE MARROW, SIGNAL = 0.58; EXPRESSED IN FETAL LIVER, SIGNAL = 0.63; EXPRESSED IN LUNG, SIGNAL =   1; EXPRESSED IN HELA, SIGNAL = 0.71; EXPRESSED IN BRAIN, SIGNAL = 0.6; SWISSPROT HIT: P30754, EVALUE 3.50e-01; NT HIT: AF135025.2, EVALUE 8.10e+00
acgtctcatccaaggtctgctcatgcctcacagaaaagaatgtgacttaacctagacaacaccagttcttcaggtaagacatcacaagccatcctcaggtggccagcgaggttctcagaagatcaaggccatggaagtttctctccaagagctgtcagtggtggggagatcaaaggcctccattcattcaatatttattcagcaaatatacagaatcaagaatcaagctgagagctgagttcagtaagccagggagtcatccaaacaggtcgcaaaaatcaaaggggaggtgagaagcaggtatcagaactcagcgccaactgccaagggagggaaggaggacctgggaggttctgccgcccaggctggaatcccaggctctccccacggctgtggtgcaagcctggaagtgacgagaggaaggctggaccagaggcacctcctgatggggcactcctccccacgtgctttttcaagagtaagggggacagaactgcagctctagcctaggagaagcagtgccaagggtgatttcgagggaatcaa

SEQ ID NO: 3064 - DNA, 534 bp, Homo sapiens
  MAP TO CHRX.1; EXPRESSED IN PLACENTA, SIGNAL = 7.4; EXPRESSED IN LUNG, SIGNAL = 4.8; EXPRESSED IN HELA, SIGNAL = 7.6; EXPRESSED IN BRAIN, SIGNAL =   7; EXPRESSED IN ADULT LIVER, SIGNAL = 5.6; EXPRESSED IN BONE MARROW, SIGNAL = 5.6; EXPRESSED IN FETAL LIVER, SIGNAL = 4.6; EXPRESSED IN HEART, SIGNAL = 4.3; EST_HUMAN HIT: BG749999.1, EVALUE 1.00e-111; SWISSPROT HIT: P22304, EVALUE 1.00e-35; NT HIT: L13325.1, EVALUE 0.00e+00
atccaacccaacatctgctcaataagttcaaggaaaggaaatcaaaccctccagtggagtgaagcggaaagccaagcatttcttacaagattcttacatgttcttggccttgacctctaaatcccatctttactccactgaggacactagtgcccatcaggcaaccatggtgcctggcgatggcaggatgtagccaccttccctgtgcaaatccctccctcaacaaacaacacagctgtcacagctgtgctggatcagccctcaaccagctcttcaccttggggtatctgaaggggatgtgtggcttatgatacccaacggccaggaagaaaggactggctgacgttttcatcttttccaacaactgtatggcttgctcagtgctctgtttgtcaggcaaggtgccctcgggaacatccagcacatccacagggcaaagcaggttggcatggagttctccatctggccctcgacatgtctttcaaaacaaaataatataacatcagctttttaagtgcaagaaatgaagccatg

SEQ ID NO: 3065 - DNA, 581 bp, Homo sapiens
  MAP TO CHR19.1; EXPRESSED IN FETAL LIVER, SIGNAL = 1.1; EXPRESSED IN BRAIN, SIGNAL = 0.81; EXPRESSED IN LUNG, SIGNAL = 1.1; EXPRESSED IN BONE MARROW, SIGNAL =   1; EST_HUMAN HIT: BF792230.1, EVALUE 3.00e-77; SWISSPROT HIT: O32465, EVALUE 3.30e+00; NT HIT: gi14766745, EVALUE 2.00e-77
ttttcctgatccattttgccatctggacgggaatttttaagtcattttttattggatatctggtaaacgagattttagattgtatggcgtataaaattacagcacgtttccgatttctgcctgttatttctcctccaaagatttttttgaataaacaaccaaacccaagaaagaagcttcttgtgccttgtgcactggatcctcccaaccccaattgttatgtatgtgccagcaagccagaggtgactgtgcggctgaatgtccataaagtgactgttctcaccttacaagacaaggtcagtgcaaggcctgggtctcttttccttttgcttttacagtattactgtgatgacaaacaaacactagctgctgattctgaaaaggtccaactgcagagatgtgtggctgtgatttcctgggttattttgccttctggattcctgcaggcttttctgtctgtggttccagaataagtgcctcacattcccagaatggagtaggagtatttgactggaatctgcagcacagtggtggcacagtatcacagcaagcagaggacttctttgctctttgcttcccag

SEQ ID NO: 3066 - DNA, 501 bp, Homo sapiens
  MAP TO CHR7.1; EXPRESSED IN FETAL LIVER, SIGNAL = 0.53; EXPRESSED IN BRAIN, SIGNAL = 0.38; EXPRESSED IN BONE MARROW, SIGNAL = 0.42; NT HIT: M75968.1, EVALUE 0.00e+00; EST_HUMAN HIT: AA037738.1, EVALUE 2.00e-56; SWISSPROT HIT: P14210, EVALUE 1.00e-16
aatgaacatggagaatgccagttctaggagatgctccaaaaaaataaaaataaaaataaacagagggaggaagggaatcaagattatgaaaagttttgaaaatgttctccttaaagtaccatactaaaaatagtcaagatactagtttcaactgtcttaatggatgaattgactacataaaatatctcatatatagtagaaaaatcagtgagaaagaccactctggcaggaaattacaaacatacatttcattatactttatttcattatgcaatatttagggagaagtcagttacctttgttttcatagaggtcaaattcatggccaaattcttttttcactccacttgacatgctattgaaggggaaccagaggcattgttttcttgctttatcaaaaacaaaagccctgaaaaaaatatcagaatgaaaagaagaaatactactatttatacagtatttaaagaatgggcatatggttcatcttgtccatgggcatat

SEQ ID NO: 3067 - DNA, 535 bp, Homo sapiens
  MAP TO CHR1.1; EXPRESSED IN FETAL LIVER, SIGNAL = 1.9; EXPRESSED IN LUNG, SIGNAL = 2.3; EXPRESSED IN HELA, SIGNAL = 2.1; EXPRESSED IN BRAIN, SIGNAL =   2; EXPRESSED IN HEART, SIGNAL = 2.2; EXPRESSED IN BONE MARROW, SIGNAL = 2.1; EXPRESSED IN PLACENTA, SIGNAL = 2.4; SWISSPROT HIT: Q64240, EVALUE 2.20e+00; NT HIT: AL161552.2, EVALUE 5.10e-01; EST_HUMAN HIT: AI926210.1, EVALUE 7.50e-01
tatggtgttgatgtgggtgggggagggatgaggaagcggggaagagccagcacagcctcattcctgcgcaaatcacaagcccaccgcccatcccctgcaatccaagtctctttttctgaagagcttcctatgtgccaaataatatttaacaaacacagatgagcaataggagatgagggaaagaactggcatgccaagatatattggaggagatttcgagggaatgttgtcaatgacacagctccagtggagaaggggggtgtgtagggagtagagaggagtccaggatggaggtggatggaaggagccgagagcagttttcaggaatcctcccgttgtgggatgccatcctgcgatgttttacatgctgttcctacacatcctttcttctcttttgtttacttcattggtctgcaggccaatgaaatcaacctagtttaactgaaggtagtgctgatatgacactgaattacaataaatgcctgatgtttggccaataagaaaagggatttctagtctccctccaatttgcaaa

SEQ ID NO: 3068 - DNA, 577 bp, Homo sapiens
  MAP TO CHR19.1; EXPRESSED IN ADULT LIVER, SIGNAL = 5.2; EXPRESSED IN BONE MARROW, SIGNAL = 1.9; EXPRESSED IN FETAL LIVER, SIGNAL = 2.2; EXPRESSED IN LUNG, SIGNAL =   2; EXPRESSED IN HELA, SIGNAL = 2.3; EXPRESSED IN BRAIN, SIGNAL = 2.3; EXPRESSED IN HEART, SIGNAL = 5.3; SWISSPROT HIT: O94759, EVALUE 2.00e-08; NT HIT: gi14757530, EVALUE 4.00e-94; EST_HUMAN HIT: BI759746.1, EVALUE 7.00e-94
attttccttggcgtcttgtgacacttgacccttgtggcatctccccacaccccaggctgaccccgggtttgtaccacctgggccgcactgtcctctgcatcgacttcatggttttcacggtgcggctgcttcacatcttcacggtcaacaaacagctggggcccaagatcgtcatcgtgagcaagatggtgaggcaggggcggggccaaagtgggcggggacatagggaaaggggtggggccagggagggagtggtccgtggagaaggggcgtgactttggggagcaatggggcgtgtttttgggatataggggtggggccagagtaggaaagggcggggccagactcagccacatctccccacagatgaaggacgtgttcttcttcctcttcttcctcggcgtgtggctggtagcctatggcgtggccacggaggggctcctgaggccacgggacagtgacttcccaagtatcctgcgccgcgtcttctaccgtccctacctgcagatcttcgggcagattccccaggaggacatggacggtaggggggatgacggcctgacagccttcctctgag

SEQ ID NO: 3069 - DNA, 585 bp, Homo sapiens
  MAP TO CHR5.1; EXPRESSED IN PLACENTA, SIGNAL = 1.2; EXPRESSED IN FETAL LIVER, SIGNAL = 2.2; EXPRESSED IN LUNG, SIGNAL = 1.8; EXPRESSED IN BRAIN, SIGNAL = 1.2; EXPRESSED IN HEART, SIGNAL = 1.7; EXPRESSED IN BONE MARROW, SIGNAL = 1.6; EXPRESSED IN ADULT LIVER, SIGNAL = 0.64; SWISSPROT HIT: P10070, EVALUE 1.10e+00; NT HIT: AF063586.1, EVALUE 0.00e+00; EST_HUMAN HIT: BG391031.1, EVALUE 2.10e-01
actttggcagctaggacctggggaacgcgagcttcccccctcaagccccccgccggtgccagctcccgggtgcgtgcgaaatggctggcggtccgaccggaggagcatggaggcgcggggttaatgcgccattccaaatcgcggtgcccgccagcaggaagccacagaggcactagatttcccttccgtcttaagagggttttcccttttttcctgcttggccgacggagggctttttaaattggacgtggagatcctcaattagaagtgtggcgaagctggcaaaagactacacagtggaaaactccccgcgtcgccagaggaggctcccggctgcggttcccgccctcggccgagcgccgccagcgcccggatcgagctcccctcttcccccgggacagggagggcgcattcttccctctgagcgccgccgggaccggctccagtccgaggggctctttcgttctcggtatttgctgggcgggggaaaaggggggaggttgggggactcggcacacacagcgtctactaggacgtttttcttagagtccgtgtgggctccacccctcggcttctcagtttgtc

SEQ ID NO: 3070 - DNA, 567 bp, Homo sapiens
  MAP TO CHR11.1; EXPRESSED IN PLACENTA, SIGNAL = 8.4; EXPRESSED IN FETAL LIVER, SIGNAL = 8.9; EXPRESSED IN HELA, SIGNAL =  11; EXPRESSED IN BRAIN, SIGNAL = 7.9; EXPRESSED IN LUNG, SIGNAL = 4.6; EXPRESSED IN HEART, SIGNAL = 4.2; EXPRESSED IN ADULT LIVER, SIGNAL = 7.3; EXPRESSED IN BONE MARROW, SIGNAL = 8.9; EST_HUMAN HIT: BG696235.1, EVALUE 1.00e-107; SWISSPROT HIT: P32151, EVALUE 3.20e+00; NT HIT: gi14784594, EVALUE 1.00e-108
ataggcacacctgccttgtcaccctgtagcctcagagcactgagcagagaggaatcctggtccctctgtctcaactgctgtccaacaggacagatgcccagggctgctgacacttacctttaagtggccaatgacgaatttgtggacaaggtggttccacttgggttttctgtagacagacaggtggccataatcatgttgcagccatccagcttgggcctggggagagagggtcacacgtgctgtcacagcctcagcaaacaggcaccaggcctctgtcagctaggggaagtgagggtgtcacgcctcacctgagaggtagcaaggacaaaggccgtgatgagggtaggaatccagccattgccaaagtaaaagacagtgaaccatgcaatgctctccagggcgatgatgtgggccaggaggaggaggaagaacacgtggttggtcttgaacaggttcatgtcctcagccgtcttcctcagggcccggaagtcctcagtgatctttgactgttgaccaagagcacagggaaaggagtcagccaccagccactctggagggaacata

SEQ ID NO: 3071 - DNA, 600 bp, Homo sapiens
  MAP TO CHR5.1; EXPRESSED IN FETAL LIVER, SIGNAL = 0.61; EXPRESSED IN LUNG, SIGNAL =   1; EXPRESSED IN BRAIN, SIGNAL = 0.53; EXPRESSED IN HEART, SIGNAL = 0.95; EXPRESSED IN BONE MARROW, SIGNAL = 0.56; SWISSPROT HIT: P46921, EVALUE 7.70e+00; NT HIT: AJ276965.1, EVALUE 9.00e-03; EST_HUMAN HIT: BE564162.1, EVALUE 1.40e-02
gaaaaatggatgtgcgtgtgtttctgtgtatacaggcaaatatcatcagaagcactttcactgtgatggtaacctttctatacactttctaacttgtctggattttcttgaaggtcgattgggttttcaactgtgttatctgctaggtgtttgatggagtggtccagataacagaagagagagcaaaggaaaaagaattttttgaagatcaaaagtggctgttcattttgttatctgaccctatctgttgtcatagtaacaggtttcttttaacctatgtcatgggatgatttgtctctatctgctctgaattctcctttgactgaagagctgctcctccagcacctagccgttttccaggctgtctgtgaagctctgcagaggggccagagaacggttcccaggtcggaagggatttaaattacattttcaatttaaaccgctatcttaatttaggaggagataaagccaacacagttgctttctcccctggttttacaacatatgagtaaatgtcatttaggaatgaaatgaatgacggtgttgactctttaacactcaggacaggtttcatcctgcaccgaaccaatgacaggagat

SEQ ID NO: 3072 - DNA, 599 bp, Homo sapiens
  MAP TO CHR7.1; EXPRESSED IN FETAL LIVER, SIGNAL = 1.5; EXPRESSED IN LUNG, SIGNAL = 1.1; EXPRESSED IN BRAIN, SIGNAL = 1.6; EXPRESSED IN HELA, SIGNAL = 1.5; EXPRESSED IN ADULT LIVER, SIGNAL = 2.4; EXPRESSED IN HEART, SIGNAL = 1.1; EST_HUMAN HIT: BG429134.1, EVALUE 1.00e-103; SWISSPROT HIT: O08749, EVALUE 4.00e-32; NT HIT: gi14752231, EVALUE 1.00e-103
tgggaattgaactagatcccagaggtagaattccagtcaataccagatttcaaactaaaattccaaagtaagttggataattgtctgcattttcagtaattttaaaattgatttcaaacagtattttgaaaagtaagatttttatgcttaaaatatgtattggctttggggaagaatagtaaacttacaaaatgtaaaataaaaaataactgaattttactcaaagataagctgaattcatagatttttgaagagctgcatttgatgtattttttggtgacttgtttactggaaacttttgttaccataatgtaactgaaggtaagtagctgtgatttcagaaattcattgtgtttcttttgatttctgtggtagtatctatgccattggtgatgtagttgctggtccaatgctggctcacaaagcagaggatgaaggcattatctgtgttgaaggaatggctggtggtgctgtgcacattgactacaattgtgtgccatcagtgatttacacacaccctgaagttgcttgggttggcaaatcagaagagcagttgaaagaagaggtaagtctgaacatgggtggttttaagccaatgt

SEQ ID NO: 3073 - DNA, 565 bp, Homo sapiens
  MAP TO CHR5.1; EXPRESSED IN BRAIN, SIGNAL = 0.54; EXPRESSED IN BONE MARROW, SIGNAL = 0.52; EXPRESSED IN HEART, SIGNAL = 0.5; EXPRESSED IN FETAL LIVER, SIGNAL = 0.42; EST_HUMAN HIT: AW502865.1, EVALUE 1.00e-05; SWISSPROT HIT: O15117, EVALUE 4.20e-02; NT HIT: gi15311071, EVALUE 9.00e-06
gacatccatgtgctttggtggcagggtctcctggagcctctggatcctcttaggctgaacacacaggtcctttcagccctgttatcctagagttggaggcagcggggagccgtgtccagttaggttttcccccttcacagaaggcaggcaggttcttgttcagtgccaagcaagaccagtttgttctcagcaagctcatgttctgtctctaggctgttaaatacattgttaaaactcaggctgttgcatttgggttgcagctgggagcttggcagagattctgcctgatgaggtaaggagagaagctaaggacgctgctggtttgcagctggaaacatcttttcatggccatttggccagattgtaaatgtcttttccaaagttcaggtttggtgggacctctggttgtatgtcttggaattgccctgtgtttagaaacagtgccagtcgcctgatgggtgaatcactgttgctgggatgttggcaggttttgcaggactttcctgtgggggtccaaacactagggctggcagggcccgtttggagtctgtttgagaagggcctg

SEQ ID NO: 3074 - DNA, 567 bp, Homo sapiens
  MAP TO CHR17.1; EXPRESSED IN HEART, SIGNAL = 1.4; EXPRESSED IN BONE MARROW, SIGNAL = 0.85; EXPRESSED IN FETAL LIVER, SIGNAL = 1.1; EXPRESSED IN LUNG, SIGNAL = 1.8; EXPRESSED IN HELA, SIGNAL = 0.58; EXPRESSED IN BRAIN, SIGNAL = 0.75; SWISSPROT HIT: P42229, EVALUE 3.00e-24; NT HIT: gi14786071, EVALUE 4.00e-82; EST_HUMAN HIT: AU122513.1, EVALUE 6.00e-82
tctgctcatctggtttgctgagtagaacatcccgcatcggctttcttccctacaggctggggctgcagcgcaagctactatataaaagcccagatttctcttgcaagcctgccctaaagccccacaaccttggtcctcctgctgctggtggattatgggaatgaggctgttcttttcacagcggaacgcaacctgtggaacctgaaaccattcaccacgcgggatttctccatcaggtccctggctgaccggctgggggacctgagctatctcatctatgtgtttcctgaccgccccaaggatgaggtcttctccaagtactacactcctgtgctgggtgggtactgccccaggaccctgccggctgactcccccgggctcttccccagcccatagacaaagccttgggctgcgccgtggggacttccccaggaggagcctaggggccatgtcccctgtgggttttggcccatggggtggtggagaggatttcagggctcacaaatgaggagagggaacgagaaacccgtcccagctctcttctctgcaaagtgaaagctgcatgga

SEQ ID NO: 3075 - DNA, 587 bp, Homo sapiens
  MAP TO CHR14.1; EXPRESSED IN HELA, SIGNAL = 8.9; EXPRESSED IN LUNG, SIGNAL =  19; EXPRESSED IN BRAIN, SIGNAL =  12; EXPRESSED IN HEART, SIGNAL = 8.2; EXPRESSED IN BONE MARROW, SIGNAL =  32; EXPRESSED IN ADULT LIVER, SIGNAL =  13; EXPRESSED IN PLACENTA, SIGNAL =  12; SWISSPROT HIT: P01764, EVALUE 3.00e-43; NT HIT: M99654.1, EVALUE 0.00e+00; EST_HUMAN HIT: AW401500.1, EVALUE 0.00e+00
gagaaaggaaacctctcccggcacctgctcctgggacctgtcccgccctcagtgggtcacgagcgccccctggtggccccgcgcgcccctgcagggaggtttgtgtccgggctcacactgacctcccctcactgtgtctgtggtacagtaatacacggctgtgtcctcggttttcaggctgttcatttgcagatacagcgtgttttttgaatcatctcttgagatggtgaatctgcctttcacgggtgcagcgtagtctgttgtcccaccatcagttttgcttttaatacggccaacccactccagccccttccctggagcctggcggacccagctcatccaggcgttactgaaagtgaatccagaggctgcacaggagagtctaagggaccccccaggctttaccaagcctcccccagactccaccagctgcacctcacactggacacctgcaaacacagagacactaagatcagaaactgccacacatatccactgtttctctcactcacgtccactcacacttaatctctctagttctccataaatcaccttttaaaatagcagcaaggaaaatccagctcagc

SEQ ID NO: 3076 - DNA, 575 bp, Homo sapiens
  MAP TO CHR17.1; EXPRESSED IN HELA, SIGNAL = 1.9; EXPRESSED IN BRAIN, SIGNAL = 2.5; EXPRESSED IN ADULT LIVER, SIGNAL = 3.2; EXPRESSED IN HEART, SIGNAL = 2.5; EXPRESSED IN BONE MARROW, SIGNAL = 2.3; EXPRESSED IN FETAL LIVER, SIGNAL = 2.4; EXPRESSED IN LUNG, SIGNAL = 1.9; SWISSPROT HIT: Q39565, EVALUE 2.00e-14; NT HIT: AJ132478.2, EVALUE 6.00e-04
gtgtccgcctagaagtcctggggccttttgaggataattactgctcctctcccctcctctcaatattaccaattctaagaagttctatccccctgagaattgagaatcattaattaacatggccctccttttgggagggcagggtcccctccaaagcttttcataccccaacaccctcccttcgccacccagcatctcactgtggccacttctactgaccttctggattctcagcaacttgatgttgtcaaagcattttttgaggtgtggctgcacagcctctgggtttcgggactggcccagaatctccagcaggtcatcattggacaagaagtagaagcgggggaaaatatgtcgcttggtctctaaatacatatccagagatttctgaatatcttccaggattgtattcatttctatcaatgtgtccaggaggcctgggaagaagagcgatgaatgacatttgattcatttccactgccctgggcggatctggatgccccaactctgtgttctttgccagctcttgaacagtggggcacagactgccatgagggtttctggacgcagagaag

SEQ ID NO: 3077 - DNA, 589 bp, Homo sapiens
  MAP TO CHR8.1; EXPRESSED IN ADULT LIVER, SIGNAL = 1.3; EXPRESSED IN FETAL LIVER, SIGNAL = 1.1; EXPRESSED IN BRAIN, SIGNAL = 0.99; EXPRESSED IN LUNG, SIGNAL = 1.1; EXPRESSED IN BONE MARROW, SIGNAL = 1.1; SWISSPROT HIT: P26809, EVALUE 3.00e-11; NT HIT: AF110520.1, EVALUE 0.00e+00; EST_HUMAN HIT: BG007849.1, EVALUE 2.00e-50
aatgggcaaaggatgtgaagatatttgtgtcccatgtaaatgctcaccaaaaggtgacttcagccgaggaggagttcaataatcaagtggataagatgacccgttctgtggacagtcagcctctctccccagccatccctgtcattgctcaatgggcacatgaacaaagtggccatggtggtcgagatggaggttatgcttgggctcagcaacatgggcttccactcaccaaggctgacctggctacagctgctgctgattgccagatctgccaacagcagaaaccaacactgagccccagatatggcaccattcctcgaggtgaccagccagcaacctggtggcaggttgactacattggaccacttccttcgtggaaaggacagcgttttgttcttactggagtagatacttattctggttatggatttgcctttcctgcacgtaatgcctctgctaaaaccaccattcacggactgacagaatgcctcatctatcgtcatggtattccacacagtattgcttctgaccaaggaactcatttcacagccagagaagtacgacagtgggctcacgatcatggaattca

SEQ ID NO: 3078 - DNA, 525 bp, Homo sapiens
  MAP TO CHR1.1; EXPRESSED IN HELA, SIGNAL = 2.1; EXPRESSED IN ADULT LIVER, SIGNAL = 3.4; EXPRESSED IN BONE MARROW, SIGNAL = 2.8; EXPRESSED IN HEART, SIGNAL = 1.9; EXPRESSED IN PLACENTA, SIGNAL = 2.1; EXPRESSED IN FETAL LIVER, SIGNAL = 2.5; EXPRESSED IN LUNG, SIGNAL = 1.5; EXPRESSED IN BRAIN, SIGNAL = 2.7; SWISSPROT HIT: Q25479, EVALUE 2.20e+00; NT HIT: AJ271003.1, EVALUE 7.80e+00; EST_HUMAN HIT: BF510994.1, EVALUE 1.90e-01
tgaccacagcagaaagttgctttgctcaggagtacggttttctttgggttgtggatttactcctgccatgctgtgttggctcagctcgtggaagcgtgatctgtgtctttcagtctaggaaaaggcttagtaggcagagtggaaaatgacagactatttttaacacagctttctatcccacagttctgggtcttacttctattatcattacttattcatagactttcattcccaaatatcattaccctttacagtaataggatcagcaaagcaaccacttaaaacaaaacaaacaaacgcaggaatccaagtcctgtacacagaaacattttctccactcttgccagctcgctgcctctccctgactacctgggggagaagtggttcttatcagtcactaagaaactcagctgcttgacaaatgccagtgtaacaaaagggcttggcagtggggaatggtttgaaggcatcagccactaagagaacagggaggaggtaatgaaatccgagaccaaacaaggaaga

SEQ ID NO: 3079 - DNA, 529 bp, Homo sapiens
  MAP TO CHR11.1; EXPRESSED IN HEART, SIGNAL = 1.8; EXPRESSED IN ADULT LIVER, SIGNAL = 1.9; EXPRESSED IN BONE MARROW, SIGNAL = 2.5; EXPRESSED IN PLACENTA, SIGNAL = 3.7; EXPRESSED IN FETAL LIVER, SIGNAL = 2.5; EXPRESSED IN LUNG, SIGNAL =   2; EXPRESSED IN HELA, SIGNAL = 5.5; EXPRESSED IN BRAIN, SIGNAL = 2.2; EST_HUMAN HIT: BI115766.1, EVALUE 0.00e+00; SWISSPROT HIT: P39748, EVALUE 3.00e-88; NT HIT: L37374.1, EVALUE 0.00e+00
caatccaggaattccacctgagccggattctgcaggagctgggcctgaaccaggaacagtttgtggatctgtgcatcctgctaggcagtgactactgtgagagtatccggggtattgggcccaagcgggctgtggacctcatccagaagcacaagagcatcgaggagatcgtgcggcgacttgaccccaacaagtaccctgtgccagaaaattggctccacaaggaggctcaccagctcttcttggaacctgaggtgctggacccagagtctgtggagctgaagtggagcgagccaaatgaagaagagctgatcaagttcatgtgtggtgaaaagcagttctctgaggagcgaatccgcagtggggtcaagaggctgagtaagagccgccaaggcagcacccagggccgcctggatgatttcttcaaggtgaccggctcactctcttcagctaagcgcaaggagccagaacccaagggatccactaagaagaaggcaaagactggggcagcagggaagtttaaaagggg

SEQ ID NO: 3080 - DNA, 588 bp, Homo sapiens
  MAP TO CHR19.1; EXPRESSED IN FETAL LIVER, SIGNAL = 0.48; EXPRESSED IN HELA, SIGNAL = 0.46; EXPRESSED IN BRAIN, SIGNAL = 0.52; EXPRESSED IN HEART, SIGNAL = 0.87; EXPRESSED IN ADULT LIVER, SIGNAL = 0.46; EST_HUMAN HIT: W93274.1, EVALUE 0.00e+00; SWISSPROT HIT: P40426, EVALUE 6.00e-23; NT HIT: gi16177655, EVALUE 0.00e+00
cgaaagaaaggtggttagcgttccgtgtttcgctttgacaaatgcgcattcacatgacagaaactcttccatgcagaaagatcacctgttcatatttctctagctcagagtggtaaatctgtcggatctgggacagcttggccctgtagtcagagtgctcaatgctattgtcatttggacagccacctggtgttgctgtgccggccctggccaccgctcctcctcttcctctcttctcgggcctgcacacgccctcagccagcagcatgttatccagcctcaggagctgggcgtcagggggatcttcgtcttgaatgccacggatgcttaccactagataagagagaccgggacaagtcacaattcattttctggagagaaaacaaaccatgagaaaatgtgagcactggtgttatgtctgaagatttttgcatagaacccttcgggagaaaggaatactccactttatcaccaaattggatgatggacactgagcaccccgctaagacatgggtccaagtgccatccttagagcgcagtctggggaggaacggggagacacaggtcgcagtttggcatagcctgtga

SEQ ID NO: 3081 - DNA, 504 bp, Homo sapiens
  MAP TO CHR7.1; EXPRESSED IN ADULT LIVER, SIGNAL = 7.4; EXPRESSED IN BONE MARROW, SIGNAL = 4.3; EXPRESSED IN HEART, SIGNAL = 5.7; EXPRESSED IN FETAL LIVER, SIGNAL = 4.8; EXPRESSED IN LUNG, SIGNAL = 4.1; EXPRESSED IN BRAIN, SIGNAL = 4.3; NT HIT: AJ010770.1, EVALUE 2.00e-99; EST_HUMAN HIT: AI866577.1, EVALUE 8.00e-10; SWISSPROT HIT: P39188, EVALUE 2.00e-03
ttttgcatcttaggccatccttttagaatcttatttctttttgaagaaaattctttagaagtttttttttttttaactgattatctattgggagtaaactatgttttttagttgtctttattttatgtctttattgtgtttttatccataaaagtttgttttgtttactgtttgaacctggttagcagttatttttatgccagaactttgaaggtaacattccagtgttttctgatttcttgtttctgtcgacaaggtccttgtcactttgttgttccctcgtaggtaatacgtcttttttctttagcaacatttaagatcttctttttgattttggtgttctcttttctcctttttttttaattttttttattttaagagatgggtctgtcagccaggctggagtgcagtggtgtgatcatagctcactgtagccttgcactcctgagctcacacaatcctctcacctcagtccctggagtagctcaccacacccagctacaa

SEQ ID NO: 3082 - DNA, 509 bp, Homo sapiens
  MAP TO CHR7.1; EXPRESSED IN FETAL LIVER, SIGNAL = 0.78; EXPRESSED IN HELA, SIGNAL = 0.91; EXPRESSED IN BRAIN, SIGNAL = 0.91; EXPRESSED IN LUNG, SIGNAL = 0.72; EXPRESSED IN HEART, SIGNAL = 0.85; EXPRESSED IN BONE MARROW, SIGNAL =   1; SWISSPROT HIT: Q99558, EVALUE 4.70e+00; EST_HUMAN HIT: BG722094.1, EVALUE 9.00e-53
ctcacggtctaacactggggtactgttcagttctgctgacaagttgtatgctgagcagtttttgtccttgttttttgtttgtttcatattagctctagaggacaaaatcccagtccttggcacaaactcaggaaatggaagccggagtctgttttttgtggggctgctaattgtgctgattgtcagcctggcactggtttttttcgtgatatttctaataggtaagtaccaccacaggtttcttttttattacttgtatgcatttattcatagctggttaactttgctcccacaaagtttgcaccctccagtcaatgcttcctggtcatcaatgcttacattgaaaaaagaaggaatgccttgagtgaacaccactggctgaggacagggtcccttggccacaaacccactgcagaagcccatagtgccagaagtccatgaatatgtatgttaaataattctatagcactttagtttctcacttggagcctctagctgcccaatggaag

SEQ ID NO: 3083 - DNA, 563 bp, Homo sapiens
  MAP TO CHR11.1; EXPRESSED IN BRAIN, SIGNAL = 0.53; EXPRESSED IN BONE MARROW, SIGNAL = 0.49; EXPRESSED IN HEART, SIGNAL = 0.51; EXPRESSED IN ADULT LIVER, SIGNAL = 0.72; EXPRESSED IN FETAL LIVER, SIGNAL = 0.5; SWISSPROT HIT: P11260, EVALUE 5.00e-98; NT HIT: AF146793.2, EVALUE 0.00e+00; EST_HUMAN HIT: AW238022.1, EVALUE 7.00e-66
catcggcacaacaatcaaagaaaatggaaaatgcaaaaagatcctaactcaaaacatccaggaaatccaggacacaatgagaagaccaaacctacggataataggagtggatgagaatgaagattttcaactcaaaggaccagcaaacatcttcaacaaaattattgaagaaaacttaccaaatctaaagaaagagatgcccatgaacatacaagaagcctacagaactccaaatagactggaccagaaaagaaattcctcccgacacataataatcagaacatcaaatgcactaaataaagatagaatactaaaagcagtaagggaaaaaggtcaagtaacatataaaggcaagcctatcagaattacaccagatttttcaccagagattatgaaagccagaagagcctggacagatgttatacagacactaagagaacacaaactccagcccaggctactatacccagccaaactctcaattaccatagatggagaaaccaaagtattccacgacaaaactaaattcacccattatctctccacgaatccagcacttcaaa

SEQ ID NO: 3084 - DNA, 533 bp, Homo sapiens
  MAP TO CHR19.1; EXPRESSED IN HELA, SIGNAL = 1.9; EXPRESSED IN BRAIN, SIGNAL = 2.4; EXPRESSED IN HEART, SIGNAL = 2.9; EXPRESSED IN BONE MARROW, SIGNAL = 2.7; EXPRESSED IN PLACENTA, SIGNAL = 1.8; EXPRESSED IN FETAL LIVER, SIGNAL = 2.7; SWISSPROT HIT: P52737, EVALUE 4.00e-66; NT HIT: gi14759689, EVALUE 0.00e+00; EST_HUMAN HIT: AW504245.1, EVALUE 0.00e+00
gcagctccagtattcgaacccatgaaagaattcacactggagagaaaccctatgaatgtaaggaatgtggcaaagccttcgcatttctcttttcctttcgaaaccatataagaattcatactggagagacaccctatgaatgtaaggaatgtgggaaggcattcagatatctcactgctcttcggcgccatgaaaaaaatcacactggagagaaaccctacaaatgtaaacagtgtggaaaagcctttatatattaccagccttttctaacccacgaaaggactcacactggagagaaaccttatgaatgtaagcaatgtgggaaagccttcagttgtcccacgtacttacggagtcatgagaaaactcatactggagagaaaccttttgtatgtagggaatgtgggagagccttcttttctcactcaagccttcgaaaacacgtgaaaacccacaccggagttcaaccttatacatgtaagaaatgtggggaagccttcaagtcatctagttcctgtgaagtgcacgaaaga

SEQ ID NO: 3085 - DNA, 515 bp, Homo sapiens
  MAP TO CHR14.1; EXPRESSED IN FETAL LIVER, SIGNAL = 0.92; EXPRESSED IN LUNG, SIGNAL = 1.4; EXPRESSED IN HELA, SIGNAL = 0.74; EXPRESSED IN BRAIN, SIGNAL = 0.74; EXPRESSED IN HEART, SIGNAL = 1.3; EST_HUMAN HIT: BI767612.1, EVALUE 1.00e-116; NT HIT: gi14751987, EVALUE 1.00e-116; SWISSPROT HIT: P14922, EVALUE 6.00e-03
ttcatccttcccatctctgctttccaaagggatagggggcagctcacatgggtgagggctcctgagaagcaggtgtgggcagctgcaacatccccttttttccagtacacctcacccagctggttccaggcttccaccagctcgggctccagcttcacagcctttgacagaagctcctcagccttagggctatagtcaggagtcacatttagtgctttcccagttagcattagaacttgtgccttgccctggacagaacctaagaggaagaaaaaaagataaagtgggaaaaaaacaagttaaagaccagggcactttctctcaaaaaataactacacgtcagttttaggaataaaaagagttggggaaaatatttatcaataaaccatttattgaaagctcaccataggcagagtgtatgttagctaattaggcaacaaagaaagcactatttctagagcttctgccatctgtttcttgggcccctatctacaaggatcagctcggttgctaac

SEQ ID NO: 3086 - DNA, 526 bp, Homo sapiens
  MAP TO CHR14.1; EXPRESSED IN BONE MARROW, SIGNAL = 2.8; EXPRESSED IN ADULT LIVER, SIGNAL =   4; EXPRESSED IN FETAL LIVER, SIGNAL =   3; EXPRESSED IN LUNG, SIGNAL = 2.8; EXPRESSED IN HELA, SIGNAL = 4.1; EXPRESSED IN BRAIN, SIGNAL = 3.2; EXPRESSED IN HEART, SIGNAL = 2.3; EST_HUMAN HIT: AI991623.1, EVALUE 5.00e-82; NT HIT: AF111170.3, EVALUE 0.00e+00; SWISSPROT HIT: Q63244, EVALUE 2.50e-01
ctgcctggtggtgaggtccccacacctcaggaccctgggctctcctgtgtgcccggatggggacagcctccacccctccactcctccccccgctactccccactcactgcctggtggtgaagtcgccactgcaggaccccgggctctcgtctcccgtgcgcccaccttgctccagtgtggccagggcctcagtgttgggggcaggctgctgggagcctggagccctcgagccatccccacaatgccgttctttgccgcagtccttcagccctgccagggacctgcctgacagcagcctgatccagggcgcggcccacgccatcgtggccgccatcacccagcgggggaacagctcactgctcctggctgtcaccgaggtcaaggtggagacggttgttacgggcggctcttccacaggtaagcgcgggaggtgggcccctgggaaggcaccaggcaggcaactcaggcattgggcacagagccggccgatcctgccgatcctgccagccaccaggaacacagaagt

SEQ ID NO: 3087 - DNA, 573 bp, Homo sapiens
  MAP TO CHR17.1; EXPRESSED IN BRAIN, SIGNAL = 0.64; EXPRESSED IN BONE MARROW, SIGNAL = 0.68; SWISSPROT HIT: P30953, EVALUE 2.00e-84; EST_HUMAN HIT: BF477726.1, EVALUE 0.00e+00; NT HIT: U78308.1, EVALUE 0.00e+00
ttactcatggccaggttgtgtttttgtgcagacaatgtgatcccccactttttctgtgatatgtctgctctgctgaagctggccttctctgacactcgagttaatgaatgggtgatatttatcatgggagggctcattcttgtcatcccattcctactcatccttgggtcctatgcaagaattgtctcctccatcctcaaggtcccttcttctaagggtatctgcaaggccttctctacttgtggctcccacctgtctgtggtgtcactgttctatggaaccgttattggtctctacttatgctcatcagctaatagttctactctaaaggacactgtcatggctatgatgtacactgtggtgacccccatgctgaaccccttcatctacagcctgaggaacagagacatgaagggagccctgagcagagtcattcatcagaagaaaactttcttctctctctgatgataacacttggagctattacatagtttatccagtaaaatattgatattaatattggaatattattctaaattatttcctcaccatccttttgttgaaatggcatcg

SEQ ID NO: 3088 - DNA, 530 bp, Homo sapiens
  MAP TO CHR1.1; EXPRESSED IN HEART, SIGNAL = 2.6; EXPRESSED IN FETAL LIVER, SIGNAL = 1.3; EXPRESSED IN LUNG, SIGNAL = 3.1; EXPRESSED IN HELA, SIGNAL =   1; EXPRESSED IN BRAIN, SIGNAL = 1.1; SWISSPROT HIT: P46555, EVALUE 3.30e-01; NT HIT: AF169288.1, EVALUE 2.00e-03; EST_HUMAN HIT: BF680711.1, EVALUE 3.00e-03
tgagctttgtatctgccacgcagtgggtgcctagtacacttaaggtgaagggtggaaggctagagccgttgctgaggtccaaaatgccacccaaattgagggcatcctttggatggggagctgcaaaaacacattattctccgttggaccaaggccacggggtgtctgtcctagaatattctttgcagaggagctgcggaaagctgcagcaggttcagagaagaggaatggaaggaactccgaagagcatgggaatggggtggggcagcctgcaagaccgaaagaaaaggcctgggacgctttgctgggaaagacaaagaggagaggggaggggagaggagacgataaacttgccaacagcccggccaaggtgaaccccggctcctggcgccttcccatccgcattcattccacaaacgcgggccaaatctccgaaccagccgcaagcgggagggggcctctctgcagccggggggaagaaagttcaggactgaggcgggaagcctgcctctcagaaggggagtgactcg

SEQ ID NO: 3089 - DNA, 559 bp, Homo sapiens
  MAP TO CHR2.1; EXPRESSED IN BONE MARROW, SIGNAL = 0.5; EXPRESSED IN FETAL LIVER, SIGNAL = 0.6; EXPRESSED IN HELA, SIGNAL = 0.41; EXPRESSED IN BRAIN, SIGNAL = 0.46; EXPRESSED IN HEART, SIGNAL = 0.63; SWISSPROT HIT: Q9NVP1, EVALUE 4.00e-29; NT HIT: gi14742950, EVALUE 1.00e-97; EST_HUMAN HIT: BE160298.1, EVALUE 2.00e-97
ttgtcccagcactctgtttgtagtgattcactgggcaatcactgtcctttgaagtctaccctgtcctaaagtgaggatcaggctgtgtagtgtataaggtttcttgctattctagttatcaccactctgtgccctctttaaatgttttccatggagtggctttgctctaggatatttaaaatctggtgttttggaggtttttgtttgtttttgtttattaaaaccagtgtttctttctatttcagcttgagaaattgattgaaaagaattactttcttcataagtcagcccaggaagcatataagtcatacatacgagcctatgattcccattctctgaaacagatctttaatgttaataacctaaatttgcctcaggttgctctgtcatttggtttcaaggtgcctcccttcgttgatctgagtatccttttctttaatgaagttatcctgtgactaaggaacaaaagcttgacagaggggcatttggggctttgcagtggattggtatgtgttctggctcagactggaggctccagtgttcaccctggtcgatgtct

SEQ ID NO: 3090 - DNA, 512 bp, Homo sapiens
  MAP TO CHR13.1; EXPRESSED IN LUNG, SIGNAL = 0.83; EXPRESSED IN BRAIN, SIGNAL = 0.74; EXPRESSED IN HEART, SIGNAL = 0.79; EXPRESSED IN FETAL LIVER, SIGNAL = 0.82; SWISSPROT HIT: P30825, EVALUE 4.00e-35; NT HIT: gi4507046, EVALUE 1.00e-120; EST_HUMAN HIT: BF993826.1, EVALUE 0.00e+00
atgttccccagaagcaacagcgggaggtggtgttcccggtctctcctcgtctatctacaatgcagcatttgactatatccttcccattttataccttgtgtcccgggcagctcactttggaggcttattgagaacttgagttggtgcacgtcattttgcttgaagcagatgtggcggtcacgcaatgcctttcttcccaggtaccagccagagcagcctaacctggtataccagatggccagtacttccgacgagttagatccagcagaccaaaatgaattggcaagcaccaatgattcccagctggggtttttaccagaggcagagatgttctctttgaaaaccatactctcacccaaaaacatggagccttccaaaatctctgggctaattgtgaacatttcaaccagccttataggtaagagctagcccttccctggggccttgcttgttggcattgcatggtttctaggcagtggagctggagttgggggaaggtgccagagaagatg

SEQ ID NO: 3091 - DNA, 552 bp, Homo sapiens
  MAP TO CHR4.1; EXPRESSED IN FETAL LIVER, SIGNAL = 0.85; EXPRESSED IN LUNG, SIGNAL = 1.1; EXPRESSED IN BRAIN, SIGNAL = 0.61; EXPRESSED IN HEART, SIGNAL = 1.1; EST_HUMAN HIT: AA890050.1, EVALUE 6.00e-91; SWISSPROT HIT: P32298, EVALUE 1.00e-31; NT HIT: U33161.1, EVALUE 0.00e+00
cagctattctcctgcccatcctggaagcagccagtgtgaaccagggaagcctagggctgggagaaaccggctccaagacttgcaggctccattaggtagcaccgttcttacctgtatacaattctttccctctgtaaatcttccaagccgcaacacagctctgcagcatagaaaacggctctctgctcatcaaagccgggattgcccaggttgtaaatgtgaaacttcaaatcccctccattcataatggtgagcaccaagcacaaggcatctttggtttcataagcgtaggctaaactaacctaaagacagcaacatcataaaaacagaacacgaacttgctctttcattggtgatttcctctatttgctaataatatgcaaataatctgtgttaggtttacaatcagaacatgtgaatactatatgtttcagagaaatgtacaggacatatcacgtgcctcttggaccttggcatgctgaagattttaccgcagctgtgtagccaaaagagagaactttctacagctaagcgaagaagtggcgaaacttc

SEQ ID NO: 3092 - DNA, 579 bp, Homo sapiens
  MAP TO CHR6.1; EXPRESSED IN PLACENTA, SIGNAL = 2.7; EXPRESSED IN FETAL LIVER, SIGNAL = 2.8; EXPRESSED IN LUNG, SIGNAL = 1.2; EXPRESSED IN BRAIN, SIGNAL = 2.5; EXPRESSED IN HELA, SIGNAL = 2.7; EXPRESSED IN HEART, SIGNAL = 1.3; EXPRESSED IN BONE MARROW, SIGNAL = 2.9; EXPRESSED IN ADULT LIVER, SIGNAL = 1.8; EST_HUMAN HIT: N24410.1, EVALUE 0.00e+00; NT HIT: gi14782487, EVALUE 1.00e-103; SWISSPROT HIT: P56699, EVALUE 7.40e-02
ctcccatcgaagagatcgagcactgtcaccacagtcccggggtgtgtctgtgggaagggggcaatgcagccaccggggataggctaagaagctcccacacgccaccccctggcccgcgtccacaggtctattgtaccctgctagaaccagggatcccgtcccccaactctcccccacgccagcaccagctccctgaggaactgggcaggcccagaggggtggctttcagttccccgctctccctcccctgccacagtagacgcctctaacgccctgcacccaggtgtcccctgccagacctcattgatgtattccagcaggtggcggaagctgtacgagctgtcgaagagcccatgcaccacgatgaccggcttgtaggacgcgcggtggggcgcgggggctgcaagcagcagcagcggcaggaaaggcaacagaagcaggacccacgccgcggggagccgctgcccccagagccccagcatgctcccgcctgagaaaggggtgataagggcatgtgagggagatggcaacaccctcctccctcggaacagacgcccggcaatcaagccacctcctctc

SEQ ID NO: 3093 - DNA, 540 bp, Homo sapiens
  MAP TO CHR17.1; EXPRESSED IN HELA, SIGNAL = 0.82; EXPRESSED IN BRAIN, SIGNAL = 1.1; EXPRESSED IN LUNG, SIGNAL = 1.7; EXPRESSED IN HEART, SIGNAL = 1.3; EXPRESSED IN BONE MARROW, SIGNAL = 1.1; NT HIT: gi14589963, EVALUE 1.30e-01; SWISSPROT HIT: O95198, EVALUE 1.00e+00
tatggtgctcatttcccagcatgtctttcaggtctgcactacagagcttacacaaggcttgtgaagtcgccagagcgcataactactacccaggcagcctatttctcacttgggtgagttattatgagagccatatcaactcagatcaatcctcagtcaatgaatggaatgcaatgcaagatgtacagtcccaccggcccgactctccagctctcttcaccgacatgtaagtcagtttgctaaggattatggaagttctctccattatgtcctgaggagtcataagaagcatgttcctccctaatcttttctcttggggagttaatcttacctaggaatattagtcattgtgaatagcacgtgtctgccacatatgaagaatcctattcttgctgttgcctgcaaaggcctgagaagcttcaccccaaggcacaatagagtctccatagtcaaaaacttcaatacgataaaatttcattattcagattccattaatttgaaatttgagtttaaaggagttgggctgaagtttgagtttgc

SEQ ID NO: 3094 - DNA, 592 bp, Homo sapiens
  MAP TO CHR2.1; EXPRESSED IN BRAIN, SIGNAL = 1.2; EXPRESSED IN BONE MARROW, SIGNAL =   1; SWISSPROT HIT: Q15032, EVALUE 3.00e-62; NT HIT: gi14724601, EVALUE 0.00e+00; EST_HUMAN HIT: BF030214.1, EVALUE 0.00e+00
tggatcactggcctttcttcaaaagctataatgccatgaacacacatcctaggagtctctataatgttaacagaagctccaaataccaagccaatcaaagatgggagagggcaggggaaccataaaggcgaagggtccaaaggtggctgttactgagaacttgccctttccaaaatgtgaaagtcatagtgcttcttgcttgttctcagcttaaacttgttaactgagttaatttgtttcttcagtgcattctgtgcagctgaaatggaggggaatgtggctaagacggtgtaggtggaggccaagtcactgggtttagagcgttcagggttggcagtgttgtccccactgccacagcagagggggtgacgacgtggttgggactgggggtcccggagccaccggatcttggcgccaattttaaagagttccccaaaaagcttttcagcttccatgcgagttattccatctggtagttcagtaatttccaagaccttcccaacaactagaatagaaaaggtacagaatcaatacattcctgttaccaaaaaagttgggtaaaaaagcactgcagacccaaatatgacatggg

SEQ ID NO: 3095 - DNA, 592 bp, Homo sapiens
  MAP TO CHR19.1; EXPRESSED IN ADULT LIVER, SIGNAL = 4.6; EXPRESSED IN PLACENTA, SIGNAL = 3.6; EXPRESSED IN FETAL LIVER, SIGNAL = 4.6; EXPRESSED IN LUNG, SIGNAL =   3; EXPRESSED IN HELA, SIGNAL = 3.9; EXPRESSED IN BRAIN, SIGNAL =   5; EXPRESSED IN BONE MARROW, SIGNAL = 5.7; SWISSPROT HIT: O43823, EVALUE 1.00e-74; NT HIT: gi14761764, EVALUE 0.00e+00; EST_HUMAN HIT: AI266184.1, EVALUE 0.00e+00
gaaccttgcgagggcttacccgatcccgatcccgcatccgaggctgcgagcggccacatccgtagggcatggtgctgtcatagccgcccgccccctgcatgcccatcacgccgtagtcgggagccatggactgggagaagagggacggaggtggccggctgggggagggccctcccaggccccgtccacccacgtagttcagctcgttccagggcgtggacaggggctcagaggacgcagcggggggcacgaaggggtcgctgcgcatgaaggtgccagggttgctccggtcctggaagcggccctggccccggccccgcatgaagccatcaagggagccccgctcccgggctgggtctcggcattcactgtactgccccccaaagctgccattgcggtcggaccccaggtcgaactcatagtcgtagctgtagctggggcggtaggggttgtgctccggcaggcagggcctggagtcataggactcgaacggctggaagcggaaggagctgcaacagaagcacagcccatcaggggcggtcaccccgatcacccactgccacactccctcagtataacctcgacgccccta

SEQ ID NO: 3096 - DNA, 575 bp, Homo sapiens
  MAP TO CHR17.1; EXPRESSED IN PLACENTA, SIGNAL = 1.5; EXPRESSED IN HELA, SIGNAL = 1.5; EXPRESSED IN LUNG, SIGNAL = 2.3; EXPRESSED IN BRAIN, SIGNAL =   2; EXPRESSED IN HEART, SIGNAL = 1.9; EXPRESSED IN BONE MARROW, SIGNAL = 1.8; SWISSPROT HIT: Q03532, EVALUE 2.80e-01
gaaagtcccagctttgttgctgtgtttttggaggccttgggcaagtccctctatcttttttggcttcaacatcctctgttataaaaagggatgagtaatatctgtgttgccaacctcctggccttggtccacaggccaaatgagatgcttctgaatgaaaatacgtagtaagaagtgaaaaggattgcgatgagtaagcttcttgttggtccaatcagtgccagtccatgctcatttcttctcgaaaagacccactgatttttatagggtaaggagggggaatgattggcaaggcactgaccaatcccattagctctgagagggggatgatttagcatcacctgccttatcaatctccctgccccgcctgcatcctcggcttttggggaggtcaatttccggcacacacagaaaagcctgtggctgtggccgggaacaattggccacagtgctcctctcgtgttgatcctttcatttcctcctgccggggacagcggttctaagtttcgcgctactcttttggactaatcgtttacaacaggcctgagcactcagcccctctctcacttttgctg

SEQ ID NO: 3097 - DNA, 560 bp, Homo sapiens
  MAP TO CHR19.1; EXPRESSED IN HELA, SIGNAL = 3.5; EXPRESSED IN BRAIN, SIGNAL =   4; EXPRESSED IN HEART, SIGNAL = 4.2; EXPRESSED IN ADULT LIVER, SIGNAL =   3; EXPRESSED IN BONE MARROW, SIGNAL = 3.8; EXPRESSED IN PLACENTA, SIGNAL = 3.5; EXPRESSED IN FETAL LIVER, SIGNAL =   4; EXPRESSED IN LUNG, SIGNAL =   5; NT HIT: gi16162900, EVALUE 0.00e+00; SWISSPROT HIT: P16818, EVALUE 3.60e-01; EST_HUMAN HIT: BG395178.1, EVALUE 0.00e+00
ttcactttcagcgaacatgccccctcctccaggaagccctccctgcccctcctcacctcctcagatcatcctcaaagggcaggaaaagccatttctttggcatgtccttgaggaacaggtcctgctgctcctccgtggagtcctgggacacgtacaccagggccagctgagccgcccgcagtacatagaactcatctgtgagccgcacgaagaagtccttgaggatgggcacgaaggcctggcactgtggacaagccccagcaccaaagaacagcagcaccagccggttctccagcctgcgactgacctcagcctccgtatccagctcgtcctggtcgctattgttgcggatcaggatgcggccagagaacagggaggccatggtaacctgggttgggtgctggggacagcgcggcgtgtggtccccggtctgctgactggctcctctcccagaaatagaaatctttagaaaaccagcttaggacttcactaatctgcctaaaccttgacctgaggggcctctaagggcggggggcagggctctctgtgtggcccttctc

SEQ ID NO: 3098 - DNA, 554 bp, Homo sapiens
  MAP TO CHR22.1; EXPRESSED IN BRAIN, SIGNAL = 3.3; EXPRESSED IN HEART, SIGNAL = 3.7; EXPRESSED IN ADULT LIVER, SIGNAL =   4; EXPRESSED IN BONE MARROW, SIGNAL = 3.3; EXPRESSED IN PLACENTA, SIGNAL = 3.2; EXPRESSED IN FETAL LIVER, SIGNAL = 3.9; EXPRESSED IN LUNG, SIGNAL = 2.8; SWISSPROT HIT: Q10567, EVALUE 1.00e-45; EST_HUMAN HIT: BF841970.1, EVALUE 0.00e+00; NT HIT: U36261.1, EVALUE 0.00e+00
gcggttgggagtagagacaggcatggccaggctggagtagagtaccatggggaatgagcccggggccagggcatggccctgtaggtggtataggggcaggctcatgggagcactcaggactgctgtccccattggccacccctgtgccgcacctggctcatggctgcaggaaggtctcctcccttctcacctggctactctgagtttcatgggcttctcctcacccccacaaggactcagataacccagacctgcgggaccgtggctacatctactggcgcctgctgtccacggacccggtggcagccaaggaggtggtgttggctgagaagccactcatctctgaagagacggacctcatcgagcccacactgttagacgagcttatctgctacatcggcacgctggcttccgtctaccataagcctcccagtgcctttgtggaggggggccggggcgtcgtgcacaagagcctgccacctcgcacggcctcgtgagtgagactggccagtcggcctgcgccttcacactctgcttccccagtttagcagcac

SEQ ID NO: 3099 - DNA, 570 bp, Homo sapiens
  MAP TO CHR6.1; EXPRESSED IN FETAL LIVER, SIGNAL = 0.76; EXPRESSED IN HELA, SIGNAL = 0.82; EXPRESSED IN BRAIN, SIGNAL = 0.74; EXPRESSED IN HEART, SIGNAL = 0.79; EXPRESSED IN ADULT LIVER, SIGNAL = 0.91; EXPRESSED IN BONE MARROW, SIGNAL = 0.73; SWISSPROT HIT: O75144, EVALUE 1.60e-01; EST_HUMAN HIT: BE552449.1, EVALUE 0.00e+00; NT HIT: Z11769.1, EVALUE 8.50e+00
aggaagaaggagaattgggctactcaaaggaaaaggtgagggaaactgagtggcatgactctccaattggattagggcaaaggaattaccaggagaattaccagcaaccacaggagaagaaattagccaaatctcttagcaaaggtgtccagggagaaggtgaagaaggaagggtgtgcattagggatgtcccactgtggctttccagaatgcacgctttcaactgacagcagtgggtacaggcccgaggtgtgcagcaagctgggaagcccagaggccgagaagctaaagatgccctggagactggaggagcgcatcaccggtcagtgcgccccctccaggagcggcctcccggccctctcggccttaggcgacaggtgcagcagctgtctctactgcccgctgtgccagggcggctgccgagcactggtgcggaaccactatcggaacgagtttgcacttctgtttacaaagcaatcctgccatcaaaagaggaacaaaatcaccacttatcacaccctgtcataaagtaatctgccctggagggaaacccttgtggagaactgctgt

SEQ ID NO: 3100 - DNA, 588 bp, Homo sapiens
  MAP TO CHR9.1; EXPRESSED IN FETAL LIVER, SIGNAL = 0.56; EXPRESSED IN BRAIN, SIGNAL = 0.53; EXPRESSED IN BONE MARROW, SIGNAL = 0.5; NT HIT: gi14738766, EVALUE 4.00e-91; SWISSPROT HIT: P45353, EVALUE 5.70e+00; EST_HUMAN HIT: AL559151.1, EVALUE 6.00e-91
agctgcatgagagatctttgggtaaaagataaactccaaacatcaataaaccctaagaccctaggcaaactatttactctaagagtttagacaaattttcacaaaaatataacattctacacgattccaaagaaaatcttattttgtcaaaacatgatttatgatttacctttatgttaagttttctattgtttgttggaagtgttccatcctctttgagttgctcaggcagatgtatagtctttgttttaaagtttgtaggagtagcattttgtaacttgggcttctttttaccaactttcaattttactttttgaaaatcatgttggcgttttctttttttagtcattctcgactactataatgaaaagaattaattaaaagcaatggatagagacaagaataaattatgaaaaaaggcactttccaacacatactactgtaacatttatttcaatcgtaatcaagaatctgattatgctgaaagatcaaaatattaaaaaatgctgttaagaactattaaaaactcagtttagtgataaaatactgtaacaaggcaacagtcttgccacggttttgcaaagtttt

SEQ ID NO: 3101 - DNA, 574 bp, Homo sapiens
  MAP TO CHR8.1; EXPRESSED IN HELA, SIGNAL = 2.1; EXPRESSED IN BRAIN, SIGNAL = 2.9; EXPRESSED IN LUNG, SIGNAL = 2.2; EXPRESSED IN HEART, SIGNAL = 2.8; EXPRESSED IN PLACENTA, SIGNAL = 1.7; EXPRESSED IN FETAL LIVER, SIGNAL = 2.6; NT HIT: AY007249.1, EVALUE 1.00e-108; SWISSPROT HIT: P48454, EVALUE 3.00e-27; EST_HUMAN HIT: H86479.1, EVALUE 1.00e-108
acgtactggtgctgtggatgtgaaatcatggtgatttattaggtttaatttgtcatgtaaaagaattgtgttctgtttgttctctatacatttaaatattttaaattattattattatttttttgtagctgtcccctttcctccaacccaacggcttactttcaaggaagtatttgagaatgggaaacctaaagttgatgttttaaaaaaccatttggtaaaggaaggacgactggaagaggaagtagccttaaagataatcaatgatggggctgccatcctgaggcaagagaagactatgatagaagtagatgctccaatcacaggtataaaaagtctttgcatgatacttttttacagtatagatttgcatgagcagttttgagaaataattacaaataaccagctaaaaagtggtgtggtaatttttctagaaattatgagacagtcaggattggttaggatatttgttgttaattgaagaaatacaattttaagtgtctcatatttccagtagaactatttagtatgagtagattgactacagttttacagcagtcctgtcaaaagctgg

SEQ ID NO: 3102 - DNA, 591 bp, Homo sapiens
  MAP TO CHR11.1; EXPRESSED IN BRAIN, SIGNAL = 0.59; EXPRESSED IN HEART, SIGNAL = 0.76; EXPRESSED IN BONE MARROW, SIGNAL = 0.64; NT HIT: AF282275.1, EVALUE 7.00e-90; SWISSPROT HIT: Q9GZM6, EVALUE 2.00e-41; EST_HUMAN HIT: AI239808.1, EVALUE 9.00e-07
tgacattgtacagcaaggggctgcagatggcaacataacagtcatacgccattgcagccaacatgtgacactctgcaatagcaaaaatactgaataaatagagctgagccatgcattcagggtaggagatgatgttcttctctgtcgcaaagttcaccagcatcttaggggtaatgacagtggaatggcagaagtcaatgaaggacagactgctgaggaaatagtacataggtgtgtgcaggtgagaactgagcccaatcagtgtgatcatgcccaagttgcccaccactgtgaccacacagattcctaagaacaggaggaagaggcgcagctggagctctggctgttctgagagcccagccagaatggactcagtcactgaggaatggtttccagggtccacgatcttgtcaacagtctctaagttttaaaaagagaaattgaatgtgtttgtgtgtgagagagaaattatttgtaaatcatgcatattctataccttatcagaggagaaacagaatgcagtggtctcctgagcctctcttgctactgtttaatagacaatagtctggtcgaccagaggaggaactgcag

SEQ ID NO: 3103 - DNA, 536 bp, Homo sapiens
  MAP TO CHR5.1; EXPRESSED IN BRAIN, SIGNAL = 3.5; EXPRESSED IN HEART, SIGNAL = 1.5; EXPRESSED IN ADULT LIVER, SIGNAL = 3.7; EXPRESSED IN PLACENTA, SIGNAL = 2.6; EXPRESSED IN FETAL LIVER, SIGNAL =   3; EXPRESSED IN HELA, SIGNAL =   4; EXPRESSED IN LUNG, SIGNAL = 1.4; SWISSPROT HIT: P37275, EVALUE 1.30e+00; EST_HUMAN HIT: BE273128.1, EVALUE 1.00e-39
aggtatccatgaaggggaggaggcagaggatggccttgaggggagggtgggatggtgccaagtgggtgtctcccccaggatgacaggcttgcacaggtgcccaggccctacaagtgaacattaatgatgggctagttggctgagggtgtcatgcttcagaagaacgtttccttgaggcagcctacttcagggcaggtcagcttgggcagtgccaacaccaggcctccagccaaggagctgccagcacctcagctttgtccactcactactgagacctggctgaactgagcctagctgggcttccaggagttcccaccagtaggagctcccacccaaaagaatggggtcactggcagcttttgaaccagctgggcactggctggagaggctgggtaagaaatatatttctaaaggctatgttggggtcaaggcagggtgaggggtgctccatggcctggattcccctgagttgcttacttagatatctctgtgagtctaactccaccccccattctagccttcttcagttgaccagc

SEQ ID NO: 3104 - DNA, 560 bp, Homo sapiens
  MAP TO CHR9.1; EXPRESSED IN HEART, SIGNAL = 3.7; EXPRESSED IN PLACENTA, SIGNAL =  11; EXPRESSED IN LUNG, SIGNAL = 5.5; EXPRESSED IN HELA, SIGNAL =  15; EXPRESSED IN BRAIN, SIGNAL =   3; NT HIT: AF255306.1, EVALUE 0.00e+00; SWISSPROT HIT: P50750, EVALUE 3.00e-67; EST_HUMAN HIT: BI761424.1, EVALUE 0.00e+00
tccatattctctcaacgccccctccctcccaggtgtggccaaacgtggacaactatgagctgtacgaaaagctggagctggtcaagggccagaagcggaaggtgaaggacaggctgaaggcctatgtgcgtgacccatacgcactggacctcatcgacaagctgctggtgctggaccctgcccagcgcatcgacagcgatgacgccctcaaccacgacttcttctggtccgaccccatgccctccgacctcaagggcatgctctccacccacctgacgtccatgttcgagtacttggcaccaccgcgccggaagggcagccagatcacccagcagtccaccaaccagagtcgcaatcccgccaccaccaaccagacggagtttgagcgcgtcttctgagggccggcgcttgccactagggctcttgtgttttttttcttctgctatgtgacttgcatcgtggagacagggcatttgagtttatatctctcatgcatattttatttaatccccaccctgggctctgggagcagcccgctgagtggactggagtggagcatt

SEQ ID NO: 3105 - DNA, 573 bp, Homo sapiens
  MAP TO CHR5.1; EXPRESSED IN LUNG, SIGNAL = 1.4; EXPRESSED IN HELA, SIGNAL = 1.1; EXPRESSED IN BRAIN, SIGNAL = 1.1; EXPRESSED IN HEART, SIGNAL = 1.2; NT HIT: X97970.1, EVALUE 5.50e-01; SWISSPROT HIT: P37012, EVALUE 7.20e+00
atggtgggaatcacaggaagcagtaatctcatctggaatttaatagtctttttgtgtgtgtggttttgatcattttccttttatgagtgccgtgtgcacagactcttgattgtttctgcaatggaaaaagaagaggatgtccctctgaatcccaatgatctgctttggccaaaatcagacaccaaagctgttaacgggaagaacacttgcaatataggaaatcctataatgtaacgaccaatgcaattggttagaaactcttaatacactcccaagttgacagaagatggcagctcccactgacaactacacagccaagcctcttcatccattctatttagaccgaaggaaaatgaagagatattgaatggaatattctaaaagttctgggtggtcagagccatgtgttttaggatggccatttccatgagaaaggtgcggttttgtgggcaaactttttaaccctcttctcttcctaccaccccctacatcacacaattaagaaccgtgggtgggagaagatggattgctcatcgccctcccactctgtggccctcttttggatggcatcat

SEQ ID NO: 3106 - DNA, 539 bp, Homo sapiens
  MAP TO CHR15.1; EXPRESSED IN LUNG, SIGNAL =   2; EXPRESSED IN HELA, SIGNAL = 2.9; EXPRESSED IN BRAIN, SIGNAL = 4.2; EXPRESSED IN HEART, SIGNAL = 2.6; EXPRESSED IN BONE MARROW, SIGNAL = 4.4; EXPRESSED IN ADULT LIVER, SIGNAL = 4.5; EXPRESSED IN FETAL LIVER, SIGNAL = 3.4; EXPRESSED IN PLACENTA, SIGNAL = 2.9; SWISSPROT HIT: P11716, EVALUE 2.00e-12; EST_HUMAN HIT: BG201525.1, EVALUE 1.00e-48; NT HIT: X74270.1, EVALUE 6.00e-93
gacttttgcctaaatcccccttatttttcttctctagtgttaccttttccacatgtacgtgggagtgagagcaggaggtggcattggtgatgaaattgaagaccctgctggtgatccttatgaaatgtatcgcattgtctttgacattacctttttcttcttcgtcattgtcatcttgctggccatcattcaaggtatgattgccaattgtgttgagtatgaacagggtttaatctagttctttttgctttcttccatctatgacttaattggtttatgaagaagcgtgtgaattcatttacttgttaatttagcaagaactaatttagcatctactatacctgaggctttggctatatataaagccaaatacacacaccaggcacagttataagaagcttcatccatacagaggaaccccttccttctgttcctctactctgaattatttactcctcacttctgcttctgagatctctcctgtggctagtcttgtcctcttcattttcttcccagagagggaggtagggtaggagcag

SEQ ID NO: 3107 - DNA, 509 bp, Homo sapiens
  MAP TO CHR19.1; EXPRESSED IN ADULT LIVER, SIGNAL = 0.68; EXPRESSED IN BONE MARROW, SIGNAL = 0.77; EXPRESSED IN LUNG, SIGNAL = 1.5; EXPRESSED IN HELA, SIGNAL = 0.69; EXPRESSED IN BRAIN, SIGNAL = 0.77; EXPRESSED IN HEART, SIGNAL = 1.2; SWISSPROT HIT: P96192, EVALUE 7.10e-01; EST_HUMAN HIT: BG698821.1, EVALUE 0.00e+00; NT HIT: AF009012.1, EVALUE 1.20e-01
gaaggggaaacagaggaaggaaccacgagtgtcccgcaggtgcaagtcctgaccggggctatcttctcaagacacaggcaagttgttgggtggttggatagtcaagaggctggcaggtctcagcagtccttgtcatcaccccggatttccacgtagggcagccccacgggccaactgtcccgaggccagtagcggactttgagggtttcacctggcatctcatagttggcatccaccaaggccatggtgaccatgccataagggaaggtgatgctgatgagcacatgcctgtggagtgcagggcgaaggtggcgagggcacaagatacccacagcctcacgccggccctctttttacttctcatgactcttgaccatccatccaggggagccttctgggtctggccccgtgactgcagccttcccctaccgccaggtcccagtgtctggctctcctctctctgcttctccaaccccagcccccaggtgcctactccgagctttggcatc

SEQ ID NO: 3108 - DNA, 514 bp, Homo sapiens
  MAP TO CHR12.1; EXPRESSED IN HEART, SIGNAL = 0.86; EXPRESSED IN ADULT LIVER, SIGNAL = 1.2; EXPRESSED IN BONE MARROW, SIGNAL =   1; EXPRESSED IN BRAIN, SIGNAL = 0.82; SWISSPROT HIT: P37287, EVALUE 3.00e-81; EST_HUMAN HIT: AI417807.1, EVALUE 0.00e+00; NT HIT: X77457.1, EVALUE 0.00e+00
ggaggagagggaccaaagagaatcattttgcaagaagttccggaaagataccagttgcatgacagggtgcatcttttgggagctttagaacacaagaatgttagaaatgtcttagttcaaggacatatttttcttaatacctcccttactgaagcattctgcatggcgatcatggaagcagccagctgtggtttacaggttgtaagtaccagggttggtggaattcctgaggtgcttccggaaaatcttactattttatgagaaacttcagtaaaatctttgtgtgagggattggaaaaagctattttccaactgaagtcaggggcattgctggctccagaaaatatccgtaacatagtaaagactttccacacctgaaggaatgttgtggagagaactgaaaaagcgtatgaccaagtatcagtggaatctgtgttgccaatggacaaacaactggacagacttatttctcacagtggaccagtaacaggctacatctttgctttgttggctg

SEQ ID NO: 3109 - DNA, 549 bp, Homo sapiens
  MAP TO CHR9.1; EXPRESSED IN BONE MARROW, SIGNAL =   1; EXPRESSED IN FETAL LIVER, SIGNAL =   1; EXPRESSED IN LUNG, SIGNAL = 3.2; EXPRESSED IN BRAIN, SIGNAL = 0.61; NT HIT: gi7661677, EVALUE 0.00e+00; SWISSPROT HIT: P08645, EVALUE 8.00e-59; EST_HUMAN HIT: AU141937.1, EVALUE 0.00e+00
gctgactcagagctgcaatgcacttagtacattaaagcagctgacatgatgactttttgcgagccttcccaggcactggagtttttctgttaatctgccgcactaggtcataaaagatctcattaacatttattttgaattttgtagaagaatctaagaatgcacagttgttccattgtcttgctagatttttgaccttcttccttccctacagctctttcatcttccaagtcatacttattaccaacaagaatcattggaacatcatcagtgtctttaactcaaagaatctgttctctcaagtcttgcaaatcattaaatgtggactgtgctttgatggaataaactaatgcaaagccttgtccatttctcatgtacaaatccctccttgctatacattgttccgttcctgcagtatccaagattgcaagcatacactgctgtgcatctacttcaacttgctttctataagaatcttctatcataggacatatttttcaacaaaaattccttgaacaaattgtacattcaaagcagactttccaacgc

SEQ ID NO: 3110 - DNA, 581 bp, Homo sapiens
  MAP TO CHR19.1; EXPRESSED IN LUNG, SIGNAL = 0.81; EXPRESSED IN HEART, SIGNAL = 1.3; EXPRESSED IN PLACENTA, SIGNAL = 1.2; EXPRESSED IN FETAL LIVER, SIGNAL = 1.5; EXPRESSED IN BRAIN, SIGNAL = 1.6; EXPRESSED IN HELA, SIGNAL = 1.9; EXPRESSED IN BONE MARROW, SIGNAL = 1.3; EXPRESSED IN ADULT LIVER, SIGNAL = 1.6; NT HIT: AJ010154.1, EVALUE 3.60e-02; SWISSPROT HIT: P87061, EVALUE 1.90e-02; EST_HUMAN HIT: BF884008.1, EVALUE 3.00e-40
aggcctatggtgttgagctgggcctggcctgtggagcatgggttatgggacaggtcacttaccgggcagtggagggccggtgtccaccatggaccagcagggcacgggagggggcatggaacaccatggagtggccagtggcagcagggggccgtccgcctgccggaatcacctgctcccaatagcccccgctggtgctgtcaaggcggaaacggaagaggccagaggagaagaggtcgtgcggggtgcggcctccagacacatatagccagacatcatccaccagggcagccgcgtgacctgccaggcctgggggccccgaggagctggaggcaggtggtgccaggagctcccagtggcccctgcccagtggactgaaggcccacacgtcgttggtgagcgagccgtcagccagctcaccacccatcagtaccagggagccggcccaggccacggccacatgggagtgacgggcagcctgtgaggaagagaaaagagacagaggtagagacacagcaagagagccagagccaggcttagacagagagatgcagagccagagaaacatggagagaaggcga

SEQ ID NO: 3111 - DNA, 568 bp, Homo sapiens
  MAP TO CHR19.1; EXPRESSED IN BONE MARROW, SIGNAL = 1.8; EXPRESSED IN ADULT LIVER, SIGNAL = 1.7; EXPRESSED IN FETAL LIVER, SIGNAL = 1.7; EXPRESSED IN LUNG, SIGNAL =   1; EXPRESSED IN BRAIN, SIGNAL = 1.9; EXPRESSED IN PLACENTA, SIGNAL = 1.4; EXPRESSED IN HELA, SIGNAL = 1.2; EXPRESSED IN HEART, SIGNAL = 1.5; EST_HUMAN HIT: BG117509.1, EVALUE 0.00e+00; NT HIT: gi6677648, EVALUE 0.00e+00; SWISSPROT HIT: Q13398, EVALUE 7.00e-76
actccagccttgttgaccaccagaaaatacacactggagcaaggccttatgagtgtagccagtgtgggaaatcctttagccaaaaagccacccttgttaaacaccaaagagttcacactggagaaaggccttataagtgtggtgaatgtgggaattcctttagtcaaagtgccattcttaatcaacaccgaagaattcacactggagcaaagccttatgagtgtggccagtgtgggaaatcctttagtcaaaaagctaccctcattaaacaccagagagttcacactggagaaaggccttataagtgtggtgactgtgggaaatcctttagtcaaagctccatccttattcaacaccggagaattcatactggagcaaggccttatgagtgtggccagtgtggaaagtcctttagccaaaagtctggtctcattcaacaccaagtggttcacactggagaaaggccttatgagtgcaacaaatgtgggaattcctttagccaatgctccagcctcatacatcaccaaaaatgtcataacacatagaggcctcatgaatgcagcaaatg

SEQ ID NO: 3112 - DNA, 541 bp, Homo sapiens
  MAP TO CHR17.1; EXPRESSED IN LUNG, SIGNAL = 0.85; EXPRESSED IN BRAIN, SIGNAL = 0.55; EXPRESSED IN HEART, SIGNAL = 0.99; EXPRESSED IN ADULT LIVER, SIGNAL = 1.2; EXPRESSED IN FETAL LIVER, SIGNAL = 0.68; SWISSPROT HIT: P11716, EVALUE 4.50e-01; EST_HUMAN HIT: BF362466.1, EVALUE 0.00e+00
aaaggaaaaggtcaccaccctgatctgacatgttgaattgagaggtaggttgtatgatagggaaggaatagggccagctgtggctgccagtagcagaatgtccaggttggaactctggtctaaagcctaggagagcagaacggtaagaggctacaaaataaaaacaaactggattatcaaggtggtcatactgagtaggcagggatggagatcttcaggctcccagccgggccccaatttacagtagagaggctcaagcagggatagggtagagcaagaaggactccagatcacagtcaaagtcgtcaaagggcatggtctccgctgaactgggctgggtagcttgtgtctccgtgacaaagttcactggctgcttctgtaggagctctgggtcgaaggccacaccccgaaagaaagggtggacctggaagtgatgcagataacgtagacgatggagggggttctggcataagagctgaaggaaaatagagcatgaaggatgagtgactaggacaggacaggcctgaacagaaaggatgga

SEQ ID NO: 3113 - DNA, 587 bp, Homo sapiens
  MAP TO CHRX.1; EXPRESSED IN ADULT LIVER, SIGNAL = 2.4; EXPRESSED IN BONE MARROW, SIGNAL = 2.7; EXPRESSED IN PLACENTA, SIGNAL =   3; EXPRESSED IN LUNG, SIGNAL = 1.4; EXPRESSED IN BRAIN, SIGNAL =   2; EXPRESSED IN HEART, SIGNAL = 1.6; SWISSPROT HIT: Q13474, EVALUE 4.00e-47; EST_HUMAN HIT: BI553820.1, EVALUE 0.00e+00; NT HIT: gi14757195, EVALUE 0.00e+00
agggcaaccagactaaggtgtgggcggccactgtccttatcctcttcctctcatcctcagaaaacaccaggaaaagagaagaaagtaggaaaacagaagagactccagccaaaccagccccaaatctagcacataaactgacagcaactcagttgtagtccaggccaacaatggagtctcagcagcagaaacattgtcagtgtctggggagagtgtcaggtctcagggtagactgtagtcaggggagggggcttgcataccttaatagcctggatgtgctctgggagtgaatcaatgaagagatccccaatgggctcccaagtggctcggactccctcagcttggctcagagtagtgcttagttcctccattgccccttgaatctccaagagctgctccagagtccgctcaatgtgacggtgctggtccacacagcgggctgtcaacttctcccacagttcactggccaccgtcgcctgcttccatacaaagcggctgagattctggatccgctgtttcggggaggtatctgcaagaggaggcaggaagccaggttaggccaaccaggcagggtcagctcaaagaaa

SEQ ID NO: 3114 - DNA, 511 bp, Homo sapiens
  MAP TO CHR1.1; EXPRESSED IN HEART, SIGNAL = 0.92; EXPRESSED IN ADULT LIVER, SIGNAL = 0.61; EXPRESSED IN BONE MARROW, SIGNAL = 1.2; EXPRESSED IN BRAIN, SIGNAL = 1.2; EXPRESSED IN LUNG, SIGNAL = 0.65; SWISSPROT HIT: P48357, EVALUE 2.10e+00
ctggcactggatggattaccgttttgtacaactctgtcattgtttcctgtgggcttgcctcagctctgtggaagacaaaagctttgtatctttcatggtgttaacatagaataggaggctaatcaatattagttacattgacctaaaagtcagtgctgagatagagagggcaaagtgaccagttaaggctctcttgggaagttatttcaagcacagtagcctgtccttggctcagagccttggtgttgaaattgcccaagacctggcaacttggcttagtttcctccactctggtctcctcacctttcacttccactcccaacttagtgtctgacattgtagccattggctcactctgggcaccctccagcctgcccgtggtacaaatcaaggcaaaggaacagactttataggcattctgcttttgtccttcataacttttggtcaagcagagccaccagctgctggggcatgcagactgtgctggaagccttgaatagccatgggtggt

SEQ ID NO: 3115 - DNA, 592 bp, Homo sapiens
  MAP TO CHR10.1; EXPRESSED IN HELA, SIGNAL = 0.9; EXPRESSED IN BRAIN, SIGNAL = 1.4; EXPRESSED IN HEART, SIGNAL = 0.73; EXPRESSED IN ADULT LIVER, SIGNAL = 1.3; EXPRESSED IN BONE MARROW, SIGNAL = 0.9; EXPRESSED IN FETAL LIVER, SIGNAL =   1; SWISSPROT HIT: P49893, EVALUE 1.90e+00; EST_HUMAN HIT: W03943.1, EVALUE 2.00e-17; NT HIT: AF339053.1, EVALUE 4.00e-88
taaacgtggcatttcttccccttcttttcccttccttcacttttccccagatggacttgggcattccagcaatgacaaagtgctgcaaccagctggatgtctgttatgacacttgcggtgccaacaaatatcgctgtgatgcaaaattccgatggtgtctccactcgatctgctctgaccttaagcggagtctgggctttgtctccaaagtggaaggtaggtgtctcaatggcacgtacagtgcacagggaggtttgttcctgttttcacaccgagatatagccagaaccccttgactcgaagagatcatcagagctcactgaatattctttatggaacactgtggctgagcaagaaatggtgaaggaaagattctgggcactccttcactcaagttcttgctgtcctgcccgcgagctgctggcaccactcctgaaggtaaaagactacaccaaagtcttcccagaaaaataaaaatctatcatttaaggctggagaaggaattgcccaactggcttggattatccattccactgttaaataattttccatatcaggaattattccttataggaccacttggtttggctta

SEQ ID NO: 3116 - DNA, 504 bp, Homo sapiens
  MAP TO CHR14.1; EXPRESSED IN ADULT LIVER, SIGNAL =   1; EXPRESSED IN BRAIN, SIGNAL = 0.49; EXPRESSED IN BONE MARROW, SIGNAL = 0.53; SWISSPROT HIT: P04437, EVALUE 3.00e-28; EST_HUMAN HIT: AA427667.1, EVALUE 7.00e-01; NT HIT: U32526.1, EVALUE 0.00e+00
ggtgaatgagaaaattggggtacagacaaactcatgcaggtagacactttaagaagaaaatattattttggggcctaatgacattttgttatctctctaagcaggggtgagtggccaacagaaggagaaaagtgaccagcagcaggtgaaacaaagtcctcaatctttgatagtccagaaaggagggatttcaattataaactgtgcttatgagaacactgcgtttgactactttccatggtaccaacaattccctgggaaaggccctgcattattgatagccatacgtccagatgtgagtgaaaagaaagaaggaagattcacaatctccttcaataaaagtgccaagcagttctcattgcatatcatggattcccagcctggagactcagccacctacttctgtgcagcaagcacacagtgctccccaggcacctgaagcctgtacccaaacctgcagttgaggttccagccaaaccccacagtgggagcttacgtaggcag

SEQ ID NO: 3117 - DNA, 550 bp, Homo sapiens
  MAP TO AC084117.2; EXPRESSED IN BRAIN, SIGNAL =  38; EXPRESSED IN ADULT LIVER, SIGNAL =  17; EXPRESSED IN LUNG, SIGNAL =  35; EXPRESSED IN HELA, SIGNAL =  25; EXPRESSED IN HEART, SIGNAL =  31; EXPRESSED IN BONE MARROW, SIGNAL =  48; EXPRESSED IN FETAL LIVER, SIGNAL =  36; EXPRESSED IN PLACENTA, SIGNAL =  35; NT HIT: gi14773070, EVALUE 3.00e-70; SWISSPROT HIT: Q9UPZ3, EVALUE 4.00e-16; EST_HUMAN HIT: BG114545.1, EVALUE 3.00e-34
tggggcttggggtagataacttctaagttcctcccagttctaaaattctgcatttctgatgactaatggttggtcaatatacctctcagtgtcacacaagaaggatcgagtaagtgaagatataagtagccttccatccaaataatctaactgtacaacacaggagtcaacagttgtgattgtctgaacaggaaacatcacaaaagcagcagctgcctaaaaggaatgtgagaaagaaataaagtttatttaatcataacatacacatgcaatctcttcctctttaccttgtaaatgaaaataacttgaatagcaaaataaaattttcaaataagccaaaacttaatttgcttgtaaggatatcaaagttttagtcacttaaaagttgtattaaataatctggtacgtaactgcagaagagatttctcaaggatctgtttgtgattatctaatcttagaggttagaacgaaaaagatgaagcaaggtttagaacatgttagtcaggcatggtagcacacatccataatcccagctacttgggaggctgag

SEQ ID NO: 3118 - DNA, 510 bp, Homo sapiens
  MAP TO CHR3.1; EXPRESSED IN ADULT LIVER, SIGNAL = 0.83; EXPRESSED IN FETAL LIVER, SIGNAL = 0.99; EXPRESSED IN LUNG, SIGNAL = 0.93; EXPRESSED IN HELA, SIGNAL = 1.2; EXPRESSED IN BRAIN, SIGNAL =   1; EXPRESSED IN BONE MARROW, SIGNAL = 1.1; EXPRESSED IN HEART, SIGNAL = 0.62; NT HIT: gi14735712, EVALUE 0.00e+00; SWISSPROT HIT: Q16829, EVALUE 4.00e-45; EST_HUMAN HIT: N75122.1, EVALUE 0.00e+00
gatgaggaaacagacacgggtgtccagtgccttggggctaaagtgtgcagagccctctccacagcagtgctgttgacctctattccaagttgctgccctacccacactgggcttggccaggtccctcaggggtcgggcaagaccagccagccaccatgctgccctctgtgccccagccccacctgcccacccatgtgggaaggctccttgaaggaggcacctccctgacccatgccaatgtgtttcagacgaagcccgctccaagaagtgtggtgtcctggtgcactgcctggcaggcatcagccgctcagtgacggtcactgtggcctatctgatgcagaagatgaacctgtcactcaacgacgcctacgactttgtcaagaggaaaaagtccaacatctcgcccaacttcaacttcatggggcagctgctggactttgagcggacgctggggctaagcagcccgtgcgacaaccacgcgtcgagtgagcagctctacttttccacgcc

SEQ ID NO: 3119 - DNA, 576 bp, Homo sapiens
  MAP TO CHR7.1; EXPRESSED IN BONE MARROW, SIGNAL =   1; EXPRESSED IN HEART, SIGNAL = 0.8; EXPRESSED IN ADULT LIVER, SIGNAL = 0.75; EXPRESSED IN FETAL LIVER, SIGNAL = 1.3; EXPRESSED IN LUNG, SIGNAL = 1.4; EXPRESSED IN HELA, SIGNAL = 1.4; EXPRESSED IN BRAIN, SIGNAL = 0.91; NT HIT: M92441.1, EVALUE 5.00e-66; SWISSPROT HIT: P27117, EVALUE 2.00e-62; EST_HUMAN HIT: BI091808.1, EVALUE 1.00e-55
tttggcaatgaaagctgatgccacatgaaatatctgcctggctcagctgtgactctcactctagagtctggtggaaaatacttgtctgatgctgggttgattacactggtaatacttcagatttaagcctcacgtcctcagatccaggaaagcaactgccagtattaagcagttacattctgaaaccaaactcaactcccgtgtcaaagacacagtggacattggaggctgcctgcatgaaggtctcaggattggtacagctacttcctacatggaagctgacaccagtgacatcaatatttagttcttttgctcattccaaaagaagcctgctggctttgagcatggcaccagatttaacactgatgtgacgggctgctttgagtgtgttctggcaactgacatcaacttgacctcattaccgaaaatcatcatctggactccattattggcagtgtacttaatttgagacatttgtttacaagaatttgcatacataaacctctctgggggcatccccagaatctgcaccaattgtatttcagccttgctagcacagtcaaatcctgtcccgat

SEQ ID NO: 3120 - DNA, 554 bp, Homo sapiens
  MAP TO AC068936.2; EXPRESSED IN BRAIN, SIGNAL = 1.7; EXPRESSED IN BONE MARROW, SIGNAL =   2; EXPRESSED IN HEART, SIGNAL = 0.95; EXPRESSED IN PLACENTA, SIGNAL = 1.5; EXPRESSED IN FETAL LIVER, SIGNAL =   2; EST_HUMAN HIT: AW748320.1, EVALUE 0.00e+00; NT HIT: AF092565.1, EVALUE 1.00e-103; SWISSPROT HIT: P34369, EVALUE 1.00e-19
ctccacacacaattccatgctactgcgcctgagacgcaccttatagttgatgacgacgttgttcttggctgtcatgtagtcggctatgttgtggtccacgatgaggcgcagcagcctgttgagcagagtcaagtcgatcttctcatacatcttctcaaagcgggattccagcatgacattgcactcgccttcactcgtctcccacacgtcctgcaggttattgatgcctgaggagtagcaaggcaggtctccagcaggttagaaatcctcttgcaagactagccccacaggaactatcattaccttccataaccaatcccactatgattccacgtattcatttggattgctttgactatgggcttttcctcagtttaacacgaacactacttccctttactaccacgcatcaagagagtaaaccaatcatgctacccagatgagatttttgacgtagaactaaattcctgccccgttcctcacagggcgatctcatgaaagttctaccttgacaccacttgtaaacaagcagcggaggtggttctgtgtctgca

SEQ ID NO: 3121 - DNA, 535 bp, Homo sapiens
  MAP TO CHR19.1; EXPRESSED IN BONE MARROW, SIGNAL = 3.5; EXPRESSED IN HEART, SIGNAL =   4; EXPRESSED IN LUNG, SIGNAL =   5; EXPRESSED IN HELA, SIGNAL = 4.6; EXPRESSED IN BRAIN, SIGNAL = 5.1; EXPRESSED IN ADULT LIVER, SIGNAL = 3.1; EXPRESSED IN FETAL LIVER, SIGNAL = 4.7; EXPRESSED IN PLACENTA, SIGNAL = 3.7; SWISSPROT HIT: P97849, EVALUE 1.00e-43; EST_HUMAN HIT: BG828409.1, EVALUE 1.00e-88; NT HIT: AF023258.1, EVALUE 2.00e-62
cagatcaaccaacaggacccgctgcgccgcttcgatggctatgtcagcgagagcgccaccagcaagaagatcgcccacagcgtcttcagcaagggcgacagcgcctacctctcaggtgcgcagcctgctaggccccggtgactggctgtgcggatggggatcctccacccatctgcccctctcccctctgccaggtgacgtgctagtgatggatgagctgggctacatgtacttccgggaccgtagcggggacaccttccgctggcgaggggagaacgtctccaccaccgaggtggagggcgtgctgagccgcctgctgggccagacagacgtggccgtctatggggtggctgttccaggcaagctggggttgcagggggtggtcctgaggcatggtcctgagggagctcagccaaaaggggcttagaagtacacatgcctttgggcagtgcacaacctggacaactgctcatggcagcccaggaggaagcactggatctggagccagttcacctgggtgatgttgagcctcagt

SEQ ID NO: 3122 - DNA, 527 bp, Homo sapiens
  MAP TO CHR14.1; EXPRESSED IN HEART, SIGNAL = 0.55; EXPRESSED IN FETAL LIVER, SIGNAL = 0.48; EXPRESSED IN LUNG, SIGNAL = 0.69; EXPRESSED IN BRAIN, SIGNAL = 0.49; SWISSPROT HIT: Q9NVP1, EVALUE 5.00e-81; EST_HUMAN HIT: AU128492.1, EVALUE 0.00e+00; NT HIT: X98743.1, EVALUE 0.00e+00
tcaagaccatccactgttgcattagctttatcgtcatcaacaccaacatacaatggctcctttttcagagaaatccttgccgggccttcaacttttcaagtttgggtggcagaaaagagcatcgtctgtctacgtgttggcaaaagtttaataatttgttttaattcctcttcaaactcaacatccaagatacgatcagcttcatcgataaccagacactgcagatttttatacataaaccctgggatattctgcatatggtccagcagacagcctggtgtgaccacagtgatgttgatcccattagcaagtttctgtgcttcagcagatctattactgccacccattatcaacccataggtatgcacgtggtgactcattagctccttaagaacaccaaaagtttgcatggctagttctctagtaggtgagagaataaggacccctgttccattcctgggcatgaaatttaacttaacaatgagttcagctgcaggatgagaaaagctggggttttaccactgacg

SEQ ID NO: 3123 - DNA, 561 bp, Homo sapiens
  MAP TO CHR17.1; EXPRESSED IN HEART, SIGNAL = 1.4; EXPRESSED IN PLACENTA, SIGNAL = 1.8; EXPRESSED IN FETAL LIVER, SIGNAL = 1.6; EXPRESSED IN LUNG, SIGNAL = 1.4; EXPRESSED IN HELA, SIGNAL = 2.5; EXPRESSED IN BRAIN, SIGNAL = 1.6; EXPRESSED IN BONE MARROW, SIGNAL = 1.7; EXPRESSED IN ADULT LIVER, SIGNAL = 1.7; NT HIT: gi7661933, EVALUE 1.00e-105; SWISSPROT HIT: P50535, EVALUE 4.10e+00; EST_HUMAN HIT: BE890759.1, EVALUE 1.00e-104
atgcctcacatagacagggctggtgggtgggcaggagcccagccgggcagggcctgtctccaatagcgccctgcccctcccacctactccctgtcttctgccccctctctttcagtccctcctgctttttagccggtctttggacaccaatggtgactgctcccgcctggtggccgatggctggctggagctgcagctagcagacagtgaaagtgccatccgactcctggcggcttccctgcggctccgtgcccgctgggaaagtgccctggaccggcagctggcgcaccaggcccagcagcagctggaggaggaggaggaggatacgccagtcagccccaaggaggtggccaccctgagcaaggaactcctgcaattcacggcatccaaggtaccctccaccagggtgcccgtgcctccctatggccagaaggggcatccgtcactgggcttgagcctcgggaaggcctggcttcccattcactccacatgggcacatttgggggttttcaggccacagaggttcagtcacttacacaaggtcactccactggtctgggt

SEQ ID NO: 3124 - DNA, 505 bp, Homo sapiens
  MAP TO CHR13.1; EXPRESSED IN HELA, SIGNAL = 1.5; EXPRESSED IN LUNG, SIGNAL = 0.82; EXPRESSED IN BRAIN, SIGNAL = 0.88; EXPRESSED IN HEART, SIGNAL = 0.89; EXPRESSED IN BONE MARROW, SIGNAL = 0.89; EXPRESSED IN ADULT LIVER, SIGNAL = 0.84; NT HIT: gi14757710, EVALUE 0.00e+00; SWISSPROT HIT: P48566, EVALUE 3.00e-07; EST_HUMAN HIT: AU131381.1, EVALUE 0.00e+00
gagaagagggccaggatttctggtaatagtctcacaccttcctcgggaagcacaagtgcctcacctgcagcgacatcatgtcaggtctgtactgcttgcggaagccgaggtcatacatgaggaatttcagcatttcaaaggcttgctcttcactcatgtgcagaagcaggactccagccacaaagctgatcccctgacagtatcccacttctttgtccagcaaagaataggctttcaggaggttaaacagtgacagctgtcctggcccaagctgtactgaaaagtaagggtgagtaggaaacgtccttcctgcagaggaaaagaaggaaaatattttttgaaatgtcctcatgccttggagacaacagtgaaattgcaattcagtgacctccaagaataaacagacactctttcccaaaccagtgagagttgcttagagtcaccatgtaactaagagtctctccctctctcaccccaagttctgccaggccaccataccatcttc

SEQ ID NO: 3125 - DNA, 596 bp, Homo sapiens
  MAP TO CHR12.1; EXPRESSED IN FETAL LIVER, SIGNAL = 0.78; EXPRESSED IN LUNG, SIGNAL = 0.66; EXPRESSED IN HELA, SIGNAL = 1.1; EXPRESSED IN BRAIN, SIGNAL = 0.97; EXPRESSED IN BONE MARROW, SIGNAL = 0.91; NT HIT: Y12056.1, EVALUE 0.00e+00; SWISSPROT HIT: P16520, EVALUE 2.00e-46; EST_HUMAN HIT: BE257738.1, EVALUE 1.00e-110
acaacctcaaatcccgtgagggcaatgtcaaggtcagccgggagctttctgctcacacaggtgagggagagaccctctcctcccctcctgaggggttcagggaaccctgggcttccagtgggctgtggctctgcagccagggcactgtccttctaaccgcctccaggttatctctcctgctgccgcttcctggatgacaacaatattgtgaccagctcgggggacaccacgtggtgaggctgaacattgctggtgctggggcttgggagtgggcccggcctttctctaacagtctccctccattttggcagtgccttgtgggacattgagactgggcagcagaagactgtatttgtgggacacacgggtgactgcatgagcctggctgtgtctcctgacttcaatctcttcatttcgggggcctgtgatgccagtgccaagctctgggatgtgcgagaggggacctgccgtcagactttcactggccacgagtcggacatcaacgccatctgtgtgagtgcaccccccaccccagcttcactccaactccttccccgacactccccacaacacatacaatacacatcctctgcccc

SEQ ID NO: 3126 - DNA, 586 bp, Homo sapiens
  MAP TO CHR1.1; EXPRESSED IN FETAL LIVER, SIGNAL = 0.41; EXPRESSED IN BRAIN, SIGNAL = 0.47; EXPRESSED IN HEART, SIGNAL = 0.78; NT HIT: gi16161881, EVALUE 0.00e+00; SWISSPROT HIT: P23249, EVALUE 5.00e-28; EST_HUMAN HIT: BE887070.1, EVALUE 0.00e+00
ggcccatgtggttgagatacgagcccagccagggctgagttggagggaggagttaccggtcaggtctctctccttcctctatccgattggtcaccacagggtttccggtgatccgggtccgcttgaagggagtcatgggcttcagctgtgcagccagggggctgtgggcgacggcagccaagaagcgggcaatgtagaatgtgccggctccttctgaacccgactccccaggtcccagcagctcccagagcactgtggctgggaagtagcccacaaagctggtcttacaatggacatggagttcatagcattcacctggaggagaatggatgagtgaatggggggtagggaccctcccacccatatccttatcccggacactcccccaggaagccccatcccaaggcaagagtcccatggacagtgacagtgtgtttcccaaagcataagcactgcctgggacaagcccctgtccaccagctctttcctttggaaactcactcaccggggcccagtggacagggcaactcctggtcttcattgtagaaagcaaactggggtgtccggcagagtgggaagaggtgag

SEQ ID NO: 3127 - DNA, 548 bp, Homo sapiens
  MAP TO CHR7.1; EXPRESSED IN BRAIN, SIGNAL = 0.54; EXPRESSED IN HEART, SIGNAL = 0.81; EXPRESSED IN LUNG, SIGNAL = 0.58; EST_HUMAN HIT: H83145.1, EVALUE 4.90e-02; NT HIT: AF078130.1, EVALUE 1.00e-04; SWISSPROT HIT: P32525, EVALUE 1.00e+00
catttcttcttaaagcttcacttgcagtattagtgttgtaatttgtcaacctggatgctgtctggaatgtagttgttccacaggaaatcctcattaactattggttgcactacaatgtttgagactctatctccatctcgagaaaaatctgtgacagcagtgtagtacacaaaagtgtggctacaggttccattagcacaggaagatgtctggagaaggtccacatgacaggaagacagtgccaaatttaagcctaggtgctctctacctatttaatgaaaaaataggtttaaaaatttccaagagaatatactaaccaaagcatgtaataaattaattaacatgaaacactgaattgtaagattattctcaaattattttctctttcttaaaacatatggttgcaaattttgtctaaattaagccaaagctattgaatctacctgatttttacaaagaattaatcaactataatatatacatatgtacacataaatacatattacaattttcaattaggttataaacctgtatgcaactgaaggaaa

SEQ ID NO: 3128 - DNA, 591 bp, Homo sapiens
  MAP TO CHR19.1; EXPRESSED IN HELA, SIGNAL = 1.6; EXPRESSED IN FETAL LIVER, SIGNAL = 1.5; EXPRESSED IN LUNG, SIGNAL = 1.2; EXPRESSED IN BRAIN, SIGNAL = 1.4; EXPRESSED IN HEART, SIGNAL = 1.1; EXPRESSED IN BONE MARROW, SIGNAL = 1.6; SWISSPROT HIT: Q08477, EVALUE 3.00e-19; EST_HUMAN HIT: AA316671.1, EVALUE 5.00e-70; NT HIT: AB002460.1, EVALUE 3.00e-89
atcgatgaggcaggtaatgcctgtgggagagaaaggggcagtcaggacaaggatcccctgagggaaccatcttcctacccgggaggcttctccccctgaggctgtgggcacctttggggatgactcggccatctgggagaacaatgtcctgggtgcagcatcgggagatgaagggagctgggggatgtaacctcaggctctccttcacgcacatggtcaggaagggcagctgggccaggtcgtccctaaggaaacaccccagccccagtcattatcaagggaacaaatacacaactctccaccttttctatttgcaaatgagaccttttctccctatcacaaaataaactccacggggatcaaacatttgagaattttaaaaagcagaaaacaattagagaagcagagaattagaaaagtaccagagaaaatttagccaaatagataaaaataaatactctgaggaaaacacccagaagccagcggtaaaaaattaacaaactcacataaaaataaatattgtctatggcaagaaagcaaactcaaatgcaaatgaataacaaacaaaatacccagatccaatgttttgct

SEQ ID NO: 3129 - DNA, 585 bp, Homo sapiens
  MAP TO CHR9.1; EXPRESSED IN FETAL LIVER, SIGNAL = 0.36; EXPRESSED IN BRAIN, SIGNAL = 0.46; EXPRESSED IN HEART, SIGNAL = 0.57; SWISSPROT HIT: Q02817, EVALUE 1.30e-01; EST_HUMAN HIT: BI257192.1, EVALUE 0.00e+00; NT HIT: gi14783215, EVALUE 0.00e+00
catcagcacagtgagatccgcccgctggagagggtagaatggttgtatcttgctgaatgactgaagagtgagtctgagttttgttttcagcggtattattatttgtgagtctaacctagcgggtggtcctggctgtcaccggtgcttgggcgggatcaccaccagcggctgcccgtacttgggccgccacatgaggacctgggcatcgttggcattgggcttgaccagggcgctgggcgggatgggctcattcttgctcaggattttgggctggtcctgggcgatgggctcccgcagccgggcgcgctggcccaggggccggttggggttcacctcgatgctgagctgcatgcgccagtgcagcgtctgcaggatgatcatgtcgttggtggaggtgttggtggccaccagccaggtggtgaagctctggtcccggtagatattggtgagcttggccacgttgctctcgctgacgggcacggcccatgtgacgctggggtaaaagttgtcattcatgctgatgatgaacttggagtccctcttggtggggcccacgatggtgcaggtctctgtggtgttgccgta

SEQ ID NO: 3130 - DNA, 529 bp, Homo sapiens
  MAP TO CHR11.1; EXPRESSED IN PLACENTA, SIGNAL =   3; EXPRESSED IN FETAL LIVER, SIGNAL = 2.9; EXPRESSED IN HELA, SIGNAL = 3.8; EXPRESSED IN BRAIN, SIGNAL = 2.9; EXPRESSED IN HEART, SIGNAL = 1.4; EXPRESSED IN BONE MARROW, SIGNAL = 3.5; EXPRESSED IN ADULT LIVER, SIGNAL = 1.2; EXPRESSED IN LUNG, SIGNAL = 1.3; NT HIT: AJ006345.1, EVALUE 0.00e+00; SWISSPROT HIT: O28819, EVALUE 8.40e+00; EST_HUMAN HIT: AI378251.1, EVALUE 1.00e-120
gaaggatgggagaaagaggctagtgaacccaccttcaggtctgtccactcaggacatgcccacactagcctctccaggggctctgcccttggcatccccgtcccccacctgggctctggcagagaagtcaggcgggaagaagccggctgagtgcccgccactgtaagaggaaacgaagagaaacagctccagtcagccccagaagcgaggcctggaaaaactctgcagctggagctaacacaaaggacttttcagaccctgcagccaaggtgcccagtgagctttttttttttttttttttttttttttaaaaaacagctattagggtgacaagcctttccaaaggccagcagttggcgagagtttccaggaagctggtctggcactgggctgggattggagcaactttaacgagttaagttcagaaggaaggagtcatcaggaaaggtttaaggttcaacaaacttttcaaattattttgcaaaaagttctggctttccaattcaaaggcatgtttcgctgtgactgt

SEQ ID NO: 3131 - DNA, 588 bp, Homo sapiens
  MAP TO CHR11.1; EXPRESSED IN FETAL LIVER, SIGNAL = 2.3; EXPRESSED IN LUNG, SIGNAL = 2.5; EXPRESSED IN HELA, SIGNAL = 1.4; EXPRESSED IN BRAIN, SIGNAL = 2.1; EXPRESSED IN HEART, SIGNAL = 1.9; EXPRESSED IN ADULT LIVER, SIGNAL = 1.9; EXPRESSED IN BONE MARROW, SIGNAL = 2.6; NT HIT: gi14773475, EVALUE 1.00e-63; SWISSPROT HIT: Q08851, EVALUE 4.00e-16; EST_HUMAN HIT: BG460496.1, EVALUE 0.00e+00
tcccccattttacaggtgaggaaactgaggctcagagaggttaaatgacctgtccagggtcacaaggctagtaagtgctagagctgggattcaaacccagagcatgtgggctttgaacctgcttttaactgttaaggtgtgccacatcctgttttctcccccaggcggtggtgctgtggttctgggggcagagtcccatgcctccaaggatgtcgccatcgacatgatggactctcggaccagccagcagctgcagctcattgacgagcaggtacccaggctctgaactaggtagaatcagcttctccattatcctctgtggttcccgagagagtgtttggagtgtgccatgggcagaatggcaagctgggagggttgtaaaaatgcaggtctgaccctgaagaagctgttggtgctcatgtgctctctccctctcctgaaggattcctacatccagagtcgggcagacaccatgcagaacattgagtcgacaattgttgagttgggctccatctttcagcagttggcacacatggttaaggaacaggaggaaaccattcagaggtgagatacactctctcgccccaa

SEQ ID NO: 3132 - DNA, 503 bp, Homo sapiens
  MAP TO CHR17.1; EXPRESSED IN LUNG, SIGNAL = 0.96; EXPRESSED IN FETAL LIVER, SIGNAL = 0.94; EXPRESSED IN HELA, SIGNAL = 1.1; EXPRESSED IN BRAIN, SIGNAL =   1; EXPRESSED IN HEART, SIGNAL = 0.75; NT HIT: AF395009.1, EVALUE 0.00e+00; SWISSPROT HIT: P07359, EVALUE 9.00e-58; EST_HUMAN HIT: AW950474.1, EVALUE 0.00e+00
aatgacccttttctccaccccgacttttgctgcctcctccccctgggcttctatgtcttgggtctcttctggctgctctttgcctctgtggtcctcatcctgctgctgagctgggttgggcatgtgaaaccacaggccctggactctggccaaggtgctgctctgaccacagccacacaaaccacacacctggagctgcagaggggacggcaagtgacagtgccccgggcctggctgctcttccttcgaggttcgcttcccactttccgctccagcctcttcctgtgggtacggcctaatggccgtgtggggcctctagtggcaggaaggaggccctcagctctgagtcagggtcgtggtcaggacctgctgagcacagtgagcattaggtactctggccacagcctctgagggtgggaggtttggggaccttgagagaagagcctgtgggctctcctattggaatctagttgggggttggaggggtaaggaacacagggtga

SEQ ID NO: 3133 - DNA, 556 bp, Homo sapiens
  MAP TO CHR5.1; EXPRESSED IN FETAL LIVER, SIGNAL = 0.84; EXPRESSED IN HELA, SIGNAL = 0.72; EXPRESSED IN BRAIN, SIGNAL = 0.93; EXPRESSED IN ADULT LIVER, SIGNAL = 0.79; NT HIT: AY008847.1, EVALUE 0.00e+00; SWISSPROT HIT: P29460, EVALUE 5.00e-43; EST_HUMAN HIT: BG389008.1, EVALUE 2.00e-01
tgataacccaaagggtccaggaaagcaaaggaaaatggaggttaacatcaattaacatcaataagagacttgatgttaattcattacactcaccatgacttggcttttcaatttgttgttgttgttgtttttaactcttatgagcgaaagagaaaattgatactatccaagggtatagaattacctttctggtcctttaaaatatcagtggaccaaattccatcttcctttttgtgaagcagcaggagcgaatggcttagaacctcgcctcctttgtgacaggtgtactggccagcatctccaaactctttgacttggatggtcagggttttgccagagcctaagacctcactgctctggtccaaggtccaggtgataccatcttcttcaggggtgtcacaggtgaggaccaccatttctccaggggcatccggataccaatccaattctacgacataaactggaatgcacataaagtggagaaccaggctgtaagctccaggaactctgggactgtgttttattaacccttcgggcatccccattgcctaaacac

SEQ ID NO: 3134 - DNA, 535 bp, Homo sapiens
  MAP TO CHR19.1; EXPRESSED IN FETAL LIVER, SIGNAL = 2.2; EXPRESSED IN LUNG, SIGNAL = 2.4; EXPRESSED IN HELA, SIGNAL = 2.6; EXPRESSED IN BRAIN, SIGNAL = 2.6; EXPRESSED IN HEART, SIGNAL = 2.4; EXPRESSED IN BONE MARROW, SIGNAL = 2.3; EXPRESSED IN ADULT LIVER, SIGNAL = 2.2; NT HIT: gi14767767, EVALUE 1.00e-51; SWISSPROT HIT: Q15459, EVALUE 1.50e-01; EST_HUMAN HIT: BI768177.1, EVALUE 1.00e-103
aaaacgcttggaacagcatccggcccacactagcaagcacccagccccacacgtgcgactgtgcagcaaacgcattcaacagcacagccttcccttccccggagatactcacgcaaatgctgggttatccttgtagtcctccatagctactttttctaactcggggcctccttctgccacaaagcgggccaatttctctatcactttccgagtctcggctccctctgggggtgaaactttaaggaggctgtcagtactggggttcaactcacacaccccacagtcaataggcacactctctctatggaccacaacgacagagggggtggggggagaagagtgtgagatgcaggaggctgtcgggcgtcccgagtccaggcacaaaacaccatgacgaggggggagtcggtctcactgtcttggtgagacacactaggtgggagagaagtgtgtgaggctgtggtgagctccaggctggaagctagcagaaaatatatccagcttcccctggttttggtgggggaaatgcttaatt

SEQ ID NO: 3135 - DNA, 598 bp, Homo sapiens
  MAP TO CHR12.1; EXPRESSED IN HELA, SIGNAL = 0.77; EXPRESSED IN BRAIN, SIGNAL = 0.81; EXPRESSED IN PLACENTA, SIGNAL = 4.1; EST_HUMAN HIT: AA443875.1, EVALUE 1.00e-102; NT HIT: Z26282.1, EVALUE 0.00e+00; SWISSPROT HIT: Q13936, EVALUE 1.00e-57
ctgtgcctacccgaaagaaggcagcccgccttcccaggccctgcacttccctgacctggctgtggaggctgctctctgggaggagtgggtgctaaggggcttctccacccacccctccttcttgcctacagagggccggtggcctgttcggcaaccacgtcagctactaccaaagcgacggccggagcgccttcccccagaccttcaccactcagcgcccgctgcacatcaacaaggcgggcagcagccagggcgacactgagtcgccatcccacgagaagctggtggactccaccttcaccccgagcagctactcgtccaccggctccaacgccaacatcaacaacgccaacaacaccgccctgggtcgcctccctcgccccgccggctaccccagcacggtcagcactgtggagggccacgggccccccttgtcccctgccatccgggtgcaggaggtggcgtggaagctcagctccaacaggtaagtgggaggctggccaccccaggcggcacacagggcccacgtgctgcaaccctcaggagacagtggaggagacggaggcctcggccagccacttgtccctcaagcttccag

SEQ ID NO: 3136 - DNA, 587 bp, Homo sapiens
  MAP TO CHRX.1; EXPRESSED IN HELA, SIGNAL =   3; EXPRESSED IN BRAIN, SIGNAL = 3.4; EXPRESSED IN LUNG, SIGNAL = 1.2; EXPRESSED IN HEART, SIGNAL = 1.1; EXPRESSED IN BONE MARROW, SIGNAL = 3.7; EXPRESSED IN FETAL LIVER, SIGNAL = 3.4; SWISSPROT HIT: P22105, EVALUE 1.00e-07; EST_HUMAN HIT: AA043433.1, EVALUE 1.30e-02; NT HIT: gi13649009, EVALUE 1.00e-110
cagatggttggaaatgccagattatttgagtttgggagagatataatttgaaatcatctgcatagaactgacagtaggagacttgggaatgtattaaataactgtaggagaatacaaaatgaagacagaaattcaagcacagacctacaaggaaaaacaagatgaaaaaaataggtaacagcgtattataaataaaaatgcagtaaaatactaacctaggacatacctggaaacctcttaggactcacaaaggtgtacagatcatattttaagaaacactgccttaaggaaggaacagttagaatttaagagtagaggaaggagaaggaaattaactccactacacctgttgagcagtcagatcctgtccacttgggatcacagctgcatactccagcgtccagaagaaaagttccgtgtcctgagcactgctcttgacatacaggaagtggtgtttcacagttaactcctccccagccagtagaacagtgacattctccttttacacagatgccatggttggaacacattgggtctaggcagtcctctgaaggcacaaaaaagtgggggggaggggtgattaatag

SEQ ID NO: 3137 - DNA, 555 bp, Homo sapiens
  MAP TO CHRX.1; EXPRESSED IN FETAL LIVER, SIGNAL = 1.6; EXPRESSED IN BRAIN, SIGNAL = 0.84; EXPRESSED IN LUNG, SIGNAL = 0.67; EXPRESSED IN HEART, SIGNAL = 0.84; EXPRESSED IN BONE MARROW, SIGNAL = 1.2; SWISSPROT HIT: P51858, EVALUE 4.00e-23; EST_HUMAN HIT: BG114800.1, EVALUE 2.00e-56; NT HIT: gi16161715, EVALUE 4.00e-54
gaatgctgtggtcaaaagggcagagtattcaaacagaaagcagaagaaaactgctttctctgtccagagaaactaagctccgtcacttactaattatatcacatatggcaaatcacttaacctatctgaggccctcatattttcttcatatctaaagtgaggatatgaatataggtacccatttcctgaaaaatttttttgagactcaatgaattaccaaatatgaagattttggcttcatagtaatgtctgctttcagagagatctataagatgcttctcgagcaggggacctgctggaggactcccctaaatgtcccaaggaagcagaaaaccctgaaggggagaagaaggaggcagccaccttggaaggtgagaagacacttcttgtggaggtggaaaagaatagcaccctctctgagcccggctctggccgggggcctccccaagaggaagaagaggaggaggaagaggaagaggctgccaatgaagatgctgagaccccaggcatcagagatcatgagagtctgtagccaccaatgtttcaagaggagcc

SEQ ID NO: 3138 - DNA, 559 bp, Homo sapiens
  MAP TO CHR15.1; EXPRESSED IN HELA, SIGNAL = 0.68; EXPRESSED IN BRAIN, SIGNAL = 1.2; EXPRESSED IN HEART, SIGNAL = 1.4; EXPRESSED IN LUNG, SIGNAL = 1.4; NT HIT: AF155156.2, EVALUE 1.00e-63; SWISSPROT HIT: Q9UPM8, EVALUE 5.00e-24; EST_HUMAN HIT: AL596783.1, EVALUE 7.80e-01
gcacatgggaggtgttcagtaaatacttgttccattaataaatgcataattattaccagtaaatataattttttgaacattgtattgtggtaacctaatcctagtaactgggtaagcctgaaagtagtagcgtttgtttctgtgaaaagtccataaataagatttctgactaaaatggactttccaattagttttattacaagttctacacaaatacattgttttgttataccttaccatgatacctgccatttttatgtttctttttctagctattttgtttgaatgtgtgcatacagtctattctatttatcctaaatcggaattacttgagaaggctgccaagtgcattggaaaatttgttctgtcacctaaaataaatctaaaatatttaggtaagatgattggttcttttgacagaaattacagagatagcttttgaaatttgctgtgtatttgtttcaattcactttgtataatgtgtctttgtttctaggactgaaggctcttacctatgttatccaacaggatcctactctggctcttcaacaccagatga

SEQ ID NO: 3139 - DNA, 592 bp, Homo sapiens
  MAP TO CHRX.1; EXPRESSED IN FETAL LIVER, SIGNAL = 0.42; EXPRESSED IN LUNG, SIGNAL = 0.64; EXPRESSED IN BRAIN, SIGNAL = 0.47; EXPRESSED IN HEART, SIGNAL = 0.72; NT HIT: AL161492.2, EVALUE 1.40e-01; SWISSPROT HIT: O83607, EVALUE 1.70e-01; EST_HUMAN HIT: AV697720.1, EVALUE 2.10e-01
tctgggggctattagtgcagtgttggtgggaaaggatgttttctctggggataagcctgcttacccctcccccaacacacactggatttcaaacagtgagaaggaagactggctctcttatgccaagagctggcccccctcccactcaggcttcccattgtatccagaggctctagttggcaatggcagaggctcccttgctccctcggcattaaaatgcaaagagaagcagggctgcttgctggcaggaggccagggaggaccagcaggtcacctagtccatggcaggcttcattctaggcagattgttgctcaatttcttttgcttgggctctggtggattctagaggagtcttggcttttgagtgtttggggatggtttgggagcttttttggggagaagggttttgggattcagaatgcatggatatgaagcgcagggcttgtgagcatctacctcagaaggctacaaggccagtcagcagcttgtgtatggcattccagggctggcccccttttagctttaagcagagatagagaacactgatagactgtaaggcgtaagcatctttcaaaggagaatgcaaggagc

SEQ ID NO: 3140 - DNA, 521 bp, Homo sapiens
  MAP TO AC021705.4; EXPRESSED IN BRAIN, SIGNAL = 0.81; EXPRESSED IN BONE MARROW, SIGNAL = 0.75; EXPRESSED IN ADULT LIVER, SIGNAL = 1.3; EXPRESSED IN LUNG, SIGNAL = 0.74; EST_HUMAN HIT: BF876996.1, EVALUE 1.00e-102; NT HIT: Y13443.1, EVALUE 0.00e+00; SWISSPROT HIT: O08789, EVALUE 2.00e-30
ttgagcttgcttcagtggtgcctgtcccaagagcccacactccttgggacgctgggcctcactgggcaggggcatggaccacaacaggtgcggtctccagcagcccccgtcaggctgggcccgctggttgccacggacttgcctctgtgggccagctgatagggagaggtttgtgggggctttgggccccaaggctgctgctcagggtgtcctgctgtcccttactctgtgtgccagtccctgaagaggaaggagaaggaatatgagcatgaaatggagcggctggcacgtgagaagattgccacgcagcagcggctggcagagctcaagcacgagctgagccagtggatggacgtactggagattgaccgcgtgctgcggcagacgggccagcccgaggatgaccaggcctccacctccaccgcctctggtgagccccagcccccacgctggccccccagccctcagatgttacacctcaaattccagcctccctggccaggctctttcttgcctgctag

SEQ ID NO: 3141 - DNA, 589 bp, Homo sapiens
  MAP TO CHR2.1; EXPRESSED IN FETAL LIVER, SIGNAL = 2.1; EXPRESSED IN BRAIN, SIGNAL = 1.2; EXPRESSED IN BONE MARROW, SIGNAL = 1.3; EXPRESSED IN ADULT LIVER, SIGNAL = 1.7; SWISSPROT HIT: O17438, EVALUE 9.00e-07; EST_HUMAN HIT: BE140919.1, EVALUE 0.00e+00; NT HIT: AF318278.1, EVALUE 1.00e-41
gtgggatggtgtcccagtagatgggggaaggtctctcaccaggctctctgggtatatgcacaataggaggattgccccagaaagctcggagcttaggttcaagggctgggtcagtaaccacaaccactctgaggtcccccggaagtttttccagcctggcatcttgcagtagcccctggagtgaatctgatgccaccgaccgctcctgagcctcatctagtaccagcacgccccaggctccagtgcctcgggtcgaggccacctcctgcagaagcagcctgtcccagcagaacctgttgacattggtagtgggcagaggaatcagtgtggacactgaccagccccacaagctcagggaatcttctccccaagggacgtatattttgatattgaaggtcagaaaaatatgctgtgacttcctgagcctatggacccataactgtcaccccacaaccccgctgagaacactttgttcacaaggtatacgccagctgggaagtgaaatttttctgatgagggtgaggctgaatgtctgaggcccctggctgggattcaagggcttattttagccattgcaccacacacaatt

SEQ ID NO: 3142 - DNA, 597 bp, Homo sapiens
  MAP TO CHR17.1; EXPRESSED IN BRAIN, SIGNAL = 0.84; EXPRESSED IN HEART, SIGNAL = 1.2; EXPRESSED IN PLACENTA, SIGNAL = 1.3; EXPRESSED IN LUNG, SIGNAL = 1.1; EXPRESSED IN HELA, SIGNAL = 1.1; SWISSPROT HIT: P04626, EVALUE 4.00e-24; EST_HUMAN HIT: BI755753.1, EVALUE 2.00e-81; NT HIT: M16790.1, EVALUE 3.00e-89
gcttctccctgtctgaggtggcatgacttggagtgagtttggatggggtggccaggtctgagaaggtcccccgccagtgtcctctgacccatctgctctctcctgccagtgtgcaccggcacagacatgaagctgcggctccctgccagtcccgagacccacctggacatgctccgccacctctaccagggctgccaggtggtgcagggaaacctggaactcacctacctgcccaccaatgccagcctgtccttcctgcaggtgaggcccgtgggcaacccagccaggccctgcctccagctgggctgagccctctgtttacaggtgggtggcagaagaaggtgccctgcccttctgtttcctctcttgttgtggtttctcaaccaggaagtcctttctaacatctaacccccattcattttactgcagaatcagttgactctctctataacgtggctggccgaggtcatgtctggatgggatgcgtctgtgtttccgctaaatcttgtgctctcttgccagcatgatcatgtcccctgtccacctgctccagccactatccctctcccacttacagcagaagaaagggctggtgag

SEQ ID NO: 3143 - DNA, 503 bp, Homo sapiens
  MAP TO CHR7.1; EXPRESSED IN BONE MARROW, SIGNAL = 1.3; EXPRESSED IN ADULT LIVER, SIGNAL = 0.58; EXPRESSED IN HELA, SIGNAL = 0.97; EXPRESSED IN FETAL LIVER, SIGNAL = 1.2; EXPRESSED IN BRAIN, SIGNAL = 1.1; EXPRESSED IN LUNG, SIGNAL = 1.2; EXPRESSED IN HEART, SIGNAL = 0.61; EST_HUMAN HIT: Z39065.1, EVALUE 1.00e-118; NT HIT: gi14752659, EVALUE 3.00e-30
ggggcactgcttcatgttagtaccatttttttaaaaccgtgaaattcagttttggggtaaaagtcataactgccattgtttatattttatctttcccagaatgtgacacaaacagattttaacaaatagcaacagtgtaatttcttacagattattatttcaccaacagatttaactacaccactaaaaaaacgaagattttatcagttgctagattcggtttactcagaaacctccacacctactccttccccgtatgctacaccaactcacaccgatattactcctatggacccatcttttgccacgcctccacggataaaatcagatgatgaaacttgtagaaatggttataaacccatatattcaccagttaccccagtaactcctggtacaccaggaaataccatgcactttgaggtgagaaattttaatggagaaaaaaaaattcaacacttggggggatggaatttcttttaagagctctttcccctcctttaaca

SEQ ID NO: 3144 - DNA, 565 bp, Homo sapiens
  MAP TO CHR7.1; EXPRESSED IN HELA, SIGNAL = 0.63; EXPRESSED IN BRAIN, SIGNAL = 0.88; EXPRESSED IN BONE MARROW, SIGNAL = 0.94; EXPRESSED IN FETAL LIVER, SIGNAL = 0.82; NT HIT: gi13629737, EVALUE 1.00e-111; SWISSPROT HIT: Q02446, EVALUE 5.00e-39; EST_HUMAN HIT: AW993165.1, EVALUE 1.00e-110
atgaccaggaacgtgagtccataatagagcataaactctttgagattaacacattttcatagcaatttggtacacagacctgttttattttgtctttaactgaaaattttctgatttgaactacagttatggcatcatgatcaaacctattcagagaagcatcatttaattaccttgattctttttaatttttctataattgtaaacctactatttggcagtgtaattaatgttcggtttttgtttttgctagaggcagtaatgaaccaggaaaaaagaagcagcatatctgtcatattgaaggatgtggtaaagtttatggcaaaacatctcatttacgagcacatcttcgctggcatactggagaaagaccttttatatgcaactggatgttttgtggcaaaagattcacacggagtgatgagctccagagacatagaagaacccatacaggttagttgattttaggacttgtactttttacttatttcttcagtttttacatgaaaattttagtgatagtttagctatcaaattggaaatatgcaaatgaaggagaaggcat

SEQ ID NO: 3145 - DNA, 588 bp, Homo sapiens
  MAP TO CHR6.1; EXPRESSED IN ADULT LIVER, SIGNAL = 0.63; EXPRESSED IN BONE MARROW, SIGNAL = 1.2; EXPRESSED IN BRAIN, SIGNAL = 0.97; NT HIT: AF262697.1, EVALUE 8.80e+00; SWISSPROT HIT: Q9UGF5, EVALUE 3.00e-90; EST_HUMAN HIT: R56373.1, EVALUE 5.30e-02
tgcatgctgccattaacttctccatacctctctgtgggaagagagtcattcaccaattcttctgtgatgttcctcagatgctgaaactagcctgttcttatgaattcattaatgagattgcactggctgcattcacaacgtctgcagcatttatctgtttgatctccattgtgctctcctacattcgcatcttctctacagtgctgagaatcccatcagctgagggccggaccaaggtcttctccacctgcctaccacacctatttgtagccaccttctttctttcagctgcaggctttgagtttctcagactgccttctgattcctcatcgactgtggaccttgtattctccgtattctatactgtgatacctccaacactcaatccagtcatttatagcttacggaatgattccatgaaggcagcactgaggaagatgctgtcaaaggaagagcttcctcagagaaaaatgtgcttaaaagccatgtttaaactctgaagaaccatacaaatgaaaggcattgttattatgtttcagattggaagagaggtgaatcttatttctacccagaatgctcttccaagct

SEQ ID NO: 3146 - DNA, 553 bp, Homo sapiens
  MAP TO CHR17.1; EXPRESSED IN HELA, SIGNAL = 0.41; EXPRESSED IN BRAIN, SIGNAL = 0.69; EXPRESSED IN HEART, SIGNAL = 0.51; EXPRESSED IN BONE MARROW, SIGNAL = 0.64; NT HIT: gi14770568, EVALUE 3.00e-67; SWISSPROT HIT: P26663, EVALUE 6.00e-01; EST_HUMAN HIT: BE391243.1, EVALUE 5.00e-02
cactcatcccagaggaaagctgcaccccgctgcgggagtcacactcccggggacgccgaagccagggaacagaagaaagacaagaggcgcccgaatgctggacatggagaagggcacacgtggaggcaggagggcctccggaaggagggactccaggaaagcacgcgggacgggaagccgaggaagccgcggggcagccgcacctcgcgggaggcaagcctgtggaaggtgtccagcagaagcacgccgtgcggcacgtcccgcaccaactcgaaggctgaggtgatcaggttctgggtcatcacctccaggtccttgattccggcacggaacctgcaccggtggagaggcatgtggcagctgagtgccctcgcctgcccccaactccaacccctgaggaagaatcccatgcattgctgaggacagagggcttcctgtgtgccaggcactccaagtactttacctacatgaatccatttaatcctcaaaacaatgctgtgagatgggctctatctctaaccgtattgcatagaggaggaagtggagacagctg

SEQ ID NO: 3147 - DNA, 566 bp, Homo sapiens
  MAP TO CHR11.1; EXPRESSED IN HELA, SIGNAL = 1.2; EXPRESSED IN BRAIN, SIGNAL = 1.1; EXPRESSED IN LUNG, SIGNAL = 0.6; EXPRESSED IN HEART, SIGNAL = 0.67; EXPRESSED IN BONE MARROW, SIGNAL = 1.1; EST_HUMAN HIT: BE222940.1, EVALUE 1.00e-107; NT HIT: AJ249369.1, EVALUE 0.00e+00; SWISSPROT HIT: O76082, EVALUE 1.00e-03
cagcaagttaagggcaaaggcaaaattcaatcttaagtctccttattctctggccagaaccctttccaacttctctttttcaaaagatcaccaacagctgtggtgggggaggaccatttgagcccaggagtttaagaccagccctggcaacacagagaccctatctctacaagaaaaaaaaaaatcgccaaattggtttgctaatcaaatggggaagagaggaggtaccgggagtgtcctgggggctgagcctgagctgccaccctccaaatgggaccagcatctgggcattcatgctggaactctaaccaacacccatctgctgcgggccctgcaggcagacaggcatgggaatgggcagcaccatggcccgagtgggcagcatcgtgagcccactggtgagcatgactgccgagctctacccctccatgcctctcttcatctacggtgctgttcctgtggccgccagcgctgtcactgtcctcctgccagagacctgggccagccactgccagacacggtgcaggacctggagagcaggtgggcccccactcagaaagaagcag

SEQ ID NO: 3148 - DNA, 572 bp, Homo sapiens
  MAP TO CHR14.1; EXPRESSED IN PLACENTA, SIGNAL = 2.5; EXPRESSED IN FETAL LIVER, SIGNAL = 3.2; EXPRESSED IN HELA, SIGNAL = 3.4; EXPRESSED IN BRAIN, SIGNAL = 2.4; EXPRESSED IN LUNG, SIGNAL = 1.5; EXPRESSED IN HEART, SIGNAL = 1.5; EXPRESSED IN BONE MARROW, SIGNAL =   3; EST_HUMAN HIT: AL135158.1, EVALUE 0.00e+00; NT HIT: AF251025.2, EVALUE 0.00e+00; SWISSPROT HIT: Q9ULJ3, EVALUE 4.00e-03
gagagctggcttccaacaacagatctgctccactacacatgaatcccactatacccgtgtgcttacctgaatttcttcattttcgtctactaggaggaaactcacaaccttctcagtcatcttcttcctcttggtctcctcatccatctcttctgcctccagtgactcctggagattactgacattgtacacagtaacagggtgtctccttttgttacccccagaatgagtcctcttctggcactccaggcacaagttaattttgcaggtctggcacctcactattgccctctgcctaacacctggtaaatgcccactgagacccttgcagaggtcacagtaagggacatggccaggtttgagtcttatccgctcatggtttctcaggcgctcctgccgatggagctcctcctcgcagcggagacactgcagactgcagcactcatcacactcaaagatagcttcatcagtcccgctgcaagcgtaactttcctggcacatcagccccggattcaggcccttctctgctggggaagtctgggcactcatactcacgctggtaaggaaacaca

SEQ ID NO: 3149 - DNA, 566 bp, Homo sapiens
  MAP TO CHR6.1; EXPRESSED IN BRAIN, SIGNAL = 0.84; EXPRESSED IN LUNG, SIGNAL =   1; EXPRESSED IN HEART, SIGNAL = 1.6; EXPRESSED IN ADULT LIVER, SIGNAL = 1.7; EST_HUMAN HIT: BG706080.1, EVALUE 0.00e+00; NT HIT: gi14739395, EVALUE 0.00e+00; SWISSPROT HIT: P13619, EVALUE 7.00e-68
ttgtctcaattgggatagatgcatttacataactggctgtgcttgagccttctttgccagcagctttaggttggcaatgcacttggcaattgtctccttttcctgctgtgcagagatgctctgcaccacgtgcttctccacccaatttatcatgtgttcttgtttctttcgaagcatcatgttctgcacagttatatgatagtccaggtgattctttacttccttatatagtctatgcagtcgttcccagtaacctccaaagccatagcaatgttgtttttctgcacatcaaaaaggtaatggtgcttctgaacgagtgcctgctgtgacttctccaaatcagttgcatcctggatttgtctgatagaagcctgcttcacctcttctagttgggcaattttttgctcattgaatttttcagcaaaatctccaatagaggcgcgatattttaaaattatttagacaagtaaccatactatcgatgtggtagagaaggtctctggggtaatcatatatatttctttggataaaccatacaagataagcccagttctgagcacataggg

SEQ ID NO: 3150 - DNA, 569 bp, Homo sapiens
  MAP TO CHRX.1; EXPRESSED IN ADULT LIVER, SIGNAL = 0.9; EXPRESSED IN LUNG, SIGNAL = 0.9; EXPRESSED IN HELA, SIGNAL = 1.1; EXPRESSED IN BRAIN, SIGNAL =   1; EXPRESSED IN BONE MARROW, SIGNAL = 1.1; EXPRESSED IN HEART, SIGNAL =   1; SWISSPROT HIT: Q93008, EVALUE 2.00e-19; EST_HUMAN HIT: AW996853.1, EVALUE 5.00e-79; NT HIT: gi14764084, EVALUE 3.00e-70
acaaagagaatgggggaaggcaagcacttagtgaagactcttaaactgctggcctagagtttaggatgtctaagagttgggagtaatagtggatcttaaatccataaaggaacatgatttacatttctaaggtaattaatgcaaaaaaaggtccctgctatttcccatagtttattttagcttacaatacatacctctagcatatagtctcatgctttccatgtaagttgcaaggttttctgctaccaaagtaactagggcatgattgtgttgaagttgattgattaagtcatggcgataaaacacatggggacttcgctgagtttgactgaaacgagaagaacttaacaatataattaggcaattaaactctgttgtaaccagaagagttcgtactatctaaattcttagctactgatgtaaaaacttaaaaattatacttttgtacatttacttcttttaatgaaaatatcacaaccaacttaaactcttcaaaagataagacatttattacattattattttacacaaaaagcatccatcactattctccaacttcaccaaatggg

SEQ ID NO: 3151 - DNA, 544 bp, Homo sapiens
  MAP TO CHRX.1; EXPRESSED IN BRAIN, SIGNAL = 0.93; EXPRESSED IN HEART, SIGNAL = 1.8; EXPRESSED IN PLACENTA, SIGNAL = 3.7; EXPRESSED IN FETAL LIVER, SIGNAL = 2.4; EXPRESSED IN LUNG, SIGNAL =   5; SWISSPROT HIT: Q9Y3K8, EVALUE 5.00e-32; EST_HUMAN HIT: BG328821.1, EVALUE 0.00e+00; NT HIT: AF188178.1, EVALUE 0.00e+00
aatgctggtattcctgagcccttctaatagcatcttaaaaatgatatttagcggccccgccgacccacggcccacgacccaccgacccacgaatcggcccggcccccgcgttcaccatgtctggcttctccagcgtcgccgctacgaagaaagtggttcaacagctccagctggaggccgggctcaacagcgtaaaagtttcccaggcagctgcagacttgaaacaattctgtctgcagaatgctcaacatgaccctctgctgactggagtatcttcaagtacaaatcccttcagaccccagaaagtctgttcctttttgtagtacaatgaatctttcaaaggtttcccaaaccacttcttatgatccagtgaatattcaagagagatacatttgaagcctgtacaaaagcttatccctgtaacacatgtgctgtaatatacaaaattctacttttgtctgtccttaacatctacctctgaatttttatgaatttctacttcacaagggtaattgttttatatacattggcagcagcatacaat

SEQ ID NO: 3152 - DNA, 571 bp, Homo sapiens
  MAP TO CHR14.1; EXPRESSED IN ADULT LIVER, SIGNAL = 6.1; EXPRESSED IN HELA, SIGNAL = 7.1; EXPRESSED IN BRAIN, SIGNAL = 3.6; EXPRESSED IN LUNG, SIGNAL = 9.7; EXPRESSED IN HEART, SIGNAL = 4.1; SWISSPROT HIT: O63852, EVALUE 1.10e+00; EST_HUMAN HIT: AW250033.1, EVALUE 0.00e+00; NT HIT: X13546.1, EVALUE 0.00e+00
caatgtgtcaggcaatctggactttccagtgatgccactgagatggcacctgtcaaaagagcagtggttccatttcgagattgcggatcttcagataaattctgccactttcatttcacttcctgaaagtcagggtcggcttgtgaaaagttgttaaacaacatgctaaatgtgaaatgtcaaccctcactctaaactttccctgttcagagcatcagatgaagacttcattgggttttacagtggctttctgatttttggcagtccactgaagaagggaatttgaaagttgttgtatactgttaacgactgtctgcccatgtcctgcctgaaataccatgattgtttatggaaagtatctttaataaagctggatacagtttggcttgggaaaaaaaaaaaaactccaaaatgatctcctttgattccatgtctcacaaccaggtcatgctgatgcaagaggtgggctcccaccgccctgcacagcttccacccctgtggctttgcagggtagagctcccctcacggctgctttcacggactggcactgagtgtctgaggcttttccagg

SEQ ID NO: 3153 - DNA, 583 bp, Homo sapiens
  MAP TO CHR16.1; EXPRESSED IN BRAIN, SIGNAL = 6.1; EXPRESSED IN HEART, SIGNAL = 4.4; EXPRESSED IN ADULT LIVER, SIGNAL = 6.8; EXPRESSED IN BONE MARROW, SIGNAL = 5.7; EXPRESSED IN FETAL LIVER, SIGNAL = 5.6; EXPRESSED IN PLACENTA, SIGNAL = 7.8; EXPRESSED IN LUNG, SIGNAL = 4.2; EXPRESSED IN HELA, SIGNAL = 6.6; NT HIT: gi15316033, EVALUE 0.00e+00; SWISSPROT HIT: Q60778, EVALUE 1.90e+00; EST_HUMAN HIT: BI752318.1, EVALUE 0.00e+00
cctaaagggaatctgctcccaaaatgagctcaatccacctttcttgttccacacccatgtcaatatgtccctgtgcactgcttcctccaaagggtcagccacacccgaggacactagaccagacacaagagagccacccagagacgcagccagtactcacagggtcggtgagcatggttctcaggtgggatgacagggcaagcacggccaagcagttaaagatgaccccgttgaccacagagtaccagaagtctttggaaggcagcagcatgacgaaagtcaccacgaagtctgcataggcgaccagaagccacgtcatgacagcacagatcatgccgcagccgtcacggatgaaccagacccggtcagccacgtcagcctcggaggaggaggacgatgaagagtcatagttgtcattttcagccaggagaggatgatgctcgacgtcccggagcctgtgtcctgatggctgcatgatttccctgacgcaccctggggagggggacgacacagagctggtaaggctcaaaaagctcacaagctaccttaaatatgatgtgttacagtttgtccttggccattt

SEQ ID NO: 3154 - DNA, 518 bp, Homo sapiens
  MAP TO CHR6.1; EXPRESSED IN ADULT LIVER, SIGNAL = 1.1; EXPRESSED IN BRAIN, SIGNAL = 0.7; NT HIT: gi14754681, EVALUE 0.00e+00; SWISSPROT HIT: P15311, EVALUE 1.00e-47; EST_HUMAN HIT: BF819441.1, EVALUE 0.00e+00
ttccctggctatgtttcaggtcgctggtcagtgacttaatgactagcatgaaggagcacttgacactggcgaagtccttgtgtttttaaactgtgcttctaaggcaatcacttctccctgccgaggacggcatgactgctcctgcccaggccgggtcatcctgtgctcacctttgagggatcagccgctcagagctgaggtacccagacttgtgcacttctttgttgtagtccccaaacttggcctgcacagcgtaggaccccaagagcacggcagtctcaggggggcagtagatctcatcgctaaggattccttccttcacttggaggaagaaaagtttctgggtgatgtcctggatgagctcctcagccacatcttcagggtagaacttggcccggaacttgaactggaggggattctccttcctgacctcctgggcagacacctgcacgaaacaagccacactctccacacaaatccggaagacgaaggcccactgtccccaacacaggcttcta

SEQ ID NO: 3155 - DNA, 532 bp, Homo sapiens
  MAP TO CHR19.1; EXPRESSED IN BRAIN, SIGNAL = 1.7; EXPRESSED IN HEART, SIGNAL = 1.5; EXPRESSED IN PLACENTA, SIGNAL = 3.8; EXPRESSED IN FETAL LIVER, SIGNAL = 1.8; EXPRESSED IN LUNG, SIGNAL = 2.3; NT HIT: AF238381.1, EVALUE 0.00e+00; SWISSPROT HIT: P36280, EVALUE 3.30e-01; EST_HUMAN HIT: BF755432.1, EVALUE 0.00e+00
accgtgtcatcccaataagggggcccacctccagggtgggtggggggtgtgaggacagagcagttaggctgtgcctggctcatggagcccacggcatgatgccgtggttggagggatgctggtccctgtggtgctgtctggtgacaccacgccctgtgcctgccaggccggctgcgtgcacttttcctacaaagcatcgtgtgagatccgcgtgcttatgctcctgtactcttcagagaagaaaatcttcattggcctcatcccccatgaccagggcaactttgtcaacggcatccggcgtgtcattgccaaccagcagcaggtcctgcagcggaacctggagcaggagcaacagcaacgaggggtgaggtggccggcctccagggctgctcagtctccctccacccccgctgcctgctcaccactggcctctgatttctcgccgtagatgggggggtagtggttaccccgggctgggcccctccaggagtcacagatgaggcccccgcagagactggtgagtggtgaccct

SEQ ID NO: 3156 - DNA, 508 bp, Homo sapiens
  MAP TO CHR17.1; EXPRESSED IN ADULT LIVER, SIGNAL = 2.2; EXPRESSED IN FETAL LIVER, SIGNAL = 2.3; EXPRESSED IN BRAIN, SIGNAL = 2.3; EXPRESSED IN LUNG, SIGNAL = 1.9; EXPRESSED IN HEART, SIGNAL = 1.5; EXPRESSED IN BONE MARROW, SIGNAL = 2.1; NT HIT: U57316.1, EVALUE 1.00e-115; SWISSPROT HIT: Q9JHD2, EVALUE 6.00e-38; EST_HUMAN HIT: AL047332.1, EVALUE 1.00e-115
cagagccctggaagtctgagctgtagtcagggttgggcagtgagaagtaagaatgctcaaaggatgaacctcagaagtggggagcaggggatccccaattttgaggagtgaagaggccgaggaggaagggaactgggtgtgctgccctgggggaggggctctctgggggacgcacgggtcaaagacgaggcgggcgatatactccttaggcatgcgcggcagctggtgggaaaagacattctgcagccccacgagccacagcaacacccgccggttggccttgggcgtcagtgagttgccgatgacatggaactcgatgatgccgcggcgctcctccaggcgggctgtctcatcccgggccgcattggccgaaagcaggctcgtctgggcacagaagaggggtggtgagccggggtctcaggttggtgggggtcccccaactggtcagcaggtcgggctgcccacctcaggccccagcatggcagcagggtcagtgatggtcagcatg

SEQ ID NO: 3157 - DNA, 598 bp, Homo sapiens
  MAP TO CHR7.1; EXPRESSED IN HELA, SIGNAL = 0.38; EXPRESSED IN BRAIN, SIGNAL = 0.63; EST_HUMAN HIT: BE962698.2, EVALUE 8.40e-01; NT HIT: X64415.1, EVALUE 5.70e-01; SWISSPROT HIT: Q9LK90, EVALUE 1.10e+00
tcctggggtattggacaaagggaaaaaaacaaatgaaagaggttgtcaagatttttgcttatttcatagttttgcattggacctgtgatggatattcctttcatgaatatcaaaagagcatgacctagctacagcctgacgcatgatacatatttgctgtgggttaacctggagtcttttaaaccaattcttttccagtgtctgccttcaactaacagtgtggagtgaagtagtagagaaaatcagactctgaacccagtaaaatgctgatcaccagaaaatgggtgattcaaagggacaattttcagaccgaatgaattcacttgaaatgaatgccaaccttaactgaattaagctgtgctctttcaaatccactgctgtgagttcagtagacagttgtctggattttacatagctctaagctagaatcgtaggtcaaattgtgacttttggagcctcatacactgtttgaatttctaacaatttttactcaggtttgagtttgccagcaaatgaacaagttcctgttaataatgagtagaccaaattaatcgcttcagatgaatatccatatgtgtgggtgcatctcaaagcaagt

SEQ ID NO: 3158 - DNA, 570 bp, Homo sapiens
  MAP TO CHR17.1; EXPRESSED IN BRAIN, SIGNAL = 0.93; EXPRESSED IN LUNG, SIGNAL = 0.99; EXPRESSED IN HEART, SIGNAL = 0.64; EXPRESSED IN BONE MARROW, SIGNAL = 0.84; EXPRESSED IN ADULT LIVER, SIGNAL = 0.69; EXPRESSED IN FETAL LIVER, SIGNAL = 0.75; SWISSPROT HIT: O15550, EVALUE 7.00e-28; EST_HUMAN HIT: BI912089.1, EVALUE 1.00e-105; NT HIT: gi14770669, EVALUE 1.00e-112
cacacatctgggaacactggtctaggggctgagtccttgagcagctgcaggagaaagagggctggtgaggatgcagatagaggccagcactcccagcttcctgtggggctagggctcctgcctatttcttctgggctgagctctgctaaacctatgaccaccctgtcagagccagaggagtaggaagggaaagggtcgattgggtcctcggtccctatcctctgcctctgccccgacaccctgctcggccctcccttccagacttgggcctcttctccaccaagaccctggtggaagcgagtggcgaacacaccgtggaagttcgcacccaggtgcagcagccctcagatgagaactgggatctgacaggcactcggcagatctggccttgtgagagctcccgttcccacaccaccattgccaagtacgcacagtaccaggcctcatccttccaggagtctctgcaggtgagatgagaacgtggccagaggcaggtcctgggacggggctgcggtgggagggctctcgaaaggtctctgacccaggcctgcctaccctctggctgaacag

SEQ ID NO: 3159 - DNA, 520 bp, Homo sapiens
  MAP TO CHR13.1; EXPRESSED IN BRAIN, SIGNAL = 0.54; EXPRESSED IN BONE MARROW, SIGNAL = 0.67; SWISSPROT HIT: P09849, EVALUE 1.00e-02; EST_HUMAN HIT: BG428593.1, EVALUE 0.00e+00; NT HIT: AB009667.1, EVALUE 0.00e+00
cttttgtttttccagcccacatactggatggtatcaatctttgcggatactttgcttattcgtttaacgaccgcacagctccgaggtttggcctctatcgttatgctgcagatcagtttgagcccaaggcatccatgaaacattacaggaaaattattgacagcaatggtttcccgggcccagaaactctggaaagattttgtccagaagaattcaccgtgtgtactgagtgcagtttttttcacacccgaaagtctttactggctttcatagcttttctattttttgcttctattatttctctctcccttatattttactactcgaagaaaggcagaagaagttacaaatagttctgaacatttttctattcattcattttgaaataattatgcagacacatcagctgttaaccatttgcacctctaagtgttgtgaaactgtaaatttcatacatttgacttctagaaaacatttttgtggcttatgacagaggttttgaaatgggcataggtgatcg

SEQ ID NO: 3160 - DNA, 590 bp, Homo sapiens
  MAP TO CHR19.1; EXPRESSED IN PLACENTA, SIGNAL = 7.3; EXPRESSED IN LUNG, SIGNAL = 2.4; EXPRESSED IN HELA, SIGNAL = 7.9; EXPRESSED IN BRAIN, SIGNAL = 5.6; EXPRESSED IN HEART, SIGNAL = 3.4; EXPRESSED IN ADULT LIVER, SIGNAL =   5; EXPRESSED IN BONE MARROW, SIGNAL = 4.5; EXPRESSED IN FETAL LIVER, SIGNAL =   5; SWISSPROT HIT: Q61626, EVALUE 3.00e-40; EST_HUMAN HIT: AL044131.2, EVALUE 1.00e-116; NT HIT: gi14756303, EVALUE 1.00e-127
aacaagaccaggtcctcacccccacagggcccttgggggaagacagcaagccccaccacccacatatactgaattgtatacacagtctcactgaattctcccaacagctctgggagggctggattgctgctaggcctggttttgcaggttgggggtacagaggctcaggacggtgatgtcgcctgcccaagaccatacagccaggaggccacatgcaacacacccagcctgcctcgggggtgcctggcccggtcctgggcctgctcacaggtggttttggatgcccacggccctgctgtgttccacaccgtgctgtgccgtacccagcggcatgccaatgccgtagcccttggtgtcgaggagtcccccgatctgggtgaggttgcagttgaggcgccggtggtattcgttcatggtggactcgagcaggaaggcgtagcgggagttgaggacgcgggcaatgccctcttctgtgctcttgacgaacacgctgggctgcttcgactgcatgtagttccacatgcgctggtacgtttggtaccgtgaattctgggcaggaggatcacaaggggaagatgggagggtctttc

SEQ ID NO: 3161 - DNA, 599 bp, Homo sapiens
  MAP TO CHR12.1; EXPRESSED IN PLACENTA, SIGNAL =   6; EXPRESSED IN LUNG, SIGNAL = 3.7; EXPRESSED IN BRAIN, SIGNAL = 3.5; EXPRESSED IN HEART, SIGNAL = 4.4; EXPRESSED IN ADULT LIVER, SIGNAL = 6.8; EXPRESSED IN BONE MARROW, SIGNAL = 3.1; EXPRESSED IN FETAL LIVER, SIGNAL = 4.6; EXPRESSED IN HELA, SIGNAL = 4.5; SWISSPROT HIT: Q15562, EVALUE 7.80e-02; EST_HUMAN HIT: BF305719.1, EVALUE 0.00e+00; NT HIT: U72517.1, EVALUE 0.00e+00
acacccaggtcttaacgcacttttatatcttgcctttttttcaaatatgacagtaatggtttttttgggaggggggtataggtgggggtcaaagtcagtgtgagcgacagggggttctgcccagatgggaaagacgcataggggtgacatggtacacccctgccctccaatctgggaagacagtggaaggaaggaaccagggtccaggctccccaccagcagctcaccgggccacccaggcgttggtgttgatgttgaatgaggcaatggtgccagtgaagcgggggtttgtttcaaagagccacaccttcatgttggcacaggcatcccactttgccttgcccttttcttcaaagccattgaagcccaggcccgtcaaaatgcatactccttcctgagagggaatagctcagttagggctcttgccactccccatactggcccccatggcttgtctaaataggaccttgtttcaacttttctacttactgtgaccagccaacaggtgacatatttgtacagcacaaacttgccccagatcagcatgtacatgcagcggaaccagaaggggtggttcttgagggaagaaagcacagtgc

SEQ ID NO: 3162 - DNA, 577 bp, Homo sapiens
  MAP TO CHR13.1; EXPRESSED IN PLACENTA, SIGNAL = 5.7; EXPRESSED IN LUNG, SIGNAL = 3.4; EXPRESSED IN HELA, SIGNAL =   6; EXPRESSED IN BRAIN, SIGNAL = 4.2; EXPRESSED IN HEART, SIGNAL = 3.3; EXPRESSED IN ADULT LIVER, SIGNAL = 4.8; EXPRESSED IN BONE MARROW, SIGNAL = 3.8; NT HIT: gi14759745, EVALUE 9.00e-74; SWISSPROT HIT: P21575, EVALUE 2.00e-15; EST_HUMAN HIT: BE969822.1, EVALUE 0.00e+00
caggaaagggcactgcttagtaaatgcaatgcgtttggcaacaacaaaggctgaccgcccccacgggcagccacaacccacgtgtgatgccactccccccattccatctgccaatgcaaggtggcgacatctctaagtgacaactggtaggcggaagggggttcctgccgaggctgaattttccagatgctcgggttgagactaacacatggagggggaggacggggacaaatgcggagatgagaacaaaacctgttaccttctcggcacacttttttatgaccgtggccagctctgagaccacgagatcaacacacttcaaactcggctctttgagttttacaatctgttttttcacaatggcttcaaaggccatgtcgggggtgaagagccccgtcctgggtcatgcggagggcaggatgaggcagaaagacacccagggacagtgcaggccacacacgcaggacaggagacagagagaagagaagaaacgagagtcatctgattagtccatgcatgggggagcctgcgcccgcatttgccccggaagctgcttcggatcaaagaggtctggggt

SEQ ID NO: 3163 - DNA, 549 bp, Homo sapiens
  MAP TO CHR2.1; EXPRESSED IN ADULT LIVER, SIGNAL = 0.46; EXPRESSED IN BONE MARROW, SIGNAL = 0.46; EXPRESSED IN BRAIN, SIGNAL = 0.47; EXPRESSED IN HEART, SIGNAL = 1.1; NT HIT: AJ277892.1, EVALUE 0.00e+00; SWISSPROT HIT: P11799, EVALUE 6.00e-09; EST_HUMAN HIT: F00104.1, EVALUE 1.00e-122
ttgcatatatacgtgcgtttgtatatatataattgtgagaagagcatttagtaaattaaagtatttgttacttttattctgttcctacagagcaaaaacttccaccatcattttctcgacaattgagagatgttcaagaaacagttggactgccagttgtttttgattgtgccataagtggatcagaacctatctccgtgtcttggtataaagacggcaagccattgaaagacagcccaaatgtacaaacatcatttttagacaatacagccacactcaatatttttaaaactgaccggagccttgcaggccagtattcctgcacagctacaaaccctataggctctgcttcttccagtgccaggctcattctcacaggtttgtggattcttaaactttcatttctagaattaaagtattataatcaaatatgaacttagggagaaatttctatttcagtaaactgacatggtccagatattgagcctgaaaccttgtctttctgctctactattagaggggaagaacccacccttctttgacatccgt

SEQ ID NO: 3164 - DNA, 596 bp, Homo sapiens
  MAP TO CHR6.1; EXPRESSED IN FETAL LIVER, SIGNAL = 1.4; EXPRESSED IN HELA, SIGNAL = 1.3; EXPRESSED IN LUNG, SIGNAL = 1.5; EXPRESSED IN BRAIN, SIGNAL = 1.3; EXPRESSED IN ADULT LIVER, SIGNAL = 0.87; NT HIT: AF246302.1, EVALUE 0.00e+00; SWISSPROT HIT: Q03181, EVALUE 2.00e-82; EST_HUMAN HIT: BI045869.1, EVALUE 0.00e+00
cccgaggcctgatctctaacggggcctggttttcagccctttgtgatccacgacatcgagacattgtggcaggcagagaaggggctggtgtggaagcagttggtgaatggcctgcctccctacaaggagatcagcgtgcacgtcttctaccgctgccagtgcaccacagtggagaccgtgcgggagctcactgagttcgccaagagcatccccagcttcagcagcctcttcctcaacgaccaggttacccttctcaagtatggcgtgcacgaggccatcttcgccatgctggcctctatcgtcaacaaggacgggctgctggtagccaacggcagtggctttgtcacccgtgagttcctgcgcagcctccgcaaacccttcagtgatatcattgagcctaagtttgaatttgctgtcaagttcaacgccctggaacttgatgacagtgacctggccctattcattgcggccatcattctgtgtggaggtgagtgagagtggggcaggtgggctggcctggcacacccagtcgtcctgggggttggccctcactgcagggcactgtgcctgagctctgacagtgtggggaagtgtcc

SEQ ID NO: 3165 - DNA, 545 bp, Homo sapiens
  MAP TO CHR15.1; EXPRESSED IN LUNG, SIGNAL = 2.1; EXPRESSED IN HELA, SIGNAL = 5.9; EXPRESSED IN BRAIN, SIGNAL = 1.1; EXPRESSED IN BONE MARROW, SIGNAL = 2.1; NT HIT: U75686.1, EVALUE 0.00e+00; SWISSPROT HIT: Q13310, EVALUE 2.00e-48; EST_HUMAN HIT: BE909100.1, EVALUE 0.00e+00
ttccatgaggggttatttggcttttgaatcggtttttccttgtctgagtggtagcagcagcaacagcgcccaccttctgggcagcttctttcttggcatgatgagcctgtagaactgctacagcttcatccaccttggagcggagagactcgggggactctaacacgtgcagcagctcagagttgtcgatctccagcagcattcccgtgatcttcccagccaggtttgaatgcattgtttggatgagtgggaacacgcgttctcccagcatctgcttctgttccgtgcggggtgctgcagccaacatggaggcagtgagtggctccgcccctgcacacggaccgcaggctggggcgccggctgaggctgtatggcaggatgagggctgcggacacaggaggtgtatttgtagggggcgacatcctggggagcagcagcagcaacagacacgcgcggcgcaaaattctgcccagctgtgggaacgcctccagattggcagctgggagcaccagccccaccaaagtccatagccaagcaagaccaca

SEQ ID NO: 3166 - DNA, 510 bp, Homo sapiens
  MAP TO CHR11.1; EXPRESSED IN FETAL LIVER, SIGNAL = 0.56; EXPRESSED IN BRAIN, SIGNAL = 0.64; EXPRESSED IN BONE MARROW, SIGNAL = 0.64; SWISSPROT HIT: Q9GZM6, EVALUE 2.00e-52; EST_HUMAN HIT: AI962273.1, EVALUE 3.00e-68; NT HIT: X89669.1, EVALUE 0.00e+00
atggttaaggcaggcatcaggatgttaaatgcactcaagaccagaaccagtaattcattgatgtaggtgctggagcaggagagccccaagagagggaaaagatcacaaaaataatggttaatcacattagtcttgcacaaaaagagtctcaacataaaactggtatgaattgtagatccaaggatgcctaaaatgtaaactcccactgtgagccagaagcagtggtgataggacatgatgacattgtacagcaaggggctgcagatggcaacataacagtcatacgccattgcagccaacatgtgacactctgcaatagcaaaaatactgaataaatagagctgagccatgcattcagggtaggagatgatgttcttctctgtcgcaaagttcaccagcatcttaggggtaatgacagtggaatggcagaagtcaatgaaggacagactgctgaggaaatagtacataggtgtgtgcaggtgagaactgagcccaatcagtgtgatcatg

SEQ ID NO: 3167 - DNA, 515 bp, Homo sapiens
  MAP TO CHR14.1; EXPRESSED IN LUNG, SIGNAL = 1.3; EXPRESSED IN ADULT LIVER, SIGNAL = 2.2; EXPRESSED IN PLACENTA, SIGNAL = 1.3; EXPRESSED IN FETAL LIVER, SIGNAL = 1.7; EXPRESSED IN BRAIN, SIGNAL = 1.9; EST_HUMAN HIT: BI914436.1, EVALUE 5.00e-39; NT HIT: gi14752115, EVALUE 3.00e-39
tgaggacagaattcctgtagggaagtgataatggaacttctcattgctaacataatcagagtaattgtgtttggttgcaggaatctatagagagctctgcttagaatctgtaaagaacaaatatgaatgtgaaattcaagcttctcgccagcattgtgaggtactgtcattttgcataacttttaagctaatttcatctcttcaagccttttctgagtgtagtagttaaaaaagtaaactaagtaaaacaatattaaatagtactttagctcatcatttgtgtgtgattaaaaaaaaaaaagaatagagttgcattggaagctgtattggagataggacacaaagaaaggaccatagaaaaaaactgagataattttagaagttttgcagctgttactttaaaaagactttgcaacgattatgtcacctggcattactgaaaatattagtataattagtataatgtggattagatttgcgaaatatacactcaatggtgcagttaggatgttggg

SEQ ID NO: 3168 - DNA, 508 bp, Homo sapiens
  MAP TO CHR19.1; EXPRESSED IN HELA, SIGNAL =   1; EXPRESSED IN LUNG, SIGNAL = 0.78; EXPRESSED IN BRAIN, SIGNAL =   2; EXPRESSED IN HEART, SIGNAL = 1.6; EXPRESSED IN ADULT LIVER, SIGNAL = 2.4; EXPRESSED IN FETAL LIVER, SIGNAL = 1.2; SWISSPROT HIT: Q05140, EVALUE 1.20e+00; EST_HUMAN HIT: AI935286.1, EVALUE 4.00e-58; NT HIT: AF289220.1, EVALUE 1.00e-129
ggggtggcctagaaccttagcatctagaacgatcctgaaccgggaagccacgcctcccggccctctattggctggccccgggggcgctgctgacgcggaccctgcctcttccaccctacagctggcctcggaccccgccctgcgcagcaagctggtccgcctgtcctccgactctttcgcccgcctggtggagctgttctgtagccgggatgacagctctcgcccaagccgagcatgccccgggcccccgcctccttccccggagcccctggcccgcctggccctagccatggagctgagccggcgcgtggccgggctggggggcaccctggccggactcagcgtggagcacgtgcacagcttcacgccctggatccaggcccacgggggctgggtgagccgctgaagcctctctctccgggcctcactttacctaactgtcatgtgatagaggaggggcggggacttcttaggttcctctcagacctcaggtattctcccagctcca

SEQ ID NO: 3169 - DNA, 511 bp, Homo sapiens
  MAP TO CHR12.1; EXPRESSED IN BRAIN, SIGNAL = 3.7; EXPRESSED IN HEART, SIGNAL = 1.5; EXPRESSED IN PLACENTA, SIGNAL = 1.5; EXPRESSED IN FETAL LIVER, SIGNAL = 1.8; EXPRESSED IN LUNG, SIGNAL = 1.8; NT HIT: X51956.1, EVALUE 0.00e+00; SWISSPROT HIT: P07323, EVALUE 2.00e-37; EST_HUMAN HIT: AL539034.1, EVALUE 1.00e-122
ggtaaagaggaaggatggggacgtgagacttagtccggaaagctgggggaagtttgggatcttgggttaacactcctggggcgggcagggaggggctctttgacccttctgtctttctgtggctccccaggccttcaacgtgatcaatggtggctctcatgctggcaacaagctggccatgcaggagttcatgatcctcccagtgggagctgagagctttcgggatgccatgcgactaggtgcagaggtctaccatacactcaagggagtcatcaaggacaaatacggcaaggatgccaccaatgtgggggatgaaggtggctttgcccccaatatcctggagaacagtgaaggtgaggccaggagccccactcccagctctaagtcttaccctattgtgggacatcagaaagggtgacacagttcaccaagtcctgagtaggcgtggagggtcctaggactctgcaaactccaaaaggtaccagttcttagagtggattgcagagagcct

SEQ ID NO: 3170 - DNA, 597 bp, Homo sapiens
  MAP TO CHR19.1; EXPRESSED IN FETAL LIVER, SIGNAL = 1.6; EXPRESSED IN LUNG, SIGNAL =   3; EXPRESSED IN HELA, SIGNAL = 1.4; EXPRESSED IN BRAIN, SIGNAL = 1.6; EXPRESSED IN HEART, SIGNAL = 1.5; NT HIT: gi14758035, EVALUE 0.00e+00; SWISSPROT HIT: P51522, EVALUE 7.00e-81; EST_HUMAN HIT: BI045702.1, EVALUE 0.00e+00
tcttgccgcactcattacacttgtaagctttctctccagtatgaagtctatgatggcatgtgaggtatgacttccgactaaaggtcttgccacactcattacacttgtatggtttctctccagtatgaattctcctatgtctttcaaggtttgatttgaaacggaaagctttgtcacattcttcacatttgtaaggttgctctccagtatgacgtctacgatggcatgtaagggatgatgtccggctaaaggtctttccacactcattacacttgtaagcattgtcttcagtatgaattttccgatgtatttcaaaatttgatctgaaactgtaagctttgtcacattcttcacatttgtaaggtttctctccagtatgaagtctacgatggcatgtaagggatgacttgtgactaaaggtcttgccacactcattacatttgtagggtttctctccagtatgaagtctatgatggcatgtaagggatgacttgtgactaaaggtcttgccacactcattacacttgtaaggtttctctccagtatgaagtcgatgatggcgtgtaaggattgacttctgcctaaaggtcttgccac

SEQ ID NO: 3171 - DNA, 548 bp, Homo sapiens
  MAP TO CHR20.1; EXPRESSED IN LUNG, SIGNAL = 0.82; EXPRESSED IN BRAIN, SIGNAL = 0.52; EXPRESSED IN HEART, SIGNAL = 0.59; EXPRESSED IN FETAL LIVER, SIGNAL = 0.63; NT HIT: gi15303869, EVALUE 0.00e+00; SWISSPROT HIT: P53323, EVALUE 2.00e-19; EST_HUMAN HIT: AA579641.1, EVALUE 0.00e+00
gagcttcactgtgtgtggttgtcatacacattcttctacccaaccatggacctctttcttcctctcaggcgcacttcatctaatttttttagcactggcctggcctttttggaggaggtggagtagctcttcagaaaggcttcaaacacagtttcagtgttgggatgggtactgaggaaggccttctccaggacatagaggtctactcccttatcctctggaagtgctgaaatgaaactcagcccaaagtctatgagcacaatgttcagctgttccagggggggtttcaggagcatgttggaggtggtgagatcaccatgaatgaggtcttcatcgtgcattcgagccaaaacctgcccaattgtcttggctaagttggagagaccctggggagttttttcagtctccatagtggactgaatataatctcgaacagtcactgagccttcaatttcttccatatataagcagttggaagcatagtccacaaaaaagacaactggggcagatattcctgaaatcaagacataagtggttattgggttgga

SEQ ID NO: 3172 - DNA, 599 bp, Homo sapiens
  MAP TO CHR13.1; EXPRESSED IN FETAL LIVER, SIGNAL = 0.6; EXPRESSED IN BRAIN, SIGNAL = 0.69; EXPRESSED IN BONE MARROW, SIGNAL = 0.66; EXPRESSED IN ADULT LIVER, SIGNAL = 0.73; EST_HUMAN HIT: BG113113.1, EVALUE 2.10e-01; NT HIT: U48480.1, EVALUE 3.70e-02; SWISSPROT HIT: Q61990, EVALUE 8.80e-01
gctgggagcctactctgatgatctttaatgcagaagaggatgtatttgagcatctggcctggaaatcgactaaatgtatctatagcataattggttcagaaagagctggaagacaaattgagaatggtgggtgtaaatagaagaaaaggtggcagaaggggagccagatggataagctgagacacaaaacacacacaagcaaaggctgcttgggatgccagcagagcacatttgcatctggggtccagaacagggcagtcacaagggagtctccttggcttggagttgtctagacccaacatccagctcccaggacagagcctgcccctaaacagcaagaacccaaccaccttccacatggggcaatccctgaccacactgggataggtggtccaaattggctttattagtgaattcagaacacaaacaattcatagaaaaatcagtggatttcttagagaatttaggctcaaggctgatgcagaggtctcatcagagacagattagggaaagatgatttcttggttgctatatataatttttccttttgcacggtgccattccaaggcagcctaaatacattctgtttgcagtgctgg

SEQ ID NO: 3173 - DNA, 594 bp, Homo sapiens
  MAP TO CHR17.1; EXPRESSED IN BONE MARROW, SIGNAL = 0.83; EXPRESSED IN HEART, SIGNAL = 0.86; EXPRESSED IN FETAL LIVER, SIGNAL = 0.84; EXPRESSED IN LUNG, SIGNAL = 0.58; EXPRESSED IN BRAIN, SIGNAL = 0.91; SWISSPROT HIT: P08111, EVALUE 3.00e-15; EST_HUMAN HIT: AW007076.1, EVALUE 0.00e+00; NT HIT: gi14775759, EVALUE 0.00e+00
gttagtggcctttgccacaccaaacactagaggtggaaacggaagcccagaccccatctcgctgggggctccaactgcccagccggccccaccccacacacctggccagcacagggctcttgcgctggtagtcgaagaggccaaagccatgactggtgccaaaagccacgaggctccactcggtgtggagtgtgacagcggttacagcagctggcggcaggcactgcaccaggacacggggctggaagccagcaggccagggcagcggccccgtgcgtgggctcagccgctcgtggcccttccatgtgaagccctcgcggtcctggaggaggtctatgatggccacgctgaccgcctgctccaccggcacatcactaagctccagtaccagcacctgagcccacagccaggcagggggagcatcagcgcaggggaggggccgccctgggccccactcagcctggagcctctgaagcagccccagccaccaccaaggtggttctaggactgtcttcagttcatcagctaaacaagcactcactgaatgcgtactgtataccaaggccctggctgagcacaaggaacacagtggtg

SEQ ID NO: 3174 - DNA, 524 bp, Homo sapiens
  MAP TO CHR17.1; EXPRESSED IN BONE MARROW, SIGNAL = 0.84; EXPRESSED IN HEART, SIGNAL = 0.71; EXPRESSED IN FETAL LIVER, SIGNAL = 0.76; EXPRESSED IN LUNG, SIGNAL = 0.61; EXPRESSED IN BRAIN, SIGNAL = 0.99; SWISSPROT HIT: O35569, EVALUE 7.00e-03; EST_HUMAN HIT: BF337562.1, EVALUE 3.00e-03; NT HIT: gi14769775, EVALUE 0.00e+00
cagcaaagcagtggaatgtgggtgggaggaggcaggtgagggagcccggaggcccggccccacctctgctgatggaggcaggcagcgtggaatgggagctgctggtgggcagcaagcagggccaccaggtggcagcaggcaggggctgcccagggcggggagtgagcacggacccgggagagtggctccttggctctgcccgtcgcactgcggcctctccgctctggttcccctttctcccaggctgggaggcgtgggtagggcttggggcctgaattggccttcggaggccccctgggccttcctacagttgctgtgccccaggcctccccatctccagggtagcaggagctggtgatgctgatgcccccgctgcccgcctcctgctcatcctccgaatcatattcaatgctgatttccaagcacttgggggaaaggcagctggccaggccaggctccagcgcccggccacgggagcacctccgggaagggcccagccggcctctcccgctagcctctagtcc

SEQ ID NO: 3175 - DNA, 570 bp, Homo sapiens
  MAP TO CHR6.1; EXPRESSED IN ADULT LIVER, SIGNAL =   2; EXPRESSED IN BONE MARROW, SIGNAL = 1.6; EXPRESSED IN FETAL LIVER, SIGNAL = 1.2; EXPRESSED IN BRAIN, SIGNAL = 1.4; EXPRESSED IN LUNG, SIGNAL = 0.91; EXPRESSED IN HEART, SIGNAL = 0.87; NT HIT: gi14781616, EVALUE 1.00e-102; SWISSPROT HIT: P18075, EVALUE 5.00e-38; EST_HUMAN HIT: AW590871.1, EVALUE 0.00e+00
tccaaggcagaatgtgtgtccccagcatctggtttcgagttagtggcatccacaagctcttacaaccatattcctgtattttttcagaatgacattggagttgtcatcaaagtaaagaaccgagatggcatttagcttagttggcgcacagcacggtttggggacatactcggggttcataaggtgaacctgttccaaaacagaaggggagaaggtaccttagaaatgacacctggtcttggcttactcccacttacaaaacaaagtctccgagagctcaccaaggtctgcacaatcgcgtggttggttgcattcatgtgtgcgttgagtgggaaggagcattctccatcacagtaattggcagcatagcccttgggtgcaatgatccagtccttaatttcatgcaaaggaagcaacaaaagatgagcatgcacttctcacactatttgtgcttttcaggaatgctgtgaaaaggtatttttcacattgcacaggcaaggatacagacgcaggaaggcttaggaatttgtccaagttcacattcaagtggcaatgctgggaagtgaacct

SEQ ID NO: 3176 - DNA, 523 bp, Homo sapiens
  MAP TO CHR16.1; EXPRESSED IN HEART, SIGNAL = 0.81; EXPRESSED IN BONE MARROW, SIGNAL = 0.69; EXPRESSED IN ADULT LIVER, SIGNAL = 0.57; EXPRESSED IN LUNG, SIGNAL = 0.71; EXPRESSED IN BRAIN, SIGNAL = 0.65; NT HIT: AB058767.1, EVALUE 1.00e-120; SWISSPROT HIT: P52559, EVALUE 4.80e+00; EST_HUMAN HIT: BE825672.1, EVALUE 1.90e-01
tgacttgagacttccccaccctggaggagagtccatacctgctctcctttgggaagcttgtcgctctctagggcctgcttccagctcaagccttcaaagtctggtgtctggatgtctaggaagggtacgcccaggtccttctccttcttcccttcgtggtcctcctccccttccccctcccagtcgctccgctcctccagggctcgcagcttctccaggcgctcccgctccgccttctccctctccaggcgctccttctccgtgcgctccttctccaggcgctctctctcccggtccttgcggcccctgcgcccacccaaggggacctggcgctggtcgtcgggctcatggggcgcttcctccatccctgcaggaggcagctggactccttgcttccggtcccagtacatgaggatgttctggacatccttcagtgtcaattcataggtcttaaacttcggggccagttgcttgtcggggtcctttgagttgtccccttcactgtcctcttggtcctggacaa

SEQ ID NO: 3177 - DNA, 510 bp, Homo sapiens
  MAP TO CHR6.1; EXPRESSED IN BONE MARROW, SIGNAL = 0.87; EXPRESSED IN HEART, SIGNAL = 0.73; EXPRESSED IN FETAL LIVER, SIGNAL = 0.83; EXPRESSED IN BRAIN, SIGNAL =   1; NT HIT: gi16174654, EVALUE 2.00e-62; SWISSPROT HIT: P26640, EVALUE 2.00e-10; EST_HUMAN HIT: BF971970.1, EVALUE 2.00e-62
agtgatgggcgatgtttagggatctgtgtggggcagggaggaagcaatgcctgggtccctgagcagggtgatgggctgagaagtggctcttagaggtggacactcaggtcattccagggctcctcagtggctgtgactgaagcttttgtgcggctctacaaggcggggttgctgtaccggaaccatcagcttgtcaactggtcatgtgctttaagatcagccatctcggacattgaggtgaggcggagagagggaagcaggtttgtgagagctctgaggcagagtggtcaatgattaagagctcagactctggagccagggtgcctggattcaaatctgatgcctgcctgttacagctgtgtggcttttggcaggccgtttagtctctttaagcctcagcttcctcagtctgtaaattagagatgatggaatgcttgcatcgtgggggtgttgtaaaaattaaatgagaattcacataggtgcttggcaagatacctggccatggcttaa

SEQ ID NO: 3178 - DNA, 552 bp, Homo sapiens
  MAP TO CHR5.1; EXPRESSED IN LUNG, SIGNAL = 0.85; EXPRESSED IN BRAIN, SIGNAL = 0.94; EXPRESSED IN HEART, SIGNAL = 0.65; EXPRESSED IN ADULT LIVER, SIGNAL =   1; EXPRESSED IN BONE MARROW, SIGNAL = 0.62; EST_HUMAN HIT: AL118953.1, EVALUE 8.00e-72; NT HIT: gi16157423, EVALUE 0.00e+00; SWISSPROT HIT: P47870, EVALUE 2.00e-26
tggtccctaattgtgcttccatcattaattgtttgtgtgctttggggaaaattacccattctcttccctgggcttggtttcctcatttgctcaacaaggtcatcaacctgtattgctagcattcttccatgagtttaagaagcaaggagggcttgccctctgaatttaccttgttgacatccaggcgcatcttctcattgttggcactggcagccttctcagctgctttcttttggcgttggggccccctcccaaagaagatgtagttgactagggcatattccagaagggccatgaaaacgaagacaaagcaccccatcaggtacatgtcaatggccttcacataggggattttagggagagtttcccggaggtgggtgttgattgtggtcattgtgaggacagttgtgattcctgaaaaaaaatgggagagttagagtaataatgttcctatctcttttcttctttcttaatagctggaaaggtgatctatattcattttctcattcatatatgccacaatctatttattgggcctttactattgcatgc

SEQ ID NO: 3179 - DNA, 521 bp, Homo sapiens
  MAP TO CHR17.1; EXPRESSED IN LUNG, SIGNAL = 0.58; EXPRESSED IN BRAIN, SIGNAL = 0.58; EXPRESSED IN BONE MARROW, SIGNAL = 0.61; SWISSPROT HIT: P09276, EVALUE 8.30e+00; EST_HUMAN HIT: AA286921.1, EVALUE 0.00e+00; NT HIT: gi6678789, EVALUE 7.70e+00
cagaagcacagctgcagaacaagatgtggctcaatgggagaggctggtggttaccatgacattcgctggaagaggaatggaactgggatcagattgccacaagggaggccctctgcagtccctccctttgaacaagaagttgtagtaggcaattaagaggagaccagagtgaaaagagatctagtctgttaattccttccactttgcagcttcaattaacatttgctgggttttttttttttagagtcaagctctgtgctgggacttgtgtatataaaaatgagtaaaatatgcttcctaccccggtggagttcacagtcttggtggagttcacaatctatctcaaaaaacttgttaataacgttatgacaaagcacaatagggttatgttaagttatataactggactatgagagcaatgggaaggttggggaatatctgagaaaaggtgatgcctgaataaaagaggatttaagaaaacagtctggaaaaaggcaacatgagcaaacatttaggcgtgg

SEQ ID NO: 3180 - DNA, 502 bp, Homo sapiens
  MAP TO CHR19.1; EXPRESSED IN BRAIN, SIGNAL = 1.4; EXPRESSED IN HEART, SIGNAL =   1; EXPRESSED IN BONE MARROW, SIGNAL = 1.1; EXPRESSED IN PLACENTA, SIGNAL = 2.1; EXPRESSED IN LUNG, SIGNAL = 1.3; NT HIT: gi13569947, EVALUE 1.00e-103; SWISSPROT HIT: P03181, EVALUE 4.10e-01; EST_HUMAN HIT: BI816708.1, EVALUE 1.00e-103
tatgcccaagaaactgggtccatgaggagcaggtggtggctgaaggttgaagagctgggctccagcactttctctccgctttccctctcagtgggcagctggaaccctagcttgccctgagcgcctcagtttctgtctccagagcaacccatagcacacctgttctccttaaccttctatagcagaaacctcacctcaccttgcctgtggggcctctagagccttctggaatggggagggggtcagggctgcctctttcagggcctgaatggttctgaagagctgttgtccacccaggcgggctgcgtgcacttcccccacacggcgccctgtgaggtgcgcgtgctcatgctcctgtactcgtccaagaagaagatcttcatgggcctcatcccctacgaccagagcggcttcgtcaacggcatccggcaggtcatcaccaaccacaagcaggtccagcagcagaagctggagcagcagcagcgaggagtgagtgttgaca

SEQ ID NO: 3181 - DNA, 587 bp, Homo sapiens
  MAP TO CHR6.1; EXPRESSED IN ADULT LIVER, SIGNAL = 0.76; EXPRESSED IN FETAL LIVER, SIGNAL = 0.74; EXPRESSED IN LUNG, SIGNAL = 0.86; EXPRESSED IN HELA, SIGNAL = 0.76; EXPRESSED IN BRAIN, SIGNAL = 0.9; EXPRESSED IN HEART, SIGNAL = 0.86; NT HIT: gi14781593, EVALUE 0.00e+00; SWISSPROT HIT: P36938, EVALUE 1.10e+00; EST_HUMAN HIT: BE244455.1, EVALUE 2.00e-94
agtgatgctttttgcccatcacattttcccatttgtcatcaagcatctaccttttcaaaaggtttaagctccccatcttgaagctggggctccacagccttggctgcctttacaggatgccctctcaggatcagggtcctgcttctgcatgttcctgtatgtgaagcagatggattctgtgagtggggctggctttgccctcagcacctgacccactgaagttctgctgtatagtctgtcctctcccaatcactcactaatgttctttttgttcccatttccagagggttttcaggctgatttctgttgttccttcaaacttgataaagctgctcatgagacacagtttggccggagtgaccagcatggcagtaaagcaagcagctctctgcaaccgccagccaaggcccaaggcagagaccgagccaaaaccggtgtgacggaacccatgaatcatgaccagtttcatctagtgcctaatcacatcgtggtctctgcagaaggaaacatttctaaaaaaacagaatgccttggcagagcactgaaatttgacaaagtgggcttagtgcagtaccagagcacgtctg

SEQ ID NO: 3182 - DNA, 538 bp, Homo sapiens
  MAP TO CHR17.1; EXPRESSED IN BRAIN, SIGNAL = 0.44; EXPRESSED IN BONE MARROW, SIGNAL = 0.45; EXPRESSED IN FETAL LIVER, SIGNAL = 0.43; NT HIT: AF195956.1, EVALUE 3.30e-02; SWISSPROT HIT: Q39565, EVALUE 7.00e-04; EST_HUMAN HIT: W22909.1, EVALUE 7.00e-26
aggagctgtgatgaccttgggcttgacactcttagaacatcggggctagaaggagtcagggcatggggtctgaagtgtggagccctgtggggggaggcaaaccaggcatttgtgactctgatcccctcttcccatggctcaggggatttcctgaaggagcccaaggtgtatgaagacctcacggatctgacagtgctgaagacagtcatggagacagctctaaatgagtataacctgtcaccctctgtcgtgcccatgcagctagtgctcttccgagaggctattgaacacagtgagcacctgccacgcctatccccttccccatcatctcagtgatggggtatgtctaaggaaataggggtcccttcccaggtctcccaaatcaagttccagaagctgcctttctccctggccccagatgccctgtggcagtgtgtgtttaacagagaaggtggaggttaaaagttgaattgcctcctgggccttgggcaccaacttcttctcatacctcttggttcctctgcttcagtttcagggg

SEQ ID NO: 3183 - DNA, 573 bp, Homo sapiens
  MAP TO CHR22.1; EXPRESSED IN FETAL LIVER, SIGNAL = 1.1; EXPRESSED IN LUNG, SIGNAL = 1.1; EXPRESSED IN HELA, SIGNAL = 1.4; EXPRESSED IN BRAIN, SIGNAL = 0.83; EXPRESSED IN ADULT LIVER, SIGNAL = 2.1; EXPRESSED IN BONE MARROW, SIGNAL = 0.99; NT HIT: AB029885.1, EVALUE 0.00e+00; SWISSPROT HIT: O55229, EVALUE 7.00e-09; EST_HUMAN HIT: AA326297.1, EVALUE 1.00e-125
gaggggtgggaaagaatagcagagccagtgtatcctattctttgggcttcaggtacctaaaacagatccaggacctgcccccaactggcctccctgagatgaacctgctggagatgtacagcctgaaggatgagatgggcaacctcaggtgagggcaggcaggacaaggctaatggtaatggtgtccgcccttccagtagttgctgagggctggtgtcagggcctggcctgttagggtggctctgatcctcctctagtcactcctgctcaggacccatgctcccatacccctgtaggaagttactagagtctaccccatcgccagtcgtcttctgccacaatgacatccaggaaggtaggagaaggcatctgagtctcctaacccaagatggaagagccagagggctctggagtgagcagaacctcaccccattcccccagggaacatcttgctgctctcagagccagaaaatgctgacagcctcatgctggtggacttcgagtacagcagttataactataggtgaggctggaaagatggcttcccatagatctgttcccatagggctcttg

SEQ ID NO: 3184 - DNA, 535 bp, Homo sapiens
  MAP TO CHR7.1; EXPRESSED IN BONE MARROW, SIGNAL = 0.5; EXPRESSED IN FETAL LIVER, SIGNAL = 0.48; EXPRESSED IN BRAIN, SIGNAL = 0.55; EST_HUMAN HIT: BI461453.1, EVALUE 1.00e-106; NT HIT: gi15893298, EVALUE 7.90e+00; SWISSPROT HIT: P56818, EVALUE 2.90e+00
cgaagcccattaaaatgaaaagctaactataaacataataattaggagactaatcagaatctaacatttttaagtcaaatatttgaaagtctgctatgagtggagttagaaatatgcattaaacctaaggtttccttggctcatatttcatccaactataaattaaatttaagttaactgagactgaaaaaaactctataaattatgtagtatactcacagctactttgtaaagaacacatttccatcattccagtgttccagattccaacagaagaaatccacagaggaacagtaaacaaagaattccaagaattgtaatgacatattcagtccaaacaggagaggcaaatccattgaaacacagcaagacagaggggaaaaaaaagttacttacatgtaactcaacaaattagaggtaaattacaaagaaattaaaggcagacttttttctaaacatgtcaaagtaatatatttttgtgtgggatataatgccagtgagtttaaacccattttcagcaactgtcctgctgaaa

SEQ ID NO: 3185 - DNA, 566 bp, Homo sapiens
  MAP TO CHR7.1; EXPRESSED IN FETAL LIVER, SIGNAL = 0.4; EXPRESSED IN LUNG, SIGNAL = 0.77; EXPRESSED IN HELA, SIGNAL = 0.61; EXPRESSED IN BRAIN, SIGNAL = 0.64; EXPRESSED IN HEART, SIGNAL = 0.83; EXPRESSED IN ADULT LIVER, SIGNAL = 0.76; EXPRESSED IN BONE MARROW, SIGNAL = 0.58; SWISSPROT HIT: Q62158, EVALUE 8.00e-18; EST_HUMAN HIT: BI524007.1, EVALUE 0.00e+00; NT HIT: gi9629818, EVALUE 5.40e-01
agtggacaggactgaggtcggatgcctgtgtttcagcccgggcagtgagtgtggatggcttggcaggtgagcctgctggagctggaggactggcttcagtgtcccatctgcctggaggtcttcaaggagtccctaatgctacagtgcggccactcctactgcaagggctgcctggtttccctgtcctaccacctggacaccaaggtgcgctgccccatgtgctggcaggtggtggacggcagcagctccttgcccaacgtctccctggcctgggtgatcgaagccctgaggctccctggggacccggagcccaaggtctgcgtgcaccaccggaacccgctcagccttttctgcgagaaggaccaggagctcatctgtggcctctgcggtctgctgggctcccaccaacaccacccggtcacgcccgtctccaccgtctgcagccgcatgaaggtggggagtgagggtgcaggcggggcggcggggcccgcggggactggatcctgtgctctctggcgctatcaactggcaccaaaacggatccagctatcctcgatttccctgca

SEQ ID NO: 3186 - DNA, 589 bp, Homo sapiens
  MAP TO CHR14.1; EXPRESSED IN HELA, SIGNAL =   1; EXPRESSED IN BRAIN, SIGNAL = 0.72; EXPRESSED IN HEART, SIGNAL = 0.9; EXPRESSED IN BONE MARROW, SIGNAL = 0.77; EXPRESSED IN ADULT LIVER, SIGNAL = 0.77; SWISSPROT HIT: Q06218, EVALUE 3.30e+00; EST_HUMAN HIT: BE250552.1, EVALUE 0.00e+00; NT HIT: AY026388.1, EVALUE 0.00e+00
ctccaccacagagaactgggagtaagactcgattcttcttaggtgaacactcacaaagagccaaagaaagtcagtaaacttctcaataaagctctcatcgagctcttctagcctgctcttcactgtgtgggcattgttatccttggtgatcttctgcaggaggtagaaagtctgctggaacataagcagtaaatactcctcgaactccatcggcacacagctcttggaaatgagttcactgatgcagggcatggccaggacccccggccggctccgctcctgaaccgagacacagttctggctgctgccgttaactgacgccatctttctggcacggatgtcacagccaaatcacgcaaagtggaaggtggtggtaaggagggatggggtgatgccggcagacagaggaatacaactgaagagatgggctaggcactccaaggcaagggaacagatatactcactcaccacatcaaggatgggaattggctgattcaacagtttggctgaactaggactctgccacaggttactcagtaagtcaccactttctcctgtcggggagggtggtggagtggcagcagtaaca

SEQ ID NO: 3187 - DNA, 588 bp, Homo sapiens
  MAP TO CHR13.1; EXPRESSED IN FETAL LIVER, SIGNAL = 0.61; EXPRESSED IN LUNG, SIGNAL = 0.85; EXPRESSED IN BRAIN, SIGNAL = 0.68; EXPRESSED IN HEART, SIGNAL = 0.9; EXPRESSED IN BONE MARROW, SIGNAL = 0.7; EXPRESSED IN ADULT LIVER, SIGNAL = 0.68; SWISSPROT HIT: P15374, EVALUE 2.00e-09; EST_HUMAN HIT: BG939578.1, EVALUE 2.00e-41; NT HIT: gi14757704, EVALUE 1.00e-41
aacaatcagcaatgcctgtggaacaattggactgattcatgctattgcaaacaataaagacaagatgcactttggtaaatgatttttcattactgcattttttcccccttaagatacaagttaattgcattgagcagtaggtggtgctctaattctttcttcaaactataaaataaagcattccctgcttccttgatgatgggaatgtatatactgttagaagaaatattaatccttctcattcttttatattgttgactaataggggttaaacaaatggacaaatattaataatgtaaggcttatcatttataacatgatccttacatttctaacctaccaatgaaagaatttaacctgaaaaatagtagcatacttctagtattttcatatattggtctctctgctgtatcaagcctttttaattttatcttctttcatattctcagaatctggatcaaccttgaaaaaattcctggaggaatctgtgtcaatgagccctgaagaacgagccagatacctggagaactatgatgtcggtaccttctttccgttttgatctcatgtgggcaaaagtttgtgggattg

SEQ ID NO: 3188 - DNA, 589 bp, Homo sapiens
  MAP TO CHR7.1; EXPRESSED IN BRAIN, SIGNAL = 0.45; EXPRESSED IN BONE MARROW, SIGNAL = 0.46; EXPRESSED IN LUNG, SIGNAL = 1.5; EXPRESSED IN HELA, SIGNAL = 1.4; SWISSPROT HIT: P07942, EVALUE 2.00e-49; EST_HUMAN HIT: AU130889.1, EVALUE 1.00e-128; NT HIT: M61936.1, EVALUE 0.00e+00
ctagggtgactcgccaagaggacggattcatgtcagttttgttctctgcggtatctccagcaccagaacggtgcctggcacatagaggatgtcaactcaatatgtactggataaacaaacaagatcctagaaaatagtgaggtggtcagaaatgaatgagcgagctgaagcctggtggagatgaattctgtggttggtctaagatgctgtctgctcagccagagatcactacattctccttactttcagcatctgcatacctttcacagttatgacccatggtgtagtcctggcagttcaagcactccccagtcactgggtcgcagtcatcggcgtggccattgcactggcagggctggcaacttggaaagccccagtgcccaggtaagcaccgatcacactgccgagcatacactccctggaaacagtggcactggccagtgacgggattgcagaaggcattgacagatccttgcagatggcactcacaagctaaagaaacaggcaaacaaggaactgccttgagaaactcattcaatggaaacatgctccttttataagcaccctgtccccaattcagaatgctcat

SEQ ID NO: 3189 - DNA, 581 bp, Homo sapiens
  MAP TO CHR19.1; EXPRESSED IN BONE MARROW, SIGNAL =   1; EXPRESSED IN FETAL LIVER, SIGNAL = 1.1; EXPRESSED IN HELA, SIGNAL = 1.8; EXPRESSED IN BRAIN, SIGNAL = 0.85; NT HIT: gi15297267, EVALUE 4.00e-11; SWISSPROT HIT: P24802, EVALUE 2.50e-02; EST_HUMAN HIT: AL537307.1, EVALUE 1.00e-113
atcatccattctgattgggccattgctagtctcctctccacactacctctgaactcattactgaagctgggaaaatacaaggctctttcttattggccatgcctggccacaggtcccacactgggcttgagtctggggtcctgggaccacaggcgcacactgctgtgcctggctgtctgtctggtcctgtttcatgccgcccactatcacgggtctccatcctcacctttcaagacccctacgcggaactctcgctctctccccacagggctactacaagcgcacacctgcctacatccctatccgcaagcgagaccgccggggctgctttgcagttcccatggtgcactcgaccttcctgatcgacctgcggaaggcggcgtccaggaacctggccttctacccacctcaccctgactacacctggtcctttgacgacatcatcgtctttgccttctcctgcaagcaggcaggtacgtacatgaggggtctgccatcgcaggggcatctgcctggttctttgggttttgcactaagccagttcagaacacactgaagattcacagaacccaaacaatgca

SEQ ID NO: 3190 - DNA, 571 bp, Homo sapiens
  MAP TO CHR7.1; EXPRESSED IN FETAL LIVER, SIGNAL = 0.75; EXPRESSED IN BRAIN, SIGNAL = 0.42; EXPRESSED IN BONE MARROW, SIGNAL = 0.58; NT HIT: M76741.1, EVALUE 9.00e-03; SWISSPROT HIT: P11369, EVALUE 1.40e-02
aggaagacaacagcataaagatgtcagttctctccaaataaagttatatattttaactaagtgtttgtaaagcatttagaacagtgcttgacatataataagtgagatataactgctgttgaataaataaatcaaaattccaacaaaggtttttcatggaacttgacaagcttgttctaaaatttgtaaggcagaacaatggtccaaatatagccaaagcaatcttgaaaaacagaggtgggaggaaggataatgttcattctatcagatattagcacttaattatgaaaccattaagacaatgtttttattggcccaggagtagacagactaatggaatgaaatagagttctaaaatgtttgctatatgaaaacttgatatagaacaagttacaaattagtagatgctggaactgttagttatccatattggggaaaaataaagtcctaattcacaccatttacatctttcaattcaggaagaataaagacctaaacatgaactgggaaatgttatttcctcagggtatgaaaggactcagaccataaaggaaaggattgacaagcaaca

SEQ ID NO: 3191 - DNA, 533 bp, Homo sapiens
  MAP TO CHR2.1; EXPRESSED IN HELA, SIGNAL = 0.95; EXPRESSED IN FETAL LIVER, SIGNAL = 0.88; EXPRESSED IN LUNG, SIGNAL =   1; EXPRESSED IN BRAIN, SIGNAL = 0.82; EXPRESSED IN HEART, SIGNAL = 0.89; NT HIT: gi14723798, EVALUE 0.00e+00; SWISSPROT HIT: P79739, EVALUE 4.00e-15; EST_HUMAN HIT: BI670463.1, EVALUE 0.00e+00
tgacacctctcccctttgtccatgtgccctgtgcctaggtgcccatctcaggggtcaggtcagccacccacccccagagagggggctcatggatgcccctgctcctctcctcccaggccctgggtgctcacccgccggtagccactgaagggcaggtcgacaggcagggagaagacattgtccacaaactgctggtagacctcaaagaggtgcccaaggtcctcctcagggatgctgaagcccagcagcacccggatggccatgcggaaggtcagcttctgcgcctcctggtacacgttgatggcctcggggtggctgctccaggcgcgcagtgtgtcctggatcaccagctggatcttgggcaggtaactctccagggcctcgtggctgaagatcttggagaagacctggaaggcagagaggcaagtgggtgagccgattggcacagcccacccctggccagcccctcactctgcctgaacaatgaatgtgactggagagaacttcagcttccacacaacagcaaagccttg

SEQ ID NO: 3192 - DNA, 587 bp, Homo sapiens
  MAP TO CHR20.1; EXPRESSED IN FETAL LIVER, SIGNAL = 0.57; EXPRESSED IN HELA, SIGNAL =   1; EXPRESSED IN BRAIN, SIGNAL = 0.83; EXPRESSED IN HEART, SIGNAL = 0.5; EXPRESSED IN ADULT LIVER, SIGNAL = 1.2; EST_HUMAN HIT: BG722454.1, EVALUE 3.00e-62; NT HIT: gi14786688, EVALUE 3.00e-67; SWISSPROT HIT: P22795, EVALUE 1.50e+00
tggtgtgggacctaggattgtgtgttttcagaaacccctaaggagtcaatgaataatgttatagccacatagaaccaaatgagtatcatcagatagtcctgcaaataatgtcattaaggggaactataaagatatccaaatgaagtaatgcttatgagtattgtaaaaaattttgatctaagctatagtcacttagcattggtagtttaaagagtcttgggaagatgactgtcccagtgaagcttaggtcacacaaggcatgactccaactgtacctggctttgcgaacgtgcagctgaggatagtggctgtgcctgtgacatatatgcactgcaaagtcttcctcatacgtcagacacgggatgttccccacttggtcaaaaacagttatgagagttgagcctaaatcacagagataaagaaacatgtccttatttatcaagaaataaatttgggatgtcagaacaaaatgtagtttccattctaaattgtgcttaattgttctaataaaatatgcacatggtacattgaggacctggagaccactcttatttctcattccccaaagcaccattctgggagtgaat

SEQ ID NO: 3193 - DNA, 542 bp, Homo sapiens
  MAP TO CHR11.1; EXPRESSED IN HEART, SIGNAL =   1; EXPRESSED IN ADULT LIVER, SIGNAL = 0.51; EXPRESSED IN FETAL LIVER, SIGNAL = 0.68; EXPRESSED IN LUNG, SIGNAL = 1.1; EXPRESSED IN BRAIN, SIGNAL = 0.48; NT HIT: AF009227.1, EVALUE 3.00e-92; SWISSPROT HIT: P03186, EVALUE 5.10e+00; EST_HUMAN HIT: BG036207.1, EVALUE 4.00e-92
tgaagacacaggtggactggcagcttgacagctggcgtggagtgtggaaggatggagggagcgccagagcatggagctgtgagccaggcacatgatgcacgcacgttatggagggctcttcagctcagaggcagacacagaggactcacaacacggacaacgcagcaaccctaccttctgtggttcctttgcctttcctgtcaggggtctctaagccagtgccccctgaggggtatagggagacgtcggttggcacaggccaactgctggctgtgtcctccgtgatctcatacatctgcccctccatcggctgcaggtgccagtttaggccaaacaggtgcatggctgtggtgagcaatgagaaaagtcatctttttctgctggaggcagaaacgggactcccaagccataagggaaaggtgggcagggtgggggaacacaggcattcagttcagttcaacaagtagccccaaaaggaagctcttgtagtgccagccctgcaaaggagactggggacagagaggatcaaggttcagaccctg

SEQ ID NO: 3194 - DNA, 500 bp, Homo sapiens
  MAP TO CHR10.1; EXPRESSED IN HELA, SIGNAL = 0.67; EXPRESSED IN BRAIN, SIGNAL = 0.82; EXPRESSED IN HEART, SIGNAL = 0.7; EXPRESSED IN ADULT LIVER, SIGNAL = 1.9; NT HIT: AF075085.1, EVALUE 1.00e-122; SWISSPROT HIT: P57495, EVALUE 2.10e+00; EST_HUMAN HIT: AV695874.1, EVALUE 0.00e+00
tcagagtgagttggtgctgggagtctgaactcacagtgtgaagtctgaacccagctgttggcagatgttcttagagggcggtggggggagaagctccaaagagcagagccgtccaatgcagggactcgaggtatggctacgaactagtcctcccagtcgatgcggatcgggccgcctgttagcgtctggccctgtagaccggctgagtcctctcctcctgccccacgacgcattcgccggtggcaaccctgggcacagcgggaacgctcgtccaacactccacagacaagaacccggcagtgcagaaacacttcctgaagagatgatcacgactgttaataaaaacaataactgctgccacttgtggggcacttacaagacacaatactaaatgttcctaaacattaagtcatgtaatcttaacaaggacatccacaagtagagtttatcatccccattttacagataaggaaacagagaggttaaggaacttgcccaaa

SEQ ID NO: 3195 - DNA, 596 bp, Homo sapiens
  MAP TO CHR14.1; EXPRESSED IN BRAIN, SIGNAL = 3.2; EXPRESSED IN LUNG, SIGNAL = 2.9; EXPRESSED IN HELA, SIGNAL = 3.1; EXPRESSED IN HEART, SIGNAL = 2.7; EXPRESSED IN BONE MARROW, SIGNAL = 2.7; EXPRESSED IN ADULT LIVER, SIGNAL =   2; EXPRESSED IN PLACENTA, SIGNAL = 2.5; NT HIT: L37086.1, EVALUE 1.00e-66; SWISSPROT HIT: P53273, EVALUE 8.80e-01; EST_HUMAN HIT: AI277339.1, EVALUE 2.00e-66
ggaacttttcccctttggtcaacattttcattttcctcatccttccccaatctctagtaaccactttttaacttttgattccatgagataaactgttttatttttattttattgatttattttttggtcaagcactgcgtctttattttacatattatttccaaagcagacactgtttaagtgagcagccaacagaatttataagatagaaagtgaaagcaaaggtaactggctcaagtctctagcatacaccatgtatatttcatatctgatcaccttgcatgtctggcttaagtgaaggtagggcgatgtagattttgcaagcaagaaatctattttctgtgaccaggaatggctactacatgccttataaaaaaatgcacaacatgaaatgtttcaatgaaatcaaaatttcctcaagcaaggatatgcatgaacaataatgaacacatacacagcaacttgggcagaaagaatggatcatgccatgagacagtgaggttagcacactgatcaagagccccaaacaggaggagccaacccagtggcaaagcaggctaggagggtgagcagcagccatctccatccaccttgat

SEQ ID NO: 3196 - DNA, 511 bp, Homo sapiens
  MAP TO CHR5.1; EXPRESSED IN BONE MARROW, SIGNAL = 1.1; EXPRESSED IN FETAL LIVER, SIGNAL = 0.82; EXPRESSED IN HELA, SIGNAL = 1.2; EXPRESSED IN LUNG, SIGNAL = 0.67; EXPRESSED IN BRAIN, SIGNAL = 1.3; EXPRESSED IN ADULT LIVER, SIGNAL = 1.1; EST_HUMAN HIT: AW134813.1, EVALUE 0.00e+00; NT HIT: gi14727912, EVALUE 0.00e+00; SWISSPROT HIT: Q9UN75, EVALUE 6.00e-79
aaaatgagagtccagaggcgcagattcagaaacaggtaccttttgttccctttctctgaacaccggcgggttgtcgttaatgtccttcacctccacgtccacatggaaaacctgcagcggcctgtccacgatcacctccaggtggatactgcactccgcgctccgcccgcacagcttctcgcggtcgatccgagaattcacaaacaaaatgccattctgcagatttacctccagaaggtccccgtgtcttttggacgccacccggaacaggcgcggcaccagctccgccagctccagccccaggtcctgagcgatgcggcccacgaaggtgccgtgtttggcctcctcgtagacggagtagtggagctggccgctccccacctcccaggctgcaaggagcagaagcgagagcagcagacgctgggatcccgggcctcttggtccgataatcaccattgcagaaaatgagggcctctgagttgggacaatcagttttaagggatcgcttgcc

SEQ ID NO: 3197 - DNA, 551 bp, Homo sapiens
  MAP TO CHR19.1; EXPRESSED IN BONE MARROW, SIGNAL = 0.97; EXPRESSED IN HELA, SIGNAL = 0.85; EXPRESSED IN BRAIN, SIGNAL = 0.74; EXPRESSED IN LUNG, SIGNAL = 0.82; EXPRESSED IN HEART, SIGNAL = 0.93; SWISSPROT HIT: P82251, EVALUE 1.00e-43; EST_HUMAN HIT: BI769541.1, EVALUE 0.00e+00; NT HIT: gi14763944, EVALUE 0.00e+00
tcaggtactcacagatggcggcggcggccaggcatttcacaacgatttgaggaggcttgcagcccacatagaagggcgcacacacatactcggagaagctgaggcagatgatggcgaaggacgtgggcttaatgacgatcaggctggcccaggagaagaggtaggcggggatgggcccgtaggcctccatcaggtagggatactctccccctgacttggtgatcattgtgccaagctccgcaaagcacagggcacctggaacacagagaggaagggcccacaggccccttgtgaggcactgccccggccccagggagccttcctcccaccggaggctgcgctcgtatggaggggcccaccgtggtccgccctcgctggacggccctgagctccagcgttggacattcagtccagcctgatttacacctgtttgccatacatgtgccaagagggatactggcagggtgagggctggcacaggtagcagctgcctggcgtgcccctgcatgcttccggggctgcaacaggctcccaagtctctttacccagcg

SEQ ID NO: 3198 - DNA, 517 bp, Homo sapiens
  MAP TO CHR19.1; EXPRESSED IN BONE MARROW, SIGNAL = 1.4; EXPRESSED IN FETAL LIVER, SIGNAL = 1.2; EXPRESSED IN HELA, SIGNAL = 1.5; EXPRESSED IN BRAIN, SIGNAL = 1.3; EXPRESSED IN LUNG, SIGNAL = 1.9; EXPRESSED IN HEART, SIGNAL = 1.7; NT HIT: AB037816.1, EVALUE 1.00e-81; SWISSPROT HIT: P71613, EVALUE 6.30e-02; EST_HUMAN HIT: BE301939.1, EVALUE 2.00e-81
actgtgtgctctgcaactccatggagctgactgctttgccacagtttacagtggaaggaaggcagaatcagagtggccaagtcactcacctggggtcacacagcaaggggcttaaacccaggtctgactccgaacccagtggtacttggccaaagaggacagaacacaaacccctgcccaagcagtcctcatttgggccagtccccttctgagccagaacggggaggggctggacagtgtctgtctgggtccttgggggcagttcccggagctgctgttcgaggaggacacggagctgtgtgccgacctgtgcctgaggctcctacgacactgtggcagccgcatcagcaccatccgcacgcacgccagcgcctcgctgtacctgctcatgcgacagaacttcgagatcggccacgtgagtgggggctaggaggcatggtccacacatggctctggtcagggtggccagtggggtctcaaccatacagggagtgagggagggggagacagtcattga

SEQ ID NO: 3199 - DNA, 576 bp, Homo sapiens
  MAP TO CHR10.1; EXPRESSED IN HELA, SIGNAL = 1.3; EXPRESSED IN LUNG, SIGNAL = 1.7; EXPRESSED IN BRAIN, SIGNAL = 0.98; EXPRESSED IN HEART, SIGNAL = 1.1; EXPRESSED IN BONE MARROW, SIGNAL = 1.3; EXPRESSED IN FETAL LIVER, SIGNAL = 1.3; NT HIT: gi15298892, EVALUE 0.00e+00; SWISSPROT HIT: P17026, EVALUE 1.00e-103; EST_HUMAN HIT: AL528233.1, EVALUE 0.00e+00
aagtggggcatgactattcgatttgactcaagcttcagtagactcagaagaagcttggatgacaaaccctataaatgtactgaatgtgaaaagagtttcagtcagagttcaactctttttcaacaccagaagatccatactggaaagaaatcccataaatgtgctgattgtgggaaaagtttctttcagagttctaatctcattcagcatcgacggatccatacgggggaaaagccctacaaatgtgatgagtgtggagaaagcttcaaacagagctcaaatctcattcagcaccagagaattcatactggagaaaaaccctatcagtgtgatgagtgtggccggtgtttcagccagagctcccaccttattcaacatcagagaacccacactggggagaaaccctaccagtgcagtgaatgtggcaaatgtttcagtcagagctctcatctgaggcagcacatgaaggtgcataaagaagagaagcctcgtaaaacccggggcaaaaatatcagggtgaagactcacttaccctcttggaaagctggtacaggaaggaagtctgtggctggtctc

SEQ ID NO: 3200 - DNA, 501 bp, Homo sapiens
  MAP TO CHR14.1; EXPRESSED IN BRAIN, SIGNAL = 0.37; EXPRESSED IN HEART, SIGNAL = 0.48; EXPRESSED IN FETAL LIVER, SIGNAL = 0.44; NT HIT: AL163252.2, EVALUE 8.00e-03; SWISSPROT HIT: P38134, EVALUE 9.10e-01; EST_HUMAN HIT: BF752217.1, EVALUE 7.00e-01
tgtgaaactccaactgctgctgcttatttccaagctcaaatcccagcagcccgtggctttagcttcatttatgccttgggtttctgttccctgtggatgtttgtcttgcttttgactgccatgtctgctttactcttattttatctatgtctgtcttgctatgtgttttgaggttggatgggcaaactcagcttcaaagtgtgaactcaccctaccgtctcgccctgaagtcgcccatggactctgtgtgctgtcccagagctccgggacccagaagacattgtgccttttggcaaatgatatatggagactgtctggattaatattaactgtgaaaggtgctcattattcatttctggttcaaggtgacagggttaagcctgatagcatccttttagtagtattaggctgtgataaagcccctggcactgtggctgtgttatctgatgtcccaggagctcagtgcttgcactgagcccagcaagcactcagcgtaagcac

SEQ ID NO: 3201 - DNA, 532 bp, Homo sapiens
  MAP TO CHR19.1; EXPRESSED IN BRAIN, SIGNAL = 1.3; EXPRESSED IN BONE MARROW, SIGNAL = 1.2; EXPRESSED IN HEART, SIGNAL = 0.92; EXPRESSED IN ADULT LIVER, SIGNAL = 1.7; EXPRESSED IN LUNG, SIGNAL = 0.7; NT HIT: AF157815.1, EVALUE 3.20e-02; SWISSPROT HIT: P11371, EVALUE 3.80e+00; EST_HUMAN HIT: AW193265.1, EVALUE 3.00e-03
ggccataatgggaatgtcagaaccaaatgatgggcgtgccatggccagggattgagtaacacttacttaacaaaaccataaggaacaactgcctatccaaacgtgcctggctctgactgccagatggatggacattccctcgaagtttctggaactcttagtcattgccacatctttgcccatactgttctcacaatctggattgccatgcttgctttgccaaactcttattcatccttcaaagccctattcaaatgacccttcctctggatatcccacctgcctagaatctcagataggctctgggagttgaggactcaaccatagatcggaggcccagcccacgtacctgaggctcccaaaaggggtttgatgtaatcagggtgcaccagaaccaacagcggcaggacaggtcccatccataccaagagtacatggtgcatgttgtccagtaccttcttctcatcttgaaggcccgcctcatttggaaggtactgcaagaggtaagggaggagcaatgaggaggtaccca

SEQ ID NO: 3202 - DNA, 565 bp, Homo sapiens
  MAP TO CHR19.1; EXPRESSED IN HEART, SIGNAL = 1.9; EXPRESSED IN BONE MARROW, SIGNAL = 1.2; EXPRESSED IN PLACENTA, SIGNAL = 1.6; EXPRESSED IN LUNG, SIGNAL = 2.1; EXPRESSED IN HELA, SIGNAL = 1.6; EXPRESSED IN BRAIN, SIGNAL = 1.5; SWISSPROT HIT: P27715, EVALUE 3.00e-05; EST_HUMAN HIT: AA772911.1, EVALUE 4.00e-46; NT HIT: gi12408317, EVALUE 5.00e-38
tcttttgtgataccccgagctcttaacttcccccactggcctcagtttcccctctataaaatgagaaccaccatgttaccctaccacctaggacactcccaggcctaggtttgaattgcagtatgctgtgtgttctcaggcgaatcaactaaactccctgggcccccgtttcctccctcctgctccctcgacgccccctctcctttttctgcagcgagattaaccgtctggatttgggactgacggtggaggtgtggaataagggtctcatctgggacacaatggtgggcactgtgtggatcccactgaggaccatccgccagtccaatgaggtgagtggcgggtggcctgagggtgaagaaggaggagtgccttgcagaagcccagagaccagtggactaaacaagatgggcatttatctcctatcccctgacaacatcaatgtagacacttgggattgccacgaaccttccaaagtcactagagcctatacaccttccatcttgctctgcctctctctccatgtggcttccaccttgtggccccaaatggctgctttaggctc

SEQ ID NO: 3203 - DNA, 552 bp, Homo sapiens
  MAP TO CHR9.1; EXPRESSED IN BRAIN, SIGNAL = 3.2; EXPRESSED IN HELA, SIGNAL = 2.6; EXPRESSED IN BONE MARROW, SIGNAL = 3.1; EXPRESSED IN HEART, SIGNAL = 3.1; EXPRESSED IN ADULT LIVER, SIGNAL = 3.3; EXPRESSED IN PLACENTA, SIGNAL = 2.6; EXPRESSED IN LUNG, SIGNAL = 3.8; SWISSPROT HIT: Q9Z136, EVALUE 4.00e-13; EST_HUMAN HIT: AW630725.1, EVALUE 1.00e-101; NT HIT: gi14738501, EVALUE 2.00e-77
agtgcctgacagacgtttcctgtttgaccttttctcctgcagatggacactgacgtcgttgtcctcacaacaggcgtcttggtgttgataaccatgctaccaatgattccacagtctgggaaacagcatcttcttgatttctttgacatttttggccgtctgtcatcatggtgcctgaagaaaccaggtacagatctcctcatatacctgttgggccctgtgaggtgaatgctttcattattgattaattgctcatatgctgtaaggaatggacatgtagacttttatagctgaaatgagtggttttcaccagacagatgagggaatatcttgggtgcatccactacaggcacatagaagaaacatgactgttgagataactttttttattttcttggcttaaaaggattagtcgtcagagaaattgagtggtaggatgtaaaactttatgattgttgataaactgaaaaacagcctccgtctgtattgcagcagtacaggactaagcttgtgggacatttctgtcttccttggctgctctgttgtgacaga

SEQ ID NO: 3204 - DNA, 511 bp, Homo sapiens
  MAP TO CHR5.1; EXPRESSED IN ADULT LIVER, SIGNAL = 0.96; EXPRESSED IN BONE MARROW, SIGNAL = 0.96; EXPRESSED IN PLACENTA, SIGNAL = 1.7; EXPRESSED IN FETAL LIVER, SIGNAL = 0.92; EXPRESSED IN HELA, SIGNAL = 0.95; EXPRESSED IN LUNG, SIGNAL = 1.2; EXPRESSED IN BRAIN, SIGNAL = 1.1; NT HIT: gi14861871, EVALUE 0.00e+00; SWISSPROT HIT: Q9Y5E8, EVALUE 2.80e-02; EST_HUMAN HIT: AW973926.1, EVALUE 0.00e+00
acgattcggacctcactctgtacctggtggtggcggcggccgcggtctcctgcgtcttcctggccttcgtcatcgtgctgctggcgcacaggctgcggcgctggcacaagtcacgtctgctacaggcttcgggaggcggcttagcgagcatgcccggttcgcactttgtgggcgtggacggggttcgggctttcctgcagacctattcccacgaggtctccctcactgcggactcgcggaagagccacctgattttcccccagcccaactatgcggacacactcatcagccaggagagctgtgagaaaaagggttttctatcagcaccccagtctttacttgaagacaaaaaggaaccattttctcaggtaaacttttgtgatgaatgtatcagctatctagagaaaaataattcttgatttaacttactagcgttcgctctttgctacagatagttcttctaacccatgtatctttgtagctttttattacaagtcctgcaaaatcacga

SEQ ID NO: 3205 - DNA, 567 bp, Homo sapiens
  MAP TO CHR6.1; EXPRESSED IN HELA, SIGNAL = 4.1; EXPRESSED IN BRAIN, SIGNAL = 1.1; EXPRESSED IN ADULT LIVER, SIGNAL = 2.9; EXPRESSED IN PLACENTA, SIGNAL = 3.5; EXPRESSED IN FETAL LIVER, SIGNAL = 4.9; NT HIT: gi14752124, EVALUE 0.00e+00; SWISSPROT HIT: P16403, EVALUE 1.00e-36; EST_HUMAN HIT: BG492167.1, EVALUE 0.00e+00
ttaggcttgacaaccttgggcttagcggccttgggcttcacagccttagcagcacttttggcagctttcttgggcttcgcaaccttggccttctttgggctcttagccactttcttggttacagtggccgcggccggcttcttcgctttcttcggtgttttcttagcgctcttcttcggagttgcgccgccagccgccttcttgggcttcttggctgccccaactggcttcttaggtttggttccgcccgcctttttaaccttgggcttggcttccccggaggctgccttcttgttgagtttaaaggagccagaagcaccggtgcctttcgtttgcaccagagtgcccttgctcaccaggctcttgagaccaagtttgatacggctgttgtttttctccacatcatagccggcggcagccaacgcttttttcagagcagccagagaaactccgctacgctctttagaggcggccacagccttggtgatgagctctgacaccgggggaccagacgccttacgaggcgtacccccagcctttttggccgccttcttctttacaggggcc

SEQ ID NO: 3206 - DNA, 600 bp, Homo sapiens
  MAP TO CHR19.1; EXPRESSED IN FETAL LIVER, SIGNAL = 7.6; EXPRESSED IN LUNG, SIGNAL = 9.1; EXPRESSED IN HELA, SIGNAL = 8.4; EXPRESSED IN BONE MARROW, SIGNAL = 7.8; EXPRESSED IN ADULT LIVER, SIGNAL = 5.6; EXPRESSED IN PLACENTA, SIGNAL = 7.5; EXPRESSED IN BRAIN, SIGNAL = 7.8; EXPRESSED IN HEART, SIGNAL = 7.2; NT HIT: gi14150053, EVALUE 0.00e+00; SWISSPROT HIT: P02462, EVALUE 3.90e-01; EST_HUMAN HIT: AW451023.1, EVALUE 0.00e+00
tctcagagaggacaggaggcccagttggagtgagacccacggagtgtgtttattctggcgttgatagcagcagcagtggggggaccggccagacgcagggtgtggcgaacagaaggggtggacacaggtgtgtgtgtgtctgaaaggacagagaggattggcccattgacattcacggcgagaacaagggtcgggacactgagtcttggacaaacagcaaagagacagagacagacagagggttttggggggcaggggtcccccagacatgcatggcccctcgcctcgagggggagccccagggaagaaaagacagacacagtggaggctgaatgccccccaccctgaaagaaggagctgggccggcctcctctcatcctctcgcttccaggggtaggaagcctagggccagggctgccccgcaccagcagctcggacgttatggcttcaaggagatgaattcacggtccgggcaggaaaggatggggtcctgagggagcctggtccgatcccgggcctaggccagacctgcacgatggagcaggaaaggaggggtcagcaatggcagagaactgcaccacgacctcctgtagctccatc

SEQ ID NO: 3207 - DNA, 551 bp, Homo sapiens
  MAP TO CHR22.1; EXPRESSED IN HELA, SIGNAL = 5.6; EXPRESSED IN BRAIN, SIGNAL = 5.1; EXPRESSED IN BONE MARROW, SIGNAL = 6.4; EXPRESSED IN HEART, SIGNAL = 6.1; EXPRESSED IN ADULT LIVER, SIGNAL = 4.1; EXPRESSED IN LUNG, SIGNAL = 9.5; EXPRESSED IN FETAL LIVER, SIGNAL = 5.3; EXPRESSED IN PLACENTA, SIGNAL = 6.1; NT HIT: U36259.1, EVALUE 0.00e+00; SWISSPROT HIT: Q10567, EVALUE 3.00e-26; EST_HUMAN HIT: BE538009.1, EVALUE 4.00e-89
ataccaactgtgccctggtctcccaggtatgagagtgtgattgccacactgtgtgagaatctggactccctggatgagcctgaggcccgggctgccatgatctggattgtgggcgagtacgcggaacggatcgacaacgcagatgagctgctggagagcttcctcgagggcttccatgacgagagcacacaggtgagccagcgagctggccagggtgtgagtcatgactggcagctcagccccactgtggcccatactgccatgaaaccctcccttcctattacctcgtaaacagccctgacagacagatgagtgatgtgcgcgtaatggacaccgccccttttcctcctcactgcagtacagtcgagtcggggacacgtgagagtctgtggtggtgtgcgtggaaggcaggcaaaagttcttcattttgttttaattccatagtcatattttaataggaaatatattgacttggtttaaaattgatacaaaagcatatatagtgaaaagtttccctctcatcactttgtaggacacaaattctcctccca

SEQ ID NO: 3208 - DNA, 561 bp, Homo sapiens
  MAP TO CHR6.1; EXPRESSED IN LUNG, SIGNAL =   2; EXPRESSED IN BRAIN, SIGNAL = 1.1; EXPRESSED IN HELA, SIGNAL = 1.2; EXPRESSED IN BONE MARROW, SIGNAL = 1.1; EXPRESSED IN HEART, SIGNAL = 1.5; EXPRESSED IN ADULT LIVER, SIGNAL = 1.3; EST_HUMAN HIT: BG571448.1, EVALUE 2.00e-01; NT HIT: AY037049.1, EVALUE 2.10e+00; SWISSPROT HIT: Q9PLM3, EVALUE 2.40e+00
gacacgcactctgactgagcccgcacattccccacaggccaactgcctttgacgtcagtgggagcttggccttctcgaagacagaggcaaagataatatttgcaaagtcagctttgcaaaattcagcttttctccgctttgctgcagattgaatgataagcctgggaccagcagagataacgtttcacaggggtttccctatctggaccctcctaccaaattcgtggaaatcagtctttaagaaaaccggacgagccactcataatggcctggccaccacacctgtctgatagcatctcagctactcccttcaaagacaacaacggggtagcaatttttttaaatgcctctgttacaatacagtatattttactcactgcaccaaaatgtcagcacaatggaaaacagattgtttacgctgacccaaggataaatatttacgagccagcaaatacaaaccttgtcaaagtcgactggtcaacaagcaatcttccaggagagggacccattttatgaagggtgtgtactttctgacgtcagccattttgcaaggggacattt

SEQ ID NO: 3209 - DNA, 517 bp, Homo sapiens
  MAP TO CHR18.1; EXPRESSED IN FETAL LIVER, SIGNAL = 0.66; EXPRESSED IN LUNG, SIGNAL = 1.3; EXPRESSED IN HELA, SIGNAL = 0.57; EXPRESSED IN BRAIN, SIGNAL = 0.7; EXPRESSED IN ADULT LIVER, SIGNAL = 0.57; EST_HUMAN HIT: AA706987.1, EVALUE 3.00e-74; NT HIT: gi14762487, EVALUE 2.00e-71; SWISSPROT HIT: O08912, EVALUE 3.00e-22
ttccctgacagctaattgggcatttaaaatgctgactaatttattttttctgtttatgtgtgtgcatttttatttccaggttttctcttatactgccaacaaagaaattagaacagatgacctttgcttggatgtttccaaacttaatggcccagttacaatgctcaaatgccaccacctaaaaggcaaccaactctgggagtatgacccagtggtaagttatgcagttgcctatagtaataaaattatgtgtgtcactgggtatatttatatactttatatctaaaggaatgagttcttgtggaccttgaatatggatcaaacttgtcttatacactaaatattgacaggcgggaaaaataagtaaaataaatgtgttttaatctccctaataattaaattttagtcttataaaatcacagttgcctccaatccctgggtccttgtttactgagtagccactgttccttctgtatgtcttcaagttctatagtctagtttgggagaaatgaggcag

SEQ ID NO: 3210 - DNA, 500 bp, Homo sapiens
  MAP TO AL390762.3; EXPRESSED IN FETAL LIVER, SIGNAL = 0.69; EXPRESSED IN BRAIN, SIGNAL = 0.67; EXPRESSED IN BONE MARROW, SIGNAL = 0.76; EST_HUMAN HIT: BI827073.1, EVALUE 0.00e+00; NT HIT: U53588.1, EVALUE 0.00e+00; SWISSPROT HIT: P54556, EVALUE 1.20e+00
tcctggtgtcattagggagggtgggcttggctcctgtttaaatgtgttcaaaggaaaaagatgatcacattataaatttctgacttcattttgacagaatctaggtggtgtgcatacaacagcagcaagacagttgataatgcagaaatatcaggaggagtgtgaaatactctgtagggagcaagctgtttctcttgactactggcttgccaaagcagagtcttattataataaaataatagtggaaatgatgaaagaagagacaggcaatgaaatctagaaaaaaatggaggagaaaacaacccagagcgtagaaggactaaaacagtactgtttggtacctgagagagagatgaaacacatagaaaggcacatacatcaaacaggaaaggctggagaatttaagaacaaaccatttagacaagtactacaaccccccaatgaaacaaaattaccaaaaattatgccagaagggcatggcatccagaacgcacagagaa

SEQ ID NO: 3211 - DNA, 597 bp, Homo sapiens
  MAP TO CHR22.1; EXPRESSED IN BONE MARROW, SIGNAL = 4.8; EXPRESSED IN HEART, SIGNAL = 5.9; EXPRESSED IN ADULT LIVER, SIGNAL = 3.1; EXPRESSED IN PLACENTA, SIGNAL = 3.9; EXPRESSED IN FETAL LIVER, SIGNAL =   5; EXPRESSED IN LUNG, SIGNAL =   6; EXPRESSED IN BRAIN, SIGNAL = 4.4; SWISSPROT HIT: Q9Z0H3, EVALUE 1.00e-31; EST_HUMAN HIT: BE268241.1, EVALUE 1.00e-104; NT HIT: Y17124.1, EVALUE 0.00e+00
tcaccgctcacacagagaagtctttctcaaaacagttttgcagggagatgagggagggagagactcatgcatgatcctacctgaaggcgtaggtcttctgatgccagctcagctgtccccggatgctgtatgcgatggtggtgacaaactccccgcccaaccccagctccgagcacagcttcagggcaaacttctctggtgagttctccttctctgacatgtcccactcaaactggtccaccagggaaatgtttcccacatggatgttcagctgaggcaacaaccaaaggacacaagttagagcttttgcagcccagggaggccgcgaggagcggggccctgccaggcctggggtgggccctgcccaccagggtccaccagctgagaactgcaggtggtccttgtccttccagttccccatccccaaaacaaggctgaccccacaaccctgtctgccatgaggggctctggctcagggcccagcacagtcaccctcgggaggccctgaagtgaccccgggggcacctgagtcccaccttaccttcatcccatctcccctgtgccctgtgctggtggggaccttcctttctgcccttc

SEQ ID NO: 3212 - DNA, 563 bp, Homo sapiens
  MAP TO CHR7.1; EXPRESSED IN LUNG, SIGNAL = 0.64; EXPRESSED IN HELA, SIGNAL = 0.45; EXPRESSED IN BRAIN, SIGNAL = 0.69; EXPRESSED IN FETAL LIVER, SIGNAL = 0.71; SWISSPROT HIT: Q28309, EVALUE 3.10e+00; EST_HUMAN HIT: AW813522.1, EVALUE 5.10e-02
tcctcatctatgcacaacaggtatttatgcatttgaaatattcatcacagtcttgggtatgtaaacataaatataaatgaagtaatacagaaacaattttcttgattacaagttatcttccatttcagggatatattcattaccttctttatgcctacataaatggctaccattactactgaaactgcaaaatagtgttttaaattttgaaaacatgtctgtatcctaaccaattggctgtggatgaacttaccagcttctgatttagtgtaagcacgtctgtggtttgttttgtcattccatttggttttagcatattttttaacacttcctcattgcctcttgttatacaaagacagctgtgaccccaaatgtgttcacttttaaagttatgttgtctgtctatgaaaaggaaacattctgagaaaaaaaaaagcaaatgtaaataaaacacaggtaaaaaaaaatcctgggaaaaattcaaatggtataaagatgctgaagtaagtgttttcatgaggatactgttgagagttttgagtacatttcaagccccagagaac

SEQ ID NO: 3213 - DNA, 411 bp, Homo sapiens
  MAP TO CHR19.1; EXPRESSED IN FETAL LIVER, SIGNAL = 0.97; EXPRESSED IN HELA, SIGNAL = 1.3; EXPRESSED IN LUNG, SIGNAL = 0.7; EXPRESSED IN BRAIN, SIGNAL = 0.96; EXPRESSED IN BONE MARROW, SIGNAL = 0.96; EXPRESSED IN HEART, SIGNAL = 0.85; NT HIT: gi7706114, EVALUE 1.00e-124; SWISSPROT HIT: Q9XSK0, EVALUE 2.30e-01; EST_HUMAN HIT: BG741581.1, EVALUE 1.00e-127
agagtgagagaaggggagcccaggggaggaatggcgggagcctggcctggggtggcagctgacgctgtagacaagggcggatacctggtagatggtgaccctggcactaaggtcaggctccatgtgccgcaggccaaacatggccagctccacagggtcctggggcaggtcccggggcactgggaaggggttgacgttcatgaatcgagggaaccacagcttcaggcgcaccaacttgagcatggggtagcttttgcgtccaaagatctgaatcagcaggaactccgtctccttgttgggcatcacacctgtgctgggcagatgcaggcagaacctcagagatggagggggaggagggaagggaagaggagaaaagaaaacagtgaagtgagggaatgatcacagacaggg

SEQ ID NO: 3214 - DNA, 529 bp, Homo sapiens
  MAP TO CHR9.1; EXPRESSED IN LUNG, SIGNAL = 1.2; EXPRESSED IN FETAL LIVER, SIGNAL = 0.49; EXPRESSED IN BRAIN, SIGNAL = 0.61; EXPRESSED IN HEART, SIGNAL = 0.89; EXPRESSED IN BONE MARROW, SIGNAL = 0.59; NT HIT: gi14740862, EVALUE 0.00e+00; SWISSPROT HIT: P34710, EVALUE 1.50e-01; EST_HUMAN HIT: AW502097.1, EVALUE 0.00e+00
gccccattttctgacagttcctttagcctctccccatagctcctggcctgctggctggaggtctcagtcgctgcccactctcggctgccacgcacgggaggctggagctggcagtagtggccagagtccgggtcactgtagctgctgagtgatggtgacggggaggccttgccaagggtgtgggaggggctggtgtgggggcccttgtctgactccccatgggtctttggggcacttccgggacacagctggggctcactggaacggcgggcgacaggggaggcaggcaatgctgtggcagaaggggctgcaggggcggcatggacacgggttactgcagaaaggtagagagagaggccccgttatagcagctccccaccaaagtgagattcccgcaccccttcccaaagaacaggctccctcactccttgtagggagtacagaggtgatgtccccacctccctgcatcaccagagaccagggccgattgactctggcaagctgaccagcccaggtgatgctctgaaat

SEQ ID NO: 3215 - DNA, 552 bp, Homo sapiens
  MAP TO CHRX.1; EXPRESSED IN BONE MARROW, SIGNAL = 0.51; EXPRESSED IN FETAL LIVER, SIGNAL = 0.49; EXPRESSED IN BRAIN, SIGNAL = 0.53; NT HIT: AJ002005.1, EVALUE 2.10e+00; EST_HUMAN HIT: BF362983.1, EVALUE 7.70e-01
ttccaaacacatccaccttgaagcattatcaccactgcgaatgctactattgtcccctacctgggaatacctttgtgcataaggtaagtaaaactgctgcattaatttgtcatataacataacacattcatatgatagtaaagttctaactcagtagttctcaaatatttccatcctacaagaatgggctaagtagaggtgagaagtatgataaggaacggtgagtggaggatgaggtactaatagagaggggcaggcaagggacaaggtgaataatggcaaatgaggaacaggtggagggtgagaagagaggaaactgagctccactcttcagttccccttggggtctatcaccctccagtgtgaggaacactggtctcatctccccactctccagggaaaagcatatagctctttatccaagggctagcatgtgagtataagtccttcacatgcctgaaaactaatctcagacaagtcatttaatcacaccacgcctcagtgtgctgatctaaacaggagggatgctgtagcccagagtgatctgaggag

SEQ ID NO: 3216 - DNA, 544 bp, Homo sapiens
  MAP TO CHRX.1; EXPRESSED IN HELA, SIGNAL = 0.6; EXPRESSED IN BRAIN, SIGNAL = 0.66; EXPRESSED IN HEART, SIGNAL = 0.6; EST_HUMAN HIT: AL521185.1, EVALUE 2.00e-60; NT HIT: M88162.2, EVALUE 9.00e-86; SWISSPROT HIT: Q01968, EVALUE 3.00e-43
gacaggagcttgaaacaggcaaccattcctttttatcatattttgattcttaattaggctaatgtcttaaatatcaacaggccactgtctgttatatatactaactttttagactcaggaagcaaaagagacactaacctgaaagtctgaatgttgacatattctttctctcgctttgccaggatatgtttgatgagaccctcccgctgcccagattgggtatttggtacaaagagcttccgcatggtgttggtcactttgggctgctccttgttagaagcttctttttcacgtggaagcctagcaaataaatgagagattcaaaagtaaaattgtttaaactataattctcctacaaggcaaatatgttttcacatgggacttacattttattcactgaaaagggtggaggtgggggttcccgatgaatcccagtaggctgattttgtgaatttattttcttgtccaaattcatagaagaaaaattgtcttcaaatccaagaagccctgaaagacacagaccccaaagtcaaacggggaaaaa

SEQ ID NO: 3217 - DNA, 520 bp, Homo sapiens
  MAP TO CHR11.1; EXPRESSED IN HELA, SIGNAL = 1.1; EXPRESSED IN BRAIN, SIGNAL = 0.97; EXPRESSED IN LUNG, SIGNAL = 0.88; EXPRESSED IN BONE MARROW, SIGNAL = 1.1; EST_HUMAN HIT: AI861797.1, EVALUE 2.00e-90; NT HIT: gi5174568, EVALUE 3.00e-95; SWISSPROT HIT: Q03164, EVALUE 5.00e-25
tccccactcaagacttaccgagctgacttcagctgtacctcctcctcttcttcatcattggggttgtattcaggaggctgacgatgtttagaagccaggaagttaaacatgtcaaatgctgacttcctggggccaaaagattaaaacatatttagagaaatgctttaataaagcagtaaaggatgatggcattaaaactggaaatctcaaagggtatgtgggaagatgacagtgtcatgagataagaaaatcgagacccaaaactgctgacagaaaagaagggaacttgcctgaggtggacttcagccctggctgagccgtgagggttcaaggggggttcattggcctcctctggcttgtggaaacggaatttgtaatttcgacagtgcttggcaccagacagctgctcaatgaggaacacaactgcatcatggagaatccccagcatcctcaaaccgttaacacctagaagaatcagaagcaccagggaagtgaggagcgcagtcaacaggaaacagca

SEQ ID NO: 3218 - DNA, 583 bp, Homo sapiens
  MAP TO CHR3.1; EXPRESSED IN LUNG, SIGNAL = 0.68; EXPRESSED IN FETAL LIVER, SIGNAL = 0.52; EXPRESSED IN HELA, SIGNAL = 0.66; EXPRESSED IN BRAIN, SIGNAL = 0.72; EXPRESSED IN HEART, SIGNAL = 0.56; EXPRESSED IN BONE MARROW, SIGNAL = 0.56; SWISSPROT HIT: P51178, EVALUE 9.00e-21; EST_HUMAN HIT: BI822263.1, EVALUE 4.00e-83; NT HIT: gi5453909, EVALUE 2.00e-83
taggcttcaatttcccgatggcaatttaactggcctgctccccaacccagccagcctcagtttccccactgccagcccaggttgtataaatgacctatgccccaccaggccaggctcagtttccccatctgtggttttgatccatgactgacctttgtatttacccagccctgagcagattccacactctatcccctcccctgtgaccccagggcactcacacagctgggactccggggtccgcatgaccttgcgggactcctgccagatggtcttgcagtcctcctgcaacttgtagaacgctctctcctccatgagctggacttcaccttcaggagctggctgcccttcagcagcgcctgtagatcctcatcatcctgtaggcctggggatcaaagccagtaagatgccaccttctccactagtttccctgatgccctaggttcacactggccatgccacctcgaccctctcagagcccacttttcaccagcctcatcctcagctctgtttactcctccctcctccacccatgctccaacctgctcccagagcctgccctcctccaggaagtcatccctga

SEQ ID NO: 3219 - DNA, 526 bp, Homo sapiens
  MAP TO CHR19.1; EXPRESSED IN PLACENTA, SIGNAL = 1.3; EXPRESSED IN HELA, SIGNAL = 0.97; EXPRESSED IN BRAIN, SIGNAL = 1.1; EXPRESSED IN BONE MARROW, SIGNAL =   1; EXPRESSED IN HEART, SIGNAL = 1.3; SWISSPROT HIT: P28644, EVALUE 2.00e-04; EST_HUMAN HIT: BG744443.1, EVALUE 3.00e-80; NT HIT: gi14759134, EVALUE 2.00e-80
cgattagaactggccagaggtccttggaggaacaacagcgaaacagaagcattagtagcattgtcctccccagtctaacacttgtcggacccctgatgagcagacttccctgtggggtgttcatatccccatgccccgctcagtgggcttcatgtctgagtcatatttgcctgctttcctttgaggtggtgggcgccaaggttgtgacaaatgcccggagtcctggagctcgctgttacggttttgtcacgatgtccacagcagaagaggccacaaaatgcattaaccacctgcacaagacggagctccacggaaagatgatctccgtggagaaagtgagtggccgttttcttcccaggatatagcccacattaggaaatgggggtaatacttgattctctttttcaggccaaaaatgaacctgtgggaaagaaaacctctgacaaaagagacagtgacgggaaaaaggagaagtcgagcaacagtgacaggtacccctccttcctggctaaattaaaggggcagg

SEQ ID NO: 3220 - DNA, 500 bp, Homo sapiens
  MAP TO CHR16.1; EXPRESSED IN ADULT LIVER, SIGNAL = 0.82; EXPRESSED IN LUNG, SIGNAL = 0.77; EXPRESSED IN BRAIN, SIGNAL = 0.53; EXPRESSED IN HEART, SIGNAL = 0.6; NT HIT: gi13648311, EVALUE 3.00e-82; SWISSPROT HIT: P75197, EVALUE 1.60e+00; EST_HUMAN HIT: AU117653.1, EVALUE 3.00e-77
cagactccacgatgtcaaaccaatctggcttatagaaagtcttgctctgctccaatgccaggaggtctacggaatggaaaaatcacaaggccctgtagagtttagtgtagtccacgtggttctttttcttctgtgaacacattctagcctatgcatttgaaaatacgttttattaattcccaggacaaaaaaaaaaaggagcaaaaatgagaatgtgacttcttacccttgtcagggggaacaaagtactttggcctctcaaatccatgtttctccatccacctggctccctgtgcatccagccggtcgtagagaggagaggtgcgtaactgcctaccggtctggaagtcccagtggggaaccttcagatcatacatcaaagctagaaaagacacgagtagtctatcaaagcccaagacacagattctagacctgagtagccaatatccactagactctggagttgtttctattcaaaagagctttccaggctaacgtag

SEQ ID NO: 3221 - DNA, 545 bp, Homo sapiens
  MAP TO CHR8.1; EXPRESSED IN BONE MARROW, SIGNAL = 0.98; EXPRESSED IN FETAL LIVER, SIGNAL = 0.97; EXPRESSED IN LUNG, SIGNAL = 0.58; EXPRESSED IN HELA, SIGNAL = 1.9; EXPRESSED IN BRAIN, SIGNAL = 0.95; EXPRESSED IN HEART, SIGNAL = 0.78; NT HIT: U63630.3, EVALUE 0.00e+00; SWISSPROT HIT: P33991, EVALUE 3.00e-44; EST_HUMAN HIT: BE003776.1, EVALUE 0.00e+00
tgacactgtgtggcctcttctgtttagaaacctaagtttagaccagagatgaggatagacaatgctatgattcttctcaaccaatggcaagtcaggttgccagcacttgctctaacaggccacaactctgtcctttatggcggatggctcgagtggcggagtggatgtttatactatttgatcccaaagaattgtaaatcccaacccctagtttaaaatccactgttaccttctttatatcttcatgttcataaatgcttggagccaaggctgaagcaagcctctcataaatgtctggtttcctggaaagttccttaagcaattccacacgtttctctgaaaaaagtttctgttctgcttcttcatcaaggccatgcagacgttttgcatccgttttccgataatgaatgacatcaatgtgggttttgtagacagacttcacattactcactcttggattgactcgaataggcacagctcgatagatgcctgagggcacaaccaggagatgcacttttaccttcccatatcttcctccgagtggc

SEQ ID NO: 3222 - DNA, 526 bp, Homo sapiens
  MAP TO CHR22.1; EXPRESSED IN BRAIN, SIGNAL = 0.92; EXPRESSED IN BONE MARROW, SIGNAL = 0.7; EXPRESSED IN HEART, SIGNAL = 1.5; EXPRESSED IN FETAL LIVER, SIGNAL = 1.6; EXPRESSED IN LUNG, SIGNAL =   2; NT HIT: L77569.1, EVALUE 0.00e+00; SWISSPROT HIT: Q15428, EVALUE 2.30e-02; EST_HUMAN HIT: AI742444.1, EVALUE 0.00e+00
ccctgtggtctgtgtgtgacaccaccactgtgtcccagtgtctggcccagccatggctggatgtgcatctggcctatgaccctgtgcctgtgtttcatgttctgtgtcacgtgaccctgtgccccgcctcccggggtgcccgtgtggcctgggtcctcggccctgtagccctggcccggtcccagtccggtgccttccaccctgccctggcctaccacagctgcctccgggcctcggcctggcttcaccgcattccaggggctgcagccccctgcttctcccgccattggccttaactggccctcgggccctctctccgccccggacagggtggcacccaccactctcaggaccaccctgccaaggcagaataaaccggatcctgttgcagcctcctgtcctgtgttcgtccctgtatggacccatctatgcatgggcattggtggctgtgcctctgcaggggaccaggccacccccatctgaggacactgcagtagggggacagggaaagcctagtgtccaccca

SEQ ID NO: 3223 - DNA, 537 bp, Homo sapiens
  MAP TO CHR19.1; EXPRESSED IN FETAL LIVER, SIGNAL = 1.1; EXPRESSED IN LUNG, SIGNAL = 1.2; EXPRESSED IN BRAIN, SIGNAL = 0.67; EXPRESSED IN BONE MARROW, SIGNAL = 1.1; EST_HUMAN HIT: BG697996.1, EVALUE 0.00e+00; NT HIT: AB002459.1, EVALUE 0.00e+00; SWISSPROT HIT: P78329, EVALUE 4.00e-21
ggggttactgccttctctccaggatgaagacgggaagaagttatctgatgaggacataagagcagaagctgacacctttatgtttgagggtgagggccccagtgtggggctagagaggggaccgggatctctcccttccaggaacagggtgggtagacccccacaaccttcccatcccccttcccccatcctccctgaggccctcaatgcatgggtgctgtctaccttcgggtgctgaagcagcccagagacccaagcctgccttgctgccccccaggccatgacaccacggccagtggtctctcctgggtcctgtaccaccttgcaaagcacccagaataccaggagcgctgccggcaggaggtgcaagaacttctgaaggaccgtgagcctaaagagattgaatggtgagtgcaggtgcttgtggcctcttcctgagaccttctcattggctctgctccccaggtggggaggggaggaaaagctgtttttgttgattctgccactattgcctagtgggaataggagcagaggacc

SEQ ID NO: 3224 - DNA, 531 bp, Homo sapiens
  MAP TO CHR6.1; EXPRESSED IN BRAIN, SIGNAL = 0.99; EXPRESSED IN FETAL LIVER, SIGNAL = 0.81; NT HIT: AF206500.1, EVALUE 5.00e-01; SWISSPROT HIT: P03316, EVALUE 1.50e-01
atgtgaggccaggtggatagacttggaagtgtttgctcatgtgggagccagatgagctctcacaggtcaccagcactgttctgagtcctcaggattgctttggggcagaataattcccactctttttggctttcaaaaccctgtcaatctgtttggtttagagtaggcagggggccaggtcagggctgcaggcaacttgtcccaagagggtgaggttgtacttgcccagaggggtggcgggcatagctgttggaggggcagcagggctggtctgggcacagactgacatcttctagccttgtcttcagcccagagcagaacctctgcccagtccccaccctatgagctgttggctgcctgcctgccacgcgcccgggattgctgaaggctttactcatgtatctcaggaacagctgcatgccggaaactgggggctggtggcaagcaggaggggtaccccggagacgatgtgggcgaggccgaacccagttttggtgggatcagcccactgctctgggggactgctattca

SEQ ID NO: 3225 - DNA, 569 bp, Homo sapiens
  MAP TO CHR4.1; EXPRESSED IN HELA, SIGNAL = 1.5; EXPRESSED IN BRAIN, SIGNAL = 0.87; EXPRESSED IN HEART, SIGNAL = 0.6; EST_HUMAN HIT: AA310129.1, EVALUE 0.00e+00; NT HIT: M83665.1, EVALUE 0.00e+00; SWISSPROT HIT: P26583, EVALUE 2.00e-28
tgctccttggatttttccttcagtttattaaactctgttgcttcctttcagatctgccttcttcctgttttgctctgaacatcgcccaaagatcaaaagtgaacaccctggcctatccattggggatactgcaaagaaattgggtgaaatgtggtctgagcagtcagccaaagataaacaaccatatgaacagaaagcagctaagctaaaggagaaatatgaaaaggtacagtgtcatcttttttaaagccgtggataagactaggtataggtaataactgtagaaaacctgggaaatttagttaatcttgtattaatggttgtcagctatgttttgaaaaggcctaatgaaaattgtacacttcaacacaaggtaattgaaaccttccttttgactgaaaccagtgtttgtagcactagtatattcctgcagacagacttgtagttacttgtagttattgtatagtctgtatagtctgttatttttttttttaagcagagagtcaaagaaattgttttatgtagatatatataaaatgtgaaggtacaggagggactatggcactgtg

SEQ ID NO: 3226 - DNA, 538 bp, Homo sapiens
  MAP TO CHR5.1; EXPRESSED IN FETAL LIVER, SIGNAL = 0.91; EXPRESSED IN HELA, SIGNAL = 0.81; EXPRESSED IN BRAIN, SIGNAL = 1.3; EXPRESSED IN BONE MARROW, SIGNAL = 0.91; SWISSPROT HIT: Q9UN66, EVALUE 1.00e-36; EST_HUMAN HIT: AA296447.1, EVALUE 0.00e+00; NT HIT: gi14724452, EVALUE 0.00e+00
agccagtgacagtggagaccctccactcagcagcaatgtgtcactgagcctctttgtgctggaccagaacgacaatgtccctgagatcctgtaccccaccttccctactgatggctccactggtgtggagctggcaccccgctccgcagattccggctacctggtgaccaaagtggtggcagtggacagagactcaggtcagaatgcctggctgtcctacagcctactcaagtccagcgagccgggactatttgcagtggggctgcacacaggcgaggtgcgcaccgcacgggccctgctggacagagacgcgctcaagcagaggcttgtagtggtcgtccaggaccatggccagccccctctctcggccaccgtcacactcactgtggctgtggccgacagcatcccagatgtcctggctgacttgggcagcctcaagccttcagcagacccagacgactcgggcctcacactctatctcgtggtggcagtggccgctgtctcctgcgtcttcctggcttttgtcacggtgctgcta

SEQ ID NO: 3227 - DNA, 563 bp, Homo sapiens
  MAP TO CHR11.1; EXPRESSED IN BRAIN, SIGNAL = 0.56; EXPRESSED IN LUNG, SIGNAL = 0.75; SWISSPROT HIT: P11369, EVALUE 7.00e-06; EST_HUMAN HIT: BG166825.1, EVALUE 1.00e-89; NT HIT: gi12736519, EVALUE 3.00e-24
ttcgtgacttggcttcttccttctcacttagcatgatgttttcaaggccacgttgtaacatgtatctgtacttcatttcttttactgccaaataatattccattgtatggatatatcgcattttgtttacccattcatcagttgacagacatttggattacttggccattattttttggggccattattaataatgctggtatgaacttttgtacacaagttttttgtggggacaattaattttgataagtacacgttctcaggccaaatattaatgctcacaggaattaatcacaaacctgtctggcatgtttgcttcataatcatagaactttttattccaggatttagccttaagaaaatcatcttccagtgtcccagaaatttcattctttggcctccaatagtatctttgactttcttcatcaaaaccatcactgcgcatccggctaaaagagaaagcagaagaacttttagatgtaaaagcaatctgtgagtttactttatggaacatcatgcacaaaactcatggaacaagctgagggggaaggaaacaacatgat

SEQ ID NO: 3228 - DNA, 517 bp, Homo sapiens
  MAP TO CHR4.1; EXPRESSED IN ADULT LIVER, SIGNAL = 0.8; EXPRESSED IN HELA, SIGNAL = 0.76; EXPRESSED IN BRAIN, SIGNAL = 0.64; SWISSPROT HIT: P03516, EVALUE 6.20e+00; EST_HUMAN HIT: BE383279.1, EVALUE 1.00e-70; NT HIT: Z11485.1, EVALUE 0.00e+00
cttttggcaccggtagactctaaagaagaaaagaaagtgattgccccattatccttgaaagttgttttgctcttctcaaaattctgtgattagtagagaaagcctatcgtgcatgaaagcagattgggtgtgaactttgacatcactgtgcatagccctgaactttaaagtatgcactgttctgatgtcccctgtagtggaaatcacaagaattttttgtgagattgtttctgacctgttttccagcgtacacagactttactaaaagagtacaaagaaagggataaatccaatgtattcagagataaacgcttcggagaatacaacagcaacatgagccccgaggagaagatgatgaagaggtttgctctggaacagcaggtatggaaagaaactggaggagggtttttgctgtacatttcacagggaagtcaaggccaaggagaaggctgactctgcatgttttgcatgttcctgggcactcggaaggtccaggggatagccctcgaatcctgtg

SEQ ID NO: 3229 - DNA, 526 bp, Homo sapiens
  MAP TO CHR2.1; EXPRESSED IN HEART, SIGNAL = 1.3; EXPRESSED IN BONE MARROW, SIGNAL = 0.56; EXPRESSED IN FETAL LIVER, SIGNAL = 0.6; EXPRESSED IN BRAIN, SIGNAL = 0.51; NT HIT: gi16157781, EVALUE 0.00e+00; SWISSPROT HIT: Q15746, EVALUE 7.00e-08; EST_HUMAN HIT: BF824856.1, EVALUE 1.00e-116
ttcctggccttgtgatatggcactactgaaaaatatatatttatgtatgtctttattaagccaaactaatacatagtatttctctttcttttatagttccaccaatagtagagtttggccctgaatactttgatggtctcattattaagtccggagagagccttagaattaaagctttggtacaaggaagaccagtgcctcgagtaacttggttcaaagatggagtggaaatcgaaaagaggatgaatatggaaataaccgacgtacttggatccaccagcctatttgttagagatgctactcgggaccatcgtggtgtatacacagtggaagccaaaaatgcatctggttctgcaaaagcagaaattaaagtgaaagtacaaggtacttttaaaatagcttcttaatgctacaatttatgaacttggattagagacatgcctagttgtattttaatggacaaggaaaaagaaactaactctagaaactttttcttatagatacaccaggaaaagtagttgggcca

SEQ ID NO: 3230 - DNA, 501 bp, Homo sapiens
  MAP TO CHR17.1; EXPRESSED IN FETAL LIVER, SIGNAL = 1.1; EXPRESSED IN LUNG, SIGNAL = 0.75; EXPRESSED IN BRAIN, SIGNAL = 1.1; EXPRESSED IN BONE MARROW, SIGNAL = 1.2; EXPRESSED IN HEART, SIGNAL = 0.75; EXPRESSED IN ADULT LIVER, SIGNAL = 1.5; NT HIT: AF136270.1, EVALUE 0.00e+00; SWISSPROT HIT: P04637, EVALUE 2.00e-52; EST_HUMAN HIT: AW402694.1, EVALUE 1.00e-100
gtttctttgctgccgtcttccagttgctttatctgttcacttgtgccctgactttcaactctgtctccttcctcttcctacagtactcccctgccctcaacaagatgttttgccaactggccaagacctgccctgtgcagctgtgggttgattccacacccccgcccggcacccgcgtccgcgccatggccatctacaagcagtcacagcacatgacggaggttgtgaggcgctgcccccaccatgagcgctgctcagatagcgatggtgagcagctggggctggagagacgacagggctggttgcccagggtccccaggcctctgattcctcactgattgctcttaggtctggcccctcctcagcatcttatccgagtggaaggaaatttgcgtgtggagtatttggatgacagaaacacttttcgacatagtgtggtggtgccctatgagccgcctgaggtctggtttgcaactggggtctctgggaggaggggttaag

SEQ ID NO: 3231 - DNA, 552 bp, Homo sapiens
  MAP TO CHR9.1; EXPRESSED IN HELA, SIGNAL = 0.5; EXPRESSED IN BRAIN, SIGNAL = 0.48; EXPRESSED IN ADULT LIVER, SIGNAL = 0.4; NT HIT: gi14349302, EVALUE 0.00e+00; SWISSPROT HIT: Q57819, EVALUE 6.80e+00; EST_HUMAN HIT: AL530906.1, EVALUE 0.00e+00
ttacaaacagcgtggtcagggaaggcttctccgctaaaggaagtagctacaggaaggcaggatgtgccgggcaggggagacagcaaaggcaacagcctgagaggggaccctgcctgggggtcagtgtggctgagtggcctgagtgaggagcagaaaggggaggcgaggtggaaatgtggggggccagggcctgggcctggctggtggccctgatggcccaggggcctctgtctccccccaacagccctgctcctggacatcatgacggtggccggcgtgcagaagctcatcaagcggcgcggcccgtacgagatgagccccagcctcctggactacctcaccatggacatctacgccttcccggccgggcacgccagccgcgccgccatggtgtccaagttcttcctcagccacctggtgctggcggtgcccctgcgcgtgctgctggtgctctgggccctctgcgtgggcctgtcccgcgtgatgatcggccgccaccacgtcacggacgtcctctccggctttgtcatcggctacctccagttccgtctg

SEQ ID NO: 3232 - DNA, 546 bp, Homo sapiens
  MAP TO CHR5.1; EXPRESSED IN BRAIN, SIGNAL = 1.2; EXPRESSED IN HEART, SIGNAL = 0.83; NT HIT: gi14726595, EVALUE 6.00e-84; SWISSPROT HIT: Q62952, EVALUE 3.00e-15; EST_HUMAN HIT: BI869777.1, EVALUE 9.00e-84
gcctgctttctacgctcaagactgtaaaagaattcccaatacactgttcacactgcagactctggtcaagtttatagatgggactgctcctgtcctcaacccccagctggactcaagagatgttttcacaaaacgcctgctgctgggcattcctgcaccaacctggccagcaaggagttgatgtagtccggagtagttgggtcagggctcaggggtggggatgtcacaaatgcagccgccttggcccagttcttgctccaataatgggttccatctatgccgaggctggcagtgatgggctcaccaaagactacatttcctagaaggggcaggaaacagacaaggggttagcataaagtatatgctgcactgggccaagcctatttaatttagctcctaagcctacccaggactgtgtctcagagtcagactgacctgggttcaagtccatgttcccacctttttaaagcccctgctttcctatctgctaaatgtgaccaagtttgtattctctagattaaaagaagccattggttgttagatgca

SEQ ID NO: 3233 - DNA, 596 bp, Homo sapiens
  MAP TO CHR14.1; EXPRESSED IN BRAIN, SIGNAL = 0.71; EXPRESSED IN LUNG, SIGNAL = 6.6; EXPRESSED IN HEART, SIGNAL = 0.61; EXPRESSED IN ADULT LIVER, SIGNAL = 0.95; NT HIT: L10058.1, EVALUE 0.00e+00; SWISSPROT HIT: P23083, EVALUE 3.00e-38; EST_HUMAN HIT: BE561361.1, EVALUE 1.00e-104
gtggatgtcgatgcaaaatgagataagatggaagttaaggaaactgctgcatcactgcctcagctcagcacagctgcctcccacatcaggatttctgacactctcaggatgtgggtttccacatggtgtatctcgcacagtaatacatggccatgtcctcagcctttaggctgctgatctgcaggtatgctgtgctggcagaggtgtccatggagaagacaaaccgtcctgtgaagccctgggcatatgttgggttcccagtgtaggtgttgaaccatcccatccactcaagcccttgtccaggggcctgtggcacccaattcataccataggtggtgaaactgtaaccagaagccttgcaggagaccttcactgaggccccaggctgcttcacctcatggccagactgcaccagctgcacctgggagtaggtacctgtggagaggacacaggggtgggtaaagcctcacttgagtggcctggtttctgcctcaaccccgagactggggagccccttacctgttgctgctgccaccaagaagaggatgctccaggtccagtccatggtgaggagctgtgctctaggggattctccc

SEQ ID NO: 3234 - DNA, 547 bp, Homo sapiens
  MAP TO CHR12.1; EXPRESSED IN BRAIN, SIGNAL = 0.51; EXPRESSED IN HEART, SIGNAL = 0.51; EXPRESSED IN BONE MARROW, SIGNAL = 0.56; EST_HUMAN HIT: AU136725.1, EVALUE 0.00e+00; NT HIT: L31848.1, EVALUE 0.00e+00; SWISSPROT HIT: P36896, EVALUE 8.00e-18
aaaaggaagagccagggaacaaagggagccttgcagagcatttccctaaggtcggccgccgggtggatgtggatctgccagactgcactgagcgggaggtggcagggaaatgagtgagagcctagggaccagaaaggcttctccagggcatgaccgagctgatggctcctgggtctctgcacaggcactgcgggtgatggggaagatgatgcgagagtgttggtatgccaacggcgcagcccgcctgacggccctgcgcatcaagaagaccctctcccagctcagcgtgcaggaagacgtgaagatctaactgctccctctctccacacggagctcctggcagcgagaactacgcacagctgccgcgttgagcgtacgatggaggcctacctctcgtttctgcccagccctctgtggccaggagccctggcccgcaagagggacagagcccgggagagactcgctcactcccatgttgggtttgagacagacaccttttctatttacctcctaatggcatggagactctgagagcgaattgtgtgga

SEQ ID NO: 3235 - DNA, 568 bp, Homo sapiens
  MAP TO CHR13.1; EXPRESSED IN FETAL LIVER, SIGNAL = 0.44; EXPRESSED IN HELA, SIGNAL = 0.43; EXPRESSED IN BRAIN, SIGNAL = 0.44; EXPRESSED IN BONE MARROW, SIGNAL = 0.45; EST_HUMAN HIT: AL530242.1, EVALUE 0.00e+00; NT HIT: gi12957487, EVALUE 0.00e+00
tccgctagcagtggatttgaactcactccacttttaccaagcctgtgcttgccccacagtgctatacactttcctgcacagcgcaccagatgtggagcaacaagcttgcagacaagccttggttttatcattctgtggccttggggagctcctgtatgtgaaaatgttttgtaaacgtaggacactgttcagtctgcaagttggcatttgaatttccatttattttggtggaataaggtatggatgactctctgtcactgcaattctctttagaggtaagccagcgattccccacaacacaccccaacgggcgccagatcatgcttacctacctgctgccctggctgcacaacatcgagctggtggacagcaggctcctcctcccgggtcgagccccagcagcccagaggacgaagtcaaggaccgggaaggtgacgtgactgcttctcacgggctgagaggaaatggctggggctctccagaagccacgtcactggtcctgaacaacctcatgtacatgacggccaaggtaaactcagaggaattgtgcttcaaatagcatggctcc

SEQ ID NO: 3236 - DNA, 527 bp, Homo sapiens
  MAP TO CHR19.1; EXPRESSED IN LUNG, SIGNAL = 1.4; EXPRESSED IN HELA, SIGNAL = 1.9; EXPRESSED IN BRAIN, SIGNAL = 1.5; EXPRESSED IN HEART, SIGNAL = 1.4; EXPRESSED IN ADULT LIVER, SIGNAL = 1.4; EXPRESSED IN BONE MARROW, SIGNAL = 1.4; EXPRESSED IN PLACENTA, SIGNAL = 1.4; SWISSPROT HIT: Q21693, EVALUE 1.70e+00; EST_HUMAN HIT: BF527499.1, EVALUE 0.00e+00; NT HIT: gi14764820, EVALUE 0.00e+00
gtcccacgacaggtgcttcttttgcaggctatcctgtccgaaaatccatccagcaggacgtcttggggaccaagcttcctcaactgagcaaggggagccccgaggagcccgtggtggggtgccccctggggcagaggcagccctgccggaaaatgctccccgaccgctcgcgggccgcccgggaccgggccaaccagaagctggtggagtacattgtgaaggccaagggcgcggagagccacctgcgggccatcctaaagagcaggaagccatctcgctggctgcagaccttcctgagctccagccagtacgtgacctgtgtggagacctacctggaggatgaggggcagctggacctggtggtgaagtacctgcagggcgtctaccaggaggtgggggccaaggtgctccagcgcaccaacggcgaccggatccggttcattctggacgtgcttctgcccgaggtgagccgcggaccggcgtgtcacgtgggcagggaggggcctgcgctgggattttgcaactcc

SEQ ID NO: 3237 - DNA, 520 bp, Homo sapiens
  MAP TO CHRX.1; EXPRESSED IN HELA, SIGNAL =   1; EXPRESSED IN BRAIN, SIGNAL = 0.75; EXPRESSED IN ADULT LIVER, SIGNAL = 0.88; EXPRESSED IN LUNG, SIGNAL = 1.2; SWISSPROT HIT: Q93008, EVALUE 2.00e-40; EST_HUMAN HIT: AL597894.1, EVALUE 0.00e+00; NT HIT: gi14764084, EVALUE 1.00e-123
tgggcaagcctaattgtttccagtcacaaaaagagtatccacctgtgagtttgccaggagtcctcaatcagtaagatttgcaaaagcagatccaaatagggccgcagttcataggtataggaatatgcaacctaaaaacaagtaagacatggtgagtaacttaatgaaaggaataacaaatcaaattataaacatacaaatgttattttccttttacctgccagagaagttcactgaggacagtagatgagaactgaggattctcccagcagcaaaaacgaagcaatttgacggtttcctctgaattactgcagtcttcaatgattttcttcacataacttgttctcacaaataaaatgtctgccacattctgctgaattggcattataggttgtgataaattaggatcaccaaaaggattgggaagaggaggattacctagaatacagatttgtcaccaataaaaaactaataagcttcttcacaataataatacacaactttcacgatagaaaatagc

SEQ ID NO: 3238 - DNA, 560 bp, Homo sapiens
  MAP TO CHR17.1; EXPRESSED IN ADULT LIVER, SIGNAL = 0.59; EXPRESSED IN FETAL LIVER, SIGNAL = 0.91; EXPRESSED IN HELA, SIGNAL = 0.87; EXPRESSED IN BRAIN, SIGNAL = 0.91; EXPRESSED IN BONE MARROW, SIGNAL = 0.9; EXPRESSED IN HEART, SIGNAL = 0.58; NT HIT: Y08501.1, EVALUE 8.30e+00; SWISSPROT HIT: P51910, EVALUE 5.30e+00; EST_HUMAN HIT: BG702938.1, EVALUE 0.00e+00
gagctgtgcaagacaagctggcaaatgtttagaactcctgtgagatctgtaaactgcaggtattggagctacatccccaaactagagttacacatattttatcttcgtaacatttctcccctggagttgatccccttcaactccttaatcatttcagttgcttgcactgaattccctcaagtctaaaattctttttttcctagagctgcagaaatcaagaccaaacagtattccagatgccactttctactccagcaactataggatttacagagggggagggatcatcttgctaatggctcagcagcataaagatcccatcagtcaacaacattcaagttcctgttctcatccggaggtcaaagcttctggttctcccaactcattatcccaaatactgatcatcctacatttgctttcctgctcactgtctccatgaggtgtccatctattgggtcaaaggccccaacatggcgcggtcacctctgaaattaaaagaaggaaaacgcattcaccttgtgcatacacgtacataaagagcagcccaacgatactcacct

SEQ ID NO: 3239 - DNA, 582 bp, Homo sapiens
  MAP TO CHR22.1; EXPRESSED IN LUNG, SIGNAL = 0.57; EXPRESSED IN BRAIN, SIGNAL = 0.4; NT HIT: AF411609.1, EVALUE 1.00e-91; SWISSPROT HIT: Q06330, EVALUE 2.50e+00; EST_HUMAN HIT: AA584173.1, EVALUE 0.00e+00
gctggcaatggagctacaaggacaaagacaaacccacaagattttttttttttttaaagcattacacagggactcaaggaatgtttcctgaggagtgtatgggagaaggaaagttggttccaggctgtgaaaagccaccgtcactattggtgggtggtagacactgaggactttctgggggaaggagaacatgataggacccacagtgaaggagagggggtggcatgaggtcccattctaacactggagttcagacaggatggaagactgcactatttccaggacagtggggtgtatggggaaggtctcatgaataatccttaaataatgcagcatcaggcctaacactgaggaggacagagcagagagtgtggcgcaccttctgggcgatcatgttgcagatctcaggcaggaagtcctcactgaggagcttgtagagctgccgttctcgaagggaggtcctctcgcgaaaactctcggtgacctgtctccattcctcttctgtctggcacaggagccaccaagtaccttggcctggcccttgggaccctagaaaataaaggaacggattcactacaggag

SEQ ID NO: 3240 - DNA, 591 bp, Homo sapiens
  MAP TO CHR5.1; EXPRESSED IN ADULT LIVER, SIGNAL = 0.46; EXPRESSED IN FETAL LIVER, SIGNAL = 1.1; EXPRESSED IN LUNG, SIGNAL =   1; EXPRESSED IN HELA, SIGNAL = 0.94; EXPRESSED IN BRAIN, SIGNAL = 1.1; EXPRESSED IN BONE MARROW, SIGNAL = 0.99; EXPRESSED IN HEART, SIGNAL =   1; NT HIT: gi14728087, EVALUE 0.00e+00; SWISSPROT HIT: Q9Y5I1, EVALUE 4.00e-71; EST_HUMAN HIT: AI969295.1, EVALUE 0.00e+00
cagcttttgttctctgagcgagaacaccggcgggttgtcgttaatgtccttcacctccacgttcacatggaaaacctgcagcggcctgtccacgatcacctccaggtggatgctgcactccgcgctctgcccgcacagctcctcgcggtcgatccgagaattcacaaacaaaatgccattctgcagatttacctccagaaggtccccatgtgttttggacgccacccggaacaggcgctgcaccagctccgccagctccagccccaggtcctgcgcgatgcggcccacgaaggtgccgtgtttggcctcctccgagacggagtagtggagctggccgctccccacctcccagaattcgaggaggagaagccagagctgtagtcgtggggtgcccaatccccttctctgaaaaccaaacatcgcatacgaaattggcttccaaaataagcttctttacacttacagtaccagattcttcagtttcaggttaaaaatctcgttgaattcttaagaagtttcaaaggatccttaaacggtggcatccggtatgatggagttcctttgtatggaagtgcctcactgttcagacca

SEQ ID NO: 3241 - DNA, 569 bp, Homo sapiens
  MAP TO CHR19.1; EXPRESSED IN BRAIN, SIGNAL = 0.94; EXPRESSED IN HELA, SIGNAL = 1.3; EXPRESSED IN HEART, SIGNAL = 0.82; EXPRESSED IN ADULT LIVER, SIGNAL = 0.8; EST_HUMAN HIT: BF983826.1, EVALUE 4.00e-95; NT HIT: gi16176004, EVALUE 3.00e-95; SWISSPROT HIT: Q06624, EVALUE 5.00e-09
acaccaaagacgaaacctggctgagggaacatatgcccagagaagaagccagcagacagcaagtcaccaacaactacagcagatgcaacagactggacctctctagcaacacattcacacaatatactaagcctaaacaatagaacagcttatacattttcttgggaaaaagctcagaatttgatatttgaatgctctcagattgctttgggatttgaaagtatatacaactagcaccttaatttgtttaattcccacagcagattttataataagaaacttacagcatcgaattgagtgaaaaatgactctggtttcttctctatatcctcagtgtccaccttcacatccaccatggggttgagattctgagctcgctccaaagaggcttcagccctatttcggccaacagacccagtacgaatcaagaactgagctccgggatcttctggagttacctaggaataatacacatatttttttaagtcttgtatttttagggaaaataaatcttaaaaagaatctttaaattttaaaggatagctaaaatacctaccacctaaattttt

SEQ ID NO: 3242 - DNA, 555 bp, Homo sapiens
  MAP TO CHR22.1; EXPRESSED IN BONE MARROW, SIGNAL = 0.35; EXPRESSED IN BRAIN, SIGNAL = 0.34; EST_HUMAN HIT: AI302223.1, EVALUE 1.00e-125; NT HIT: M57678.1, EVALUE 0.00e+00; SWISSPROT HIT: P09382, EVALUE 9.00e-23
cacaaactggggctgtgtcagggccacatgaggaacgggttctggaagggcccatggcatgtgggcccggctcactgctctcctctacccccaggtgtgcatcaccttcgaccaggccaacctgaccgtcaagctgccagatggatacgaattcaagttccccaaccgcctcaacctggaggccatcaactacatggcagctgacggtgacttcaagatcaaatgtgtggcctttgactgaaatcagccagcccatggcccccaataaaggcagctgcctctgctccctctgaaccagcctcgtgtgtgtgcttgtgcgtgtgtgtgtatgtgtgtgcatgtgtttgtgtgtgtgagaggggtcccccacctccaggcctgcccccttccttcacttccattcgctttgtccacgggtacctcctcagttccaatgacgtcttccgctgggtcccccagacaaagcacacagagtttggcacatagtaggagggtcagtgaccactgaataaaagtcagtccctgccctgaaactgtttttagcctagtgggccc

SEQ ID NO: 3243 - DNA, 577 bp, Homo sapiens
  MAP TO CHR17.1; EXPRESSED IN BONE MARROW, SIGNAL = 0.49; EXPRESSED IN BRAIN, SIGNAL = 0.48; SWISSPROT HIT: O66647, EVALUE 7.30e+00; EST_HUMAN HIT: BG819789.1, EVALUE 0.00e+00; NT HIT: gi15309461, EVALUE 6.00e-84
gttcccctgccattcattagtttagtgttggttatgaaaacatgtcagatagcatcagttctgtagaactgatttgattaaacagttacagaagcaaaagtttgatgtattataatgatgtacacatctctgtttccttatggtaacctcagtttgaagtagatctgtaccaaaatgaaacagcctgtcagagtcctttggattatcagtaccgtcaggagatcctgaagctggagaattcgggtggcaagaaaaaccgacgaatctttacctacactgactctgatagatacaccaatttggaggaggtattgttctttctagggtctcatagcttccatctttgcttcctctagcttttttgcctcactgagttctgtgtgttatgtcagagcctagtaaggggagacaagtagcctgtctaggaactgctgtgagctgctgctgctggcagccagcctggaatagaatgggcacagtctacaggtggtgaggctgctgctcccttctctgcctgctagagggcctgggggagctgccagtatctctgattatatgcttgcagagtgcatactgg

SEQ ID NO: 3244 - DNA, 515 bp, Homo sapiens
  MAP TO CHR6.1; EXPRESSED IN FETAL LIVER, SIGNAL = 1.1; EXPRESSED IN HELA, SIGNAL = 1.3; EXPRESSED IN LUNG, SIGNAL = 0.79; EXPRESSED IN BRAIN, SIGNAL = 1.3; EXPRESSED IN HEART, SIGNAL = 0.73; EXPRESSED IN BONE MARROW, SIGNAL = 1.4; SWISSPROT HIT: P72689, EVALUE 3.60e+00; EST_HUMAN HIT: BF989907.1, EVALUE 2.00e-04
tccctacccaggtctctgtgggctttgtccgttctgccaggcccttgcttatatgatgtcagaagccctgtgcccggtgccattgtcaatgccatgtcccagattacctaatggctgcttcttggagatggtttggtgtccatgcacatttttctctgccgttggagccagggtgaggagctgcttgcaacagctggattccagggtgtcagaggagcccttggagcttgccttgagcctggcagggagaacatggccccttgcatcaggtttcagacatatgggtcttcttccttggcagatggctcctagccttcataactcagcaggctggtgattggcatgtgactccagttcattctgcaggggctttggtgaaggcatcaactatgactcaggacatcttcatttatgagcttctacccagctcccttcttaccttgcctgcgccttctgcgccgacctgataaaatcagcaaagccagtgtctgcttacttgggagtgagcagactcc

SEQ ID NO: 3245 - DNA, 500 bp, Homo sapiens
  MAP TO AL353601.7; EXPRESSED IN BRAIN, SIGNAL = 0.49; EXPRESSED IN HEART, SIGNAL = 0.47; EXPRESSED IN ADULT LIVER, SIGNAL = 0.39; NT HIT: gi4507046, EVALUE 0.00e+00; SWISSPROT HIT: P30825, EVALUE 2.00e-58; EST_HUMAN HIT: AL596602.1, EVALUE 0.00e+00
cacactttggaggtgggaacaaacagaaaagtggtagagggcacgagctccggacccctgggacctaccgatgatgtaggagaggattaagttccagccggtgatgaaggcccagagctctccaacggtgacatagctgtagaggtaagctgagcccgtcttggggacccgagcaccaaactcgccatagcacaggccagccagcactgaggccagcgcagcgatcaggaaggagatgacaatggcagggcctgcattctcacgggccacagctccagccaggacgtagacaccagcacccagtgtgctgcccaccccgagggccaccagatcaaaagtgttcaggcagcgagacagccgcgtctcctcccggctacagtccaccaccttccgccgcagcatctgctgcccaatgttgagcaggactttgcaccccatgttgctgttcagagctgttgaaaaagaacaaagatgtttcctgattgctcctcatttcaccc

SEQ ID NO: 3246 - DNA, 550 bp, Homo sapiens
  MAP TO CHR19.1; EXPRESSED IN ADULT LIVER, SIGNAL = 4.8; EXPRESSED IN PLACENTA, SIGNAL =   3; EXPRESSED IN LUNG, SIGNAL = 1.5; EXPRESSED IN HELA, SIGNAL = 3.4; EXPRESSED IN BRAIN, SIGNAL = 2.4; EXPRESSED IN HEART, SIGNAL = 2.1; EXPRESSED IN BONE MARROW, SIGNAL = 1.9; SWISSPROT HIT: P07562, EVALUE 6.00e-01; EST_HUMAN HIT: AW368928.1, EVALUE 4.90e-02
gcacctcataagtgcagcagaactgagcaaaacagaaaggaaatccctccccactccctcctctgcctcccaaggatcaaacggtcgggtccagagccaagcctgaccctcaagctcctccccgtgaggcagaagagactcttcaaggtgtgttcatatagaacggggcggtgggggggcctgagtcatgtgcaaagcccgctcctccccctgcccgcctgcttccccaactccttccgaagggcgggtactgcggcagcaaagttggctggggctggatgcaatttcagccgcagagcagggctccctggctggaagcaattttctcattaggaccccaagcctgctagctcgttgcttttcagccctcactcccctcctgcgaaaccgcaccccacaggcctccccacagaccactcacacgcacagggaaccacacgtatattgagttgaggggcgactggggggtcacctccgtggggctgggtgcaaggagagatttgctggccaaagtccctggccagggaggcgcgaggtgagatgaggactc

SEQ ID NO: 3247 - DNA, 550 bp, Homo sapiens
  MAP TO CHR5.1; EXPRESSED IN BRAIN, SIGNAL = 0.54; EXPRESSED IN HEART, SIGNAL = 0.65; EXPRESSED IN BONE MARROW, SIGNAL = 0.39; EXPRESSED IN FETAL LIVER, SIGNAL = 0.49; NT HIT: gi14728058, EVALUE 0.00e+00; SWISSPROT HIT: Q9H158, EVALUE 2.00e-77; EST_HUMAN HIT: AW152471.1, EVALUE 3.00e-46
ttgcttaccatggcattgacattagcgtgatcccctttcctattccgaatctgaatacaggatattggcaaattcagtcctaccccagtggcaagatttcgcaggtcggcagcattgtactccccacgcaacagcaaactgttattatcagaaccaagtcccagagaggcccgatagagataagtctgagaaagtctctcaactgtagtgacatctatggtggctgatgtcatgcaaggatttgaaaccatcttacttccatacctcagatcctctgtagagcgacagcagctctgagcgcaacagcctgggctctggtgcaacttggtacacacgaagaaaagtaagcaccccagaaataaaaaggaaatacaagccaaggcaattactaaatacaagttctgggcagaaagctgccctcctggttcccagacatcttcaaagtctggaagtaactgagggacagagttgctcaacagcacacccagagtgacagaggaggaaagtggtgggtctccatggtcccgaaccactaccaccaccctctgct

SEQ ID NO: 3248 - DNA, 530 bp, Homo sapiens
  MAP TO CHR22.1; EXPRESSED IN LUNG, SIGNAL = 0.99; EXPRESSED IN BRAIN, SIGNAL = 0.8; EXPRESSED IN HEART, SIGNAL = 0.95; EST_HUMAN HIT: BF929717.1, EVALUE 0.00e+00; NT HIT: AF105150.1, EVALUE 1.30e-01; SWISSPROT HIT: P14708, EVALUE 6.00e-07
ggcccctccctttactgtagatgtcagcgaggtccctctcatcactgtagatgccagtgaggtccctccctttactgtagatgccagtgtgacccttcccttcactgtagatgccagcgaggtccctccattcactgtagatgccagcgaggtccctccattcactgtagatgccagcgaggtccctccctttactgtagatgccagcaaggtccctcccttcactgtagatgccagcatggcccttcccttcactgtagatgccagcgaggtccttctgtctgctcagacgtctttgactccctcttatgcacatcccacagatgactctcagcacatcccatcaccttcacctttgaggtttatccaggatctgacaagtcccagcatcccagctgctgccctctggcctggcctcctgctccccaaccccaggcatcttccccttctccacatgcggttggcgcaagccaggggggaatcagagcccccctacagactcgaaggtgggcttgtttctgtgacctgca

SEQ ID NO: 3249 - DNA, 565 bp, Homo sapiens
  MAP TO CHR11.1; EXPRESSED IN LUNG, SIGNAL = 1.5; EXPRESSED IN HELA, SIGNAL = 1.4; EXPRESSED IN BRAIN, SIGNAL = 1.7; EXPRESSED IN ADULT LIVER, SIGNAL = 1.8; EXPRESSED IN FETAL LIVER, SIGNAL = 1.6; SWISSPROT HIT: P18286, EVALUE 1.80e+00; EST_HUMAN HIT: BF849580.1, EVALUE 0.00e+00; NT HIT: U02548.1, EVALUE 3.40e-02
aggcacatcaaagaaggctgaagacatttgagagataaatgagggtcacctccccagtggggtgccatagaaaagtgagcacctggaggtgagaggggcatcggctgggggtagaaaccaaaggatgttgctcagactgccaagcagctccagcggtcgctatgcacagccattctttggggatctcatcatggaaaagggtaaaaaagaacattgctgtgtcaaggctgcacagcaggaaactggagaaggtgaggtgacttgctcaaaaagacagacccaagtgtgggtgaacttggaagagaaccttggaattctggctccctggatcccagagaagtccgtgtgccctagacagtgtggtttcctattacataagcaactcttttattactcacactcgcttgctcctgcaagactcctacagcatctccccctagaaaacacagtggaagaaaagggttcttagttccagctgagtcttggtgacttgaatgcctggtcactcctaaggattccaggtgaataacagcaacaagccacatcacggaaactggtgcactaa

SEQ ID NO: 3250 - DNA, 588 bp, Homo sapiens
  MAP TO CHR17.1; EXPRESSED IN BRAIN, SIGNAL = 0.53; EXPRESSED IN HEART, SIGNAL = 0.58; EXPRESSED IN BONE MARROW, SIGNAL = 0.44; NT HIT: Y16791.1, EVALUE 0.00e+00; SWISSPROT HIT: Q92764, EVALUE 8.00e-14; EST_HUMAN HIT: BF569905.1, EVALUE 4.00e-49
tcacccctcctaatgctcacctcctccccatgctcatctgctccccatgcccacctcctccccatgctcacctcctctgcatgctcacctgctctctatgctcacctgctccccatgctcacctcctcttccctatgcacacctgctccctcatgttcacctccccctatgctcacctcatccccaatgctcacctcctccccatgttcacctcctcccccatgctcacctgctgtgccgtgttcaccttttcccccatgctcacctcctcatggttcttcttcaggcagagcagctcctccttcagggactccacctgggcctccaggtcagacttgcacagggtcaggtcatccaggatcctgcgcaggccgttgatgtctgactccaccagctgccgcagggacacctccgtctcatacctgcaggcatagaacagggcacctgagtctgcatttcctttttgcatctaagtcaggcctgccctcagactgtccaggtgctgtgagtcctgcttttatgccccaatgacagagtacagccaaaaccctgagctcaggcatcacctgtgtccagttctagcagccc

SEQ ID NO: 3251 - DNA, 521 bp, Homo sapiens
  MAP TO CHR19.1; EXPRESSED IN FETAL LIVER, SIGNAL = 0.86; EXPRESSED IN HELA, SIGNAL = 0.69; EXPRESSED IN BRAIN, SIGNAL = 0.85; EXPRESSED IN LUNG, SIGNAL = 0.97; EXPRESSED IN ADULT LIVER, SIGNAL = 1.1; NT HIT: D38169.1, EVALUE 1.00e-113; SWISSPROT HIT: P23677, EVALUE 3.00e-27; EST_HUMAN HIT: BI000796.1, EVALUE 0.00e+00
ttgatttgcccattcttgtgccacactgtggctttatgtcttaatatcaggaagggtaagccctccagtttgttctacataatttcctttgtcacatcctctgtgtgctcaggacctatctggaagaggagctagtgaaggcacgggaacgtccccgtccccggaaggacatgtatgagaagatggtggctgtggaccctggggcccctacccctgaggagcatgcccagggtgcagtcaccaagccccgctacatgcagtggagggaaaccatgagctccacctctaccctgggcttccggatcgagggcatcaaggtgaggaccaggaaccgcctggcctgtcccgggaaggcctatagccagatcccaggcagggcttcttggggaaagccacgagagagtgcaggagacggcgtgggatgaaaggctggggctggggaagcccagcctctttcttacctccatacccatcagagcccaggttctgtttatccgtctgcctgagcatctcctgagtcc

SEQ ID NO: 3252 - DNA, 512 bp, Homo sapiens
  MAP TO CHR1.1; EXPRESSED IN FETAL LIVER, SIGNAL = 1.7; EXPRESSED IN LUNG, SIGNAL = 2.3; EXPRESSED IN HELA, SIGNAL = 1.5; EXPRESSED IN BRAIN, SIGNAL = 1.6; EXPRESSED IN BONE MARROW, SIGNAL = 1.7; EXPRESSED IN ADULT LIVER, SIGNAL = 1.5; SWISSPROT HIT: O14896, EVALUE 5.00e-30; EST_HUMAN HIT: BE540926.1, EVALUE 4.00e-95; NT HIT: gi13635795, EVALUE 3.00e-95
gctcttcccatttctccctctgacccccccagatcatggccctccacccccgcagagtccggctaaagccctggctggtggcccaggtggatagtggcctctaccctgggctcatctggctacacagggactctaaacgcttccagattccctggaaacatgccacccggcatagccctcaacaagaagaggaaaataccatttttaaggtaaaggacttcttctaccatcagacctttctggatttttttttttttttttttttggcatggggaatacactagatctaaaactctggtgaaacagagagaatgcttatgatgggggtgcccaaactcagcaggcatagtaattcctcttttgggggcatgtctgcaatggttgaagccgtttattctttcccactcattgaaggtactcactcacatcccaaaggataccagctggggttggctaaaactctcattagtgattgtagtgatgtgtttgtttcaaaagctagcgagggtcag

SEQ ID NO: 3253 - DNA, 518 bp, Homo sapiens
  MAP TO CHR10.1; EXPRESSED IN BONE MARROW, SIGNAL = 0.67; EXPRESSED IN LUNG, SIGNAL = 0.78; EXPRESSED IN BRAIN, SIGNAL = 0.49; SWISSPROT HIT: P09914, EVALUE 1.00e-100; EST_HUMAN HIT: AL552669.1, EVALUE 0.00e+00; NT HIT: gi4504584, EVALUE 0.00e+00
cagcttcctgtccttcatcctgaagcttcagggcaaggagaaccttaatatatccattatctggatttaagcggacagcctgccttaggggaagcaaagaaaatggcttgtgattttttgtggctaatttaaagccatccaggcgataggcagagatcgcatacccagcgctggattcagggttttcagggtccacttcaagcaccttttcaaagcaggccttggcccgttcataattctttcctccacacttcagcaaggcccatccttcctcacagtctatttctggacactccattctatagcggaagggatttgaaagcttcttgcaaatgttctccaccttgtccaggtaagtctgggcttctgccagtctgcccatgtggtaatacatccaggcaaagttgccccaggtcaccagactcctcacatttgcttggttgtcatgttcttcctgcattaagttttcagcttcttttaagctcttcagggcttcctcattctggcctttcaggtgt

SEQ ID NO: 3254 - DNA, 509 bp, Homo sapiens
  MAP TO CHR17.1; EXPRESSED IN FETAL LIVER, SIGNAL = 0.64; EXPRESSED IN HELA, SIGNAL = 0.69; EXPRESSED IN BRAIN, SIGNAL = 0.69; EXPRESSED IN HEART, SIGNAL = 0.49; EXPRESSED IN ADULT LIVER, SIGNAL = 0.6; SWISSPROT HIT: Q01844, EVALUE 3.60e+00; EST_HUMAN HIT: BE260736.1, EVALUE 1.00e-122; NT HIT: gi14774013, EVALUE 0.00e+00
gtctggacctcagcgtcttctcctccgtggggtgcaggttctttagggagctcacggagctcaagaccttcgccaactattctacgtgcgaccgcagcaacctggcggactggctgggcagcctggacccgcgcttccgccagtacacctacggcctggtcagctgcggcctggaccgctccctgctgcaccgcgtgtctgagcagcagctgctggaagactgcggcatccacctgggcgtgcaccgcgcccgcatcctcacggcggccagaggtcagcccgctcacccgggaccccgccccagccccagccccagccacggccctggaatggtgaggggagacacggggtggagccttccagcctcgccgtggattgattgagcacaaacgtgggtcacactgggctctgaggatgtaaagatgaatacgttgcactttacctcaagaagttcccagtctgaggtgggtaggcggtgggaggaaggaggctattaaacaggcaagcgg

SEQ ID NO: 3255 - DNA, 539 bp, Homo sapiens
  MAP TO CHR3.1; EXPRESSED IN FETAL LIVER, SIGNAL = 0.73; EXPRESSED IN LUNG, SIGNAL = 0.89; EXPRESSED IN BRAIN, SIGNAL = 0.58; EXPRESSED IN HEART, SIGNAL = 0.98; NT HIT: AB022159.1, EVALUE 1.30e-01; SWISSPROT HIT: P21179, EVALUE 1.00e+00; EST_HUMAN HIT: BI194595.1, EVALUE 1.90e-01
acctggtgtctctgtacccgcggctcctgagtcagtcctcagggcaggtacaattccagctccaagggaatgaggttttctccctggagctattggaggtcccccagcaaactttctgcctggtttttacaagctttgtgagagggtttgtgctgtgactaacacccgatcctctgactcccttggtcaccactacctgctgggcaggaagtcagcaggactcgaccccccttaatcactgccaccttcccatgacccgcctcaatcacgtctctttacagttgggcagagccggctgggcctcctcaaacttccatatctgcaccgggagatcactgatagggctaatggcatttgcttgcctccacaccctgggcccagtgctccaggagtcacgcaatcccacaggcccagggcggaaactgttcccacagcagcaaggccctccggcctggggagcctccccgccccataaaatatatgaaaagagcctttcttcatggccacctggccagccagcctcaaagccacaggaagtc

SEQ ID NO: 3256 - DNA, 560 bp, Homo sapiens
  MAP TO CHR19.1; EXPRESSED IN ADULT LIVER, SIGNAL = 3.2; EXPRESSED IN HEART, SIGNAL = 1.9; EXPRESSED IN HELA, SIGNAL = 2.3; EXPRESSED IN BRAIN, SIGNAL = 1.1; EST_HUMAN HIT: BE818925.1, EVALUE 5.00e-82; NT HIT: gi14763788, EVALUE 4.00e-82; SWISSPROT HIT: P31751, EVALUE 2.00e-18
tcttcaccaactcccaggacgaacctgcagtgggtccacccaaggttgctccctcccctacgggcatggagcacaccctagggcacctgccacctgaaatcaccccaccctgcagggcagccttgtctctcagctgagccccctgaactgtgttatggaaaccaaggagagcaggccagcactgggggtgggggcaccgcaggctggcagccccacccctgctcccagcacttaccactttagcccgtgccttgctgaccgccacttccatctcctcagtcgtggaggagtcactgggggagccacacttgtagtccatggggtcctcgcctggggcccgctgcttgaggctgttggcgaccatctggatggcccgcatccactcctccctgtgcagggacacacgtgagtcccagcagccaggagtcctgggcctcagagtcgaacagctgagtgccacctcccagccacccccagcaacaggcaagcaaatgaccacataaccatgggaatttgggcaagatctgtcagaaccagagagagctgaagggacctgagtg

SEQ ID NO: 3257 - DNA, 594 bp, Homo sapiens
  MAP TO CHR16.1; EXPRESSED IN BRAIN, SIGNAL = 0.82; EXPRESSED IN FETAL LIVER, SIGNAL = 0.62; SWISSPROT HIT: P50896, EVALUE 4.40e+00; EST_HUMAN HIT: AW976865.1, EVALUE 2.10e-01; NT HIT: AF124051.1, EVALUE 9.00e-03
tcagcctgtgtgtgtatttttagtttatataaataatgtattagagctcgctatgttttctttttttttttttttttaccaagttcattcatgtgactgtattcatctagtattgtttctaacttgcagagaaccccagtgggtatatcccccacactttacctgcccacttctgatccccagattgtctccaactctgcacctcagacatgatgtggtaaatatctttgtatcccttatcagtgcatccctatgagaatttctttgggaacacacatacacacacacacgagtagaatttgtgagtcacaaaatgcatagttttaattatatataaggccagattacttgttattcagaacagctgtacgattctgtatcactatcagtagcacgtgaggatagaacctccagtatgttttcagagggtaactttggtgtttcatggacgaatgtggccatgagaagctggtgacaccagtgagtaggcgcatccagaaaacactttactgagcacagtgagttcattaatttattcattcactaatcagtggagggcctgctgtgtttgtgggcctgaggacacaaaagagg

SEQ ID NO: 3258 - DNA, 555 bp, Homo sapiens
  MAP TO CHR7.1; EXPRESSED IN FETAL LIVER, SIGNAL = 0.31; EXPRESSED IN BRAIN, SIGNAL = 0.42; SWISSPROT HIT: P10071, EVALUE 8.00e-43; EST_HUMAN HIT: BF194991.1, EVALUE 0.00e+00; NT HIT: gi13518031, EVALUE 0.00e+00
ccccatagctcctgaacaagtgccgactggcatgggcacttacggtagtggggctccatgtaaccattcctggggtccatggcaaacaccgtcccgcggtacggcacagagggctccgccacgtgtggcagggacccatggatctctttcttgatcaatgaggccctctcgtcactcgatgttgaaggttcctcactgactttgctgagcccctggacattctgtggctgcatagtgattgcgtttcttctctctctgtgataagtctgtccaggactttcatcctctaaagaaagaagaaaaatgaaagactctgtaaactactttaaggagcaattaaaaaaccatgatcaattaggtctcattctcgatatccctctcccggaaaagaagtatctttctcattcacagcaactttgagagctacagggctgggatgggatctttgcagacaaaattgtttatgaatgagggtccaaagtacacaaatacacagggaaggatgaaggagagcaggaaatgagcctattaaactgagatgtaggggttggcaaa

SEQ ID NO: 3259 - DNA, 569 bp, Homo sapiens
  MAP TO CHR12.1; EXPRESSED IN HEART, SIGNAL = 1.2; EXPRESSED IN ADULT LIVER, SIGNAL = 1.7; EXPRESSED IN HELA, SIGNAL =   2; EXPRESSED IN BRAIN, SIGNAL = 1.5; NT HIT: gi14756915, EVALUE 0.00e+00; SWISSPROT HIT: Q9VPY8, EVALUE 2.00e-18; EST_HUMAN HIT: BG705738.1, EVALUE 0.00e+00
gctcgaaagtgctagggatgggattcgttcccagttcaattctgattcttcgctttagcgtgttgtgggtaggagttaaatgggcccccagccaggaccaggggttcaaatccgttgccatggtcccccgacgctttcccgggctccagaacggatcgcgtggtcacgtgacagcggccaacatggcgccgcccactgtgtggtacggcccacgtggttccgacagtcaagatggcgggagcagctacccaggcttccctggagtcggccccacggatcatgcggctggtggccgaatgcagccgctccagggcccgggcaggcgagctgtggctgccgcatgggacagtggccactcctgtgttcatgccagtgggcacgcaggccaccatgaagggcatcacgaccgaacagctggacgctctgggttgccgcatctgcctgggcaatacctaccatctgggtctaaggccggtgggtgggctctgcccgcgcggggaggcggcgaggcggcgaggcgtggggagccatggagcgtcctccaggcccggacactcctcccaaagtca

SEQ ID NO: 3260 - DNA, 547 bp, Homo sapiens
  MAP TO CHR5.1; EXPRESSED IN BRAIN, SIGNAL = 0.54; EXPRESSED IN FETAL LIVER, SIGNAL = 0.32; NT HIT: gi14165379, EVALUE 0.00e+00; SWISSPROT HIT: Q9Y5I2, EVALUE 4.00e-90; EST_HUMAN HIT: BI465306.1, EVALUE 5.00e-79
tcttccccgtccacatctaccattgggcatggtggaaggctggggctgaaggccatgaggtccgccttgggcaggccctccccagaacacaccctctgccgcctctgctgcgagtaagaccagctccccaccgcgctagagcacaccagcgtgggcttcaccggcccacatgcgccctcggtgggcgccgccgagcacctcagtgcagtgtacagcagcagcgtgagcaccagcaagctggacaccgcgcagatggcgatgatcaggtacacgttgacatccaccagggccacctcgggcgccacgcccactgaagcccgcgacgaggccttgggtgcctggctgccctccacaagcgacacaagcacagtggccgtggccgtcagcgacggctcgccatggtccttcaccagcaccagtaggcgctggcgtggcgagtcagtctcatccagagcgcgcgtcgtactgatctcgcccgtgtacagccccacgcgaaacgggatgcgtgcaccaaccgccgccgactgcaattcatacgacagccacg

SEQ ID NO: 3261 - DNA, 546 bp, Homo sapiens
  MAP TO CHR19.1; EXPRESSED IN BONE MARROW, SIGNAL = 4.7; EXPRESSED IN ADULT LIVER, SIGNAL = 4.2; EXPRESSED IN PLACENTA, SIGNAL = 5.4; EXPRESSED IN FETAL LIVER, SIGNAL = 4.2; EXPRESSED IN LUNG, SIGNAL = 4.5; EXPRESSED IN HELA, SIGNAL = 6.3; EXPRESSED IN BRAIN, SIGNAL = 4.9; SWISSPROT HIT: Q9ULX6, EVALUE 8.00e-73; EST_HUMAN HIT: AI479138.1, EVALUE 0.00e+00; NT HIT: gi14761741, EVALUE 0.00e+00
aactaagcttcccagaggggaaggctgcctccactcactcggaagtcggctgtggtccaggtcttccaggtccgcctcatctgcttcatgccattgccaaacccgaaaccaaagcgggagccgcccgggaaggcgcccccacctcgcatgccctggaacatgccgtactcggggatgatgttctgggagaagagggagggcagccgagaggcaccagacatgcactggccccgggcccccatggggtcttcccacatgcgcccatagcctgaggccattggccggccgctccgggcatcccgggcccagccctgtgccctgggaccgaaggtgtcgttgccacgcatgcggaactggtcgcggtaggcatcgtattggccctcataggccatttccatctcagggtcaagctcgctgtagtcatagcctgaccggtacaggtcgcgctcactcaggacggccctcgagtcgcaggactcataagagtcatacctgcagaggcatggggtgagcatcaggtggagcccctcaggatccctcacctcc

SEQ ID NO: 3262 - DNA, 598 bp, Homo sapiens
  MAP TO CHR5.1; EXPRESSED IN BONE MARROW, SIGNAL = 1.2; EXPRESSED IN HEART, SIGNAL = 1.7; EXPRESSED IN ADULT LIVER, SIGNAL = 0.87; EXPRESSED IN LUNG, SIGNAL = 1.8; EXPRESSED IN HELA, SIGNAL = 1.2; EXPRESSED IN BRAIN, SIGNAL = 1.1; SWISSPROT HIT: Q9UKP4, EVALUE 4.00e-03
caaagatggtggtgatctggttggtcataccttcatccaggacagcttgccactgaagtatatgctttggggaggaagttctaacactataagcctgacattgccagtctctgaatccaggcaaacctgcaggacaaggtggattctcacatattctgtattgttttctgggaccattacaatcccttgcttcagaatctagcctagaaaagaaagtacaaataatcaattttatgttttttatgttaactacctaggttttaaattaaaagccattatattaataatatataaccccttatattatatttacttttgaaaacttggacacattaaatgatagtagtagcaaattcatatatttatttctttaactatatatattttctaatccttgatcaatataccttccaaaatatatgaggaataaaatcccacttgccatgaaaatgatacattagagtaaagggcagaaactgaagggaaaatagaaagccttcaaatgcccattaagaaatttggttcttagaatttttaaggaggtgtttttacataaattcatataaattctttaagactgcatgtgacctctacacca

SEQ ID NO: 3263 - DNA, 545 bp, Homo sapiens
  MAP TO CHR19.1; EXPRESSED IN LUNG, SIGNAL = 1.1; EXPRESSED IN BRAIN, SIGNAL = 0.49; EXPRESSED IN BONE MARROW, SIGNAL = 0.56; EXPRESSED IN ADULT LIVER, SIGNAL = 0.46; SWISSPROT HIT: P17024, EVALUE 2.00e-71; EST_HUMAN HIT: BF921432.1, EVALUE 0.00e+00; NT HIT: gi14760087, EVALUE 0.00e+00
tcttcgtgggtcattcttcccttaataggcacattagagctgacactgcacacaagccgtctgagtatcaggaatatggacaggagccatataagtgtcaacaacgtaagaaagccttcagatgtcacccctcctttcaaatgcaagaaaaggctcacactggagaaaaactctatgattgtaaagaatgtggaaaaaccttcatatcccattcaagcattcaaagacacatgataatgcacaatggagatggaacttataaatgtaagttttgtgggaaagcctgcccttgtctcagcatatatcttatacatgaacgagttcacactggagagaaaccatataaatgtaaacaatgtggtaaagcctttagttattcaacttcccttcaaatacatgaaagaactcacactggagagaagccttatgaatgtaaggaatgtgggaaagcattcggtagtcccaattccctttatgaacatagaagaactcacactggagagaagccatatgaatgcaaacaatgtggaaaagccttcagatgg

SEQ ID NO: 3264 - DNA, 554 bp, Homo sapiens
  MAP TO CHR11.1; EXPRESSED IN BRAIN, SIGNAL = 0.52; EXPRESSED IN HEART, SIGNAL = 0.45; SWISSPROT HIT: Q15620, EVALUE 2.00e-43; EST_HUMAN HIT: AI962273.1, EVALUE 0.00e+00; NT HIT: X89669.1, EVALUE 0.00e+00
aagttcgatggaagcagaccggaggaatattttggagaggtgttacataaaagagcatcactaaattttcataaatctcaacaataaatccaataagttagatatctaatcaaaccaaagacctatcttgatgtaacaacataacattgattctattcattaacatgctgtctgatgcagaattttcttcacggcaagtttgacatctttattcctcaggctgtagatcagggggttcagcatgggcacaatagtagtataaaacacagacgacactttcctctggtccatggagctgacagatgatggctgcaggtacatgaatgctgcagatccaaagaaaacagcaacagccaagatgtgggagctgcaagtgctgaaggctttggacctgccctcagtggagtgaatgcggaggatgctggcaatgataaagatgtaagaagcaaggatggttaaggcaggcatcaggatgttaaatgcactcaagaccagaaccagtaattcattgatgtaggtgctggagcaggagagccccaagagagggaaaagat

SEQ ID NO: 3265 - DNA, 553 bp, Homo sapiens
  MAP TO CHR3.1; EXPRESSED IN ADULT LIVER, SIGNAL = 0.41; EXPRESSED IN FETAL LIVER, SIGNAL = 0.6; EXPRESSED IN BRAIN, SIGNAL = 0.63; NT HIT: AF016707.1, EVALUE 0.00e+00; SWISSPROT HIT: Q05086, EVALUE 4.00e-37; EST_HUMAN HIT: BG820451.1, EVALUE 0.00e+00
tggacattgttttctcaagtgctaatataatagaaatcaatgttgcatgcctaattacatatattttaaatgttttatatgcataattattttaagtttatatttgtattattcatcagtccttaataaaatacaaaagtaatgtatttttaaaaatcatttcttataggtatgttcacatacgatgaatctacaaaattgttttggtttaatccatcttcttttgaaactgagggtcagtttactctgattggcatagtactgggtctggctatttacaataactgtatactggatgtacattttcccatggttgtctacaggaagctaatggggaaaaaaggaacttttcgtgacttgggagactctcacccagtaagttctttgtcatttttttaattcagtctcttagattttatttaaatgcaaaaatttaatttatgtcaaaattttaaagtttttgtttagaatctttgttgatactcttatcaataagataaaaatgttttaatctgaccgaagtaccagaaacacttaaaaactcaaaggggga

SEQ ID NO: 3266 - DNA, 567 bp, Homo sapiens
  MAP TO CHR17.1; EXPRESSED IN LUNG, SIGNAL = 0.82; EXPRESSED IN HELA, SIGNAL = 0.48; EXPRESSED IN BRAIN, SIGNAL = 0.69; EXPRESSED IN HEART, SIGNAL = 0.78; EST_HUMAN HIT: BI009653.1, EVALUE 0.00e+00; NT HIT: gi14773922, EVALUE 1.00e-115; SWISSPROT HIT: P34703, EVALUE 7.00e-25
attggtggacatttgggttgttactagaagcttatcgttctatatcctgttccttttctgcctttcctccagcactgactcatatattgaagtccttgatggttcccgtgtccaccctgagacttatgagtgggctaggaagatggcagtggatgccctggaatacgatgaatcagccgaggatgccaatcctgcaggagcccttgaagaaatcttggaaaacccagagcgactgaaagacctggaccttgatgcctttgcagaagagctggagaggcaggtaagggacagcatggaaggcccggcaggagaacccatcccaagtggccaggttggtaggagacttgggcagtgagtgtgcagagaaagcctgatactgttagtatggcagacttgatcctcatctccctgccctgctctactgggctcctcaaggaagtttttggtctgcttgttaaggagccagggaagtctcagagattgccaccataattacaaggggcaggagggagttgggaggatgtcagtactacagtttccgtctaggccccctttcctcctttctaa

SEQ ID NO: 3267 - DNA, 505 bp, Homo sapiens
  MAP TO CHR19.1; EXPRESSED IN ADULT LIVER, SIGNAL =   8; EXPRESSED IN PLACENTA, SIGNAL =  12; EXPRESSED IN FETAL LIVER, SIGNAL = 9.5; EXPRESSED IN HELA, SIGNAL = 8.6; EXPRESSED IN HEART, SIGNAL = 5.3; EXPRESSED IN BONE MARROW, SIGNAL =  14; EXPRESSED IN LUNG, SIGNAL = 6.2; EXPRESSED IN BRAIN, SIGNAL =  11; EST_HUMAN HIT: AI422453.1, EVALUE 1.10e-02; NT HIT: gi15302121, EVALUE 4.80e-01; SWISSPROT HIT: Q92766, EVALUE 9.20e-01
tgtgagtcaccatacctggctctctcaattccagtgaaagcagagctgggcctgggtcctcaccctccttccgccccctcccccaggagactttgcctacaacctggatcaggacaacgcccgtgttggggataggttcatgcggctcattgaacccgtggctgccagcctgccgtacatgacatgccctgggaatcatgaagaacgctagtgaggactgagggtggtggcggtgggcgagggctggatcaatggaaatggtctcgttcttcttagtgtctcccttgagtctctcatgctgcaacatttcaattgtggtagcaagaggagatgggggtgggctggaagctggactcagggcctgacagtggcggggtataggagtagggctatgaaattcagtccttcacctccatcccttgtacttcctttattccagcaacttctctaactacaaggctcgcttcagcatgccgggggataatgagggcctgtggtacaggta

SEQ ID NO: 3268 - DNA, 595 bp, Homo sapiens
  MAP TO CHR11.1; EXPRESSED IN BRAIN, SIGNAL = 0.86; EXPRESSED IN HEART, SIGNAL = 0.89; EXPRESSED IN LUNG, SIGNAL = 0.9; SWISSPROT HIT: Q03164, EVALUE 3.00e-71; EST_HUMAN HIT: AA969422.1, EVALUE 0.00e+00; NT HIT: Z69771.1, EVALUE 0.00e+00
gtgttatgaacctgtggggccagtttaggaattccagggtaagccacattatgtgcagatccctctgagctcttggaactcagcactttggtcttctctccctttaaagaggagctcttggacaccaagtctgaagcactggactgcttcatttctgaagatgaagatccatccaagtgactgtttttattgcctacagtaaccactgtcctttgcaaatttgaagaggtggaagtgttttgccctaaactagtacttgaattcagtggccctaagacatgatcaactactttggcacttgattcaagatcagtagcggtcccggtggtggagactgaggaaacattattcctagagtaagtattcccagttctcattggagacattatccggagtttggaccgctggggtgataaggaagaggtactgtgacgcctggagccaatgcttcgaagtccagaggagagtaaaggatcacctactgtgactatttcatgagtggttggggtaggacttcctaaacaagagagaaaaagtaataaatgctattgtagatagaacaaatgtgtagaagtcactggtttcaatgatttga

SEQ ID NO: 3269 - DNA, 543 bp, Homo sapiens
  MAP TO CHR19.1; EXPRESSED IN LUNG, SIGNAL = 1.1; EXPRESSED IN BRAIN, SIGNAL = 0.61; EXPRESSED IN HEART, SIGNAL = 0.89; EXPRESSED IN BONE MARROW, SIGNAL = 0.85; SWISSPROT HIT: Q9Y2G4, EVALUE 1.20e-01; EST_HUMAN HIT: BF870044.1, EVALUE 0.00e+00; NT HIT: gi14767177, EVALUE 1.00e-88
gcaagattcagggttggaagtacaggtcacactgtgaggtcagggttggggtagagatcagagaagtcaccattctggggtaaaggatgaaacactgaggtcagaggtcacattatagagtcagggttgcctgagggctgaagtcaccttccgagattagaagtcattctctgaaagcgagcattgggtggggcagggaggtcatcccgcgcccgcgagctcagaggccactctacaggcaggctcagtgcttacttaccccctcagggcccggcccgggccgcagcaggtgaacgggctgctcattctccaggttgcgcagtgtggggtccgccccagctgccaacaggtgccgcacgatggcctcctgggccggcccagggggcagggcagccgccatgtggagggctgtgttcccgtgggcctggaaaagtaaggggagggctggtggggatctgggctcagctggcccaggcctctaaactgcacttcaatttctgccttgtctacgtcctacacttgtcctttcacatcccagacctc

SEQ ID NO: 3270 - DNA, 572 bp, Homo sapiens
  MAP TO CHR17.1; EXPRESSED IN LUNG, SIGNAL = 0.7; EXPRESSED IN HELA, SIGNAL = 0.66; EXPRESSED IN BRAIN, SIGNAL = 0.59; EXPRESSED IN HEART, SIGNAL = 0.53; EXPRESSED IN BONE MARROW, SIGNAL = 0.49; SWISSPROT HIT: P37959, EVALUE 4.00e-05; EST_HUMAN HIT: BE389703.1, EVALUE 1.00e-119; NT HIT: gi7661657, EVALUE 1.00e-119
actgaaatccatggtgggacataaaaatatccccaccttgtaggggtttgcaggcaccatgaaaaagacatgtaggtaatgctgcacaaatgtggctgtcactaaagagaacatcttgattggaagctataaagcaaatacccaaactgtaacaataacacctaacacccactccagggcaacagagaggatggagatggggaacgtttagctgaaaaggatccaagtgaagtaaaaagaatgccaacatatcacttatcactgctcttttctcaagactgttacctttcgttagagcaactgggccaaagtagtttgtctccatgaccctcttgtccacatccactgtggtgtccatgatggtaccacggtagctgatcccagcattgttgacaagtatgtcgacatagccaaagcactgcaggatctcagctgctgctgcaactatggccccagagtctgtgaggtcgaaggtcaccaagtaaggcttgtgtgtctgcacctggtcaaatacaacagatacaaattcactttctgagtggcaggccatctgagctatgtgtcccacggat

SEQ ID NO: 3271 - DNA, 588 bp, Homo sapiens
  MAP TO CHR14.1; EXPRESSED IN HEART, SIGNAL = 0.76; EXPRESSED IN BONE MARROW, SIGNAL = 3.4; EXPRESSED IN ADULT LIVER, SIGNAL = 0.96; EXPRESSED IN PLACENTA, SIGNAL = 1.2; EXPRESSED IN FETAL LIVER, SIGNAL = 0.93; EXPRESSED IN BRAIN, SIGNAL = 1.1; EXPRESSED IN LUNG, SIGNAL = 1.4; SWISSPROT HIT: P23083, EVALUE 2.00e-27; EST_HUMAN HIT: AW403516.1, EVALUE 6.00e-79; NT HIT: M99637.1, EVALUE 0.00e+00
atccatcccatccactcaagcccttgtccagtggcctgtcgcacccagttgatatcataactggtgaaggtgtatccagaagccttgcaggagaccttcactgaggccccaggcttcttcacctcagccccagactgcaccagctgcacctgggagtgggcacctgtggagagaacacaggagagaataaaatcctctttgactgaaccaggatccgttcctcagctttgagactaggaagccccttacttgtagctgctgccaccaagaagaggatcctccaggtccagtccatggtgaggagctgtgctcacagggttttctctagaggacagatgtggttgttgagtgatgctctcagggcaccaatatacctatatttacctcagaagagctcaggttatttgcatattcatgaggcagggtatttcacagctcaaagccttatctagtatgagaaagaaaacacagatgccacatcagccatacaagagtgggacgctgagggacgaagccctaatcctgcctgaggaaacgcacccccttccccatttctaagctttctgtgcacagcactcttcccactga

SEQ ID NO: 3272 - DNA, 522 bp, Homo sapiens
  MAP TO AL356000.4; EXPRESSED IN BONE MARROW, SIGNAL = 0.78; EXPRESSED IN ADULT LIVER, SIGNAL = 0.53; EXPRESSED IN BRAIN, SIGNAL = 0.72; EXPRESSED IN HEART, SIGNAL = 0.44
  unsure 186
  unsure 238
agtcaccccaaccatcacagcagaaaattttccaagctgaggttaatttttaagcatggggagtcctgccacttctgtgattgcagctccagttgaaactaaaaactcaactaggaatacccggtgatatagccatgatgatataaacagctcaaaaagaagcccccaagttataagacgtggcanaaagggggaagctgcagatgctttttgggctctgggcaaactcccgagaccncaggtggaaactgtgaagtaatagaaacaatttggtatttaaatctgtgcagagaggagtacacagaatgaaatggaacaagcatcagggaaaattgagatttcttgtggtgttattccccaagtggaagcactctgcctactaaaacagctgtgagaaatcctgacctgcttacactctttcattaccaaagccagtcagattttcctttactcatgcaatttccatcacctcaaaaagaatattcaccgtctaaagaggtgaagtccattaaagttttgggg

SEQ ID NO: 3273 - DNA, 560 bp, Homo sapiens
  MAP TO CHR17.1; EXPRESSED IN LUNG, SIGNAL = 1.3; EXPRESSED IN BRAIN, SIGNAL = 0.73; EXPRESSED IN HEART, SIGNAL = 0.75; NT HIT: L78833.1, EVALUE 0.00e+00; SWISSPROT HIT: Q99536, EVALUE 8.00e-35; EST_HUMAN HIT: AU130968.1, EVALUE 1.00e-116
atgactgagaagtggtggggaaggtagctagagaggtgggggtgtggggtgagggcacgttgctaaggatagcacaccagactagacctggtgcctgaatgttaccacggcaactacacagcagaggcctctgggagccacaggccaaggcagcctggtgttgccatgacaacaacccagacaggctgcagggaaggggcctggaaggaaatctgggtggggtaaggggtgataaagtgaggggacctgtcacctgcagccatgtgtaccaagacgctgtggccaggctgtaggttgccgaagtcaaagaggaccatgtaggctgtaatgtaattgacgagcaaggcagcagcttcctcaaaggtcatggcctcaggaatcaggaaggtctggaccgagggcacagtcacctcttcctgccacatccctgaccggttcaacaccatcacccggtctcctgccttgaagaacagaagagtatcattcagtcactcattcattcacccacaggctatttactgatttccccctaggtacaaggccaccttcttccaaatgaa

SEQ ID NO: 3274 - DNA, 552 bp, Homo sapiens
  MAP TO CHR11.1; EXPRESSED IN BRAIN, SIGNAL = 0.56; EXPRESSED IN BONE MARROW, SIGNAL = 0.63; EXPRESSED IN ADULT LIVER, SIGNAL = 0.45; SWISSPROT HIT: Q12587, EVALUE 2.30e+00; EST_HUMAN HIT: BI011063.1, EVALUE 2.00e-01
cgaagcatttggatacctggagagtatttgtgaatttttttcactcttttgagcaccatacttaattttattttcttgattgcttactgtatttgttaaaccaactgaaaaatatgtctgattccttggcgtaacttcaactttttgtgcatactttcatgtttagtaatttctgccaaatctttgaaaaacagaacaagacttgaggagactctgggattaaaataatttgtgctatggatgttatgatgatgaagtcctgattttctgggtcaactgacaaataaaatacattagaggtcaattctagatttcataacagatttttggaagaggaaagtatccaaaaattattttgtttgacctgtttcactttctggcctctcagcaggctctctaccatttgtgtcaatgtgtctttgtggttaatagtgctcctggcatggagcatggttgaagacccaaatagtgaatttaactcaaattctatcctctaacaacaggacagttctcctggggaacaattctattgttggaagtgctttcctttgg

SEQ ID NO: 3275 - DNA, 591 bp, Homo sapiens
  MAP TO CHR12.1; EXPRESSED IN FETAL LIVER, SIGNAL = 1.8; EXPRESSED IN LUNG, SIGNAL = 3.9; EXPRESSED IN HELA, SIGNAL = 3.5; EXPRESSED IN BRAIN, SIGNAL = 2.3; EXPRESSED IN HEART, SIGNAL = 1.6; EST_HUMAN HIT: AI016707.1, EVALUE 0.00e+00; NT HIT: M74493.1, EVALUE 0.00e+00; SWISSPROT HIT: P16587, EVALUE 3.00e-24
tgggcatgtggacatgatacccagggccctggccacacttgcatggagaggaaggggtaggactggggcagggtgacagtaggtatgtcaggggtgggtggggtgctttgttagggctgtctggctttcacttcttgtttttgagctgattggccagccagtccaggccttcgtacagcccgtccccgctggtggcacaggtggcctgaatgtaccagttacggtgacgaagggaatgcaggcccagcttgtctgtgatctcagcagcgttcatagcattaggcagatcctggagcacgtgggagacacataaaaagaagcctcaggattttttaaaggcttctagaacacccatctaccaaagaaatgtgtaccagcaccttcccctcctcctttattttaggaaacccagaacaagatcctaaggagctactttggatttagtcacctagaactcaagatccaaagcactagaggtcactgtactgaagaattggaaaccaaatacgaggatggtggggaagcaagagacgtgattcagactgaccaaagaatcaggtctgtctgacagcaggagtgaggccaattctc

SEQ ID NO: 3276 - DNA, 566 bp, Homo sapiens
  MAP TO CHR7.1; EXPRESSED IN FETAL LIVER, SIGNAL = 0.34; EXPRESSED IN BRAIN, SIGNAL = 0.3; NT HIT: gi14734056, EVALUE 2.10e+00; SWISSPROT HIT: Q07215, EVALUE 3.20e+00
ggagtaggatggctgagtgcgctgtcatcaccaccctatgggatttctctcatttgtcccaacaggccagcacttatgggctttgtgtctgcacctcaccccacgggccctgtgaaacctttccagcaatggcttagatgtctgttctgctccctcccctaggaaacatattttagactcattcttccctcctgcaagtctgaactttaggtctccagctgaagtgggcaaggatggtgggctccagaagcagcagctctggtgtggtaggagccagaagaggaggtgaatgggggaaggatgtccctatgttctcacaccccaggacctccaggactctctagccaggaaacagggtcgagctggcattgcatgatctggttcagctcaattctcagcttcagcagtctttctgccacccctgatcacactgggttggatttgtgggggagggagtcaaggcctgcagacatgaacatacatgcttaggtcggtcaagtcaacaatgaacggcagagtgggatgggaatccaggtgtccggagtcccagcccaatactttttcca

SEQ ID NO: 3277 - DNA, 600 bp, Homo sapiens
  MAP TO CHR7.1; EXPRESSED IN BONE MARROW, SIGNAL = 0.52; EXPRESSED IN LUNG, SIGNAL = 0.57; EXPRESSED IN BRAIN, SIGNAL = 0.46; SWISSPROT HIT: P36113, EVALUE 4.50e+00; EST_HUMAN HIT: BE894812.1, EVALUE 3.00e-90; NT HIT: gi14781728, EVALUE 2.00e-90
aagttaattgccactttccccttaataattttttcagtactttgcagtactatttaaatttcttgagactgacaactccatgcattttatttcactctttttctttctttgctttatagtaaattaccatagaggtacactctgtattagaatttagcattaaaatattttcttttgtgttttgttattgctgtttaaacaggcctttgttgaaaataatcctgccattaaatggtgtcctactccaggctgtgacagagcagtaagactaacgaaacaagggtcaaatacatctggatctgatacactcagcttcccattgctgagagctcctgctgttgattgtggaaaaggacacctcttctgctggttagtataagacaagttggaatcagcctaatcacctttctttccaatagttattaaagactttgcaccttgagtcaggcctttaaattgtagtatacttgatagtattcttcttaatttaagaaatgtgtaagaagtagtaatagttcatatttgttgtgtgcttagtgtgtgccaggcactacaccagctattttttacatattgaattctcccaacaatgctgagttg

SEQ ID NO: 3278 - DNA, 541 bp, Homo sapiens
  MAP TO CHR17.1; EXPRESSED IN HEART, SIGNAL = 0.87; EXPRESSED IN BONE MARROW, SIGNAL = 1.3; EXPRESSED IN ADULT LIVER, SIGNAL = 1.5; EXPRESSED IN FETAL LIVER, SIGNAL = 1.2; EXPRESSED IN HELA, SIGNAL = 0.92; EXPRESSED IN BRAIN, SIGNAL = 1.2; EXPRESSED IN LUNG, SIGNAL = 0.79; SWISSPROT HIT: Q39565, EVALUE 2.00e-09; EST_HUMAN HIT: BE142539.1, EVALUE 2.00e-93; NT HIT: AB040936.1, EVALUE 0.00e+00
agaggccatgaacatgaagcctgagatggtgataaaggacaaagagctggtgcaacggctagagagtgagtggctggcactgctagcatcacctggcgatcacaggggagagggaaaggggaggctcggatgctgacaatggagttgggttaggaggtctctgtcggggttgcggggagtgaaggatgctgttgggaagcagtgtgaagaaacgaaggagattttgtactctcccctgcagcctccatgatccactggacccggcagataaaggagatgctcagtgcccaggagactgtggagacaggagaaaatttaggtcctctggaggagattgagttctggcgcaaccgatgcatggacctgtctggcatcagtaagcagctggtgaagaagggagtgaagcacgttgaatccatcctgcaccttgccaagtcgtcctacttggcgccctttatgaaactggcacagcagatccaggtttgtgagcgaatcaaaggattcaggctcagcaagaagtgggcaatggttgggatgatac

SEQ ID NO: 3279 - DNA, 593 bp, Homo sapiens
  MAP TO AC026803.4; EXPRESSED IN FETAL LIVER, SIGNAL = 0.67; EXPRESSED IN LUNG, SIGNAL = 1.1; EXPRESSED IN HELA, SIGNAL = 0.93; EXPRESSED IN BRAIN, SIGNAL = 0.83; EXPRESSED IN HEART, SIGNAL = 1.1; SWISSPROT HIT: P13807, EVALUE 2.00e-24; EST_HUMAN HIT: BG753499.1, EVALUE 0.00e+00; NT HIT: Z33633.1, EVALUE 0.00e+00
gcctttccagagcacttcacctacgagcccaacgaggcggatgcggtgagtggaccctggatttctgcttagccaggagctaaagggctgggcttcggtggggtgggggtccctcctggagtgggaaggcctagaggtggctggatgcctgggtgggactgtgaggtcctcagctcaccctggtttgcacccacatcgccgtatgcaggcccaggggtaccgctacccacggccagcctcggtgccaccgtcgccctcgctgtcacgacactccagcccgcaccagagtgaggacgaggaggatccccggaacgggccgctggaggaagacggcgagcgctacgatgaggacgaggaggccgccaaggaccggcgcaacatccgtgcaccagagtggccgcgccgagcgtcctgcacctcctccaccagcggcagcaagcgcaactctgtggacacggccacctccagctcactcagcaccccgagcgagcccctcagccccaccagctccctgggcgaggagcgtaactaagtccgccccaccacactccccgcctgtcctgcctctctgctccagagagaggatgcagagg

SEQ ID NO: 3280 - DNA, 593 bp, Homo sapiens
  MAP TO CHR19.1; EXPRESSED IN BRAIN, SIGNAL = 0.92; EXPRESSED IN HEART, SIGNAL = 0.96; EXPRESSED IN BONE MARROW, SIGNAL = 0.96; EXPRESSED IN FETAL LIVER, SIGNAL = 0.72; EXPRESSED IN LUNG, SIGNAL = 0.78; EST_HUMAN HIT: BG010301.1, EVALUE 0.00e+00; NT HIT: AF117757.1, EVALUE 1.40e-01
gagggccagggttctctaagtatgtcagggatcaaaagtgggaaactgggaaaatgcaacttcaacgtgttttgtcttttaacggaacttatgcttgtaaaacacatcagaagtacagtgtttggttctgcaagtcatttctgttgttgttttttccttgttacgtggaggccggggggactgggggctggaggaggtgttccctccaacatgactgggcgtgtaacacgtttgcatcaacttttcacagtcagacatgtgctttcgaacaaaggagcagtggagacaggcagagatgggggcttgacacagtttacagattttgtgcttcaacagtactttacaaatgacttgctcaattttaacgtccatcaccacaagagacattggagtaaaatgagaaaattggagctacttgaaccaatcttttttggggagtgggggggaggggaaccattaatttgaatacctgcatcataaatcaaatccagtaagcttgtctcctacaaatggacttgaagtatccactttcttcaaagatgaaggctggagacaaagcaatggattgaaatggaaagaaggatgccaagggt

SEQ ID NO: 3281 - DNA, 538 bp, Homo sapiens
  MAP TO CHR17.1; EXPRESSED IN ADULT LIVER, SIGNAL = 1.5; EXPRESSED IN FETAL LIVER, SIGNAL = 1.1; EXPRESSED IN BRAIN, SIGNAL = 1.1; EXPRESSED IN LUNG, SIGNAL = 1.2; EXPRESSED IN BONE MARROW, SIGNAL = 1.9; SWISSPROT HIT: O15550, EVALUE 1.00e-44; EST_HUMAN HIT: AA158658.1, EVALUE 1.00e-67; NT HIT: gi15310403, EVALUE 1.00e-102
caggccaccaggagaataacaacttctgctctgtcaacatcaacattggcccaggcgactgcgagtggttcgcggtgcacgagcactactgggagaccatcagcgctttctgtgatcggtgcgtgccgtcctgcgcaagtcagactgccgcgtccccgccctcggtccccagttcccacctgacctgtggccaccccgcaggcacggcgtggactacttgacgggttcctggtggccaatcctggatgatctctatgcatccaatattcctgtgtaccgcttcgtgcagcgacccggagacctcgtgtggattaatgcggggactgtgcactgggtgcaggccaccggctggtgcaacaacattgcctggaacgtggggcccctcaccggtgagagggtggggcaggtgttggcgtggtgtggcgcctcagcggcaagggcctgggaggctggggcttggagagccgccagcagtgagggaaggggcttgggcctaggtgtctgggggctgtttgagagtcctgttgtgatcgccttt

SEQ ID NO: 3282 - DNA, 566 bp, Homo sapiens
  MAP TO CHR6.1; EXPRESSED IN BONE MARROW, SIGNAL = 0.82; EXPRESSED IN LUNG, SIGNAL = 0.57; EXPRESSED IN HELA, SIGNAL = 0.49; EXPRESSED IN BRAIN, SIGNAL = 0.79; EXPRESSED IN HEART, SIGNAL = 0.61; NT HIT: Z99708.1, EVALUE 1.40e-01; SWISSPROT HIT: P27793, EVALUE 5.40e+00; EST_HUMAN HIT: AI583880.1, EVALUE 7.90e-01
cagagcaggaggcaggtaagtactctcacccaatcagcacaatcaatttgtcattccctgaaaatagagtcgtccctccagtctgtccaggtcggtggggatagagaggaaggcccagctgcctttgagcaatgccacattccagtggggagtggttcccccacattcaccgcactagggcgggcgtgttgtgcctcgtgcctgcagccacccttgaagtgttgttgttaaacaacagtcatgaactctggaatgtctctggtcatttatagcgtgactgtgtcactctgtaaatgacactgtcaagcttcaaggcctagaatgaagttggtttgcttttcaatagatcatagtcccgcccaaaacaaagcttccaggcttttacaatgtacttcttactctgaaactcctaagagaatagaaatgctagggagataaaatacaggaatagactacaaatcacactccagtcatcttacaggccctttaaaacacatagaacaatttgaccatactatttgcaaataagcagctttctggaaattagctgggctcttcttaaagca

SEQ ID NO: 3283 - DNA, 558 bp, Homo sapiens
  MAP TO CHR10.1; EXPRESSED IN BRAIN, SIGNAL = 0.61; EXPRESSED IN BONE MARROW, SIGNAL = 0.71; NT HIT: gi13386415, EVALUE 3.40e-02; SWISSPROT HIT: P27935, EVALUE 2.40e+00; EST_HUMAN HIT: BF823018.1, EVALUE 0.00e+00
caggccactccctatttctgatagccctagagttttgttgattgactctcggatgtgtttattttccagacccaggttcctgtcatggctaggggtggctgttggcctcgtccttaccctccactgggaatgtctttgtcttatgcacgtagtctgccttgttgttgcaaataacatttctgctataatcacaggatgccccggcttcttcactccattcgacgtaaccccttcccacgagctccaccttcactatggggtccaccagggtgctgttcagggttaagatcacctgcccttttatgctggagccagccaggtagattctatcctcgggcagcactaattcgatcgacttcaccacagacatggggggttggggggtagagagacattcctctctgtcccccatgtccctgaaattcccggttcgttggccctagtgaggtaatccatctatgacatcactcagctcagagttccgggaagtggggaccccagtggccaggaggggaggcaaaactgttgtttagggtgggtggttgattgggaaacctg

SEQ ID NO: 3284 - DNA, 547 bp, Homo sapiens
  MAP TO CHRX.1; EXPRESSED IN FETAL LIVER, SIGNAL = 0.88; EXPRESSED IN LUNG, SIGNAL = 0.99; EXPRESSED IN BRAIN, SIGNAL = 0.77; EST_HUMAN HIT: BE409327.1, EVALUE 0.00e+00; SWISSPROT HIT: Q15274, EVALUE 5.90e-01
agccaagcgtagtggagaactggctgcgcgccggttgccagggacgcggcagccagcttggcggggctggggtgaaagaggacgctgcgtgggggagggctccgcggcttctgactggctggagcatcaggattcatttgcataatattttctgacggcttctgattggctgaagccagaggggcggtggtggggtgattccaagggcccagagctctggccggcggaccttttccttctggagtttccccggcgggtgtgagttgttgcggggtctgggggagctgggaggcccggtttgggaagttttgcaggcaggtgcatgagccatctttctctgaaagtgtttaagaaatgttcaagaacagcggccagagtcaagaaactgggggatgaagggttatctcgagactagacggaaggaaacgtatcaggggaggggtggaggccagaaggaaggagttaggtaggggccctctcccaagctggcgtttttgctgggtggaatccttttgctagatcccttggatttccgttttccgtgtgt

SEQ ID NO: 3285 - DNA, 580 bp, Homo sapiens
  MAP TO CHR4.1; EXPRESSED IN BRAIN, SIGNAL = 0.72; EXPRESSED IN BONE MARROW, SIGNAL = 0.67; EXPRESSED IN HEART, SIGNAL = 0.43; EST_HUMAN HIT: T75122.1, EVALUE 8.20e-01; NT HIT: X55272.1, EVALUE 3.00e-21; SWISSPROT HIT: P23574, EVALUE 3.00e-25
ggttatgggtctcaagcgtccctatttctgtaaacaaacacataaatattcaaaagagtatctctaagtaagttgaggtttataaaatagaaatttttctttttaacataccgaggctttattttttagctttctgtctttagtagcagtctttcctttttggttgctggtaaaataatgcaaggttccatattccatcaaggctgcaaaaacaaaaatgaaacaaacagaaacaaagagatccatcgcagtcacataagaaaccttaggtaaagacttcctggcaattgtactcagggttgtcatagtcagaactgtagtgatacctatagagagaggaaacaaaacaggaaatgaaaattaatagaccacatttattcttccatctgatttggcaatattgtgagtgaaattaaacaatagaaacaaaaatatgattactagtaatttatattaataattattggtagccatagcaacattgtgtccaatgtgctctttgtgtttctgtgagttctaatcatttaaattactgcggagtgcaagttgactcctgatatccattcttcccttcctccat

SEQ ID NO: 3286 - DNA, 566 bp, Homo sapiens
  MAP TO CHR14.1; EXPRESSED IN BONE MARROW, SIGNAL = 0.82; EXPRESSED IN LUNG, SIGNAL = 0.89; EXPRESSED IN BRAIN, SIGNAL = 0.81; EXPRESSED IN HEART, SIGNAL = 0.86; EXPRESSED IN ADULT LIVER, SIGNAL = 0.88; EST_HUMAN HIT: BF093217.1, EVALUE 2.00e-81; NT HIT: gi4759015, EVALUE 2.00e-59; SWISSPROT HIT: Q92696, EVALUE 6.00e-06
gttgtccaggctccactttcctagtccttcccaacacattagttttatcacatcaccacagcccacctccattcctgccaaactcatctctgcctcatcaggaccagtccccatgggggaccagtctttgtttacccagcaccctccactggcccctgtacctccgaactccaggcctcctcctcctcacccaccccactggttaccccactcgcagcactgtctgtcccacgtcatgtactgctgtgggctgtaaggtcagcttcccacatgctcccatcctcttcttggctggggtccccaagggcctgtggggcacagagggcatgtgcctaataaatgctggccgaggaccctctcccaggtctcctgggaagcccatcacctccttcctcccttcaccccccaggatctgacagtgctctgccatctggaacagctgctcttggtcacccatcttgacttgtcacacaatcgcctccgaaccctgccacctgcactggctgccctgcgctgccttgaggtaaagtacccatgtctccgtccctgtcacgggtggttctttt

SEQ ID NO: 3287 - DNA, 570 bp, Homo sapiens
  MAP TO CHRX.1; EXPRESSED IN BRAIN, SIGNAL = 1.2; EXPRESSED IN HEART, SIGNAL = 0.99; EXPRESSED IN ADULT LIVER, SIGNAL = 0.96; EXPRESSED IN FETAL LIVER, SIGNAL = 0.81; EXPRESSED IN LUNG, SIGNAL = 1.4; SWISSPROT HIT: P40631, EVALUE 1.90e-02; EST_HUMAN HIT: BF526977.1, EVALUE 0.00e+00; NT HIT: gi14767910, EVALUE 0.00e+00
gctcccatgtgagactttccagacctattcaggaccatatagtatttcacaagtagtggaaaaccagttacctcattgcttaccagctcatgatagcaaacagagactagattctattagctactgtcaactcaccagagactgtttcccagaaaaaccagtacccttgagccttaatcagcaagaaaataactctggctcatacagtgtagaatctgaagtttacaagcacctctcttcagaaaacaatactgctgaccatcaagcaggtcataaacagaaacatcagaagagaaaacgacacctagaagaaggcaaagaaaggccagagaaagagcagtccaagcataaaaggaaaaagagttatgaagatacagatttagacaaagacaagagcatcagacaaaggaaaagagaggaggatagagtcaaggtcagttcaggaaagcttaagcatcgaaaaaagaaaaaaagccatgatgtaccctccgagaaagaagaacgtaagcacaggaaagagaaaaagaaatctgttgaagaaaggacagaagaggaaatgctttgggatga

SEQ ID NO: 3288 - DNA, 566 bp, Homo sapiens
  MAP TO CHR7.1; EXPRESSED IN LUNG, SIGNAL = 0.65; EXPRESSED IN HELA, SIGNAL = 0.61; EXPRESSED IN BRAIN, SIGNAL = 0.66; EXPRESSED IN HEART, SIGNAL = 0.7; EXPRESSED IN ADULT LIVER, SIGNAL = 0.8; EXPRESSED IN FETAL LIVER, SIGNAL = 0.62; SWISSPROT HIT: Q62158, EVALUE 1.00e-16; EST_HUMAN HIT: BI524007.1, EVALUE 0.00e+00; NT HIT: gi9629818, EVALUE 1.40e-01
tgcagggaaatcgaggatagctggatccgttttggtgccagttgatagcgccagagagcacaggatccagtccccgcgggccccgccgccccgcctgcaccctcactccccaccttcatgcggctgcagacggtggagacgggcgtgaccgggtggtgttggtgggagcccagcagaccgcagaggccacagatgagctcctggtccttctcgcagaaaaggctgagcgggttccggtggtgcacgcagaccttgggctccgggtccccagggagcctcagggcttcgatcacccaggccagggagacgttgggcaaggagctgctgccgtccaccacctgccagcacatggggcagcgcaccttggtgtccaggtggtaggacagggaaaccaggcagcccttgcagtaggagtggccgcactgtagcattagggactccttgaagacctccaggctgatgggacactgaagccggtcctccagctccagcaggctcacctgccaagccatccacactcactgcccgggctgaaacacaggcatccgacctcagtcctgtccact

SEQ ID NO: 3289 - DNA, 586 bp, Homo sapiens
  MAP TO CHR9.1; EXPRESSED IN BONE MARROW, SIGNAL = 0.49; EXPRESSED IN BRAIN, SIGNAL = 0.53; SWISSPROT HIT: P16157, EVALUE 1.00e-07; EST_HUMAN HIT: BG575022.1, EVALUE 1.00e-107; NT HIT: AF084375.1, EVALUE 0.00e+00
aagggggactgattcctagccagtccaatttacaagcttattgtaaaaatctgatgtagacaacgtatgtggaagcatttccataagaataaagcattaaaggaacaattgttattgtttttcttctattcattttaataaatgcatttaaggaacaattgttttttctactcctactcattttaataaaagctatttatattagacattctcattatatttgtgcttttccaggtggagcaagggtagatctagttgaccaagatggacattctcttctacattgggcagcactgggaggaaatgctgatgtttgccagatattaatagaaaataagatcaatccaaatgtccaggattatgcaggaagaacccctttgcagtgtgcagcatatggaggctatatcaactgcatggcagttctcatggaaaacaatgcagaccctaacattcaagacaaagaggtagaaattctgtcttttctatattgtttgctccaaagaatttagagtatttcttctttgttgtaaacataagtaaaacaacagtttacaagatgaagagatcacccacaaatccatctgtt

SEQ ID NO: 3290 - DNA, 536 bp, Homo sapiens
  MAP TO CHR16.1; EXPRESSED IN BRAIN, SIGNAL = 0.66; EXPRESSED IN LUNG, SIGNAL = 0.7; EXPRESSED IN BONE MARROW, SIGNAL = 0.61; EXPRESSED IN ADULT LIVER, SIGNAL = 0.8; SWISSPROT HIT: P50896, EVALUE 3.80e+00; EST_HUMAN HIT: BE888313.1, EVALUE 1.90e-01; NT HIT: AF124051.1, EVALUE 8.00e-03
tacctgcccacttctgatccccagattgtctccaactctgcacctcagacatgatgtggtaaatatctttgtatcccttatcagtgcatccctatgagaatttctttgggaacacacatacacacacacacgagtagaatttgtgagtcacaaaatgcatagttttaattatatataaggccagattacttgttattcagaacagctgtacgattctgtatcactatcagtagcacgtgaggatagaacctccagtatgttttcagagggtaactttggtgtttcatggacgaatgtggccatgagaagctggtgacaccagtgagtaggcgcatccagaaaacactttactgagcacagtgagttcattaatttattcattcactaatcagtggagggcctgctgtgtttgtgggcctgaggacacaaaagaggagtaagtttagttcctattgcaagtatatagaaggtgcagagggaggagctcctgggggggtacagtcagaaaagatttacagaggagggaagatgtaggg

SEQ ID NO: 3291 - DNA, 556 bp, Homo sapiens
  MAP TO CHR19.1; EXPRESSED IN FETAL LIVER, SIGNAL = 0.76; EXPRESSED IN LUNG, SIGNAL = 1.1; EXPRESSED IN HELA, SIGNAL = 0.48; EXPRESSED IN BRAIN, SIGNAL = 0.71; EXPRESSED IN HEART, SIGNAL = 0.75; EXPRESSED IN ADULT LIVER, SIGNAL = 0.7; EXPRESSED IN BONE MARROW, SIGNAL = 0.76; SWISSPROT HIT: P19526, EVALUE 1.00e-109; EST_HUMAN HIT: AL046138.2, EVALUE 1.00e-24; NT HIT: gi11425196, EVALUE 0.00e+00
agatccgcagagagttcaccctgcacgaccaccttcgggaagaggcgcagagtgtgctgggtcagctccgcctgggccgcacaggggaccgcccgcgcacctttgtcggcgtccacgtgcgccgtggggactatctgcaggttatgcctcagcgctggaagggtgtggtgggcgacagcgcctacctccggcaggccatggactggttccgggcacggcacgaagcccccgttttcgtggtcaccagcaacggcatggagtggtgtaaagaaaacatcgacacctcccagggcgatgtgacgtttgctggcgatggacaggaggctacaccgtggaaagactttgccctgctcacacagtgcaaccacaccattatgaccattggcaccttcggcttctgggctgcctacctggctggcggagacactgtctacctggccaacttcaccctgccagactctgagttcctgaagatctttaagccggaggcggccttcctgcccgagtgggtgggcattaatgcagacttgtctccactctggacattggctaagcc

SEQ ID NO: 3292 - DNA, 559 bp, Homo sapiens
  MAP TO CHR17.1; EXPRESSED IN LUNG, SIGNAL = 0.63; EXPRESSED IN BRAIN, SIGNAL = 0.87; EXPRESSED IN ADULT LIVER, SIGNAL = 1.7; EXPRESSED IN BONE MARROW, SIGNAL = 0.76; EXPRESSED IN FETAL LIVER, SIGNAL = 0.98; NT HIT: gi14773211, EVALUE 1.00e-75; SWISSPROT HIT: Q64536, EVALUE 5.00e-21; EST_HUMAN HIT: BF994055.1, EVALUE 0.00e+00
tgagccccctgttaatgaagggtttagctgacctggccgagacatcctttggctttcatagtctgtggctctgtggctcacccctctttctcctgccaggatccagcaatgcctgtgagaaaacctccttcaccttcctcaggcaggagctgcctgtgcgcctggccaacatcatgaaagagatcaacctgcttcccgaccgagtgctgagcacaccctccgtgcagctggtgcagagctggtgagacccctggctcagtccctgcacctcccactccatcgccagtgtccctgggctcagggatggcatctccaagcttttagcagctttgagggtggggtggggacagacaggagacaccaaagccccaagcgcttggagttgcctagggtcacgtgggaatctgaggccagagcaggactgaggtcaagctcctagtctctgtgtctagccctcttcttaccacccacctttctctggaaacacaggatccacctaggaaagcatggttttcacagccaaaaccccaattcaggctgatgtcagcattagccagca

SEQ ID NO: 3293 - DNA, 500 bp, Homo sapiens
  MAP TO CHR20.1; EXPRESSED IN BONE MARROW, SIGNAL = 1.3; EXPRESSED IN ADULT LIVER, SIGNAL = 3.9; EXPRESSED IN FETAL LIVER, SIGNAL = 3.3; EXPRESSED IN PLACENTA, SIGNAL = 1.7; EXPRESSED IN LUNG, SIGNAL = 1.1; EXPRESSED IN BRAIN, SIGNAL = 1.5; EXPRESSED IN HEART, SIGNAL = 1.3; EST_HUMAN HIT: BF871980.1, EVALUE 8.00e-90; NT HIT: gi16166414, EVALUE 6.00e-90; SWISSPROT HIT: P17858, EVALUE 5.00e-27
tcatcttctccgtcatgtgctccacgttgacctgcgggaggggcggacacggatgagccggaggactgtggggagggaattccaggctgaccggcgatccggggccagcaggagcactgggctacgcgtcccacctgcccgggccctgccctgcgctggccggcctgagtgtctggggcccaggctggcatgccggcaggtctgccgcagcaggggctgggctgggctcacctttaagtcgtggatgttgaaagggtcctcgaagacgtaggcggcgtcggcccccacagcaatgccagtcacggtggccaggtagccacagtaaccccccatggtctccacgatgaacacacggcgcttggtccccgaggcagactgtttgatgcggtcacagctctgggggacaagggggggtcgggggtcctccacgtgcccacccttccctgtaggccgtcggcatggctaccctgcagggagccctgtgtctccaaagccagcct

SEQ ID NO: 3294 - DNA, 578 bp, Homo sapiens
  MAP TO CHR13.1; EXPRESSED IN ADULT LIVER, SIGNAL = 1.5; EXPRESSED IN BONE MARROW, SIGNAL = 1.7; EXPRESSED IN FETAL LIVER, SIGNAL = 1.5; EXPRESSED IN LUNG, SIGNAL = 1.5; EXPRESSED IN HELA, SIGNAL = 1.8; EXPRESSED IN BRAIN, SIGNAL = 1.7; EXPRESSED IN HEART, SIGNAL = 1.5; SWISSPROT HIT: O88935, EVALUE 4.90e-01; EST_HUMAN HIT: BE732429.1, EVALUE 0.00e+00; NT HIT: gi14757710, EVALUE 0.00e+00
ttcctcctcctcttccttccctactcccttaattcttatactccacactccacgtctgcctctccccccttccctactttcctctgcactcttcctccacctgccttatctgctttgaaggggaaaacaaataaaagttagattattcgttatatagaggtggagctgggaggaactggatgcccagctacttccatctggcaccttttggggcaagggcagacagcgtccgatcaggtgtacctggaagagcatggtcctgttcttctccgagtccgagggctggacgtgactgggtgcgctcgcgtgtctccgtcgcggctgggatttctggctgccctcgtgaactctccgttgcacgccggtgacactgctgcaccgagaccgaaactcctgctgctcatcaaagccagaatcttccaaaatccgctcagggaagcagacccgagagctggtcagggcaggctggctggccccggcaggtaagccaaggtgggtgtcggtgccgtcagcctcctccggcaggcagtctccgggggacccgggcaccaccacctccaagtcagccaggtcctctc

SEQ ID NO: 3295 - DNA, 531 bp, Homo sapiens
  MAP TO CHR19.1; EXPRESSED IN LUNG, SIGNAL = 1.3; EXPRESSED IN FETAL LIVER, SIGNAL = 0.88; EXPRESSED IN BRAIN, SIGNAL = 0.92; EXPRESSED IN HEART, SIGNAL = 0.86; EXPRESSED IN ADULT LIVER, SIGNAL = 0.83; SWISSPROT HIT: P07318, EVALUE 3.00e-03; EST_HUMAN HIT: BI090562.1, EVALUE 0.00e+00; NT HIT: gi16163266, EVALUE 0.00e+00
ccattgttgggttgaccttcttagccatgtgacatctgttccaggtctccctcctgctgtgctcccatctctaagggtggaaactcaccagcactgttggcctccgactccagcaggtggatgtcattgcagtccgccagtgagtgctccaggcagagctgcaggaagcgggcctgggtacgggtgacccgtttcagaagtgacaggagggccactgtctgctcacactcattccagcctttgaaccagccagcgaggatgcccacctggtctcggaacatcatggtgccgggcctggggccagggtcgggggacggcggtggcgagggccagcgccgtcacatggtcccggctctggcctcctgttacctttcccctgagggccagggcttaaggacgtttctgggcgtggtggcaacggttgttgggggaggaggaagcctgctcacatggggggaggtcttggtccagccacgcctctccagtttcctgaaaaaggaagcaaaggggtcaaacagaaagaaggggctg

SEQ ID NO: 3296 - DNA, 556 bp, Homo sapiens
  MAP TO CHRX.1; EXPRESSED IN BRAIN, SIGNAL = 4.9; EXPRESSED IN BONE MARROW, SIGNAL =   5; EXPRESSED IN HEART, SIGNAL = 2.5; EXPRESSED IN ADULT LIVER, SIGNAL = 6.1; EXPRESSED IN FETAL LIVER, SIGNAL = 3.9; EXPRESSED IN HELA, SIGNAL = 4.5; EXPRESSED IN LUNG, SIGNAL = 2.1; SWISSPROT HIT: P11938, EVALUE 1.00e+00; NT HIT: Z37510.1, EVALUE 5.30e-01
tgagatgaggaatatggtggcttgaagaatgtaatatcttagaggacacagagtgtgtttcatgtgtatctttccatcatctagcatgtgtgtactcccaacgaatattaaaaaatagggtgtgaccctcttaaccataagagatgattcctcattttgagatgacgtgctctgggaataaagaatgcttccttcattttccgtgactgtcaaactggcatctttcatcagcactaaattcccttttaagtagtcaaatgccttacacagttttaacaggaaatctctcagcacctctagctatttgttgaaaagaaaacaactcttttttttagatacatcttgcagaaaaccatttcccaaataaaaatttaaaagtgttatcatatttagagggaaagaaataagcccctgaatcatagtgccagtttcatgttttccttaatgttgcaaaggtgattatttttgccataatcttcttctggctgttagcccaggatggcaggctgcatagctgccttgttaaataaaagagaggggagactttcttgaagcc

SEQ ID NO: 3297 - DNA, 513 bp, Homo sapiens
  MAP TO CHR19.1; EXPRESSED IN BRAIN, SIGNAL = 0.35; EXPRESSED IN HEART, SIGNAL = 0.61; NT HIT: gi14755934, EVALUE 0.00e+00; SWISSPROT HIT: P34804, EVALUE 4.80e-02; EST_HUMAN HIT: BF439795.1, EVALUE 0.00e+00
gcttggctcaaaattccaagggagctcataactccatggggcccagagttcctggctcgggaacattgggaggcctgggatacagtgccttagcctcaagcagaaaagtgaacacaatatctttatggcttgaaggtatatgaaataatgtcactacatcggagcagcgcctctgcttgcacacctatgggagtctgcagctgtgacacgtagaagttggccacatccaggtcggtggctccaaagtgggcggccacacgcacaccctcgtgcaacgtgaagctcacctgatgacccaccatggccagcaggctgcggaggtaacgctcccgaagggcggctcgtgcccgctgctcctgggattccagggattcttgagctatgggacactcctggatttcaggaacctctggcctcaagggggctctgcgtccatcaggggcaaagccacggctgaagccatcagggccccggggcagccggagcacaggcacgggaatgttcactggagtt

SEQ ID NO: 3298 - DNA, 596 bp, Homo sapiens
  MAP TO CHR3.1; EXPRESSED IN ADULT LIVER, SIGNAL = 3.9; EXPRESSED IN BONE MARROW, SIGNAL = 2.9; EXPRESSED IN PLACENTA, SIGNAL =   3; EXPRESSED IN HELA, SIGNAL = 3.6; EXPRESSED IN BRAIN, SIGNAL = 3.1; EXPRESSED IN LUNG, SIGNAL = 1.8; SWISSPROT HIT: P37238, EVALUE 5.00e-31; EST_HUMAN HIT: BF514811.1, EVALUE 0.00e+00; NT HIT: AB005524.1, EVALUE 0.00e+00
gagggcttctactgtgtgggaacgagggctgggagagcacagtgtgtgttcagagcagtagtaatccaatgattcatcctgtcattcctcttcctctatagccatcaggtttgggcggatgccacaggccgagaaggagaagctgttggcggagatctccagtgatatcgaccagctgaatccagagtccgctgacctccgggccctggcaaaacatttgtatgactcatacataaagtccttcccgctgaccaaagcaaaggcgagggcgatcttgacaggaaagacaacagacaaatcagttagttctcttctgctgtcttcattgggggaggcgggaagttgttttgggtttttgtttctttgagtaaatggtttactgcgctacaaatgcacacacagaatattgttcaactgttggctgttaacatattgcaggctgagtctgaaacgcaggaagtgttttcagatagcacaagtcaacattattttgaaaagggagaaaagtccataaagtttttgagaatagtgtaacaatgtattggtcatcctaactttaatgaatgaacttaagccccctgagcctatcaccctct

SEQ ID NO: 3299 - DNA, 598 bp, Homo sapiens
  MAP TO CHR2.1; EXPRESSED IN BRAIN, SIGNAL = 1.7; EXPRESSED IN HEART, SIGNAL = 3.4; EXPRESSED IN ADULT LIVER, SIGNAL = 9.5; SWISSPROT HIT: P19945, EVALUE 3.00e-95; EST_HUMAN HIT: BI912445.1, EVALUE 0.00e+00; NT HIT: gi13637300, EVALUE 0.00e+00
catcgtctttaaaccctgcgtggcaatccctgacgcaccgccgtgatgcccagggaagacagggcgacctggaagtccaactacttccttaagatcatccaactattggatgattatccaaaatgtttcatcgtgggagcagacaatgtgggctccaagcagatgcagcagatccgcatgtcccttcgcgggaaggtcgtggtgctgatgggcaagaacaccatgatgcgcaaggccatccgagggcacctggaaaacaacccagctctggagaaactgctgcctcatatctgggggaatgtgggctttgtgttcaccaaggaggacctcactgagatcagggacatgttgctggccaataaggtgccagctgctgcccgtgctggtgccattgccccatgtgaagtcactgtgccagcccagaacactggtctcgggcccgagaagacctcctttttccaggctttaggtatcaccactaaaatctccaggggcaccattgaaatcctgagtgatgtgcagctgatcaagactggagacaaagtgggagccagcgaagccacgctgctgaacatgctcaacatctcccccttctcct

SEQ ID NO: 3300 - DNA, 537 bp, Homo sapiens
  MAP TO CHR12.1; EXPRESSED IN ADULT LIVER, SIGNAL = 0.91; EXPRESSED IN BONE MARROW, SIGNAL = 0.99; EXPRESSED IN FETAL LIVER, SIGNAL = 0.88; EXPRESSED IN LUNG, SIGNAL = 0.98; EXPRESSED IN HELA, SIGNAL = 0.64; EXPRESSED IN BRAIN, SIGNAL = 0.99; SWISSPROT HIT: P04628, EVALUE 1.00e-29; EST_HUMAN HIT: AA070024.1, EVALUE 7.50e-01; NT HIT: X03072.1, EVALUE 0.00e+00
ttctctccagccacatacccccaggaagaggaccgggtggcacagtttttatggttagggtgcggatccccttcctgagcctgagctatcatacgtcccaccaggggtattgtgaacgtagcctcctccacgaacctgcttacagactccaagagtctgcaactggtactcgagcccagtctgcagctgttgagccgcaaacagcggcgtctgatacgccaaaatccggggatcctgcacagcgtgagtggggggctgcagagtgccgtgcgcgagtgcaagtggcagttccggaatcgccgctggaactgtcccactgctccagggccccacctcttcggcaagatcgtcaaccgaggtgggtgcccaggaaggcgacgcttccgggagcaggggaaacgcggggtcacccccagggcatgggcgggcgagttcagagaaggtgtcccaggcgcctggagggtcacacaatcaaccttgccaagtgcctcgtgcccagcgccagctcggggccagacttctaccaggcgttttcca

SEQ ID NO: 3301 - DNA, 543 bp, Homo sapiens
  MAP TO CHR1.1; EXPRESSED IN BRAIN, SIGNAL = 0.33; EXPRESSED IN HEART, SIGNAL = 0.57; SWISSPROT HIT: O94855, EVALUE 4.00e-02; EST_HUMAN HIT: BF513140.1, EVALUE 3.00e+00; NT HIT: AJ298300.1, EVALUE 2.00e-03
cacagattcagagctgtggcttataaggggcagggacagcacccaaagcaggactgtgtgactcaaagtcgtgcctcttcgacatgtcacctcaggggcaggagggagagcagaagcagggaaacccagacagaggacaggggtagcagccagccagcttccctggtccaccccacccggtccccaaagccccaagtaatacaaaggaggctcagtcccagcaatgcccacagctcgagtttgggcaggctgccttcctccccccttcctcctaggcctgccagcaacactgggtcactcagcccccggcaggggacaatgaccacactgtagggagccatacatctaccacagcacagtgactgagaagaatccaccagggaatcacctccacccactctggaacagccccttcctccctcagtccagctcacccgcatgccctgcccacccctccctgtgactcagggcaaggagtcagcttcccgggcttccatgtgtcccccacccccagcacacacagcgagcatctgcacagttcat

SEQ ID NO: 3302 - DNA, 586 bp, Homo sapiens
  MAP TO CHRX.1; EXPRESSED IN ADULT LIVER, SIGNAL = 1.1; EXPRESSED IN BONE MARROW, SIGNAL = 0.86; EXPRESSED IN HELA, SIGNAL = 0.77; EXPRESSED IN BRAIN, SIGNAL = 0.87; EST_HUMAN HIT: H94427.1, EVALUE 2.10e-01; NT HIT: gi13649009, EVALUE 0.00e+00
tttctgcttcctgctcttcccttccttccccctcttcctcctttgctcttctgtctacagaaaatactcaaagtacctatcgggtgaatccagatggttccctgcgtgtcacttttgccagcgggatggagatcggcctcagctcagagccccacatcctggcaggggcagtcaaccctaccctgggcaaatgcaacatctcattgcccggagagcacaatgcaaacctcatcgagtggcggcagaggaaggagcaaaacaaaggcaatgtttcggcttttgaaaggaggctgagggtaaggcttgactttacacaagatatagaacttttataggtgttttgtttgtttgtttgtttgtttgtttgtttgtttaactgcagagcctccctaaactgaagtcccatttctccaaagcttttctaagtgactgactggcttatatgatatactaattcaaaagaggatgctaatggccgataatggttcagtatccttaaatgagcattctaataggagctttctttgtcattagccagctaaagtgctctaatagtagcaatttcaccaagaaagtctggctggag

SEQ ID NO: 3303 - DNA, 549 bp, Homo sapiens
  MAP TO CHR5.1; EXPRESSED IN FETAL LIVER, SIGNAL = 0.62; EXPRESSED IN HELA, SIGNAL = 0.76; EXPRESSED IN BRAIN, SIGNAL = 0.76; EXPRESSED IN BONE MARROW, SIGNAL = 0.82; EXPRESSED IN ADULT LIVER, SIGNAL = 0.73; EST_HUMAN HIT: BE218418.1, EVALUE 1.00e-120; NT HIT: AF260225.1, EVALUE 1.30e-01
tggatacaggcagagggaagaagagaaagggatatttattctttgttatttatttattttcaacaataaaagttctgattgtggaaaaaatatctagctgattataggaatttaataaagaaaccaaaacaaattagtcttatagctgatgatagtattggcctacattattgtcatacactgaattctgagttatcaggccaaatatgtggacttggcaaagatgagacttactgttaattgttccagctctccaaactggatgtgactggcaccagtggctatatgagtgaatatagaagctgaaatccacattatgttaactttggttctattccaccaaaatattttattccagagatatgtaagatgaagcttttccagggcagagatcatgatcatatcgcctagcacagtgcctgacccataatagctgcccaagaaatatgtgttgaataaataaatggcacaaaggttattctgggttgctaagatcagaacagtatttgccattattttggaggttggcgtgggatttgtacaccctgg

SEQ ID NO: 3304 - DNA, 570 bp, Homo sapiens
  MAP TO CHRX.1; EXPRESSED IN FETAL LIVER, SIGNAL = 0.63; EXPRESSED IN BRAIN, SIGNAL = 0.99; EXPRESSED IN BONE MARROW, SIGNAL = 0.78; SWISSPROT HIT: Q16720, EVALUE 9.00e-24; EST_HUMAN HIT: AW611841.1, EVALUE 9.00e-10; NT HIT: U82695.2, EVALUE 0.00e+00
gaaggaggaagaggaatggggcttgagatgagggacggtcacaggatggtgatgtctcctccactgcttcccttctgtcctccgcacagcctgtgggaatgtgtcgggaggcgcagaagatgagggcgaggccgaagctggctggatcgagggggctgccatcctgctgtccgtcatctgtgtggtgctggtcacggccttcaatgactggagcaaggagaagcagttccgaggcctgcagagccgaattgagcaggagcagaagttcacggtcatccggaacgggcagctcctccaggtccccgtggctgcgctggtggtgggggacattgcccaggtcaagtacggtgagtgccctggtcttcacccaccctgtcaaggaagctcggctcctgcttctggggagggtgagccagaggagacccccagcacaggttctccccggtggcctgcgtgtcgtcacctgccttaggcgggaggtggcgggggtgggggaggtgggggaacacggggcagggcagagtggtttcagacacagcaggcccccgaagaatcaactgtccccacagc

SEQ ID NO: 3305 - DNA, 573 bp, Homo sapiens
  MAP TO CHR19.1; EXPRESSED IN FETAL LIVER, SIGNAL = 0.84; EXPRESSED IN LUNG, SIGNAL = 0.91; EXPRESSED IN BRAIN, SIGNAL = 1.1; EXPRESSED IN HEART, SIGNAL = 1.1; EXPRESSED IN BONE MARROW, SIGNAL = 1.3; SWISSPROT HIT: P29463, EVALUE 1.90e+00; EST_HUMAN HIT: BF364482.1, EVALUE 8.10e-01; NT HIT: AB031010.1, EVALUE 1.40e-01
attttctcaaagcagcacggctccagggcctgctctaaaggtctggcctttctctttgaaaatgttttctcctgtaattaagggattttctaacttgagcaatagattaaaattcatcaaaattatattttcagaaagccataaacctgaagctactaaggtctggctccaggaaatcctgaatccaggaaggatgctcagcgggacagaattgaagacaatagttcatcatctttccttcccaggatcgagaatatcccaaggaaatgccaagtaaaaaagtaaaatcagcgattgattttgcgtttggagaactgaccacgtttcttgatcaaatgccgattgcaagtctgagtcaaggttgagcatataaaggaatcctcccgggtacctccccttggggtcttcacatgatgtgattttgaaaaaccagactcgggcgatcagagacctcactgcggaggaaatgaaggatgcctcgcttccaatacctggctcccatgaacactccctcgggtccctgctagcgccagcctgagacagagagcgcttcctgtcctgctgactgcagaa

SEQ ID NO: 3306 - DNA, 518 bp, Homo sapiens
  MAP TO CHR6.1; EXPRESSED IN HELA, SIGNAL = 0.61; EXPRESSED IN BRAIN, SIGNAL = 0.68; EXPRESSED IN BONE MARROW, SIGNAL = 0.74; EXPRESSED IN ADULT LIVER, SIGNAL = 0.67; NT HIT: AF336797.2, EVALUE 4.90e-01; SWISSPROT HIT: Q9QXQ7, EVALUE 2.10e+00; EST_HUMAN HIT: AW948409.1, EVALUE 1.80e-01
ttgatctccaggcttcttgggtaaattaaatggcaggtacacaaagaggtgagggacaggagtgtggcagcagcttcagaactcttgctctgttagcatgaggttctaacaaagccataggtacctgggctgccccacatccccagagccaaggctttggagccagttgccttctccgggtgaggcatgcaccctctgctgagtcaccttgatgtatggccctcctcatggctgtatctgtcagatctcaggaactaaaagcaagaggagggcttggtttaaacttggctggaagacccaggaatgataataataattaacacagctcaacttccacttgcgctataaacaataattaatgtacacagtggcccactgagacatctaagtttggattatgagtcttgttttgcagacagggaaactgaggccaggaggttaactgacttgtaaaggccacacagggactcagtattatacctgaaattaaaatctgggcttccctgccttctgatctg

SEQ ID NO: 3307 - DNA, 587 bp, Homo sapiens
  MAP TO CHRX.1; EXPRESSED IN BRAIN, SIGNAL = 0.62; EXPRESSED IN LUNG, SIGNAL = 0.7; EXPRESSED IN HEART, SIGNAL = 0.74; EXPRESSED IN BONE MARROW, SIGNAL = 0.69; EXPRESSED IN FETAL LIVER, SIGNAL = 1.3; EXPRESSED IN HELA, SIGNAL = 0.57; NT HIT: gi14764091, EVALUE 7.00e-96; SWISSPROT HIT: Q93008, EVALUE 2.00e-29; EST_HUMAN HIT: AU140296.1, EVALUE 1.00e-95
aaaagccccacagcagtaaggtatgcaaagtatataaatcattctgtttcaggtatttagtaatcagtgatatactccacttttgtatgtaagtactagtaaaaattttatttctgttagtatatacatggtacaacatatactttcaatgtgtaattagtacttacctatgtgggcagccttggcagatcttctgatcagcaaaggaacctcctaagactttacttagcatagctggatgtcctaaagcttttaaagcttcatctaaactatccaccaatgaattaaaaaattctaaagcatcgtgttgttcacgcagattaacaggctcaccccaaagcctaagaaatgaatgaaataaaacatgtaacatgtaacattcacagaacaatatgtacaactatatttttcaggggaaaaaaaagcaacaagaccacaaacaacagtatataaaaccgagattttattcctcaattacatggaaaaagtaggaaaaaaagaatgtgctttccctgtagaatgtagtggggtaagagagtgagcctcatagtaaaactagtactctagcggcaaagaactgccacaaa

SEQ ID NO: 3308 - DNA, 531 bp, Homo sapiens
  MAP TO CHR5.1; EXPRESSED IN HELA, SIGNAL =   1; EXPRESSED IN BRAIN, SIGNAL =   1; EXPRESSED IN HEART, SIGNAL = 1.1; EXPRESSED IN BONE MARROW, SIGNAL = 1.2; EXPRESSED IN FETAL LIVER, SIGNAL = 0.87; EXPRESSED IN LUNG, SIGNAL = 0.95; NT HIT: AF048728.1, EVALUE 5.00e-01; SWISSPROT HIT: P53638, EVALUE 3.80e+00
ctcactgagccccacttagccgagtggcgtggcccatggcctccagtggtttctatgcattcgtttacttgcgttttccttcctccactttgaggtgaacgcccctcaggacaggatgtttttagaggaaaatataagcttccgggagctgctgcaactgagctgctagttgatgctaccaacacagcctggagactacacagcagccctgagactgggcaacccccagcccaggcagttattcatgcagctccccatcagtgcccagccatccaggagcccaccgtggaccgaggcaaggcacaacctcatagctccgctgtctttggcagtagggaatggaaaacagggatctggggagggaggtgtttgaggagttctgaggctgtttccctgggggctttgcagaaaaggcaggaaaataccaggtgcagatttagagatggcagcccccactagtaacagccaactgagtgtctcagtctgcagagctccacccctgccggaatcccaccagtcttcccaaccact

SEQ ID NO: 3309 - DNA, 519 bp, Homo sapiens
  MAP TO CHR17.1; EXPRESSED IN BONE MARROW, SIGNAL = 0.55; EXPRESSED IN BRAIN, SIGNAL = 0.53; NT HIT: AF276226.1, EVALUE 3.20e-02; SWISSPROT HIT: P28854, EVALUE 6.30e+00; EST_HUMAN HIT: AA994651.1, EVALUE 1.20e-02
cttcatcatcaccgacatgcattgagctctcagatgcatcatccctgtgaacacacaatctttttatttaattctcgcaacaactccattttgtagtcaagtacactggtgttcagacaaacttaaataacactttccagatcgcacatctggtaagcagcagagcccagagctatctgattccttacttttaaccatgctgatctactgtttgtcactattttcagatagagcccatggttccccttactggataacaaatcatttttcctctcttggatgtaacctccccatctacaaaatgagcagtttgtactaaatgatttaagattcctttccaatctaatctgacaaactaatctaatttcagagcagccgcgtggagggaatgtttttgctttgggtttgtatttctgaaataacctgtcttctctcttcccaggagaccagcagtaaatacacagatggataagactcaaaagaacctacaaatcctgtacaatgaaatcacgtggcaag

SEQ ID NO: 3310 - DNA, 561 bp, Homo sapiens
  MAP TO CHR4.1; EXPRESSED IN HELA, SIGNAL = 0.61; EXPRESSED IN BRAIN, SIGNAL = 0.72; EXPRESSED IN BONE MARROW, SIGNAL = 0.73; EXPRESSED IN FETAL LIVER, SIGNAL = 0.69; EST_HUMAN HIT: AW183059.1, EVALUE 0.00e+00; NT HIT: gi14916450, EVALUE 0.00e+00; SWISSPROT HIT: P53301, EVALUE 1.10e+00
atccgtttcagttgtggaggtgtcttccttatagtctggggtatctaatacagaggtagttccagaaaatggctcagtgatcttaggtacagtctctgtattatcagtttcagacaaatcttcttctgtagatgattcttccactaggtttgtagctattgatgcagggacaacgaagtcatatctggattcaacagcagtaagcaaaacagaatgggtctctgcttcatttgcagtatctctctccatccaaatactggctccctcggtagtttcttcatcagttagcagagtatcttcccgtttatctttgtctttttcagcagaggtagtgagttcaaacacagtgataaacttctcatcagagtcagttaatgtagccacagcactggtgtcatcttctaaaacacttaggtcaatttcggttattttctcttcttcaagggcagttatgtctggaatagtagtgaagctttcttcaggagcaggagggatttcagcctcaggaatagtggaatcagtgacctggacagcctcatcagcagggacattggatttgat

SEQ ID NO: 3311 - DNA, 521 bp, Homo sapiens
  MAP TO CHRX.1; EXPRESSED IN BRAIN, SIGNAL = 0.44; EXPRESSED IN BONE MARROW, SIGNAL = 0.49; EXPRESSED IN LUNG, SIGNAL = 0.68; SWISSPROT HIT: P19736, EVALUE 4.80e+00; EST_HUMAN HIT: BI667416.1, EVALUE 6.00e-54
ttgggcagcaattaggaatccatttcaaaaacaagaatctaaaagttattggcttctaaatttagcattattttcattttaactgacatttagagatttgaaatcatgtgagtctgtaccaagtttgactaaatatattaacacacatgaatgccatcctcaaattcagaaaggtgtaaattttgaatgactcttttattgaataaacaaagtcatattatatcttttttcagggtgaaaaacatgctcaaaatgttagtttttattttcaaatgcatggggaacaaaatgaagtgcctggtaagaaaatgaagatgcatgttgagaattttcaggtgagtgatgtgtgttggtattgtaatccaaactttgagttattgaatctttctaacaagattgtgcctatttcaggtgcataggtatgaaggagtggacaaaaacaaattttgtgatctctgcaacatgatgtttagctctccacttattgctcagtctcactatgtgggaaaggtccatgctaa

SEQ ID NO: 3312 - DNA, 503 bp, Homo sapiens
  MAP TO CHR1.1; EXPRESSED IN BONE MARROW, SIGNAL = 0.9; EXPRESSED IN ADULT LIVER, SIGNAL = 0.97; EXPRESSED IN FETAL LIVER, SIGNAL = 0.81; EXPRESSED IN HELA, SIGNAL = 1.1; EXPRESSED IN BRAIN, SIGNAL = 0.76; SWISSPROT HIT: Q9NYT6, EVALUE 1.00e-104; EST_HUMAN HIT: BF966342.1, EVALUE 0.00e+00; NT HIT: gi7706780, EVALUE 0.00e+00
tgaagcccttcccacatatctcacatttatagggtttctctcctgtgtggaccactagatgaacttgataatgggaattcctcctgaagctcttcccacactcattgcatttgtatggcttctctccagtgtggactctctgatgggcttgaagatttgaactcagagtaaagcctttcccacatacagtacatatgtatgacttctctccagtgtgaactccctgatgggcctgaagacttgaaggccgactaaagcctttaccacattcctcacatttatagggtttttctcctgtgtggactctctgatgaatgtaaagatttgagctacaaatgaagcccttaccacactcctcacatttgtatggtttctctcctgtatgaactctttgatgggattgaagatgtgaattccgactgaagctcttaccacatgcatcacatttgaatggcttctccccagtgtggagtctctgatggtcctgaagatgagaggcctga

SEQ ID NO: 3313 - DNA, 599 bp, Homo sapiens
  MAP TO AC068936.2; EXPRESSED IN PLACENTA, SIGNAL = 1.3; EXPRESSED IN FETAL LIVER, SIGNAL = 0.79; EXPRESSED IN BRAIN, SIGNAL = 0.95; EXPRESSED IN HEART, SIGNAL = 0.94; SWISSPROT HIT: P34369, EVALUE 7.00e-35; EST_HUMAN HIT: AV706934.1, EVALUE 0.00e+00; NT HIT: gi5453983, EVALUE 0.00e+00
ttctggggtttccatttctgagaacagttccatgccagagcattgttttggtcaaggaagcgtagggtttatggatgctaaacagtgggaaggtgcacacgcagtgtgctgtcccgcttggatctgacgaatcttggaagtgttagtgcacctccgtttcacacttcctgtagaagcagctcttgtggattgtctggggcgtgagtataggctgtcctgtcctaccaagttacaccctttccattgaggcagaagtgaccaaggggaagggatccttgtaatataacccacaccatccccacagtgtgaacgtggcatcactgacacaatcagaaattcgagacatcatcctgggtatggagatctcggcaccgtcacagcagcggcagcagatcgctgagatcgagaagcagaccaaggaacaatcgcagctgacggcaacacagactcgcactgtcaacaagcatggcgatgagatcatcacctccaccaccagcaactatgagacccagactttctcatccaagactgagtggagggtcaggtactgtcgggcaagagggtggggatggaaaggccggctgcactacctaaggtgc

SEQ ID NO: 3314 - DNA, 523 bp, Homo sapiens
  MAP TO CHR1.1; EXPRESSED IN HEART, SIGNAL = 1.1; EXPRESSED IN ADULT LIVER, SIGNAL = 1.5; EXPRESSED IN FETAL LIVER, SIGNAL = 1.5; EXPRESSED IN LUNG, SIGNAL = 0.91; EXPRESSED IN BRAIN, SIGNAL = 1.9; NT HIT: gi14720528, EVALUE 1.00e-66; SWISSPROT HIT: Q63450, EVALUE 6.00e-05; EST_HUMAN HIT: BI818261.1, EVALUE 2.00e-66
aaagtgagcaatgcctttgggtgcagaaatccagtcctagtcctttttgaaggtaatttgtgaagaaaatgttgtgatcccatagtgatccagtcaacactaagacccactcactttttcaacacagcaatctcattctccaggctgctgtcccggaaggcaggtgacttcttgatgcacttcagagcaaagagcttcccagtcagtctttgcttcaccaggaaaacttctgagaaagctcctctgaggagaagacaccaaaagataaaacttagtagggggcagacatcttacacttccagatgtaagacctcagaaaggacgtaacagagtctatatagtcctctgaccacaaaggcatatactgaatttaaatctggaagaaacatcaggaaagcacaaaatttaaaaaagggaaggggggaacctgtattcttccaaaatgccaatgtcataaaaaagctagggagagataacacccaagtgaaatatcagaccctagactggaacctgtactggaggg

SEQ ID NO: 3315 - DNA, 548 bp, Homo sapiens
  MAP TO CHR19.1; EXPRESSED IN HEART, SIGNAL = 9.8; EXPRESSED IN ADULT LIVER, SIGNAL = 3.1; EXPRESSED IN FETAL LIVER, SIGNAL = 4.7; EXPRESSED IN BRAIN, SIGNAL = 5.2; EXPRESSED IN LUNG, SIGNAL =   9; NT HIT: AF023268.1, EVALUE 4.00e-11; SWISSPROT HIT: P51870, EVALUE 1.00e-25; EST_HUMAN HIT: AW059742.1, EVALUE 6.00e-17
tgcagtgagctatgattgtgccactgtactgcagcctaggtgacagagcaagaccctatctaaaaaaataaataaatgaatttaaaaatagagttaatatagggcttctctttgttatctattcaatggggacaggaggcttatcttagccaagccagggctgtgctatgctaggggaaggggctacactcatggatccccttctccttggcaggaagatgagtgattatatctccgctatcattgaactgagcgctctgtctgtccggcgccagtatcgcttgcaccactacctcgacttcatttactaccgctcggcggatgggcggaggttccggcaggcctgtgacatggtgcaccacttcaccactgaagtcatccaggaacggcggcgggcactgcgtcagcagggggccgaggcctggcttaaggccaagcaggggaagaccttggactttattgatgtgctgctcctggccagggtgaggctgggccccctggaattgctggcctcccgagggctggcctcccgaggaattgcatgtaaa

SEQ ID NO: 3316 - DNA, 583 bp, Homo sapiens
  MAP TO CHR5.1; EXPRESSED IN BRAIN, SIGNAL = 0.62; EXPRESSED IN HEART, SIGNAL = 0.8; EXPRESSED IN FETAL LIVER, SIGNAL = 0.64; SWISSPROT HIT: O76534, EVALUE 9.60e+00; NT HIT: gi15828471, EVALUE 8.70e+00
agcagaacccccaaaatatggcaatagatttctttataagatattattaggcaaaaattaatgttatattgtacataacaattctacaataaagctgagttgcacctttcagaattgtgagtaaaattcattttagaaaatgttaaaacatgacctctttcttcttactatctttttgaccatatctctgttctggcttcttacaattagcatgtcattagaatgaattttccatgttgtactacatgtgattctagcaaaataggaaacagacaggaagatggatctcaaccaataggccaaataacatctatatatcatagatttgcatctcatatctgcacatgtttagactatgctagaaatcattctattcttgaaacatttaaagatatattatgcctttcacacacaggcctaccctctattaatgcagtttatatttttcttgtttttaaaattcactggtccaaagtactttattatgctggttggtgtgctttactgctgatgttctttctatttttcagaaacataaaaatagcaaaaataaaattctgaagccactgaaggcaaatgatga

SEQ ID NO: 3317 - DNA, 570 bp, Homo sapiens
  MAP TO CHR19.1; EXPRESSED IN HELA, SIGNAL = 1.3; EXPRESSED IN BRAIN, SIGNAL = 1.7; EXPRESSED IN BONE MARROW, SIGNAL = 0.94; EXPRESSED IN FETAL LIVER, SIGNAL = 0.8; EXPRESSED IN LUNG, SIGNAL = 0.73; EST_HUMAN HIT: AI076878.1, EVALUE 9.00e-81; SWISSPROT HIT: Q98919, EVALUE 1.10e+00
gtacctttcagctccttgcggtcccggtaccagcgcagggtggcagccggacgggaccgcggaacgaggcagctgagctccacctcgccgccctctaccgcctgctcccggacctccaccacaggattctctggggccactgccgcagggagaagggaagtaaggggttaaagaaggcacgaacgtgggctcaaagcgatcgagctgcctgttcccagcgaccatagggaaccagggtcccaggtggcaggggtcaaaggggagaggtcaggagccagatgcccatccaggatgttaaaaatagccatggtctgaaagtctcaggagaagagagaagcagagaagaaaggaggagaggatgcgtctgacaagggggagggcgttacctagtaccgtgagcgtggcaatctggtggtgggtgtcttctgtgtagagctggcagaaatagcccccctcgtcctccaggcgggcatctgagagccggatccgcacccggcgtggggagaactcctcaagctggaaacgctcatccttcaaggctagagagagtgagggggaaggtgtgaattt

SEQ ID NO: 3318 - DNA, 558 bp, Homo sapiens
  MAP TO CHR12.1; EXPRESSED IN BRAIN, SIGNAL = 0.41; EXPRESSED IN ADULT LIVER, SIGNAL = 0.41; EST_HUMAN HIT: AL522912.1, EVALUE 0.00e+00; SWISSPROT HIT: O28433, EVALUE 2.70e-01; NT HIT: AF229163.1, EVALUE 5.30e-01
tccgcccacactataaaaggctctttctaaaaaacgaaacatgattaagggcacacggctccagcgttaacaaagctctttgttagctgggaaatgcccccctccccgactcatctgcttatcatctgcatagaattatgtactcaaaagcaggaaaattattgagaaaaccattggtccccggctgcagaccccaaggttgggagctggttcccgtttcctcccagagccggcagggggggcaccaggcaaagtttgcaagacgcgcctccctcccacccctcccccttcctcgcccaacttcccatagccgcggcctcaactaaaagtggccattgacctttcaagctttcgagcagtgatgcaatagaatagtatttcaaagaaaaatgcttatcgaaattttggatccggttttcccgtgattgttaagggtttcttttaaaaagtaggtcacatttcaagtaggtcatatttcgggggcgggtgcgcagacaaggagatgagtttccactaaggccagggggcctccaacggggttggaggtgagaatcccag

SEQ ID NO: 3319 - DNA, 502 bp, Homo sapiens
  MAP TO CHR2.1; EXPRESSED IN ADULT LIVER, SIGNAL =   1; EXPRESSED IN BRAIN, SIGNAL = 0.5; EXPRESSED IN HEART, SIGNAL = 0.77; NT HIT: gi4557730, EVALUE 2.00e-52; SWISSPROT HIT: P22064, EVALUE 1.00e-10; EST_HUMAN HIT: AW860232.1, EVALUE 3.00e-52
tgtcgataacaagggaactggtttatagcgtggctgtgagggacagcagtgctctggggctgggcatcctgcactcaattaaccttcatatttcacacctaatcattgcagtgtggcaaagcgctccctggcctttcaaagcaagaggactgctgtggaactgtgggtacctcctggggctttaacaaatgccagaaatgccccaagaaaccatgtaagtaatgtttcctcactcctttgcaggttaatgtagcatatctgttttttatgattactcctttaatgatgaggcaatattagactttcaaagaactctcctactgaattctagaatgtagtactatgatgtgcatttccagaaaatttgcaagtctgaaaaagttttcatgtcaattattttgtaataagcacagttattaattatcctctttagttggattacttatggggaaaaaaagtcttaagtggtaatgagttaaaatggactttttgtctcagggga

SEQ ID NO: 3320 - DNA, 500 bp, Homo sapiens
  MAP TO CHR19.1; EXPRESSED IN BRAIN, SIGNAL = 0.72; EXPRESSED IN ADULT LIVER, SIGNAL = 0.7; EXPRESSED IN BONE MARROW, SIGNAL = 0.71; EXPRESSED IN HELA, SIGNAL = 0.72; NT HIT: gi14785864, EVALUE 4.00e-88; SWISSPROT HIT: P18616, EVALUE 8.00e-02; EST_HUMAN HIT: BF870610.1, EVALUE 3.00e-80
tgttcccagtccctcaaatccaacttccacctctccccctggggagcacacagagcccgcctcggtttggcataccctctttgatgaaacaatcctgtttcacacctctctgcctttgctcctgcagtgccccccaccatttacctttgtcctgtctccatgaccctggactcagcccccaactgaccctgaactgggggcgtggctcctccacggcttccccaggtgagtccagcgtcccccacttatatgccagctcagcccctctccgcttccattcctctaggaacagcgtcgaccagatcacgttgaagagggcaaagaccacgcaggaaacatcccggcttgtctgtgagtggcagagaagagttgagtcattgtttgtgccagtccagaaaggagggcgcctctggatcccccagaccttgcagggtccctgcccagtacctgatcagcctctgtgaatgtgtacaggacagacccgaagacagctgggtata

SEQ ID NO: 3321 - DNA, 505 bp, Homo sapiens
  MAP TO CHR2.1; EXPRESSED IN PLACENTA, SIGNAL = 1.7; EXPRESSED IN FETAL LIVER, SIGNAL = 1.7; EXPRESSED IN LUNG, SIGNAL = 0.59; EXPRESSED IN HELA, SIGNAL = 2.6; EXPRESSED IN BRAIN, SIGNAL =   2; EXPRESSED IN ADULT LIVER, SIGNAL = 1.4; EXPRESSED IN BONE MARROW, SIGNAL = 1.7; EST_HUMAN HIT: AW994475.1, EVALUE 1.00e-120; SWISSPROT HIT: Q9XZC8, EVALUE 8.00e+00
aggaacacgggatctgtgagggcacgggagcatggtgctggttccttggggttccctgcctggctgtcagcagagcctaatagatctgggctctgttaggtggggcaggatggactaggttggcacagccagccctcagctgtcccctggcttctgcctgttggttttcttcactgctctaatgacccaggcctggagggagagctaattagacattttttggcagcctacacttgcccctcctgctggtgtcttgcctctgccccttgggttctaatctagagagaagtgggagtgttttatgttgctggatctctgatcagcatggagttttgtaccctccccgagggccacgaggctacagaacaagcacaggtgtaaagtgtctccacgctgctcttccagggaactctcctctgctgaagagatgcagcgtgggagcagctcaccacgcccacagtaactgcctgacctgtagccactgactttgcccctttgaaacgta

SEQ ID NO: 3322 - DNA, 583 bp, Homo sapiens
  MAP TO CHR9.1; EXPRESSED IN HELA, SIGNAL = 5.4; EXPRESSED IN BRAIN, SIGNAL = 3.3; EXPRESSED IN LUNG, SIGNAL = 2.9; EXPRESSED IN ADULT LIVER, SIGNAL = 1.6; EXPRESSED IN BONE MARROW, SIGNAL = 3.7; EXPRESSED IN PLACENTA, SIGNAL = 3.8; EXPRESSED IN FETAL LIVER, SIGNAL = 4.1; EST_HUMAN HIT: BF980670.1, EVALUE 0.00e+00; SWISSPROT HIT: P78368, EVALUE 9.00e-74; NT HIT: gi14764718, EVALUE 0.00e+00
accggttctacaagcagctcagcgccatagagggcgtccctcaggtctactacctactacagcctggaggacctgttcgaccttcacgcccaagacggtgctcctgatcgccatccggctgatcacgcgcatggattatgtgcacaccaagaacctcatttaccaggacgtgaagcccgagaacttcctggtggggcgcccggggaccaagcggcagcacgccatccacatcatcgacctcgggctggccaaggggtacactggtctcaggaccaagaagcacatcccgtgcagccagcacaagagcttgacaggtacggcgtgctacatgagcatcaacatgcacctgggcaaggagcagagccactgcaacaacctggaggtgctgggccacatgttcatgtacttcctgtgcagcagcctcccctggcaggggctcaaggctgacacgatcatgagcggtacagaagatcggggacacatagcgcgccacgcccatcgaagtgctctgcgagaacttcccagaggagatggctacgtacctgcactacgtgcggcgcctggactttgagaagcccgactg

SEQ ID NO: 3323 - DNA, 570 bp, Homo sapiens
  MAP TO CHR11.1; EXPRESSED IN BRAIN, SIGNAL = 0.61; EXPRESSED IN BONE MARROW, SIGNAL = 0.65; EST_HUMAN HIT: AI185858.1, EVALUE 1.00e-95; SWISSPROT HIT: Q14896, EVALUE 1.00e-30; NT HIT: U91629.1, EVALUE 0.00e+00
gtcgggtggtacatacctggccatccccaggagccagcctggtcactgaggcactgcagaagaggaggccatgtcactgtgtcctcccagccttctggaagctattgcccatctgggcgtggcagggtccgtgcccttgcagccagggcaggtgcttggccgaggacaacggagcaaagcccagggtccccactgccgcccgctcttcccatctcccaggccctggccccgagggctcctcacctcgcacctccaggcggcactcacaccgtgcctcgccctgtaagttggtggccctgcagacatagatgcccccgtcaaaggggcagggctttctaatctccagagtcaacactccctgcttgctgaacatgcggaagcgggcgtcttctcccaggtccaggccattcttgaaccaggaaatcttgggctataaataaggtaaagagagggagggaagccatccaggctgagaggggacctggcagggacccagggagacacatctgtgtttctactcggggggtcccacgagagtccctgactatgcccaaggctggaaacaaacat

SEQ ID NO: 3324 - DNA, 596 bp, Homo sapiens
  MAP TO CHRX.1; EXPRESSED IN BRAIN, SIGNAL = 0.33; EXPRESSED IN ADULT LIVER, SIGNAL = 0.52; EST_HUMAN HIT: BE779416.1, EVALUE 9.00e-07; SWISSPROT HIT: O28357, EVALUE 5.80e+00; NT HIT: gi14765213, EVALUE 3.00e-09
atggcccagagacatgaaagctgtcacccttgataaccacacactatggcactgtggcaaacttggttttgtctctatggagcagtgagaaaagccaggaatgatatcattcctccaaagctgaggcaaagaggacaggatctaaatagaaggttgaagtttatagtagattgttttctttccaaatgactgcacatttgacagaaatgccaggaacaacaaaaacgcatatttaccaagtgttcttggtctgaatcaacaccaaccctaaaggagaaagacaaagagcaaatgagattttgaagccaaaaaatggtctattcacacatatacattgtcaggcaactacttttctcaacacagaagctatggaatggttaatgttttcttgcttctctatagctgttgatgcagatttttggctcctgccactttccttagcaacagcttggattctaaggcaagcagggtgtacccatgattctcttcctgcaatcttacttaccagtttcagaaaaaaacagcattttttttctctgaatataggtccactcgaagcggaatcagggagagcagcactgccccagttgctaaat

SEQ ID NO: 3325 - DNA, 590 bp, Homo sapiens
  MAP TO CHR5.1; EXPRESSED IN FETAL LIVER, SIGNAL = 0.85; EXPRESSED IN HELA, SIGNAL = 1.2; EXPRESSED IN BRAIN, SIGNAL = 0.94; EXPRESSED IN LUNG, SIGNAL = 0.67; EXPRESSED IN BONE MARROW, SIGNAL =   1; EST_HUMAN HIT: AI248137.1, EVALUE 2.10e-01; SWISSPROT HIT: O43516, EVALUE 5.70e+00
ctctctcccttcttcccacccagcatcttggctattactaaccaacagggcatgtaaggaaaagggctcctttcagggctggagtgctatagttggtggatcacagcctgtgtgggaggcttccccaaagacatatgatgtgggtgtaggaaccagacagacgggaggaattaagtcacccttttccccaaccctaattttcttgcccaacctagaagtcactgggttggtttccttatactaaggcagtaattttatttctactgtcctctagcttttgacagtgggcagtcttcaatgggagtgtgaaaggaggaagaagctagcttgttctttcttcatgccactagagtctgggttaaggacagctgtgtaaaccatgtactcacccagggttctctaggaaagcctgacttctttctattttgtcggtggtacttggtcagttgggcgtccctgggaagcattgtgcttggtaaggggggcctgatcgggtccatttgagagtaagtgttctctcctgcctgtggatgtaaatccaacccctggaactccaggcctgagaagtgtgacccaagttcaaccccttt

SEQ ID NO: 3326 - DNA, 508 bp, Homo sapiens
  MAP TO CHR12.1; EXPRESSED IN FETAL LIVER, SIGNAL = 0.61; EXPRESSED IN HELA, SIGNAL = 0.67; EXPRESSED IN BRAIN, SIGNAL = 0.77; EXPRESSED IN BONE MARROW, SIGNAL = 1.1; NT HIT: gi5032222, EVALUE 9.00e-12; SWISSPROT HIT: P09706, EVALUE 4.70e+00; EST_HUMAN HIT: BE763773.1, EVALUE 7.10e-01
ccagcccatggaaactacactttagagtatgttaggtaaatatttgcagcgtggatttttctgaaggtgcaggatttctaatgctccggttttcatgttctaggcacttcttgctcggtgacttgttttgttcttatgccttggccaattaaaagctgagatagtgatccctaggagagtatgagatgtaaatgagctgtaaaatggcttcttcctagtgattattcatgggaggcttggaactcgaggtgggttcagtctgtttggaggcttgagctgtgcacttcggctgcctgatgcgaatggcctatggggaaggaaccacatactgattgaaatgttagcaaacagctggcacgctcctgcccactatgcagaggaagcaaaaatatttatctttttttgcatttacagctatgcttgactatagcaggactccaccgtaaatgacattttccccccttccctccagatgtttcagttgtcaacgtgatgttctccttcggtt

SEQ ID NO: 3327 - DNA, 518 bp, Homo sapiens
  MAP TO CHR6.1; EXPRESSED IN HEART, SIGNAL = 0.76; EXPRESSED IN LUNG, SIGNAL = 0.77; EXPRESSED IN BRAIN, SIGNAL = 0.51; EXPRESSED IN BONE MARROW, SIGNAL = 0.37; SWISSPROT HIT: P57541, EVALUE 8.20e+00; NT HIT: AE006722.1, EVALUE 1.90e+00; EST_HUMAN HIT: AI379874.1, EVALUE 1.80e-01
ttcctcgacacactgacagcccttgtgcaacatctgcataacgatggaatttattttgttcattatgactgctgcagcgcatggggctgtatttcactcccacagacgatttctgttttcataaattatccagcatgctcctcgtggaaatggctggcagtctttggagaactggcaaataatctctgagttgtctctgcttcttcattttggttatttctgtgtcataaaagttatgacctatcagacagaagaagcatcaagaaggcctctaataaatagtattcaacaagctccagacaaatctaataacagccgtggaggcttcaaagaaaccctaaacacctccccagcccgagagctcaatgactaaggcaccttcctgtggccaccagcacccgtttctgcttgaagcattttgttttctgtgtattgatagaaacttcattttgctcccttatagaccatccagctctgtggtgatctttgtgttcttaacaatgcatctcccctttgat

SEQ ID NO: 3328 - DNA, 532 bp, Homo sapiens
  MAP TO CHR4.1; EXPRESSED IN LUNG, SIGNAL = 2.6; EXPRESSED IN PLACENTA, SIGNAL = 2.3; EXPRESSED IN BRAIN, SIGNAL = 1.7; EXPRESSED IN HEART, SIGNAL = 1.9; EST_HUMAN HIT: BI768529.1, EVALUE 1.00e-103; SWISSPROT HIT: Q63003, EVALUE 1.30e-02; NT HIT: gi14781062, EVALUE 6.00e-87
caagccctactctgagccactcctggccttaagcgaccgcccctgcctcttggcccctgcccctgggcagatgggtgtggccacctcatatgcagtctgggccacctctcggagctttgcggccttcctggcctccaggctgattgggggcatcagcaaagggaacgtcagcctctccacggccatcgttgctgacctgggctcgcctctggcccgcagtcaaggcatggtaagtgcacaggctgggtctttggggtcctggtggtgacttctgggcctgggtctccctgtgcagctcgggtggtcttttccctaggcggtcattggggtggccttctcactgggcttcaccctgggccctatgctcggagcctccctgcccctggaaatggcaccctggtttgccctgctcttcgcagcctccgacctgctgttcatcttctgcttcctgccagagacgctgcccctggagaaacgggtagggctgtggtctgggacccacaggcctaggggctggaggcttgattccata

SEQ ID NO: 3329 - DNA, 573 bp, Homo sapiens
  MAP TO CHR13.1; EXPRESSED IN BONE MARROW, SIGNAL = 0.46; EXPRESSED IN BRAIN, SIGNAL = 0.45; EXPRESSED IN HEART, SIGNAL = 0.65; SWISSPROT HIT: P22723, EVALUE 1.90e+00; NT HIT: AF110176.1, EVALUE 2.20e+00
atcttcccacgtcaaacaggtcttcattggctgataaaccattctgcctctccaaagctgagatgtttgagtgcatatgtagtggatgtctgcttttcagtcattcttaaagaagctgctgctgagccagttgatctctgtaaaagttgcaatagcttgtatcttttaggctttctttagtaagtggttagaatctttggccatttgcatggcattgccagctttaccagtagaaggactcttggtataaattaaatgtaggtaagccaaattattttaaatgcaatagcgctttcaaataaatcctttagttgctcctttgcaaagtgaaggattctcttacaaagccaataattacttcctaatgcatgggttttgcaaatctggaatttaatccatcaggtttgcttaaagcagatagatctttatttgctcatctgagggttggtcttttggcttagtgttaatttaaagaataaaacaatcaagaaagaatgctctaattggactcttattttggcagcattgctgattaatgtgtaaagagtaatttggtgtcagtggaagggaatg

SEQ ID NO: 3330 - DNA, 552 bp, Homo sapiens
  MAP TO CHR1.1; EXPRESSED IN LUNG, SIGNAL =   3; EXPRESSED IN BRAIN, SIGNAL = 2.4; EXPRESSED IN HEART, SIGNAL =   4; EXPRESSED IN ADULT LIVER, SIGNAL =   4; EST_HUMAN HIT: BE393082.1, EVALUE 1.00e-109; SWISSPROT HIT: Q9Y483, EVALUE 5.00e-34; NT HIT: gi15294427, EVALUE 1.00e-109
gatcatggcctgcatacctcaacataaagctgttattttgatggcagctgccttgaatgtgttatcttggagtgtttgctgagtcttggcctcacttagagtaggcaatgaatggatattgagaattgttatcattttgttttaaactgctttgtttggagagtatttatgatttgaggtactttttatatttttgtcttaaggtttttaacaaatttaaaactttgattaacatataaaatatcccactggtataaaataagctctacaagtaagtcttatgtatggtcttttattctctaaacagagactctacaggggcaggtaattcactggtccacaagcggtctcctttacgtcgaaaccaaaagaccccaacatccttgaccaagctgtctttacaggatggacataaagccaaaaagccagcatgtaaatttgaagagggtcaggatgtcctagctagatggtcagatggcttgttttatcttggcactatcaaaaaggcaagttactttaatgtatcttttgctgtttttgcagtaagcattt

SEQ ID NO: 3331 - DNA, 568 bp, Homo sapiens
  MAP TO CHR9.1; EXPRESSED IN HEART, SIGNAL = 0.46; EXPRESSED IN FETAL LIVER, SIGNAL = 0.32; EXPRESSED IN BRAIN, SIGNAL = 0.3; EST_HUMAN HIT: AW409736.1, EVALUE 0.00e+00; SWISSPROT HIT: P35658, EVALUE 1.00e-21; NT HIT: gi14783213, EVALUE 0.00e+00
gcagcagactggtagcacagccagcacagcagctgccacaccacaggtcagcagctcagggtttagcagcccagcttttggtaccacagccccaggggtctttggacagacaaccttcgggcaggcctcagtctttgggcagtcggcgagcagtgctgcaagtgtcttttccttcagtcagcctgggttcagttccgtgcctgccttcggtcagcctgcttcctccactcccacatccaccagtggaagtgtctttggtgccgcctcaagtaccagtagctccagttccttctcatttggacagtcttctcccaacacaggaggggggctgtttggccaaagcaacgctcctgcttttgggcagagtcctggctttggacagggaggctctgtctttggtggtacctcagctgccaccacaacagcagcaacctctgggttcagcttttgccaagcttcaggtaagaatttgtggaagctttttacttgtttccctctctgctatttgaaacattagcaacagacccctattacttttgtaattaaaggggagactcaaaacccaaaa

SEQ ID NO: 3332 - DNA, 530 bp, Homo sapiens
  MAP TO CHR19.1; EXPRESSED IN BONE MARROW, SIGNAL = 3.7; EXPRESSED IN ADULT LIVER, SIGNAL = 3.7; EXPRESSED IN PLACENTA, SIGNAL = 4.6; EXPRESSED IN FETAL LIVER, SIGNAL = 5.2; EXPRESSED IN HELA, SIGNAL = 5.5; EXPRESSED IN BRAIN, SIGNAL = 4.3; EXPRESSED IN LUNG, SIGNAL = 1.3; SWISSPROT HIT: P25100, EVALUE 1.10e-01; NT HIT: gi6755729, EVALUE 5.00e-01; EST_HUMAN HIT: BE827621.1, EVALUE 1.90e-01
aaaggaaaaggagagctggccaaaacctttggctgtccccacacaaaagtccccattagctaccaagaggattccagacccaagggctaaaaattggcatcttctaggagaaccttacagaagtgagagggcacagcagatatccattgctcacaaggagatggaaatgcaatacttttatcctgccaccagagacatttttccaagtgcccatgcctctgtggaaaaacaaaccctggcactgatgtttcaaaaggacttctgggattttaaggataaacgcaggtttcctaaactgcccaagttagagaagaagacacagcccatttctaaaaaaaaggaagagttgcctttgtgggagacatttgtggcactgtaccatgttttgcggatgctgcagcagcgatatccaaaagacagcactgcttggatggaacagttctaccagctcatggacctgtaccaacttaagtcccccagaatccagaagctgcttcaggagctgctaatgagagaggaacctcaacccc

SEQ ID NO: 3333 - DNA, 572 bp, Homo sapiens
  MAP TO CHR20.1; EXPRESSED IN BRAIN, SIGNAL = 4.3; EXPRESSED IN HEART, SIGNAL = 4.3; EXPRESSED IN ADULT LIVER, SIGNAL =  21; SWISSPROT HIT: P39019, EVALUE 1.00e-36; NT HIT: gi14591914, EVALUE 0.00e+00; EST_HUMAN HIT: BG766470.1, EVALUE 0.00e+00
gttttgtttctgattcgcccacagctggcggatttttccccatgaatggcgacaccaattaggaactcgcgggaaaccccgttgctccctttcccctggctggcagcgcggaagccgcacgatgcctggagttcctgtaaaccacgtgaaccagcgggacttcgtcagagctctggcagcctttctcaaaaagtccgggaagctgaaagtccccgaatgggtggacaccgtcaagctggccaagcacaaagagcttcctccctacgttgagaactggttctacacacgagccggttccacagcgcggcacctgtacctccagggtggcgctggggttggctccatgaccaagatctatggggacgtcagagaaacggcgtcatgcccagccacttcggccgaggcttcaagagtgtcctccgccgggtcctccaagccctggaggggctgaaaatggtggaaaaggaccaagatgggggccgcaaactgacacctcagggacagagagatctgggcagaattgccggacaggtggcagctgccaacaagaagcattggaacaaaccatgctg

SEQ ID NO: 3334 - DNA, 593 bp, Homo sapiens
  MAP TO CHR20.1; EXPRESSED IN BONE MARROW, SIGNAL = 0.71; EXPRESSED IN BRAIN, SIGNAL = 0.64; NT HIT: gi5453572, EVALUE 4.00e-82; EST_HUMAN HIT: AA398263.1, EVALUE 8.00e-32; SWISSPROT HIT: Q9Y6D5, EVALUE 2.00e-23
aggcagccctttagggtaagtacagtactaatttggctatgactttgtacttgtgttttaagaagcagcggaaaagcatggtctgacagaacctgagagagttctaggtgaactggagtgccaggaatgtgctattcccccaggagttgatgaaaactcacagaccaacgggatagccgatgacaggcagtccttgtcgtcagcagataatctggtatgttggtgatcatcctctgtggacttattgccatttttactttttcaaaagatgcagaattaagtctttcctcaaaagaagcaactaaaataagcaagccctgttcctttattagtcacacagtcctgggctgatattctttgtattagcaggttcagttcttagaacgtgctaatgttgcttggtatataacatcattattaaaccctgtttactcagacttctaatacttaaatttcttgccacttttcttctctctcaaaatagtatacattcattatagaaaaataaaatatatagttacccgtctttccttctctgtattgaaaagtcagtatgactgtattgaaagccatccataacccatagattgccc

SEQ ID NO: 3335 - DNA, 554 bp, Homo sapiens
  MAP TO CHR17.1; EXPRESSED IN BONE MARROW, SIGNAL = 0.77; EXPRESSED IN HELA, SIGNAL = 0.84; EXPRESSED IN BRAIN, SIGNAL = 0.79; EST_HUMAN HIT: AW807633.1, EVALUE 2.00e-01; SWISSPROT HIT: Q04690, EVALUE 4.00e-24; NT HIT: U17687.1, EVALUE 0.00e+00
gctgaaaatttagttggaaggggaatttaagatagctagattatcaaaataattcacctttgacattaacttcaagcccctttcgattctaggtggtggctttttatctaaaatccctgcttcatacggtgagacaatggcaggattgataaatctgaggaacatggcacttcctactgcaccgatgctgttctgagggaaacgctggctaaccacctaaaaacaaggagttgagaattgagtataaggtttgaattaatataaagacatgaaaacaaagagttcaaaggtcaaactttgcataaaaactctgaatcaatcagtcctcatgaatgacatatttctatttttttcttctcccaaaacatgagaaaataaagtttcctctcaattctagtcttatatcatattaaagtacaattaaggtatctcagaggaaagaaaaacctcatggatgagatgggtagaagaaacctgaaaaaagatcttcactgtatcatcacttatactgcatgtttgatgagtaatgaaagcagaccaaatttttcacacaa

SEQ ID NO: 3336 - DNA, 522 bp, Homo sapiens
  MAP TO CHR17.1; EXPRESSED IN BONE MARROW, SIGNAL = 0.4; EXPRESSED IN HELA, SIGNAL = 1.4; EXPRESSED IN BRAIN, SIGNAL = 0.42; EST_HUMAN HIT: BG436859.1, EVALUE 2.00e-04; SWISSPROT HIT: O95838, EVALUE 3.00e-56; NT HIT: gi15313957, EVALUE 0.00e+00
ggtaaatttcccaagggtggcacagagtagctactcaattaatatttgctaaatggacacatggctaaatgactccaagacagtaacctctcacttgtctcacccggcaggtgaaggctgagctgcggaaatactgggtccgcttcttgctagcccgccactcaggctgcagagcctgtgtcctggggaaggacttccggttcctaggaaaatgtcccaagaagctctcggaaggagatggcgctgagaagcttcggaagctgcagccctcacttaacagtgggcggctcctacatctagccatgcgaggtcttggggagctgggcgcccagccccaacaggaccatgcacgctggccccggggcagcagcctgtccgagtgcagtgagggggatgtcaccatggccaacaccatggaggagattctggaagagagtgagatctagggtggagttccaccaccctggctctgctcccagggactcttgagggggcccaggaagaggaagcaaagcaggacac

SEQ ID NO: 3337 - DNA, 590 bp, Homo sapiens
  MAP TO CHR14.1; EXPRESSED IN ADULT LIVER, SIGNAL = 0.65; EXPRESSED IN BRAIN, SIGNAL = 0.41; EXPRESSED IN HEART, SIGNAL = 0.55; EST_HUMAN HIT: D60809.1, EVALUE 2.10e-01; SWISSPROT HIT: P01739, EVALUE 2.00e-05; NT HIT: U32540.1, EVALUE 0.00e+00
gaaaggactgagcttgcctgtgactggctagggaggaacctgagactaggggacagaaagactagggattcacccagtaaagagagctcatctgtgactgaggagccttgctccatttcaggtcttctgtgatttcaataaggaagaagaatggaaactctcctgggagtgtctttggtgattctatggcttcaactggctagtgagttggggattttggtgatgggaatggcaagaccaaattttagagcccacagggctgaggggtgaagtgttcttattaatttggaaatgtaatttgaaaatgtaatgactgactcctggtcccggacctgtgtttctgcctaggggtgaacagtcaacagggagaagaggatcctcaggccttgagcatccaggagggtgaaaatgccaccatgaactgcagttacaaaactagtataaacaatttacagtggtatagacaaaattcaggtagaggccttgtccacctaattttaatacgttcaaatgaaagagagaaacacagtggaagattaagagtcacgcttgacacttccaagaaaagcagttccttgttgatcacggct

SEQ ID NO: 3338 - DNA, 579 bp, Homo sapiens
  MAP TO CHR7.1; EXPRESSED IN HELA, SIGNAL = 0.64; EXPRESSED IN BRAIN, SIGNAL = 0.46; EXPRESSED IN ADULT LIVER, SIGNAL = 0.96; SWISSPROT HIT: P40879, EVALUE 9.00e-41; NT HIT: gi13630971, EVALUE 1.00e-128; EST_HUMAN HIT: AI793160.1, EVALUE 1.00e-124
cattgattggttgtttccattaagaacaaagaaattaccgatttaaggcccctcactgaagaaacatcaagaaaggacactgctgaaaagtcaagaatgaggctgtggaggctgattttggggacctcaatgttgagaggaagatcatcattccagtcaatgtggaaaggcaggtctgtggtattgattggctggtccagtacttctatctgattgttgtccagctcttcgtcagaatcttttatggtgtcaacagtacatataaatcctttctgcaggagaggataacaagtatgaaaactgtgaccaagaaaaacattgtgtatgtcagagatagccagtgagtttcagaagcactgattctgagttgagccaaacgatgggattggactaggtgtggtggctcatgcctgtcatcccagcactttaggaaactgaggtgggaggatcacttgagcccaggagtttgagaccagccagggcaacatggtaagactccatctctgcaaaaaataaaaaagttagccaggcatggtggcacatgtgcttgtagtttcagctacttgggaggctgaggtg

SEQ ID NO: 3339 - DNA, 564 bp, Homo sapiens
  MAP TO CHR17.1; EXPRESSED IN LUNG, SIGNAL = 1.1; EXPRESSED IN BRAIN, SIGNAL = 0.62; EXPRESSED IN BONE MARROW, SIGNAL = 0.57; SWISSPROT HIT: Q9PDP1, EVALUE 7.00e+00; NT HIT: AF080508.1, EVALUE 3.40e-02; EST_HUMAN HIT: BE082725.1, EVALUE 8.00e-41
agggaaacagcggagtaaggacaggaagaatattttttgttcatgtttggagctatgccaaggtgttatattcccattaagaatggctagatctggaagaaacttgatggattagtggaaagtggaggtggggagagaaggcggcaccatcaattgctgaaattggccccagacaggtttcctcattgttctgccaattggttttgcaataaattggaggaaatttggcgagatattcaaccagggcatggacagtgtactaggaccaaaataaacaatggtgaataacttggcagttttttattggatatttcagaagtgagttatgagacaccaagttgtgagttagttcttacaagtttacatagtgagaattaaaataaggcgatagatgacaagttttgctcttaaaatttgggagacaaataccaaataggaaatctagttacaaaacatacaatgacccagagaagaaaaacagaataaggtcaaatatttgagatgacatagcacatagtcaacatattgaactcaaaggatttaccccagaaactccacatacag

SEQ ID NO: 3340 - DNA, 535 bp, Homo sapiens
  MAP TO AL355432.3; EXPRESSED IN BRAIN, SIGNAL = 0.37; EXPRESSED IN HEART, SIGNAL = 0.45; EXPRESSED IN BONE MARROW, SIGNAL = 0.38; EST_HUMAN HIT: AL534794.1, EVALUE 2.00e-72; SWISSPROT HIT: Q9ZK75, EVALUE 7.50e-01; NT HIT: AY040325.1, EVALUE 1.00e-72
ttggcacacagcagtaatttgtattacctgtaacagtttctcatttgtggttttcatctctaggtacttgacttggttttcaaaagacatatttttgataatgtcatctgttgcttgtttttcctgttcaatttcttcttcgacacttctgatttgtttttctttcctaaaatcagaagcacgtaatattcctgatactatattgaggaaaaaatatccaattattttatacaagtcatggtcctaatttaataggatacttaaagacattcaaccacagtgtgtgactgaaaagtctttatatttgtactaaaaaatgctatttgacctatataaaatttggccccattagcacaaacttatttttacatctttctcttctccatccctaaattcctctatttccttactctccattttattttactaagaaatcacaaagattaccaaaaaatccttaatgacttatatatatgaggatgcatttatacttttttaaagttataccttcaaaagacaaataagaggctgcgct

SEQ ID NO: 3341 - DNA, 574 bp, Homo sapiens
  MAP TO CHR13.1; EXPRESSED IN ADULT LIVER, SIGNAL = 3.8; EXPRESSED IN BRAIN, SIGNAL = 1.4; EST_HUMAN HIT: AV702910.1, EVALUE 0.00e+00; SWISSPROT HIT: P15954, EVALUE 2.00e-28; NT HIT: gi13641663, EVALUE 0.00e+00
aaaaggtcttggtgaggtgccgccatttcatccgtcctcggtttctgtgcctttcgcagagcttccagcagcgctacgttgggccagagcatccggaggttcacaacctctgtggtccgtaggagccactgtgaggagggccctgggaagaatttgccattttcagtggaaaacaagtggtcgttactagctaagatgtgtttgtactttggatctgcatttgctacaccctttcttgtagtaagacaacaactacttaaaacataaggatgtttcagttcatccattaacagatatgaagagcattttaagaggtacagcctctggaagtggatcaaacttgaactcatatggcatactagatatgtttgtcaataaacttatgacattaaaaaaaaaaaatccaggacaacccaaagtgaagtgaacatctttttatggtgtaccttatgaaaagcaagaagaaagaaaagatatgacataaaatgtaaagccataaagaatagaaagagactggctggaataaatctatcagtgtttaatatccattcataccgttagaaccttctgccat

SEQ ID NO: 3342 - DNA, 537 bp, Homo sapiens
  MAP TO CHR14.1; EXPRESSED IN BONE MARROW, SIGNAL = 1.1; EXPRESSED IN BRAIN, SIGNAL = 0.89; EXPRESSED IN LUNG, SIGNAL = 0.82; EST_HUMAN HIT: R06830.1, EVALUE 0.00e+00; SWISSPROT HIT: Q16822, EVALUE 5.00e-34; NT HIT: Y11484.1, EVALUE 0.00e+00
gcaggagagacacttgggagcagtagcagcaccaagaggtggctgaagccccccacctcataataaccatcagcttccatgcccctattcttggacacggatttttctcaacctagtgcaaagtgctctgcaaacacagccttatccctctgctgggactgctgctctggatcttgggaattaggttgccagagaggacaggttcttagggtctgtggagaggtaggatttgggatttcctctgagtacaagaaggcctctgtgttccccttggggcagagcaggtgcttaccttgtcctgtcaggggctggcccacggagtgcagacacttgacaaagtcaccatctcccagggcctgaagcacaggtgtccccagtcgggtcataatacgcatgcttgccaccacataggctgagtcagtgagctgcaccccgatgcgggacagcggggagcccacaggacccatgctgaatggaagcacatacatggtgcggcctgtggaggaaggcatcccctggatgaagggttccaaacct

SEQ ID NO: 3343 - DNA, 578 bp, Homo sapiens
  MAP TO CHR14.1; EXPRESSED IN FETAL LIVER, SIGNAL = 0.55; EXPRESSED IN HELA, SIGNAL = 0.82; EXPRESSED IN BRAIN, SIGNAL = 0.6; EST_HUMAN HIT: AI218345.1, EVALUE 0.00e+00; SWISSPROT HIT: P09874, EVALUE 4.00e-05; NT HIT: gi14751885, EVALUE 0.00e+00
agttctgcccacttcgtcaccctgtaagtactcagaaccaggaggactagaagactccttttggccagataagactacgttctctattgcagcttctgaaccagagactgatgttgacacactttttttccatttggcaggaatgggagtacagtgccattaggaccagcaagtgacacaggaattctgaatccagatggttataccctcaactacaatgaatatattgtatataaccccaaccaggtccgtatgcggtaccttttaaaggttcagtttaatttccttcagctgtggtgaatgttgatattaaataaaccagagatctgatcttcaagcaagaaaataagcagtgttgtacttgtgaattttgtgatattttatgtaataaaaactgtacaggtctaccactggcttcttcgggctttatttctccaagaacatatttcttctgacattagtagatctccatttccaggacagaaattactcattgctctgagggttattcagtatcctgttcttagtggcatctgtgcattgagggacactaatgggggcgctaatgcttttacctg

SEQ ID NO: 3344 - DNA, 595 bp, Homo sapiens
  MAP TO CHR14.1; EXPRESSED IN HELA, SIGNAL =   1; EXPRESSED IN BRAIN, SIGNAL = 0.65; NT HIT: AF387637.1, EVALUE 4.00e-82; SWISSPROT HIT: P27448, EVALUE 4.00e-05; EST_HUMAN HIT: BG249147.1, EVALUE 0.00e+00
gccaagaaaggacatcaagccaggctctgagcaagagaatgcttcccagtgctaggagacctcttgcctggactctaagagaaggcactgggatactccaaaacttaccatggtcactgtagcgtctttgcttttggcttgaagaaacacttctctgcactttgtggtgaggagactggccagtactgttgttgagatcactgctcggcctaaccttagcaagtgaaagattgctgctagaactggaatcactagcatccagctaagagaaaatgagaaaaacagagcaaaccacaacacgaacccaaatggcttattaggaagttaaacttttcattaacacagacctctcataaaccgttcattcagagagaggaggaatcacaacgtacaaaaatgacaaccctaaactcaagcaaaagtagttttctgacggctggaaagacactaaaggtaaggtatttatgattttctttccaggctttctcaaataactttaaatgttgtatttacttcatctgatgctttacgtcatttctaagctattaatgactacaggttaatttatgaaagaccaggtttatgacaacatcca

SEQ ID NO: 3345 - DNA, 568 bp, Homo sapiens
  MAP TO AC011676.4; EXPRESSED IN HELA, SIGNAL = 5.8; EXPRESSED IN FETAL LIVER, SIGNAL =  11; EXPRESSED IN BONE MARROW, SIGNAL =  10; EXPRESSED IN LUNG, SIGNAL =  12; EXPRESSED IN HEART, SIGNAL = 7.8; EXPRESSED IN PLACENTA, SIGNAL =  11; EXPRESSED IN ADULT LIVER, SIGNAL =  10; EST_HUMAN HIT: BG823297.1, EVALUE 0.00e+00; SWISSPROT HIT: Q9V3J8, EVALUE 6.20e-01; NT HIT: gi14747475, EVALUE 0.00e+00
tatcaccaacaagacgcagctgcctgcctgagacacaccccaacaggaaacacccttggtgcagtttaaccagggggcccgaaggcctgagagaaggtgcgtggccatgggtctcgcggctggccacacggtaagtgggctccatgctgagcctgggctgctctgccctgccacccctccaggcttctgctcctggcaggctctagggggcagccagtccccacacatagggcacagttccacttggcagactcagccacgtttattcgcctttccaaatggcgactttcccctcctccctgcccgacccactcagcacgtatctgtcctcagccgagcacagcgtcctcacggtgtccatgtgcgccaccagctccttctccacggtcttcctctcggcgtcaatcacgtagattttccccttgggtgttccctgccccagccctcggctgcccacccagacctgccagggagaaacgggaggggtcagcagggaaagaagcccctcccaagagcaccagggctttgcccggctacccagaattgacgcgtgtgcctccaaatctat

SEQ ID NO: 3346 - DNA, 549 bp, Homo sapiens
  MAP TO AL137846.1; EXPRESSED IN FETAL LIVER, SIGNAL = 0.82; EXPRESSED IN PLACENTA, SIGNAL = 1.1; EXPRESSED IN LUNG, SIGNAL = 0.91; EXPRESSED IN ADULT LIVER, SIGNAL = 1.2; EXPRESSED IN HELA, SIGNAL = 0.71; NT HIT: gi16179907, EVALUE 3.00e-58; EST_HUMAN HIT: AA461376.1, EVALUE 4.00e-58; SWISSPROT HIT: P31258, EVALUE 1.80e+00
tgcaatcacctactttcccctctccaagtcacttttccagaaagctccctttctgcaccgtgtaaagtgagcctaacctcagccccacagctgtggtgttttggagcggccctcataagcctcggtggcctcctggggctggcgaggcctccggctcctgcaaactcaccttctcggagtagtgctccccggggagtggggggtagtcacactgctcgatcttctggcacagggagaagagattcatcttatctccatagaaggggctctggagggctgccatctgcaagggacgggaacaacgaagataagctttcggcctcaaggctcagaaggactagagaggaggaggctgctccagattgttggggcatgggttctctctggtcccgaccgcggcgagtccagcaggacttctcccccgaatcaccgagcatgctggggttcaacagaggagcaggcgcaacactaccctgattctgtcactggattaagtgggcacgagggtttcggtgacaaaactttcaaggcaataaagaagggcagctg

SEQ ID NO: 3347 - DNA, 501 bp, Homo sapiens
  MAP TO CHR21_66.0; EXPRESSED IN FETAL LIVER, SIGNAL = 1.7; EXPRESSED IN BONE MARROW, SIGNAL = 1.8; EXPRESSED IN HELA, SIGNAL = 3.6; EXPRESSED IN LUNG, SIGNAL = 1.1; EXPRESSED IN PLACENTA, SIGNAL = 1.7; EXPRESSED IN ADULT LIVER, SIGNAL =   1; EST_HUMAN HIT: BE218113.1, EVALUE 3.00e-80; SWISSPROT HIT: P46060, EVALUE 3.60e-02; NT HIT: gi6912259, EVALUE 3.00e-02
ctaagccttcctcgagtccctggggcccagctgaaggcaggccttggtgaagggaaggggaatcccactgttcgtggcccctaagtgcgggccctcgccccacttccctgcgcagggacctcaccctcatccatgtcatagcggaactcctcctggtcatactcccggctctcttcccggaggacgtctgcatcttcatctccaggcctcatgtccatctcaccctcgaagccctccagcagagcctgggcctcctccccgggttctcctgcacctgagataaaacacaagtcagaagcctgagttcctgggaaaaatggagcctgcagacctgtgcagggcagctgtcccctgggctgccgtgcccccaccctccccctcccactggcagcacctcatgttccccatctcaacatccacccagcccagcctaggcctggccaggggagcagcccagtccccactgtagtcagtggcttggggatgggagcaggtagtctg

SEQ ID NO: 3348 - DNA, 531 bp, Homo sapiens
  MAP TO CHR21_68.0; EXPRESSED IN BONE MARROW, SIGNAL = 1.9; EXPRESSED IN HEART, SIGNAL = 1.4; EXPRESSED IN LUNG, SIGNAL = 0.89; EXPRESSED IN HELA, SIGNAL = 3.2; EXPRESSED IN PLACENTA, SIGNAL = 1.1; EXPRESSED IN ADULT LIVER, SIGNAL = 1.1; EXPRESSED IN FETAL LIVER, SIGNAL = 1.8; NT HIT: AL163282.2, EVALUE 5.00e-07; EST_HUMAN HIT: BE009211.1, EVALUE 5.00e-08; SWISSPROT HIT: P08547, EVALUE 2.00e-03
gatcccatgtgccgttattctacatactcgtcctctgttggatatagggcttgcaaatagttcctcccagtctgtaataaaaggccccaggtctcctcaatgctcacatcttctctaacatatcatgatgtcacaggcaagaatggacagtgacacacacgagattcagaacactccccagccacctcccaactcacagacatccctccagggatccacaggatccctccagtgccccttgtaagacccgtttgtataaccattgaggacatccaggctagtccactgtttggctttgacaggtaaatctgctaggaacattgatccactggttgttatgaacatgagtctttgcctgtctgggcgtgcccaggagagcaatcctggggctgtatagtaattgaacatggagttttgtaagaaactgccaaaccgttttccagaacggctgcaccttttacattcccaccagcaatgcacaaatcggttatctttttgttactgacatctagtttgattcccctttggtca

SEQ ID NO: 3349 - DNA, 551 bp, Homo sapiens
  MAP TO CHR21_69.0; EXPRESSED IN HEART, SIGNAL = 1.2; EXPRESSED IN BONE MARROW, SIGNAL = 1.5; EXPRESSED IN LUNG, SIGNAL = 0.79; EXPRESSED IN ADULT LIVER, SIGNAL = 0.92; EXPRESSED IN HELA, SIGNAL = 4.3; EXPRESSED IN FETAL LIVER, SIGNAL = 1.4; EXPRESSED IN PLACENTA, SIGNAL = 0.78; SWISSPROT HIT: P17326, EVALUE 4.00e+00; NT HIT: AL163207.2, EVALUE 5.00e-04; EST_HUMAN HIT: AW958648.1, EVALUE 2.00e-04
gactctggagccagtgaagggatttggccctgccctttactttcctgcccagcaggcaggggcagtgcagtacacccccctcggctctcctccccacctcgaggacttcggtggcaaggatcaggctccggaaaactcactggagccatgctggtgaggtctgaggaggggttaggagctgaggcgctgggtccccctttccctggtggttagttttaccaaccagtccttgttcagttcctgtggcagagatttttgttgttggtggtggtggtgttagtgtttttttttctctgtatagcaattaaaggagggagattctgtgatgtagtcagcctgcttccttagcctagaagtccttagtcctttggtatttccaattgacttttttttttttttctaaaatgcaaatctaataatgtcccgcctgagctctccagtggctccctgtggattcctgtgggtttcatgcaaagactgagctgctctgtggcccgaatcgtctggcccctctggaccccaggacgcccccaacatctctgcctggcata

SEQ ID NO: 3350 - DNA, 587 bp, Homo sapiens
  MAP TO AL160058.2; EXPRESSED IN PLACENTA, SIGNAL = 1.9; EXPRESSED IN FETAL LIVER, SIGNAL = 1.3; EXPRESSED IN LUNG, SIGNAL = 1.6; EXPRESSED IN ADULT LIVER, SIGNAL = 1.8; EXPRESSED IN BONE MARROW, SIGNAL = 1.4; EXPRESSED IN HELA, SIGNAL = 1.2; EST_HUMAN HIT: BI768747.1, EVALUE 4.00e-98; SWISSPROT HIT: P28705, EVALUE 7.00e-20; NT HIT: gi5902067, EVALUE 3.00e-98
atcaagcctgcattctctgctagtgattatttgctttctgtcccaatgcccaagtgatatgcctgtttctctgggggaagagccaagaggttcttttgaatgaaagatccaaataaacacaagaacaatctatggaatgttcttttcttctaaccaggaaagcactacggggtatacagttgtgaaggctgcaaagggttcttcaagaggacgataaggaaggacctcatctacacgtgtcgggataataaagactgcctcattgacaagcgtcagcgcaaccgctgccagtactgtcgctatcagaagtgccttgtcatgggcatgaagagggaaggtgagacacattcagttccaaaactcgtgtccggagagaggcatttcctaggcaaggggacattcaactgcaatacacgagaagtcatggtgcccaaagtcatcctaatctccacttcaaatttctttcccacagggctctaaagagaagtctgaataggaaattaggatgactttgggtactcgtgtattgcaattgaatgtacccttttcctaggaagtgtgtctctccagagcagagagggcaagag

SEQ ID NO: 3351 - DNA, 580 bp, Homo sapiens
  MAP TO CHR21_69.0; EXPRESSED IN BONE MARROW, SIGNAL = 2.2; EXPRESSED IN HEART, SIGNAL = 1.7; EXPRESSED IN LUNG, SIGNAL =   1; EXPRESSED IN PLACENTA, SIGNAL = 0.99; EXPRESSED IN ADULT LIVER, SIGNAL = 1.6; EXPRESSED IN HELA, SIGNAL = 4.5; EXPRESSED IN FETAL LIVER, SIGNAL =   2; SWISSPROT HIT: P35520, EVALUE 3.00e-18; NT HIT: AF042836.1, EVALUE 0.00e+00; EST_HUMAN HIT: BG819685.1, EVALUE 7.00e-66
gagggtgagttacaggctgcaccggcactgtggccgggctctggactcgacctaccgtcctgtccagcaccgtggggatgaagtcgtagccgatcccttccacctcgtaggttgtctgctccgtctggttcagctcctccggctctgcgaggatggacccttcgggatccaccccaatgatctgcagagggcgcggcttcagggctcaaggccagcaaaagccccgcctggacatgcctcgatattctattatgggagtggccaataccgccgttaacaactgcctgttaatgatctgcctgtgggtggtggcctgttcccagcctcagaggcaggatgagaaacccaagaacccaggctccaagtattaaagcggtaatgacctaaatgttcagtgcagggcgctcagaagtaaaggcaggtgcctgggaggaactgacctccccggggtgcttctcggagcggggcccccaggacagtccagacagaccaccctgcggcggagcagcagagcctttggggacaaagggcattgctgggcagtgacgtctttttcaagggcaagcaacagggagagaac

SEQ ID NO: 3352 - DNA, 590 bp, Homo sapiens
  MAP TO CHR21_71.0; EXPRESSED IN HELA, SIGNAL = 3.8; EXPRESSED IN HEART, SIGNAL = 1.3; EXPRESSED IN FETAL LIVER, SIGNAL = 1.7; EXPRESSED IN PLACENTA, SIGNAL = 0.89; EXPRESSED IN LUNG, SIGNAL = 0.9; EXPRESSED IN BONE MARROW, SIGNAL = 1.7; EXPRESSED IN ADULT LIVER, SIGNAL = 1.3; NT HIT: gi14780631, EVALUE 1.00e-97; SWISSPROT HIT: Q14684, EVALUE 5.00e-28; EST_HUMAN HIT: BE221756.1, EVALUE 7.00e-97
ctctccgctgtgcttctaccctcagccacaccctggtacagaccatagctcggggtgtcttcgaagctatcgtagatcagtctccttttgtgcctgaagagacgatggaggaacagaagacaaaagtgggtgatggtgacctctctgctgaggagatacctgaaaatgaggtatccttgagaagagctgtcagtaaaaagaagacaggtaggaggatgttcttggtcagtgtagctttctttctgctaaaatcctcctcagacaaacagtttttaatacatttgttggcatcttactgaatgcaacctagagttgatggctctgcctcagcccctcccaagaaaggcagcagaggtgggttcattgtgcctggggggtgcctagcggggctctggggagacctgagatctgtcccatgtggcatacacacatttctgtacctctcaggatctcaggactctcctcgaggattttaccattgtcactgctagtgctttttgtttgctttgttgttttttgtttgacacgctaacaccttagcatgcatggcctcatttctacgggttactcgagggacgtacgcttgtttc

SEQ ID NO: 3353 - DNA, 587 bp, Homo sapiens
  MAP TO AC013614.4; EXPRESSED IN HELA, SIGNAL = 4.7; EXPRESSED IN FETAL LIVER, SIGNAL = 1.8; EXPRESSED IN BONE MARROW, SIGNAL = 0.86; EXPRESSED IN PLACENTA, SIGNAL = 3.5; EXPRESSED IN ADULT LIVER, SIGNAL = 2.6; SWISSPROT HIT: Q04538, EVALUE 1.30e-01; EST_HUMAN HIT: AL517934.1, EVALUE 3.30e+00
gcactgctgctgatgcttacaggttaggggaagggtccacgtggaggccctggcctcaggccccccgctgcaccccgctgctgatacttacaggttaggggaagggtccacgtggaggccctggcctcaggccccccgccccactccagttcttggccccagcgctgttctgtgtttgaggagcctgtgggccttggtctcagatctttccacactccaccccacctttacccagacagctgtcccttggcccgcctgctcacctgccatgtggtctggaacagggagggtgttcctggagaaaagcctttgtgggctctctgaaaagcccagggtcaggcagagacccagcatgggtcccagtgcagccccgctgtggttctggagaggctgtgtggccattcttttggccggtggccactgcttctggatttcttcattctccttcagagggtcccgtgaagaccaaggcatcggctggtttaccctcactgctgcgtccctcctttcgccctccttccccaccacagctaccatctcccttcctctgtccgggacaggatgtagggtttccattcccttgaaca

SEQ ID NO: 3354 - DNA, 588 bp, Homo sapiens
  MAP TO AL035697.19; EXPRESSED IN PLACENTA, SIGNAL = 3.6; EXPRESSED IN LUNG, SIGNAL = 2.3; EXPRESSED IN ADULT LIVER, SIGNAL = 2.2; EXPRESSED IN BONE MARROW, SIGNAL = 2.1; EXPRESSED IN HELA, SIGNAL = 0.66; EXPRESSED IN FETAL LIVER, SIGNAL = 2.6; SWISSPROT HIT: O67784, EVALUE 9.80e+00; NT HIT: AL161532.2, EVALUE 2.20e+00
ggagcctgtcagaagagcagggctggctgctgtccttgcatccgtttgatgtaggagatcacaggaaacaatgtgaaattctgcagcctggttttaaaatttcttacatcttttacacatttcaaaacatcaaatatgtttgttgtagcttgttcttacctctattctgcctaagcaaatgatatttcatctcttaatgtgaaaataagatttttgagttgacacattcattcattttctaaaaggtgtgtgtgtgtgtgtgtgtgtatgtgtgtgtgagtagggttctgtgtgagatggacgggtgaagccataaggatatatagtataaagccatcctttataaaacaggacaacaaatcttacactaaaaatttgctctgtagagttgcaagcctcagaaagtttaggagtgtcacctgtcctgttcctgggcctggagatgagggtccacctctcccaggtcctgaggactttcctcctggagcctagcctgccagtgagtaggctgctctgatctcttctccctgcactccaacatcttgctttcagctttgccctctaaatactggaataaaagggccaaca

SEQ ID NO: 3355 - DNA, 575 bp, Homo sapiens
  MAP TO AL138747.1; EXPRESSED IN ADULT LIVER, SIGNAL = 1.1; EXPRESSED IN HELA, SIGNAL = 0.69; EXPRESSED IN FETAL LIVER, SIGNAL = 1.1; EXPRESSED IN PLACENTA, SIGNAL = 0.89; EXPRESSED IN BONE MARROW, SIGNAL = 1.2; NT HIT: AJ277546.2, EVALUE 1.00e-14; EST_HUMAN HIT: AI733767.1, EVALUE 8.00e-32; SWISSPROT HIT: P10602, EVALUE 5.50e+00
agccagaaaaacaacatggcaaaacaaatttcaatcagtttaaaagataaatttcctgatagtaagtattctgtaactttaaaagcctatttcaagtcctagaacaataggttaaatatgatctggcttttaaaactaggtcatgaggtggggcaagatgactcaatggaagtctccaacaattgtcttccctgtaggaacaccaaatttgacaactatctacacaaaaagtacactcataagaatcaaaaatcaggtgagcaatcacaagacctagttttaacttcatatgttgaaataggcactgtagtgggtaggaaagacagtcttgaattgtcaaccccacctctgccccatcccctggcagcagccacctggtgtggagagagaatctatgtgctggcaggagggaaagcatagctattatgggagtttagtgctgccaacaccaacacccacaaagagagcatttagatcagccctagccagaagggaatttcccattttaacattcaaaaattgacattggtaagccttgaccctgtaggctaaattgctctggggttctgaatgaa

SEQ ID NO: 3356 - DNA, 598 bp, Homo sapiens
  MAP TO AL138919.2; EXPRESSED IN FETAL LIVER, SIGNAL =   2; EXPRESSED IN PLACENTA, SIGNAL = 1.9; EXPRESSED IN LUNG, SIGNAL = 2.1; EXPRESSED IN ADULT LIVER, SIGNAL = 2.2; EXPRESSED IN BONE MARROW, SIGNAL = 1.7; EXPRESSED IN HELA, SIGNAL = 1.6; SWISSPROT HIT: Q09788, EVALUE 2.60e+00; EST_HUMAN HIT: BG428422.1, EVALUE 5.40e-02
tgaggatgaagttggggaagaggaggcctcaaagccccaacaaagcccaggcagtcagagtgcagcactggcattttcaaagcactctgccatcattaattggttaagttataacagggctttgggaattagataagtctttgccccactttttctcatttgaagatgtttgttcagatagatggagggggaatatctgcctctcagaaagagcttttgtggcagacgtggcaagctatgggtttcccagtcagacagcctggggtggagtcctggctgctcctcatcggggatttaacactgggcaagttactcagcctctctgagatgcagatttctgatgtgtaagtggggacttatgcactttagagagttatgtgagattttaaaaatgagattataggtgtatgtaaagatgcctagtacacgatatactgtatacataactaatggcaactactgtcattgtgaagaataatgcaaggggcttggatcttctgttaagatacatcatagttttctgtattacttaggcaaaaccaatttgaaccctagtcctagagagctcacattgctgcccctcttcctgtctcccaat

SEQ ID NO: 3357 - DNA, 597 bp, Homo sapiens
  MAP TO CHR22_106.0; EXPRESSED IN BONE MARROW, SIGNAL = 1.5; EXPRESSED IN HELA, SIGNAL =   3; EXPRESSED IN FETAL LIVER, SIGNAL = 0.77; EXPRESSED IN PLACENTA, SIGNAL = 0.73; EXPRESSED IN LUNG, SIGNAL = 0.64; EXPRESSED IN ADULT LIVER, SIGNAL = 0.44; SWISSPROT HIT: P52591, EVALUE 1.00e-12; EST_HUMAN HIT: AL042278.1, EVALUE 0.00e+00; NT HIT: gi14777802, EVALUE 0.00e+00
cggatgtggaggagtcattcctgagggtgagtgtctgccctggtgctatatctgctgccttttcacactgggtgtgacctgaagagacagcctgaggcctgtcctcactcactgtctttgaggaactgagggtcagctggcagtgggatgaggctggccccctcctccgctttagccccggcaagcctcccgtggagctgtaggagctggagatggcatttcggttggtgcaggagctcgtccaggaggtctgggatgtcgggttatatctgatttctgacctctgggcatggaggtctgtctgcagaggcccgggcccgggcacaaagggagagaggcctccattgtcccgcaggggccgaaatgcagacggtgcatccccggtgacctcggggacccttctctgatcaccaggattctcttggactctagggtccttgtcctgctcaggcatccctgccccgctctccttgagggccctcaacactatcttccctggacacaagtctggggacagccgggtgttgtggaccccaaaggggtgactcccggctcctgggccccacagagagtccatgttctcagtgcagtggctga

SEQ ID NO: 3358 - DNA, 525 bp, Homo sapiens
  MAP TO CHR22_101.0; EXPRESSED IN HELA, SIGNAL =   5; EXPRESSED IN PLACENTA, SIGNAL = 4.1; EXPRESSED IN LUNG, SIGNAL =   4; EXPRESSED IN ADULT LIVER, SIGNAL = 3.7; EXPRESSED IN FETAL LIVER, SIGNAL = 4.3; EXPRESSED IN BONE MARROW, SIGNAL =   4; EXPRESSED IN HEART, SIGNAL = 3.8; SWISSPROT HIT: Q9G2W9, EVALUE 3.70e+00; NT HIT: M77664.1, EVALUE 2.00e+00; EST_HUMAN HIT: BE504099.1, EVALUE 0.00e+00
cttagcctgcacagaaaggggaagtgcgagtggagttggggaaatgagacggcgaatgtcaagtgcttaccacgtagtgcagactcaggctgacagggggccacagaaatgcaaatatgtgagcagtgtgggtaactgcatcctggggaggaagtcctatgtgctggaataccacaagcacccatttctgccctgtggtactgcgcagcgttggtgtgaagcgatacataggcgtgaagtcccgagaacgcaattttcctggttaaaggacagcaacgtctacatttcttccaagaggcctactttgttggaacttcacttcacttgtgaaattagggtgttgggcagtgagtgaccactaactcagctcccttcttgtgaatcttggcaacagaaaacttttcgtttgtattactgaataaagtgtgtttcttacaaactgtttttttacaggcaagaggcagagggaaacacttgcacatcaggcctgagtttgcattctcatctctgccacctcctacaagc

SEQ ID NO: 3359 - DNA, 593 bp, Homo sapiens
  MAP TO CHR21_44.0; EXPRESSED IN BONE MARROW, SIGNAL = 4.3; EXPRESSED IN HELA, SIGNAL =  15; EXPRESSED IN LUNG, SIGNAL = 1.1; EXPRESSED IN ADULT LIVER, SIGNAL = 3.3; EXPRESSED IN PLACENTA, SIGNAL = 1.2; EXPRESSED IN FETAL LIVER, SIGNAL =   5; NT HIT: X91233.1, EVALUE 9.00e-03; EST_HUMAN HIT: BG616211.1, EVALUE 5.30e-02; SWISSPROT HIT: O42354, EVALUE 4.40e+00
tgatgaattattgggccctctaggacatcatccaaagagatctacatggtcacagaatgttaaaactggtaaaagccttagtcgtcatcttgactgtatctgacccaagttaagcatgcgtgcctctggctctgggctctgccccttcagtagggtctgcactgtgcctgctgatgcaggagcagaactggctctgacaccccggtctggcccaactgcacacacattggctgtgctttttccatcatctgctgggctcaaagaatcagtatggagggtgagatatggcttccctaccagagaaacttggatggaaaacctaaaagtacagaagcattaacaacaattggggcaagctttcatagtgagatgcaggaaactgaaaggagcctgaagatgccctctcctccctttcttcacgtgataaatttttgaaatctagacatacaacatgatctcctggagacatttgtaatgtctaagcaacagactgtttttctttgaaggctgtggccagttcaataacttcctaccttttacttgctttctttccttttgtgtcttgttttccttcttcttccatgcttgttgcc

SEQ ID NO: 3360 - DNA, 590 bp, Homo sapiens
  MAP TO AL136224.3; EXPRESSED IN LUNG, SIGNAL = 5.6; EXPRESSED IN ADULT LIVER, SIGNAL = 7.1; EXPRESSED IN HELA, SIGNAL = 5.2; NT HIT: AL163227.2, EVALUE 4.00e-45; EST_HUMAN HIT: BE512633.1, EVALUE 3.00e-59; SWISSPROT HIT: P28887, EVALUE 1.90e+00
gacaggcaagttccttctgcctatgagcctgtaaaatcaaaagcaagttagttactttctagatacaatgggggtacaggcattgggtaaatacacctgttccagaaggaagaaattggccaaaataagggggctaaaggccccatgcaagtccaaattcaggggggcagtcaaaccttaacgctccaaaatgatatcatttgactccatgtctcacatccaggtcatgctgatgcaaaaggtgggcacccacagccttgggcagttctgctcctgtggctttgtggggtatggcccaactcctagctggtttcacgagatggcattgattgaggattttccaggcacaaagtgcaagctctcagtggatctgacattctgggtctggaggacggtggccctcttctcacagctccactaggcagtgccccagtgaggactctgtgtgggggtttcaactccacatttcccttccacattgccctagcaggggttctccatgaggtctctgcccctatagcaaatttctgcctgtacatccattcttttccatacatctgctgaaatctaggtggaggttcccaaagttt

SEQ ID NO: 3361 - DNA, 587 bp, Homo sapiens
  MAP TO AL160211.1; EXPRESSED IN HEART, SIGNAL = 5.8; EXPRESSED IN HELA, SIGNAL = 3.2; EXPRESSED IN PLACENTA, SIGNAL = 6.7; EXPRESSED IN ADULT LIVER, SIGNAL = 5.6; EXPRESSED IN FETAL LIVER, SIGNAL = 4.6; EXPRESSED IN LUNG, SIGNAL = 6.4; EXPRESSED IN BONE MARROW, SIGNAL = 5.2; SWISSPROT HIT: P52367, EVALUE 1.50e+00; NT HIT: AJ271735.1, EVALUE 6.00e-07; EST_HUMAN HIT: BG707688.1, EVALUE 4.00e-09
aagcaacgcaggagtgaaagaacatcaaacacacagaaaactaccaattttccaagactgctgaagtatacagtgagaagaatgactttaaagtttagatcatatagagcctagtgtgtcttactttttagttattttattattaatgtttatggatacataataattgtacatatttatgggtacatgtgatatttttatacaaggatgcaaatgtaataattaaaactgggtaattgggatagccatcacatcaagcatttttcatttgtgttggaaatcttccaacacaaatctctattagctaatttgaaatatgataaattgttaactatagtcatcctattgtgctactgaacactagaacttattctttatatctaatgattttttttatccattaataactcctcttcactcacccctcccactaccttttccagcctccctggtaaccattattccatttactacctccatgagagcaaattttttagctcctaaatgtgacagagaccatgaaatatttgtttttttgtgcctggcttatttcacttaacatagtgccctccagtcccattcatgtt

SEQ ID NO: 3362 - DNA, 550 bp, Homo sapiens
  MAP TO AC020759.3; EXPRESSED IN BONE MARROW, SIGNAL = 2.2; EXPRESSED IN HELA, SIGNAL = 1.3; EXPRESSED IN PLACENTA, SIGNAL = 2.4; EXPRESSED IN LUNG, SIGNAL = 2.9; EXPRESSED IN ADULT LIVER, SIGNAL =   3; EXPRESSED IN FETAL LIVER, SIGNAL = 2.2; SWISSPROT HIT: Q02817, EVALUE 9.00e-02; NT HIT: AL163208.2, EVALUE 6.00e-10; EST_HUMAN HIT: BI561486.1, EVALUE 1.00e-120
tgttggacttcccagtctccagaactgtgagaaataaatttatgttgtttacgtcactcaatctacagtatatttttatggcagcctggcaggtctaatacacttaggtcatcttaggggaataaaaaagagtttaaaactccagctgaccttctcatgggccaagtatttggcagacaagatgatgacctggctcttggcccaacctgagacctggttgagggtggagatggctccgtgcacagcctcgggggagagggattccagttggctgtaggtcaaacctacaactgcatccgacaaagaacccagggtctcattgagggtctggttctccatggcaatgtccaggagttctgctttgagctggaaggagagcaaactggaatgagtgttgacaggaagcagggcggtggctccctctgaccatatccagggctattaggactccacagcacctcccttgaccctgttccatcaaagcttttgggctcagaaacgatgaaggaaagggactcctgccatgcccagacagtgagacaccacacgg

SEQ ID NO: 3363 - DNA, 553 bp, Homo sapiens
  MAP TO AL138478.1; EXPRESSED IN BONE MARROW, SIGNAL = 2.3; EXPRESSED IN LUNG, SIGNAL = 2.8; EXPRESSED IN PLACENTA, SIGNAL = 3.4; EXPRESSED IN ADULT LIVER, SIGNAL = 3.3; EXPRESSED IN HELA, SIGNAL = 1.9; EXPRESSED IN FETAL LIVER, SIGNAL = 3.1; EST_HUMAN HIT: AV762447.1, EVALUE 1.00e-126; SWISSPROT HIT: O00409, EVALUE 2.00e-13; NT HIT: gi14748995, EVALUE 4.00e-54
cgtgcatgactgtgtgagtgtgtgtctgtgcatgtctgtgtgactgtgtgtgtgtgtgtgtatgtgcacgtgtgtgtgtgtgtttctctctgtctctgccctctgtctctctctctctcttattggtctatccagaatttctgacttggaacggaaatcttcacagttgaattcacgtgcggtgtctttctcccctttgctttttcagttcctccaggagtgatccaaaatggagcgcgggtcctgagccgagggctgtttcctggcgtgcggccgctgccaatcactcccattggggtgacagcggccatgaggtaagtggggagtgcgctgggcagagccagcctggggagtgggaagggcagctttctgtccacggggtcccttctggagacagagaggagctgcttcgaactagtgacagcaataaacctggtttgcgtgctcagaaatgtgaaagtaaccccaagaactcccaatccaaatgcccccttctctttctcgggccaccagatgatcctggtctctttacagatgaggagatggaggcaag

SEQ ID NO: 3364 - DNA, 518 bp, Homo sapiens
  MAP TO AL136163.3; EXPRESSED IN FETAL LIVER, SIGNAL = 0.97; EXPRESSED IN HELA, SIGNAL = 1.7; EXPRESSED IN LUNG, SIGNAL = 1.3; EXPRESSED IN ADULT LIVER, SIGNAL = 0.98; NT HIT: gi15594346, EVALUE 1.20e-01; EST_HUMAN HIT: AW500008.1, EVALUE 0.00e+00; SWISSPROT HIT: P51990, EVALUE 7.20e-01
catgtgcaaattgtagaaaggcaattatgcaacagaatataaaggcattaaagaaaaacagcttaccttcaatgggtacctgaattctctttaacagccacaactgaacttcagatttattatccatttgtgcaccttgacagctgttgtccagagtagattccaaagaggagtctagagcctctttaatcacatttgcttctgtagaagagttcagttttaccgggaggggctctccctttttcacccaggtcttatctggctctttattgccctcagttatgggatcacccgcctgggaaagagaactactaagggtaatgtctattccccctggttcaatactttttccatcacttaattctgttttctgcaaattttcagatacctgtggcccttctttgttcttagtcaggtaatattcaatgagtttaactttatctaaatcttcatgtatgttcagtgtgttttctactcggctttctggcgaaccagactgcttgtccacttctggcatt

SEQ ID NO: 3365 - DNA, 548 bp, Homo sapiens
  MAP TO CHR22_92.0; EXPRESSED IN HELA, SIGNAL = 1.3; EXPRESSED IN BONE MARROW, SIGNAL = 0.42; EXPRESSED IN ADULT LIVER, SIGNAL = 0.58; EST_HUMAN HIT: AI033018.1, EVALUE 1.90e-01; SWISSPROT HIT: Q9ZCG0, EVALUE 6.80e+00; NT HIT: AF428300.1, EVALUE 1.30e-01
tgggtcttgctagagcttccatacggcatcactctttgctatagatgtttccaataccaatgagtctacagcatttaaaagcgctataacattttgcactacagactggacttgttagagccttactttgctctgagcctcattaaaaactgccatcattatgagtttctcaataaataggtcagaggagcatgtgaaatctgacgtatgttggcctgaaaaacacaaaaaggctcactaagtgtggtgcatatttctttgtggtggacgaggtaaggtacagcaacctgcttatgacttcagtggcataatgctcataagcatagggccatttgacctgagaaacttcatcaggataactggcatctgaaatttcacaccatttgtcttctatcttcctacatagatgtaagaagatacttattaaggtatgtggtgtgtttcatatttcttgctgaccataagaattagtatactatcatcagggtaacagaccatgatgacatttgataggttgtaacgatggcccctccagaccacaatgacaa

SEQ ID NO: 3366 - DNA, 598 bp, Homo sapiens
  MAP TO AC015855.4; EXPRESSED IN PLACENTA, SIGNAL = 1.8; EXPRESSED IN LUNG, SIGNAL = 1.7; EXPRESSED IN ADULT LIVER, SIGNAL = 2.4; EXPRESSED IN HELA, SIGNAL =   3; EXPRESSED IN FETAL LIVER, SIGNAL = 1.9; EXPRESSED IN BONE MARROW, SIGNAL = 1.6; EXPRESSED IN HEART, SIGNAL = 1.7; NT HIT: gi16161833, EVALUE 2.00e-03; EST_HUMAN HIT: AI285886.1, EVALUE 1.00e-52; SWISSPROT HIT: Q9Y5P3, EVALUE 3.90e-01
ctagcccaaaagtcagtggcttaaaattcatccattttactatatctcttgattttgtgggacaggaattcaaccagaggctcagctgggcaattctatttcagatggagtctacagaggtcacacagtaggattcagctgacagatagacacagagggtacgatatggctttgcccacatgtatgatgccttggtgggaatggctggaagactggactcagctgggaatggtaacgggagcccctacacgtggcctttccagcatggtggcctcaggttgctgggcttcttccatgatggctggggctcccagagtaagtgctacaagaagctgagtggaagctgcagggcttcttataacctggccttgaaaatcccagaatttcacttctttcatattctgttggtccaggaagtcattaagaccagctcaggtttagagggaataaaactagactccacctctcaatggtagcagtagcaaagaatatgagatcatctctattttattacacaatttgccctaagacctaggcaagcagggtccctagctcaggccccaggccagattctcaggggaccccacacttttgagtg

SEQ ID NO: 3367 - DNA, 565 bp, Homo sapiens
  MAP TO AL139135.2; EXPRESSED IN PLACENTA, SIGNAL = 1.1; EXPRESSED IN LUNG, SIGNAL = 0.93; EXPRESSED IN FETAL LIVER, SIGNAL =   1; EXPRESSED IN ADULT LIVER, SIGNAL = 1.3; EXPRESSED IN BONE MARROW, SIGNAL = 0.87; EXPRESSED IN HELA, SIGNAL = 1.4; NT HIT: U66060.1, EVALUE 3.40e-02; EST_HUMAN HIT: AI133501.1, EVALUE 1.30e-02; SWISSPROT HIT: O51634, EVALUE 5.40e+00
ctctacccagcacttccctgccatgctcccgtatcaaatttcagttgttttaagctacactgcttgtggtacactgcttaaccaagttgctttgttaaagcaactttaggaaattaatacattctccaattttttcattccccactcttaactctagagtagatacaggaagaagagtgaaggaagaggaggagtgaaaataggcatggaagcctctaagcctccaggtactgggagcagagagagaggtaaggtttgattgcataggtaatggaggttttaaattaggatgattgatctagaaattgcatactctatattttagacccttatgtcaattttcattgcaaattgtctgttttaatgagataaacttcaaataggattaatgggtttacaaagaaattaagcagatatttgcaggaagctattgaagactaataaatgtcattcacataggcaccccatcaagttctgagtgctcaactatacctgtcacacagacttgaccgagagtaaatggatctaagtgggcatcctgttcagcctaagttcagccaccttg

SEQ ID NO: 3368 - DNA, 545 bp, Homo sapiens
  MAP TO AF238280.1; EXPRESSED IN HELA, SIGNAL = 0.5; EXPRESSED IN FETAL LIVER, SIGNAL = 0.66; EXPRESSED IN PLACENTA, SIGNAL = 0.61; EXPRESSED IN LUNG, SIGNAL = 0.63; EXPRESSED IN ADULT LIVER, SIGNAL = 0.74; EXPRESSED IN BONE MARROW, SIGNAL = 0.61; NT HIT: AE000369.1, EVALUE 8.00e-03; EST_HUMAN HIT: BE149398.1, EVALUE 4.90e-02; SWISSPROT HIT: P08547, EVALUE 1.80e-02
ggtttccctcatccttgttgatttcctttttatataggtaagtgatctccctttttaaaccataaaattcttcagagggacattaggaaaagagcgacatgaataaatactgaagtctatcttgtttgttcatagactcaatatcatgaagatgaaaatttttcttaaatttatctgtgaattcagtgcatccccagtcaaaatccaaataggaagcattggggaactagtccaaattatctcaaagttcacgcagaaaaagacacatgtaagtagcaggtgtcttaatgtttgtttggtggcaaataaagacatccactcaactagcataagttagaagggcatttcttgtcatggggaacaggaagtgagtgccatcaggaacaattgcaagctctttgttcctctgcatccatttcattcttttctctttagatgtggcaaggaaatggctgccccacagtctgctccccagttcacttgtcctcacacgtctagggacagaaccaatctgtgaaagttgctgtgtcctcagttcatggcct

SEQ ID NO: 3369 - DNA, 518 bp, Homo sapiens
  MAP TO AL137802.2; EXPRESSED IN BONE MARROW, SIGNAL = 2.2; EXPRESSED IN HELA, SIGNAL = 1.7; EXPRESSED IN HEART, SIGNAL = 2.5; EXPRESSED IN PLACENTA, SIGNAL = 3.1; EXPRESSED IN LUNG, SIGNAL =   3; EXPRESSED IN ADULT LIVER, SIGNAL = 2.9; NT HIT: gi16161774, EVALUE 0.00e+00; EST_HUMAN HIT: BE149144.1, EVALUE 0.00e+00
tgaagtgagccagtgattgcagggcagctggtctcttccttcctcacctttttcctcatgttctctccccaggtgggtgaaacagcagtgtgaatttgcaaaacaagcccagaacccagaccaaggccctaaactggacctgggcttcaaggagggccagaccatcaagctcaacatcgcagtgagttctacccttgcttggctgtggtgacgtgatacttgtggccacccagccccagagcccattgctcttcttacagttcagctccttcagttcagcagatgtttagtgagcatctgccttgtgccaggtcctgcatcggggtgaacaagagacctctgttctcatggagctcagagttgagctgagacaggcaggtaaaaatgtgataacaacatggcaggaaaggttccatgactaagggatgccctgggtgccgtgggctcctagaggaagggtgtgcagcccatagttgtgggaaccaaggaaggcttcctggaagaagggacctgtaggc

SEQ ID NO: 3370 - DNA, 553 bp, Homo sapiens
  MAP TO CHR22_163.0; EXPRESSED IN HEART, SIGNAL = 1.6; EXPRESSED IN BONE MARROW, SIGNAL = 0.73; EXPRESSED IN LUNG, SIGNAL = 1.2; EXPRESSED IN PLACENTA, SIGNAL = 1.3; EXPRESSED IN ADULT LIVER, SIGNAL = 1.3; EXPRESSED IN HELA, SIGNAL =   1; EXPRESSED IN FETAL LIVER, SIGNAL = 0.82; NT HIT: AJ006345.1, EVALUE 8.20e+00; SWISSPROT HIT: Q05722, EVALUE 6.90e-02
aagggatggaagtgttgcagtgctgcccaaggagaccgaggcgggtggcaacgcaggagtacaaggctatccccagggcctgcctgtggaattcggcaggaagcacgtgattgggaatgctgagagttctgtgccatctgcacatggtccccggcccagctctgcagaggagcctgtcccagcacaggatggcactggtgttcaggtagaaagccgtggcccccgcagaagcacacacagccgcggtgagcctctggttgcttgctttgaaaaaaactttatattttgaaaacaattgcacatgaattattcatggcaaactcttcttgctcagttctttcacaaaaccatatgtactggatcgtaaggaaatgtctgcaggcaaatgttccccagcctagagggctgtgaggtgccagggagattcgtactatcccccaggccctcagcagcctgtccagcggtcgcaggagcgtaatccccaggggcacggagcaccggagcaccgcagagaacacaaacgctgcaagtgccattcccagaagaggctcag

SEQ ID NO: 3371 - DNA, 580 bp, Homo sapiens
  MAP TO CHR22_195.0; EXPRESSED IN BONE MARROW, SIGNAL = 0.9; EXPRESSED IN HELA, SIGNAL =   1; EXPRESSED IN LUNG, SIGNAL =   1; EXPRESSED IN FETAL LIVER, SIGNAL = 0.91; EXPRESSED IN PLACENTA, SIGNAL = 0.94; EXPRESSED IN ADULT LIVER, SIGNAL =   1; NT HIT: gi14778050, EVALUE 6.00e-87; EST_HUMAN HIT: AI247548.1, EVALUE 3.00e-03; SWISSPROT HIT: P06869, EVALUE 1.00e-04
ttcccctagttgtgagctgggatgaaaggggttggaagaagagactagatatatatctatctttttaaagtactgagtggccccatcttacctgcaatagttgtgctcacccaggcccccctccccgttggggtatttcagagtgttgtatggatgctggaaagtctcgttccaaaacagacatggcttcccgccttgtagtgctgtccagttctgtgttcccctataatccgcaccattggctgtgaaacactctagaagaaaaaaaagacagagcaaactaattttctggcaacattcatggtttcctccctctttggttgatgttttgttttgtttggaccaagctggaaatggatagtgtcttgctagatcctggacacagtgcagttaacacttctggggctgaataaatctgaaacaaggtaccctcaaaaagctaggctaatcttggcactagcttgtctacagacactagaacattttcccctaaagtatacagatcccaactaggaaataaacagggagctgaagtgtactgaagcccatgaagtgaaccaggaaacccctaaatctggga

SEQ ID NO: 3372 - DNA, 513 bp, Homo sapiens
  MAP TO CHR21_27.0; EXPRESSED IN LUNG, SIGNAL = 0.77; EXPRESSED IN FETAL LIVER, SIGNAL = 1.2; EXPRESSED IN PLACENTA, SIGNAL = 0.67; EXPRESSED IN BONE MARROW, SIGNAL = 1.3; EXPRESSED IN HELA, SIGNAL = 3.3; EST_HUMAN HIT: BE061127.1, EVALUE 2.80e+00; SWISSPROT HIT: Q9GZZ6, EVALUE 3.60e+00
ttccagcaaaagatgccttcagttgccccggggctttactcccgacccatgtggtagttagacctccccgaaaggaaacagagcatgaaagagagaggtggcagggtcttggaaaagagacagatccgacagttttccatttcaactcacccttctgatgaatatcccagatggagcccccagatgaaatggccacggcaacggccacgacgggcgggggaaaaaccacagctgccactgggagcctgcacggttggctggctggcgcttgctgcccggtgtgccagtggaactctactctggccaaggaattcagctctgtctgaacagaggggaagcatacaatgattaaggagacacatttgcgctgagcaaggggttcttcccccaggaccttccccttttgttccttaaactgttttctcttgttttccttttccaagaggttttcttccccagcacgctgcttctgttagggaagttaatggagaagcgacccctactggctgataa

SEQ ID NO: 3373 - DNA, 599 bp, Homo sapiens
  MAP TO CHR22_88.0; EXPRESSED IN BONE MARROW, SIGNAL = 0.95; EXPRESSED IN HEART, SIGNAL = 1.2; EXPRESSED IN HELA, SIGNAL = 1.6; EXPRESSED IN PLACENTA, SIGNAL = 1.2; EXPRESSED IN LUNG, SIGNAL = 0.97; EXPRESSED IN ADULT LIVER, SIGNAL =   1; EXPRESSED IN FETAL LIVER, SIGNAL = 0.88; NT HIT: AJ277636.1, EVALUE 5.70e-01; EST_HUMAN HIT: BF841862.1, EVALUE 8.40e-01
attgcaaggccagtgagttcttgggtgggttagaatctgatagtatctctttatttgattttgcaagttagaagaacaccagccacctccattatgcacacccatggcttctccgtttagtgcctatttatttgtccttgacttccttctttgcagaatatggtagtagagatggcagaaaataatgatagccagaaaaatcactggaatatagtcaagacctgactaaacgactggcaagaaggactaacctagaggggaaaagtaagagaaaagtggcttctgtccttcagaagcgaatcgagagaagcgacttggattactcacatccgaattgtccttttgagattgtccctagtcagcgtttcactggaaggtgatcttacctgcctctcactacctgctactctgtttatcagcctttccatttctagcaccatatttctacttattggacactttctttgtatattaagctatcatttttagctcaacatgtgtgaccccacttttaccctacatcttctttacttactaaatagctgcccattccaatttctttttctgttaatggtattacccaagatcaaaacctcagc

SEQ ID NO: 3374 - DNA, 579 bp, Homo sapiens
  MAP TO CHR22_16.0; EXPRESSED IN PLACENTA, SIGNAL = 0.76; EXPRESSED IN HELA, SIGNAL = 0.55; EXPRESSED IN LUNG, SIGNAL = 0.89; EXPRESSED IN FETAL LIVER, SIGNAL = 0.7; EXPRESSED IN ADULT LIVER, SIGNAL = 0.82; EXPRESSED IN BONE MARROW, SIGNAL = 0.65; NT HIT: Y08032.1, EVALUE 1.00e-115; EST_HUMAN HIT: BG980069.1, EVALUE 0.00e+00; SWISSPROT HIT: P10263, EVALUE 2.00e-51
gtctctcatccctcctgacgagaaatacccacaggtgtggaggggctggcccccttcatctgatgcccaatgtgggtgcctttctctagggtgaaggtactctacagtgtggtcattgaggacaagttgacgagagagtcccaagtacgtccacggtcagccttgcggtaagcttgtgtgcttagaggaacccagggtaacgatggggcaaactgaaagtaaatatgcctcttatctcagctttattaaaattcttttaagaagagggggagttagagcttctacagaaaatctaattacgctatttcaaacaatagaacaattctgcccatggtttccagaacagggaactttagatctaaaagattgggaaaaaattggcaaagaattaaaacaagcaaatagggaaggtaaaatcatcccacttacagtatggaatgattgggccattattaaagcaactttagaaccatttcaaacaggagaagatattgtttcagtttctgatgcccctaaaagctgtgtaacagattgtgaagaagaggcagggacagaatcccagcaaggaacggaaagttc

SEQ ID NO: 3375 - DNA, 513 bp, Homo sapiens
  MAP TO AC020759.3; EXPRESSED IN LUNG, SIGNAL = 1.3; EXPRESSED IN FETAL LIVER, SIGNAL =   1; EXPRESSED IN ADULT LIVER, SIGNAL =   1; EXPRESSED IN HELA, SIGNAL = 0.89; NT HIT: M19529.1, EVALUE 3.10e-02; EST_HUMAN HIT: BG216075.1, EVALUE 8.00e-50
acactgctgggggtatgaagttacatacagtaaatgtacagggtgatcttttcaaaatctgagaaattctgaattctgaactatatctgtccccaggggttttcgtaagggtttatgaacctgtcataccaccataagtagaaaatcagtaccacctgctagaagaagagaagatgaccgtaaaaataaatataattaaactacatattgtaattttaagaaaaatgttttttaaaaacacctaaactcacacagatctcctctgaccccatcagcagagcctggtcacaagcctctaaattccaaggcccatcacctgtttccctgtgtgatttgaaatggggtcaagctcccatttctccttgaagaactgagcacctactttgaatatctcatcaggaaggcattttattgctgatggctggaaatatggcatcaaatccttgtcaagcatccggagctctgccttagttaatccagctggggagaaaaaggaatcacgggggtttagtt

SEQ ID NO: 3376 - DNA, 565 bp, Homo sapiens
  MAP TO CHR22_209.0; EXPRESSED IN FETAL LIVER, SIGNAL = 1.2; EXPRESSED IN BONE MARROW, SIGNAL = 1.5; EXPRESSED IN HELA, SIGNAL = 2.3; EXPRESSED IN PLACENTA, SIGNAL = 0.83; EXPRESSED IN LUNG, SIGNAL = 0.84; EXPRESSED IN ADULT LIVER, SIGNAL = 0.78; NT HIT: X55782.1, EVALUE 2.10e+00; SWISSPROT HIT: P32873, EVALUE 7.00e+00; EST_HUMAN HIT: AA363322.1, EVALUE 7.90e-01
tcctgagcccattcattctcctactcttccaggcaactatttaacattgcttcctttcatctcacacttctcatatgtccttctcctctagattctcagtgacgatgattttgtttcaaatttcattgaaaacattagaagcaataagaagagaactgccaaagctctcagcaccacatctacccaccttccagtacctattccatataccctgctttccctcttgctcctttgcatgaaccctgtgctcctactccatggaaacccttcacttgtgctctaggtatcacccctttcgccgattctaggacaatgctccacccacatctcctctttctccggcatccacttttctttttctaatggatcatttccattcatttcaacacgccattgtaatatcttccttaaaaataaaaaccctttcttgaccctatattcaccatcaattaccacccatttcccccctgttctactttacagcaaaaagtctatacctctggattctgctctctctttcattctctctcgacctcactcccatccctccacctgctatggtcat

SEQ ID NO: 3377 - DNA, 597 bp, Homo sapiens
  MAP TO CHR22_155.0; EXPRESSED IN BONE MARROW, SIGNAL = 1.2; EXPRESSED IN PLACENTA, SIGNAL = 0.36; EXPRESSED IN LUNG, SIGNAL = 0.54; EXPRESSED IN HELA, SIGNAL = 0.63; SWISSPROT HIT: P01717, EVALUE 5.00e-29; EST_HUMAN HIT: H62289.1, EVALUE 0.00e+00; NT HIT: L29162.1, EVALUE 0.00e+00
ttttccccaagtcacactccagcccagaaaacaccaggacctactggacctgccaaccccgaatttattattgatccaccttctgtagggcctccgtagagatctggaaggaaggaggcctcagagtctctgatctgggtgtactgggccagacctgttcgtggctttgtccacagtcctcctggggctggaggaagaaggtgacacagatggcaaggggtttgtgtctcatttctccatctgcctgtgtcactgtgagattgttgtcagccgcagagtaacagtaatagtcagcctcatcctcaacctgggccccgctgatggtcaaggtgactgtggtccctgagctggagccggagaatcgctcagggatccctgagggccgctcactgtctttataaatcaccagcacaggggcctggcctggcttctgctggaaccaccgagcatatttttttgccagtacatctcctgagcaggtgatcctggctgtctgtcccggagacactgacactgaggatggctgtgtcagctcataggaggccacagagactgcaagaaaagacaggagagggggcttgaggacaaaggacgcat

SEQ ID NO: 3378 - DNA, 591 bp, Homo sapiens
  MAP TO AC019287.3; EXPRESSED IN HELA, SIGNAL = 0.64; EXPRESSED IN FETAL LIVER, SIGNAL = 1.8; EXPRESSED IN LUNG, SIGNAL = 1.8; EXPRESSED IN PLACENTA, SIGNAL = 1.7; EXPRESSED IN BONE MARROW, SIGNAL = 1.8; EXPRESSED IN ADULT LIVER, SIGNAL = 1.9; SWISSPROT HIT: O13426, EVALUE 3.30e+00; NT HIT: U93163.1, EVALUE 2.00e-31; EST_HUMAN HIT: AI571905.1, EVALUE 3.00e-28
cgagctgaaaaattcctattgcctagtatttagtatattatactttttattgtcatttttgagtatatgcttctacttattaagaaaagttaactataaaatggccacaagcagatccttcaggaagtttttcagaagaaggccttgttatcgtaggagatgacagctccacacatgttattgcccctgaagacctgggacaagatgtggaggtagaagacagtgatattgatgatcctaaccctgtgtaggcctaggctaatgtgtgtgttcatgtcttagttttcttaaacaacagtttaaaaagttaaagaaaaccccaaaatttaagaataataaaaagcttgtagaatgaggatataaagaaaatagtttcatacagctgtacaatgtctttatgtttttaagctaaacattattacaagagtcaaaacatttaaaaattaaaaagcttttaaagataaaaaattacagtaaactaaagttaatttattattgaagaaaaataagatttttacataaatttagtgtgtcctaggtgtacagtgttttataaagtctacagtacaacagtaacgccttaagccttca

SEQ ID NO: 3379 - DNA, 574 bp, Homo sapiens
  MAP TO CHR22_95.0; EXPRESSED IN HELA, SIGNAL = 1.9; EXPRESSED IN FETAL LIVER, SIGNAL = 0.48; EXPRESSED IN BONE MARROW, SIGNAL = 0.49; EXPRESSED IN PLACENTA, SIGNAL = 0.65; EXPRESSED IN LUNG, SIGNAL = 0.51; EXPRESSED IN ADULT LIVER, SIGNAL = 0.64; EST_HUMAN HIT: BE206853.1, EVALUE 5.20e-02; NT HIT: AF189368.1, EVALUE 9.00e-03; SWISSPROT HIT: P17053, EVALUE 7.20e+00
aacaaatgcctccacacctcctgatctgcttttgcagacctccagcctcagtccctgaagtcgccgactctcctgcattgctgcgtctagaaaggaatgccttccaggtgatccaggctctgatacggtggaatataaacaggttaatcaataatagcccagaaatggacaaactctctgagctgcagcggacctccagtcagtccctcctgttgttgatgacaaacggggggtttgcactggagaggcacaggtggcccagtcattcgtgcaggctctgagcagcctgcctgggttgtagcttggctccagcgctcctgctagctgtgtaactgaggccgattacttcatcctgaacacttccagttcctcatctatagaacaggaatagcagcagcaacttgtctcatggggttggtgaggattattaattattacatacacaacacctggagcaatgcttagcacacagtgagctctcaacaaaggacagggattattgttattgctggtgcgcttggtgctgagaagcttgctcataccctgggcccagaggaggaaaatgggtggtctt

SEQ ID NO: 3380 - DNA, 534 bp, Homo sapiens
  MAP TO AC020588.4; EXPRESSED IN LUNG, SIGNAL = 4.4; EXPRESSED IN PLACENTA, SIGNAL = 5.4; EXPRESSED IN BONE MARROW, SIGNAL = 3.2; EXPRESSED IN ADULT LIVER, SIGNAL = 3.7; EXPRESSED IN HELA, SIGNAL = 2.5; EXPRESSED IN FETAL LIVER, SIGNAL = 3.3; SWISSPROT HIT: Q62767, EVALUE 3.00e-40; EST_HUMAN HIT: BE895831.1, EVALUE 1.00e-122; NT HIT: gi14744017, EVALUE 1.00e-122
caagtagagggcaaaggctggagaagtcccactgggcctatcacccctccaagagttccaggaggctacagggggaggctgggagggccaggcccagcaggcattctccctgggtttggaaaggaaagctcttctcagacaagcttccactccctgtgccaagcactttaccctcatgtcattcaggggcctttgtttccctttctgtgcaggggggtcctgtggagatccttcccttcctctacctcggcagtgcctaccatgctgcccggagagacatgctggacgccctgggcatcacggctctgttgaatgtctcctcggactgcccaaaccactttgaaggacactatcagtacaagtgcatcccagtggaagataaccacaaggccgacatcagctcctggttcatggaagccatagagtacatcggtaggctggccctgctctggggttcctgggtttgagggcgggtgggaaggataaggaacccctgtaagcctgggttgaaggtggacattggaggcactgaat

SEQ ID NO: 3381 - DNA, 527 bp, Homo sapiens
  MAP TO AL138499.1; EXPRESSED IN HEART, SIGNAL = 2.6; EXPRESSED IN PLACENTA, SIGNAL = 3.5; EXPRESSED IN LUNG, SIGNAL = 2.5; EXPRESSED IN ADULT LIVER, SIGNAL = 3.1; EXPRESSED IN FETAL LIVER, SIGNAL = 3.4; EXPRESSED IN BONE MARROW, SIGNAL =   2; EXPRESSED IN HELA, SIGNAL =   2; SWISSPROT HIT: P14629, EVALUE 6.40e+00; NT HIT: gi15300836, EVALUE 3.00e-39; EST_HUMAN HIT: AW390945.1, EVALUE 5.00e-39
ttctcattccacacacaggctgctgctgcacatgaattggagaagatgcaacaaaggtgactaaagtattgtacatctagtcgttcatacatttatgtttaattataattgttgcagaaaatattgctgcttataactgatagttgtgcccataattcttgtagattttctgaatgtatgaagtattttaattttttttttcaccctcatagtgtttatgttaaagatgataaaataagattgctggaagagcaactacaacatgaaatttcaaacaaaatggaagaatttaaggtgtgtgattaagcttgtacactcaggtttcttagaacaaccttgtatacttttcagttgagtgattccagaaatactacgttttgtatgaagtcactctgaaacagtgtttctgtagtttattaggggacttatgcaaaccatgaattttatcatagactttccccctagattatctgttcttttagtggagcttggagatttatttttggcccccaatcttttctcagctg

SEQ ID NO: 3382 - DNA, 599 bp, Homo sapiens
  MAP TO CHR22_13.0; EXPRESSED IN PLACENTA, SIGNAL = 3.5; EXPRESSED IN LUNG, SIGNAL = 3.6; EXPRESSED IN BONE MARROW, SIGNAL = 2.8; EXPRESSED IN ADULT LIVER, SIGNAL = 3.3; EXPRESSED IN HELA, SIGNAL = 1.4; EXPRESSED IN FETAL LIVER, SIGNAL = 3.3; EST_HUMAN HIT: BI049254.1, EVALUE 1.00e-125; SWISSPROT HIT: P02810, EVALUE 1.70e-01; NT HIT: AL163204.2, EVALUE 1.00e-111
gactcccaagcctcagtgacattgctcaaccaggagctgaagtgcattcctgggcttaggccaggccacccacccacccgctgcagtcctggaagctcagaggccacagtggagacagcagcgtgggggatgtcccccctcctctccccaccatcctcgtcaggcagaggccagggtgcagggaccaccggagcaaaggcccagggaaatgaatgggtgtcattctggtcctgatccgaggcacagccaggaaggtccctgtggggaaaagaaagagatatcagactgttactgtgtctatgtagaaagaagtagacgtaagaggctccattttgttctgtagtaagaaaaattcttttgccttgagatgctgttaatctgtaaccctatccccaaccctgtgctcacagaaacaagtactgtgtcgactcaaggtttaatggattcagggctgtgcaggatgtgctttgttaaacaaatgcttgaaggcagcatgcttgttaaaagtcatcaccactccctaatctcaagtaagcaggggcacaaaacactgcagaaggccgcagggacctctgcctaggaaagccaggtattgtcca

SEQ ID NO: 3383 - DNA, 556 bp, Homo sapiens
  MAP TO AC024326.2; EXPRESSED IN HELA, SIGNAL = 1.1; EXPRESSED IN FETAL LIVER, SIGNAL = 1.7; EXPRESSED IN BONE MARROW, SIGNAL = 1.8; EXPRESSED IN LUNG, SIGNAL = 2.7; EXPRESSED IN ADULT LIVER, SIGNAL = 2.6; SWISSPROT HIT: Q09772, EVALUE 4.60e-01; EST_HUMAN HIT: BI837073.1, EVALUE 1.00e-85; NT HIT: gi13626872, EVALUE 7.00e-99
aaaagaacctgtggctttgctacaagaagtctatagaaattctgtgacagatctttcaccaacagatataattacatatatagaaatattagctgaatcatcttcattactaggttacaagaacaacactatctcagccaaggacaccctttctaactcaactcttactgtaagtatgttcagctttaactcaatataattgagctttgaatttttcctttcatttgtgaatagtgtaggattccaacatttctaaaagacatactttttttcaataggaatttgtaaaaaccgtgaataattttgttcaaagggatacatttgtagtttgggacaagttatctgtgaatcataggagaacacatcttacaaaactcatgcacactgttgaacaagctactttaaggatatcccagagcttccaaaagaccacagagtttgatacaaattcaacggatataggtaagaaacaagggtccatttaaaagtaattgtgttttccaaataagccattttcaaagttttgggtggggttaggaggcatggtgttgaaact

SEQ ID NO: 3384 - DNA, 500 bp, Homo sapiens
  MAP TO AC016078.3; EXPRESSED IN FETAL LIVER, SIGNAL = 1.8; EXPRESSED IN PLACENTA, SIGNAL = 1.2; EXPRESSED IN LUNG, SIGNAL = 1.2; EXPRESSED IN ADULT LIVER, SIGNAL = 1.4; EXPRESSED IN HELA, SIGNAL = 1.1; SWISSPROT HIT: P35190, EVALUE 6.00e+00; NT HIT: gi9964314, EVALUE 1.90e+00; EST_HUMAN HIT: AA437318.1, EVALUE 1.00e-106
ttttgaaaatatgggttgccttttatagttgtaccatagttttgatagctcaatttcacttacagatacatttaacgccactagatacaaagtaaaaactttgtctattatctgctgaatgtgtcatttcccacaggtgctaagaacgctcaagccatggagagagatgcatttggagttgtttacattcagacaaagctcatctggttgtttgcagctagtcacaaggtaagcaggggcgtgcatgcgcacacacacacacacgtgaattatatatttcaaaataaattggaattacataaattaaaaaataaatattttaaaatatgatttttaaatgtagtatggctgtatattcatcagtagcaccactgactaatacccaggaaaatgaatctgcagaaaagtccacaaatctacactttaaacaaatacataaactttataaaattgcatgtagggtcatatgtttcagggagggggatacgggatatagggct

SEQ ID NO: 3385 - DNA, 597 bp, Homo sapiens
  MAP TO CHR22_35.0; EXPRESSED IN FETAL LIVER, SIGNAL = 2.1; EXPRESSED IN BONE MARROW, SIGNAL = 1.8; EXPRESSED IN LUNG, SIGNAL =   3; EXPRESSED IN HELA, SIGNAL = 3.1; EXPRESSED IN ADULT LIVER, SIGNAL = 2.5; EXPRESSED IN PLACENTA, SIGNAL = 2.5; NT HIT: gi9635487, EVALUE 0.00e+00; EST_HUMAN HIT: BF739117.1, EVALUE 0.00e+00; SWISSPROT HIT: P26807, EVALUE 3.00e-01
agcacgagattgggctagagaaaaaactttcccgttcatctggggagagagtagaagtcaggatgacatttaagtcactccaggttaagttgtaggacagagttagatattggaattcctgtatatatttagtggggtctgatgagaaagagcctaaacattgactgatctgagagaggtctgatagagaaaaaagtacatgtaccttgactatgccttcagctccagccacttctctaagaggaaattgttgggcaggtggggaagcgctagtcgcggaactaaactgtaagccggaccaggtgtgaggaggggaggtgatagaaggattatagggtggaggagtggaggctgaggaagtattgggacttagctcggtctggcgacaagcagcttggggaggaggggaaaggtcagatgggtctgtagaaaaggaagactgggaagactcagcgacgcttggggttgggaccgaggggacaggcgggagggaaaggaggaggatctgggaggaatcgcattgggaacagagactagggagggaacgaagtgtgaaaaatgcctggacgtaaggcacctcagaccatttgcccattt

SEQ ID NO: 3386 - DNA, 507 bp, Homo sapiens
  MAP TO CHR22_27.0; EXPRESSED IN HELA, SIGNAL = 2.6; EXPRESSED IN FETAL LIVER, SIGNAL = 3.2; EXPRESSED IN PLACENTA, SIGNAL = 3.2; EXPRESSED IN LUNG, SIGNAL = 2.9; EXPRESSED IN ADULT LIVER, SIGNAL = 3.3; EXPRESSED IN BONE MARROW, SIGNAL =   3; NT HIT: gi7305164, EVALUE 7.50e+00; EST_HUMAN HIT: BG719388.1, EVALUE 7.10e-01; SWISSPROT HIT: P24733, EVALUE 2.70e+00
ggcctttaaagtctggaccctcgggaaggcaacggaagggtccccacccctcaatttgctagtatcatggccttcttttggactttcgattgtaaaactgtgaattccatcagatgcttgtcggtgttggcggcggtggctgctgaggtcctgaaagcgttttgcctccgcgtgtgtgcagaacaccgaaataatcgtttttctctcttcgcctctgtttgcagccaacggctttcattaaatatcctcagcggtgctaatggtggtctccgcgcaggctttctaaaatggattactgacgccagtgttggtggcatatttccgtcttgaagtttttacttctaagtggattttaatatcgtactgctggcgtttcaggaaggataaactaacattactctcttgatttgttaaagatccgtttagagttgggcctaatttgactttttttttagcccccaagtgagctcttttaccagcataaatgctcccagatgttttagccca

SEQ ID NO: 3387 - DNA, 571 bp, Homo sapiens
  MAP TO AC021635.3; EXPRESSED IN PLACENTA, SIGNAL = 0.69; EXPRESSED IN LUNG, SIGNAL = 0.69; EXPRESSED IN FETAL LIVER, SIGNAL = 0.58; EXPRESSED IN ADULT LIVER, SIGNAL = 0.85; EXPRESSED IN HELA, SIGNAL = 0.53; SWISSPROT HIT: P03330, EVALUE 2.00e-03; EST_HUMAN HIT: BF930480.1, EVALUE 2.00e-13; NT HIT: AF087913.1, EVALUE 1.00e-105
ccttcgtccttttcctgttgtatatcaagtgctttagaaagatttcgagttcagggtacttattcccaaattccttttattattatctcccttacattctgcatattttcccggtgatctgcgttgttattgtcccactgggggtctcgggtggagaatttctggcctgtggtaggaatgttttcatcaggagggtgctcacattcctgaactaccatagcagccctacaaatcatactcctttcttcctctgaaaagaggatgcccaagatggacagtaactcgacccaagtgtataactgaggtcctaagaattggtcaatttggtctgccactccataagggtcatctagtggcagtttaagctcctttttaaaatttcagacttacaaagccaatgcctgccccccgccccccccccccccgacctcccttgtggtacctctttcaaagggaagagggtcggggctgacctcttaggtacagaaggaactgggaaattctaaatatcttttttacattgttctacctcatgctggagtccttttagagaggggtctttaggttggga

SEQ ID NO: 3388 - DNA, 533 bp, Homo sapiens
  MAP TO CHR22_13.0; EXPRESSED IN HEART, SIGNAL =   4; EXPRESSED IN BONE MARROW, SIGNAL = 4.2; EXPRESSED IN ADULT LIVER, SIGNAL = 5.3; EXPRESSED IN HELA, SIGNAL = 3.2; EXPRESSED IN LUNG, SIGNAL = 4.8; EXPRESSED IN FETAL LIVER, SIGNAL = 4.1; SWISSPROT HIT: P11274, EVALUE 3.00e-18; EST_HUMAN HIT: AW590017.1, EVALUE 0.00e+00; NT HIT: U07000.1, EVALUE 0.00e+00
atcctcatacagggcagtggacagaccgcactgagtcctgggcttccacctcctgtccacccccaaggcaggaaggccaagtccccacagaagcccctggtccactccaccaagtggcatgagtgggtacgatggtgtaaaaactggcttctatagaagctgtttgtacaactcttgttttctctttttttaaaataataaaacagtaaatgaagaaaagacacagagaaggatgtgacatgcctgggccatggagcactctgagatctcatcgcggacaccactgcccacacctccatcccgtcctgcgcaggccgacactcactgacgttgaagcctgccttcagtgcctggatgtccgtggccacaccggacacgcggtagatgcccacctcctccatgcctcggcgctcgatctcctccacgcactggcgcatgatgtagggcaccttggacctctctctcctgcgggaggagggaatgttctcagtgtcctaacagccccgcttgggccataacacaggaggcctgct

SEQ ID NO: 3389 - DNA, 596 bp, Homo sapiens
  MAP TO AL136224.3; EXPRESSED IN HELA, SIGNAL = 1.6; EXPRESSED IN LUNG, SIGNAL = 5.4; EXPRESSED IN ADULT LIVER, SIGNAL = 5.1; EXPRESSED IN FETAL LIVER, SIGNAL = 2.9; EST_HUMAN HIT: AW983880.1, EVALUE 1.00e-116; SWISSPROT HIT: P36118, EVALUE 7.60e+00; NT HIT: AL163210.2, EVALUE 1.00e-97
aaaattgaatcaaggcggtggtttcccccatactattctcatagtattaaatcagtctcacgagatctgattgttttttaaggggtttctgcttttgcttcctcctcattgtcttcttttgtctgcagccatgtgacatgtgcctttcaccttccaccaagattgtgaggcctccccagcaacatggaacatggtgttagcaacatggtgttagttcaatacacctctttcttttgtaaattgcctagctttgggtgcgtctttaccaacagcatgaaaatgaactaatacagtaaattggtaccagtagagtagggtgctgctgaaaagatacctgaaaatatggaagtgactttggaactgggtaacaggcagagattggaacagtttggagggctcagaagaagacagggaaatgtgggaaactttggaacttcctacagacttgttgaatggctttgaccaaaatgctgataatgatatggacaatgaaatccaggctgaggtagttttagatggagatgaggatcttgttgggaactggagcaaaggtgactcttgttatgttttaacaaagagactggtggcattttgct

SEQ ID NO: 3390 - DNA, 509 bp, Homo sapiens
  MAP TO AC024195.2; EXPRESSED IN LUNG, SIGNAL = 3.5; EXPRESSED IN PLACENTA, SIGNAL = 3.4; EXPRESSED IN ADULT LIVER, SIGNAL = 3.8; EXPRESSED IN FETAL LIVER, SIGNAL = 3.2; EXPRESSED IN BONE MARROW, SIGNAL = 3.6; EXPRESSED IN HELA, SIGNAL = 0.91; EXPRESSED IN HEART, SIGNAL =   3; SWISSPROT HIT: O27262, EVALUE 9.40e-01; EST_HUMAN HIT: AI114527.1, EVALUE 8.00e-47; NT HIT: AB063285.1, EVALUE 2.00e-18
tgaaccctgttgtgaactgcgcatatgaaggatctaggttgcctgctccttatgagaatctcacgaatgcctgatgacctgaggtggaacagttccatcccaaaaccatcctctcctcctcggtctgtggaaaaactgtcttccatgaaaccagtccctggtgccaaaaaggttggggactgctgccatagaggggcctttgggtggccccgttaggtgttttctttgtgaggtggtgctttccagcctgccctggactctgtggttcatggtagatcattcgtactgacctggaccagggagcactggtaggagtatctgatttctatgaacagtgcttgctggcactgactcaagaaagaagacaggaaggaatggtgaatacaacttccattgagaaactagagtggaaaaaatgtgcaaattatgctaaaattgtaattaatctgggctgtacaggttgaatatctcttcatcctgaaagaaaaggggaggtcaccatgagaaaa

SEQ ID NO: 3391 - DNA, 564 bp, Homo sapiens
  MAP TO AL136140.2; EXPRESSED IN LUNG, SIGNAL = 2.8; EXPRESSED IN HELA, SIGNAL = 1.9; EXPRESSED IN FETAL LIVER, SIGNAL = 2.2; EXPRESSED IN BONE MARROW, SIGNAL = 2.1; SWISSPROT HIT: Q07736, EVALUE 5.40e+00; EST_HUMAN HIT: AW299979.1, EVALUE 5.10e-02; NT HIT: AL161564.2, EVALUE 8.40e+00
taaggtgtgggaattctggctggggcaccagagtaacttcatgatcaagcactctgtgcacagtcgcttgggctctgacacccagcaagggttctcctgccatttctgatgtgtgctaccaagcatcttctggttcctgatgttcacactgggtgttctgttccaggctgtcatgccatggctgcaagtccaggtggagaatggaggcctctgctcaccagtggttccacgctaactgatgtgtatggcaatgacccacagccacaaaacctcactcagtattcagcattgttcagtatcaaatgtagttatcttgatcattttctgattccttgaaaattggtaaaactccatccgatagacatgggaaatttctggttactaaaatataaatttttaacttaaagaaactcattcccaatgccactgatactgaaatgtcccccagctctctgatctggagttcattttgtttctttccttaaatcactgtctccatggttccttgtaggtctattgggtggtccttacaaacaggaagtttccagatgccagaaaatggtt

SEQ ID NO: 3392 - DNA, 540 bp, Homo sapiens
  MAP TO AL138889.2; EXPRESSED IN HELA, SIGNAL = 1.6; EXPRESSED IN LUNG, SIGNAL = 1.5; EXPRESSED IN ADULT LIVER, SIGNAL = 1.5; EXPRESSED IN FETAL LIVER, SIGNAL = 1.5; SWISSPROT HIT: Q99102, EVALUE 3.00e+00; EST_HUMAN HIT: AA834990.1, EVALUE 0.00e+00
ccttcacctacctctgcgtcttctttgcctgcccagccttagctgggccccacaccactaatggaatttccatcctcatcccatagcatccccaaagaacattcaagtctgagcctcaaggagcctctgcgactcggtgtctagatccaggaaatggagaatgagccgtgactttggatgcttcactcttgtccatcaggctcggaattggtgagcatctcccacattaccgtctccaacggaacaaggtgccccattggacatttcctctgcatggaccagccattctccaaatctgcccccatgtcaccccagctccccatcgcagtcacttctcactccttgtcccctgtccccctgagtgacaggacttttgccagttaggtcctgtccctgtttctgatcttgggtccattccccatggtccctttcttgcttgtgccttgggatctcaggcctgttgaagtaggaggcaggactcaacttcagaccagattgaagactggctgacacagaagaggcaccaaaagcacctctctc

SEQ ID NO: 3393 - DNA, 573 bp, Homo sapiens
  MAP TO AC011881.5; EXPRESSED IN BONE MARROW, SIGNAL = 1.8; EXPRESSED IN LUNG, SIGNAL = 1.6; EXPRESSED IN HELA, SIGNAL = 1.1; EXPRESSED IN PLACENTA, SIGNAL = 2.8; EXPRESSED IN ADULT LIVER, SIGNAL = 1.7; EXPRESSED IN FETAL LIVER, SIGNAL = 1.5; SWISSPROT HIT: P10263, EVALUE 3.00e-17; EST_HUMAN HIT: H59931.1, EVALUE 1.00e-119; NT HIT: AF333072.1, EVALUE 6.00e-04
ctagcaccaccaattgctccaggttttaatgttgcaactacaggagcagtaagtttttcagctaatttattttctcacccatttaggggagagagaggaggtggccattcacttaattcagcaggtggagcaaatgggctaataaaacatactttttaaagtctttcttttctttaatctcctccggtagctgttcttcacactcagaatttgaagttagttttttacactcatcctcctcttcctcatctgaatctgcctcatcatctatttgaaatggctcaaagtctgcctttattagtgcccacactgaccatacagaaactggaatttttgctccatctttatatgccttttaaaaatctcttccaattctctcccgttcatctaacttcatactcctttgttctggaaaccatgggcaaaactgttttactgtactaaagagtgataacaaattctaagtactaactttcactccccatctttgtatgtcctcgggtgtcttttgatgatgtgtcctctgctttcacatgctctagccttccttcatcagggtctttgtcatcccat

SEQ ID NO: 3394 - DNA, 586 bp, Homo sapiens
  MAP TO AC021010.3; EXPRESSED IN FETAL LIVER, SIGNAL = 2.5; EXPRESSED IN HELA, SIGNAL = 1.7; EXPRESSED IN PLACENTA, SIGNAL =   3; EXPRESSED IN ADULT LIVER, SIGNAL =   3; EXPRESSED IN LUNG, SIGNAL = 3.3; NT HIT: AL163246.2, EVALUE 2.00e-31; EST_HUMAN HIT: AW953903.1, EVALUE 2.00e-38
tgaattaagggtgggtctgcctctccagtccactgactcaaattttaatctcctttggcaacaacctcacagacacacccaggaacaatactttgcatccttaaatcaatcatgttgacactcattaactatcacgccaataaatccaagttaaaaagaaattctcaattgaactacgggggtatacaggtatacacgggatatgaactacaggggtatacacagaatgaaatcctgtcatttggtgtacaaattctactagggaaggccgacaataacaagtaagcatataaatatataatataatttcatttgactaattgatataatgttacttggccaagtcatttatattaatgagtacaataagaaacaaacagagaaagataaaacagtgtgctttccaaacttattcatgcaatgacaaacaataaataatacttaacatttaaagagcacattgagttaagcaggctaaggccgtttgtggtcagggagaactggtggtgggcggagaataagagggtacagtagccctaggccttgccttgccattctaaggagcaggggatcaaggcttggtaat

SEQ ID NO: 3395 - DNA, 564 bp, Homo sapiens
  MAP TO AJ239319.2; EXPRESSED IN BONE MARROW, SIGNAL = 1.3; EXPRESSED IN PLACENTA, SIGNAL = 2.1; EXPRESSED IN ADULT LIVER, SIGNAL = 1.7; EXPRESSED IN HELA, SIGNAL = 2.6; EXPRESSED IN LUNG, SIGNAL = 1.8; EXPRESSED IN FETAL LIVER, SIGNAL = 1.8; NT HIT: X95808.1, EVALUE 0.00e+00; SWISSPROT HIT: Q14202, EVALUE 9.00e-45; EST_HUMAN HIT: AU123497.1, EVALUE 0.00e+00
tgcacacaggaacaggagagggaagctaggcgccaaggagagggccgacctggcaggtatggtgggttatggcagggcatggaaggggaaggcagagaaggggcaaaagcacaggggagggggcagcctcgtacctcgccctttcctctggcggactggggcatagtagcggatgctcaccaccttggtggtgccccgaggggtggtacacttgcgggactgccgcaccacattggtgaaggagagttgcatgtgttcctcagctgtctgcagcccaaaaaacttagtgttgaagaacatgagggtgttgaggaggacaaagggcgagtagacccccagttgcttacactcccagaggtgctcctcctccactcgagagaacaccgtatctacaatggtcaagggggagaggccagtcaggagggagtggctacccaaacccaaccacttcccatcccatgtgccctgctcatttcccacacaattctcatttggtgagtaacctttgtatataaaacactgtcacttcgctacacttgctacactacacagtgggactgggct

SEQ ID NO: 3396 - DNA, 529 bp, Homo sapiens
  MAP TO CHR22_21.0; EXPRESSED IN LUNG, SIGNAL = 2.5; EXPRESSED IN BONE MARROW, SIGNAL = 2.4; EXPRESSED IN HELA, SIGNAL = 3.3; EXPRESSED IN HEART, SIGNAL = 2.2; EXPRESSED IN PLACENTA, SIGNAL = 2.7; EXPRESSED IN FETAL LIVER, SIGNAL = 2.5; EXPRESSED IN ADULT LIVER, SIGNAL =   3; SWISSPROT HIT: P21691, EVALUE 6.40e+00; EST_HUMAN HIT: AI553788.1, EVALUE 1.00e-101
agaaccactgtcatcagccctgcctagctaaccattttctgcagcataagcaactaaagctgcacaccaatttatacctcagtgatgttgccgcacaaataaggaagcatataatgccacctttgcctctttaattagagaacaggctggaccagatggctgtggggtggaaccttacaaaaatgatggacaaccagaatgagattttctgctctatcagctcaggctctaattttgactgcaagaagcttatggagcagaggattaaagcactggtgctggcttgtctttagctaaagataggagtggccattcagaggagtttgttcattttttaaaaagctatgaacaaattctagagcttatatataaaatatttatggaagtatggtaagattagaaagcttagaaataactacctgtcaataaagggaacaagtaaagggattcgcttaagtggctgcagaggacactaagatcttttctaaccccagtgtaggcacaaacggcgaaaaagggagcaagaaga

SEQ ID NO: 3397 - DNA, 546 bp, Homo sapiens
  MAP TO AC021609.3; EXPRESSED IN FETAL LIVER, SIGNAL = 1.4; EXPRESSED IN BONE MARROW, SIGNAL = 1.4; EXPRESSED IN HEART, SIGNAL = 1.5; EXPRESSED IN PLACENTA, SIGNAL = 1.6; EXPRESSED IN LUNG, SIGNAL = 1.4; EXPRESSED IN HELA, SIGNAL =   1; EXPRESSED IN ADULT LIVER, SIGNAL = 1.4; SWISSPROT HIT: Q08462, EVALUE 7.00e-27; EST_HUMAN HIT: AU119404.1, EVALUE 6.00e-91; NT HIT: gi16159207, EVALUE 4.00e-91
accctacctaccacgcacaggacggcgcccgcaacagagaattatttagtccaaaatgtcaatagtgctgaggtcgacaatcttagattacttttgtcaacatagtacagttataacacagttcttctctccaaaccacttcacatcttctatgtgtgtttgggaatacataatcagatgtaatctataacaaaaacacatattgtctttctgaggcatcacttcaaagaaattctctcagaatgatttatcaatgacaatgacatcgctaacttgcatttactcaacacacactcatgctatccacaggctgggaaagaactatagtaagagaaggaagaggccgtggctcacctctcaaataagacctggctgtagtcgcccaggacgtgggcgtgggtgtggagtaggatggtgttgtagcccaccaaggccaccatcatgatcaacatcttcagctcatagtttacccgcaggaacacggaacaggatatcagtcccagaatgcagctgtagataaagtactgaaacagggaaggacaccag

SEQ ID NO: 3398 - DNA, 514 bp, Homo sapiens
  MAP TO AC016763.5; EXPRESSED IN HEART, SIGNAL = 1.2; EXPRESSED IN BONE MARROW, SIGNAL = 1.5; EXPRESSED IN LUNG, SIGNAL = 1.4; EXPRESSED IN PLACENTA, SIGNAL = 1.4; EXPRESSED IN ADULT LIVER, SIGNAL = 1.5; EXPRESSED IN HELA, SIGNAL = 1.4; EXPRESSED IN FETAL LIVER, SIGNAL = 1.5; EST_HUMAN HIT: AI761763.1, EVALUE 1.00e-70; NT HIT: AF286904.1, EVALUE 7.00e-71; SWISSPROT HIT: Q13576, EVALUE 1.60e+00
ttcagatgtaagcacagagggattttattctttaatgtttaacatatctattaatcagtgtgtatgaattaaaaaatcagaatttctttagacaaaagaaaagatttccactggttgataaatttaaagtacaaacagaaaacaatgaattaacaaacttacgctgaatatgaatgaactgttttggctgtttaaactctcctttgtacaagcgattgtaatagttgacgttgctctctgcctcaggaacaggaatgaccatactctcttttttttctctaaacacttgctgtgctgaaattgctcgctgtaaatgatgttcctggaaaatgtaaagtaggcaacataagttgttttagtaatattaatcaatgcataattttatataaaagttactttgtttaataatcacaaagtgctttaagaatcaattataaatagttcctttgccaaagacctacagttacattgtcatcattctctcttaatactcgtggctcatactgataacacc

SEQ ID NO: 3399 - DNA, 553 bp, Homo sapiens
  MAP TO CHR22_6.0; EXPRESSED IN LUNG, SIGNAL =   3; EXPRESSED IN HEART, SIGNAL = 2.5; EXPRESSED IN PLACENTA, SIGNAL = 3.1; EXPRESSED IN ADULT LIVER, SIGNAL = 5.1; EXPRESSED IN HELA, SIGNAL =   3; EXPRESSED IN FETAL LIVER, SIGNAL =   3; EXPRESSED IN BONE MARROW, SIGNAL = 2.3; SWISSPROT HIT: P10263, EVALUE 2.00e-06; EST_HUMAN HIT: BE389450.1, EVALUE 3.00e-99; NT HIT: AJ271736.1, EVALUE 4.00e-51
agtctcccccagttctctcccatttattcaactccatagtcccttgttcaggaaaccatgggcaaaactgctttactgtactaaagagtgattaacaaattgtgagtactaactttcatgcccccctctttgtaataaatgctttaagaaatctaaataagcagaatgtctgctttcactttgtcccattgttaccctggttcttcccagtgctcagctttcctgccgagcttcttttagacgttcgacgttcttgggtgtcctgtgacaatgtgtcctccgctttcacatgctctagtgttccttcaccggggtctttgtcgccccacgttgggcagccaggaatgttggggtgatcagacccaacaccaggttgtggggacgacgaagtctggtggagtcaaaggaatgaaaaaaaagtttgagagagaaagtgggaccaggggtcatggcgagtgtggaagctgcaaaggccctggagctctggaagcccatgctatttattgatgctcaaacaaagaaacagttggtgaggatgtgggagttgaaagga

SEQ ID NO: 3400 - DNA, 523 bp, Homo sapiens
  MAP TO AL137802.2; EXPRESSED IN BONE MARROW, SIGNAL =   1; EXPRESSED IN PLACENTA, SIGNAL = 1.2; EXPRESSED IN LUNG, SIGNAL = 1.5; EXPRESSED IN ADULT LIVER, SIGNAL = 2.2; EXPRESSED IN HELA, SIGNAL = 1.4; EXPRESSED IN FETAL LIVER, SIGNAL =   1; EST_HUMAN HIT: BI518357.1, EVALUE 1.00e-91; NT HIT: AF106828.1, EVALUE 1.30e-01
ttgaagagccctgagagtggaaatcaagagattttttccacggggaagttctttttacaaagcgttgatttctcggcacccggcagggagggcaactggcagggtctctggcgcaccttctgcgcggtggagccacgggggctcagctgggcggtggtgcggccgtggggtggtaggtcaagagctgggaaaggaaaaagcaaaagctgggaaagaagccggggagcggtggaccagacatccagacctcctgaaaggctcatgaaggggcacaggcaggatcttctggaagtgagaattgttttgtttgtttgtttgtttattgtagtagaatggggaaatggagagagaacctgaaagagccccaaactcgaggacctattgctccccaagaataacatcttccagaagaactagacagaaaactaggcgtctgggaactctgaaatccttggaggagtagcatcatcatgaccctctgtgttccttttggcaaaggacttgctcccattgtttgcttgtt

SEQ ID NO: 3401 - DNA, 522 bp, Homo sapiens
  MAP TO AC011985.3; EXPRESSED IN PLACENTA, SIGNAL = 0.91; EXPRESSED IN FETAL LIVER, SIGNAL = 1.1; EXPRESSED IN LUNG, SIGNAL = 1.1; EXPRESSED IN ADULT LIVER, SIGNAL = 1.1; EXPRESSED IN BONE MARROW, SIGNAL = 1.1; EXPRESSED IN HELA, SIGNAL = 1.1; NT HIT: gi15294734, EVALUE 3.00e-79; SWISSPROT HIT: Q99743, EVALUE 1.00e-21; EST_HUMAN HIT: AW043721.1, EVALUE 5.00e-79
cagagacgggctgatagagggtggagtgtctttacaatgggaagccctcgaccggtaaggctgggcctggctggggagacaaaaccaaccaggcagcccagattggtgaagtcatcaccacatggacagggcagggtggaaaaaaaacagagagaagggtgacctttaccattgtgtttctgcaaaaatccgatgaccttttccaacacggtggttttgtccattttccgcgtgttgccagggagcatggaactgagctctttgatgagaacattgaactggtcccgacgcttcttctcagacttgtttcgagaagctctgtaaacacaaaacgagcaggttactggaacattccacgtcacaaaggctttgtgatgaaacaaaagcactttctattagagcacattctattgtgatcatctatcttatcaaaaaactctttcaggaaggtcacgctggccacatttccaaggcaggaggatagaaaatgttttgctagactcttggccacaaagacagaca

SEQ ID NO: 3402 - DNA, 559 bp, Homo sapiens
  MAP TO AL049828.3; EXPRESSED IN ADULT LIVER, SIGNAL = 2.3; EXPRESSED IN LUNG, SIGNAL = 2.3; EXPRESSED IN FETAL LIVER, SIGNAL = 1.4; EXPRESSED IN HELA, SIGNAL = 0.87; SWISSPROT HIT: P11260, EVALUE 1.00e-17; EST_HUMAN HIT: BE505156.1, EVALUE 1.00e-39; NT HIT: AJ229041.1, EVALUE 7.00e-65
cacgagttcaccaacaatggatccaaaccaagaagaaattcttgattacctgaaaaaagaattcaggaggttagttattaagctaatcagggaggcaccagaggaaggcaaagcccaatgcaaggaagtccaaaaactgatacaaaaagtgcaaggagaaattatcgacgaaatagataccataaataagaaacaaccaaaacttcaggaaacaatggacacacttacaaaaatgcaaaatgctcaggaaagtctcagcaatagaattgaacaagtagaagaaaaaaattaagagctcgaagacaatgtcttcaaattaacccaatccaagaaaaattaaaaaaatttactaagaaaatatgaccaaagcctccaagaagtctgggattatgttaaatggccaaacctaagaatattcactgttcctaaggaagaagagcattctaaaagcttggaaaatatatttgggagtataatggaggaaaacttccccagccttgctagagacttagacagccaaatacaagaagcacaaagaacacctgggaaattcatcaca

SEQ ID NO: 3403 - DNA, 514 bp, Homo sapiens
  MAP TO AL122013.3; EXPRESSED IN LUNG, SIGNAL = 0.57; EXPRESSED IN HELA, SIGNAL = 0.55; EXPRESSED IN PLACENTA, SIGNAL = 0.57; EXPRESSED IN ADULT LIVER, SIGNAL = 0.59; EXPRESSED IN FETAL LIVER, SIGNAL = 0.58; EST_HUMAN HIT: BE965772.2, EVALUE 1.80e-01; SWISSPROT HIT: P49018, EVALUE 4.80e+00; NT HIT: gi15027629, EVALUE 7.60e+00
aggtctcaaagatggcaaggaaaacaatagtaggcataagaagaacagaactagattgtctgaataaaaagaagcaatctcctcccatcagctcaactcccaacattctccaggaggccatgcccctgaaccttttctccaatacagctttccccttgctaccttctacttaaggaaaggaaaaaaaaaatcctgaatggtgacttgtagtgaaatctcttgacctttgcaaataagtttttaattaaaaataaattcactcattacagaaaacacatattacccttaagtaaatactagcaaaataaaacaaagaaaacaaaaacctaaccatttaaagaaatctgtggcactttctctttaaatttagcttcattcaagacaagccagaaagatgcttgcataaaatatgttttttttcccccacagtgtgttctatctgttcaccatgaaatcctcagaccacacctttcagctgtcctggtatgagctttgctttcctgctcccattgta

SEQ ID NO: 3404 - DNA, 561 bp, Homo sapiens
  MAP TO AL137010.1; EXPRESSED IN BONE MARROW, SIGNAL = 1.3; EXPRESSED IN HELA, SIGNAL = 1.1; EXPRESSED IN HEART, SIGNAL = 1.4; EXPRESSED IN PLACENTA, SIGNAL = 2.1; EXPRESSED IN LUNG, SIGNAL = 1.8; EXPRESSED IN ADULT LIVER, SIGNAL = 1.9; EXPRESSED IN FETAL LIVER, SIGNAL = 1.8; SWISSPROT HIT: Q9WUU9, EVALUE 7.00e+00; NT HIT: Y09356.1, EVALUE 2.10e+00
aattctgttgccacattcccccccaccttaatcctctatttcaactgcattgaaaatcttatccttccaataaatcctgttattttacacctccctgatttcaccccattctctcacctataacaccattctctttcccagaagttcgaggaactagcaagtcaccaaatggttttctagttagccgtgatgtatgtaaaggtcagctggctttgacacgtgttcccttgcccatcaccagactgatgtggctgcttttgattgtctgcatctttgtcttcttactttatcacctggcagtactcctttccagtaatcacaccttcatccaaaaaggccaactgttcctggaagacaagaatgacccttcactcaagagtgtagaagagactatggccataagacccttgaatacaactaagaaaatagcctgggatttcacccagatgggtgcctaccacctcagccatattgtgatccatgtccttgacacatgattggatctgtaaacccggaaaaacttctaatgattggaatttctgctccaacccactgagaatc

SEQ ID NO: 3405 - DNA, 574 bp, Homo sapiens
  MAP TO AL139149.1; EXPRESSED IN HELA, SIGNAL = 0.61; EXPRESSED IN HEART, SIGNAL = 1.2; EXPRESSED IN PLACENTA, SIGNAL = 1.5; EXPRESSED IN ADULT LIVER, SIGNAL = 1.4; EXPRESSED IN FETAL LIVER, SIGNAL = 1.2; EXPRESSED IN BONE MARROW, SIGNAL = 1.3; EST_HUMAN HIT: AW937701.1, EVALUE 2.00e-04; SWISSPROT HIT: P21657, EVALUE 7.20e+00; NT HIT: AB026898.1, EVALUE 6.00e-07
tttctagacccacactgggccagaagagaacctactgccttgaagaaaacaactcaatcctgctgactaaagagcccttgggctttgaataaacattagcattacccaagcagtactgactgtgggctttaggtgagactcagtgacatgcttgctttagttgtgacccagaacattcccagttgttgcagtcatggggagagacccccgcatgaggaaaggaaagggaagattaagggaattttctcttgcagcttgggtaccaacttggccatagtgggtcagagcaccaagcaggctattggggttcctgattctatgccttggctccttgatgccatttctggacctgatctgggccagagaggagcctactgccccaacaggagagacagacctggcagcattcaccacaaggtgattaaagagcttttggggcttaagtgaacattggtggtagccaggcagtatttgccatgagcctgagtggtggtagctgcagggagagactccttttgctcaataaaaggagagggaagagttggaaggactttgtcttgcagctttggtgtca

SEQ ID NO: 3406 - DNA, 502 bp, Homo sapiens
  MAP TO AC015845.4; EXPRESSED IN BONE MARROW, SIGNAL = 3.4; EXPRESSED IN HELA, SIGNAL = 1.8; EXPRESSED IN FETAL LIVER, SIGNAL = 3.2; EXPRESSED IN PLACENTA, SIGNAL = 3.5; EXPRESSED IN LUNG, SIGNAL = 3.5; EXPRESSED IN ADULT LIVER, SIGNAL = 3.6; SWISSPROT HIT: Q9Y3D9, EVALUE 2.00e-29; NT HIT: AF161447.1, EVALUE 2.00e-92; EST_HUMAN HIT: BE388985.1, EVALUE 3.00e-92
tcactatgaggaaggggtgctgcctccctaatttggctagataagccttctccacagggcaaacccctgactcaatttcatgtttgaattcccagactgctaccgaaaccttcccttctgaagttctgttgcctcctgtccactacagggctgagcactcacgctctaatccgatcctcgtggtaccagatgtcttggatgggagctttggctttgccatatcgcactcgaggcctttggaagacgggctccctcagcgggggaaaggcgtcatatacgtcaaaccacaggggcttctccttcagcaccccggcccgaaccaggtcccgagtccttagggagggaacagaacgaaactgggtcacttgcagtagcctgccaaagcccctgaatcagtctagcacagtttgggacattaaaggtattatgcggtctgcaacacagaacggggaaggactgctccccacctacagagaagatctgtccacatcccaaaccaaac

SEQ ID NO: 3407 - DNA, 543 bp, Homo sapiens
  MAP TO CHR22_77.0; EXPRESSED IN HELA, SIGNAL = 0.66; EXPRESSED IN ADULT LIVER, SIGNAL = 0.43; EXPRESSED IN PLACENTA, SIGNAL = 0.38; EST_HUMAN HIT: BG697779.1, EVALUE 7.60e-01; SWISSPROT HIT: P55270, EVALUE 2.00e-01
tgtgagcatcctcgtgtagcccaccacagtcaggtgggccctgatgtctgtaacaagcctcactcgggtaggacagtggctgaagcccagaccacagcggcccaggcaaatgcaacctacgaaagcagaagctggctaagaccagtgttctcaaggataagggaggaagaaatgaggtgggcggggctgggacaaggaattcccatacaggggcatcccttccttccctacccacccctgcagagatgggggtgaagatccctgaccccgaaccagccccatctgggtccatcccggtccctctgcaggaaatcctcatcacccctcctacacctcaggggccaaaggcagcagggtgccagggtgaccatgatgaatgctgtctctggatggggtcctcaccccctaggcctgggaccaggataggatgcactcctgcaacaaagcacctgtgctccctggcactcagcaggtaccagctataccggcaggcgcttcctcctcactggggtcctaggagatgccagaattgagccactggat

SEQ ID NO: 3408 - DNA, 537 bp, Homo sapiens
  MAP TO CHR22_100.0; EXPRESSED IN HELA, SIGNAL = 1.4; EXPRESSED IN PLACENTA, SIGNAL = 2.5; EXPRESSED IN ADULT LIVER, SIGNAL = 1.9; EXPRESSED IN LUNG, SIGNAL = 1.7; EXPRESSED IN FETAL LIVER, SIGNAL = 2.6; EXPRESSED IN BONE MARROW, SIGNAL = 1.3; NT HIT: gi14770778, EVALUE 1.30e-01; EST_HUMAN HIT: H43135.1, EVALUE 1.90e-01; SWISSPROT HIT: P46020, EVALUE 1.70e+00
ttcctaggggacatgacagggctggagagagaaggggtcatgcaccgctcagttccagaatgaacaaagaacacttatgagggagagaaaaaatgcctcttgaccgcccccagcatatgtatgcacaaatacacacacaaacacacacatacacacatgcatgcacatgcacacacatacacgtgcacgcacacgcatacacacacacacacacacacacacacaggctgccccagcctgcatgtcaccatcaatcagcgccttcccacttgccgtttgcaggcagagttccccacagatgtgctcggggggctgggagaaggagaagaaggtggagctggggctagggagggagggaggcagagatgtcctcaaagagttaaaaccttgcctcaccagactgcgaatcctcctcgactctcccccacccccatccccctcaatccagccaaacaacagcttgacattttccatccttcacgagaaagacaaagacgggaagatattcccatgatccctttctgcatgcctaaccgt

SEQ ID NO: 3409 - DNA, 593 bp, Homo sapiens
  MAP TO AB017651.1; EXPRESSED IN PLACENTA, SIGNAL = 1.1; EXPRESSED IN HELA, SIGNAL = 0.56; EXPRESSED IN ADULT LIVER, SIGNAL = 1.1; EXPRESSED IN LUNG, SIGNAL =   1; NT HIT: AF130178.1, EVALUE 5.70e-01; EST_HUMAN HIT: AA383472.1, EVALUE 3.00e-53
ggacattgtgctgacacacctaagggtggtttggaaacagttggcatgttttctttatgtatttttcacctctgccatctgtaactgagaaagggtatccttcctcctgccagttctccccagctgaagtctacacaatctttacccagacatcagaaacagctgtctcaggcagaaggcgcttgactccaggtgggcgctcagcagcaagggcaggtgagataatgagcaacaataaagtccttttcaaggaggtgggagtctgttggaggggtgagttggttagcatatgctggcccttacttggctcctagcatttgttcttctgtgaagcttgtttctcagtgtgatatcagatttactcctccttctcttcctcctttcctgccttcttttttcccttcatttactgtgcatgacactgtgcttgataccacagaagactcaaagatgatgcagctatcacccctaccctcaaggacccagccacactctacctaggaaaaaggcaaatcaaacgcaaccatgttgctaataataataataaatgaagaaaagataagaagagattaagcatttggagttcagggaaa

SEQ ID NO: 3410 - DNA, 531 bp, Homo sapiens
  MAP TO AC015822.3; EXPRESSED IN BONE MARROW, SIGNAL = 4.9; EXPRESSED IN HELA, SIGNAL = 2.2; EXPRESSED IN HEART, SIGNAL = 3.6; EXPRESSED IN LUNG, SIGNAL = 5.2; EXPRESSED IN PLACENTA, SIGNAL = 5.2; EXPRESSED IN ADULT LIVER, SIGNAL = 5.2; EXPRESSED IN FETAL LIVER, SIGNAL = 5.1; SWISSPROT HIT: P16142, EVALUE 6.50e+00; NT HIT: X95433.1, EVALUE 5.00e-01
caaagacattgggaaaagtggaatatagttaggtacttctcactggataatttaaaaataggccaaccataataaacattttcaactttaagatccctcacctttctgtgtttttcaccaccctctccttttgctctgttaatcttgcagacatagtcaattctgactttctcattctgaggaatataaaggagatctggtaaaactagataattcatatcaaggagtattaacttcaaatgttaaaaactcccagggatactttcatcgtaaagtaagagtcagtagaatttaatgcctacttctcagtaagaacttatttttttaggatggcagtggtaagagtggaaatggtaggaattttgagggagatgggagaaagatctgtttctgtgtttgtaagtacattacccaccatttacccataaagaacttgtcctaaaaggcatgtttggagagagcattggttcttgacaaacacctggtttgagtccttactcttcacttactagctgggtgcctttgagtatg

SEQ ID NO: 3411 - DNA, 576 bp, Homo sapiens
  MAP TO CHR22_143.0; EXPRESSED IN ADULT LIVER, SIGNAL = 0.35; EXPRESSED IN HELA, SIGNAL = 0.77; SWISSPROT HIT: Q9WVL2, EVALUE 2.00e-11; EST_HUMAN HIT: AV661341.1, EVALUE 5.20e-02
agcaccagataagcacccagggtcagcactgagccagcaactaggatcagcaccagataagcacccaaggtcagcactaagccagcacccagggtcagcattaagccagcacccagggtcagcactaagctagcacccaggaacagcaccagatgagcacccagggtcagcactgagacagcacccaggatcagcaccagataagcacccagggtcagcactgagacagcacccaggatcagcaccagatgagcacccaggatcagcaccagatgagcacccaggatcagcaccagataagcacccagggtcagcactgagacagcacccaggatcagcaccagatgagcacccagggtaaccactgagccagcacccagggtgggaaagtattattacatcattactagtatcctcatggcctctggggagaaaaactatgaaggagaaagactcagtgttttcattaagaaccttctcaaaccttttgtattttgtaccctgagcacgtttacctatccaaaaagtaaccaaaatatttctaacaatgcagttacttggaaaaacgctcatggt

SEQ ID NO: 3412 - DNA, 512 bp, Homo sapiens
  MAP TO AL035464.20; EXPRESSED IN BONE MARROW, SIGNAL = 2.9; EXPRESSED IN ADULT LIVER, SIGNAL = 4.3; EXPRESSED IN PLACENTA, SIGNAL = 4.5; EXPRESSED IN LUNG, SIGNAL = 3.5; EXPRESSED IN HELA, SIGNAL =   5; EXPRESSED IN FETAL LIVER, SIGNAL = 3.2; EXPRESSED IN HEART, SIGNAL = 4.6; SWISSPROT HIT: P12838, EVALUE 2.10e+00; EST_HUMAN HIT: AA203342.1, EVALUE 2.00e-07; NT HIT: gi14730306, EVALUE 8.00e-06
gcttctctggaagcaacaccctgctttatgagtgaggtgctgggaaggggggaagtagccttttgccttctcagcttacttctcctggcatggagccatcactttatgagcaggcaaaggcaatcgagacctggtattcttggcctgcttcacctggaagagaacttctgccttacaaagaggggcctgggtggaggaaggaagccccagatctctcatttgctcttgcctggcctacagcttatgcaatacagagataggggtcatgagaaatgtgggtggcctgcttttcccagggagataccataaccttagactgggagctagggggagtggaagcttcatgttctaatttacagtcatccagagtagagcttccatcatgcagaggtggggggtggggaaggagcaagtcatggctcaaatgccaatggactcttactcttcttactgagatttagtagatttccttgaatgaatatttctccatttgctgcgtgcctttagacaat

SEQ ID NO: 3413 - DNA, 515 bp, Homo sapiens
  MAP TO AL137017.4; EXPRESSED IN ADULT LIVER, SIGNAL = 1.7; EXPRESSED IN LUNG, SIGNAL = 1.6; EXPRESSED IN HELA, SIGNAL = 2.6; EXPRESSED IN FETAL LIVER, SIGNAL = 1.5; SWISSPROT HIT: O26631, EVALUE 6.20e+00; NT HIT: gi14589963, EVALUE 1.20e-01; EST_HUMAN HIT: Z40221.1, EVALUE 4.60e-02
ctagcttgtctctgccccagcctatcttctggttgcaaagatctgtgtcatgtttccttctacacacagcacaatcacacactccccaagaaagagaactcaaagcactgtctactcactgagttaggctctatgtccagattctctagggatgccatcttccccatcaggtccagattcatggctcaccatggcccagctatctgtaagtagaaggacaattacctactgcctcctccccaacacatcccttctagagtggtgggacaagaacaaaataattgcagtaaacatacccttgtgaaaaagagaagactcatagcagtcactggtgaaggtgtcatattttactgggggaaagacgttatgaaaaccctgctctgggagtgaggaaagtttctggaataggtcctagatctgctttctcagagaaactcccttgtccattggtcttcatagctcctggatccactatgtaaaagtttcttctttgtccttttcctccttggccactt

SEQ ID NO: 3414 - DNA, 582 bp, Homo sapiens
  MAP TO AL138781.2; EXPRESSED IN HELA, SIGNAL = 3.1; EXPRESSED IN FETAL LIVER, SIGNAL = 1.7; EXPRESSED IN ADULT LIVER, SIGNAL = 2.3; EXPRESSED IN LUNG, SIGNAL = 2.1; NT HIT: AE007073.1, EVALUE 3.60e-02; EST_HUMAN HIT: AW408680.1, EVALUE 1.00e-104; SWISSPROT HIT: P14581, EVALUE 8.50e-01
gtggtggtgcttgaccttccaccgcctggacctcacccggaagaagaagtacatcaccatgaggaacagggatgaagccacgtacagcacgacacagagactcatgtccaggctggagaagtcaaccccgaggaagggtgcggccccgcccacctccttgtgggccccgggcccatccagactctggagtttcccgtccaagctgtgatgcaagctctctggaagggcaggcctggggcccagtgcaccaggtggacggacgctctgggtgtctcggtctccatgggacacctctgggggagtgagtcttttctcctcttcctcacccctggccagggttcctccttcactggaatccccctggtctgcggaatacgtgtctaagaggttgtcgcggccatagtgctgcttcaagaatgtgagcacgtggccttcatcccagctggccaggcccttaatttcctcatggcaggctgggcagaggtccggagtgggccactgaagctttggaaaccggggatcctcactcagatggcctaggaagaaaaggaagcgggagagccagagggaaggaggctttgt

SEQ ID NO: 3415 - DNA, 599 bp, Homo sapiens
  MAP TO CHR22_200.0; EXPRESSED IN HELA, SIGNAL = 1.7; EXPRESSED IN FETAL LIVER, SIGNAL =   1; EXPRESSED IN BONE MARROW, SIGNAL = 0.95
ttgaatgactgagcgacctgaccagggtcccaaagcacgagagagacagtgcagtcaaggcaggctgcatggaggagaaacttcttcttgtttttttttttacctttatggttaaggagtaactctcaaatggttatctttttttctccctcagtttcccaaattgtaaagtgaggggcttgatgagatggttctcatggccctgctagctctgcctctgggtttcatgaaacagcagattctgcttgtctcagtcacccttagctctacagcctgtaagctgagctggagggatgcctgttcctgtggatgctgatgccagggccacggcttagcctcagctcctacacagcagacgtcttcacagctgcgggcactgtgcatggcttctcagatgctgtgcccaggagattattgacgaacatgatgccacatgcattaagaacaattccagggttcagagagagaaggcttattttagcaagagaatttgggccttccatttcttctggaatagctgcaggacctgacttgcctttcctggcagagcagggggcatttgttaacacctgcacctggctttgaacagccctagcctg

SEQ ID NO: 3416 - DNA, 582 bp, Homo sapiens
  MAP TO CHR22_84.0; EXPRESSED IN HELA, SIGNAL = 0.9; EXPRESSED IN ADULT LIVER, SIGNAL = 0.32; NT HIT: Y07848.1, EVALUE 0.00e+00; EST_HUMAN HIT: BI772364.1, EVALUE 8.20e-01; SWISSPROT HIT: P33485, EVALUE 1.70e-01
ctttcctctcccataagcccccagaggctctcacaaggcagatcctcctggtcccaggtgtcccctttgcagttttccctttggtcctcctaacctgttctgttggtccctttaggggactaagagagccaggccctcactcaccccaggcattcattcacccagaaactctccacccatgtggttatttgaggagccaggccagccctgtccccaccataggaggggaaactgaggtctcagtactgagactcactcccaggctcctgccctgacgccagctggcagtgccctcccaccctccccgcttggctccccagcccagccctcggaggccagactcgcaccgtctgctcttctccatctcccatcaggctcctagcttacagagcttcctgcagcagcaggctcagctggagctcctggccagacgggtcaccctcctggaagccatcatctggccaggtaatggcagggcgggcaggcaggggcagcctcttccaggaagggcctggaaaaggcctgggcatgcagaaggcgccttccgatgcttggcccaggccagcggacactcattcttca

SEQ ID NO: 3417 - DNA, 554 bp, Homo sapiens
  MAP TO AC019196.4; EXPRESSED IN HELA, SIGNAL = 1.6; EXPRESSED IN HEART, SIGNAL = 3.2; EXPRESSED IN PLACENTA, SIGNAL = 4.7; EXPRESSED IN LUNG, SIGNAL = 4.1; EXPRESSED IN FETAL LIVER, SIGNAL =   3; EXPRESSED IN ADULT LIVER, SIGNAL = 3.9; EXPRESSED IN BONE MARROW, SIGNAL = 3.9; SWISSPROT HIT: O70372, EVALUE 1.40e+00; NT HIT: AL163227.2, EVALUE 9.00e-83; EST_HUMAN HIT: BG705017.1, EVALUE 1.00e-82
gctgtgggcttgagtttctcctcagaaaatggatttttctttcctattgcatcatcagtttgccaattttccaaatatttattctctgcttccgttttaaacataagttccaattccaaactgtatctttgtaaatgaataaaactgaatgcttttaagagcaccaaagtcacctcttgaatactttgctgcttagagatttcttctgccagagaccttaaatcatctctctcaagttcaaagttcctcagatctctagggcaggggcaaaacgccaccagtctctttgctaaagcatggcaagagtgacctttactccagttccaagcaagttcctcatctccatcagagaccaactcagcctggaccttattgtcaatgtaactatcagcattttggtcaaagcctttcaacaagtctccaggaagttccaaattttctacatctctctgtttcctgtggagccctccaaactcttccaacttctgcctgttacccagttccagagtcacttccacatttttgatatctttacagcagcactccattctctg

SEQ ID NO: 3418 - DNA, 547 bp, Homo sapiens
  MAP TO CHR22_115.0; EXPRESSED IN BONE MARROW, SIGNAL = 0.62; EXPRESSED IN HELA, SIGNAL = 0.65; EXPRESSED IN PLACENTA, SIGNAL = 0.38; EXPRESSED IN LUNG, SIGNAL = 0.52; EXPRESSED IN ADULT LIVER, SIGNAL = 0.55; NT HIT: gi15318159, EVALUE 0.00e+00; EST_HUMAN HIT: AL119662.1, EVALUE 1.00e-120; SWISSPROT HIT: Q92558, EVALUE 1.00e-03
ccaagaagaaactgccttcgctcaagcaggtgaactctgccaggaagcagctgaggcccaaggccacctccgcagccactgtccaaagggcagggtcccagccagcgtcccagggcctagatctcctctcctcctccacggagaagcctggcccaccgggggacccggaccccatcgtggcctccgaggaggcatcagaagtgcccctttggctggaccgaaaggagagtgcggtccctacaacacccgcacccctgcaaatctcccccttcacttcgcagccctatgtggcccacacactcccccagaggccagaacccggggagcctgggcctgacatggcccaggaggccccccaggaggacaccagccccatggccctgatggacaaaggtgagaatgagctgactgggtcagcctcagaggagagccaggagaccactacctccaccattatcaccaccacggtcatcaccaccgagcaggcaccaggtatgcagcccccaactcctgaagccatcctgaaacagccatgaggcactcacta

SEQ ID NO: 3419 - DNA, 588 bp, Homo sapiens
  MAP TO CHR21_32.0; EXPRESSED IN BONE MARROW, SIGNAL = 2.4; EXPRESSED IN LUNG, SIGNAL = 1.7; EXPRESSED IN HELA, SIGNAL = 5.2; EXPRESSED IN PLACENTA, SIGNAL = 1.4; EXPRESSED IN ADULT LIVER, SIGNAL = 1.3; NT HIT: AJ271735.1, EVALUE 4.00e-05; EST_HUMAN HIT: BE004842.1, EVALUE 1.30e-02; SWISSPROT HIT: P08547, EVALUE 7.00e-21
catttcttccaacctccagcccctagcaactacctctttattatctgcttctatgtgtttgattatttcagatacctcatattagtggaatcatgcagtattttgtccttttgtgactggcttattttacttggcttagtgtcttacctatgttgctgcaaatggcagaatctcatttctcaaggctgaataatagtctgttgagtgtatataccatgtttcctttacctgttaattcatcaatagacccttggattgtttccgtatcttggcatttgtgaataacactgcagtgaacatgggtgcaccagatatccctttgagatcctggtttaaattcttttgcatgtatatctaaaagtgggttcactggatcatattgtagttctattttaaactttccgaggaacctccatggtttatccatagtgactgggagaggtaatatttcacatttccatcaataatgcataagagttccaattcctacacatcttcagcaacacatgttattttttttaataatacttatcttaccaggtgtgaagtgatctcttattgtggttttcatttgcatttccctgatga

SEQ ID NO: 3420 - DNA, 572 bp, Homo sapiens
  MAP TO AL136537.3; EXPRESSED IN HEART, SIGNAL = 1.2; EXPRESSED IN ADULT LIVER, SIGNAL =   2; EXPRESSED IN HELA, SIGNAL = 1.1; EXPRESSED IN PLACENTA, SIGNAL = 1.6; EXPRESSED IN LUNG, SIGNAL = 1.4; EXPRESSED IN FETAL LIVER, SIGNAL = 1.4; EXPRESSED IN BONE MARROW, SIGNAL = 1.3; SWISSPROT HIT: P33487, EVALUE 2.80e-01; EST_HUMAN HIT: AA828945.1, EVALUE 8.00e-01; NT HIT: AJ311849.1, EVALUE 5.50e-01
tttgacagatccttccaccccacttgctgatacagcttcaacaaagaagggtgttcaccaactgactacaagaatcattgctaaccagggatgactcattctcacatccatcctaaatagacttccttggatacaaaaaatccagagtttgccgtatctccatggacactgtcatttagacaggacacttacttcttgggaaactcacttccattttcctaataaggttccctttgaagactaagaatttctccaagacaaaattcatgtaagccaaaataccagacatcaggcctgtaattgtggtcaccctggccacagccaagttgtcaccttcactcacgatcatctttctgccctctgctacttgtagaataatgatcataaagtattgttgtctgaagcccctttagaaaagttgatttacagcagcccatgagagaggtagattagagatgaccaatgtcctgagaacaccaagaagcactcatctttgattctcagggcttgacatttcagaaacaaatccagacacattataataatgaccctggtccattgtgagcccatta

SEQ ID NO: 3421 - DNA, 538 bp, Homo sapiens
  MAP TO AC016714.2; EXPRESSED IN HELA, SIGNAL = 0.69; EXPRESSED IN FETAL LIVER, SIGNAL = 0.97; EXPRESSED IN PLACENTA, SIGNAL = 0.77; EXPRESSED IN LUNG, SIGNAL = 0.85; EXPRESSED IN BONE MARROW, SIGNAL = 0.96; EXPRESSED IN ADULT LIVER, SIGNAL = 0.88; NT HIT: gi12084983, EVALUE 1.30e-01; SWISSPROT HIT: P25927, EVALUE 3.00e-12
ttttctgaagctgacccctccacctatgctgtctttaccagaactatgcacttgaccattttcttcttcctcatccccaggaactccaccactggtacttcgccttatgccactatcatcaccactggtacttctccttatgccactaccatcaccactggtacttctccttatgacactggcaccaccactggtacttctccttatgacactggcatcaccactggtacttcttatgacactgtcatcaccactggtacttctccttatgacactggcatcaccactgatacttctccttatgacactggcatcaccactggtacttctccttatgacactgtcatcgccactggtacttctccttatgacactgtcatcaccactggtacttctccttatgacactgtcatcgccactggtacttctccttatgacactgtcatcaccactggtacttctccttatgacactgtcatcaccactggtacttcttatgacactatcatcacaaggtgggaagccataaaaagtgcca

SEQ ID NO: 3422 - DNA, 500 bp, Homo sapiens
  MAP TO AL138691.2; EXPRESSED IN HELA, SIGNAL = 0.87; EXPRESSED IN FETAL LIVER, SIGNAL = 1.2; EXPRESSED IN BONE MARROW, SIGNAL = 1.3; EXPRESSED IN LUNG, SIGNAL = 0.68; EST_HUMAN HIT: BF987906.1, EVALUE 1.00e-14; NT HIT: U65590.1, EVALUE 3.00e-08; SWISSPROT HIT: P08547, EVALUE 1.20e+00
agagatatctgcacccccatcctcacagcagctttattcacaatggcaaagccatggaaacacctaaatgcccatcaatggataaattaatgagaaagatgtagtatacacaagggactaccagttagccttacaaagaaggaaatcctgtcatttgcaacatgataccactttatgataaatctgaaatagtcaaattcatcaaagcagagagtggcatggtggtggccaggggcttggtgtgagagaagtggggaagaattcgctaaagggtacaaaattttagttataccagtaatacaaattctaaagacctactgtacagtatagttcctataattaacaatactgtattgtatacttaaacatttgctaagagaatagatcttatgttaagtgtttttatcaaaataataataatgatgataaaaataaaagatcagaggaaactttgggatgtgctggatggtttatggcatggattgtggtcatggtttccc

SEQ ID NO: 3423 - DNA, 571 bp, Homo sapiens
  MAP TO AL137185.3; EXPRESSED IN HEART, SIGNAL =   3; EXPRESSED IN BONE MARROW, SIGNAL = 3.3; EXPRESSED IN LUNG, SIGNAL =   2; EXPRESSED IN HELA, SIGNAL = 1.3; EXPRESSED IN FETAL LIVER, SIGNAL = 3.2; EST_HUMAN HIT: BE736446.1, EVALUE 8.00e-01; NT HIT: gi16077068, EVALUE 9.00e-03
atgttccctaatgggcagtggaaagtgtgaaattgaaactcaggatatgacctgaaatatagacttgggactcattagcatcaaggaaatagtgaagatgtaggaacagatatgaatgccaagggagagtatggaagagaagatgaccaagaacaagactctagggagaagttctacttttaggtgagtctgttgaaatagtcagtgaggtcagagtagaagtaggagaacttaacatcataaaagactggggaagagagagtgtggagaaaggaggggcagtaatatccatggaagcagagaggtaaggaagatgaaaattgagggggaaattaaatgtggcagctaagaattcattgacgactttcacaagagaggtcttagaaccatgaattgctggaatgtatcctctttgtcagtctggagtgtttgtttttgacctattaagtattctagatttgtccaatgaatgatttaaaatagcacagataactctgtgtgtgtgtgtgtatgtgtgtgtgtgtgtgagagagagagagagaagagaaagagtgagcatcagtcttgtggc

SEQ ID NO: 3424 - DNA, 572 bp, Homo sapiens
  MAP TO AC016569.2; EXPRESSED IN HELA, SIGNAL = 0.68; EXPRESSED IN FETAL LIVER, SIGNAL = 0.93; EXPRESSED IN PLACENTA, SIGNAL =   1; EXPRESSED IN LUNG, SIGNAL = 0.99; EXPRESSED IN BONE MARROW, SIGNAL = 0.97; EXPRESSED IN ADULT LIVER, SIGNAL = 0.99; EST_HUMAN HIT: BF877657.1, EVALUE 4.00e-15; SWISSPROT HIT: P22290, EVALUE 1.40e+00; NT HIT: Y10196.1, EVALUE 7.00e-16
agctcttcaaggcaggaatcatgtcttatttattattttttaatcccagcactgtatctgtttcataataggtaccccaatatctattaaataaaagaaaatgattatttctctttctactacttccaaggcaaagttattttgcaaatattttctattgaaagcagctccatagatatcccattcctgccttaaggcaactgattagaagtggatgcttgtgtataggtatatatgagggcaagattctctgaaatatattgactatatgaattcaatatatacagtaagtcctcacttaatgttatcaatatgttcttggaaactgtgactttaggagaacttaggtataatgaaaccaattttaccatagcctcgttgatataagcaagagttaagttctggtcatttctggtcacaaaaacatccctaaacttataaataaagacctaaaatgtttctagtattaaacattaaaataaatgtgagctattcaaacatttaagaaagatgaaaaaaaaccaagtaagataattatttacccactaattccagttcagggtcaagggtgt

SEQ ID NO: 3425 - DNA, 560 bp, Homo sapiens
  MAP TO AL034373.13; EXPRESSED IN HELA, SIGNAL = 1.8; EXPRESSED IN LUNG, SIGNAL = 1.5; EXPRESSED IN PLACENTA, SIGNAL = 2.6; EST_HUMAN HIT: AL600353.1, EVALUE 7.90e-01; SWISSPROT HIT: Q49398, EVALUE 1.80e+00; NT HIT: gi14726301, EVALUE 2.10e+00
atttggccaatgagttggaggaatacaaacctgtgaaaggcagttgaggccagtttatgaatgtccttgaagtccagctttgataaatggattttactctgaagggagacaccaaagtatctgaacatggagctatctagttgaaaggaaagtttcaggataatgaatttttcaggaatatgcatgatggatgagcgtacggcattcctggagaaaaagggaccaattagtagatgattaaaatagatgagacatggctaataatagtaagaataatggcaatgactccagaaaaaatggatgagagagacatttgaaagaagaaactggtacgccttaatgacaagtggatgtagttatgaaagggacaagtaagagataagacaaaaattttctgagattttgggactgggaattaccaaaggagagttaataaaaaataaggatagaaaaggcaagtacttctagggaattacattcctaaagtatgcatttcttttctgattcctgagagaaatccacagaaaagaagattctgtggcacagtggagagaatcatt

SEQ ID NO: 3426 - DNA, 508 bp, Homo sapiens
  MAP TO CHR21_30.0; EXPRESSED IN LUNG, SIGNAL = 1.1; EXPRESSED IN HELA, SIGNAL =   3; EXPRESSED IN FETAL LIVER, SIGNAL = 1.7; EXPRESSED IN BONE MARROW, SIGNAL = 1.4; EXPRESSED IN PLACENTA, SIGNAL = 1.1; EXPRESSED IN ADULT LIVER, SIGNAL = 1.2; NT HIT: AL163249.2, EVALUE 1.00e-20; SWISSPROT HIT: O32865, EVALUE 3.60e+00; EST_HUMAN HIT: AV730039.1, EVALUE 6.00e-54
tccctcctgtggaagatttgttcttttgctcttctcaataaatttcgctgctgctcactgtgggtttgcactgcctgtagcagtcactgtaaaggtctgcagcttcacttctgaagccagcaggaccatgaacccactggggggatcggaacaacttcttgcctttgagagctgtaacagtcactgcaaaggtctgcagcttcactcctgaagtcagctaaaccaggaacccaccagaggaaagaaactccagacacatctgaacatctgaaagaacaaactcaggacactgtctttaagaactgtaacactcaccgtgaaggtctgcagcttcacttctgaagtcagtgagacgatgaacgcatcagaaggaagaaactccggacacgtctgaacatctgaaggaacaaacacaggacacaccatgtttaagaactgtaacactcaactgcgaaggtctgcaacttcattcttgaagtcagcgagaccaagaacccaccaattccag

SEQ ID NO: 3427 - DNA, 575 bp, Homo sapiens
  MAP TO AL160168.1; EXPRESSED IN HELA, SIGNAL = 0.95; EXPRESSED IN PLACENTA, SIGNAL = 0.54; EXPRESSED IN LUNG, SIGNAL = 0.6; EXPRESSED IN FETAL LIVER, SIGNAL = 0.56; EXPRESSED IN ADULT LIVER, SIGNAL = 0.52; EXPRESSED IN BONE MARROW, SIGNAL = 0.54; SWISSPROT HIT: Q9Z9F4, EVALUE 9.50e+00; EST_HUMAN HIT: AA527182.1, EVALUE 5.20e-02; NT HIT: U82446.1, EVALUE 5.50e-01
ctcggccttgttttcaattccatcacctagatgttaaggtccacacctctttttcagtcttcacactctcttcaggtcatctttttgatgcccaggatttcaagttctatgtatacgttgatgactcacaagtacaaattacccacccgtatcttgctcctgaaattcagaggcaaatactcagcttcatcttgcacactggatatcctactggcacttaaattcaatatatgcaaaatagaattcataataataatagtaataatgcacataatattgaattagcatttaatgcttattctcataatctttaccaaaaccctaacatgtaggagactgtcatattccccattttacaagggaggaaactaggacttaaagaggttaattgtcaaatgtcaaatgttcacaaagagttatgatttggacctaagtgcacctgcccagagtctatgttgtttatcaccactcccatgctgactacccttagtttcctctttcacttaattcttcctagtggtgtttcctatttggatggtgcaactgcttcagggtgactttcctgttcccatgga

SEQ ID NO: 3428 - DNA, 500 bp, Homo sapiens
  MAP TO CHR22_179.0; EXPRESSED IN BONE MARROW, SIGNAL = 0.59; EXPRESSED IN LUNG, SIGNAL = 0.57; EXPRESSED IN PLACENTA, SIGNAL = 0.65; EXPRESSED IN HELA, SIGNAL = 0.76; NT HIT: D89013.1, EVALUE 4.70e-01; SWISSPROT HIT: P22357, EVALUE 4.00e-03; EST_HUMAN HIT: BI819256.1, EVALUE 1.00e-119
gaccggtagaagccacaaaggcagtgaccagggcagcagctggtcatagccccttcaggccaaccccgacccccggctatggccccctcaccctcccaccttgggacccctgatccccgctcccaggcaagcccagaacccactggccattctcgaggtccttgacgtggcagacagcagcctccacgcaatcctgagggctggggtaggggtgaggggtggacaggcgctcctccgtgtggaagtggcgggccgtgccattgccctggtaggcccgggggctgcccttcccactggccgacagctcctccttgcctcgctccttctcaggcagcaccacctcgatcttgagctccactgtgggcaaggcagcgccttgagccccccacctcagccaacttcctcccccatccctcaagctgggtgcagaggccagctcctcggggtgccaggaggctcagccctgcctggcaacctccccagaattccctctgcaccac

SEQ ID NO: 3429 - DNA, 557 bp, Homo sapiens
  MAP TO AL132996.2; EXPRESSED IN HELA, SIGNAL = 5.9; EXPRESSED IN FETAL LIVER, SIGNAL = 8.4; EXPRESSED IN HEART, SIGNAL = 6.6; EXPRESSED IN PLACENTA, SIGNAL = 8.8; EXPRESSED IN LUNG, SIGNAL =   9; EXPRESSED IN ADULT LIVER, SIGNAL =   9; EXPRESSED IN BONE MARROW, SIGNAL = 9.7; SWISSPROT HIT: P32896, EVALUE 9.10e+00; NT HIT: AL163303.2, EVALUE 6.00e-44; EST_HUMAN HIT: AL046939.1, EVALUE 6.00e-94
aacaaagcctggatgacagcacatctgcacatctgtttacagcatggcttactgaatattttaaccctaatattgaaacatactactcagaaaacaaaataaaatttctttcaaaatatcactacctattgacaatgcacctagtcactcaagagttctgatgaagatgtacaaagagattaacgttgttttcatgcctgcggacacaacatctattctgcagcccatgaaccaaagagtaatttcaactttcaagacttcttatttaagaaatacatttcataaagctatagctgccatagatagtgattcctctaatggatcgtggcaaagtaaattgaaaaccttccggaaagaattcatcattctagatgccattaagaacatttgtgattcatgggagcaggtcaaaatatcaacgttagcaggagtatggaagaagttgattccaaacctcatgaatgactttgaggggttcaatactgaagtggaagaagtaactgcagttgtgatggaaatagcaagataagtagaattcgaagtgaagcctgaagacg

SEQ ID NO: 3430 - DNA, 558 bp, Homo sapiens
  MAP TO CHR22_180.0; EXPRESSED IN BONE MARROW, SIGNAL = 0.44; EXPRESSED IN PLACENTA, SIGNAL = 0.61; EXPRESSED IN LUNG, SIGNAL = 0.46; EXPRESSED IN ADULT LIVER, SIGNAL = 0.57; EXPRESSED IN HELA, SIGNAL = 0.72; EXPRESSED IN FETAL LIVER, SIGNAL = 0.47; SWISSPROT HIT: P28481, EVALUE 6.00e-03; NT HIT: AY056812.1, EVALUE 5.30e-01; EST_HUMAN HIT: N48360.1, EVALUE 5.00e-02
caggccttcctagtctgtgctccctcatccaatcctcccagcttttcaggaagtaaacatcactcctcccatcccggaatcggggggaaatcctgagcccagagacgtggcatgacttgctttagactgcagggagagagacaggcagacgagaagtggacacccatttgtgccgtgattcctcccccaggaatctttctgctactctgcttggcctttcgtggtaaacaactgggcgtgtgagcgagcggcggcgtgcacgccagagacagatggatacagtgagtgtgctaagccccaggcagcccaggcactgaacacccagataaagctgccaggccgccttcttccttctccgggagaacaggagtcagtggcccagggacaggagctggaccagaagggctttggaaagcctctgaagggaggccacgaaaggatggaggcagagaaggaaggaccctgtggggagtggtgcccacagaacaccgcctccatcgagggctgagtaaggagaagcatgttgtttgaattagaacgctaatatgggacagacgt

SEQ ID NO: 3431 - DNA, 520 bp, Homo sapiens
  MAP TO CHR22_146.0; EXPRESSED IN HELA, SIGNAL = 4.7; EXPRESSED IN FETAL LIVER, SIGNAL = 0.84; EXPRESSED IN PLACENTA, SIGNAL =   1; EXPRESSED IN BONE MARROW, SIGNAL = 0.63; EXPRESSED IN LUNG, SIGNAL = 0.7; EST_HUMAN HIT: AW753073.1, EVALUE 2.90e+00; SWISSPROT HIT: P16818, EVALUE 4.20e-01
tcacctaggactgggacacctgcctgctacgcccccagccccctgtccctagcatggcccagcacccagggtcctggagccctctaggcccaggctgagaaacccctcctgaggccacagcccattcagcttctgtcgcttcagaacctctaaccaggcgatcgcaaggggtcagtatggacaccagctggggtggcccaaattccctccccctggccctgagaccagctttctccagaggaggtgggagggtccagcccacactgacggccgcctctgaggctacggggggcctgcagctgcagcagcagagaacaaggaggctctgtcggtgcagaggggtcgacatcgagccccggaaactccccggggagggccgccggctgggcagaaaccacagcccaaacgtgaggctatctatgtgacagctgctgtggccaccaactccgcgtggccagtccaccaagaccggccctccctaacgtgctgccaaagcgcagggtccacattcagctcgaat

SEQ ID NO: 3432 - DNA, 596 bp, Homo sapiens
  MAP TO CHR22_148.0; EXPRESSED IN FETAL LIVER, SIGNAL = 0.44; EXPRESSED IN LUNG, SIGNAL = 0.52; EXPRESSED IN BONE MARROW, SIGNAL = 0.47; EXPRESSED IN HELA, SIGNAL = 1.2; NT HIT: AL163206.2, EVALUE 8.90e+00; SWISSPROT HIT: Q9P2N4, EVALUE 3.40e+00; EST_HUMAN HIT: AW803159.1, EVALUE 9.00e-04
ctcccattgtggtggttttcaaatgtgttcataaattatttagcaaccttcctggcaaaaggtggagactaatttctctcctcttgagtgtggacaagactcatttctaacaagtagaatgtagtgggggtgatagtgagtgacttctaggattaagtcataaaaggcattatttttgctcctcttctcccctctcctttcctctatcctcttctctcctccttcatcccctctttctttgtcctctgcttcttcctctcctcttcgtctcttctgttttcttctctcctcctcttgtcctttccctccttcttctccttctttttttctctctcccttccccccgccaacctcaattatttgcactgtgaaaagccagttgacacattctgaagacatccaggcagccttttggtgaggttcatatgacaagggatagagacattctgccaaaaaccagcaagaaactgaggccttctaccaacaactgtatgagtatgtcatcttggaagagaagttttcagccccagtcaagaattcagatgattgcagccctagttgacagcaaccacatgagagaccctgatcctgaacca

SEQ ID NO: 3433 - DNA, 544 bp, Homo sapiens
  MAP TO CHR22_148.0; EXPRESSED IN FETAL LIVER, SIGNAL = 0.59; EXPRESSED IN HELA, SIGNAL = 1.2; SWISSPROT HIT: O06222, EVALUE 3.40e-01; EST_HUMAN HIT: AV710874.1, EVALUE 3.00e-03; NT HIT: AF418272.1, EVALUE 2.00e-03
acaacctggcagatgacctcctggcaggtgacatgcccagctcccctgggtaaggcaagagctagatcctttcttccctgggcttcctctcagtctcactggtgggagaagccaagaaatagcgactatctgcaccttctgagtgtccccaggatgctgtcatcacggctccaccctaaggagccagagaaggcgaggcctgtgccctctttctacagatgaagaaattgaagctcagagagtgataggcccccaggcacccatcaagcatgtgtcagagctggaactgcgccctgggttcactcccccaccaggtgtcaggcaggcctggtgttcaatgccagccttttcagagtgtaactcacctgggacacttctaagactgagtgttctcatttgtgaaatggagacaatgatccctgccagctgcatcctaaaaggtaaaggagactatgcctgtgaaagtgctcagcacagcacggaacatgacgcctagtaggccctcagtaatatcagcttcccttcttcctctagacccatcccc

SEQ ID NO: 3434 - DNA, 572 bp, Homo sapiens
  MAP TO CHR22_174.0; EXPRESSED IN HEART, SIGNAL = 3.1; EXPRESSED IN LUNG, SIGNAL = 3.9; EXPRESSED IN HELA, SIGNAL =   3; EXPRESSED IN ADULT LIVER, SIGNAL = 3.8; EXPRESSED IN PLACENTA, SIGNAL = 3.8; EXPRESSED IN FETAL LIVER, SIGNAL = 3.4; EXPRESSED IN BONE MARROW, SIGNAL = 3.8; EST_HUMAN HIT: BI758586.1, EVALUE 0.00e+00; SWISSPROT HIT: P19474, EVALUE 1.00e-06; NT HIT: gi16167919, EVALUE 0.00e+00
ttgtgtacttttcccctggcagtggacatggctgcactcttccaagaagcaagcagctgtcccgtctgctcagactatctggaaaaaccaatgtccctggagtgtggatgcaccgtctgcctcaagtgcatcaattcgctgcagaaggagccccatggggaggatctgctttgctgttgctgttccatggtctctcagaggaacaaaatcaggcccaatcggcagctagagaggctggtttcccacatcaaggaactggagcccaagctgaagaagattctacagatgaacccaaggatgcggaagttccaaggtaaggaatctgtataccctgcccccttcccaagaccagaccaggaaaaatcatctgtgcagttggcccctcattccacatggggattagctgctgtctggcacctaaaattgagatgcttcatcatcacattctcagccctgacaacacatagaatcacctggtgatgtcaaaaacaaaaacaaacaaaaacccgatgtctatgtcatgggttagacaagggattctctaaacttagtgtgctcagattacctgggga

SEQ ID NO: 3435 - DNA, 569 bp, Homo sapiens
  MAP TO CHR22_175.0; EXPRESSED IN HELA, SIGNAL = 0.74; EXPRESSED IN PLACENTA, SIGNAL = 0.46; EXPRESSED IN LUNG, SIGNAL = 0.52; EXPRESSED IN ADULT LIVER, SIGNAL =   2; SWISSPROT HIT: Q92838, EVALUE 9.40e+00; NT HIT: gi14779626, EVALUE 3.00e-95; EST_HUMAN HIT: BI761998.1, EVALUE 4.00e-95
atgtgttcagcgttggtgagaaatctttctcggtttccaggaactttccgaaagcctgtgaactatgggaacagattctccaggaccacccgacagacatgttggccctgaaattttcccatgatgcttatttttacctgggctatcaggaacagatgagagattctgttgctcgaatttaccccttctggacacctgacatccccctaagcaggtatgtgccagctggaaatcacattatttctgtttcttaatctctcttttctgccctaaaaatatggtgactctcttggccctgtcctaaaaataatgggaccactgttgctattctcctagttccttaaagttcaaaggcctcattttcttcacttgattttcatcccacctgtgaatgaggtagtaccattatgtatcagtcagcatgggattgtttttgctgcagtaataaacatcccctggttcttcttccccaaagcttattacagcaaaggtttatttttcactcatactacgtggctaccttagaagggctgagggctctgccaccatgtccttgtctccatctggga

SEQ ID NO: 3436 - DNA, 565 bp, Homo sapiens
  MAP TO CHR22_182.0; EXPRESSED IN LUNG, SIGNAL = 1.6; EXPRESSED IN HELA, SIGNAL = 1.8; EXPRESSED IN ADULT LIVER, SIGNAL = 2.2; EXPRESSED IN FETAL LIVER, SIGNAL = 0.92; NT HIT: Z70705.1, EVALUE 0.00e+00; EST_HUMAN HIT: AI278613.1, EVALUE 0.00e+00; SWISSPROT HIT: P08236, EVALUE 4.00e-19
gtttttccttcctccttggctatgaaatagacaagaaaaaggcaagctagccatttacatctcactatagcagactctcctgtttgctttttgactgtatttgggaagcaggggcctgactgctttcctacttactaagcacaactcacttttcctaggaaatcctcaacgcaacctgcatggattaaaccagctcctcgctttgtttccaatattcttacaatcaaagtgtccagaatgggcaaggcaacctgaaaaaatgaggacgggtacattatcctatgagccaaactgccgcttacactggttagtcatgaaatcggcaaaattccagatgagctctccaaccacgtattttctgagtttttgatccagacccagatggtactgctctagcagacttttctggtagtcttcactgaacatcagaggtggatcctgggattcaaggcaaagagaatttaagagtcagaactggcagaattgtaaatgttagataaaaaataaagatccacttgatggtgaccaaaatatctgtcctcgcagggggctatagtgactgcag

SEQ ID NO: 3437 - DNA, 501 bp, Homo sapiens
  MAP TO CHR21_26.0; EXPRESSED IN HELA, SIGNAL = 5.6; EXPRESSED IN FETAL LIVER, SIGNAL = 2.9; EXPRESSED IN HEART, SIGNAL =   2; EXPRESSED IN BONE MARROW, SIGNAL =   4; EXPRESSED IN LUNG, SIGNAL = 2.5; EXPRESSED IN ADULT LIVER, SIGNAL =   2; NT HIT: AL163246.2, EVALUE 0.00e+00; EST_HUMAN HIT: BG001353.1, EVALUE 0.00e+00; SWISSPROT HIT: Q12929, EVALUE 1.60e+00
tcagctctcacggtgacttgatgacccatagtcaaacgttcagtttccaccaaagcccagtagcaggccaaaagctgtctctcaaaaggagagtagttatctgcagaagatggaagggcttgctccaaaatccttgaggcctccgctgtgattcacctttgggggcctgccaaaggctccaaacagcatccctatcttccactgacacctcaagctccattggatctgctggatctgggtcatatggcccaagcgggagcagcttgcacagcagcctgtacccgttgcagagccgtctcctgttttgggcccacgcaaaactggcgtcctttcaggtcactcgataaacgggatggagtaacacacccaaaagaggaatgaatgtgtttcctccaaaatccaaataggccaactaggcattgtgcctctttcttggttgtaggaggggccaaatgcagcaacttatccttcaccttagaaggaatatcttgacaggcccca

SEQ ID NO: 3438 - DNA, 574 bp, Homo sapiens
  MAP TO CHR22_183_1.0; EXPRESSED IN HELA, SIGNAL = 2.4; EXPRESSED IN FETAL LIVER, SIGNAL = 1.2; EXPRESSED IN LUNG, SIGNAL = 6.6; EXPRESSED IN ADULT LIVER, SIGNAL = 4.3; EXPRESSED IN PLACENTA, SIGNAL = 1.3; SWISSPROT HIT: P01842, EVALUE 8.00e-54; NT HIT: X57808.1, EVALUE 0.00e+00; EST_HUMAN HIT: AW393787.1, EVALUE 0.00e+00
tgggggtctataggtgatggaaaatatgaaaaagagacagatccaagagggggtctgtgacccccaagagtgggggcaactcccatctgacagcgagtgtctccactcaccgctgacctgacctcagtccagcaagggtccggcctgaggtccctgccctgggccttagtcccatacccacttcaagactgaggtcaggggctccccaggtggacaccaggactctgaccccctgcccctcatccaccccgcaggtcagcccaaggctgccccctcggtcactctgttcccaccctcctctgaggagcttcaagccaacaaggccacactggtgtgtctcgtaagtgacttctacccgggagccgtgacagtggcctggaaggcagatggcagccccgtcaaggtgggagtggagaccaccaaaccctccaaacaaagcaacaacaagtatgcggccagcagctacctgagcctgacgcccgagcagtggaagtcccacagaagctacagctgccgggtcacgcatgaagggagcaccgtggagaagacagtggcccctgcagaatgctcttag

SEQ ID NO: 3439 - DNA, 572 bp, Homo sapiens
  MAP TO AC020582.3; EXPRESSED IN HELA, SIGNAL = 1.3; EXPRESSED IN FETAL LIVER, SIGNAL = 1.7; EXPRESSED IN LUNG, SIGNAL = 2.4; EXPRESSED IN ADULT LIVER, SIGNAL = 2.2; EXPRESSED IN BONE MARROW, SIGNAL = 1.6; NT HIT: AL163246.2, EVALUE 4.00e-94; EST_HUMAN HIT: BF930825.1, EVALUE 0.00e+00; SWISSPROT HIT: Q01630, EVALUE 8.30e-01
attgctgagactttccagggcattttgcatttttaaaagagtgtccaaagtttcctgaattttttattgttttttctttaagctacctatttccatgaatatttctcccttcacttcttgtgccagtttttggatttccttgcattgggctttgcctttctctggtatccccctgattagcttaataactaacctcttcaattctttttcaggtaaatcaaggatttcttcttggtttggatccattgctggtgaactagtgtggttttttgggggggtggtgttagaataaccttgttttgtcatattaccacggttggttttctggttccttctcatttgggtaggctctgtcagagggaaggtctagggctaaaggctgttgttcagattcttttgccccacggggtgttcccttgatgtagtactctcccccttttcctatgggtgtggcttcctgtgagctgaactgcagtgattgttgtctctcttctgggtctagccacccatacagtctacccggctccaggctggtactgggggttgtctgcagagtcctgtgatgtgagcca

SEQ ID NO: 3440 - DNA, 592 bp, Homo sapiens
  MAP TO AC019325.3; EXPRESSED IN FETAL LIVER, SIGNAL = 9.2; EXPRESSED IN HEART, SIGNAL = 7.8; EXPRESSED IN PLACENTA, SIGNAL =  11; EXPRESSED IN LUNG, SIGNAL =  10; EXPRESSED IN ADULT LIVER, SIGNAL =  10; EXPRESSED IN BONE MARROW, SIGNAL = 9.4; EXPRESSED IN HELA, SIGNAL = 5.9; SWISSPROT HIT: P21851, EVALUE 1.00e-46; NT HIT: gi4557468, EVALUE 0.00e+00; EST_HUMAN HIT: AL045727.1, EVALUE 0.00e+00
atgagctaccacatccagcctgaagtatcttcttaatacccagtctgcataaatcactacaacattggttgatgataaatccagcagtttgggtttctgtatggagaacagtttcatctccacctccttgcctttgccttttctttaggattctgataatcctgaccttcgagaccggggctatatttattggcgccttctctcaactgaccctgttacagctaaagaagtagtcttgtctgagaagccactgatctctgaggagacggaccttattgagccaactctgctggatgagctaatctgccacattggttctttggcctctgtgtatcataagcctcccaatgcttttgtggaaggaagtcatggaattcatcgtaaacacttgccaattcatcatgggaggtaagaaggtgtgaactgtctctgagtgagaaatgactcttgtttagacagcgttgctcttctttatgcttttatagtctggaaaagaactgctgtacatttttgcttctttatgcttttatagtctggaaaagaactgctgtacatttttggacacctactactatacaaccccagggagctc

SEQ ID NO: 3441 - DNA, 587 bp, Homo sapiens
  MAP TO CHR22_179.0; EXPRESSED IN BONE MARROW, SIGNAL = 5.4; EXPRESSED IN PLACENTA, SIGNAL = 1.6; EXPRESSED IN HELA, SIGNAL = 2.8; EXPRESSED IN FETAL LIVER, SIGNAL =   5; EXPRESSED IN LUNG, SIGNAL = 1.9; NT HIT: gi15317879, EVALUE 0.00e+00; EST_HUMAN HIT: AL134889.1, EVALUE 0.00e+00; SWISSPROT HIT: P05214, EVALUE 8.00e-86
acatctttcgggaccacatcccctcggtacaacatgcagcaggctatgtacttgccatggtgagggtcacacttgaccatctgattggctggctcgaagtgggcactggcgatctcggccacggacagctgctcgtggtaggccttctcggctgagatgatcaaggcataggtggccagggggaggtggatgtgggtgtacggcaccaggttggtttggaattctgtcaagtacacattcagggccccaacgaatcacagggaggccgtgatggaggacacgatctgcccaatcagacgactgaggttggtgtacatgggacactcgatgtccaggttgcactgacatgtcgaccatgaaggcacagtcagaatgttccagggtcgtgtaggtggtcaggatggagttgcagggctccatcacagccatggagacatggggggctgggcaaatggcaaactccagcttggacttcttcccgtagtccaccgagagccgctccatgagcagagacatgaacccagagacggtgccgcccccaaagctgtggaagatggggaagccctgcagtcccatgcacagatcag

SEQ ID NO: 3442 - DNA, 580 bp, Homo sapiens
  MAP TO AL133216.10; EXPRESSED IN FETAL LIVER, SIGNAL = 0.88; EXPRESSED IN HELA, SIGNAL = 1.6; EXPRESSED IN ADULT LIVER, SIGNAL = 1.4; SWISSPROT HIT: P06819, EVALUE 1.40e+00; NT HIT: AF109718.1, EVALUE 0.00e+00; EST_HUMAN HIT: BG015076.1, EVALUE 0.00e+00
tctatttccctgccatccaggctgtgtacccccctgtgggagaaggcttgggccaggctgagctaggttccctgactgtgtgcagccgttctgccccacagaagctgctccttggtatccgagctctggagtgtttgggctgcaactgacaggaattcagaggacaccccaggggcagtggcagtgcccgtctctgatatgctccactcccacgagcccttgttacactcctgctagcccctggcttgtgagcttggcctctgagctggacttctttcggtccttgttgcaagtgggccaccttcacctggaaggccaggtcgtggtatttctgtgtctcattgggccccagggtgtaccaccactcgttcagcatctggctgacagtccggttatcctggttggggtgaccctggtgtgccctgccagggcctggtgccgcttgctgaagatcatgaccgccactcatgggccactggatgtggtccttgtcccatttgttggggctgcgtccatccttctcagaagatgagtcctgttccttgcgcagggcactgagggactgggcctgacatcatct

SEQ ID NO: 3443 - DNA, 540 bp, Homo sapiens
  MAP TO AL136105.2; EXPRESSED IN FETAL LIVER, SIGNAL = 2.3; EXPRESSED IN HELA, SIGNAL = 3.1; NT HIT: D50561.1, EVALUE 0.00e+00; EST_HUMAN HIT: AA778343.1, EVALUE 0.00e+00; SWISSPROT HIT: P01266, EVALUE 2.30e+00
tgttgtccaaggtttctccccatgtggtagtctgaaatatggcctcgtgggatgagaaagacctgaccatcccccagcccaacacctgtaaagggtctgtgccgaggtggattagtcaaagaggaaagcctcttgcagttgagatagaggaaggccactgtctcctgcctgcccctgggaactgaatgtcttggtataaaacccgattgtacatttgttcaattctgagataggagaaaaaccgccctatggcgggaggcgagacatgtttgcagcaatgctgccttgttattctttactccaccgagatgtttgggtggagagaaacataaatctggcttacgtgcacgtccagtcatagtaacttcccttgaacttaattatgacgtagattctgttgctcacatgttcgttgctgaccttctccttattatcaccctgctctcctactacattcctttttgctgaaataacgaagataataatcaataaaaactgagggaactcagagatggtgccggtgcaggtccttggtatgct

SEQ ID NO: 3444 - DNA, 516 bp, Homo sapiens
  MAP TO CHR22_119.0; EXPRESSED IN HELA, SIGNAL = 0.55; EXPRESSED IN ADULT LIVER, SIGNAL = 0.45; EXPRESSED IN PLACENTA, SIGNAL = 0.51; NT HIT: gi14785864, EVALUE 7.70e+00; EST_HUMAN HIT: W72129.1, EVALUE 1.00e-107; SWISSPROT HIT: P11333, EVALUE 3.20e-01
acacggttccagatgctttcccaagtggctgtgccctcctcctatttgcggaggaatggctttggtctgcacctgcagctctggacggactgcctggggctggggctgtggaggcggacgactggggagtctgatggggaggtgggtggcgggggtgttgacaggaaaaatccgactggcggccttggagcagttcgaagagagggcgtgtcctttgcctgttggaattccaaccctggcgactttcagctacaccctcctccctcccctagccccacacaaaacaaaaatgcctcagagcttcagtgtaactggagcaataccagctgattctaacagtgtggcccagcagcgcctgctggctgggagcagggacagaaaatgcctgaggctccgaggtgggagcccaggctgggattcaggatttcgctgctccccgttcaaggcctctggagaatgttccaaagggaggtgtggatgtttcattcagtactttggagggagaaagaaatgggt

SEQ ID NO: 3445 - DNA, 570 bp, Homo sapiens
  MAP TO AC019196.4; EXPRESSED IN PLACENTA, SIGNAL = 2.2; EXPRESSED IN FETAL LIVER, SIGNAL = 1.6; EXPRESSED IN ADULT LIVER, SIGNAL = 1.8; EXPRESSED IN LUNG, SIGNAL = 1.7; EXPRESSED IN BONE MARROW, SIGNAL = 1.8; EXPRESSED IN HELA, SIGNAL = 1.3; EXPRESSED IN HEART, SIGNAL = 2.5; SWISSPROT HIT: P70436, EVALUE 8.20e-01; NT HIT: AB013139.1, EVALUE 5.40e-01; EST_HUMAN HIT: AI282822.1, EVALUE 3.20e+00
attttgccatcttcccagagtttttatttttttttgtcttcagattatctctccctcaccatcataaaatgcatgcaccatctcaaggctttcattctcacacagcaatgcaaaaagctggaaaaaaggctgccttttccttggttcccttttaagaacaaatacaagtttccaaaaataaaactaaccccagaacactttacacaatgtctcatggctaaattgcattccttgtgcatagtcactagcaaaggaaatgataccacgattgttgaagacaggcttagtgtcccctgaaacacacagttactggataggtgaacaatttgggggtgctgttaacatagtaaaggaaggaggtggctttcgggagacaacatttggagattgccagaaactttttgacctataatactctcagctacaaaaatgtaactattataggtactttagatgagactatggtgataaaaatatctggaactttttataattttcacttctgataatccaagggaaaaggagaaaaaaaagtcatactattttatacctctcacccaacctagacct

SEQ ID NO: 3446 - DNA, 598 bp, Homo sapiens
  MAP TO AL137068.1; EXPRESSED IN PLACENTA, SIGNAL =  11; EXPRESSED IN LUNG, SIGNAL =  10; EXPRESSED IN ADULT LIVER, SIGNAL =  11; EXPRESSED IN HELA, SIGNAL = 4.6; EXPRESSED IN FETAL LIVER, SIGNAL = 9.7; EXPRESSED IN BONE MARROW, SIGNAL = 8.5; SWISSPROT HIT: O05960, EVALUE 1.00e+01; EST_HUMAN HIT: BE295646.1, EVALUE 3.00e-68
caaagcttggcacacaccaaatatttatagtgtgtataaccattatcatctttgtatcattatagttactacattacaatacgttatagtattacaatacattaattgtaatatacaatacattatagttattacattataatacattatagtattacaatcattacatcattatttcattataattatgaaatgctatgaagtaaaatattattaaaacattatgattagaaatagccagcttttttggtatattcatggcttaatttttgtttttgttacataacatcaaaacaacttgttctttgtgatattcatgtctttcctctactgatgatgatctgtttctataatttcaggagctgattcacatgcaggagttagatatattacagaggccctcattaaaaaacttactaaacaggataatttggctttgataaaatctctgaacctttcactttctaaagacggtggcaagaaatttaaggtaggttaccaacaatttctgagcatagatactgtttttaacttttctgtgctttaatactgcgaaaaaaaattatcctaatgtcacctaatttgtggcagacctttt

SEQ ID NO: 3447 - DNA, 592 bp, Homo sapiens
  MAP TO CHR22_102.0; EXPRESSED IN FETAL LIVER, SIGNAL = 5.3; EXPRESSED IN BONE MARROW, SIGNAL =   6; EXPRESSED IN HEART, SIGNAL = 3.6; EXPRESSED IN PLACENTA, SIGNAL =   2; EXPRESSED IN LUNG, SIGNAL = 1.9; EXPRESSED IN HELA, SIGNAL =  19; EST_HUMAN HIT: BF996338.1, EVALUE 0.00e+00; SWISSPROT HIT: Q10172, EVALUE 2.20e-01; NT HIT: AB048319.1, EVALUE 1.40e-01
ctgcctcagtattgggaagcaagagctcaaggggctcgtgaggcctgggaggctctgcctgggtcgcatgggcatcttgtattttcttccgttttggctgtatgcatcaggcacaaactgtgtgcacagagccacatgacgggggtggggtggggaagagactgacagatgtcgttcttgcacggtggctctggccctccctgggtgagttctgcaggcgagggaggggctcagagcaggagggcgcaggtgtgcaccagacgggtcaggatagccaggtgaggtggctgcctctgtgagagggcgggaggactcctggagggcctccctaggatgaagcctctggggacagggaggcgcatccctggaggggtcgtcattcttccccagaggtttgcatctcacaggcctttgccatctcccccctcggctccttccacttgttgaagcccactcgtggctctgaggctgctgctgacacaggtctcttctcgtgccccacagacaccgtgtgagtgggtgtgacgctccgtgtacagggagcactcagacagagctggaatgccagctgggacctcggaatccacactgt

SEQ ID NO: 3448 - DNA, 543 bp, Homo sapiens
  MAP TO AL137159.1; EXPRESSED IN HELA, SIGNAL = 0.77; EXPRESSED IN FETAL LIVER, SIGNAL = 9.4; EXPRESSED IN HEART, SIGNAL =  14; EXPRESSED IN PLACENTA, SIGNAL =  17; EXPRESSED IN LUNG, SIGNAL =  19; NT HIT: AJ271735.1, EVALUE 2.00e-15; EST_HUMAN HIT: BG012555.1, EVALUE 3.00e-28; SWISSPROT HIT: P08548, EVALUE 2.00e-07
aaagtcccaaaatcactgcgctcttactccccaaaatgcacagattctctctctgcgctatataacctactgctgggggatatggaagcagtggcatctgcaattcaagactgtttttcttaccctcttcagtgcctctttcagtgatatgaagttaaaaccaggtactgtgactgctgacctgatttttggtttttatggtgctttttatgtggataattgttaaatttagtgtgcagaggggctgattggtagaggcttctattcaaccatcttgctccacttcctcccattatgttgtatatatcttcaacagacacacacacacacacacacacacacacacacacacacaccccaacaatctagaaatagaagactaattcccttaatatgataaaaggcatctatgaagaacctacagttgacaccatacttaatggtgaaaaactgaatggtttcatgcaaagattagaaacaaggtaaggatgtccactctcaccatttcttttcaacatttaatggagatgttagccagtgcaa

SEQ ID NO: 3449 - DNA, 510 bp, Homo sapiens
  MAP TO AC010125.3; EXPRESSED IN HELA, SIGNAL = 6.8; EXPRESSED IN LUNG, SIGNAL = 2.5; EXPRESSED IN ADULT LIVER, SIGNAL = 2.3; EXPRESSED IN FETAL LIVER, SIGNAL = 2.4; EST_HUMAN HIT: AW998984.1, EVALUE 1.80e-01; SWISSPROT HIT: P19001, EVALUE 5.50e-01; NT HIT: AL163218.2, EVALUE 7.60e+00
gcatgtaaacccataacccgataatgctcttggaaaggaattgatatcatttgtatttggagatctcttaaatttcttacatcttttacatttggtataaaataaaaaattgtcagaagaaataaaagcattcaaatggaaaaagtgaatattaagggtaatatcaaatcagtacttaagaagaatgctgggaaaggccaggaaataaagattacagaaattgaagagaacacaaattatcagaagccaaagtccagccctagcccacccatcctctatacccattatctaggggaaatatatgatcttagggcaagtgcaagaaaggttacaattaaaaacatctcagtgatgattcttgccttaaactccagaagaatccttgtccaactctgctggatgaaggatgaagtagagaaatacacttctgcatccctgccttgccccagcatggactaaaatacacctcagatgtaattttctctctttccccttgcattcaaaccagtt

SEQ ID NO: 3450 - DNA, 528 bp, Homo sapiens
  MAP TO AL136366.3; EXPRESSED IN HELA, SIGNAL = 1.6; EXPRESSED IN HEART, SIGNAL = 2.1; EXPRESSED IN PLACENTA, SIGNAL = 2.5; EXPRESSED IN FETAL LIVER, SIGNAL = 2.1; EST_HUMAN HIT: AL538961.1, EVALUE 6.00e-88; SWISSPROT HIT: O10334, EVALUE 3.70e+00; NT HIT: Y15405.1, EVALUE 1.30e-01
ataagcaccctcaaacgtggggcaattgaaagagatttgaacccctaagtgatgggcctgggaggccccagacgtcttcacttctctggggtcttacctggatctgacgctgcttcttcgcccttggtgttgctgaagcttttgtgggctcttctgtgtaatacttgtcaatttttcgtttttcttttttaagcttgtgaaaaacttttggatgcaacctagttttggtggcagaaggaaatggtttctgttgggaaagggaaactaataaagggaggaggggtagcgatgtcgggagacacttgcccagggctcagccctgggcctctttttgccaggggacaacggctggttctgggctctcaggctgaaaggagtgctctctgggtgccaggatttcactgggggtggtgtggtgaggagggagggaagaagggagggagggagagaaggagagatgggcgctcgatttttaaagagaccccgaaataatggcttctatgagagtccaggcattcaaagaggtgt

SEQ ID NO: 3451 - DNA, 597 bp, Homo sapiens
  MAP TO AL136975.1; EXPRESSED IN HELA, SIGNAL = 1.9; EXPRESSED IN FETAL LIVER, SIGNAL = 2.6; EXPRESSED IN BONE MARROW, SIGNAL = 2.7; EXPRESSED IN ADULT LIVER, SIGNAL = 2.8; EXPRESSED IN PLACENTA, SIGNAL = 2.9; EXPRESSED IN LUNG, SIGNAL = 2.9; SWISSPROT HIT: Q9QUN9, EVALUE 8.80e-01
aggtctcctcttcctcaggcaagcactaatcagtgctgagataggccttcttggcctgagattttgcctacaggataaacaaagagttaagtgatcatccaactttgccagccttttgggacattggctgagaggttcatttctgcttaccttaccaagaacactgaggaaactggcatagctagatcacctgggtgcaatgaatttgtgggagctaacaacacctggtgcctggctttcaacaacctgtctgctaaccctgtcaaccagccaggctgaccaagaaccatcagccaagcagccaaactgtggacctcaacagctggcccatgcaaacttctactgccagcacccacagctggaaccctatgcagccccatagtcagtgccccatgctcaccagcaatgaatgctttctgggcacccacctgtgagtgcacgcccccacagacagtacgcatgtgcccacacagacagcatatatatctcagcagccaatgtagacatcagcagctggctcgactgcaggattgggagaaggtgcacaactctgagactgcaccttcaagagggagaaggaaaagtggagattgcagc

SEQ ID NO: 3452 - DNA, 577 bp, Homo sapiens
  MAP TO CHR22_105.0; EXPRESSED IN BONE MARROW, SIGNAL =  12; EXPRESSED IN HEART, SIGNAL = 8.3; EXPRESSED IN PLACENTA, SIGNAL = 3.7; EXPRESSED IN HELA, SIGNAL = 9.1; EXPRESSED IN ADULT LIVER, SIGNAL =   2; EXPRESSED IN FETAL LIVER, SIGNAL =  11; SWISSPROT HIT: Q92523, EVALUE 5.00e-34; NT HIT: AB003286.1, EVALUE 0.00e+00; EST_HUMAN HIT: AL045256.1, EVALUE 1.00e-121
ctagttgtgcctccagcctccagttccagggtggcaggcagggccacgctcctctcctcacggagccctgaactcagggtggggacagtcccttcctagaggccaataccttcctcctgcagtgagggctgccagcttctcctccccaggctgaggtggggaggggtcgtccaggatcctctggaactgcatctccagatcctgaggcttgagcagacgggcgccctcatagagccacagcttgaagaagcgtcccttgtggtagacagccacgtgccggctgtctgagaggtgctgtagcacatctgtgatacaggccacgggcaagctgaggcggggcccccagctacatcctgggaagggcccacctcccatgcactaggtgacccctgcagaccctgttttgctcggcctctgcctgggccttcctgccccctggatgggatccgtgtgtcctaaaccaggccctgtgctgggtgcttccactctctctcacgcaacaccaacaatcctataaagtatttcacagaagaggaaacgacgcactagagggttgtgcaaaccgcctaaggataca

SEQ ID NO: 3453 - DNA, 523 bp, Homo sapiens
  MAP TO AL136366.3; EXPRESSED IN BONE MARROW, SIGNAL = 4.5; EXPRESSED IN HEART, SIGNAL = 9.4; EXPRESSED IN HELA, SIGNAL =   5; EXPRESSED IN PLACENTA, SIGNAL = 7.6; EXPRESSED IN LUNG, SIGNAL = 5.5; EXPRESSED IN ADULT LIVER, SIGNAL = 5.4; EXPRESSED IN FETAL LIVER, SIGNAL = 5.8; SWISSPROT HIT: P56410, EVALUE 6.30e+00
cttttctttgggaaggaggggaggcaaaagcctgaataaaagaaaataatttaaaaagaaagaaaggaaagaagaaacaaaataagaaccgtatttttaacaaaaggatttttgaaagccttggaaaatgttatattcactcatataaggccccactgttttaaaacatattttactataattttgccttcaaaaccctgacattcgaagttgaacagggctctttcagtgtacaaccccaggacatggagaaataaaaagaacagtattccaactaacgcatactcagtgggaatcatcacatcgcataattgcttgaaatccacaagctgatccgatgtcatcttcagaaatatgcaagtttccctttgttttctgacttagagatatttccttgctttagggcttaacccttcagttgctgcccctggtgattgaaacataattaaaatgaatgtggatctgcccttcctaaactctccccaaatgttagataagattcccccaaacctgccaaatctta

SEQ ID NO: 3454 - DNA, 574 bp, Homo sapiens
  MAP TO AL136443.5; EXPRESSED IN BONE MARROW, SIGNAL = 1.2; EXPRESSED IN LUNG, SIGNAL =   2; EXPRESSED IN ADULT LIVER, SIGNAL = 2.1; EXPRESSED IN HELA, SIGNAL = 0.6; EXPRESSED IN FETAL LIVER, SIGNAL = 1.2; NT HIT: AJ400879.1, EVALUE 7.00e-93; SWISSPROT HIT: O30725, EVALUE 9.40e+00; EST_HUMAN HIT: AW246964.1, EVALUE 1.00e-73
gtttgtggacacaccaatcggcactctgtatctagttaatctggtggggacttggagaacctttatgtctagctgtgggattgtaaatacaccaaatcagcattctgtgtctagctcagggtgtgtaaatacaccaatcgacactctgtatctagctaatctagtagggaggtggagaactttggtgtctagctgaaggattgtaaatgcaccaatcagcaccctgtcaaaatggaccaatcagctctctgtaaaacagaccaatcggctctctgtaaaatggaccaatcagcaggatgtgggtggggccagataagagaataaaagcaggctgcccccaagccagcagtagcaaagctgtccgttttggtttctcaccgtggaagctttgttcttttggtcttttgtaataggtcttgctgttgctcagtgtttgggtctacattacttttggagctgtggcactccgcgtgaaggcttgcagcttcacccttgaagccagtgagaccatgaacccaccaggaggagtgaaggctgtcttgtcttaagtagtcctaccggctgtaacggttgt

SEQ ID NO: 3455 - DNA, 595 bp, Homo sapiens
  MAP TO AC020759.3; EXPRESSED IN BONE MARROW, SIGNAL =   2; EXPRESSED IN LUNG, SIGNAL = 2.5; EXPRESSED IN ADULT LIVER, SIGNAL = 1.8; EXPRESSED IN HELA, SIGNAL = 1.6; NT HIT: AJ278581.1, EVALUE 0.00e+00; SWISSPROT HIT: P04438, EVALUE 8.70e-01; EST_HUMAN HIT: BI909320.1, EVALUE 0.00e+00
gacatcatgtgacccagcaggtcaaggtcagaaaacaggaggagttggggcaagtgaggaccactggtgtttatttttagtcttatttatattgggattaaggtaagaaaaataacagaatggctgggtttcctacctcaaaaatataataaaagcacaaagtgaggtggcaggcccattaacccactcatctgcttcctcccacaggtgctgtgggcgcctgtactctctctgtcacacaaccgtggtacctagaagtggactacactcatgaggccgtcaccataaagtgtaccttctccgcaaccggatgcccttctgagcaaccaacatgcctgtggtttcgctacggtgctcaccagcctgagaacctgtgcttggacgggtgcaaaagtgaggcagacaagttcacagtgagggaggccctcaaagaaaaccaagtttccctcactgtaaacagagtgacttcaaatgacagtgcaatttacatctgtggaatagcattccccagtgtgccggaagcgagagctaaacagacaggaggagggaccacactggtggtaagaggtcagtcagcgaggctttatttcagtgc

SEQ ID NO: 3456 - DNA, 526 bp, Homo sapiens
  MAP TO CHR22_10.0; EXPRESSED IN PLACENTA, SIGNAL = 0.36; EXPRESSED IN HELA, SIGNAL = 0.67; EXPRESSED IN FETAL LIVER, SIGNAL = 0.78; EXPRESSED IN BONE MARROW, SIGNAL = 0.76; NT HIT: AF095743.1, EVALUE 7.80e+00; SWISSPROT HIT: P16242, EVALUE 2.80e+00
tatgtttccaggcaaaaggcaggtggacgccagggtctttgcaggtgcgggtggtgaacccagtgcagggctgtttcccccctacctgcacattgcctgcgtaaacaaaggccagctctctcctcattttctccgtgttgctttccaacagcagctgactggggaaacccagagacaaacggtcccaggggctccgagtgacactgtgctttgtcaccacgtcgttcatctcagccagctcctctgccggccccctcttcaccttgatggggcagcgcctttctccgctgtgtctgtggccttcccaggtggacttcccacagggggacaaggaattggctctctggggatccaagaagctgccagaacactgcagaattccaggcagggagaaagggcagagatttcatccaaactccagagtcttcctgtgaggcggcagcaggacaagccctgctcacagttagaaactggacaggtggcaacacgacctgaaaagtgtgagagaaagtccggaagtaagccc

SEQ ID NO: 3457 - DNA, 589 bp, Homo sapiens
  MAP TO AC016078.3; EXPRESSED IN HELA, SIGNAL = 0.66; EXPRESSED IN FETAL LIVER, SIGNAL = 0.66; EXPRESSED IN BONE MARROW, SIGNAL = 0.6; EXPRESSED IN LUNG, SIGNAL = 0.52; EXPRESSED IN ADULT LIVER, SIGNAL = 0.58; NT HIT: AF215636.1, EVALUE 3.60e-02; EST_HUMAN HIT: BG540349.1, EVALUE 5.30e-02; SWISSPROT HIT: P41512, EVALUE 1.10e+00
aaacatgaaccttgcccttgaaatacacataatactgtaagagatagcattggtagtgctctatgctttgggaagcatcaacttctacaggtgcattcttgggttggttgtgtgcatacagaaatgttttccatggaaacactgcaaataggggttatatttttagcacaggctactgaagtgttgaacccataaataaccagaattataattttgggaggctaggtaccactggggagttggtaggcacagaaagaggagacacaagaggagagaaagaaggaggataggggaaaggcagacgactggaaaggaagagaggacaaagaagaggagggaatgagacagaggaaatggaaggagattaagggaagaaaggagtggagagaaaagaagaagtgtgagggagagacagacaggaagtaaaggaagcactctctctactccttacttcaggataaattttaggttcgattttgaagtatgaagaatttgtttttaaaaatcctctccccacccctacccttacctcctgcttttttcttgttccccaactcacatataagcaagtcccaacacaatgaccatg

SEQ ID NO: 3458 - DNA, 566 bp, Homo sapiens
  MAP TO AL121993.2; EXPRESSED IN BONE MARROW, SIGNAL = 0.73; EXPRESSED IN HELA, SIGNAL = 0.52; EXPRESSED IN FETAL LIVER, SIGNAL = 0.73; EXPRESSED IN PLACENTA, SIGNAL = 0.91; EXPRESSED IN LUNG, SIGNAL = 0.9; EXPRESSED IN ADULT LIVER, SIGNAL = 0.81; EST_HUMAN HIT: AW897200.1, EVALUE 1.00e-113; SWISSPROT HIT: Q57865, EVALUE 9.30e+00; NT HIT: gi16161328, EVALUE 6.00e-84
atgcaaggttcctttcttgcttctgatgtccttatgtatctaacagtcctgaagggttgtcttactttctttgatgctgcttctgcagagctgcctctgataattgtccctgaaggatcagttttctttgcttgtcaatatctccttccattcgagcaaaagcatgagagccaatgaaagagagatcaactcccaagccttcatcctcctcttcttggttatctgtaacaaaaatgcaactatcaatagagagcttatgctaaaactagatagtaaacattgtgaatgctgcagtaaggatgacagtgaggtaactcaaaaaactggggtcaaggttatttttgagaatgaaactgtaatcagatttaggcatttgtaaagctgaaataatgaaagaaactgcctgtccatgtgtgacaaaggttttagcaatatgtgaaatccaatcagggtgacctgggtgtaaccctaggaagaaaagagtagaatgtagtcacacacaaaaagacagaagtaaatagattgtatctggctttaaagatggctcattgcacagcatctgacaa

SEQ ID NO: 3459 - DNA, 550 bp, Homo sapiens
  MAP TO CHR21_66.0; EXPRESSED IN BONE MARROW, SIGNAL = 1.5; EXPRESSED IN HELA, SIGNAL = 4.2; EXPRESSED IN FETAL LIVER, SIGNAL = 1.5; EXPRESSED IN HEART, SIGNAL = 1.2; EXPRESSED IN PLACENTA, SIGNAL = 0.79; EXPRESSED IN ADULT LIVER, SIGNAL = 0.59; EST_HUMAN HIT: BF757994.1, EVALUE 9.00e-90; SWISSPROT HIT: P57057, EVALUE 2.00e-27; NT HIT: gi9507120, EVALUE 6.00e-90
gctggactcgtttcagcttctcagctccatcttctgtcttctgttttgttgtgctgcaggagaggtttgattatgggggtctggaactcccacacctccgtgggcaacatcttggggtcattgatcgctggctactgggtgtccacatgctggggcctgtccttcgtcgtgcctggagccatcgtggcagccatggggatagtgtgctttctcttcctcattgaacgtaagtgcacgtggccttggagaccacccaccaagggaggcctcggatttccctgcctgggtgggccttgggggcgagtgtgagagctgcgtggcctagcgccctgtttgcccgtggctgcctcagcgctcttcttaccagggagacttccccggggagccggttctctcctggttttgctggatttcctactctcccctgattctggagtgacccatgtccccattccttcctcccgtcctcctgtcctcccttgccccggcatcaggagttcatgcatgggagtcttccatcttcccacaggctgttccttctcatgcccat

SEQ ID NO: 3460 - DNA, 568 bp, Homo sapiens
  MAP TO CHR21_55.0; EXPRESSED IN HELA, SIGNAL = 0.52; NT HIT: Y15777.1, EVALUE 3.50e-02; SWISSPROT HIT: P40082, EVALUE 3.20e+00; EST_HUMAN HIT: AA668348.1, EVALUE 1.30e-02
ctggggaagccaagtgttaggaaactcttctttctggaatgttccattttttcccttctcagagagaagtcagccctgttatttcccagtttctgctcttcctaccaggcttcaggtctctgcccactgtgtcctcacaggaaggcagcaataaggaactgggttagggtctcttcccccgtccacagatattggggtatgtgggtccctgagtcttcggtccatgcaaggggcatctgtccctctcctgcagacagtgatgcaccctgggccgcaggctggctgctcgcaagttgcttttcctcagtgaaagaatctgcttgttggaggcaccagaaggttcttgaagctgcagaaaattctacaagtggtggaaggttctggaaacagcttcctccctcctcctctcccccttctccaccacaggcagcatctgctgtagtgtgagccgcaaccctgcctggccctccaccaagcctgaggaggacgcgagctcggctgcggctgacagcattcagcagcagaactccaagcaagggggtcacctgcccaggagactaccccctta

SEQ ID NO: 3461 - DNA, 538 bp, Homo sapiens
  MAP TO AC015937.3; EXPRESSED IN LUNG, SIGNAL = 1.1; EXPRESSED IN HELA, SIGNAL = 1.8; SWISSPROT HIT: O42280, EVALUE 6.00e-11; EST_HUMAN HIT: AA738490.1, EVALUE 4.80e-02; NT HIT: AB063483.1, EVALUE 5.00e-75
acggggttacttcttttggggtgagccctgaaatgatgtatattccacccacactgggggcacccaaggaggctcccttcccttcacctgcccctcaccaccatccccaaggctcacccgtctctgtcctctcgccgtctccagcctgaccaggtgggaggtcctgatgcccttcccaggactgggcactgcggtggccccagcacagggcagggcccacctgaagcagtgtgacctgctgaagttgtcccggcagcagaagcagctctgcgggagggagcccagcctggctgagaccctgtgggacgccatgcacctcggcctggagtgccagttccagttccggcatgagcgctggaactacagcttggagggtaggaggggcctgctcaagtgaggtggggaggagggctatgggaggaggagggctgggggcgcgggggaagaaggcttctgggaggaggaggaggctgggagaggctgccttttcctctcccctggaccctgtgcccagaacacactgcccttgctaccctag

SEQ ID NO: 3462 - DNA, 589 bp, Homo sapiens
  MAP TO AL118512.8; EXPRESSED IN HELA, SIGNAL = 2.3; EXPRESSED IN FETAL LIVER, SIGNAL = 3.2; EXPRESSED IN PLACENTA, SIGNAL = 4.1; EXPRESSED IN LUNG, SIGNAL = 4.6; EXPRESSED IN ADULT LIVER, SIGNAL = 4.5; EXPRESSED IN HEART, SIGNAL = 3.8; EST_HUMAN HIT: AW946301.1, EVALUE 8.30e-01; NT HIT: gi15296873, EVALUE 0.00e+00; SWISSPROT HIT: P13590, EVALUE 5.00e-11
gaatctgagaacccaggcagtggcatccttatttacccaagacatcaacttcatatttgatttccttttctcctgccacactggtagccacgcatatgtactgtcctcgatcaatttcttgggcactcatgatttcgagtttcttcccaccagcttctatgcggatattgtcattagctttcacaggtacaccatctttcaaccaggtgagaatgggagaagggtttccagcagctttgcactccagtgtcagagaatgagcaataactacttgcttattcaaaggcgtggccaagttgccttcaatcattggaggaactagggagaaacatagcaatatttcaggcaattatttgtgtggtcacaaaatacattctaatgaaataaagaagagcttttgttttttctcacaaagtttgaccattaaaatctacctatatgcctgtctccctctaagctattgaggaaagaatttcttggttcagctaaactgtaactgtcctaattattctggaaactctggactttctggcttataaaggacaaatagtagagaatgatttttgtcccaacaactactttgcctttt

SEQ ID NO: 3463 - DNA, 595 bp, Homo sapiens
  MAP TO AL121876.23; EXPRESSED IN HELA, SIGNAL = 1.3; EXPRESSED IN LUNG, SIGNAL =   3; EXPRESSED IN ADULT LIVER, SIGNAL = 3.2; EXPRESSED IN FETAL LIVER, SIGNAL = 3.7; EXPRESSED IN PLACENTA, SIGNAL = 3.8; EXPRESSED IN BONE MARROW, SIGNAL = 3.4; SWISSPROT HIT: Q09884, EVALUE 2.00e+00; EST_HUMAN HIT: BI026854.1, EVALUE 5.40e-02; NT HIT: AF106703.1, EVALUE 5.70e-01
ggggtatgtgtgcatgtgtgtgtgtctgtgtgtgtgtgtgtgtgtgtgtgtatgtgtgtgtgtgagagagagagagagatgaatactgagataatcttaagtatttaattgctctatacctaaatttgccaaacagactggatttcctgtttgttaatctgatctttttcttggtatttgaaagtcatgctagttagaaaaaaaatcagtaattttaattctgtacatatttatgaaggtttatgctgcatccagcactttgctagatactattggatataagaaagttataagacaaagtttctgcccatacatatttttctctgtagtttagaagaccaggtttactcatgtaaaataattagtgaatcatatgagatagagtaccatgaaaaagaaactccaatgtgaacttacttaggtactcattataaataggcaggctcccatcatagcagtaaactgtgtgtgtaggccagttgaagaataccacacttggaaaatagactgctttggggagatatttgaggtttaacctaaactcaaacttgaagaccatttgaagactatgaaaacgctttcctcccagataaat

SEQ ID NO: 3464 - DNA, 569 bp, Homo sapiens
  MAP TO AL133520.2; EXPRESSED IN HELA, SIGNAL =   1; EXPRESSED IN FETAL LIVER, SIGNAL = 2.4; EXPRESSED IN PLACENTA, SIGNAL = 2.6; EXPRESSED IN LUNG, SIGNAL = 2.6; EXPRESSED IN ADULT LIVER, SIGNAL = 3.2; EXPRESSED IN BONE MARROW, SIGNAL = 2.4; SWISSPROT HIT: P43879, EVALUE 2.40e+00; EST_HUMAN HIT: BI600012.1, EVALUE 8.00e-38; NT HIT: U91328.1, EVALUE 2.00e-25
gggtaacttctggatgctgccacggcattgataagctgtcatggtgctggtgggagtgtcttttagcatgctaatgcattagaattagcatataatgagcagtgaggacaactagaggtcgctttccttgccatcttggttttggccagcttctttgctgcatcctgtttcatgaattggatctttgtgacctgtatcttgtgaaaccagtcctgctgacctcctatctcattctgtgacttaggctgcctaacttcctgggaatgcagcccagcaggtctcagcctcattctccccagctcctgttcaagatggagtcgctctggttcaaacgcctctgacagtaggtcccatgatgataactgctatggagaacaaaagcagggtagggagggagttggggatgagagtagtgcaattgtagagtccggaaggtgtcctggaaaagggagcattgaacacataccaaaaggaggtgacatttgagcaaagacctgaagaaggtgaaggagcaagccctgagcatctataaaggaagagcattccaggcatagggaacagcaagtgca

SEQ ID NO: 3465 - DNA, 547 bp, Homo sapiens
  MAP TO CHR22_168.0; EXPRESSED IN HELA, SIGNAL = 0.79; EXPRESSED IN LUNG, SIGNAL = 0.72; EXPRESSED IN ADULT LIVER, SIGNAL = 0.75; EXPRESSED IN FETAL LIVER, SIGNAL = 0.6; EXPRESSED IN BONE MARROW, SIGNAL = 0.58; SWISSPROT HIT: P46196, EVALUE 7.00e-21; EST_HUMAN HIT: AL036162.2, EVALUE 3.00e-68; NT HIT: gi14777624, EVALUE 2.00e-68
taacaggcccatctttccagggaagcattatcttgaccagctgaaccacattttgggtaaggttcccgagcccttcaggagctagatttactcaagtttgtacagcttacatcaaagtcacttcattaaattaagaagagttctaatatactctttaacctgtggtaggtgtgaatttttaaccttctctgatttaaaatgttaaggacttttgtgtaaaaacataagaaaggtaaacatcaggagtggtgataagcaacggctcatatcaattatcagggttcattccgactcagagttgatggtgtgtagtcatttaccttggtcctgataactaatagctaatttttttatctgataggtattcttggatccccatcacaagaagacctgaattgtataataaatttaaaagctaggaactatttgctttctcttccacacaaaaataaggtgccatggaacaggctgttcccaaatgctgactccaaaggtaaatgttatttcgttgattagttttttcttaggcttagcttcgcgtttattt

SEQ ID NO: 3466 - DNA, 598 bp, Homo sapiens
  MAP TO CHR22_184_2.0; EXPRESSED IN FETAL LIVER, SIGNAL = 3.2; EXPRESSED IN BONE MARROW, SIGNAL = 2.8; EXPRESSED IN HELA, SIGNAL = 1.9; EXPRESSED IN PLACENTA, SIGNAL = 3.6; EXPRESSED IN LUNG, SIGNAL = 3.8; EXPRESSED IN ADULT LIVER, SIGNAL = 3.2; SWISSPROT HIT: O63852, EVALUE 1.00e+01; NT HIT: J03137.1, EVALUE 2.30e+00
tcttcctcctcctcctcctcattctcttcctcctcattctcttcctcctcctccttcttctcctcctacttctccttctctccctcctctttctcttcctcctcctcttcttcctcctcctcctcctcttcctcctcctcctccccctcttcctcctcctcctcctccatctcctcctcctccatctcctcctcttcctcctcctcctcctcctcctcctccttctcctcctccttttgctgctgctgtttgcacagaaaacattaaattcacttcacagacaaccaatgggctgtgactgcaagttctggactaaaagctccacaggtgcagaagtcacaattgtgttgttcacacctctattcctagaacttagtgcaatccctggcaaggtcgttagttgataaaaccttgttgaatatatgaaaaatcaatatgttaatagtttcatcttgtggtgtctcttaacaagttctctcttttcacatctgaagctataagatcattcttttctctgaacctttcaaaatatactgttttcaaggctatgtaaggtagattgtatttcatgatgttcagtgttcctggccataccatt

SEQ ID NO: 3467 - DNA, 550 bp, Homo sapiens
  MAP TO AL138781.2; EXPRESSED IN HELA, SIGNAL =   2; EXPRESSED IN FETAL LIVER, SIGNAL = 1.7; EXPRESSED IN PLACENTA, SIGNAL = 1.7; EXPRESSED IN LUNG, SIGNAL = 2.2; EXPRESSED IN ADULT LIVER, SIGNAL =   2; SWISSPROT HIT: P27882, EVALUE 1.50e-01; EST_HUMAN HIT: AI524259.1, EVALUE 0.00e+00
gtcagcagtgtttcttcccctgcaggctttgaagacgacccccaggctgtgctgcagacaatgaggaggtacgttcacaccttctttgggtgtaaggaatgtggtgagcactttgaggaaatggctaaagaatccatggactcggtgaaaaccccagaccaagccatcctctggctgtggaagaagcataatatggtgaacggccgcctggcaggtgagaagcccctgggcatggggggctcagcacgggcggagggaggccctggtcctgggacagcaaggacggcacggctgccgtggggcttgtccctgagctttgcggcctcgtgccacccactgtgctgacgggatcaggacttgggtggctgagagctgccagagctgcagcctttcccaggctgcttctgtccccggctttctagatgcttctctcactccgggggctcttcgaccccgtggaaatgggtgtggctctttcttcccccatcggtacccactggtagcccgttagactctgaagatgtttttgactctggaaagcttggaacgt

SEQ ID NO: 3468 - DNA, 577 bp, Homo sapiens
  MAP TO AL160314.1; EXPRESSED IN FETAL LIVER, SIGNAL =   2; EXPRESSED IN BONE MARROW, SIGNAL = 2.3; EXPRESSED IN LUNG, SIGNAL = 1.9; EXPRESSED IN ADULT LIVER, SIGNAL = 1.9; EXPRESSED IN HELA, SIGNAL = 0.71; SWISSPROT HIT: P23267, EVALUE 4.00e-37; EST_HUMAN HIT: BF363311.1, EVALUE 4.00e-12; NT HIT: gi6754931, EVALUE 4.00e-76
gagcaaaagggtctgtgtccagctagtcctctgttagtggatgacaggattccttctcatcattattccaagttttcttgtccttcagcagccattctgtggccccaacatcattaaccatttcttctgtgacaactttcccctcttgaaactcatttgtgcagacatgactctgatagagctcctgggttttgttatagccaacgtcagcttactgggcactctgtctatgacggccacttgctatggccacatcctccacgccattctgcacatcccctcagccaaagagaagcagaaagccttctccgcctgctcctcccacatcattgtcgtgtctctcttctatggcagctgcatcttcatgtacattcagtcaggcaagagtgaccagaaggaagacaggaacaaggtggcggcattgcttaacaccgtggtgaccctgatgctcaaccccttcatctacaccctgaggaacaaacaggtgaaacaggtgtttaggcagcaggtgagcaaactcctcatataaagctgtgtaaaaaaaaaactgaagctcagcatccccagacaagctaag

SEQ ID NO: 3469 - DNA, 560 bp, Homo sapiens
  MAP TO AL137799.2; EXPRESSED IN HEART, SIGNAL = 3.9; EXPRESSED IN HELA, SIGNAL = 5.5; EXPRESSED IN PLACENTA, SIGNAL = 4.7; EXPRESSED IN FETAL LIVER, SIGNAL = 4.6; EXPRESSED IN BONE MARROW, SIGNAL = 5.9; SWISSPROT HIT: O00519, EVALUE 4.00e-18; EST_HUMAN HIT: AL042017.1, EVALUE 7.00e-66; NT HIT: AF098013.1, EVALUE 0.00e+00
tagccatgggtaccaggaaggcttcccgtgaggggaggagatgccagtacttccaggaccctgcagtcataccgtgtgccccgcagcctcaaggctctgtttggtctccagcacggcccgcctcatggccggggagggcatggtatagttgtcagtctcatagtaccccacacgcaggggctgagagctggtgtagacctggagggaaaacacaggggacaggggcaggtcaggagaagacaaccctaggcaggacccctagagatcagagaaactactcagccccagacacagctgcgaggctgcagtcagcgaggccagccccttctgcatctgaccctttcataaaacaccttcacagtgactcaggtgggcagagcaaggataaggattcctactggtcatatgaggaaactgaggcttgaggtctcaatagggagattaggtgggactgggacttgcccaaagctacccaatgcagagtgacaagacaggtctggaatgcaggcatcctgtcttctgagctgaggctctccaccacctgtcctggctctcatgat

SEQ ID NO: 3470 - DNA, 519 bp, Homo sapiens
  MAP TO CHR21_69.0; EXPRESSED IN FETAL LIVER, SIGNAL = 1.3; EXPRESSED IN BONE MARROW, SIGNAL = 1.3; EXPRESSED IN LUNG, SIGNAL = 0.7; EXPRESSED IN ADULT LIVER, SIGNAL = 0.66; EXPRESSED IN HELA, SIGNAL =   4; NT HIT: X52618.1, EVALUE 1.20e-01
caggacggtagtccttctgcatcctgcaagacttggacaggatttctttccatttaacactgtctcctaaagtgctgctttccttggggaactttgctgttcttgctagtccagaacaagtggcacaactgcccttgacctccacatgaccttctcagggcagcccagactctaaatgtctgtgacctgcaccagcagcagcaaggccatgccggccgtggtccagcccggctgctctcccccactctgcagtgtttttccacacccatgctgcaggtgctggttgcgttcctgctccatccttcagtgcggaagtggcattttgcggttttctgttgtcatgaagcaagtgcgccacacttgcctgtcttatgtgcgtgtgtatatgagcatgcccatctcagtctccctgagcgcctcttttccacccgtctcaggcctctgtgttagctgttccctctctctgaaacaccaaactccctgatctcagcctgtctctccagtctcgacgtaacagca

SEQ ID NO: 3471 - DNA, 599 bp, Homo sapiens
  MAP TO AC017112.5; EXPRESSED IN FETAL LIVER, SIGNAL = 0.86; EXPRESSED IN HEART, SIGNAL = 1.3; EXPRESSED IN BONE MARROW, SIGNAL = 1.1; EXPRESSED IN HELA, SIGNAL = 0.53; EXPRESSED IN PLACENTA, SIGNAL = 1.3; EXPRESSED IN LUNG, SIGNAL = 1.5; EXPRESSED IN ADULT LIVER, SIGNAL = 1.4; NT HIT: AF135416.1, EVALUE 3.00e-27; EST_HUMAN HIT: T52554.1, EVALUE 8.00e-32
gaaagctaatgcatctggggcttaatacctaggtgatgggttgataggtgcagcaaaccaccatggcacatatttgcctatgtaacaaacctgaacatctacgtacatatcttggaactttcaattaagtttaaaaataaataataaataatgaagatagtcaagatcattcccagaggttccaatgaacaaggcctaggaatctgtatgttcaaagcactgcccatgagtctgatccagagggtgcaagaaccacacttggagaaatgctggtctacaggagagaaggcggacttcagtggtaaaaattcttgaagggcatctgtgtggtgtaaacctggaaatactagtagagccacacacacgtaagtcttacattctcagtgctttattttgtaacgtagctaccattttttgaggagtcattataaacgagatcctcaaaagaacattgtgggcaagtcactctagtctcacttaagatgagggtacctaacctaagacttggttaagtaacacattcaaggttccccacatagtaagtggaaaagctgggattcatacccagttggtctaatacgtaatgggtgcaggaagtc

SEQ ID NO: 3472 - DNA, 501 bp, Homo sapiens
  MAP TO AL160237.1; EXPRESSED IN BONE MARROW, SIGNAL = 2.3; EXPRESSED IN LUNG, SIGNAL = 1.9; EXPRESSED IN ADULT LIVER, SIGNAL =   2; EXPRESSED IN PLACENTA, SIGNAL = 1.7; EXPRESSED IN HELA, SIGNAL = 2.1; EXPRESSED IN FETAL LIVER, SIGNAL = 2.5; EST_HUMAN HIT: D44849.1, EVALUE 2.00e-07; NT HIT: AF111170.3, EVALUE 4.00e-17
aattttgatcctggggaagcaagccaaagacggaaaacagttttgaaacagttgatcaaaacaggatcatgggtcactgtaaattaatagccatgcatttaaccagagtgataaacaacttcaaaagcaatacagaaagttatatggatttttaaaaaccttaacactttcaaagctcagttttcctaagtaatcagaaacctagtaaagacaacacagaaagttatcttgataaaacataagttctctctccctctcttttttttctttaggtcagtgcccaaaaaggtaaagaaaacctcatgcagtgtgcttgcttctcctcatgggcagcccatttggataccctggaaattgaacctaatttaaaaggtatctgaatctaatcagtcacaggaagaatgtgtgtataccatattatagaggaaggtaaataagaaaactagtatcttgagtaggggaatatagtactcttagcaatagcatgggaagtttcctggt

SEQ ID NO: 3473 - DNA, 593 bp, Homo sapiens
  MAP TO AB017651.1; EXPRESSED IN HELA, SIGNAL = 8.4; EXPRESSED IN FETAL LIVER, SIGNAL = 6.7; EXPRESSED IN PLACENTA, SIGNAL =   7; EXPRESSED IN BONE MARROW, SIGNAL = 8.2; EXPRESSED IN ADULT LIVER, SIGNAL =  14; SWISSPROT HIT: P41051, EVALUE 1.00e-73; EST_HUMAN HIT: BI552300.1, EVALUE 0.00e+00; NT HIT: gi15431292, EVALUE 0.00e+00
ttcagcctgcagatgtcaacccatgcatctccctgtgcttgcgaactggtttggtgattcactgggtgtcaggatttcttctgatagctttatggaatggatcaattaggataacctccaaaaatttgtacgtggaatcttcaccaacccagttagaattcaagactcttaaagctccacagtggtgtccagcttactcctctgcagtggactgaaggcttcaagcaaaccctagctggttaacatcatggtcgacaggcttgccataagttgcacccttaggaactgggcatttttggccaccatggcgcatacaaatcctatatataatgtaactttgcttggccttgtagcccagttggcatgctttatcaggccaggtggggtggggattcctgtgcagagcagagagccagcagtactgccaacagccgaccttcagaagaaagtgcaagacatcagactgcctcttccatagctcctggatgtatttgtatgcacccatcttggtttacctgatggcaccagacagaaagtctcctttagtactttgaatatatcatctcactttctcctggtctgcagtttctgct

SEQ ID NO: 3474 - DNA, 544 bp, Homo sapiens
  MAP TO AL138783.2; EXPRESSED IN PLACENTA, SIGNAL = 0.51; EXPRESSED IN HELA, SIGNAL = 0.54; SWISSPROT HIT: Q62755, EVALUE 3.00e-06
tttttcagattgtccatgccttaaaaataagcaatatatggaaaatttacaagaaccagttttacaaatattgtataagtattcaaaaatgtatcatccagaagacccatagcattttgcccatctcatatggaagcatactgaactgagaactctgaattataaccattcagaaatacttagcacttggaaaacaaaggaccccaaattggctactttactctctgagaagtgaaatttgtattcttgctgaaattttagaatgttgtagtttgttttaaacttcctaaatctgaattgtttaccatataggatgactttatcatataggatgactttatcatataggatgacttatttggacaacatgaacggtattgctgtgttaccaatatatgaccgtaaaatggacatcatcaatgctcatcaaaattttatgaaaattttgtggaatatagaactatcactgagggatatctaggattctttttatgattggactcaaaagaagcaaaagttgtttcctcatgtttccttcaaaagg

SEQ ID NO: 3475 - DNA, 547 bp, Homo sapiens
  MAP TO AC022117.2; EXPRESSED IN HELA, SIGNAL =  13; EXPRESSED IN FETAL LIVER, SIGNAL = 2.3; EXPRESSED IN PLACENTA, SIGNAL = 6.1; EXPRESSED IN BONE MARROW, SIGNAL = 0.61; NT HIT: gi4557887, EVALUE 0.00e+00; SWISSPROT HIT: P05783, EVALUE 6.00e-66; EST_HUMAN HIT: BE621836.1, EVALUE 0.00e+00
acgagctggctcagaagaacggagaggagctggacaagcattggcctcagcagattgaagagagcaccacagtggtcaccactcagtccgccgaggttggagctgctgagacgacgctcacggagctgagacgtacagtgcagttcttggagatgacctggactccatgagaaatctgaaggccagcttggaatctgaagaacagcctgagggaggtggaggcccgctacgccctgcagatggagcagttcaatgggatcctgctgcacctggagtcagagctggcacagacccgggcagagggacagcgccaggcccaggagtaggaggacctgctgaacgtcaaggtcaagctggaggctgagatcgccacctaccgcagcctgctggaagatggcgaggacttcaattttggtgatgctctggacagcagcaactccatgcaaaccatccaaaagaccaccaccacccaccggacagtggatggcaaagtggtgtctgagacccacgacaccaaagttctgaggcattcagccaacagaagcag

SEQ ID NO: 3476 - DNA, 531 bp, Homo sapiens
  MAP TO AL137784.2; EXPRESSED IN HELA, SIGNAL = 0.98; EXPRESSED IN LUNG, SIGNAL = 1.2; EXPRESSED IN PLACENTA, SIGNAL = 1.3; EXPRESSED IN FETAL LIVER, SIGNAL = 0.87; SWISSPROT HIT: P22978, EVALUE 7.00e-04; EST_HUMAN HIT: AA825245.1, EVALUE 6.00e-94; NT HIT: gi9631294, EVALUE 8.00e-03
acacctgtgaaagcccagagatattgctgtgtccagggccttcttgcttctcactccggctaaataagaaaacactagctgtcagatttggatggttttacttcattgtacttctctttgaagtctcttggattcatctgtagagcttcacctacttcatccactgaaagaaaatgttaagaatttcagttagattttagatatagtaaattatttatatgttttttaataaattaatttaagacacatgtcacttacatggtacattgatagactcagggattttttgatactccagaatttcccatatctctctaacatcaattaacataatatttttagaattcaacaggtttttaagttccttataagtgacatctttagaaatagcagtataaaaattgtggcagtttccctttattgacgtcaaacctggaaaaaataaacaatttaggcaacttcaaagtgatatcactattaacagctggaaagaataggttaaaagaatttccccctggttccagtcagtta

SEQ ID NO: 3477 - DNA, 533 bp, Homo sapiens
  MAP TO AL160192.1; EXPRESSED IN BONE MARROW, SIGNAL = 1.3; EXPRESSED IN HELA, SIGNAL =   1; EXPRESSED IN FETAL LIVER, SIGNAL = 1.6; EXPRESSED IN LUNG, SIGNAL = 1.1; EXPRESSED IN ADULT LIVER, SIGNAL =   1; EXPRESSED IN PLACENTA, SIGNAL = 1.1; EST_HUMAN HIT: AA004535.1, EVALUE 3.00e-03; NT HIT: AF321530.1, EVALUE 2.00e-03; SWISSPROT HIT: P37889, EVALUE 3.80e+00
attcctcactgagcattgccttaagccacagggaagtacctcacccgaggttatgtctcatccctggggtggcttgtggccaaagactgacagatgaaggattacagagaactgactcctgtgtctcattgtgggacaatccccaaagctcatctccattccagggctccccatatgattgcctgaggcctaaaaggcaagtgcatttcaggccggcttttccctctgctaaattctttttctccccaatttctcacaatgtatctctcaggagcaaccaccaatcaaccttttgcatgcaactcccatctcaaagtcaatttaagacaaggggatagcaactgttcagctccaccaactgttgccatgcacaatcatgtagacccattgatgtcagatcttgtttttcaagagaagctagaaatgcaagtatgtaagtgaaatattctaatccttctatattggaaaataactctaagagaacatctctgaagtgaaacaaaacacatctgtgggccaaattcagctaatga

SEQ ID NO: 3478 - DNA, 584 bp, Homo sapiens
  MAP TO AL122013.3; EXPRESSED IN BONE MARROW, SIGNAL =   4; EXPRESSED IN LUNG, SIGNAL = 3.5; EXPRESSED IN ADULT LIVER, SIGNAL = 3.8; EXPRESSED IN HELA, SIGNAL = 2.7; EXPRESSED IN FETAL LIVER, SIGNAL = 4.2; EXPRESSED IN PLACENTA, SIGNAL = 3.6; EST_HUMAN HIT: AW885852.1, EVALUE 2.00e-13; NT HIT: gi10947104, EVALUE 2.00e-10; SWISSPROT HIT: P14826, EVALUE 5.70e+00
agataagcagaggccacaggctcaggcggcgtagcatctcacagcagggatactcccccagcaacagcagccagaagacgaatgctccaagctggacctgctttagccacatgtgtgataagctttcaaatctcacacacacaagcagaggaaggggcacttcagaatcacaggaaaatgccaggagtatttcaaagtcaaataatgcctagagcaagagaaaaaaagcaagaagaagctcctcatctcactgctttcatgttcctgccccagggtgggaggggctatcctaatacataactcactaagttttacaggtaaaccaaatgacattctaggtctaatcatcgttcaggaaagtcagagaggaagataataaggaccattcattgcaacccagcagaatcatcaccaagtcaaggcctccttttctagcacctcattttattcctaaattaaaacagtgataactgtcagaggcatttgaaccagagtgactctgtcttgaaaacaagctgtaaaaataaggctgagacctattggtctgtattcccaggaggttaggcattccaagtcacagcatg

SEQ ID NO: 3479 - DNA, 518 bp, Homo sapiens
  MAP TO CHR22_41.0; EXPRESSED IN PLACENTA, SIGNAL = 0.62; EXPRESSED IN LUNG, SIGNAL = 0.49; EXPRESSED IN FETAL LIVER, SIGNAL = 0.69; EXPRESSED IN BONE MARROW, SIGNAL = 0.49; EXPRESSED IN HELA, SIGNAL = 0.87; NT HIT: AJ011415.1, EVALUE 4.90e-01; SWISSPROT HIT: P30754, EVALUE 8.20e+00
tcgcgctacattattcatgccctctcgtttgagtttcagatctcaaggaggctctggaaggggaaggcagagagggcagaggcggcgggaggcgggggtggcagcctagacagggccccactctgccagctgtggaaggccgggtgactaattgacaactactcaatgatccccttccctagggcgcccctcttccatctctcatttttagctccggcccacaagcacctcccttgcacctgccacggtgcccagatttcccccagcagtggatgtgtgagtgtgagatgcagaggaagacatggcgtctgggcggtcctggctctgtgtgatctcgggcaagcgactaaacctccctgaaccttgattttttgttccccttgtaaaatgggaaagcagaaggagcggctcctctacctactctggggagaggtagcatttctgagagtcaaatgccgcatcgccatgcttctcaagtttgaacgctcaggtgaatcccggaggaacttgttgggata

SEQ ID NO: 3480 - DNA, 541 bp, Homo sapiens
  MAP TO CHR22_233.0; EXPRESSED IN BONE MARROW, SIGNAL = 2.9; EXPRESSED IN HELA, SIGNAL =   3; EXPRESSED IN HEART, SIGNAL = 2.3; EXPRESSED IN LUNG, SIGNAL = 2.8; EXPRESSED IN PLACENTA, SIGNAL = 3.2; EXPRESSED IN FETAL LIVER, SIGNAL = 2.6; SWISSPROT HIT: Q63932, EVALUE 1.00e+00; EST_HUMAN HIT: BF837975.1, EVALUE 7.60e-01
ttgcatactttttcctggggaacccaaggacccagcaggttagaaacacagggtggtcagcttgatgctccaggaggcagcctccaggggggctgctgtgggcagttcctccacagctcacactctgcagaagccgggtgagtgtccctcctaaatactccggagcagggtgctcctggccctgaccatggcatcatggccctaggattgggtgagtgctcctcgtcaacgctccagaatagggcgctcctgcccctgactatggcatcatggccctaggatcagcctttcactcaatcttggacaacgagtttttcttccaatgtggtttagccttggtggtgaatgttgttgctccagcagccaaaactgaaggtgcaaatgcaggaacagtcagccccaccctgctgtgtgtgaggatgatgctgccctgtgcagtgaagaaagcagggtgctgctggaagccaaggctgaaggtggctttgtgtctggatccagctgttcctgaagctgcctgtattcctctcttcccaagagcctt

SEQ ID NO: 3481 - DNA, 583 bp, Homo sapiens
  MAP TO AC006477.3; EXPRESSED IN HELA, SIGNAL = 6.4; EXPRESSED IN LUNG, SIGNAL = 2.8; EXPRESSED IN ADULT LIVER, SIGNAL = 2.7; NT HIT: Y10196.1, EVALUE 1.40e-01; SWISSPROT HIT: P20430, EVALUE 7.40e+00; EST_HUMAN HIT: AW579791.1, EVALUE 3.20e+00
aagaccgtgtggttttctgctacagctttcttgaagcattgccattttattgtccaaaagtcacattgtttgtgtatcctgccccattctctggagcatgcagtatttggtttttacacatgctccttgtaactatctagaaatgtttccttaagaattcaaaatcaaaacaaaatgatgatcacctatgtttcgtttgaagaagaggaattactgatatgtgttacaaaacaaggggtaccctgcaatgtttattgcttaattattctttgtgaagcttcctattttggcttattcatgtcctctgctttcttaaaatccccttaagaccacatcctcttctcttcagactcctacagcatctcacggtactgccttgcctccttccagtgggggctgcttctctgcagaacttgctatgccagtggtgctccctgtaagtgtgaagtgtgtggccaccctgtttctgtggttcaagttatcatagcaccaatttcagttaaaacgtttagaattttatgtctgtgattttttgattaacttgtcttgctgccagtctctgggtcccctaaggtcaggaacc

SEQ ID NO: 3482 - DNA, 559 bp, Homo sapiens
  MAP TO AL133330.5; EXPRESSED IN FETAL LIVER, SIGNAL = 5.7; EXPRESSED IN BONE MARROW, SIGNAL = 5.6; EXPRESSED IN HEART, SIGNAL = 4.6; EXPRESSED IN LUNG, SIGNAL =   6; EXPRESSED IN HELA, SIGNAL =   3; EXPRESSED IN PLACENTA, SIGNAL =   6; EXPRESSED IN ADULT LIVER, SIGNAL = 5.9; EST_HUMAN HIT: AU124528.1, EVALUE 0.00e+00; NT HIT: gi14763552, EVALUE 0.00e+00; SWISSPROT HIT: P43006, EVALUE 2.00e-29
acctcatagaatccctgggcctagacagagataattatatatttagaaaatttctacccagagttggtctgttaaaatactcttaagttatcgccttgataacttagaggactggagaagagagaacatctgaactctgggttacctgttgaaagcaggcttggacaaggttttcagggaagagatttcgaataaggtccaggaaggcatccaggctggacacttcatcattcttcttcccaggccccagctgcttcttgagcttgggattgcctggatggatagccaagaccagaatgacccccagtactgcagcaatgatggtcgtggacatgtaatacaccatggctctcgtgcccaagcggccactagccttagcatccaggcctgacaaccctggattgaaaagaaatgcagaaggattaattctattacgtttgtgctaatgacctgtgtctacatttctatgacgttagcttcatattactcaaatgtgttaatggttgattaaatctcctactgtagtcttccctcaatatccatgagagggttggttctg

SEQ ID NO: 3483 - DNA, 560 bp, Homo sapiens
  MAP TO CHR21_43.0; EXPRESSED IN HELA, SIGNAL = 0.58; EXPRESSED IN FETAL LIVER, SIGNAL = 0.44; EXPRESSED IN ADULT LIVER, SIGNAL = 0.31; SWISSPROT HIT: P21414, EVALUE 1.00e-18; NT HIT: AB026898.1, EVALUE 0.00e+00; EST_HUMAN HIT: AA368311.1, EVALUE 0.00e+00
tgtcactatccgagggttcctaggacagtcagtcactagatacttatcccagtcactaagttgtgactggtgaactttactcttttcacatgcttttctaattatccctgaaagcaccactcccttgttagggcgagacattctagcaaaagcaggggccattatacacctgaacataggagaaggaacacctgtttgttgtcccctgcttgaggaaggaattaatcccgaagtctgggcaacagaaggacaatacggacgagcaaagaatgcctgtgctgttcaagttaaactaaaggattccgcctcctttccctaccaaaggcagtacccccttagacctgaggcccaacaaggactccaaaagattgttaaggacctaaaagcccatggcctagtaaaaccatgcaatagcccctgcaatactccaattttaggagtacagaaacccaacagacagtggaggttagtgcaagatctcaggattatcattgaggctgttgttcctgtatagccagctgtacctaacccttatactctgctttcccaaataccacagg

SEQ ID NO: 3484 - DNA, 564 bp, Homo sapiens
  MAP TO AC018876.4; EXPRESSED IN HELA, SIGNAL = 1.9; EXPRESSED IN FETAL LIVER, SIGNAL = 2.7; EXPRESSED IN ADULT LIVER, SIGNAL = 2.8; EXPRESSED IN LUNG, SIGNAL = 2.8; NT HIT: gi7524593, EVALUE 2.10e+00; EST_HUMAN HIT: AL546364.1, EVALUE 7.00e-66; SWISSPROT HIT: P24831, EVALUE 4.10e+00
acttccagacaccaacccagggactgaaaaggtgaagtgtccctaaggtcatgggtacctaagaggtggtgccaacaaggggagagaggcttttgtgcttgagtagaaagcaagcaatgatacatttctatctcagaacgtttttctggggtcggtcctaaaataaaaggtgagttcctgaatgatgggactaaagaggagagacggaacaataatgtaaggttttcagagggagtagtcacaaaagctttcagaggaagtactggttttcttgcgtctttctgcagttaacatttcatttcctcctctaaggtggatcctgttttagtgaataattagtatttagtttaatccacacttgtactgatgcatcatagttgacttccaccagtgttttaattgtttcatggttgcagatataaagggcaatgaacaaattgaaaaatattcttggagagaagcttgtgatactggcagctcaagaatggacagaaagcatggaaaatacatattgaacgttgagcactctgaaaaccagccggtgagtgtccttgctccattttg

SEQ ID NO: 3485 - DNA, 545 bp, Homo sapiens
  MAP TO CHR22_18.0; EXPRESSED IN HELA, SIGNAL = 1.1; EXPRESSED IN FETAL LIVER, SIGNAL = 0.95; EXPRESSED IN LUNG, SIGNAL =   1; EXPRESSED IN BONE MARROW, SIGNAL = 1.4; SWISSPROT HIT: P54743, EVALUE 3.90e+00; EST_HUMAN HIT: BE735359.1, EVALUE 1.00e-116; NT HIT: AL163209.2, EVALUE 4.00e-14
cagatggcctattgtgggaccttgtgattgtgtaagttaatacttaataaactttcatatatatctattagttctgtccctgtagagaaccctaatataccccccatgcagaaattcatttcacagtgtagagtggtcacttctgtggtcatgaagcaccataggtcaccttgcacacgtcatctcacaagtgaggagtcatggttcatggtggttcatggttctggtcttgctgtgccccaggtccagatcatactgtgcaccaagggctgcagctgtttggacaatttcatgaaaggaaatcagtatttacagtcttgggtatattggagaattatcagcaaagttggaattttattagaaagtgatccagacgttgatctacaggagaagaaacagaatcacagaatctttaagcacagtgagggctgagtaccacccactcctgggtcctgatctttgtcaccaccacccagtgtgtgggtctgagcctggagaaggagccttggacttggagtcagaggccggggtaactgaccactgat

SEQ ID NO: 3486 - DNA, 518 bp, Homo sapiens
  MAP TO CHR21_46.0; EXPRESSED IN HEART, SIGNAL = 1.4; EXPRESSED IN PLACENTA, SIGNAL = 0.73; EXPRESSED IN HELA, SIGNAL = 5.8; EXPRESSED IN LUNG, SIGNAL = 1.1; EXPRESSED IN ADULT LIVER, SIGNAL = 0.82; EXPRESSED IN FETAL LIVER, SIGNAL = 1.7; EXPRESSED IN BONE MARROW, SIGNAL = 2.2; SWISSPROT HIT: P36406, EVALUE 6.30e+00; EST_HUMAN HIT: AW270217.1, EVALUE 7.30e-01; NT HIT: gi15920163, EVALUE 4.90e-01
taaagttgcatgagggagggaaaacatgggctttccttcactggctttaatcctcccgtggtcaagggtatccccaagagatgttagcttttctacattacgaggttttttttaagcctcacctgtaccaggcagatccctttcagaaaagcctgagaaaaatgctaagagattcttggcagagctgaagcaagatgctgtcaggttcagctctgtgaagctgattgtacagctggagtagaggtgagctgagaggacttcacagtaaatataagaggtgtcctatggggtgcatctttgctcagatatccccctaacgagctccattaagtcaaattcatgagagaaacttcaaggatgcggaccagttgtaatctgttctaaagccttcacactgaagaattagtgaagtaagttccagtctcctgtacagccactggtactgatcattgttttcattgcctcttctctccacttttccttctatatctccctcacctttgaacagcactgtggga

SEQ ID NO: 3487 - DNA, 573 bp, Homo sapiens
  MAP TO AC015822.3; EXPRESSED IN BONE MARROW, SIGNAL = 1.9; EXPRESSED IN HEART, SIGNAL = 1.7; EXPRESSED IN HELA, SIGNAL = 1.6; EXPRESSED IN FETAL LIVER, SIGNAL = 2.3; EXPRESSED IN ADULT LIVER, SIGNAL = 3.1; EXPRESSED IN LUNG, SIGNAL = 2.3; EST_HUMAN HIT: AI695079.1, EVALUE 6.00e-14; NT HIT: AL163227.2, EVALUE 3.00e-15; SWISSPROT HIT: P32901, EVALUE 4.20e+00
tcatttcccatctcctctgccacagcaactgactaatgtcttcttccttttgcaataattattgtctcagtcattggccttctgtttggtaagcagcaggacctagatcaatcccctggtgtttcagtaatagataaataagtggagtacagaggatttttagagtaacaaaaatactctgtatgataatgtaatggtggatggcatgccattatacatttttcccatagaatctacaccaccaagagtgggcccaatgtaaaccataaactttgtataagaatgatgtgtcaatgtaggtccactgattgtaacaaatgtaccactctggtgggggatgttgataatgggggcagcatgtgtgagggtgggagtatatgggatatctctgtaccttcctctcaattttgctgtgaacttaaaagtactctaaaaaataaagattttaatagtagtaaaaaaaaaagaatgggacaaaactccaaacacttggcaacctctttactgtaaagtcagtaagaaaatgaagattagataggaggactgaacagtagtgaggagggtactgccaaa

SEQ ID NO: 3488 - DNA, 555 bp, Homo sapiens
  MAP TO AC013718.3; EXPRESSED IN FETAL LIVER, SIGNAL = 3.1; EXPRESSED IN PLACENTA, SIGNAL = 3.5; EXPRESSED IN ADULT LIVER, SIGNAL = 3.7; EXPRESSED IN HEART, SIGNAL = 2.3; EXPRESSED IN LUNG, SIGNAL = 3.6; EXPRESSED IN BONE MARROW, SIGNAL = 3.3; EXPRESSED IN HELA, SIGNAL = 2.2; NT HIT: L44140.1, EVALUE 2.10e+00; SWISSPROT HIT: Q03250, EVALUE 2.30e+00
gttaagactccacccctccctcaatccgtcactatcaatgcctctctcctctcctccttctggaactcccccacttcccttcatgtttgtactcatcatcacctcatttcttccctcaactctcctgaactccagcccctcatcctctctctccatccatttcccatctctctcctctatcttcatctacctgctgtgtttgtggagcgggtgagattgacttggaccagggacagtcactcagaccacaactttccacacaagcattccctaccctctccatggtaagagcctccacttcctcaagttgcaaccattaaaacctctccttcctcaacaaatgacctgtggtttacacctgtaataatacacaagctgaacagaacccaaccaactgaaatcccacttagataggactttatttctggcatctactttagggacaaaagtcagcatgaggaacttgttaaatgattagtctctagagcagagcagacccagggcattttctgtgatgatggatgctattctatatggtagccactcaccacaggt

SEQ ID NO: 3489 - DNA, 576 bp, Homo sapiens
  MAP TO AC019287.3; EXPRESSED IN HELA, SIGNAL =   3; EXPRESSED IN PLACENTA, SIGNAL = 2.2; EXPRESSED IN ADULT LIVER, SIGNAL = 2.7; EXPRESSED IN FETAL LIVER, SIGNAL = 2.7; EXPRESSED IN HEART, SIGNAL = 1.9; EXPRESSED IN LUNG, SIGNAL = 2.4; EXPRESSED IN BONE MARROW, SIGNAL = 2.8; SWISSPROT HIT: Q96690, EVALUE 1.90e+00; EST_HUMAN HIT: AI823458.1, EVALUE 1.30e-02; NT HIT: gi12545411, EVALUE 2.20e+00
tgtgtcagcatttggtgtccaagtgagatagaacaggagttatttaagatttttaggttacatgaacataagaagacctggcattttgatgcatgtagaaagatattgatattataataaacaacgtcttccacaggaagatacacttcattcagcagtccatcaacatgaacttttaaaaattttaaattgtattaggaaggtttttagaataaaatttcaactcatgttcaacttactaatgttccatgcatgcatatcttggctaataatgataaaagaactaggaaaatacagaagagtctattttgttgctggaaattcttttgggaaggaggtcttccttctaattcttccagaatgaagatgaggcagaattcaagggtgataccaagggcccactcacaatttctctttcatgggaaaacagtgtagtgctgaggggcattagtaagaatttggcagacacttgtcctaattccatgggacaaagaaataaaggcaaaggtaggtgtcggaataggggcacccaactagttcttgttgtgagatcccagggcactgtcttccatcact

SEQ ID NO: 3490 - DNA, 597 bp, Homo sapiens
  MAP TO AL121916.12; EXPRESSED IN LUNG, SIGNAL = 4.5; EXPRESSED IN ADULT LIVER, SIGNAL =   6; EXPRESSED IN HELA, SIGNAL =  14; NT HIT: X61923.1, EVALUE 2.00e-43; EST_HUMAN HIT: BE908551.1, EVALUE 1.00e-103; SWISSPROT HIT: P11518, EVALUE 5.00e-30
cggtgtgcagtgtaaaatggggcgggtgtgtgtgtgcaaaagcaacaacccaggtgtgcagacctgcctctgccagagtgacccttcccctaacagcatctaacccaagaatgggagaattgcttgctatggagaaatctaaatatcacacatcaaacccataggaaacattagaaaatatatagtcatctgccttgaagggcagatacgtgaactttttaacccagagcagttgctacccagctagctttgaaatttactgcttttggtcaaaatatgctcttcagctagtgctttcttctagctggttgtcttcctgcctgccctgtgtcataaaaaatggggggcccttactgctttatcaaggggaagtcaagactgggacttctagtccacaagaagagaggcaccactgctgccttcgcacaggttaacttggaagacaaaggagctttggctaagctggtggaaactatcaggaccaattacagcgacagatacgatgagatctgctgtcactggggaggtaatgtcctgggtcccaagtctgtggctcgcatcaccaagctaaaaaaggcgaaggctaaagaacttgcg

SEQ ID NO: 3491 - DNA, 521 bp, Homo sapiens
  MAP TO AL136122.1; EXPRESSED IN LUNG, SIGNAL = 0.71; EXPRESSED IN PLACENTA, SIGNAL = 0.98; EXPRESSED IN ADULT LIVER, SIGNAL = 0.49; EXPRESSED IN HELA, SIGNAL = 0.7; EXPRESSED IN FETAL LIVER, SIGNAL = 0.87; NT HIT: AJ314910.1, EVALUE 3.20e-02
  unsure 33
catggtgagactacatgggctacggtagcgtantagaaataggagtgatcctggtgtctgagtgactttgatttgaatgcaatcatcttagtattagcagcaccacagtagtaacaaaagcagttttgacatcattatttttaaattgacttaaatagtcatagtcttaacacattatagatatatttatgtgtcagcaactatattcaaaatgtgcttatagaaactgtcaaatgctttgaaatagtttcttagacataatactcaaaatgtttgattctatgatattgaggacaagttttctaggattaataaataattctgcctaatgaatttcgattcatctttattaacttctagcttcaaatagatcagcagttctcaaccagggcagtatcaatcacacacaaacacaccccagggcattttggaaattcatggaggcttttgattggtgctatgatgacagggtgctgccggcatttagtgattaagattctccaacactggagttccaccaa

SEQ ID NO: 3492 - DNA, 565 bp, Homo sapiens
  MAP TO AL136985.1; EXPRESSED IN HELA, SIGNAL = 0.66; EXPRESSED IN FETAL LIVER, SIGNAL = 0.94; EXPRESSED IN PLACENTA, SIGNAL = 0.56; EXPRESSED IN BONE MARROW, SIGNAL =   1; EXPRESSED IN ADULT LIVER, SIGNAL = 0.32; NT HIT: AF287967.1, EVALUE 8.40e+00; SWISSPROT HIT: P30594, EVALUE 9.20e+00; EST_HUMAN HIT: AW440185.1, EVALUE 5.10e-02
ttcaaagatcggaaagcaccatgctaaaagctcttccaagaaggagcatgtagacaaacagcccagcatgatggggctggagtgggtaaaggcatcatgtccagtattcccactatccatctctctgtggcaaatgtattcaaccatgctagtgtaccttctcctcagctgctgctccttggtgcaacaaatctttgacatcctgggaaaaatcaagcagcttgcatgttattgtgctatcattcctctagttatcagtcttgccttgttttatagtaacatgtgttacagggtcatgtgtatagcagagcagtccacagatgcagatgaggggttgtagctctcaatgaatcgcaggcttcatgagcagaataagcaatgactctcagagatataacagaattcaatgagagacatgagtctctccctctgtccctccctccctttccagcctgaccaggctactatccactcccctccttggtttcaggtttccttttcttaactagcttgtgagcttcttgagagagggctctgtcatattcctctatgtgctctgagggcc

SEQ ID NO: 3493 - DNA, 503 bp, Homo sapiens
  MAP TO CHR22_137.0; EXPRESSED IN FETAL LIVER, SIGNAL = 0.49; EXPRESSED IN BONE MARROW, SIGNAL = 0.45; EXPRESSED IN ADULT LIVER, SIGNAL = 0.45; EXPRESSED IN HELA, SIGNAL = 2.6; NT HIT: gi14729570, EVALUE 1.00e-23; SWISSPROT HIT: P36578, EVALUE 2.00e-14; EST_HUMAN HIT: BE301423.1, EVALUE 6.00e-26
tgttcaaaaagcttcctgccatgagcaatcactgtttttttcactgatcaggtctttattaaaaataagctgtccaaaattatttgacctttatggaataaaccaacaagctcatgcagcaggcttcgtttcctctgtggtaggtttttttttcagctactgatgtcttggttggtagctgctgccctttttcccaccagaggtttctcctgcttaaaaacaacaaccttctttcctttcttccctaccacaggcttcttgactgcaaccccctttctcatctgatttggcctctagtgctgctggtgctgctggtgctgctggtgctggtgctggtgctgctgctgctgctgccaccgccgccgctgccttatccacctggagtttgtggttgctggcctggcaaagcctggtgttgcagagcatggtctttgcatatgggtttagcttcaacatgattttcaggttttccaggaggtttgtccccaggactctacgatgaa

SEQ ID NO: 3494 - DNA, 581 bp, Homo sapiens
  MAP TO AL136530.3; EXPRESSED IN HELA, SIGNAL = 2.9; EXPRESSED IN LUNG, SIGNAL =   1; EXPRESSED IN FETAL LIVER, SIGNAL = 3.7; EXPRESSED IN ADULT LIVER, SIGNAL = 0.79; EXPRESSED IN BONE MARROW, SIGNAL = 3.6; EXPRESSED IN HEART, SIGNAL = 3.6; NT HIT: M80206.1, EVALUE 3.60e-02; EST_HUMAN HIT: AI862375.1, EVALUE 5.20e-02
gatgataaaggcccatcagcagaatagatggctccacacacaaggcagagttatccacaggtgagacagagggcaaggctgatggggatgtgggataagagatgttggcagctggctggatgaaatggagggaaggcggcagagctggtgacaagagaagtgagcatttcatcagcatctgcattgtcttacacagaaagacaatcattcaggggaactgaaacatgggggcacacagctctgccctcctccccatcttcctccctgccactgatataaacagcaaacgtttttcaaaatcagagcaagaaattgacaatcactgagtgtcccaggggccattcattgtgtcaagtggttacatagattagcttatttcatctgacagtgacttcatggggttggccttatcatcatcatcatcgtcatcatcatcatcatcatcccagtcctacgaaagaaaaaagcaaagtcagggaagtctactcatctagtaactgccagtgctgggctgaacttgggtttgtctgactcttgagcccacagcctttttgctgtcccctgctgttgccagaaccata

SEQ ID NO: 3495 - DNA, 578 bp, Homo sapiens
  MAP TO AC016672.4; EXPRESSED IN HELA, SIGNAL = 1.9; EXPRESSED IN FETAL LIVER, SIGNAL = 1.5; EXPRESSED IN HEART, SIGNAL = 1.4; EXPRESSED IN PLACENTA, SIGNAL = 2.1; EXPRESSED IN BONE MARROW, SIGNAL = 1.3; EXPRESSED IN LUNG, SIGNAL = 1.6; EXPRESSED IN ADULT LIVER, SIGNAL =   2; EST_HUMAN HIT: AV648649.1, EVALUE 8.10e-01; SWISSPROT HIT: P11269, EVALUE 2.90e-01; NT HIT: AF252282.1, EVALUE 1.40e-01
cacctagcaggaggctgttccatgggaccttccagtgccaggggaggctgtggactccaggccatcccttctccagggtcaccgtgaggcccctccggtgacttccaccaaccacgcctggtctagggtccacctgggacaccttcttgtgaaaagagagcatggcggtggcaacacatcccacagagtgagcaagctgcttggggttcgggccgtgtcccctcctgcctcctcctctctctctgctgatgagccttcccctctctgccctgggaaagcagaggccatgggagaagtccccacacccccagtgctgcctgtgggccccgaggctctgcccttccttctgtgtctgggttgcgccgtccacccccgccccccgccccacaagaccagcggctcctcctggccccagatcctgcttctggaggacacccctccacaggcccagcaactcctgaccttcccctgggccacggccatcggctagaaacacatggttatttctctcttttcatgtcttaaaagacaaacatcaaacaagaaatcctcccttgagtcactccctaccaatcccc

SEQ ID NO: 3496 - DNA, 593 bp, Homo sapiens
  MAP TO CHR22_24.0; EXPRESSED IN PLACENTA, SIGNAL =   1; EXPRESSED IN LUNG, SIGNAL = 0.92; EXPRESSED IN HELA, SIGNAL = 1.7; EXPRESSED IN ADULT LIVER, SIGNAL = 0.83; SWISSPROT HIT: P53675, EVALUE 4.00e-43; NT HIT: L77569.1, EVALUE 0.00e+00; EST_HUMAN HIT: AA897278.1, EVALUE 0.00e+00
tactgtgaagaccttgggggaaaacctaacagtagaaatcagtttggaaaccaggtccatcttggtccctagagcaacctgaagtcaatggactctgagattttttgtttcaggaaacatctgtcagagccctggagttgccctcaagacttccagtggtagccttgagactttacagcaccttccttctttcaaaggctcaagctgctgcttccctggctggagtcccagattcaggaaggctgtgaggagcctgccactcacaatgcactggctaaaatctacatcgacagcaacaacagccccgagtgcttcctgagagagaatgcctactatgacagcagcgtggtgggccgctactgtgagaagcgagacccccatctggcctgtgttgcctatgagcgggggcagtgtgaccttgagctcatcaaggtgggtagcagatgtgctgagctgcccatgtaaccctgggctcccagggaagctttcaaaggtgtgcctgtggggagctgatcagggctttctgtgcacctggagatggcaggtcatgagattatttccttgtgattctcacagcttttgggaacttgctc

SEQ ID NO: 3497 - DNA, 571 bp, Homo sapiens
  MAP TO AC011931.3; EXPRESSED IN ADULT LIVER, SIGNAL = 2.1; EXPRESSED IN HELA, SIGNAL = 1.1; EXPRESSED IN FETAL LIVER, SIGNAL = 1.7; EXPRESSED IN HEART, SIGNAL = 1.7; EXPRESSED IN PLACENTA, SIGNAL = 2.3; EXPRESSED IN LUNG, SIGNAL =   2; EXPRESSED IN BONE MARROW, SIGNAL = 1.8; SWISSPROT HIT: P49415, EVALUE 5.50e+00; NT HIT: AB011150.1, EVALUE 0.00e+00; EST_HUMAN HIT: BG334343.1, EVALUE 0.00e+00
ctttatgctgggtttgtgggttttttttacttaagtcacccacatggccctttagagctaattggagtttatttgggacaatgcttaccaaactctgtgaacaaaattgatttgtgaagaaagaagacacagcaacaaatctcccagagaactttaaatcacagtccctagtttttagtaaccatgaggcaaagggatggctacatttatcaatagcatacctttcctaaagcataggtgctgttagaattagataataaatgttaatatagctctctggtattcagtgaactcaatgatcactttgtgtttgttctcatcctcttttctatagccaacccaacccgagcaggcggcagagagccgtatccaggctcagcagaagtgatccgggagtccagcagcaccacgggtatggtcgttgggatagtagccgctgccgccctgtgcatccttatcctcctctatgccatgtacaagtacagaaaccgggatgaaggctcataccatgtggacgagagtcgaaactacatcagtaactcagcacagtccaatggggctgttgtaaagg

SEQ ID NO: 3498 - DNA, 512 bp, Homo sapiens
  MAP TO CHR22_143.0; EXPRESSED IN BONE MARROW, SIGNAL = 0.5; EXPRESSED IN HELA, SIGNAL = 3.2; EXPRESSED IN ADULT LIVER, SIGNAL = 0.67; SWISSPROT HIT: P30594, EVALUE 1.20e+00; NT HIT: gi14779565, EVALUE 0.00e+00; EST_HUMAN HIT: BG031302.1, EVALUE 0.00e+00
gtgagcctctgagcaactcctctgcctcagtgagctggtctgagagatgggaccaacacacgccgtcaaaggaagtgagttctaggaaaccagggaagatgaaaagacacccccgcccccagaagacggggtcccacctagaaccttcctgggaggatgccagccccaccccacatcagacaccctttggcagatatcctgttctgcctggctaccgaggcctcccgactaccctcagaatccaaattctgcaggttcctccgtgcgaggcccagcgtgggatgtcccaggttggaggtgtgcgtgttggcggtgttctttggctggaagcaaaaggccgttctggcgggatcggggccgtctgctcagctggaggcctttctggaactgggcgtgggtgaggtattcccagcccagggcaaagccatcaaacttctcgtgttcccatctcctattagaacaaagtggtaaactggggaggatgagctgggactgactcgggtgctgaagtt

SEQ ID NO: 3499 - DNA, 593 bp, Homo sapiens
  MAP TO AC011803.4; EXPRESSED IN LUNG, SIGNAL = 1.3; EXPRESSED IN BONE MARROW, SIGNAL = 1.1; EXPRESSED IN PLACENTA, SIGNAL = 1.3; EXPRESSED IN ADULT LIVER, SIGNAL = 1.1; EXPRESSED IN HELA, SIGNAL =   1; EXPRESSED IN FETAL LIVER, SIGNAL = 0.96; SWISSPROT HIT: Q46888, EVALUE 1.50e+00; NT HIT: AL163252.2, EVALUE 8.80e+00
atgctgagcagagggtatggtggatgataagtgttggctattattatgatgggtcagatattatgctaagtgctagaggtgcttgaaactcagcaagatgtgtatgtgggtgtgtgtataacagggggagattgagatgcactgggagaatagtgcaggagccttggtgcaagtacagctctgggttctgagccactgttgactatctctagggtaataagtgttaaccttgagtggtttactccatctagaaagtcactggataatgtgaaatcctttctgggaggagattttttaccattcttgattagacttcaggaccaggtctgtaaccattttttctttcttcttccacctcaccttcaaatatcctaaagggttagtttttctgtaaaaccgaaatgactgcaagtcattgtgcagagctggggtgtgtggataggcttttgatggatggagttgagctgtggagcttggatcacttgcgacgttgctgatgcaacctctgaatgggatggaacttttgagaggagatggggacttggcacttatgatgttacctggaagaaaaatgacagttgggtggaccagag

SEQ ID NO: 3500 - DNA, 597 bp, Homo sapiens
  MAP TO CHR21_69.0; EXPRESSED IN FETAL LIVER, SIGNAL = 9.6; EXPRESSED IN BONE MARROW, SIGNAL = 5.6; EXPRESSED IN PLACENTA, SIGNAL = 7.3; EXPRESSED IN LUNG, SIGNAL = 6.8; EXPRESSED IN HELA, SIGNAL = 3.6; EXPRESSED IN ADULT LIVER, SIGNAL = 7.7; SWISSPROT HIT: P55347, EVALUE 5.00e-24; EST_HUMAN HIT: AL576236.1, EVALUE 0.00e+00; NT HIT: gi14780601, EVALUE 0.00e+00
aggtcaaacgagcaaacagcacccaattgagtaataaagtgtttttctgtgagtactaatttaaataatgacacaccttcatcctgccgcaggagctgttgtcaccatcaccacgcccgtgaacatgaacgtggacagccttcagtctctgtcctcggacggggccaccctggcggtgcagcaggtcatgatggcagggcagagcgaggacgagtctgtggacagcacagaggaggatgcgggtgccctggcccctgcccacatcagcgggctggtcttggagaacagtgactccctgcagtaggggcaggagcagacgcacctgactttttggagtttgcacagcaaacattttacacagttttatttctaatatgttttatatgtagatatagaagagtgcacttttgtatttcatagtaagcttaaagcgcgtctttgccggtgcagcgacttctttcaagtgtgtgtgtgtgtgtgtgtgtgtgtgtgtgtgcgtgtgtgcgtgtgtgtggatttttaaagaaattctttaaaggtttaacgctagattgtgaggaatgacacaccactccctccccaccttgaatccctaat

SEQ ID NO: 3501 - DNA, 538 bp, Homo sapiens
  MAP TO CHR22_43.0; EXPRESSED IN HELA, SIGNAL = 1.2; EXPRESSED IN FETAL LIVER, SIGNAL = 1.6; EXPRESSED IN BONE MARROW, SIGNAL = 1.4; EXPRESSED IN ADULT LIVER, SIGNAL =   2; EXPRESSED IN LUNG, SIGNAL =   2; NT HIT: U07000.1, EVALUE 0.00e+00; SWISSPROT HIT: P11274, EVALUE 3.00e-18; EST_HUMAN HIT: AL046113.1, EVALUE 0.00e+00
tagggagcaggtctcctgtgttatggcccaagcagggctgttaggacactgagaacattccctcctcccgcaggagagagaggtccaaggtgccctacatcgtgcgtcagtgcgtggaggagatcgagcgccgaggcatggaggaggtgggcatctaccgcatgtctggggtggccgcagacatccaggcactgaaggcaggcttcaacgtcagtgagtgtcggcctgcgcaggacgggatggaggtgtgggcagtggtgtccacgatgagatctcagagtgctccatggcccaggcatgtcacatccttctctgtgtcttttcttcatttactgttttattatttttaaaaaagagaaaacaagagttgtacaaacagcttctatagaagccagtttttacaccatcgtacccactcgtgccacttggtgcagtggaccaggggcttctgcggggccttggccttcctgccttggggttggacaggaggtggaagcccaggactcagtgcggtctgtccactgccctgtatgaggat

SEQ ID NO: 3502 - DNA, 503 bp, Homo sapiens
  MAP TO AC016729.5; EXPRESSED IN HELA, SIGNAL = 1.9; EXPRESSED IN FETAL LIVER, SIGNAL = 4.3; EXPRESSED IN LUNG, SIGNAL = 5.4; EXPRESSED IN PLACENTA, SIGNAL = 4.9; EXPRESSED IN ADULT LIVER, SIGNAL = 5.9; EXPRESSED IN BONE MARROW, SIGNAL = 3.9; NT HIT: AL163280.2, EVALUE 2.00e-25; SWISSPROT HIT: O00268, EVALUE 8.10e-02; EST_HUMAN HIT: AU136093.1, EVALUE 2.00e-26
aaacaatgcttcagtgtggatgaaactaaaatgttacatattttagagcagcatgctgcacatgctgcaatgtggatgaatctaaaaaacattacactaagtgtattagtccactcttgcattgctataaagaaataccctgaaactgggtaattaataaagaaaagaagattagctcacggttctgcaggctgtacaggaagcatggcagcatctacttggctacttggcttctggggaggccttgggaaactttcagtcatggcggaaggtgatggggaagcaggcacatcttacgtggctggagcaggaggaagagagcaaagggtgaggtgctacacatttttaaacaaccagatatcatgagaattcactcactatcatgagaacaacaagggggaaatgcaccctcacaatccaatcaccccccagcaggcccctcctctaacactggggattacaatttgacatgggatttgggcagggacactgatccaaaccat

SEQ ID NO: 3503 - DNA, 506 bp, Homo sapiens
  MAP TO AC013637.3; EXPRESSED IN FETAL LIVER, SIGNAL = 5.5; EXPRESSED IN BONE MARROW, SIGNAL = 2.9; EXPRESSED IN HELA, SIGNAL = 0.53; EXPRESSED IN LUNG, SIGNAL = 3.5; EXPRESSED IN ADULT LIVER, SIGNAL = 3.1; SWISSPROT HIT: P11225, EVALUE 8.00e+00; EST_HUMAN HIT: BF696308.1, EVALUE 7.10e-01
tgcactgaaaccacctattccacagaaatccaaagaggggtattttatgactttccaagagatatacctacatacatacatacacacacacacacacacacaaacacacacacacacacaatgaaaaaacaggcaccaacaaaccctatttaaaaatattttaggattatacgtgtaaatttgaactgtgtttttctcaagttcatgcatagttttatggttatgagtcttaaaagtaggtggggctaacacttcataaatacatttattaattgtcaataccgtgaaataggtagctgtcaattatatacaagaatgcctaagaacagagggcaaatgacctcctatagttactcatgtaggaacgaagccctccagatgaaactaaacttcttctttcgcaccaggaactgtgaggcgctgaagatcatcctgcatgggccacttgtcatcttcgatctggacagcagcacaaatcatgggagtgggaaattttgaagcagcaa

SEQ ID NO: 3504 - DNA, 543 bp, Homo sapiens
  MAP TO CHR22_232.0; EXPRESSED IN FETAL LIVER, SIGNAL =   1; EXPRESSED IN ADULT LIVER, SIGNAL = 0.96; EXPRESSED IN BONE MARROW, SIGNAL = 1.5; EXPRESSED IN HELA, SIGNAL = 2.7; EXPRESSED IN PLACENTA, SIGNAL =   1; EXPRESSED IN LUNG, SIGNAL = 0.97; NT HIT: AJ310932.1, EVALUE 9.00e-06; SWISSPROT HIT: P08548, EVALUE 6.00e-07; EST_HUMAN HIT: W76159.1, EVALUE 3.00e-03
cgcactcctagagtccatccccccaggaggaatgagaatcgcactcctagggtccatccccccaggaggaatgagaaccgcactcctagggtccatccccccaggaggaatgagaacatgtccacacacaaacctgtacacgcctgttcttagcagcaccgttcccaacagccagaaagtggaaagagcccaagtgtccgtcagcggtcccacggaaaaacaaccttcatatacagccatgactggaatattattcagccttaaaaaggaatggcattctgatgaaccggcaacacggatgaacctcggaaacatgacgccgagtgaaggaagccagtcaccgaagtctgccctgttggagcccagtgatgtgaaacttccggaacaggcaaggtcacagaggccgaatgaaggcccgtggccgccagggtccaggacggagatggggagtggttgctgacgggtatggcgttgctttcgaggagatgaaggtgtcctaaagttggctgtggtgatggtcgcccaacctgggaattgatgctt

SEQ ID NO: 3505 - DNA, 560 bp, Homo sapiens
  MAP TO AL138895.4; EXPRESSED IN HELA, SIGNAL = 0.88; EXPRESSED IN HEART, SIGNAL = 2.2; EXPRESSED IN LUNG, SIGNAL = 2.8; EXPRESSED IN PLACENTA, SIGNAL = 2.2; EXPRESSED IN ADULT LIVER, SIGNAL = 2.4; EXPRESSED IN FETAL LIVER, SIGNAL = 1.9; EXPRESSED IN BONE MARROW, SIGNAL = 1.7; SWISSPROT HIT: P22216, EVALUE 9.20e+00; NT HIT: AL163207.2, EVALUE 3.00e-15; EST_HUMAN HIT: AI471967.1, EVALUE 2.00e-29
tgatctttgatttcccagcctctaaaactgtgagacataaatttctgttgtttataagctacctagtctatggtactttgttatagcagcccaaagggacagacagacgacatcatcatcatcatcatcatcatcatcatcatcatcatcatcatcatcattatggacataatcattaacatctaccatatctcccctttcccagttactcttccaagtgttttacatcattaacttgtttaaccttgcttccctttactatataataataataggtaacattcctttctcagggttattgcaaagatcaaatggggaattcttattattatagtaaacattgccacagattgtgttcctccaaaattcatgtattgaaatccttacccacaagctgatagtattaggaggtggggcctttgggagatgattaggtcatgagggtggagccccacgaatgggattagtgcccttataaaagaggctccaagaactgcctcgccccttccaccatgtgaggacacagtaagaaggcacagtctatgaaccaggaagtgggc

SEQ ID NO: 3506 - DNA, 534 bp, Homo sapiens
  MAP TO AL049828.3; EXPRESSED IN HELA, SIGNAL = 1.2; EXPRESSED IN ADULT LIVER, SIGNAL = 3.8; EXPRESSED IN FETAL LIVER, SIGNAL = 1.9; EXPRESSED IN LUNG, SIGNAL = 2.9; EXPRESSED IN BONE MARROW, SIGNAL = 2.1; EST_HUMAN HIT: BF982332.1, EVALUE 3.00e-65; NT HIT: AL163249.2, EVALUE 4.00e-48; SWISSPROT HIT: P16989, EVALUE 2.90e+00
tgctgctcactcttttggtgctcactacctttatgagctgtaacactcaccatgaaggtctgcagcttcactcctgaagccagcgagaccacgaacccaccaggagaaatgaacaactctagacgcaccacctttaagagctgtgacactcagtgcaaaggtctgcagcttcactcctgaagtcagcaagaccacaaacccaccaggaggaacaaacaactccagatgcgccatctttaagagctgtaacactctgcgaaggtctgcagcttcactcatgaagtcagcgagaccacgaacatctgaaggaacaaactgcggacacaccatctttaagaactgtaacactcaccctgagggtctgcggcttcattcttgaagtcagcaagaccaagaacccaccaattctgaacacagctggaccccatgtttgctcactcatgcacccctcagcaccctgcacctggctcgcccttggcaagcatgagagcgaggctggtagcaccagcaagtgcagctttccaggctaagtgg

SEQ ID NO: 3507 - DNA, 576 bp, Homo sapiens
  MAP TO AC016692.4; EXPRESSED IN BONE MARROW, SIGNAL = 0.59; EXPRESSED IN HELA, SIGNAL = 0.59; EXPRESSED IN PLACENTA, SIGNAL = 0.72; EXPRESSED IN LUNG, SIGNAL = 0.71; NT HIT: J02756.1, EVALUE 3.50e-02; SWISSPROT HIT: P35458, EVALUE 6.40e-01
agttccatggcggtaatgaggcccagactccactgaccagaattagccatgtggtgtggctacgcgctctgacccagggaagcaggggctggtggcactgcaaagcctgggcaccacgggctctctcccagccccactggccccagccgccctgccttttggtaaataagtgtgttctgaccacagggccctgaggcaggcgcctctgctcacagacagcctttgtgtgggccatgaagggccttttcatccctgccctggcctcctgcccgctcagcccggcctgctcccacctcagtagctgaggccacaggcccccaacagggagggcctgtgcctcagatggggcctgggcctcagcccacaaggccgctccttcccttcctgtctgctacaggaccccagcccacagagcccagggccgtgtacacacctgtccagagctcccagcccaggggtggggtcaaacgctctcgcaagaacaacagccagaaccccagagactccggggttgggaaggcctggtctggcccctgcggggggcctgcctactcttggtaggacacatggagggaa

SEQ ID NO: 3508 - DNA, 542 bp, Homo sapiens
  MAP TO AL133216.10; EXPRESSED IN LUNG, SIGNAL = 1.1; EXPRESSED IN FETAL LIVER, SIGNAL =   1; EXPRESSED IN ADULT LIVER, SIGNAL = 1.5; EXPRESSED IN BONE MARROW, SIGNAL = 0.68; EXPRESSED IN HELA, SIGNAL = 0.55; NT HIT: AF162763.1, EVALUE 0.00e+00; SWISSPROT HIT: P56937, EVALUE 2.00e-30; EST_HUMAN HIT: BF738124.1, EVALUE 1.00e-102
tttctttcacccagattcgggaactggagcctctcctctgtcacagtgacaatccatctcagctcatctggacatcatctcgcaatgcaaggaaatctaatttcagcctcgaggacttccagcacagcaaaggcaaggaaccctacagctcttccaaatatgccactgaccttttgagtgtggctttgaacaggaactttcaaccagcaggtaaggcctgtctcagtgacggaaatggcagaggagggttctcttaattacctgctgttgatttcctaataaggtagctggctttccactaactcttgtagtttagattgatatttggtgtatatgaaagtgttagggcagagataattggctcctgacattatagttataggtagttcattcatcattctgtggttcttcaggaattctaacttatgttaacagagtgacactactaaaagtgataatagctactgttttggtacttgctgtgtttcaggtgctgtattcgtctgtgtatgtcattaaatacctgcctcattacatggagg

SEQ ID NO: 3509 - DNA, 581 bp, Homo sapiens
  MAP TO CHR22_101.0; EXPRESSED IN LUNG, SIGNAL = 0.71; EXPRESSED IN FETAL LIVER, SIGNAL = 0.77; EXPRESSED IN ADULT LIVER, SIGNAL = 0.99; EXPRESSED IN BONE MARROW, SIGNAL = 0.59; EXPRESSED IN HELA, SIGNAL = 1.6; SWISSPROT HIT: Q9Y295, EVALUE 1.00e-28; NT HIT: gi4758795, EVALUE 2.00e-90; EST_HUMAN HIT: AA618372.1, EVALUE 1.00e-110
tttgtggctggtactagggcctgacttctgttacttttcaacccatagttcactttttctttttcttttttctttttctggctgatctgctacttacagtccctcttgggagcgccagttgggtctgggtgagggtgtgctgttcaacagtctgacagttctgtcaacaactccagactaataccctgtttttcttcactttctgtagagtttatatcccctgtatctatgtgttaaataagattgaccaaatctccattgaggaattggatatcatctataaggtgcctcactgtgtacccatctctgcccatcaccgctggaattttgatgacctattggaaaagatctgggactatctgaaactagtgagaatgtaagtctttgtggatagggtaatgttgctataggaattaaccagactgtcctaaaatgatactttctggagctcattaacaaaatctggctctttttgaaaatataagtaaattggttcctattatctactaggtcattaggtcatattgaggacactttttcccttaagttggaggttgtcctggtctgatgtcaggggtgat

SEQ ID NO: 3510 - DNA, 535 bp, Homo sapiens
  MAP TO CHR22_103.0; EXPRESSED IN FETAL LIVER, SIGNAL = 1.3; EXPRESSED IN BONE MARROW, SIGNAL = 1.2; EXPRESSED IN HEART, SIGNAL = 1.3; EXPRESSED IN HELA, SIGNAL =   1; EXPRESSED IN LUNG, SIGNAL = 1.6; EXPRESSED IN PLACENTA, SIGNAL = 2.3; EXPRESSED IN ADULT LIVER, SIGNAL = 1.5; NT HIT: D17676.1, EVALUE 5.10e-01; SWISSPROT HIT: P17595, EVALUE 5.00e+00
ctcaaagctccttaaccccctagaggtgaccagagcctccccgagacactgccccatacatatcaagagcctcggctgctgaagaaggagtgtggcgccctcaggaccagcagtgtgtctgcagatggggcgagtagcagcctcgtgtgttcgctgctcacacaagtgaaatcaaagacacagcccatgattcggttcctgaagagacaaaggcgttggaggaaaaacttggtaaatcacaaggctaatcatcatagccagcagctctaatgaggcatcatgggactaccaaagttattatcagagtcatttcattgaaaaaattcaaagttaattgaaatcaattgtacggttccgacagcaggtgttttaagactctaaggtatcaaagcggactctttggagtggctgatgcaggcggcgtagtcagcatagtggtcgtcaacctttacgggggcaaaaagcaacatgacgctctcgcatggaaagatcgcctccccagcggggacaagcaacaagacaaaagtgcccaggt

SEQ ID NO: 3511 - DNA, 502 bp, Homo sapiens
  MAP TO AL137157.2; EXPRESSED IN BONE MARROW, SIGNAL = 4.2; EXPRESSED IN HEART, SIGNAL = 4.7; EXPRESSED IN PLACENTA, SIGNAL = 2.7; EXPRESSED IN LUNG, SIGNAL = 2.5; EXPRESSED IN HELA, SIGNAL =  13; EXPRESSED IN ADULT LIVER, SIGNAL = 5.5; EXPRESSED IN FETAL LIVER, SIGNAL = 5.2; EST_HUMAN HIT: AA873521.1, EVALUE 2.00e-04
taaattgagccccagcctaccttcccagcattataggttactattatcctgctccagatccctagccaaactgggctcctccctgacctccagcagggatttccccttctacctcatgaaatctacagcaaccaacgctgcaaggaacatttaaattcttacttccttcaagaagtcttcccggatcacctccaactcaaggtaatactttattcctctgtgacaaatgttgcatagaaatctttaatgcttctttaaaatatattatttttaatattcatgttatgtgcttatgtctcatctctccactagaatttttaagctattcaaagtcaggaccttatatatttttttgaattcttcacattgcctaaaaccttaattaattaaggaatcccacaaacttttatcaattatcttttttgtgccaggcactgtgctgggtgcttggaatataaagcataataaaaagatttcttaaggaagcctttcttgtttcccc

SEQ ID NO: 3512 - DNA, 505 bp, Homo sapiens
  MAP TO AL133500.2; EXPRESSED IN HELA, SIGNAL = 0.67; EXPRESSED IN FETAL LIVER, SIGNAL = 0.93; EXPRESSED IN BONE MARROW, SIGNAL = 1.1; EXPRESSED IN PLACENTA, SIGNAL = 1.1; EXPRESSED IN HEART, SIGNAL = 1.4; SWISSPROT HIT: P40473, EVALUE 4.60e+00; EST_HUMAN HIT: BG035152.1, EVALUE 2.80e+00
tgaatatgcgcaaacctgagctccaattgctagcccctagaaggatgccaatcccggatgtcaggctgccagaggaagtgctgcttatacgcagcacaatggttctcctaagaatattaccagtagatgtgcaaagggtctcagattggggctgtggaactgcaaatggcagactgggtctggtggctacagcacatttcaggcagcaggagctgggtgagctggcttctcctaccttctgtccatttcttttccttctctactagggaaagggagctagaagcttcagattacactatggtgggggagggggcggggcctagggagggctacaaagcctatgtcaggggccagaatttcaaaggttgcccaaggctgtcttcttcccatttccagggagtttagtgtttaggattagccacatggaagaagctgggcatgtagtgtgaggtaggagggtttactaggggcgatcggaaagagcagacgggatgatgagcagatt

SEQ ID NO: 3513 - DNA, 566 bp, Homo sapiens
  MAP TO AL138499.1; EXPRESSED IN FETAL LIVER, SIGNAL = 0.73; EXPRESSED IN LUNG, SIGNAL = 1.1; EXPRESSED IN ADULT LIVER, SIGNAL = 1.3; EXPRESSED IN BONE MARROW, SIGNAL = 0.6; EXPRESSED IN HELA, SIGNAL = 0.65; NT HIT: gi15300836, EVALUE 7.00e-62; EST_HUMAN HIT: BF793128.1, EVALUE 1.00e-61; SWISSPROT HIT: Q01026, EVALUE 4.10e+00
cggggcaaattttctttttctgaaagaaaaaatggatatatttctgatattcatagattctagattttttttccttttgtgtccaagtgacaacatttataacatagttttctttggtgccaactagtttgcaccactagttagcaaacagtatttctctatgtggtttttgttattgttgattttcatgtcattgttcagattttttaatgtttgtgtttaaatcagcaatataacattttctgttgtttggttttacatttcttttccttgtgtatggagtttatcatcacttccatcttctttttaggagtcttctgagaaggagacaatgtctgtaagtctaaatcagactgtaacacagttacagcagttgcttcaggcggtaaaccaacagctcacaaaggagaaagagcactaccaggtgttaggtaaggacaactgaaatattgctgtctatgggtaattgatgttatgtgtctgtgtaatgtgtatttacataaataaactcacttcactagaggaaatattccttctttatctctcagaacttccagatgacagcc

SEQ ID NO: 3514 - DNA, 528 bp, Homo sapiens
  MAP TO AC022215.2; EXPRESSED IN FETAL LIVER, SIGNAL = 0.84; EXPRESSED IN BONE MARROW, SIGNAL = 0.86; EXPRESSED IN ADULT LIVER, SIGNAL =   1; EXPRESSED IN HELA, SIGNAL = 0.72; EXPRESSED IN PLACENTA, SIGNAL = 1.1; EXPRESSED IN LUNG, SIGNAL =   1; NT HIT: gi15296972, EVALUE 1.00e-130; EST_HUMAN HIT: BI828920.1, EVALUE 1.00e-125; SWISSPROT HIT: Q9JJG0, EVALUE 2.20e+00
gccaggagaagggtagatcctttcccctatgtgccatgggactgtgaatgacaggagggtcgggccctgcggtgtgtgtctgtgtctgtgctgcccatcaggcttggctcactggtactgcagatagtttttgagagactgaggcaggggcagggagctgatgtcctgcaggcgctggcggcccagggccgagcggatggatctccggcacaggtccatcagtggcaggggctcggctgcaatgagagggaagcagttagagtgtgccctgtgccatcctggcaccttctcatcccagcccccactgcataccgcctcctgcctgctcctctgagctggccttcagggtcaatggcttctccttggagaagatttctctggttacataagctgaaggcctagaggagtgttcattagactgtggaatgcaaccagtgagactaaagagtcacaaaatcaattcaatgggtggtgaccagccataattttttttaaaaaaagagaaaatgggagcaatacccatagcaa

SEQ ID NO: 3515 - DNA, 528 bp, Homo sapiens
  MAP TO AL121976.2; EXPRESSED IN FETAL LIVER, SIGNAL = 1.1; EXPRESSED IN BONE MARROW, SIGNAL = 0.99; EXPRESSED IN PLACENTA, SIGNAL = 1.6; EXPRESSED IN HELA, SIGNAL = 0.55; EXPRESSED IN LUNG, SIGNAL = 1.5; EXPRESSED IN ADULT LIVER, SIGNAL = 1.9; EST_HUMAN HIT: BE072336.1, EVALUE 1.00e-17; SWISSPROT HIT: P08547, EVALUE 5.00e-13; NT HIT: AJ271735.1, EVALUE 1.00e-13
tcaaattctggcaaagatgcagagaaaagacaactcttatacactgttggacttataaattaccatagccattattgaaaaaagtatggaggttcctctaaaacctataactagaactaccacatgatccagcaatctcactatggtgtataaatttttaaaaaaggaaatcagtatattgaacaggtatctgtactcccatgtttattgcagccctattcacaataaccaagataaaagtatccgttaacagatgaatggataaagaaaatgtgttatatatacccagtggaatactatttggccgtaaaaagaatgagatcctgtcatttgcaacaacactgatgagcttggaggacttaatgttaagtgaaataagccaggcactgaaaggtaaacacatgttcttactcatgttctccacatgttcttacccattttcacaagctaaaaaagttgttctcatagaagcagaaagtagaatagtgattattaaggctgagagggtgagggtgggatagggagaga

SEQ ID NO: 3516 - DNA, 515 bp, Homo sapiens
  MAP TO AL139135.2; EXPRESSED IN HELA, SIGNAL = 0.65; EXPRESSED IN FETAL LIVER, SIGNAL = 0.82; EXPRESSED IN PLACENTA, SIGNAL = 0.62; EXPRESSED IN LUNG, SIGNAL = 0.65; EXPRESSED IN BONE MARROW, SIGNAL = 0.78; SWISSPROT HIT: P36029, EVALUE 6.20e+00
tttctttaccaatttaaacggcttatcagatttttagcttttctaactattcttggctgattttgctatgacctccagtaaaacattgaataacagtgagaataatcagttttctcatatgtcttcatttcaggaggaagacttatatgactttattattaggcatgtaagtattttaatatatatgttttactagattaagaataattccatttcattcctagcaaactagaatatattttgatgaatagctgtccaattttatccatcattttgcctctattgggataatcaaatattattttctattatgaattaatgtgatacataggtaaattgatttgtaaaagttataccaatatcacttttctaaaataaacacaatttattcatattatattccttttacttttcattgaatatagctggtaatattttgtttaattttattttttcatcaattacgagagagaaattattctatgataaaatgttctgcaatgacatggtctgct

SEQ ID NO: 3517 - DNA, 547 bp, Homo sapiens
  MAP TO AL136304.2; EXPRESSED IN FETAL LIVER, SIGNAL = 5.4; EXPRESSED IN BONE MARROW, SIGNAL = 5.8; EXPRESSED IN HEART, SIGNAL = 5.6; EXPRESSED IN PLACENTA, SIGNAL =   8; EXPRESSED IN LUNG, SIGNAL = 7.8; EXPRESSED IN ADULT LIVER, SIGNAL = 7.9; EXPRESSED IN HELA, SIGNAL = 4.4; NT HIT: gi14781548, EVALUE 7.00e-99; SWISSPROT HIT: Q14999, EVALUE 3.00e-20; EST_HUMAN HIT: BE396680.1, EVALUE 1.00e-98
atcattccgtccagttgctctatctccacactcctgttcagcccaaccactcccacttccctgcagacatggctgtgccttggtttgtttatctcaccctctagatgaggatggcattagccccctgggttggctgctggaccagtacctggagtgtcaggaagctgtcttcaacccccagagccgcggcccagctttcttctcgcgggtgcgccgtctcactcacctgctggtgcatgtcgagccctgtgaggcaccccctcctgtggtggccactcctcggcccagtgagtagtggagattcaggtggggagctctagtcaggagcgttttcctgggccccatgtgtacaccacaggcttctgtccatccccatccttcccctccctatgggctcagcctgttcatcttccaggtttgtgtcacctccatccatgaacatcattttgggtggcagcatgtcaggaaaggcctcagggaacccccttggatggggacttgggagtggaggggctgcaccctccttgcctctgccactttcttggtc

SEQ ID NO: 3518 - DNA, 598 bp, Homo sapiens
  MAP TO AL133499.1; EXPRESSED IN BONE MARROW, SIGNAL = 0.7; EXPRESSED IN HELA, SIGNAL = 0.88; EXPRESSED IN PLACENTA, SIGNAL = 0.79; EXPRESSED IN LUNG, SIGNAL = 0.9; EXPRESSED IN ADULT LIVER, SIGNAL = 0.79; NT HIT: AL163301.2, EVALUE 0.00e+00; SWISSPROT HIT: P08548, EVALUE 2.00e-08; EST_HUMAN HIT: AA577832.1, EVALUE 2.00e-07
tgttgtcccacattgtcaccagtattcagtgttgtcagcagttctggttttgggccattctaatacacatgtagtagtatctcgttttaatttgcagattcctaatgacatatgatgtggagcatcttttcatgtgtttatttgccatctgtatatcttcttgaatgacgtgtctgttaaatttttttggccaatttttaatcaggttgttcattttcttattgttgagtttagagagttttttgtatatttggaagagttcttcatagatttatcagatatgtcttttgcaaatattttctcctagtctgtggcttgtcttttcactcccttgtctttcacagagtagaactttttaattttaataaagtctagcaaatcagttatttctgtcatagattgtgcctttgatgttacatctgaaaagtcatcaccaaacccaagatcatctagattttcttctgtgttatcttctaggaattttatagttttgcattttacatttaggttgtgacctactttgagttaatttttgtgaagggtgtaaaacctatgcctagattctttttttttttttctgcatgtttatgtccattgg

SEQ ID NO: 3519 - DNA, 590 bp, Homo sapiens
  MAP TO CHR22_101.0; EXPRESSED IN ADULT LIVER, SIGNAL = 0.38; EXPRESSED IN HELA, SIGNAL = 3.4; NT HIT: gi14778384, EVALUE 9.00e-77; SWISSPROT HIT: Q9R233, EVALUE 1.10e+00; EST_HUMAN HIT: BE153447.1, EVALUE 0.00e+00
tggggaaaggaataaggagctatgctagtttcatttgtaaaaatgaatggtttaactggtagaaacatcctaagattttaaaatatatttactcataacaatcttgtgaggtaaattaggcgagcagcatcccttccatatggctaattagcaaactcaaggaaaaaaagtaatttataaatcaagaacggaaataaaaccatatagaatgaaagccctatgccttgcagtagaatttaatcatatttccgctattaaatctatttcttctattgatttggattgggatggaatttctaccacatactgaacataccacagtatgtacaacagaattatactgcagataagtaatttattagtttcaggaaaacttatccgtaaatctccacatgagcaggattagtaatttacctgtttctgaatccatctctggttctgtccacctgtggtttgccaaaaccaggctggtagaagtttgctgcctgtacagcaaggtcatgtggcaaggccagcccttctaaagctgcctgttgcaactccagctggctcatctgctgaaaaggagaggggagggtcaggagaagagt

SEQ ID NO: 3520 - DNA, 528 bp, Homo sapiens
  MAP TO CHR22_152.0; EXPRESSED IN HELA, SIGNAL = 0.83; EXPRESSED IN ADULT LIVER, SIGNAL = 0.29; NT HIT: gi14786755, EVALUE 7.80e+00; SWISSPROT HIT: Q10185, EVALUE 3.70e+00
aacgttgtgcccagattctctttctgagcgtgaacttgatgttcctgaccaggaaccagccactcgtaccgaaggccttcctgacccctcagttctcccctgagcctttgctgtgtcctgggcaccaagaggtggagataggctgtcaccgtgcacgtttcctaagcctgcagaggaactgttcacagaatccagcctggaatcagccgtttgtggcaaacagtcagtagctatttctcaacttgtggttgtgaagctgcaggctccatattcgctcttcacagagcatccaagcaggtgtctcagtgccagctcacaccgttcacactgctcacaccagctctggagagctgcttgtacacatctctccacaagtccactttcagtgttgccacgtggtaccggaaatttgccatagaaattggccgatggtacgaccagagagccacctgttagatagttaccccacatccccaccctcaacaccaccttagacaaatcctactgtcagaacatgtggaacggaga

SEQ ID NO: 3521 - DNA, 598 bp, Homo sapiens
  MAP TO CHR22_108.0; EXPRESSED IN BONE MARROW, SIGNAL = 2.1; EXPRESSED IN HEART, SIGNAL =   2; EXPRESSED IN LUNG, SIGNAL = 2.1; EXPRESSED IN PLACENTA, SIGNAL = 2.1; EXPRESSED IN ADULT LIVER, SIGNAL = 2.2; EXPRESSED IN HELA, SIGNAL = 0.61; SWISSPROT HIT: P23486, EVALUE 1.00e+01; NT HIT: AJ310932.1, EVALUE 1.40e-01; EST_HUMAN HIT: AV738378.1, EVALUE 3.00e-03
ctctgagtggcctcaaaagggagggaggagagggattcttatccccactggacagatgagaatcctgaggtcagagaggaccaggaggactaagctggaagtaacactggacaggagacaggagtgactgatggaagccctgactcaagggccaggctgtgggggaacaaatcatggatccactacagattagctgtgtgaccctcagtaagtgacttaacctgtctgtgcctcagtcccttcatctgtcaaatgcggatactaataaattcctacctcctggggctattgtaaagactaaatgagtcggtgatcataaagtacttagaacaggccccagtgcacaataagcacgagaactgttggtttttattcttatggttgtcgtcgtcatcatcatcatcgtcatcatccttgccccacagccaaccagcgatgggaacttgggtacgttccttttcctctctgcgcctcagcttccccacaggcagaatgatcgtggtttgatggtctctaactaacagtttagtgtgtccagaattcctgcttccatgcccaacgtacagacgagaagcggggtagaaactgggggctcaca

SEQ ID NO: 3522 - DNA, 581 bp, Homo sapiens
  MAP TO CHR22_235.0; EXPRESSED IN HELA, SIGNAL = 3.8; EXPRESSED IN LUNG, SIGNAL = 0.57; EXPRESSED IN BONE MARROW, SIGNAL = 0.93; EXPRESSED IN ADULT LIVER, SIGNAL = 0.55; NT HIT: L44140.1, EVALUE 5.50e-01; EST_HUMAN HIT: AW173241.1, EVALUE 0.00e+00; SWISSPROT HIT: Q13164, EVALUE 2.50e-02
tcctggctttctctggagtccagcctcaccctggcctctacctgccaccatgctgttcccgccaccctgaatgcccccttccaggcatccttggccagcacagcctcaccccaggggaaccttctgccatctcctccctggcacacaacgtgaaccatgggtgcccagttcccctcagtcccctacctgctccaagggtagggcccagactgatggcctctggggtgggccacgatgagacccctgcccctgagggcccagcctgcacctcctccacctcactggatgctgttaaccccctctgctcctcctccaggtacagggaagccacagggaggcagagggcaaacatcggggagctgtgttcccgccacagatccacactgtcggttgagtgcaccctcaccaggaaagctgggcccaccatgtgatttcctggagcctccgtgacaaaggaccacaaactgggggcttaaagcaacagaaattctctcacagttcggaggccggaagtccaaaatcaaggtgtccccggggccacgttccctctggaggctccaagggagggatcttcctgtctc

SEQ ID NO: 3523 - DNA, 593 bp, Homo sapiens
  MAP TO AC020582.3; EXPRESSED IN HELA, SIGNAL = 0.55; EXPRESSED IN LUNG, SIGNAL = 0.61; EXPRESSED IN ADULT LIVER, SIGNAL = 0.46; SWISSPROT HIT: Q33134, EVALUE 9.90e+00; EST_HUMAN HIT: AI200804.1, EVALUE 4.00e-21
caagcaagttagatgctgcgtctggcaactgttttctacacaaatattgatcttaggtagtaggtctgatacatttgccacttgttagtagtcctgcagctagaggacaaaagacctcaacatgaacaaatgagtagccatgaagtgtatttcagaacacactgcagttcatattactacgtacatgaatattctagtaacattttaagtaagctaaattgaatttttaaactaaaaccttttcttaattaatttactgggaattttattttaaaataaaactgtcagcaacaggtaaatgccaggaatagttgagtgattctcaaagctatacaccgatacctggattttctcagcttcccctctgctgcgtctaggtccctttggagttcttcaccttgttttcagcatccttctctttctcttctttctcttccttgcctgcagcatcttgggcctcttcatcccacttttcatgctgatatttagtgacttctttagcgaagaataatacagatgttgggaccagacattcacagaaaatatagcccaatttataaccagcagcggcacccagtactccaccctcagga

SEQ ID NO: 3524 - DNA, 558 bp, Homo sapiens
  MAP TO AL035367.1; EXPRESSED IN HEART, SIGNAL = 1.1; EXPRESSED IN BONE MARROW, SIGNAL = 0.78; EXPRESSED IN PLACENTA, SIGNAL = 1.2; EXPRESSED IN LUNG, SIGNAL = 0.96; EXPRESSED IN ADULT LIVER, SIGNAL = 1.1; EXPRESSED IN HELA, SIGNAL = 1.1; EXPRESSED IN FETAL LIVER, SIGNAL = 0.86; NT HIT: gi14779020, EVALUE 4.00e-05; EST_HUMAN HIT: BG763673.1, EVALUE 9.00e-87; SWISSPROT HIT: Q10586, EVALUE 2.70e-01
tgacaccaaaagaggggaaggagtgccactcacctggggcagacgacgagggggccaagggcaacactggctggctaagggcagcaggtggaggccggggctgcaggtgtggtgtggccttgagcaggctcagttccttccagctgtctgccttggtgtcatcctcatcccgcgggctagtggccctgtcaatgaactgcaagcacagtcacacagatcagtgtatatgaaatctgggcagtcatagcaaagcccagggcaaagcagaccagcgtgctgggtggagaagcaggtgccctgggctcccatgaaggccttgggcagtccccacccctccccagggcccctctgaaaagcccaaccctgttgtcctcctctaggagcttcaggcatgacccgcccacttggccttacccgcttcacggccagggtggcaatgcccagcacagcagccccgcccacgcccagcaccaggcgggcattggccaggaggaagtccaccatgctgcccagcccttcgtcgctacgccgcttcccccgtttctgggagaactctgc

SEQ ID NO: 3525 - DNA, 514 bp, Homo sapiens
  MAP TO CHR22_52.0; EXPRESSED IN HELA, SIGNAL = 0.52; EXPRESSED IN FETAL LIVER, SIGNAL = 0.54; EXPRESSED IN BONE MARROW, SIGNAL = 0.48; SWISSPROT HIT: P09152, EVALUE 6.20e+00; NT HIT: U07000.1, EVALUE 0.00e+00; EST_HUMAN HIT: BF057242.1, EVALUE 2.00e-23
tggccctgagataatccttgaaatacaaatgaggattctcgatgccttcgtggccttacctgaccatacctcccccaactcccatcacgtcccccgtgacgtgatctttattttggcttatgtttgtctctgctgctggaaagtaaacgtggaggacagggctttgtccagttcattctctgtggtatctccagtatccagacagagacataaaacatacatctgtatctgtaagttatttaatacattgtttaatggatctagagtttatatatatatatatatatatatagtaaaatatatattggcacaaagcaagtactgttacatgcactggaaattgctgagccaggcacctgccctctcacagatgaaggtgctgaagttcccaggggtggctggggcgggagccagccaagcctggggcttctccaccacgctgtgcatgtgcccagtggtggtcggggccttcatggtgagggggtcggggagttcagagtttggactcccacgt

SEQ ID NO: 3526 - DNA, 568 bp, Homo sapiens
  MAP TO AC015956.3; EXPRESSED IN BONE MARROW, SIGNAL = 0.59; EXPRESSED IN LUNG, SIGNAL =   1; EXPRESSED IN ADULT LIVER, SIGNAL = 0.72; EXPRESSED IN HELA, SIGNAL = 0.88; EXPRESSED IN FETAL LIVER, SIGNAL = 0.57; NT HIT: gi15304150, EVALUE 9.00e-77; SWISSPROT HIT: Q63150, EVALUE 1.80e+00; EST_HUMAN HIT: BG720757.1, EVALUE 1.00e-76
ggtcctcctttcactcatgggattgatctgtgtatgattctgaaaaggaatgcagaattaaaggatgttgtctcaagtcctttatattttgaagatgaaagtccatagccttcctaagtaccctcaagaacagataaaggttttgttgctgcaggagaacatgtttgctcacattgccgttatttcaatagaaccaactgtgagagcggagctgatggaacaggtgcctcacatcgcactgttttgtcaagaaaaccggccttcaataccatatgctttttcaaaattcttactacctattgtggttagataccttgcagatcagaataatcaggtaagagtaccatttatatgttcttaaaagaaatttacgtagtgtaatatatggagaatagccgagcctaagtgttctctttggaatgttttactgtttttcaaaaatgaatatttatcttagacaagatgtgtttagagtctgacaaatctagtagatccctttaatgccattatggacaatgcctagtaactgcactctcacttggtaacctcctagcggtcccttaaaagg

SEQ ID NO: 3527 - DNA, 569 bp, Homo sapiens
  MAP TO CHR22_144.0; EXPRESSED IN FETAL LIVER, SIGNAL = 1.3; EXPRESSED IN BONE MARROW, SIGNAL = 0.5; EXPRESSED IN ADULT LIVER, SIGNAL = 0.95; EXPRESSED IN HELA, SIGNAL = 2.6; NT HIT: X83121.1, EVALUE 2.10e+00; SWISSPROT HIT: Q9Z1S5, EVALUE 2.10e-01
gcatgcacctgttcactcacacgcgcatggacaggcacccacagacgtggtcctgggcacctgtgtacacagtccaagcagacatacatatccagacacacacacagaatacacaacacacacgtggatatgtatgagtgtgtattcctgcaaacccttgtggctgccttgcacacgtgggcacacaaagctgcataaatttgtgcaagcacatacacacacacacacactctctctctccttttgttcagcctcataagcagctgcccacagcccccttggtggttccagggatggccaagaggcagcgagtcactgcagggggttcccccggctgcccatactcacggtccgactggttgtacaagccatagtgcacccgcacaccgggcccggtgagggagatctgggaggtgaagttgatggtgatcccggccgtggccaccacggggatcctctcggcgtagggctgcaggatgcgcaagccacacagcctggggggagtcagagacgactcagggctgcactggctggtctcctgggtcccgtgcacagacagagcaaggaca

SEQ ID NO: 3528 - DNA, 584 bp, Homo sapiens
  MAP TO AC012360.2; EXPRESSED IN HELA, SIGNAL = 1.2; EXPRESSED IN PLACENTA, SIGNAL = 2.3; EXPRESSED IN LUNG, SIGNAL = 1.8; EXPRESSED IN ADULT LIVER, SIGNAL = 1.8; EXPRESSED IN FETAL LIVER, SIGNAL = 1.7; EXPRESSED IN BONE MARROW, SIGNAL = 1.9; NT HIT: AB038792.1, EVALUE 0.00e+00; SWISSPROT HIT: Q14192, EVALUE 1.00e-32; EST_HUMAN HIT: AA083418.1, EVALUE 4.00e-92
ccccttccctctaacctcaggttatcaacataagaacatatttagaaatggtctagaagaaggcagggttaaacgatttgatcacagagctcaacaatgttgatgtctttgaaagaaggatggacacccagacccgatggataaatgctcagaatgtaaggcaggacaggcacagctcccacgccacttaagtatcacaggtatccttggttttggaaagagaactgacagacatggaccatggaggcaaaccagccagaacgtgcaagggccaagggggcatctgagatacctttttgcactgaacgcactgcatggcatgttgtttctcatagcagggcacacagaaattctgattgtctttggggatgaaactcttggttccaattggctgctggcagcggtggcagatgaagcaggtctcatgccagctgctgcccttgtactccatcttgcgggtacctgtcatcagggtcaagaggaacacagcagagttatggttagaggggtgtggagtcccagcaatctgccttcagagcttgctgccctctagttttatgaccagagcaagccacttcagctct

SEQ ID NO: 3529 - DNA, 559 bp, Homo sapiens
  MAP TO CHR22_165.0; EXPRESSED IN FETAL LIVER, SIGNAL = 5.8; EXPRESSED IN LUNG, SIGNAL =  11; EXPRESSED IN ADULT LIVER, SIGNAL =   9; EXPRESSED IN BONE MARROW, SIGNAL = 7.3; EXPRESSED IN HELA, SIGNAL = 3.1; SWISSPROT HIT: O13776, EVALUE 4.70e-01; EST_HUMAN HIT: BF203746.1, EVALUE 1.00e-105; NT HIT: AL163227.2, EVALUE 1.00e-112
atgaaatccaggctgaggtggtctcagatggagatgaggaacttgttgggaattggagcaaaaatgactcttgttacattttagcacagagactggtggcattttgcccctttcctagagatctgtggaactttgaacttgagagagatgatctagggtttctggtggaagaaatttctaagcatcaaggcattcaagaggtgacttggttgctgttaaaggcattccgttttaaaagggaaacagagcataaaagtttggaaaattttcaacctgacaatgcgatagaaaataaaaacccattttctgaggagaaattcaaggaggctgcagaaatttgcataagtaatgagaagccaaatgttaatcaccaagacaaaggagaaaatgtctccagggcatgtcagagacttttgaggcagaccctcccatcaagggccaaaggtttaggagggaaaaatggtttcatgtgccaggcccagggtccctttgctgtgtgctgtctaggaacttggtgccttgcatcccagccactccagctgtgactaaaaggggccaa

SEQ ID NO: 3530 - DNA, 518 bp, Homo sapiens
  MAP TO AJ239319.2; EXPRESSED IN FETAL LIVER, SIGNAL = 5.2; EXPRESSED IN BONE MARROW, SIGNAL = 4.3; EXPRESSED IN HELA, SIGNAL = 0.72; EXPRESSED IN LUNG, SIGNAL = 6.2; EXPRESSED IN ADULT LIVER, SIGNAL = 7.6; SWISSPROT HIT: P21675, EVALUE 6.00e-28; EST_HUMAN HIT: BF891036.1, EVALUE 1.00e-45; NT HIT: gi14759179, EVALUE 6.00e-96
ctgctttggggtgatttttcttttttggtctaactgtgtacattggcttgtcctttgaaatccctgaatgatttgtgtgtgtgtgtgtgtgtgtgtgtgtgtgtgtgtgtgtgtatatttatatttgtgtgtggctatttgtctcgtagattaaaaagttgtcccgctgggaagtgattgatgtggtgcgcacaatgtcaacagaacaggctcgttctggagaggggcccatgagtaaatttgcccgtggatcaaggttttctgtggctgagcatcaagagcgttacaaagaggaatgtcagcgcatctttgacctacagaacaagtgggtcgttttagtgctgcagaaaatccaagctggaaagggggaggagttccaggcactatttcataataaagaggaggtcacctaaaagtttgactacctaggtagtcagatatctgacatgtcagggtagtatatgtttgtaatcccaccaccagattacctattcccttcaacccaacttggcaaaatt

SEQ ID NO: 3531 - DNA, 536 bp, Homo sapiens
  MAP TO AC011636.3; EXPRESSED IN BONE MARROW, SIGNAL = 2.9; EXPRESSED IN HEART, SIGNAL = 2.3; EXPRESSED IN PLACENTA, SIGNAL = 3.2; EXPRESSED IN LUNG, SIGNAL = 2.9; EXPRESSED IN ADULT LIVER, SIGNAL = 2.7; EXPRESSED IN HELA, SIGNAL = 1.6; EST_HUMAN HIT: BG535588.1, EVALUE 4.80e-02; NT HIT: AL163278.2, EVALUE 8.00e+00; SWISSPROT HIT: P38486, EVALUE 1.30e+00
tcagaaacacagcctgatgctctgggatgctgaaatgccagggcaccacaccatcttggtgatatgtttgtcatttgaataggtacatctctgcttcccccatgccggccaggcccagaaggagacagaaataaatcagcggaaattatctattttctacagtgtcaaaacaacactttctatgttggagttgggagaaaaccaattcacctcttttcccaaccagcagaaacacgttgcatctcccgagtgtcccagggagaagaaagaagagaaacaagagaaggtggagcccgggtactgggggcttccgctgaagagcacctttcccaccgcaccttaaccccgggatctagaggactcctgggaaaatggttctgcagcttaccatccatctagggaacatttccaggagactcacgaacccactgaccttccctgcacccagctacctgcccctttgaagggcgcccagcaggctggcctccaggtccccatcctgtaaaccaaactcctggggtctgggtcttttcttc

SEQ ID NO: 3532 - DNA, 593 bp, Homo sapiens
  MAP TO AL133520.2; EXPRESSED IN FETAL LIVER, SIGNAL = 3.2; EXPRESSED IN PLACENTA, SIGNAL =   3; EXPRESSED IN LUNG, SIGNAL = 3.3; EXPRESSED IN ADULT LIVER, SIGNAL = 3.5; EXPRESSED IN BONE MARROW, SIGNAL =   3; EXPRESSED IN HELA, SIGNAL = 1.9; SWISSPROT HIT: P13181, EVALUE 3.40e+00; EST_HUMAN HIT: BI036384.1, EVALUE 9.00e-07; NT HIT: gi14723098, EVALUE 2.00e-10
ggctgatgactctgggaaagttgcttagcacctctgagcctctactcccccatctgtaaaatgggtatggcagatggtattttgtttcttgccctctcagcatccatttcctatttttctgatgacatactttgattttccttcaggtaggagttttcagaacagcagcctcagcatcacctgggaagttgttagcaatgcagattctcaggccagtctcagacctttgattcagaagctttggaatggcagcctggcaaggtgggaaagtgcgtcttgtctacccttagcttataaggggaacaaatggagctgtattataatcacctgtttgctgttctctaaaaatagtagccacttaaatgacatcacgataatgatattgctcattgtcaccatgtgccatgcactgtggtagtgctccaactgctccacgtacctccttatatggatgcttgtggtggacatggatgtgcgacccagatcccttaaggaagcacctattgccccagaggcagggagagtggtcagcagtcagctcctgtggtcagctcctccagggatcaactcacagtaggcagagagtggccttg

SEQ ID NO: 3533 - DNA, 567 bp, Homo sapiens
  MAP TO AC019325.3; EXPRESSED IN PLACENTA, SIGNAL = 0.89; EXPRESSED IN LUNG, SIGNAL = 1.5; EXPRESSED IN ADULT LIVER, SIGNAL = 0.88; EXPRESSED IN BONE MARROW, SIGNAL = 0.88; EXPRESSED IN HELA, SIGNAL = 1.6; NT HIT: gi4557468, EVALUE 0.00e+00; SWISSPROT HIT: P21851, EVALUE 4.00e-45; EST_HUMAN HIT: AL539834.1, EVALUE 0.00e+00
aaatttacggccaaacctcctgaagaaaatgatgaaagttttcatcatgggcaatatgggcaaatatgagcataagtacaatacaaagatttgctttaagatccctgcattttagtacttggttctcacctcaaaaacacctaggatatgaaatatacaatctgtgagacacacaaagtcatgtttcccatagctaccccataacccagtattccaaagacaaggttcatattaaacacgctttaacaagggactcattttaaatactgctctctttgtaaaagcagaagcttattaccattggatttgaatctgctatgagatcccgtagagaatccagaaatccctgatcttccaccatttgggcattgatatcatggagttttgccacgcagactgctgctgttttccgaacatagggatcctcatccttcaagcacttgcggagcggctcacagagatattctgtaattttgtctacccggatgcaccccatggttctgactgccaaggctcgaatcaaaggattaggatcttcacagtcctgcagaaaacaatcaccaacaa

SEQ ID NO: 3534 - DNA, 542 bp, Homo sapiens
  MAP TO CHR22_83.0; EXPRESSED IN HELA, SIGNAL =   2; SWISSPROT HIT: Q9UJY5, EVALUE 3.00e-10; NT HIT: gi14778731, EVALUE 1.00e-108; EST_HUMAN HIT: BF879478.1, EVALUE 1.00e-121
ttcttaatgcactgtcccccgattaagggagaagcagcagccaaccccccggctcacactccgggacctgcagaataagagcagcagctgcagctcccccagctccagcgccaccagccttctccacaccgtgtccccagagccccccaggcctccgcagcagcccgtaccaaccgagctctcactggccagcatcactgtgcccctggagtccatcaaacccagtgagtagggctggggcaggtgcaggctgggttgggtcagcttgctgccctgtcaggagctctgtctggggaagctagtgggaaagcagggctcccctggctctgccactggccaaccagaggggagctctgaacaaggccctccccttcccaggagtcagtttccttatctgccccagagcaatcagaggactgctgtacaaactccaggcttatataagcaagaagacctctagggagtaggctctgggccccttccatccccaggaaggcagggcccaggacacagagaggtttggggtctcccccagattacag

SEQ ID NO: 3535 - DNA, 585 bp, Homo sapiens
  MAP TO CHR22_147.0; EXPRESSED IN HELA, SIGNAL = 0.7; EST_HUMAN HIT: AI190543.1, EVALUE 1.00e-18; SWISSPROT HIT: P50488, EVALUE 2.50e+00; NT HIT: Z00015.1, EVALUE 1.00e-17
tcagggagatggatttgaggctgatctcccatctcttcatctgcagcactggattaaagccttcttcctcggcaatacctgttgtctcagtgactggcttcctgcacggtaagcagccgaaccgaaacctgacccctggcatttcagtaacaaaatggatcatataccaattacaactgtgtaaaatttgcttatttaccaagctgtatgagaaaatggaaaagtcccccagccaggacagagctggacagaggcagcctgtgtcactcatctagacaatgcccctgaaaggccagacatcctgggtcaccaacaggcgagggctgagtggtgtgatagtgactcagggcaggctgtttttgaggcctctccagagtcccctgggagctgagagacctagaatctgtcaggctcccagtgtgagtcccgtgctgtcctccagtgagccaagaagctggccctgcaagatgccttcccaattcgtatcattccatgcacaccccttgtcctcaagatctaagcagactgacatttcttttaaaaaaaaaagagtgctttatcctctgagactttttcctccctggg

SEQ ID NO: 3536 - DNA, 591 bp, Homo sapiens
  MAP TO AC013613.3; EXPRESSED IN HELA, SIGNAL = 1.2; EXPRESSED IN PLACENTA, SIGNAL = 2.5; EXPRESSED IN LUNG, SIGNAL = 2.6; EXPRESSED IN ADULT LIVER, SIGNAL = 2.3; EXPRESSED IN FETAL LIVER, SIGNAL = 1.9; EXPRESSED IN BONE MARROW, SIGNAL = 1.8; EST_HUMAN HIT: BG723268.1, EVALUE 8.00e-72; SWISSPROT HIT: P41849, EVALUE 1.10e+00; NT HIT: AL163249.2, EVALUE 2.00e-62
tgtcattgcccaatacaagcaaaagagaatacacaaacagaaataattctgtcctactccacacaaatttcacatacattaagcaatgaacctacaattacccatgatactggagcccctggcacctcaattactcatggttcgttcatcagcagctccaatttttactttaagctcacagttaactttctcacaatttttaaaatgtaagttctttataccagcagatctgtgtatgtaatttggtaaggaaacagtaatcttggcttaaagccaatcaccatcttgtgctagcctgaaaccaatcatgctgaaaactgattctcaccttgtcttacacaggaactactgacataaagtatattcatatacacctacctgcacactcatccatggagtggcactgagaggtgacagcgtgctggccgtcctcgtagccgtcgcttgctctcggcgcctcctctgcctgggctcccactttggcggcacttgaggagaccttcagcccaccgctgcactgtgggagcccctttctggggtggccaaggccggagctggctccctcagcttgcagagaggtgtggagggaga

SEQ ID NO: 3537 - DNA, 552 bp, Homo sapiens
  MAP TO AC020588.4; EXPRESSED IN FETAL LIVER, SIGNAL = 2.7; EXPRESSED IN BONE MARROW, SIGNAL = 2.5; EXPRESSED IN LUNG, SIGNAL = 8.4; EXPRESSED IN ADULT LIVER, SIGNAL = 5.3; EXPRESSED IN HELA, SIGNAL = 4.3; SWISSPROT HIT: Q13115, EVALUE 4.00e-68; NT HIT: gi14744017, EVALUE 0.00e+00; EST_HUMAN HIT: BG763033.1, EVALUE 0.00e+00
aggagaaatgatggggaaggagctcggtcgcctgctcccagctgctcagtcccaactttctgcccgcatgcggcccgtcctacccttgctgggagccagctctggttctggggcccccagggcggctctaacagctgggagaggtggtgatggggctgtgcaggtagggcaggctgctgggggccgagtgcacgcccacggagaccggaaagctgaagacgaactgcgaggtgggggtggcgggggtcttgacccgctcccgcaggggtcccgaggggctagcagcctccgcagcacaggacgtggccagcacctgggactcgaactgcagcagctgccccatgaagctgaagttgggcgagatgatgctgcggcgctgcttaacgaactcgaaggcctcctccagcctcacccgtttcttcatcatcaggtaggccaggcagatggtggccgaccgcgagatgcccgcctggcagtgcaccagcacgcgcccacggcagtccttcacggcatctggggacagggttcaataggttagtgcacgtttctgca

SEQ ID NO: 3538 - DNA, 571 bp, Homo sapiens
  MAP TO CHR22_122.0; EXPRESSED IN FETAL LIVER, SIGNAL = 0.8; EXPRESSED IN BONE MARROW, SIGNAL = 0.9; EXPRESSED IN PLACENTA, SIGNAL = 0.76; EXPRESSED IN LUNG, SIGNAL = 0.96; EXPRESSED IN ADULT LIVER, SIGNAL = 0.87; EXPRESSED IN HELA, SIGNAL = 0.55; EST_HUMAN HIT: AA601190.1, EVALUE 8.00e-01; NT HIT: AF116241.1, EVALUE 2.20e+00
tttcctggaacacaaaagggtgagatgatttcctaatactcattgctttccaggagcttagggctcaggtaaagtccaacgttgtcaacaacttaggtcctgatggtgatgatgatggtgatggtgatgatgatgatgaggatggtgatgatgatggcaataatgatgatgatgatgatggtgatgatgtgatggtgatgatgatgatggtgatgaagatgtgatggtgatgatgatgatggtgatgaggacaatggtgttgatggtgatgatcataatgatgatgatgactgataatggcgatgatgatggtgataatgatggtgatgatgatggtggtgatgatggtgatgatggtgatggtgctaatgatggtgatgatgataatgatggtgatggtgttgatgacaatgatcataattataatgatgtgacattcttataagtttttcgtgtgtgttatttgaattacaaggtaaatactaccatccaactttatagaactgaaacacagatgattaattaacttgctcaaggttctgccactgcctgctttgcagaaagttgggtt

SEQ ID NO: 3539 - DNA, 573 bp, Homo sapiens
  MAP TO AC018671.5; EXPRESSED IN BONE MARROW, SIGNAL = 1.7; EXPRESSED IN PLACENTA, SIGNAL = 1.6; EXPRESSED IN LUNG, SIGNAL = 1.6; EXPRESSED IN ADULT LIVER, SIGNAL = 1.7; EXPRESSED IN HELA, SIGNAL = 2.8; EXPRESSED IN FETAL LIVER, SIGNAL = 1.8; NT HIT: AJ006345.1, EVALUE 5.00e-29; SWISSPROT HIT: P08548, EVALUE 2.00e-55; EST_HUMAN HIT: AA904860.1, EVALUE 2.00e-20
ccagtaaagaaaagcccagcacccaatggattcactgccgaattctaccaaacatttaaagaactaataccaatcctactacactattctgaaaaatagaggaagagaaaatacttcaaaattcgttctacaaggccattattaccctgataccaaaaccagacaaagacacatcaaaaaaggaaaacataggccaatatttctgatgagtattgacgtaaaagtcctcaacagaatactagcaaaccagattcaaaagatcattcttcgtgaccaagtgggatttatccctcggatgcaaggatggttcagcatacatagatcaatcaatgtgatccatcttatcaacagaatgaagaataaaagccatataatcatttcaattgatactgaaaaagtgtttgatgaagttcaacatcatatcatgacaaaaacccttgagaaactggttatggaaggaacatacctgaacatcataaacgccatataggacaaacccacagctagtattatattgaatagggaaaaactgaaaggctttcctctaagatctggaacatgacaaagatcccc

SEQ ID NO: 3540 - DNA, 547 bp, Homo sapiens
  MAP TO CHR22_138.0; EXPRESSED IN HELA, SIGNAL = 0.97; EXPRESSED IN PLACENTA, SIGNAL = 0.35; NT HIT: gi13646545, EVALUE 3.30e-02; SWISSPROT HIT: Q99715, EVALUE 9.00e-02
agtaggtgtgagggtgcaggaaggcccccaagggcccccaaaggccccagagtcccatgggggagaggctggagacaaggccctggtccagcactgggccctgcagggctgttgggagacagcgccagggacagctgggttttgcctgagtcctggcaggggcaaccgtgacgtggtcgggcagtggcccaacagtggtcattgggaacattccccgggtgtctcggggggtgtcacagagaccagatgtgccctgaggctcttgtaccatcgcacaggaggacaccagatcaggtaaggagcttcggcccagcctggctcggcttctgcatcctccccagaggggatcccctgcctgtgcccccagcttttgcttggctgcatgttgggccttgaggccgcaagcatccaggggctctgggtctcttgccccaaagtccaggctcagtgtccttccagagaaccctcctccccaagaccccacaacgactcaggccaggactgtgcggtgccttggcggcctgcgagggaacaactggcttctcac

SEQ ID NO: 3541 - DNA, 588 bp, Homo sapiens
  MAP TO AL133553.2; EXPRESSED IN ADULT LIVER, SIGNAL = 1.2; EXPRESSED IN PLACENTA, SIGNAL =   1; EXPRESSED IN HELA, SIGNAL = 0.54; EXPRESSED IN FETAL LIVER, SIGNAL = 0.85; EXPRESSED IN BONE MARROW, SIGNAL = 0.85; EST_HUMAN HIT: AV647669.1, EVALUE 2.00e-91; NT HIT: gi14730477, EVALUE 5.00e-94; SWISSPROT HIT: P35440, EVALUE 7.00e-17
tgcccctatgaatcgaagacatctagggtattatacagacatgacagcaaccttacaacattctgacatcctaaaccaaaggttgaagaaccaaataacggaatattgcaactttaaggaattacagtcataatgaaactttatgaaagtataatgttgactcactatttccaacactcacttgggcaagggtcactgttgcaaaaatcactctggacatcactcccttcgcatttccttcctccatactggggcacagggtcggagcagccccttgttctctgtctggcacctcctccacatgacacagaacaggcactccaactggcccaagtcgcccacttgccatgaactggaataagggaaaaaggtacatgctttcttactacctaggaaccatcgtgttacactctgggcattgttagtttgagagatgttcttgtgggcacagttagaatgggatagattcttgttgacatactacctagataagataggtagatgttaatttattaaggtataaacagtgtatttctcttacttggacaatttctttcattgcaaacttgcatctgtgtttctgctcca

SEQ ID NO: 3542 - DNA, 562 bp, Homo sapiens
  MAP TO CHR22_128.0; EXPRESSED IN BONE MARROW, SIGNAL = 1.7; EXPRESSED IN HELA, SIGNAL = 1.4; EXPRESSED IN HEART, SIGNAL = 1.9; EXPRESSED IN FETAL LIVER, SIGNAL = 1.9; EXPRESSED IN PLACENTA, SIGNAL =   2; EXPRESSED IN ADULT LIVER, SIGNAL = 1.9; EST_HUMAN HIT: BE894159.1, EVALUE 5.10e-02; NT HIT: L12231.1, EVALUE 3.40e-02; SWISSPROT HIT: Q14587, EVALUE 4.70e-01
gcgacttctccaaattcagcaaatgatatttattgggtgcacagacacacatgacattaggataggccctgtggatctgcagggagcacccaggatatttattgggctcacagacgcacacgacattaggataggccctgtggatctgcagggagcacccaggatatttattgggctcacagacgcacacaatgttaggatagaccctgtggatccacagggagcacccagttgtgctcttggccttaaactactcaaagaaaagaaacacagagctgtgtgatggaagcctttcaacccctctgaaggaggtaccatttccccagtgttagatacggaaactgactgctccctgctcacactccacaccttgttattacgaaggactgctgactctgcacaatccagccccacgctgcagccgcccaccccccatctttccagttcactcccttgggcgcccaaagctcacagccttgacccactgggccctcccctgagctccggcctccctccacactcctccatgcctctcagcctcacttccttcctaaccctccca

SEQ ID NO: 3543 - DNA, 563 bp, Homo sapiens
  MAP TO AC016672.4; EXPRESSED IN HELA, SIGNAL = 0.55; EXPRESSED IN LUNG, SIGNAL = 0.6; SWISSPROT HIT: P29496, EVALUE 2.40e+00; EST_HUMAN HIT: AA933962.1, EVALUE 5.10e-02; NT HIT: AF029308.1, EVALUE 5.40e-01
cccatcagacaccatgtgagtctgtggctcagaatggggtccgggacgcaccacacagggtgggcatccatgtggaggatgcaggaacagcatggtggaggcagggtggccttgagggcagtaaggccagctttgccattctgtggttcgaggcacagcccagagctgagtccttcaatcctccccgacagaactgtgagatttctcaaactaatcaataaatcccttcctgctgaaaccaaattgattggcttctgttggttccaaccaggcccctggccagtgccatggatgtctacggacccaaagaaaggcctccacatgagcagatccagctgtgtggggcccaatgcttctatcgttgaaagatcctacaaagtaaaagaatataaagttttacaaacaaaactatatacaaaggtgaatatttaatgagaaaataaatcacaagaaattataaattttaaacctcaaatatcttataaaattttaaaaattaattttctactttaacatacctctaggacacttctttcttatgcttttgacaatattttgcaatg

SEQ ID NO: 3544 - DNA, 557 bp, Homo sapiens
  MAP TO CHR22_141.0; EXPRESSED IN HELA, SIGNAL = 1.3; NT HIT: gi14777910, EVALUE 4.00e-51; SWISSPROT HIT: P35626, EVALUE 1.00e-10; EST_HUMAN HIT: BG391508.1, EVALUE 6.00e-51
aaggatgcatggtctatggctcgtgtattgtaagataattgtaaccatggcagtgtgtgtttcctaatattatgtttctacatttaagtgatgagagtcatcatagggaaaaaatccacttgtatgtttctagttgaatttaaattattccaacttcattattacaacattagaagtagctgtttcctgtggaatagccggttcagtaatttgctttatctcatgtgcaagtggtttctgcctgggccagtaatatattttaataaggcaagtttccaggaagatacaacctaacaatgataactttaaaaaacctagataaaggaatatgaaaaacttgataatgaggaagaccgcctttgcagaagtcgacaaatttatgatgcctacatcatgaaggaacttctttcctgttcacatgtaagtatttcttcttactctgttactttagtactgatgaataagggaccatgttcagcgtttccagaatgaaagttaaacagtagaaaggtgtttaaaattgaaaaatgcacgcccgggatggatcctatttcttc

SEQ ID NO: 3545 - DNA, 550 bp, Homo sapiens
  MAP TO CHR21_64.0; EXPRESSED IN FETAL LIVER, SIGNAL = 1.1; EXPRESSED IN LUNG, SIGNAL = 0.87; EXPRESSED IN PLACENTA, SIGNAL = 0.77; EXPRESSED IN HELA, SIGNAL = 3.7; EXPRESSED IN ADULT LIVER, SIGNAL = 0.65; SWISSPROT HIT: Q9Y426, EVALUE 2.00e-37; EST_HUMAN HIT: AA575913.1, EVALUE 0.00e+00; NT HIT: gi14780530, EVALUE 0.00e+00
agctatgagcacagcccaagctctgcagctgtcaagtctcatttagcatctggtggcaagttgggcttttttgtcctctctgggagaagcctcctggctggagactcagattttgttttccctttaaatgacgagatggttggaagaaacccagcaagacaagcggggcatctggacatccggcggacacactggctgcgtcctggtgagggtagttaacatgggtgcacgtcttctggcttggaggtgatgacctcaggccctacgtgcagggctccacgggggcaccgttcatggtgttcttgtttctgtgcctggagagcagcttcttgttcaggatcctggtgagggtgatgcctttcctccgggaaccctctggctgctccaggaacacaaggtcattgtgtgactgactcatgcctgggtctttctgttgatgccgccggcggaagaacagctttgcacctttccttagaattcctcctggaagagggaggcacaagggctggtcaagtgggcagggaatgaggggctgaatgactggtccaat

SEQ ID NO: 3546 - DNA, 577 bp, Homo sapiens
  MAP TO CHR22_127.0; EXPRESSED IN HEART, SIGNAL = 2.8; EXPRESSED IN LUNG, SIGNAL = 3.2; EXPRESSED IN PLACENTA, SIGNAL = 3.7; EXPRESSED IN ADULT LIVER, SIGNAL = 3.3; EXPRESSED IN HELA, SIGNAL = 2.3; EXPRESSED IN FETAL LIVER, SIGNAL = 3.2; SWISSPROT HIT: Q61967, EVALUE 9.50e+00; NT HIT: AL163279.2, EVALUE 5.50e-01; EST_HUMAN HIT: BG169833.1, EVALUE 2.10e-01
tgaagagtgctgtgaatcggtagaaagaaatgctaataggtccccagtttgaatggggaaaacatttgctgtatcagctgatggaccctaaatcacccactttctgtgggttttgttgtttggacatggttcttgggttcttctcagtcgctctgtctggacccagatgtgtgaagtcgaatggctaagggtggttgaagtcagggtcatccgagtagagccatttgttcttagttaaaaaggcccaggccacatggggctcagtgacttagcgctgcgcattaaaggtggacggttggacgtttgagacccttcagtcctccaccgtcatctaacaggtggggcaataagggcctagaacctgctgaacctgctggtgggacagaggcaggtctatagctgccccctccaggccaccaccatcttcgttgcgctatttcaaggcctcgtggaagccatgggctgctgctcccgcttgtctgtgttgtgttcgtctgtgttgcacgtcctagtttctttcatacattccctctggcccttgcaagtgtgatctctccctcctgtctccctccctttc

SEQ ID NO: 3547 - DNA, 560 bp, Homo sapiens
  MAP TO AF168787.1; EXPRESSED IN FETAL LIVER, SIGNAL = 0.6; EXPRESSED IN BONE MARROW, SIGNAL = 0.52; EXPRESSED IN PLACENTA, SIGNAL = 0.59; EXPRESSED IN ADULT LIVER, SIGNAL = 0.73; EXPRESSED IN HELA, SIGNAL = 0.81; NT HIT: gi11426863, EVALUE 0.00e+00; EST_HUMAN HIT: BE281398.1, EVALUE 0.00e+00; SWISSPROT HIT: Q9UHJ6, EVALUE 2.00e-72
tgaaagctgtccactgaacggtccagggaaaggatgacccacagatggtgtcaggaatgttaatcaggtaaaattcacagcagtcgtttggcgaaagagtttgctgtctaagattccttctggttgaggtgtctccggagcatgaccagagctgccccgacagctgcatccacatcctgcccaaaggacatgggcaaagggaaagccctctgcacctcctgcttcagcacgtcattcctggacagcgcactcccactgcccatcaccctctccacgccccactcctggagctgctgaatcggaagcatggagtgcaggttctgaacaatgcctcggcacagagcccgggtcacgtgccccagggagaggtcggaggaggagattctggtcactgaggccagctggtccggcaggtgcctctcccccagcactgtcggggtgatggtcaggtgggtatctctctgctgcacagctgcctgaatcatgcgtgaatacacagtggattcttcaacctccaggcctgccagagacagagaagatctgtgtaagctcatgcgtcc

SEQ ID NO: 3548 - DNA, 552 bp, Homo sapiens
  MAP TO AC022490.3; EXPRESSED IN HELA, SIGNAL = 1.3; NT HIT: gi14762261, EVALUE 2.00e-71; EST_HUMAN HIT: BE728019.1, EVALUE 3.00e-71; SWISSPROT HIT: Q02357, EVALUE 1.60e-01
ggagacagaggaaagggaggagaaactaataatcattgaggaccaccctgagaagaggcatcatcatcatcatcatcctcctcctcctcctcctcctcctcatccttgttacaaatgagagaactacagttcaaacagtgtgaaataattccccaagggaacacagtcaatatgaaccctgaccttgtccaactccattgcccacactaatttctctcctacagcagtaagatgtttaaaatacatttaatttacttttcgttttcttttcttgttttggtttgctttttgctttacctgactccagaagcttcttgacacaggctctctgttggttttcacaagccaaatagagtggagtgcccaggtggctgatcttatggtcaatgttgcccccataagctataagagagttgacacactccacgtggcctgcagcccaaagcaggaagaaaaacagttacaatacaagttcccttagctagaaagacattgccatccccattttgcattaaatttggcagcagcttatccaggggaccaaaaagctat

SEQ ID NO: 3549 - DNA, 599 bp, Homo sapiens
  MAP TO AL159176.2; EXPRESSED IN LUNG, SIGNAL = 0.82; EXPRESSED IN FETAL LIVER, SIGNAL = 0.7; EXPRESSED IN ADULT LIVER, SIGNAL =   1; EXPRESSED IN BONE MARROW, SIGNAL = 0.63; EXPRESSED IN HELA, SIGNAL = 0.53; EXPRESSED IN PLACENTA, SIGNAL = 0.92; NT HIT: gi14249577, EVALUE 9.00e-77; EST_HUMAN HIT: BF035758.1, EVALUE 1.00e-76
tgatacttggctctttcttcaggagatatttttaactacattccttatagaaatatttcattcaaagtaaagtatgccatttattctcaagaaattgtcagtgacttaagaggggaaatgataaatattgtcaaatatttctttggatttatacaatttttaaaacatgatacttactatatttcatgttgttccaagcagatataaatttggtttttagcttgtcaacttcatctgttcctgtagcctccatattcaaattctaaaggaaaagccatcacttgattgcattcttctgtagagtttaatcttttatactgactttaaaaattaaggaaaaaaatcagtaattactacatatatggttacatggagcaatacctgttaaagttacttaagtgattaaatacagtttgaactgcaaatgaacaaaacaatttctctttttatactcagaaataaacagaaaaccaatttctcattttacaaacagaaatcttatagaataagatattctatattttaattacaaaaaacctttactaacaaatatacaacaataaacctatcatgcaaaaccaagcaataatctcccccaa

SEQ ID NO: 3550 - DNA, 551 bp, Homo sapiens
  MAP TO AL160313.1; EXPRESSED IN PLACENTA, SIGNAL = 1.6; EXPRESSED IN LUNG, SIGNAL = 1.8; EXPRESSED IN FETAL LIVER, SIGNAL = 1.7; EXPRESSED IN ADULT LIVER, SIGNAL = 1.8; EXPRESSED IN HELA, SIGNAL = 1.3; EXPRESSED IN HEART, SIGNAL = 1.5; NT HIT: gi5729795, EVALUE 8.00e-74; SWISSPROT HIT: Q9Y6A2, EVALUE 6.00e-16; EST_HUMAN HIT: BI552024.1, EVALUE 1.00e-73
aaagtggggtttggggttactgggcccactgctgagtctactggggtgaagagccaagtcataccctatagggagtgcagagggaaggcagcctttgggctgagagtcaggcagacctgagatcaaatcttgcttctgccattgaccagctacaggccaggccctgcacctgtcccttgctcaagaatgagttactagccccaatctcacactaggttgctttgaatattgaaggagacagaatgtatacagaatatatgaagcacagaggaattgctggtatgttagaggagcaggagggaggggaagagagaagggaagagggagagaagagacccctctaccccatgtggccctcctggcccccatgcccgactgtcacccatcaccttggccaggatgtccatggcggtgtaggtcagcatgtcctgcatggacactggggtctgcccatctgccttggcttctagaatctccaccagctgctcagccttctcgttgaatgtttccattaagctaaccaaggagctggagaaacagcacaggcatca

SEQ ID NO: 3551 - DNA, 531 bp, Homo sapiens
  MAP TO CHR22_230.0; EXPRESSED IN HELA, SIGNAL = 2.9; EXPRESSED IN FETAL LIVER, SIGNAL = 1.3; EXPRESSED IN PLACENTA, SIGNAL = 1.1; EXPRESSED IN LUNG, SIGNAL = 1.1; EXPRESSED IN BONE MARROW, SIGNAL = 1.6; EXPRESSED IN ADULT LIVER, SIGNAL = 1.1; SWISSPROT HIT: P11035, EVALUE 1.50e-01; NT HIT: U16175.1, EVALUE 2.00e+00; EST_HUMAN HIT: BE263076.1, EVALUE 2.90e+00
agttgcagcagggatttgagtttttgtgaagagagagaggtatatcagaatcttgggcataaactaaggagccatgtcagaacctcaggtgtatgccaatgagatagatcagaacctcaggcatgtacccgatgagacagatcagaacctcaggcgtgtacccggtgagacaggtcagaacctcaagcgtgtacctgttgagacaggtcagaacctcaggcgtgtagccagtgagacaggtcagaacctcaggtgtgtacccagtgagacagatgagaacctcaggtgtgtaaccagtgagatatatcagaatcttgggtatttacccaaagaggtatagcagagtctcaggtatatactcaagaaggcatatcttgaggctttaagtatctagctaaggatttatatcaggatctcaggtttatacccagggaggtatagcagaatttggggtatagatctaaggaggtctatcagtctagagcatatagccaaggaactatatcagaacctcaggcacctacccaaaga

SEQ ID NO: 3552 - DNA, 596 bp, Homo sapiens
  MAP TO AC010125.3; EXPRESSED IN BONE MARROW, SIGNAL =   7; EXPRESSED IN HELA, SIGNAL = 8.2; EXPRESSED IN FETAL LIVER, SIGNAL = 5.6; EXPRESSED IN LUNG, SIGNAL = 5.1; EXPRESSED IN PLACENTA, SIGNAL = 4.3; EXPRESSED IN ADULT LIVER, SIGNAL = 4.4; NT HIT: L00974.1, EVALUE 5.70e-01; EST_HUMAN HIT: AW408956.1, EVALUE 1.40e-02
tctttgtcttgcaggctgggaccaatgcagggaagcagcatttaatagaaaacagcacaagttatgggtattatgatcctcaccatataaatgagaaactgagccacagataggttaagcatttgctcagattctggagagtaaatcacatttcagatccacgtgcagacctgttggactgtttttctttcactgtgccgtaattctgaatacattttcatgcagctgatgaagacccaggtagaatcacttcctttaaactctaacagcacctctctgttggttaaactcgataagaggtttctggtttctgttccttcatattccactggacaggcaattatcaggcccacaggtgcacagcacctgtactttcaagagtcaaaaaactaaaaacaaacaaaatacaactgtgctagttggagagtaaaacttacataaagacaagttattttctgcaagtactttttagcaattgcctctttccaaaaattagcatcttttgtctctgaattgcagtgaagtcctgtgatttctatacttattttagacattccttcttcaaaccctcattttccatttccaccagcaaagat

SEQ ID NO: 3553 - DNA, 578 bp, Homo sapiens
  MAP TO CHR21_10.0; EXPRESSED IN HELA, SIGNAL = 0.69; EXPRESSED IN FETAL LIVER, SIGNAL = 0.43; EXPRESSED IN ADULT LIVER, SIGNAL = 0.47; EXPRESSED IN BONE MARROW, SIGNAL = 0.44; SWISSPROT HIT: P03355, EVALUE 2.00e-37; NT HIT: AJ278581.1, EVALUE 0.00e+00; EST_HUMAN HIT: BE168410.1, EVALUE 0.00e+00
aaacaaaatggtcggtggagactagtgcaagatcttagactcatcaatgaggcagtaattcctctatatccacctgtagccaacccctatacactgctctctcaaataccagagtcagcagaatggttcactgttctgatcctcaaggatgccttctgtattctcctgcactctgactcccagtttctctttgcctttgaggatcccacagaccacacgtcccaacttacatggacagtcttgcctcaagattttagggatagccctcatctctttggtcaggcactggcccaaaatctaggccacttctcaagcccaggcactctggtccttcagtatgtggatgatttacttttggctaccagtttggaagcctcatgccagcaggctactctagatctcttgaactttgaagctaatcaaaggtacaaggtgtgtaaatcaaaggcccagctctgcctacaacaagtcaaatatctaggtctagtcttagccagagaaccagggccctcagcaaagaatgaatacagcctatactgacttgtcctcaccctaagacattaaaacagtcacggggg

SEQ ID NO: 3554 - DNA, 524 bp, Homo sapiens
  MAP TO AC007029.3; EXPRESSED IN BONE MARROW, SIGNAL =   2; EXPRESSED IN LUNG, SIGNAL = 1.6; EXPRESSED IN HELA, SIGNAL = 2.8; EXPRESSED IN FETAL LIVER, SIGNAL = 1.9; EXPRESSED IN PLACENTA, SIGNAL = 1.3; EXPRESSED IN ADULT LIVER, SIGNAL = 1.6; NT HIT: AY046055.1, EVALUE 1.00e-07; EST_HUMAN HIT: AI688963.1, EVALUE 3.00e-09; SWISSPROT HIT: P39188, EVALUE 5.00e-17
cctggcaatccacaagtatggcagtaaccctgggcaacatagtgagaccccatctctacaaaaaaagaaaaaaaatcagttagcagggcatggtgatgctcacctgaagtcccagctactagggagactgaggtgagaaggtcacttgagcccaggtgtttgaggacacagtgagatgcaatggtaccactgtactccagcctgggtgacaaaatgagaccctgtctctagaaaataaaataaaactacagaagtaagcagttggccaaacagctaacatttatgatcacttaaagagatcataaatcctttgttatggagaatggctcattttatcttgctgtagttcatattttcagagatatccaagagaaaagagtattgataaagcaagaaaacattgtgctgaaatttctgaacttcaggaaaatcataagtactcccagaaagaaaagtcaggatatttacaaaggaataggaatcagaattctcaactacaactctggatggctggcaacttctaa

SEQ ID NO: 3555 - DNA, 546 bp, Homo sapiens
  MAP TO AC005627.2; EXPRESSED IN PLACENTA, SIGNAL =   4; EXPRESSED IN HELA, SIGNAL = 5.6; EXPRESSED IN ADULT LIVER, SIGNAL = 3.7; EXPRESSED IN FETAL LIVER, SIGNAL = 3.5; EXPRESSED IN BONE MARROW, SIGNAL = 5.8; SWISSPROT HIT: O54951, EVALUE 1.70e+00; NT HIT: AF109718.1, EVALUE 0.00e+00; EST_HUMAN HIT: BG015076.1, EVALUE 0.00e+00
agtgcccgtctctgatatgctccgctcccacgagcccttgttacactcctgctagcccctggcttgtgggcttggcctctgagctggacttctttcggtccttgttgcaagtgggccaccttcacctggaaggccaggttgtatttctgcatctcattgggccccagggtgtaccaccgctcgctcagcatctggctgatggtctggttatcctggttagggtgaccctggtgcgccctgccagggcctggtgccgcttgctgaagatcatgaccgccactcatgggccaccagatgtggtccttgtcccatttgttggggttgcgtccatccttatcagaagatgagtcctgttccttgcgcagggcactgagggactgggcctgacatcatctgagtggtagaggcaactgggtgtcaggagacatgatggagaggaaagcatcatcatggtcattctctgtctcactgtccagcagggactctcctgaggggcccagggctcctcctccatggtgggaggtgagcttttaccaggttccacca

SEQ ID NO: 3556 - DNA, 537 bp, Homo sapiens
  MAP TO AC013341.3; EXPRESSED IN LUNG, SIGNAL = 2.4; EXPRESSED IN HELA, SIGNAL = 0.9; EXPRESSED IN ADULT LIVER, SIGNAL = 2.7; SWISSPROT HIT: P40461, EVALUE 8.80e-02; NT HIT: D87076.1, EVALUE 5.10e-01; EST_HUMAN HIT: BE276632.1, EVALUE 7.50e-01
caaatttggaaagagggctgtgagcctaagaaggataacaatggagaccctaaattcattttcttataatattgagctccttgctggccacaaaaagaccaaacaaaccaaaataaatctggcagaaaccacacctacaaacaaaattaattaccattatgactttcagtcccttttctcttataatttattaagccctatctctattttctcaattactagaaaaaccatctgtatcctgtctactcaagacttcatggcacttttccatatctttagagacatcactatacacacatgtacgcacaaatgcgcgcgcgcacacacacacacacacacacacacacatatacacagaactaggctgatgagatatgtgtttcaagaagtccttgtcagcaacagtccagttcaaagcatctgcaaacctacaggcagccctgtaattgtcataaagtcagagcttgaggtgagcagctggcttggaaagtttgggtaggtgaattgctttgtagctgatttcagtggcaagcacac

SEQ ID NO: 3557 - DNA, 504 bp, Homo sapiens
  MAP TO AL160231.1; EXPRESSED IN FETAL LIVER, SIGNAL = 0.8; EXPRESSED IN BONE MARROW, SIGNAL = 0.71; EXPRESSED IN HELA, SIGNAL = 0.74; EXPRESSED IN LUNG, SIGNAL = 0.74; EXPRESSED IN PLACENTA, SIGNAL = 0.75; SWISSPROT HIT: P49816, EVALUE 1.20e-02; NT HIT: gi14749996, EVALUE 3.00e-85; EST_HUMAN HIT: BF511287.1, EVALUE 1.00e-128
tggaaagaaacccatgaacccctatagaaccaaaatctattactaaaatggaagataaggagttcttacctctggttttttcattatctgaatactgaacatgtgatttttcattggatatattacaataaggacatcaccaaattctgtgggaataattcctctcctgtagtctctagtatgctctgaccaaacaatgtgcacttcatcatttcccaaatgtctcaactggaaagacaagaaaacaatttatactgctttaaaagctctttgagtacagtcatacagtcacatacaacataaaaaggggaaaaacgaaattaaaaaattgttaaattgcacttgatcagttttacatatgaaacacaaacactcaaaaacatcaggagacactgcagaagaccagacaatttcaattgtcaataatcaatgggtaacagagaacttagatttaaaaagattcacatatagcccaaatactctccttaaccagcaactgcacca

SEQ ID NO: 3558 - DNA, 578 bp, Homo sapiens
  MAP TO AL137068.1; EXPRESSED IN HELA, SIGNAL = 1.7; EXPRESSED IN FETAL LIVER, SIGNAL = 1.8; EXPRESSED IN BONE MARROW, SIGNAL = 1.7; EXPRESSED IN PLACENTA, SIGNAL = 2.7; EXPRESSED IN ADULT LIVER, SIGNAL = 2.3; EXPRESSED IN LUNG, SIGNAL = 2.6; SWISSPROT HIT: P09661, EVALUE 2.00e-03; NT HIT: AL163246.2, EVALUE 1.40e-01; EST_HUMAN HIT: AL040858.1, EVALUE 1.00e-98
actccctttcctgacaccactacttttgggtaattggcttcatgaatagattccttgccatgttaaatttccttgatttgtaacttcctttaagtatgttatgatttttaaattaaattataccaatactaatgttatatcatttcagctccaagatataagcaagttgaaaccgcttcaagatttgatttctctgatcctagttgaaaatccagttgtgacccttcctcattacctccagtttaccattttccacctccgttcattggaaagtttggaaggtcagccagtaaccactcaggatagacaggaggcttttgagagattcagtttaggtaagattaaatttaaaaaataataaatttgggtgagggaggaatttattttcagaagttatctagaaatatgtatcatgaactttataatgctattaaaatgtacatgggaaatggcagcataaatcaattcaacaaatatttactgagtgtgtactgtgcaccaggcaactggatttggcactaaggatacaatgggaaggaagacatatggtgctgctgtccatgcagcttatgttttgg

SEQ ID NO: 3559 - DNA, 550 bp, Homo sapiens
  MAP TO AC020996.4; EXPRESSED IN BONE MARROW, SIGNAL = 4.3; EXPRESSED IN HELA, SIGNAL = 1.7; EXPRESSED IN PLACENTA, SIGNAL = 7.1; EXPRESSED IN LUNG, SIGNAL = 6.1; EXPRESSED IN FETAL LIVER, SIGNAL = 3.9; EXPRESSED IN ADULT LIVER, SIGNAL = 5.6; SWISSPROT HIT: P87137, EVALUE 3.00e+00; NT HIT: AL163227.2, EVALUE 5.00e-78; EST_HUMAN HIT: BE783486.1, EVALUE 3.00e-62
cagtttggagggctcagaagaagacaagaagacatgggaaagtttggaatctcctagagacttgttgaatggttttgactaaaatgctgatagtgatatggacaatgaagtccaggatgaggtgttctcagatggagatgagaaacttattgggaactggagtaaagatcacccttcttatgctttagcaaagagactggcagcattttgcccctgccctggagatctgtggaactttgaacttgagagagatgagttacagtatctggcagaagaaattcctaagcagcaagtgttcaagaagtgacctggctgttcctaacagtgtacagtcatatgtatccacaaatagatagtctggagttggaacttaagtttaaaagggaagcagagcataaaagtttggaaaatttgcagcctgaccatgtcataggaaagaaaaacgcattttctggggagaaattcaagccgctggctgcagaaattagcataagtaaagagaagctgaatgttaataaccagacaatggggaacatgcctcaggagcatt

SEQ ID NO: 3560 - DNA, 597 bp, Homo sapiens
  MAP TO AL136457.1; EXPRESSED IN FETAL LIVER, SIGNAL =   5; EXPRESSED IN LUNG, SIGNAL = 8.6; EXPRESSED IN ADULT LIVER, SIGNAL = 6.8; EXPRESSED IN HELA, SIGNAL =   1; SWISSPROT HIT: O14265, EVALUE 1.00e+01; NT HIT: AB029068.1, EVALUE 3.70e-02
ttttccctctgaagccattgttgttgttgtctatttatttgcttgtttgttttttagtgactcagttggactaatttagcgaagtctatttcctctgcagttcgcagcctctgatgttggtccttacagtttccaagcttggatatgcacaaaatgtttctgaccaccagcaatatctgtggttttagctatgctctctttaactttctctttaacctgttattaacaaaatctggttgttctgctactattggtatcaacctcagctattagcctccactaattgctaagtaataactgcaatgttttcaacatacctctcaccccaatccagtcagatccaactgaagtttgaagtctgaccctggcaggggccctttttcaggctttctcagatgctcctgagggcagaaaatttgtactgtggagaagagaattatgaacttggtgggaaactcttatcaattactctaaatggatcctccctgtagcaggaactacacaagtgtgtgtgtgtgtgtgtgtgtgtgtgtctgtgtgtgtatgtctgtgtgtgtgtttgtactgaggacaaccggtgttgctaccatgctgcat

SEQ ID NO: 3561 - DNA, 584 bp, Homo sapiens
  MAP TO AC020550.2; EXPRESSED IN HELA, SIGNAL = 2.5; EXPRESSED IN ADULT LIVER, SIGNAL = 4.3; EXPRESSED IN PLACENTA, SIGNAL = 0.79; EXPRESSED IN LUNG, SIGNAL = 1.9; EXPRESSED IN FETAL LIVER, SIGNAL = 1.4; NT HIT: AJ250915.1, EVALUE 0.00e+00; SWISSPROT HIT: P26772, EVALUE 6.00e-14; EST_HUMAN HIT: BI519822.1, EVALUE 0.00e+00
atatggcattttctgggtgctggctactgttgcaggtttatttcatatagttgataagttatgttaatatttaacagttataaagttagctttagttaactaaagttagcttttccagaatattttcttgaacttttacgttggagtcaggttttagtttaagccactgtgtattatttcaaagtgtaactacagtggtatttttgagtgaagatctgtaattctagtatgagtcgtatcacttagccacgaaatatatttttaatataattggatttgagtgaccatgtttcattagttgtagtgatttaaaagttaactgtttatgttgggtgaactagatatctttgctaataaacatccttccttttttaagggtggagagattcaaccagttagcgtgaaagttggagataaagttcttctcccagaatatggaggcaccaaagtagttctagatgacaaggtgtgtaaacttaataattctaaaaagaagtcagatatttgcaattagttgtcttaactaatggtttttttcacttgcaggattatttcctatttagagatggtgacattcttggaaa

SEQ ID NO: 3562 - DNA, 543 bp, Homo sapiens
  MAP TO AL136444.1; EXPRESSED IN FETAL LIVER, SIGNAL = 0.86; EXPRESSED IN HELA, SIGNAL = 2.4; EXPRESSED IN ADULT LIVER, SIGNAL = 1.3; EXPRESSED IN PLACENTA, SIGNAL = 0.97; EXPRESSED IN LUNG, SIGNAL =   1; SWISSPROT HIT: P35372, EVALUE 4.00e-59; EST_HUMAN HIT: BI753905.1, EVALUE 5.00e-05; NT HIT: AF024516.1, EVALUE 0.00e+00
gccaagctgatactggaaaacaattctatatctaatctcaaaaaagctttctactaattcatgcaaatttattattggaagcttacctatattttacactagtgtcttttactgattctcactcttcttcctttatctcctagatacaccaagatgaagactgccaccaacatctacattttcaaccttgctctggcagatgccttagccaccagtaccctgcccttccagagtgtgaattacctaatgggaacatggccatttggaaccatcctttgcaagatagtgatctccatagattactataacatgttcaccagcatattcaccctctgcaccatgagtgttgatcgatacattgcagtctgccaccctgtcaaggccttagatttccgtactccccgaaatgccaaaattatcaatgtctgcaactggatcctctcttcagccattggtcttcctgtaatgttcatggctacaacaaaatacaggcaaggtgagtgatgttaccagcctgagggaaggagggttcacagcctgata

SEQ ID NO: 3563 - DNA, 598 bp, Homo sapiens
  MAP TO AL121993.2; EXPRESSED IN ADULT LIVER, SIGNAL = 1.1; EXPRESSED IN HELA, SIGNAL = 1.2; EXPRESSED IN PLACENTA, SIGNAL = 0.79; EXPRESSED IN LUNG, SIGNAL = 0.75; SWISSPROT HIT: Q9UNX4, EVALUE 6.00e-31; NT HIT: gi5803220, EVALUE 1.00e-116; EST_HUMAN HIT: BF819666.1, EVALUE 1.00e-116
tcacacccatcctcttcactctatcattatactactttgtatattgacagcccattgttttacctgacaatttttgtcaacaacttgcttcagcataagccttacattcctttaatagatcaaagcctgggctgattcaaaggctcaccttggacccagatgccagtctgcctcctagctgatcatacttcaaggtagtgatagctgctttgtgaccattgaaggtcacatttccttccccactcaggagactgaagattcggatcgacccatcctcatacccaacagctaagtgtagcccatctggggaggggcataagcaagtaacttcttgtttaagcccctgaaggataagaatctgaaatcataaaaattaaaaacaatgtagaagagttaagcatgaactcaagggaaaagcataggaatactcaggcacagtaaaattaagagcaccaataattccaaattactcttatgaataaaaatgaaactccacaatccatttcaagttttttaatatagaaattagtatttgtactaggcaatgaaacatttaagaaaaggcttaattattttctccaaagccctacgttgttgt

SEQ ID NO: 3564 - DNA, 529 bp, Homo sapiens
  MAP TO AL136115.5; EXPRESSED IN FETAL LIVER, SIGNAL = 0.84; EXPRESSED IN BONE MARROW, SIGNAL = 0.67; EXPRESSED IN LUNG, SIGNAL = 0.76; EXPRESSED IN ADULT LIVER, SIGNAL = 0.84; EXPRESSED IN HELA, SIGNAL = 0.53; EST_HUMAN HIT: BF906844.1, EVALUE 0.00e+00; SWISSPROT HIT: Q00722, EVALUE 9.70e-01; NT HIT: U48297.1, EVALUE 1.00e-57
cacaatgcactgcaacacagcaacctggctcttcacgaaatttggtttttaacaggtttaaccaatcatctactatctgattagggggtggagctccatcatcaaatggccaatcctgaaaagaaatgaccttttacattaaattgatattttctccatgattaacatcctaatacagaatacctgcacacagtacacacggcaggcctaactgaactaactgcactatatatacctattgttaacacaattctgatcattgctgtaaaatgatccaggattgaaattaaagtttgccaaataaattacccttctcaatgcagtgtcgcacacatctgaatttacaaaaacttacagaaatctctatcagagtcataagagctagtgttctcccaaaaatgatatctgaatagagtagtaattagacataatagacaaaactgtaattaaagccaagacaaagtaacagaggacacagcacatgtcaacatgatttaaaagtccactctggcaaagcataccaactggt

SEQ ID NO: 3565 - DNA, 591 bp, Homo sapiens
  MAP TO AC012172.3; EXPRESSED IN HELA, SIGNAL = 0.64; EXPRESSED IN FETAL LIVER, SIGNAL = 1.4; EXPRESSED IN HEART, SIGNAL = 2.9; EXPRESSED IN PLACENTA, SIGNAL = 1.6; EXPRESSED IN LUNG, SIGNAL = 1.8; EXPRESSED IN BONE MARROW, SIGNAL = 1.3; EXPRESSED IN ADULT LIVER, SIGNAL = 1.7; SWISSPROT HIT: P02519, EVALUE 3.30e+00; EST_HUMAN HIT: BI009837.1, EVALUE 4.00e-12; NT HIT: AL163247.2, EVALUE 1.00e-14
aagtgggtgctgtagggatgaggaggaattctgctggaagggctttttaaaatgcttcctccagagtcatctatgaattatctacctcattaacatgtttgtcttagatgtcactctttgattttataaattgacataatttcttgttctgttataaatgcacattgctatagtccttcaataaacccaccacaaatttttatcatgaggcactttttctgcagagttaaacaatgtcatgtttatagtcactcttacaacaatcaccttgatgcagaaccacctcagctatttcaccattagtcaataaacaaacaaatagagcctcattatcaatgttaaaattttctttgatatctacttcttccagcttacagacaccctgaagataaaaattttgtacatgtaaggaagtcagacatcatttttcttttctcactggacatatggaatccttcagtcaccttcttgttcacatcatcattgaacttggttgcaggccagaggttatgcctggcatacacaactgtctgtatccactgtgttccgcatgctagcaacagtatgcataccacccttcatgctaagctc

SEQ ID NO: 3566 - DNA, 554 bp, Homo sapiens
  MAP TO AL035464.20; EXPRESSED IN FETAL LIVER, SIGNAL = 1.3; EXPRESSED IN ADULT LIVER, SIGNAL = 1.3; EXPRESSED IN BONE MARROW, SIGNAL = 1.2; EXPRESSED IN HEART, SIGNAL = 1.2; EXPRESSED IN PLACENTA, SIGNAL = 1.2; EXPRESSED IN LUNG, SIGNAL = 1.4; EXPRESSED IN HELA, SIGNAL = 0.99; SWISSPROT HIT: P49270, EVALUE 1.80e+00; EST_HUMAN HIT: BF934333.1, EVALUE 2.00e-01
tgcccaagccagaaagttagaagtttcttgtggttctgtcctttttctcatactccaagtccaatcggtttggggcatttcttttaaaaagtaattataacattaaataatttaagactaaatatagtttaaatccaaacacatagtattataaaacccacacagaatttgtttcaaaagaacatatttgtactaataaaagcttcattgatgtccaagctttatattgaaatgcaaataaatatgcctaaaggaagagtcttaaatgctcgtttatccatcaaataaatcgcactttgaaataaaacaaatttatacctgtattcattttttccagtggataaacactgactgagtactaacaggaccatgttgggcactgtgttaggagctgggaggctcagagacaaactaaataatccctcaggaaggtggtgtgccacagacaggggaagatgtccagacacacacgctctttgctgatgcccacctgctgtgatagacagctggtagagatggaggtggaggagtgttctgtgaaggggaggaaacag

SEQ ID NO: 3567 - DNA, 553 bp, Homo sapiens
  MAP TO AL133552.2; EXPRESSED IN LUNG, SIGNAL = 0.9; EXPRESSED IN FETAL LIVER, SIGNAL = 2.9; EXPRESSED IN BONE MARROW, SIGNAL = 3.2; EXPRESSED IN HELA, SIGNAL = 2.4; EXPRESSED IN HEART, SIGNAL = 3.1; EST_HUMAN HIT: BF509753.1, EVALUE 2.00e-01; NT HIT: AL163284.2, EVALUE 5.30e-01; SWISSPROT HIT: P35085, EVALUE 6.80e-01
gcttggcatagtaagtggctgatattagtttcattctccacaccaagtgttttttctttctttttttttttaaaaaaaaaacttacatcccaaagtttcttttataaaaaaaatttcaatgcagtatggtcaatattttgacttttgcacagagactgatggcctggctctgccccatagagtggaggaacccccggggaggttgtattacctcgaaggggtgggcgagccagggctgctgaacctgttcgtgctagaccccaggtcccctgtccggctctgtgaagggctctccaggggtggcagaagggtgctgggagagctatgctcgggagagaagatgaatggacttggggagtcctggaagttggtgcaccaggtcctggatgccttaaataaaacttctcgagacaaagtagaagcacacctcattttactgcacttcagttgatttcactttgcagataatgtgttttttacaaactgagggtatgtggcaaccggcattaagctcatcaattgacatcatttttccagcagcatgtgttcactt

SEQ ID NO: 3568 - DNA, 549 bp, Homo sapiens
  MAP TO AL137846.1; EXPRESSED IN PLACENTA, SIGNAL = 3.1; EXPRESSED IN LUNG, SIGNAL = 4.1; EXPRESSED IN HELA, SIGNAL =  12; EST_HUMAN HIT: BI252884.1, EVALUE 0.00e+00; NT HIT: gi14744287, EVALUE 1.00e-81; SWISSPROT HIT: Q09841, EVALUE 6.00e-09
ccatcgttttgtggtgattgtctgatgtggtcaagaggcggtgcatgcataaaaagttttaaaggcctgggtcgggaactttgggtaaataatcaaggtactttgagatcttttcctcatctgtgagatgggcattaaaaacaacacctgtctcgcgggaggtcttgcgcactgctagtggacgtacattgcggatgtcagagcaggccctagtttggccggggacattattgccgccgttctgtttctcaggaggaggaagccaagaatctggtgagcgaagccatcgcagctggcatcttcaacgacctgggctccggaagcaacattgacctctgcgtcatcagcaagaacaagctggattttctccgcccatacacagtgcccaacaagaaggggaccaggtgagtgaaggagacgaagttcttcctgggtcccctggcgtcgtggccacccttggtatctccatggcatctggatggagttttcctggttctttccacattaagtacatccagtgttcccaaatcaacctcccacacagacctt

SEQ ID NO: 3569 - DNA, 563 bp, Homo sapiens
  MAP TO AF238280.1; EXPRESSED IN HELA, SIGNAL = 1.7; EXPRESSED IN FETAL LIVER, SIGNAL = 5.3; EXPRESSED IN LUNG, SIGNAL = 8.1; EXPRESSED IN PLACENTA, SIGNAL = 7.6; EXPRESSED IN ADULT LIVER, SIGNAL = 8.3; EXPRESSED IN BONE MARROW, SIGNAL = 5.7; SWISSPROT HIT: P53882, EVALUE 4.70e-01; EST_HUMAN HIT: AW983880.1, EVALUE 5.00e-67; NT HIT: AL163282.2, EVALUE 4.00e-57
aatgctgccagtctctttgctaaaacataacaagagttacctcacctttgctccagttcccaagaaattcctcatctccatctgagatgacttcagcctggatttcattgtccatatcattttcagcattttggtcaaagccattcagtaagtctctaggaggttccaaattgtcccacattttcctgtcttcttctgaaccctccaaactgttccaacctctgctgttacctggttccaaagttgcttccacatttttgggtatcttttcagcaactggtaccaatttactgtattagtctgttctcacactgctgataaatacatacccaacactgggcaatttacaaaagaaaaaggtttaatcgacatacagttccacatggctggagaggcctcacaatcatggtggaaggcaaggaggagcaagtcacatcttacatggatggcagcaggcaaaaaggagagcttgagcaggcaaactcccatttttaaaaccatcggatctcacaagactcattcactatcaccagaacagcacaggaaagactcacccccagtca

SEQ ID NO: 3570 - DNA, 512 bp, Homo sapiens
  MAP TO CHR22_4.0; EXPRESSED IN LUNG, SIGNAL = 2.4; EXPRESSED IN BONE MARROW, SIGNAL = 1.4; EXPRESSED IN ADULT LIVER, SIGNAL = 2.1; EXPRESSED IN HELA, SIGNAL = 1.3; EXPRESSED IN FETAL LIVER, SIGNAL = 1.7; SWISSPROT HIT: O04379, EVALUE 1.40e-01; NT HIT: gi10946611, EVALUE 3.00e-05; EST_HUMAN HIT: BF246708.1, EVALUE 3.00e-06
ctagacccttcgccctcttgggctcatatattttcttaataaattgactctagcttgttagtcttccacctaagttgcctgctccagatggtttttctttcctgtatcactgttgttgtatcttagggaatgtcatgtttgctggttttcaaggtgatttgtatcctgcccaatgatgacaaacgtagatatgacagcataaaaagatacctatgtaccaaatgcccaattccaagccagtgtgtggtgaaaaagaccttagaaaaagtccaggcaaggaccatcgtcaccaagattgcccagcagatgaattgcaagatgggaggagccctctggaaggtggagacagacgtatgttgtatttcactgacttcgtttaacttacttctaataaaacttgagattctcttaattgttaatgcttaaattttgctcacgttctaactccattaccttttcaaaaacaaacttaaggtacaaagaacaatgttcgttggcattgattgtttcca

SEQ ID NO: 3571 - DNA, 600 bp, Homo sapiens
  MAP TO AC022215.2; EXPRESSED IN FETAL LIVER, SIGNAL = 2.8; EXPRESSED IN ADULT LIVER, SIGNAL = 5.1; EXPRESSED IN BONE MARROW, SIGNAL = 4.9; EXPRESSED IN HELA, SIGNAL = 2.1; EST_HUMAN HIT: BG779409.1, EVALUE 0.00e+00; SWISSPROT HIT: P31796, EVALUE 2.00e-24; NT HIT: gi9635487, EVALUE 0.00e+00
gagagagagaatgggcgatgtttctcagggctgcttcaagcgggattaggggcggcgtgggaacctagagtgggagagattaagctgaagggagattttgtggtaaggggtgatattgtggggatgttagaagaaacatttgtcatatagaatgattggtgatggcctggatacggttttggatgaattgagaaactaaacggaagatacaaggtccgaataaaagaaggagaaaaatgagtattaaaggaataagaattgggaggacccaggacatccaattagagtgcccaagggggttcagcataattacttgcttggttggcaagtttttgggctctatccttgagtttgtttatgttgtcatacaccaggccagattgatttaggtaaaaacaacacttttcatttaagaatatacagagtcctcctttttcagcagtgagtaagtcaaggcctcggcggttttggaggacaactgcagctaaagagtcaacttgggcctggaggactgataaagtttgtgatatgtctgtgatgctagcagagaagtcattagacaggctacggaaggtcgtgacagaggttgaaatgcctgct

SEQ ID NO: 3572 - DNA, 587 bp, Homo sapiens
  MAP TO AL136382.1; EXPRESSED IN FETAL LIVER, SIGNAL = 2.2; EXPRESSED IN BONE MARROW, SIGNAL = 1.6; EXPRESSED IN HEART, SIGNAL = 2.1; EXPRESSED IN LUNG, SIGNAL = 2.1; EXPRESSED IN ADULT LIVER, SIGNAL = 2.5; EXPRESSED IN PLACENTA, SIGNAL = 2.8; EXPRESSED IN HELA, SIGNAL = 2.2; EST_HUMAN HIT: BF592665.1, EVALUE 3.00e-62; SWISSPROT HIT: P03332, EVALUE 3.00e-20; NT HIT: gi11467755, EVALUE 9.00e-03
tgttcccttctccctcactgatctctctcaaattaacaaaagactcagttcatttccagaagaccctacctcttacattagagagtttcagtacctcacccagtcttatgaactaacctggcatgacctctatgttatcctctcttccaccctcaccccagaagaccgagaccatatctggaccctagctccgtcacatgctaatacaattcatcaccaagctcctgcccagcctactggcacagaggcagtccccaaccaggaccccactgggattatcaagacaggacctctggacaccgccattgagaccacatgattgtgtgtctccctgcaggactcaaaaagggtgcccatgaagtggtaaactataaaaaactttcagaaatcacccaaggtcctaataaaaacccagccctttttctctctggtttaactgaagccatgagaaaatataccaacctagacccagcaagcccagaaagaactactatcttaaaccttcggttcatctcccagtccacccctgatattcggtacaagtttcagaagcttgatgatggccctcacaccccagaatgagacct

SEQ ID NO: 3573 - DNA, 567 bp, Homo sapiens
  MAP TO CHR22_153.0; EXPRESSED IN BONE MARROW, SIGNAL = 0.43; EXPRESSED IN ADULT LIVER, SIGNAL = 0.44; EXPRESSED IN HELA, SIGNAL = 2.4; EXPRESSED IN FETAL LIVER, SIGNAL = 0.4; EST_HUMAN HIT: BI060524.1, EVALUE 5.10e-02; SWISSPROT HIT: O43426, EVALUE 4.80e-01; NT HIT: gi5454137, EVALUE 3.50e-02
acttccatcttccctcccacccttctctggcagcccaggaggtctttttgtgtgaatctgcgcagatctcagcgtccctgcccttctttgtgttttgttctctcttccaccttaggtctttctctggtctgggcacacccagctgcagggctcacctttgcctgtaagaatacagcccccaaacacagtcagtaccccaagaacagtccctgccatctctggcggcacagatgctggccaagctgcagctgccagtgctgcccagggagctggagagctgccggccaagagcccagcccctctgggtagagcaggagccagtgccaccactccctgtgggattcggattaaggacacacccacccaaagtaaaccaagcttggccaaaggcaggtgcccagctgtggtcaccactccgcagtagttactgaaaatcttccatctgcccaataccctcctgagcccgtgaaggagatgagcggaaagaggctccgcctgttggaagcacagccaggaaaggtgggctcagattgctgaagcctgcaggggaacttgaagaaagcgtgc

SEQ ID NO: 3574 - DNA, 526 bp, Homo sapiens
  MAP TO AC005283.2; EXPRESSED IN LUNG, SIGNAL = 0.69; EXPRESSED IN PLACENTA, SIGNAL =   1; EXPRESSED IN HELA, SIGNAL = 0.55; EXPRESSED IN FETAL LIVER, SIGNAL = 0.53; EST_HUMAN HIT: BE536489.1, EVALUE 0.00e+00; NT HIT: gi14741311, EVALUE 0.00e+00; SWISSPROT HIT: Q62786, EVALUE 4.00e-04
tttttccctcacgtctgctcaggcagcatgggcacatagcccacaggtcctcagcactcacctggctgcagcaccctgatcaccagcaggttggaggtcctctccgccagttgcgtccaggtgttgttgtagttcttccaccacagctctgccacacactggtacttgcctgcttccgtgtcactggctcggctgatgattaggcggacgttgttgctggactcagccttctcggtggcagttcgggttcggaagctggaggacctgtccccccactggacccctccgtcccgggtgaaggtcaccaagtcatggaactccaccgtgcccaccggctggaaccgccatgtcactgacacggggacctgggcagggtagtggggtttgatgatacactgcaagtcaaaggagtcgctgtaggtcacccccggtgtccgggagatggctgtgactgcgaagcccatttctggagagagagcagagagattcaaccagaggaggcatgtggctttctcagggcagtatg

SEQ ID NO: 3575 - DNA, 517 bp, Homo sapiens
  MAP TO AL135920.4; EXPRESSED IN FETAL LIVER, SIGNAL = 2.5; EXPRESSED IN BONE MARROW, SIGNAL = 2.5; EXPRESSED IN HEART, SIGNAL = 2.8; EXPRESSED IN HELA, SIGNAL = 3.8; EXPRESSED IN LUNG, SIGNAL = 3.7; EXPRESSED IN ADULT LIVER, SIGNAL = 3.9; EXPRESSED IN PLACENTA, SIGNAL = 3.4; EST_HUMAN HIT: BE048741.1, EVALUE 5.00e-05; NT HIT: AL163246.2, EVALUE 3.10e-02; SWISSPROT HIT: P08547, EVALUE 3.00e-08
tccagattcatccatgttgccacaaataacaggatttctttattttttaacgctcatcagcattctattgtgtatttacaccacattttctttatctatcattaggtatttggtttgtttccgtatctaggcaattgtgaataacgcaatattaaacatagggatacagatatatttttgaaatcctaatattatttccactggatatctatgaagaagtgagattaatgaattataagctagatgtattttttaattgtaatctctacactgttatccataaaggtaatatgcgttcacattcccaccaacagcgtacaacactttgcttttctccaaaacctcatcgagacttgttgtattatctttctgataatagctatccaaaaaggtgagataatagctcattggtttttgttccttttatttttatttgacatgtaaaaattgtacatatttggggaatacagaatggcacttcaacatgtgcatacattgcataatgacaaaatccggg

SEQ ID NO: 3576 - DNA, 578 bp, Homo sapiens
  MAP TO AL136987.1; EXPRESSED IN LUNG, SIGNAL = 2.8; EXPRESSED IN ADULT LIVER, SIGNAL = 2.2; EXPRESSED IN HELA, SIGNAL =   2; EXPRESSED IN PLACENTA, SIGNAL = 1.9; EXPRESSED IN FETAL LIVER, SIGNAL = 1.6; EXPRESSED IN BONE MARROW, SIGNAL = 1.7; EXPRESSED IN HEART, SIGNAL = 1.8; NT HIT: gi14720672, EVALUE 6.00e-87; SWISSPROT HIT: Q08116, EVALUE 2.00e-26; EST_HUMAN HIT: BF089513.1, EVALUE 0.00e+00
tgaatgagtttgtctggccccagattcctcttctatgaatgaagaaatttcaaatgacttctcatctctacaatctataacacagctatttcagcagtagctgtctcttacctttgtatgaataggaagcaattgtatttttcttacaaatttcttcttcaaattattcatttgttggttcatttaatttaattatctccccacccacccctcgtttctttttagctggtcaaaatgtctttggaagtttcctaaagtctgaattcagtgaggagaatattgagttctggctggcttgtgaagactataagaaaacagagtctgatcttttgccctgtaaagcagaagagatatataaagcatttgtgcattcagatgctgctaaacaagtgagtattaagcttatcatcatcagtttctccataaaagaccctatatgcagaaataacatttaatatatacaacaagataaaatccttttggggtatataattttacttctacatacttaggcatataaatatagttcagtgcaatgagaatctaattttctatattggtgagggtttcagcacagt

SEQ ID NO: 3577 - DNA, 522 bp, Homo sapiens
  MAP TO CHR22_211.0; EXPRESSED IN BONE MARROW, SIGNAL = 1.8; EXPRESSED IN LUNG, SIGNAL = 1.2; EXPRESSED IN HELA, SIGNAL = 4.3; EXPRESSED IN PLACENTA, SIGNAL = 0.99; EXPRESSED IN ADULT LIVER, SIGNAL = 1.1; EXPRESSED IN FETAL LIVER, SIGNAL = 1.7; EST_HUMAN HIT: BI256272.1, EVALUE 1.80e-01; SWISSPROT HIT: Q61001, EVALUE 4.80e+00
tgcatttggttctctttcccaggagctctgaaagggtttcacttggaatcagacttcagtcaaaatcttttcatcaagtatatgacctagaaacttccttctcatcttagggtatttttccgtcatacttcctccacgaaggtaagtatcttcgtggactgatgcatacgcatagtggatacacttggctgcttccctttgcatctcctcctccctaactgaacagtagttgtgttcagcgaccggcccctcctctacaagacaagggcaatgggaaacccagccctctgagttcagaaattgatcctaattggtctaagtgtggtctcagttccctggccaggggttgcttcagaaatgggcactacccaattcaggcatataaaacaggaggggaattctgcaggtgcgctagtgaaaaaaaaatcttcatttccaatcaaagatggggaataccgggagggggagtatagagacaggatttaaaaaaaaaagagcacatgaatgagcaaagagggcaag

SEQ ID NO: 3578 - DNA, 511 bp, Homo sapiens
  MAP TO AL138781.2; EXPRESSED IN HEART, SIGNAL = 1.7; EXPRESSED IN PLACENTA, SIGNAL = 1.9; EXPRESSED IN LUNG, SIGNAL = 1.7; EXPRESSED IN HELA, SIGNAL = 2.2; EXPRESSED IN FETAL LIVER, SIGNAL = 1.9; EXPRESSED IN BONE MARROW, SIGNAL = 1.7; NT HIT: AF131205.1, EVALUE 1.90e+00; EST_HUMAN HIT: AA490148.1, EVALUE 3.00e-03; SWISSPROT HIT: P08345, EVALUE 1.60e+00
ttttgtgaaaggttccctgcaaggccatgtgtctgcacgtcgtgttttctgagaaactgccagcccctgtggaagtgtcattgtgttctcatcccccaggtgatcttagacctgatcccgtatgaaagcatcgtggtgacccgagcactggacggggacaaagcatttctggagaaacttggtgtttcttcagtcccttcgtgttacctgatctacccaaatgggtcgcatggattgattaacgtgtgagtgcccgggtggggtctgggaactccgtgccgctcggagttaccggacagaggctccgagtagacagtgcaagtctggtgtgagatcgggggagccctggcccctccgcctcgcttccctgggcagatttgggccctggctctcagcccgtgggtattgctgatctgtgctgtgttttcgtggatttctgttttctcactgctgtgtccccgcacctaggaggagcctggcgtggtgacttaccaagagtcgcagaggaaac

SEQ ID NO: 3579 - DNA, 525 bp, Homo sapiens
  MAP TO CHR22_21.0; EXPRESSED IN HELA, SIGNAL = 2.7; EXPRESSED IN FETAL LIVER, SIGNAL = 1.7; EXPRESSED IN BONE MARROW, SIGNAL = 1.6; EXPRESSED IN LUNG, SIGNAL = 1.9; EXPRESSED IN ADULT LIVER, SIGNAL = 1.8; EXPRESSED IN PLACENTA, SIGNAL = 1.7; NT HIT: AF086788.1, EVALUE 0.00e+00; EST_HUMAN HIT: BG106058.1, EVALUE 1.00e-130; SWISSPROT HIT: P17473, EVALUE 9.60e-01
tgcgacctcatctttgtcagtgcacaaaatggcgccctacagcctactggtgactcggctgcaggtgagcgagctcagggacctctgggttcacgggggcggggtgcctcctactgtgccggcggctgtgggcgaggcagggcgaggcgggcccaacctggggccaacttctcgtgtacctgtcccggttgtgggcccggcacccgtgcccgcttctctggtgccctaggtcaaggcgtccccggcacagtcagctttcctggccctgtccctgcctcgcaagaagcgtgggcccaagcagcggcggccgggtgaagagcggaggcacctctttcttctttttgaggacagcattgcctgctcccgtggggtgtgtttccattcctcaaggtgaggacaaggtgactagggggcgcggtcgttgttgagtcttctaggcccagttcctgaggcctcacttcccatctcttagcaacagaggcatgacagcatctacggttgccaggcctggagtctggagaagaa

SEQ ID NO: 3580 - DNA, 568 bp, Homo sapiens
  MAP TO AL035633.18; EXPRESSED IN FETAL LIVER, SIGNAL = 1.5; EXPRESSED IN HELA, SIGNAL = 0.81; EXPRESSED IN PLACENTA, SIGNAL = 1.4; EXPRESSED IN LUNG, SIGNAL = 1.1; EXPRESSED IN ADULT LIVER, SIGNAL =   1; NT HIT: gi16306469, EVALUE 1.00e-111; EST_HUMAN HIT: BF951698.1, EVALUE 0.00e+00; SWISSPROT HIT: Q03188, EVALUE 7.10e+00
atgctttatgggtgtggctcagatcttgttggaagaactcgacctgtccagcatggtgatcggatggtacaaattgttcccaccgtcctcactggtggatcccacactcactcccctcacccggcgggcttcccagtcatctctggaaagttcaactgggcctccctgtattcgatcatagtgaactcataccagagtcattccaataaaactctacttttcaggataataatctgaaccagatatttcatgatcgaaagcattgttggagacagacaatcaacttgtgttttgcctgtagtagtttttcaataatatgtcccaattgttatttaaaacatggcttcatatgacagaacaaggcaatctatcaaatttacaggaagaatcaacatgctggtgagagtcactgatgcttctaacaaatagaaaaagaggaaactttaaatccacgcatacacgtacacacacacatgcacacacacacacaccaaattgaacaaactggaaactctcactctgtgaaaagttgtattctacacatttctgcacagaccacaagcagtgt

SEQ ID NO: 3581 - DNA, 576 bp, Homo sapiens
  MAP TO CHR22_228.0; EXPRESSED IN HELA, SIGNAL = 4.1; EXPRESSED IN FETAL LIVER, SIGNAL = 1.7; EXPRESSED IN BONE MARROW, SIGNAL =   2; EXPRESSED IN HEART, SIGNAL = 1.5; EXPRESSED IN LUNG, SIGNAL =   1; EXPRESSED IN PLACENTA, SIGNAL = 0.92; EXPRESSED IN ADULT LIVER, SIGNAL = 0.92; SWISSPROT HIT: P98203, EVALUE 2.50e+00; NT HIT: gi14277708, EVALUE 2.00e-65; EST_HUMAN HIT: AW008846.1, EVALUE 0.00e+00
tttgccaaagacatcacagcagacacgaagtagcagagccatgggcacagaaaagggagcctgggtaccccctgctggcagaggtgctggggcaggagcaggcgctccaggtcgcgcgcgaagtcagtgaggacccttttgagctccccgcaactgaagaaggaattaataaaatcaactataacctaacagtagtagtaatagaaattttaaaatcctctcaaagttgctgcaaagtgtgaccccccccttactctcaagttaaaagagaatattaacagtctgtcttctctctgtggacagtggaccttatctatactccccaactccacattcctcaaagtttgttacaggcccagcgagttcctgcttacctccctagcatggctgcagggtcacaagaccaataagtttaggtggcaagacatgtttctctcaagatataagaaatgtaatgctgtctttgtttcttgcttctgtaacttgcttcccgcctcacgtagttcctgccttaagatgtttacaagtagaaaaagccctttgttcggggctcaaactttctggacctatgtccgg

SEQ ID NO: 3582 - DNA, 533 bp, Homo sapiens
  MAP TO CHR21_21.0; EXPRESSED IN HELA, SIGNAL = 5.7; EXPRESSED IN FETAL LIVER, SIGNAL = 2.3; EXPRESSED IN HEART, SIGNAL = 1.9; EXPRESSED IN LUNG, SIGNAL = 1.2; EXPRESSED IN PLACENTA, SIGNAL = 1.1; EXPRESSED IN ADULT LIVER, SIGNAL = 1.5; EXPRESSED IN BONE MARROW, SIGNAL = 2.4; SWISSPROT HIT: Q9X6B2, EVALUE 7.50e-01; NT HIT: AB043547.1, EVALUE 1.00e-04; EST_HUMAN HIT: AI337323.1, EVALUE 5.00e-05
aaagatggtccccaagatccccacgactatgtgccttctcttgagtgtaagcaggacttgtcaacttgaagagattggctcctgtgattacatcattttaaataacaaagctgatattaaggtccaaaatcagttgactttgagtccaaaggagattatttcaggtgagataacctaatcaaattagcctctaaaaacagtccagaccttccctgaagggagagctttgaggtcagggagattttcctactgcccgaaagattcaaagagccagtcttcaaagggcctttgggaattgtgggaggctttttgaacagcaacctccagatgaccgttaacaagaaatcggagacacgaatgccacatctgcaaggaactgaatgctgccaacatccatgtgacctgggaagaggaacctcgagctccagaaaggaacacagtccagccaacaccttgactgcagcaagacctgggaaaaggaccctgagaagtgaaccagctaagccatgcccggactgctggcctcagaaaac

SEQ ID NO: 3583 - DNA, 588 bp, Homo sapiens
  MAP TO CHR21_25.0; EXPRESSED IN HELA, SIGNAL = 3.7; EXPRESSED IN HEART, SIGNAL = 1.5; EXPRESSED IN LUNG, SIGNAL = 0.99; EXPRESSED IN PLACENTA, SIGNAL = 0.88; EXPRESSED IN ADULT LIVER, SIGNAL = 1.1; EXPRESSED IN FETAL LIVER, SIGNAL = 1.9; EXPRESSED IN BONE MARROW, SIGNAL = 1.8; EST_HUMAN HIT: BG221697.1, EVALUE 1.00e-123; NT HIT: AL163227.2, EVALUE 0.00e+00
tgctgctttaaacccctcagctttgtggtagttacatgggaatagctaatacaaataagtggtgcagaccccggacacagagctgatacacaggatgtcactgggagaaacagagaaagagtgtggttgtctccccatatctacagtttcacattctgggatttcagttacctgcatttaacggaggttgtctgaaaatattaaataaaaaattcccaaagtaaacaattcgtaagttttagaatgcatgccattctgagtatcataactaaacctcatgctattttactttgtccttctcaggatgtggtttcaggtatccggtgagggtctcagaatttatcccctgtggataagggaggactactgtaatcagaaaagcagaaagagatgggttaactgttagcttaagcaattatggaaataaaatttagaaaataaacaataccagttcccaaacatttatccaaaagtcttaggactatatgtgcttgaactatagaaattttcatactttataaagttattagaatgcatacacactatatgttttaacagtcaccagcaggttctgggacaatgcctcaa

SEQ ID NO: 3584 - DNA, 528 bp, Homo sapiens
  MAP TO CHR22_170.0; EXPRESSED IN HEART, SIGNAL = 1.2; EXPRESSED IN BONE MARROW, SIGNAL = 1.2; EXPRESSED IN PLACENTA, SIGNAL =   2; EXPRESSED IN LUNG, SIGNAL = 1.2; EXPRESSED IN ADULT LIVER, SIGNAL = 1.2; EXPRESSED IN HELA, SIGNAL = 0.72; EXPRESSED IN FETAL LIVER, SIGNAL =   2; SWISSPROT HIT: Q00143, EVALUE 3.70e+00; EST_HUMAN HIT: AA090905.1, EVALUE 7.40e-01; NT HIT: AF176642.2, EVALUE 5.00e-01
cagttgtggcctaggagagcttcttaatctgaattccataaagattcatttttattcagtggtgcatgtgcacacacacacacacgcacacacacaatgaatctttgaaaagtctccaggctagaagatagctgctcttggtgtgttgagggcaagagctgtacagggcggtacaaggtttctctcccaaacccaccattgtcacagccactccagtgcaaaaccatgtagactattccggcaggcactgcattccaggagccagtcttccccttagtgagaggccgaagtccatagctggaagcaacctctgctcctggtgctggcacagttagagtggcgtgggccacatttgctttggggagggaaacagcttctggagcctgcgtctctggtacccaggtgacagcagacccggccatgtcgctgcagccaggccatgcttggcagctttagggaagcaaattagcagaagactgcagggtccagggacttagcaagctgcctccagggcagaggaatcaaaag

SEQ ID NO: 3585 - DNA, 538 bp, Homo sapiens
  MAP TO CHR21_28.0; EXPRESSED IN FETAL LIVER, SIGNAL = 2.8; EXPRESSED IN BONE MARROW, SIGNAL = 3.6; EXPRESSED IN HEART, SIGNAL = 1.9; EXPRESSED IN PLACENTA, SIGNAL = 1.7; EXPRESSED IN LUNG, SIGNAL = 3.5; EXPRESSED IN HELA, SIGNAL =   4; EXPRESSED IN ADULT LIVER, SIGNAL = 3.6; SWISSPROT HIT: Q03828, EVALUE 4.40e-01; NT HIT: AL163280.2, EVALUE 1.00e-97; EST_HUMAN HIT: BG573364.1, EVALUE 6.00e-88
aattttctgcccagtcatgcttgttaccaggggttccttgctcccagagctcccaagatggtggtgggctgcttccaaaatggtggcaagcctcgtgttctctgacctggggttcttggcctcacggatttcaaggaatggaatcttgggccatgcggtgagtgttatagctcttattagaagccgtgggtcacggaagagaactgtggaacctactgactcctgttcagctcaattaggacgaacccaggcacttagctgtgcaggaacaagggcaagcctttagcccaatcaggagtggcaatgggtgcctcgctggatcagaagcacagcggacacccttccagatctggagggatggcagtcagcggtgggtctgtgacagcggcgggtctgtgacagcggcaaacaccagtggtgggcagcaagtgaaagctcagctcgagctgtaacaaacacggaccagaagaatgcagttgcaagatttaatagagtgaaatagagtgaaaacagagctcccatacaaagggaggggact

SEQ ID NO: 3586 - DNA, 545 bp, Homo sapiens
  MAP TO CHR22_171.0; EXPRESSED IN BONE MARROW, SIGNAL = 1.2; EXPRESSED IN HELA, SIGNAL = 0.98; EXPRESSED IN HEART, SIGNAL =   2; EXPRESSED IN FETAL LIVER, SIGNAL = 1.1; EXPRESSED IN PLACENTA, SIGNAL = 1.4; EXPRESSED IN LUNG, SIGNAL = 1.3; EXPRESSED IN ADULT LIVER, SIGNAL = 1.3; SWISSPROT HIT: Q92523, EVALUE 8.00e-22; NT HIT: AB003286.1, EVALUE 0.00e+00; EST_HUMAN HIT: BE780650.1, EVALUE 1.00e-102
actgcacccagctcataaccctaccttcttttatctttaatcctctaaccataaccctaacttttaaccttaagctgtaacctgtggggctggggctgccgtacctgttgtagcagttgccatgtagcagggccttgccatagaggctgaggctggcctcatcttcggggtcataggagtaggattcctcatccagggccacgaagaaagcggcacgctcgatggcctccaaggcagccttattctttccagagctaaagaaggcctggcgtgcctgcgcccactccaccctgaagcatggggcagggtaagcagtgggcacgtggacttgggatgagggtgcctctgagggcctggctggacctggagatgggggtggggtgccaggctggacctggagatggggggtaccacgctggacctggagatgtgggggtgccaggctgggcctggaggtgttggggtgcgtgccaggctgcgcctggaggtgggggtgtgtgtgccaggctgggcctggaggtggggggtgccaagctattttggag

SEQ ID NO: 3587 - DNA, 596 bp, Homo sapiens
  MAP TO CHR21_66.0; EXPRESSED IN FETAL LIVER, SIGNAL = 1.2; EXPRESSED IN BONE MARROW, SIGNAL = 1.3; EXPRESSED IN PLACENTA, SIGNAL = 0.73; EXPRESSED IN LUNG, SIGNAL = 0.83; EXPRESSED IN ADULT LIVER, SIGNAL = 0.8; EXPRESSED IN HELA, SIGNAL = 3.8; SWISSPROT HIT: Q14684, EVALUE 1.70e-01; NT HIT: J01619.1, EVALUE 1.40e-01; EST_HUMAN HIT: BG122930.1, EVALUE 3.00e-03
gccttcatctggtcaactcctattaatccttcagaacccaactcatttatcctctcccctttttgagtcttctccagctccccaggcaaaaggagttgctgcccattttctcgttcatgtgtctagtggcacttttgtatcatacgggccatgtgtctggtgcagcaccgcatccctcaccagaccgagtccctcaagggaaggcagatacctcactcatctttgcacccccagaaactagcacagcccctaaaacagagtttgtgcttccaaaatgtgtggtaagtcaactcaaggatgggtgattgttggctacccacaaatgcagaacttttccctgtctcagggaccagccgtctgattcagaaaaaaaatggcccagtgggtagctccacagcaaaacacaatggcccagcaggcagctctacaggggcaccgggaagacaagaagaatgtgggagctgctcaggagaaaagaaggagaagggagagacagacagccactgctctactcagctccgccagaggggcttaaggaagggcacacccacttctgctaccgcggcctggccccaactctgctgttggcaaactga

SEQ ID NO: 3588 - DNA, 574 bp, Homo sapiens
  MAP TO CHR21_33.0; EXPRESSED IN FETAL LIVER, SIGNAL = 1.9; EXPRESSED IN BONE MARROW, SIGNAL = 2.2; EXPRESSED IN HEART, SIGNAL = 1.5; EXPRESSED IN LUNG, SIGNAL = 1.3; EXPRESSED IN ADULT LIVER, SIGNAL = 1.5; EXPRESSED IN PLACENTA, SIGNAL = 1.1; EXPRESSED IN HELA, SIGNAL = 4.2; EST_HUMAN HIT: H79398.1, EVALUE 8.10e-01
ttggggcatgtgtgtaagtgcatatgtctgaatgtgttttaatatgaaaagatatattagaatctatctctttcaccatgactttctttttgtctctggattatttttacaaactaaatattcccttgtctcttagggcttacagtatgatctatgatattcagtaccctggagagcagcacaatatttcattgccttgtggggtaacatcaaagagaatagagaaatgcaatgaaaaatgacgtataacaaatctaatactatctatgcttcacctgattctataactacagaaatatgggagttcaatttataaactgcaaatgcagtttaataaattgtcctttaaccttataattttccatattggttgatttctgtctctttagttgcattcaatctctttgcaaatatccatcttttcagtttaaatgtcttttgtctgaggaatccaagtaatgattataaactgttttttttttttcataaaagaggcgatagaaaagctctcgttatacattaaactcttcaattttcactcagtcatactgtagggaaaacactgagggcagtg

SEQ ID NO: 3589 - DNA, 570 bp, Homo sapiens
  MAP TO CHR22_139.0; EXPRESSED IN PLACENTA, SIGNAL = 0.46; EXPRESSED IN LUNG, SIGNAL = 0.44; EXPRESSED IN HELA, SIGNAL = 2.1; EXPRESSED IN FETAL LIVER, SIGNAL = 0.41; EXPRESSED IN BONE MARROW, SIGNAL = 0.4; SWISSPROT HIT: O95644, EVALUE 1.20e-01; NT HIT: AL163279.2, EVALUE 8.50e+00
caaaagatggggatgtggagtcaagataagagatgatgaaagcacggctgttcagtgatgggaatgaccccacagaatgggaggaaatgaagatgcaggaaagaggggcgctaagggcatctctacttgggaagctgagggccaaggttcagaacacaggctggggactgacctgggaggggagcaggacctctccataggcacagagatggcagatggcgagggtgcagaggggggcaggctgtcttggtggtgggaaggcacgggccttcctgctgactgcttgtgatttctcagtgaagaccttccctgggtggtgctggggaggagggcaggtggggaaggacacgctgcaggggaagtgtttcgaaggtgggagaatctgggcatgctagggcagtacagtggtgcggccaggcagcactgagtgcccttctgagctgtggggccgcacagtcttcagaatgtctgcaagaaggcaccatggttgttgtatctattttatacccatagaaacaaagtcttagggaagtcaaataacttgcctaaggccacacagatggaatctga

SEQ ID NO: 3590 - DNA, 549 bp, Homo sapiens
  MAP TO AL132671.19; EXPRESSED IN FETAL LIVER, SIGNAL = 0.93; EXPRESSED IN HELA, SIGNAL = 0.54; SWISSPROT HIT: P08922, EVALUE 1.00e-35; NT HIT: gi4506578, EVALUE 1.00e-100; EST_HUMAN HIT: AW966196.1, EVALUE 7.70e-01
gagcccatggacttcaaaactgccagatattaaatcgagactttgctaagctaaagtcagttttctcatgcatattatctacatgtttttttgctttcagaaatcaacccatttcctcacctcataactcttcttggtaacaagatagtttttttagatatggatcaaaatcaagttgtgtggacgttttcagcagaaagagttatcagtgccgtttgctacacagctgataatgagatgggatattatgctgaaggggactcactctttcttctgcacttgcacaatcgctctagctctgaggtatttcactatgtaattcttccgaaataaaggaagtgaagtatttgcatatgacactactttgtagttaaaatgactggaaaacggtttagtcattaagattagaatgaaaaggacagatattgtataattatttagccacaaatgaatacagactacattttgggcaaatgtcattcaacactcagttagcaaatagttattgggtttaggatgctgtgttagagcctgggatattatgggtga

SEQ ID NO: 3591 - DNA, 563 bp, Homo sapiens
  MAP TO CHR21_69.0; EXPRESSED IN BONE MARROW, SIGNAL =  23; EXPRESSED IN ADULT LIVER, SIGNAL =  18; EXPRESSED IN HELA, SIGNAL =  18; EXPRESSED IN HEART, SIGNAL =  20; EXPRESSED IN FETAL LIVER, SIGNAL =  20; EXPRESSED IN PLACENTA, SIGNAL =  23; EXPRESSED IN LUNG, SIGNAL =  24; SWISSPROT HIT: P55347, EVALUE 1.00e-21; EST_HUMAN HIT: AL545010.1, EVALUE 1.00e-92; NT HIT: gi15320349, EVALUE 7.00e-93
tgcattttcacccaacagaggtgttagtgaagtagtgcaggcatacacgcaaagacattctcacggagatgtagaacgtaaatggattcttttttttcttttctcctcaggcatccactatttccattattagctttgttgtttgaaaaatgtgaacaatctacacagggctctgaaggcacaacttctgccagttttgatgtagacatcgaaaattttgtaagaaagcaagagaaggaagggaaacctttcttttgtgaagatccagaaactgataatttagtaagtaaaataaattttatttttagttttcaaaatgtgaaatctgttcatgaaattttaggcttctaagtagaactttagactgcttgtagttctgctaaaggagagactcatacaactctaaaagaatttttatggtgtgtgtaatgtggatatccccaagtcttccagccttctctaggtatcttttatttatttagtttttatttttagatttattttatttttgtagacacatcttactgtattcccccagatggtctcaaactcctggcctcaag

SEQ ID NO: 3592 - DNA, 523 bp, Homo sapiens
  MAP TO AL121954.3; EXPRESSED IN LUNG, SIGNAL = 1.1; EXPRESSED IN HELA, SIGNAL = 0.59; EXPRESSED IN PLACENTA, SIGNAL = 0.95; EXPRESSED IN ADULT LIVER, SIGNAL = 0.95; EXPRESSED IN FETAL LIVER, SIGNAL = 0.7; EXPRESSED IN BONE MARROW, SIGNAL = 0.73; EST_HUMAN HIT: BG507119.1, EVALUE 8.00e-44; SWISSPROT HIT: O13290, EVALUE 8.30e+00; NT HIT: Z97343.1, EVALUE 5.00e-01
tgatatccagaggccctgacattttaagtggcctgatctcaagcgacttcagacagtgattttttcttcttacccaattctctacacctcactccactgactgtattgtccattattgcgtaaaacactttggcaaattcatacctaaagctctttctactgagtgattaagaactttgggtactttttcctcacagtttttaccctgttgaagatttgctttaacttcaaaagtgatgacaagaaagtatggacaccccttcaggaccaacctgataagtcactggtaaggtcttaatttctccataaagcttcctaatattttctagtattaaggtcttcatatcccgtaacccgctttgcatcacctgcagaaatcctaggcttagctgtttggtagcatctggctgtgtcatttgttctattatttttcgcaggctcccacctagagtcctgttatagtgaaggctggcttccactagtttccattattgcttatgggtctgtccctttcctccagaaa

SEQ ID NO: 3593 - DNA, 512 bp, Homo sapiens
  MAP TO AL138840.1; EXPRESSED IN HELA, SIGNAL = 1.2; EXPRESSED IN FETAL LIVER, SIGNAL = 2.8; EXPRESSED IN BONE MARROW, SIGNAL = 2.9; EXPRESSED IN PLACENTA, SIGNAL = 2.9; EXPRESSED IN ADULT LIVER, SIGNAL = 2.8; EST_HUMAN HIT: BF817215.1, EVALUE 5.00e-39; NT HIT: AB018491.1, EVALUE 3.00e-05; SWISSPROT HIT: P17972, EVALUE 8.20e+00
tgcatttctaacacattcccaggtgatactgctgctgctgctcctgctgctgctgctgctgctcttcctgctgctgctgctgctcctgctgttagttggcccaagagcactgctaatagcgtggctcagtgatcagctcccagccctgtcccttggttcaaatgacttgggccatcctggtcaagtgttcttctctggtccaatcatttatggccaggggatggagttacagggtgtagacacagctgcctgagggccacccccagtgtgtcatgaacacttcagagaaaagaagggcttggtggatacaacagaaggtgtctgcgattccactcctcacaaatgctgcattcaggaatccgagtcttgaacgctgaagttcattctgtagggtttgtctttgagctgccactctgtcccttgggattctctccaccaagattagccttcaagtgagacactgccttcctggctctttgctttctagtccctttaaacaagtaagtagggca

SEQ ID NO: 3594 - DNA, 537 bp, Homo sapiens
  MAP TO AL137798.1; EXPRESSED IN LUNG, SIGNAL = 2.3; EXPRESSED IN PLACENTA, SIGNAL = 2.6; EXPRESSED IN BONE MARROW, SIGNAL = 1.9; EXPRESSED IN HELA, SIGNAL = 1.8; EXPRESSED IN FETAL LIVER, SIGNAL = 2.1; SWISSPROT HIT: P12752, EVALUE 1.50e-01; EST_HUMAN HIT: BI762786.1, EVALUE 2.00e-41; NT HIT: gi16161778, EVALUE 1.00e-41
ggtggcacagaggttaaagcatcaggctgggcaggtggagggcagggcctgcctctgccccaccctggcacccaccctcagctgctgctgctccagctctccggatctctccaacagctgctccagctccgagaacctcttcttgtactggagaatctggggattgggagctgatggtgagccccaggggtgggggcagggcaaagtgaacacgtgggagggaaagagcaggaatgggtggccctgaccttgccctgcagccgctgcacaagctgggcctgccgctgctggccctccaggtaggcctgcagcttgcgccactaggaggcctgctcctcctgcagctgcctccgcaactccacgctctggagtaccagccccctgggctcttgcgtctccagctcaccagattgcagccacagagcctgctccagctgcagggaagggccctgggtgagagtcctgggcctcctgggaaggcaggctcaggcctctgtagggggtggcaggctgggcccagacccacaatgccttgta

SEQ ID NO: 3595 - DNA, 577 bp, Homo sapiens
  MAP TO AC016692.4; EXPRESSED IN HELA, SIGNAL = 3.1; EXPRESSED IN ADULT LIVER, SIGNAL = 2.9; NT HIT: gi16157418, EVALUE 1.00e-108; SWISSPROT HIT: Q01149, EVALUE 7.30e+00; EST_HUMAN HIT: BG470388.1, EVALUE 1.00e-107
tgttggagcagtgtttccaggagactttcctgtagttgatggtgagctgcttcgagatcagagctttgactgcacatgtttaaaatgacagtcctttaattaaaatttcatcctgtaagcataccaggcctttgtggctactataaatatattttaaaagaaaggttacttctaccttgcatcatcatgaacagagtttctgctttctctgtcatctctatagccatttgacagaagctttcaaaagtgagtcagatttttccccccacaattaataaaatttttatatctttaatttttccttctggaaaggaagaggaggctgcaaaatgggcccgggaagaagaagaagcccagcgtcgattagaggagaaccggctgcggatggaagaggaggcagccagactccggcatgaggaagaagaacggaagagaaaggagctggaggtccagcggcagaaggagttaatgcgccagaggcagcagcagcaagaggctctccggaggttgcagcagcagcagcagcaacaacagctggcgcagatgaaggtaaagcccgaggcatcaaccttaggag

SEQ ID NO: 3596 - DNA, 585 bp, Homo sapiens
  MAP TO AC011734.4; EXPRESSED IN FETAL LIVER, SIGNAL = 4.3; EXPRESSED IN HELA, SIGNAL = 4.6; EXPRESSED IN ADULT LIVER, SIGNAL = 7.4; EST_HUMAN HIT: BE512633.1, EVALUE 1.00e-76; NT HIT: AL163227.2, EVALUE 2.00e-71; SWISSPROT HIT: Q61039, EVALUE 4.30e+00
attgttgcttcagagggtggaagacccaagctttgacagcttccatgtggtgttgagcctgcggatgcacagaagtcaagaattgaagtttggaaacctctgcctaggtttcagatttatacggaaatgcctgaatatccaggcagaagtttgctgcagtgacaaggccctcatggagaacctctgctagggcagggcagaaggaaaatgtggggtggaagccccacacagagtccctactcgggcactgcctagtgaagctgtgagaagaaggccaccgtccttcagaccccagaatggtagattcagcgagagcttacactgtatacctggaaaagccacagacactcaacaccagcccatgaaagcagccaggagggaggcagtactcgcaaagccatgagggtgcagcttcccaaaaccgtgggaaccctcttcttgcatcagcatgacttggatgcaagacatggagtcaaaaaatataatttttgagctcaaagatttgattacccagttggatttcaaacttgcatggggcctgtagctgctttgttttggcctatttctcccatttggaacagctgt

SEQ ID NO: 3597 - DNA, 592 bp, Homo sapiens
  MAP TO AL137798.1; EXPRESSED IN BONE MARROW, SIGNAL = 1.9; EXPRESSED IN HELA, SIGNAL = 5.7; EXPRESSED IN FETAL LIVER, SIGNAL = 1.8; EXPRESSED IN ADULT LIVER, SIGNAL = 5.6; EST_HUMAN HIT: BI044957.1, EVALUE 7.00e-94; NT HIT: gi16161787, EVALUE 1.00e-116; SWISSPROT HIT: Q09298, EVALUE 2.60e+00
gctctgagttcaggcacctcgaaccttgtttttgtggtgaaggatcctaaagtgctgtggggagtgatcacatttttcacaacagtaagttaagaatttcagttactgacatccctcagtcctgattaaacctatttgatttcaccagtttttaacccatcatatgtttgggtttcttctccccagtccctggctccacctcttctgccacaaacgtcagcatggtggtatcagctggcccttggtccagcgagaaggcagagacgaacattttagaaatcaacgagaaattgcgcccccagctggcagagaacaaacagcagttcagaaacctcaaagagaaatgttttgtaactcaactggccggcttcctggccaaccgacagaagaaatacagtaagatctataggctcaccatcatgaaagtgatgaatgatgtcctgtcttctctctgagacactaaatgctctctccatcaaaaataatttcatccttcctgtacttctaggaaaacagaaatgggtattttaacattttgttaaagttggaagacagaggtaccaaagtatttagcaactttccatgtttgcaa

SEQ ID NO: 3598 - DNA, 559 bp, Homo sapiens
  MAP TO AC011931.3; EXPRESSED IN PLACENTA, SIGNAL = 1.4; EXPRESSED IN LUNG, SIGNAL = 1.3; EXPRESSED IN ADULT LIVER, SIGNAL = 1.2; EXPRESSED IN HELA, SIGNAL = 1.1; EXPRESSED IN FETAL LIVER, SIGNAL = 1.3; NT HIT: AB011150.1, EVALUE 2.00e-43; SWISSPROT HIT: P30071, EVALUE 1.40e+00; EST_HUMAN HIT: BG706907.1, EVALUE 8.00e-44
gtcaccatttctgcgtcctcatgtaaactaaagtgtaatcaagttttcacaaataggcagttacttctatgaaggatctaaaatgtaagctctgtgtctttagaaagggaaatagtgaatttggtttcttgataaacaaattgtatttcacttgtcaatgagacaaagatgagagaatctgttaggaccctttaaattaatctactgaatgtgattcttttgcagaccacagatgacatccttgtggcctcagcagagtgtcccagcgatgatgaggacattgacccctgtgagccgagctcaggtgggttaggttagtcaactttttttcttacttccttggctttactgtaaatctttgttgcatgttatattccttagaagggccttatattcatgtatagaaggctaccctcctataccatcgttgattgtgagatgaggactcttattttttacataaatttttccacatttattgaaaaaattaaaaacaaaacatgccaagattatgtatttcagaaaaagcagtgggtatagcacacagggcttctacctt

SEQ ID NO: 3599 - DNA, 591 bp, Homo sapiens
  MAP TO AC011881.5; EXPRESSED IN PLACENTA, SIGNAL = 1.1; EXPRESSED IN LUNG, SIGNAL = 1.3; EXPRESSED IN ADULT LIVER, SIGNAL = 1.1; EXPRESSED IN HELA, SIGNAL = 0.64; EXPRESSED IN FETAL LIVER, SIGNAL = 0.58; EST_HUMAN HIT: W74578.1, EVALUE 0.00e+00; NT HIT: AL163202.2, EVALUE 2.00e-74; SWISSPROT HIT: P18175, EVALUE 6.00e-06
aagggaaacattgagaccccagcatgaatgttctggaatcctatgtgagggacaaacattcagaccacggcaggagtgttctggaatcctatgtgaggaacaaacattcagaccacagcaggagtattctggaatcccatatgagggataagcattcagaccctcgtagcagtgttctggaatcctatgtgagggagaagcattcagagcacagcaggagtgctctggaatcctatgttagggacaaacattcagaacctcgtaacattgtgctggaaacctatgtgagggacagacatttagaccctcgcagcagtgttctggaatcccatatgagggtcaaatattcagatcctcgcagcagtgttctggaattctatgtgagtgacaaacattcagactccagcagcagtgttctgtattcctatgtgaaggacaaacattcagaatccaggagcagtgttttgaaatcatacattaagggcaaacatacagaccctagcatcaatgttctagaatcatatgtgagggacatacattcagaccctcgcagcagtgttctggaatcctagatgggggacaaacattcag

SEQ ID NO: 3600 - DNA, 518 bp, Homo sapiens
  MAP TO AC017050.4; EXPRESSED IN HELA, SIGNAL = 1.1; EXPRESSED IN FETAL LIVER, SIGNAL = 0.64; EXPRESSED IN PLACENTA, SIGNAL = 0.77; EXPRESSED IN ADULT LIVER, SIGNAL =   1; EXPRESSED IN BONE MARROW, SIGNAL = 0.84; EST_HUMAN HIT: BI461933.1, EVALUE 0.00e+00; NT HIT: gi14758030, EVALUE 0.00e+00; SWISSPROT HIT: O35682, EVALUE 5.00e-46
tctcggcctccatcatctaccccaccacctacttgcagttcctgtcccacggccgttcccgcgaccacgccatcgccgccatcgtcttctctggcatcgcctgtgtggcttacgccaccgaagtaacctggacccggcccggcccggcgagatcactgactacatggcctccgagctggggctgctgaaggtgctggagaccttcgtggcctgcctcatcttcgtgttcatcaatagcccctacgtgtaccacaaccggccggccctggagtggtgggtggcggtgtacgccctctgcttcgtcctggcggccctcactatcctgctgagcctggggcactgcaccaacatgctgcccatccgcttccccagtttcctgttggggctggccttgctgtccgtcctcctctatgccactgcccttgtcctctggcccctctaccagttcaacgagaagtatggtgtccagccctggcagacgagagatgtgagctgcagcgacagaaacccctaccttg

SEQ ID NO: 3601 - DNA, 572 bp, Homo sapiens
  MAP TO CHR22_173.0; EXPRESSED IN HELA, SIGNAL = 1.1; EXPRESSED IN ADULT LIVER, SIGNAL = 2.8; EXPRESSED IN FETAL LIVER, SIGNAL = 2.4; EXPRESSED IN BONE MARROW, SIGNAL = 2.8; EST_HUMAN HIT: AI239531.1, EVALUE 3.00e-03; NT HIT: S59821.1, EVALUE 3.50e-02; SWISSPROT HIT: Q9XYD3, EVALUE 4.20e+00
tcagaagctgtgtgaccctgggtgagtcattaacctctctgggccttataccactctaggccatcctcactgctgcccagtggggctatcgctcctgtggacacagcccagctcatcagcccacagtagccccgggaatgcttcctcattgcacagccttctggaaggaatctttggcaaatgtcaactcttgttctgctctcacggcaaacacgccttggtcacatacccgtgagtgcaggaaactgttcctgtgtggccactgactcctgccacggagagcactcgcctgccctgatgcgggggtcatgtgtcctcctaggcactctgcaggtcaccttgcccctcatggccagttctgtggaccccaggctcaggcccaccagtgctcccctcactcagtggcaacttgtggcccctcacactaggccttccataagctggaactatagcaccttcggccagggcctgggctgggggctcagaactgagtcaggtgtgggccctgcccttgagggctcgaagcgggtaggggagccacaccaggaccctgaaacaagagcagcagaccc

SEQ ID NO: 3602 - DNA, 582 bp, Homo sapiens
  MAP TO AL121939.3; EXPRESSED IN HELA, SIGNAL = 1.2; EXPRESSED IN HEART, SIGNAL = 1.3; EXPRESSED IN PLACENTA, SIGNAL = 1.5; EXPRESSED IN LUNG, SIGNAL = 1.5; EXPRESSED IN ADULT LIVER, SIGNAL = 1.2; EXPRESSED IN FETAL LIVER, SIGNAL = 1.2; EXPRESSED IN BONE MARROW, SIGNAL = 1.5; SWISSPROT HIT: Q61548, EVALUE 5.00e-03; NT HIT: gi7662227, EVALUE 2.00e-80; EST_HUMAN HIT: AW961216.1, EVALUE 4.00e-80
tagccagtgagtcatgcagctgaattgaagcccagttcattcctgtacattatacagatttttttccatccttgttcatgttcattagtattttcatactttatgagtagacatatgtcgacatgttcttcttggtgttacagtcatgaaaagtgtgaattacttgccttcttttataagattttatattcacttgtttccatagtatcaaaagagagttttactttaatttcgcatatgatctttttttgttttcaattattctgaacctagtctatttgatttccagtgtttgatggtctaggtgatcttttgatgccaaccatggcaccagctgggcagcctgcacctgtctcaatggtaccacccagtcctgcaatggcagccagcaaagcccttggaagtgatcttgattcatctcttgccagcttagtaggcagtgagtaatctagttttttttttttttctttaactgaagcatatgtgaattgttttttgtttctctctctctctctctctcatctcatatgttttgtttctggactctcttatgggtgagtatggcagggagggaatagaaat

SEQ ID NO: 3603 - DNA, 581 bp, Homo sapiens
  MAP TO AL132875.5; EXPRESSED IN HELA, SIGNAL = 1.1; EXPRESSED IN FETAL LIVER, SIGNAL = 0.7; EXPRESSED IN BONE MARROW, SIGNAL = 0.7; EXPRESSED IN LUNG, SIGNAL = 0.79; NT HIT: AF279650.1, EVALUE 0.00e+00; EST_HUMAN HIT: BG742712.1, EVALUE 1.00e-102; SWISSPROT HIT: Q12599, EVALUE 7.40e+00
ttgttgggactcaaaggacagtgatccgtatttagtcaaattaggaaattaagttgaaacatcttgattcctaaaaagtgtattttataaaacatttactgattaatgaattttatggtattttgttctctctatagataagcgtgtggaaaattggcctctgatgcagtctccttggcctacactaagtataagcactctttatctcctgtttgtgtggctgggtccaaaatggatgaaggaccgagaaccttttcagatgcgtctagtgctcattatctataattttgggatggttttgcttaacctctttatcttcagagaggtatgtttttaagatcactttaataattttccaaggttattggaaatttaaaaatgagaatgtgtaaaaccatcattgtaatattttacccagacataactgttagctactctaaaagtacatttttgacatttttcacttttgaataacaaaaatattaaacatgaggtataggaaagttgtttaaagtggaattttgaataagaccaactggattctaaagtaacccttattagctgttctggcattgaaagtt

SEQ ID NO: 3604 - DNA, 551 bp, Homo sapiens
  MAP TO CHR22_126.0; EXPRESSED IN HELA, SIGNAL = 1.2; EXPRESSED IN FETAL LIVER, SIGNAL = 1.1; EXPRESSED IN PLACENTA, SIGNAL = 1.2; EXPRESSED IN LUNG, SIGNAL = 1.3; EXPRESSED IN BONE MARROW, SIGNAL =   1; EXPRESSED IN ADULT LIVER, SIGNAL = 1.5; SWISSPROT HIT: Q9Z0H3, EVALUE 1.00e-25; NT HIT: Y17123.1, EVALUE 0.00e+00; EST_HUMAN HIT: BI225835.1, EVALUE 4.00e-89
cttccactcccagtttccaggaaggccacccccagtgccctggttgtcctctcctgcatccggagatgtttggcttcaaagaagaaggggtgagggaggccggtccatgcccaagcatggtgcaatctcttggcatcccttccctctcctgatttcagagaagttgatgacgcctgagatgttttcagaaatcctctgtgacgatctggatttgaacccgctgacgtttgtgccagccatcgcctctgccatcagacagcagatcgagtcctaccccacggacagcatcctggaggaccagtcagaccagcgcgtcatcatcaaggtaggtgacttctcacccagcactggagccttcctggccctcagggtgggtgtcatcatggagcactgagggtacaccaaggcctcagcagaagcccgtctttgggttccatatcatctggaaagtcataacacctggctttgctccctgcaatcccccaggaagggcataggctgagttctcatagtaaagtgttatattccggacacattcagggggtgtctct

SEQ ID NO: 3605 - DNA, 600 bp, Homo sapiens
  MAP TO AL160192.1; EXPRESSED IN FETAL LIVER, SIGNAL =  44; EXPRESSED IN PLACENTA, SIGNAL =  27; EXPRESSED IN ADULT LIVER, SIGNAL =  47; EXPRESSED IN LUNG, SIGNAL =  43; EXPRESSED IN HELA, SIGNAL =  20; NT HIT: X62245.1, EVALUE 0.00e+00; EST_HUMAN HIT: AL559675.1, EVALUE 0.00e+00; SWISSPROT HIT: P10126, EVALUE 6.00e-61
tttgctccagtcaacattgcaactaaagatgtgttgaaatgtaccatgaagctttgagtgaagctcttcctagggacaatgtaagcttcaatgtcaaaaaggtgcctgtcaaagatgttcattgtggcaacactgctggtaacagcaaaaatgacccaccagtggaagaagctggcttcactgcccaggtaactgtcctgaaccatccaggccaaatcagtgttggttatgcccctgtaatggattaacacacaactcacattgcttgcaactttgttgaactgaaggaaaagatggatcaccattttggtaaggagctggaagatgatcctaaattcttgaagtctggtgatgctgctatttttggtatagttcctggcaagcctatgtgtgttgagagcttctctcacaatactcctctgggttgttttgttgtttgtgatataagatagacagttgctatggatgtcatcaaagcaggggacaagaagcctgctggagctggcaaggtcaccaagcctgcccagaaagctcggaaggttacatgaatattatccctaatacctgccatgccagtcttcaccctttatgcctgacgtt

SEQ ID NO: 3606 - DNA, 527 bp, Homo sapiens
  MAP TO CHR22_152.0; EXPRESSED IN HELA, SIGNAL = 0.89; EXPRESSED IN PLACENTA, SIGNAL = 0.35; EST_HUMAN HIT: AW195321.1, EVALUE 0.00e+00; SWISSPROT HIT: P52179, EVALUE 1.70e+00; NT HIT: AB038980.1, EVALUE 5.00e-04
tttcttgtaggcttgcgctcaaatccagccacttactagctgtgtgtccttgggcacattgcttaatgtctcagagccttggttttctctacaacgaaatgaaaataaggacacatacttcacaggagtgattgttaggatgaaaggggatgattacgtaaaacagtgcaagaactgctacacaggaggtcctccataaatagtactgtcatgacacacacacccgaaaggatagtctttattcagttagatgccacattttattaaagtcttgtgtggacaagaagtgaaacctcagaggaatttatgaagaataattggaggcacttccttgtgacttggcttcatccggaccggatgacttctgggtgccagcaacagttccccatttccattcacgtttccccacatcgttcatgccaaagagatgggtgccaagaggccatccgtcttcatcctggacatagaatgagacgggaactcactcttgaaggacttttgaagtctcagagaagaaacggagccac

SEQ ID NO: 3607 - DNA, 585 bp, Homo sapiens
  MAP TO AC022525.3; EXPRESSED IN PLACENTA, SIGNAL = 0.7; EXPRESSED IN LUNG, SIGNAL = 0.71; EXPRESSED IN HELA, SIGNAL = 0.55; EXPRESSED IN ADULT LIVER, SIGNAL = 0.67; EXPRESSED IN FETAL LIVER, SIGNAL = 0.63; EXPRESSED IN BONE MARROW, SIGNAL = 0.73; SWISSPROT HIT: P26570, EVALUE 6.50e-01; NT HIT: AL163280.2, EVALUE 7.00e-19; EST_HUMAN HIT: T56184.1, EVALUE 5.00e-30
gcatctgatgatgaatccccatgttgtcagtatggtacatacacacaactgtgtgtagcattccccagctgaagatcttattttccctttctagtgaatacatctccagatttttaggggaggagggacatgcagcagtgaaacatcagatatatatttggttctcagacatattctacctaagctgccagagttcagaaccactcccttcgtcttccttctaaaagtaatggatactttcaatgattctgcaagtgtaaattgggtttgtccctacccttccctactgatggcagtttccattcattcgtttatagtttccgaaactgtgccctttactgctcctgatttccccatccttgtggtttatatttttaagaatatacacccctttgctatcatttttgtaagtatgtcccagtaatctatcttaatgaaagactaaaatggcatatttttaatatttacttatttattatttttatttttccataagttattgggatacaggtggtatttggttatatgagtaagttctttagtggtgatttgtgagattttagtgcactcgtcacccaagcagta

SEQ ID NO: 3608 - DNA, 561 bp, Homo sapiens
  MAP TO AL137007.4; EXPRESSED IN FETAL LIVER, SIGNAL = 3.8; EXPRESSED IN PLACENTA, SIGNAL = 5.1; EXPRESSED IN ADULT LIVER, SIGNAL = 5.2; EXPRESSED IN BONE MARROW, SIGNAL = 4.2; EXPRESSED IN HEART, SIGNAL = 3.3; EXPRESSED IN LUNG, SIGNAL = 5.1; EXPRESSED IN HELA, SIGNAL = 2.1; SWISSPROT HIT: P11369, EVALUE 4.00e-03; NT HIT: gi14861872, EVALUE 2.00e-03; EST_HUMAN HIT: AV732634.1, EVALUE 2.00e-04
tcctgttccattggttgatgtgtctctctttttatgctagtaccatgctgtttttattataattgctttataatgtgctttgtaataagaaaacgtaatggtgtcagttttgttattgccacttaggatttttttcctattcagggtattttgtagttccatccaaatttaagataatttttttattttcatgaaaaacaacatgactaattggtatttatgctgtttcaagtatggttcaatgtacacaaacaataaatgcaggataccaattaaataaaattaagaaaaattatatgaaatcatctcaatagatgccaaaaaacctcatgttaaaattcaactgcccataatgatcaaaagaaaactttcaaaagattaagcataaagggaatgtacctcaacacagttaaggtcaaatataacaaacatatagctaacatcattctcaatgatgaaatgttgaaagctttttctctaagatcaaggataagcatgtccatcctcaccacttctttttaacattgtattggaagatgtagccagagcaattaggcaaaa

SEQ ID NO: 3609 - DNA, 500 bp, Homo sapiens
  MAP TO CHR22_75.0; EXPRESSED IN HELA, SIGNAL = 5.7; EST_HUMAN HIT: BG752360.1, EVALUE 0.00e+00; SWISSPROT HIT: Q9Y512, EVALUE 8.00e-19; NT HIT: gi7661541, EVALUE 7.00e-68
tcaggtttgaatgcaggatgtgagcactcagcagcggcatgttttaaagaatgaaagtgattacaaatgaaagactagatctgtagttagcatcttccttctgtttttatgaaagtcccttagctagcatagtctttatccaatccaaagttctcattccttcaatgtagaccactgctattttttttttttcccctcctaggtacttggcctcaagcttcctaatcttcttggtcgtgcagaaaaggtgacctttcagttttcctatggaacaaaagaaacttcgtatggcctgtccttcttcaaaccacggcccggaaacttcgaaagaaagtaggaagcccaacagatcattgagtacactggcctgatagaaaagttaaaataggtggcttatttgtgaaaagaaccatgacagaatcagctgccacttctgcagtgaccacatgctgtagatttcctcttgaagatgagccctacgggcgtagtgttaagtctgt

SEQ ID NO: 3610 - DNA, 598 bp, Homo sapiens
  MAP TO AL136372.1; EXPRESSED IN ADULT LIVER, SIGNAL = 0.74; EXPRESSED IN LUNG, SIGNAL = 0.59; EXPRESSED IN HELA, SIGNAL = 0.53; SWISSPROT HIT: P08480, EVALUE 5.80e+00; NT HIT: S66757.1, EVALUE 2.00e-03; EST_HUMAN HIT: AV646301.1, EVALUE 9.00e-41
tctttggttgactggggaaggacatatattggagcctgcctgagctgtcagctgcatgaccccaagaggtggcagctacaagagatagatgagaagcccgccacagctagctccccttcccaccccaacataagaaaaacagggtatgacaccaattcagaggggagagagcatgcagcagcagggaaagggactgcaggtgctgataacaaagtgctctcaaggcaagttgctggccttacctcttttacttcagtctgaagctcaccaaatgacttctttccacagcctgccattctggtcgagttgctggcttcctggtcatccaggtcttggggctaattgtagaaggaaagcagctgagtcagtgaatagccctgatcacattctacaagatgaacctgtgcctagctacctactgaaatgaatgaaatagtcctcacctgtgcagcttcatttgtttttaaattctataaaacatatttataaaaatcaattaaaattaatgtaaagcttaccaaatcatcataaagtaaagattcttatcaccactggccaggccaaagagtataacttcgcccttccatatgctccattc

SEQ ID NO: 3611 - DNA, 599 bp, Homo sapiens
  MAP TO CHR22_78.0; EXPRESSED IN HELA, SIGNAL =   1; NT HIT: M63889.1, EVALUE 5.70e-01; EST_HUMAN HIT: BF246900.1, EVALUE 2.10e-01
tctccacctccatcatctccatctccatcactttcaccacctgcgttatctccatcatcttcatcatctctatctccgtcaccttaatcatcatctttttttatctccatctctatcacctccatcatcttcatcatctccatcatttccatcaccatctccattatcttcatcacctccatttctattgcctccatcacttccaccttcattacctctgccatttcctccatcatcatcatctctatcacctccgtcaccatctccatcatctccttctttatctccatcactatcaccttcatcacctcaatcatcttcatcacctccatttctatcacctccatccctctatcctcatcttcatctccatctccattatcttcatcaccatctctatcacctccatcatgtccatcacaatctctagcacctccatctctgtatttatttataccggttgtttctactctgattgaaccttcactgatatgagtatcacttatttgtgattagctaatacatagaaaaccaaataatgcatacagagaagggaggccgtcctgaccagccctgacccgttttcctcctcagaagca

SEQ ID NO: 3612 - DNA, 543 bp, Homo sapiens
  MAP TO CHR22_144.0; EXPRESSED IN ADULT LIVER, SIGNAL = 0.31; EXPRESSED IN HELA, SIGNAL =   1; EST_HUMAN HIT: AI446528.1, EVALUE 7.60e-01
aagcgtctgcttagaaagcgccagagaggaattcaaggcagcggctgaaatctagtggcccaagcggagtcactcagcgtaaagacaatctgtttatgcaccatgtagaaattgcttcattgagtcgcgagctaatttcacataataatccagattcctgctcctttagaaggagaagaggaagaggaagaggaagaggaaggaggaggcggaggagaagaagaagaaaagatgaagaggaagaaaggagaaagagaatgaggagaaggaggaggagaagaagaaggaggaggaggaagaggagaaggagaagaagaagaaagaggaggaggagaaggaagagaaggagaagaaggagaagaggaagggagaagaagggaaaaggagaataaggaagaagaaagaagaaagagaaagaagaggaagaaggagaaggagaaggagaaaaagagaaagaaagaaagaaaaagaaagaaagaaagaaagaaagaaagaaagaaagaaagaaagagaaagagagaaagaaagaaaagccccgaaaac

SEQ ID NO: 3613 - DNA, 563 bp, Homo sapiens
  MAP TO AL138889.2; EXPRESSED IN HELA, SIGNAL = 3.2; EXPRESSED IN FETAL LIVER, SIGNAL = 1.9; EXPRESSED IN HEART, SIGNAL = 1.1; EXPRESSED IN LUNG, SIGNAL = 1.3; EXPRESSED IN BONE MARROW, SIGNAL = 1.9; EXPRESSED IN PLACENTA, SIGNAL = 1.1; EXPRESSED IN ADULT LIVER, SIGNAL = 1.3; EST_HUMAN HIT: AI818886.1, EVALUE 3.10e+00; SWISSPROT HIT: P20127, EVALUE 8.10e-01; NT HIT: AE008683.1, EVALUE 8.40e+00
gcaccttttcttcttggctggtccctccctgtcacccatatcctccatcctgtgtcctcggggccttggtgtcatatgtccagcagcccacctggccatttccagcacgcagttctaactcccgacatcttcttgtattagatctctgtcctccctgatgtttgctatatctcccaatttagtatcatctgcaaatttaattaacatgtcgttgcctccctgttccagaccgttaatgaagatgttatggcggtacctggcaaacaatattttcaaggtcatgaggagaggagagctaaactgctaatacctctgcctgctgtgggagaaagaagcaatcaagtgctcacatgtggtttgagccatttcctctgagttttgtcaacttcctttcccagattggggttaggtttctacgcctcccctctgcctcggctgctgcatatccgtggcaattcccacttggaaaatgaagaacatcagattatgccttccttttatttttgtctggtttctagcaggagagaaacagccactaattgagcatttgtagggagagccaa

SEQ ID NO: 3614 - DNA, 527 bp, Homo sapiens
  MAP TO U82695.2; EXPRESSED IN PLACENTA, SIGNAL = 0.96; EXPRESSED IN HELA, SIGNAL = 0.7; EXPRESSED IN ADULT LIVER, SIGNAL = 1.1; EXPRESSED IN LUNG, SIGNAL = 1.1; EXPRESSED IN BONE MARROW, SIGNAL =   1; NT HIT: U82695.2, EVALUE 0.00e+00; EST_HUMAN HIT: BE254937.1, EVALUE 0.00e+00; SWISSPROT HIT: Q16720, EVALUE 2.00e-41
ttgagaacttttgcccatccctggcctcacaggtggctctggctgggaaactgcctgtagctaaggccgaccttcctctgctccctgccgcccacaccctaacaatgtggtgaccacgagggggcagagctggggctccaggggcagcatggagggtggtctcaggcccccagtgcctgctagccctcgtcatcttgcagcctcctgagaaggaaggcgccctcccacgccaggtgggcaataagacggagtgcgccctgctgggcttcgtcttggacctgaagcgggacttccagcccgtgcgcgagcagatcccggaagacaagctttacaaagtgtacaccttcaactcggtccgcaagtccatgagcacagtcatccgcatgcccgacggtggcttccgcctcttcagcaagggggcctcagagatcctcttgaaaaagtgagtgagcagcagggaggtgccggggtacgcacggagtttctgattctattgtcgtggtaaaagaggccgaacgtaaaattca

SEQ ID NO: 3615 - DNA, 550 bp, Homo sapiens
  MAP TO AL133547.3; EXPRESSED IN BONE MARROW, SIGNAL = 4.4; EXPRESSED IN PLACENTA, SIGNAL = 2.4; EXPRESSED IN ADULT LIVER, SIGNAL = 2.9; EXPRESSED IN HELA, SIGNAL =   3; EXPRESSED IN LUNG, SIGNAL =   3; EXPRESSED IN FETAL LIVER, SIGNAL = 3.1; NT HIT: gi13651005, EVALUE 1.00e-116; EST_HUMAN HIT: BE881303.1, EVALUE 1.00e-115; SWISSPROT HIT: P09602, EVALUE 4.00e-18
gaagattggaccaacaacaggagtaactgaaggtcaaaaccaagatattttgaagaatttatttcacatgtacaagatgagagtggggggcggggtatgtgtatgtgtgcatgtatatgagtgcatgagcagacatgtgatgggaggaaggacataaacctcactggaactaatgtagctgatagggaaaacagccggggctctcattggacacattcttaatacaagaatacaatttttaagtacatcaccactgccagcatgcccaagagaaaggctgaaggggatgttaaaggagataaagtcacgatgaaggatgaaccacagagaagatcatgaggttgtctactaaacctgctcctccaaagccagagctcaagcctaaaaacgcccatgcaaagacaggagagaagatacccatagggaaaaagggaaaagctgatgctggcaaggaggggaataaccctgcagaaaatggagacgccaaaacagaccaggcacagaaagccgaaggtgctggagatgccaagtgaagtgtgtgcatttttga

SEQ ID NO: 3616 - DNA, 565 bp, Homo sapiens
  MAP TO AC015957.3; EXPRESSED IN HELA, SIGNAL = 0.54; EXPRESSED IN FETAL LIVER, SIGNAL = 0.57; EXPRESSED IN LUNG, SIGNAL = 1.4; EXPRESSED IN BONE MARROW, SIGNAL = 0.58; SWISSPROT HIT: P28827, EVALUE 3.00e-27; NT HIT: gi15305591, EVALUE 2.00e-96; EST_HUMAN HIT: BI059711.1, EVALUE 3.00e-96
tgccaagagcacattcattgttttttgtgcaactaaatcaacatagataaaacacatttttcaaaaatattgttcacgtgcaaaatttgtacttaaaatgcaatccatcaaaatagcctgtcatcaaaccactgctcagaaacagacaagggtaagtttgagctttaaagggataatgaactaacaacacctaacatatctactttagaagaatattctggtataaaaacacattaaatacctttaactaccaactctgcatagtttgatattccaacacctccttcagtgcgaatcatgcagcggtactttccagcatctcgtttggtggtattcacaacattaaatgaagcaatgaagcgtcgggagctggtcaccttgatttccttcagaggagcatctcgcacatcaatgccctgtatcaagtggggtggggaggacaaaaagaagcaatataagctgtcagagcaaaacagtcagacacccaatggtatattatccatgctgttttcatgcagaccttggtgcagttgcttattacccatgggcagttgtaccaggagaa

SEQ ID NO: 3617 - DNA, 555 bp, Homo sapiens
  MAP TO CHR22_144.0; EXPRESSED IN HELA, SIGNAL = 4.9; EXPRESSED IN FETAL LIVER, SIGNAL = 1.6; EXPRESSED IN HEART, SIGNAL = 1.3; EXPRESSED IN ADULT LIVER, SIGNAL = 1.6; EXPRESSED IN PLACENTA, SIGNAL = 1.3; EXPRESSED IN BONE MARROW, SIGNAL = 1.5; EXPRESSED IN LUNG, SIGNAL = 1.5; SWISSPROT HIT: P14784, EVALUE 2.00e-27; NT HIT: gi14778673, EVALUE 3.00e-89; EST_HUMAN HIT: BI911897.1, EVALUE 4.00e-61
ttggagatttcagggtggagaagagtgaaaacagcctttcgacccctccccaactcacaaggcccatggcaagccccgtcccctcactgaacccctgttcctgtctgaaaagcgagccccctgcagggttacagcaagtgagggatggagctgactgctataccctcaccccaggcagggagagaatggagcagctcctcctccagccgccccctcctgcctgagccccctctcacccttgccgcccaccagtacctgcaggctttgtcctgaaggccaggggctggctccaggggctccaggtcgtgaactcgccttgcagaggcttgacccgcacctgaaactcatactgggtgtctggggtgagcgtctccaggcagatccattcctgcttctgcttgagagtcagcaggggggcctcctgggtcggagacaggactgtcagcgcccacctcacctcccatggcagggccaggaggctgagcatcacagaacccccccccaacccctgccagctgcacccccacttccttgccacccaaagctccctcacta

SEQ ID NO: 3618 - DNA, 517 bp, Homo sapiens
  MAP TO AL133500.2; EXPRESSED IN HELA, SIGNAL = 0.97; EXPRESSED IN HEART, SIGNAL = 1.9; EXPRESSED IN FETAL LIVER, SIGNAL =   2; EXPRESSED IN PLACENTA, SIGNAL = 2.1; EXPRESSED IN LUNG, SIGNAL = 2.1; EXPRESSED IN ADULT LIVER, SIGNAL = 1.9; EXPRESSED IN BONE MARROW, SIGNAL = 2.2; NT HIT: AJ271735.1, EVALUE 8.00e-06; EST_HUMAN HIT: BG979557.1, EVALUE 8.00e-07
gctccatcaaaactgctcttgtcaaggctacccatgactacactgttgctaaatccaatggtcaattctcagttctcatcttacttgatttctcagcagcatatgacacagttggccactccctcttccttgaaacactttcttcacaagaggacaacacactcttctaattttcctcttacctcattggttattctctctcagtcttctttgctagttcttcctcatttctccaacattttaatgttggactgtcctagggatcagtctctagatatcttctcttctcttgctatacatacttctttggtgatctcatccatactcatagttttaaagtctacccatatattaactcccaattttgtaatgctagtctaacttaccatcaggatcaatctatccatccatccacattcatttatcttttttccttctacttacttgacatttccaactcaacatgtccaaactgaactctttatcatctgaaactgcacctcccacagcattctct

SEQ ID NO: 3619 - DNA, 539 bp, Homo sapiens
  MAP TO AC006477.3; EXPRESSED IN HELA, SIGNAL =  38; EXPRESSED IN FETAL LIVER, SIGNAL = 4.8; EST_HUMAN HIT: BI085169.1, EVALUE 0.00e+00; SWISSPROT HIT: P32429, EVALUE 1.00e-48; NT HIT: gi4506660, EVALUE 0.00e+00
ggcaggaaaacagtcagctcaatgggatccatgtcgtgtgcagtcaccaccagcagagctttcttgttatccacaaaggtggtgatggtgttaactcctgctcgaaagacaggtggtctcttaatggggaggtcccctttgcccacaactctgcctgggccaacagcctccgcttcttctcttgctttgtctctggtctgtatttgtgggccagcttaagcagctgagtagctgtttggccttccagggcctgggtgaactggttaatcgcaggaggcactttcagctgcttatagagtatggatctctgccattgcaacctgatatagcggggccatttcacaaagcaggtgaggtctcttttgggctggatgtcctgtccaatgccaaaattcttaggccttttctcaaacaggggattcaccactttcttggcctcctgcttcttcacaaaagcaggggccagagccaacttcttccccttggcctcctttcctttcggcatcttgggcgacgggaggcgcacacttgttgtttta

SEQ ID NO: 3620 - DNA, 541 bp, Homo sapiens
  MAP TO AL137070.3; EXPRESSED IN ADULT LIVER, SIGNAL = 6.5; EXPRESSED IN BONE MARROW, SIGNAL =   5; EXPRESSED IN HELA, SIGNAL = 3.4; EXPRESSED IN FETAL LIVER, SIGNAL =   4; NT HIT: L78810.1, EVALUE 2.00e-65; EST_HUMAN HIT: BE167244.1, EVALUE 4.00e-61; SWISSPROT HIT: Q64318, EVALUE 3.90e+00
aaacatgaagctgcagaccctagtggtgagtgttacagttcttaaagatggtgtgtctggagtttgttctttctgatgttcggaagtgttcggagtttcttccttctggtgggtttgtggtctcgctggcttcaggagtgaagctgcagacctttgcggtgagtgttacagctcttaaggcagcgtgtctggagttattcattcctctcggtgggttcctggtctcattggcctcaggagtgaagctgcagaccttcccagtggttgtcacagctcataaaggcagtgtggacccaaagagtgtgcagcaagatttactgcaaacagcgaaaacacaaaccttccacaccatggaaacggacccaagccggttatcactgtcccttctggcagcctgcttttactccctcacctgaccccacccacatcctgctgattggtccattttgcagagagctgattggcctgttttgacagggtgctgattggtgtgtttacaaaccttgagctagacacagagtgctgattggcgcatatacaa

SEQ ID NO: 3621 - DNA, 574 bp, Homo sapiens
  MAP TO AC005627.2; EXPRESSED IN HELA, SIGNAL = 3.3; EXPRESSED IN FETAL LIVER, SIGNAL = 2.1; SWISSPROT HIT: P22736, EVALUE 9.60e-02; NT HIT: gi14741339, EVALUE 0.00e+00; EST_HUMAN HIT: BG994496.1, EVALUE 0.00e+00
ctggcctctctacatccagcttatgcctcacggtggcctctccaggcccaactcctgtcccaggacgtcatctccgggcccaaaacttactcaagtcagactctctagtcccaactgctgcctcctggtggcctatgaaggcccaaaatctcctcaagttggcctctccaggcccagctcctgcctcctgtcagcgtctagaggcccaacctctgcctcatgggggcttctccaggcccacctcttcctcttggctgggtctacaggcacaactgctgcctcacaacagccttttttggcccagttcctgtccagctcatggcggccaatgtaggcccaaaacttcctcaagtcaaactctccaggcccaccttctgcttcccggtggcatgaaccggcccagctttgacttgagaacagcctctgcaggccctgctcttgcctcccaggggctttttccaggcccagctcttgcctcatggcagctgccccaggccgaatttctgcctgcctgccagcagcctcaacaggcacagctcctccctcacagtggcccatttaggcccaactcatg

SEQ ID NO: 3622 - DNA, 591 bp, Homo sapiens
  MAP TO CHR22_165.0; EXPRESSED IN HEART, SIGNAL = 3.6; EXPRESSED IN FETAL LIVER, SIGNAL =   4; EXPRESSED IN PLACENTA, SIGNAL = 4.3; EXPRESSED IN ADULT LIVER, SIGNAL = 4.4; EXPRESSED IN BONE MARROW, SIGNAL = 3.8; EXPRESSED IN LUNG, SIGNAL = 4.2; EXPRESSED IN HELA, SIGNAL = 2.4; NT HIT: AF163864.1, EVALUE 2.00e-07; EST_HUMAN HIT: AA705053.1, EVALUE 2.00e-07
caatgcatgataatcgcagcatagaaaatttaataatttcttggttatcaaaggatctggtttctttttattttgcagtactttgaatttgtcactttattttcaccatataaatatggctttcatattacacatatgttagttctttagattatgtcccgcatatagtttgtgctctattttgttgttttttattttgttattattttttatctctgcttcaatttagttgttttccattttcctgatggtaagtccactagtttgtcttctgctgtgtttactttgctatattctaagagtcttttattttccagtgctagattatcagcttggtttttactctgattataattctctgttcaaatatttcaatttcatcaactttgtccagcagttttcctattttattttccgtatttatcacaattaattggaattccttgtctgctaccttaaactctggatcatctcttggtctatcttcattgacttttaaattttttcatttattttttattttatgttttatttaaatttttttaggcatgaagtttcattatgttgcccaggctgcacttaaactcctgg

SEQ ID NO: 3623 - DNA, 514 bp, Homo sapiens
  MAP TO AC021010.3; EXPRESSED IN BONE MARROW, SIGNAL =   1; EXPRESSED IN LUNG, SIGNAL = 0.67; EXPRESSED IN ADULT LIVER, SIGNAL = 0.85; EXPRESSED IN HELA, SIGNAL = 0.74; EXPRESSED IN FETAL LIVER, SIGNAL = 0.77; SWISSPROT HIT: P38110, EVALUE 6.20e+00; NT HIT: AL163201.2, EVALUE 1.90e+00; EST_HUMAN HIT: BE733786.1, EVALUE 7.20e-01
aagaaacataagggtggctcctatgtactgtatgttcaatccaggataatcaggataatcaggttaaatcaggttgaatacccccagattcaaattgagatgactgaaagtaatatatcttcaattagtattgtatctccttaagtattatgagggttctcagtatacaatagaatattttggagtaaatacccaactgactttagcgttaggactatggatacttattatctcctataacaatcagtctggtagcaaatatttccagaattcacggatttagtagtgtcaatgttgaggctactagtcagcttccttccaatttcactggtttttctatccatgatctcaagatagcagttacagcatccaccatcactggctctgtgcaagggccaaaggcaagaatatttgtgtcatcttttccaattttatttactagggacaataacatgcttattctatagtagtctccaggatgtttcctctcctttcgtttatcaggtttgtggca

SEQ ID NO: 3624 - DNA, 600 bp, Homo sapiens
  MAP TO AJ239319.2; EXPRESSED IN HELA, SIGNAL = 1.4; EXPRESSED IN FETAL LIVER, SIGNAL = 2.8; EXPRESSED IN HEART, SIGNAL = 2.4; EXPRESSED IN LUNG, SIGNAL = 2.8; EXPRESSED IN BONE MARROW, SIGNAL = 2.6; EXPRESSED IN PLACENTA, SIGNAL = 2.7; EXPRESSED IN ADULT LIVER, SIGNAL = 3.1; EST_HUMAN HIT: BI911171.1, EVALUE 0.00e+00; SWISSPROT HIT: P49682, EVALUE 3.00e-75; NT HIT: U32674.1, EVALUE 0.00e+00
gccgacaggaagatgaagtctgggagggcgaaaagcaggcagagcccccagacagccaggcaggtgagggtcacgcgggccgggggcccccggcggtagagctgggtggcatgaactatgttcaggtagcggtcaaagctgatgcaggccagcaggagggctcctgcgtagaagttgatgttgaagagggcacctgccactttgcagaggccagagccaaagacccactggacggcagcgtccactgcccagagcggcagtgtcagcaccagcagcgtgtctgctacagctaggtggagcaggaaggtgtcggtgctgctcagggctgtccgccggctcagcagcacggctgccaccgcgccgttgcccagcagccccagcagaaagaggaggctgtagagggctggcaggaaggcccggtcgaagttcaggctgaagtcctgtgggcagggcggggaggtacagcacgagtcactctcgttttctccatagtcataggaagagctgaagttctccaggagggcggcaacctcggcgtcatttagcacttggtggtcactcacctgtgagggcgggaacggggaggaaggggctgtgtaa

SEQ ID NO: 3625 - DNA, 515 bp, Homo sapiens
  MAP TO AL031602.14; EXPRESSED IN HELA, SIGNAL = 0.69; EXPRESSED IN HEART, SIGNAL = 1.4; EXPRESSED IN FETAL LIVER, SIGNAL = 0.86; EXPRESSED IN BONE MARROW, SIGNAL = 0.94; EXPRESSED IN PLACENTA, SIGNAL = 1.1; EXPRESSED IN LUNG, SIGNAL =   1; EXPRESSED IN ADULT LIVER, SIGNAL = 1.5; SWISSPROT HIT: P97680, EVALUE 2.80e+00; NT HIT: D16241.1, EVALUE 3.10e-02
tactgaaggcagagggatgcaaaggcaaagatcctaagatggaaaccacttgggtgtgttgaaagaaaaagagagacagcagtgtggccgaagtgtggtaattaaagaggggactggagggctacgatatgagagaggtgggtgggagccagagcatgctggaaattgtgggccttggtgaagacttacagagcccagtaaaagcaggcattgatatgacttgattgatgtttttgaaaaatcactctggctgctacatggaaaatgaattgtagaggtggaggtagaggtaccagttaggaggctgctggatgaagggagtgatgacggaaatggagagaagctgtttgatttcataggtattttggaactagaacagcaggacttgcaggtggatagaatgtaaagaacgagaaaaagggaggaatcactaatggcctttaggcctttggcttgagcaactatatagatgatagtgccaattactgaaaagaggaagaatgaattcaggggca

SEQ ID NO: 3626 - DNA, 501 bp, Homo sapiens
  MAP TO CHR22_166.0; EXPRESSED IN PLACENTA, SIGNAL = 0.67; EXPRESSED IN ADULT LIVER, SIGNAL = 1.6; EXPRESSED IN FETAL LIVER, SIGNAL = 1.1; EXPRESSED IN LUNG, SIGNAL = 0.76; EXPRESSED IN BONE MARROW, SIGNAL = 0.63; EXPRESSED IN HELA, SIGNAL = 0.86; EST_HUMAN HIT: R51048.1, EVALUE 7.00e-01; SWISSPROT HIT: O08530, EVALUE 1.10e-01; NT HIT: AE003930.1, EVALUE 2.00e-03
gggttcctctttctgaggatgaatctttaactgagacaaagtcataaaacatgagacatttgttcccttatgtcaacattgaaattgctcacttaactttagatcagctcaccaacactgtgtttctcagacactcttgctagcatcttagttatctcatcagaaagcattttggcagctctgtcttgtaaagctgcttctgaaaagcactaaattaaatgtaatgtgaagttggatttctgtggcatccttcccattcaccttccatactcatacccataagcaatggactggttttgtgtgtcccttttgaaggctacatcaacagtacatttcctgctgtaggggtcgttctgcagattgtcattttcacccgcaatgatgtattgtgagatcttcctatgctgatacatgcagatgtggttcatttctttccactgccatagatcatcccatttgtccattgtccagctaaagtgcatttaggttgttttacttttt

SEQ ID NO: 3627 - DNA, 514 bp, Homo sapiens
  MAP TO AC007029.3; EXPRESSED IN ADULT LIVER, SIGNAL = 0.88; EXPRESSED IN LUNG, SIGNAL = 0.9; EXPRESSED IN HELA, SIGNAL = 1.3; SWISSPROT HIT: Q9ULD4, EVALUE 1.00e-02; NT HIT: gi7662303, EVALUE 5.00e-78; EST_HUMAN HIT: BE815811.1, EVALUE 2.00e-75
gagccacagtcagccatttctaaaaagagagaaaagaaagcaacattaccttcatggactgtaatgccacaattgtcacactgaattatttcatcagcgtcctcactattatctcccagacaaacacagcaaatcagaatatggtccattttttgagagctccagttttgactcttctcaagaatcagcgagtcctaatattaaaatattaacatatatcagaaaatcacatttaaagtaaaaaaaaaacttaatcactaaaattctttattacttaaacattattatatgcatttccaaatgtatgccccattttccattcttttattaacttcaaagtacattatatttgagaaatatatacttgacctctttatcaaagaaccctgtaagcaccctcttatttaatttttcacttctctgcaagcttcgtattctctctcctctaggatatgaaaaagcacgcatgcaactaactactgttgatctgctttgctattctgctttgcccctt

SEQ ID NO: 3628 - DNA, 552 bp, Homo sapiens
  MAP TO AC004845.2; EXPRESSED IN HELA, SIGNAL = 0.86; EXPRESSED IN FETAL LIVER, SIGNAL =   1; EXPRESSED IN ADULT LIVER, SIGNAL = 1.2; NT HIT: AF333473.1, EVALUE 5.30e-01; EST_HUMAN HIT: AW592245.1, EVALUE 0.00e+00; SWISSPROT HIT: P17511, EVALUE 1.40e+00
aacgccaactttgattctgggcgactccatatgcttgcagagactggagtcctttcagacgatgcgtgttgccacgtgtcttttcatactccacacaatgacagttggacaggttcctatcaccattgcagagagcatttctgtggcccacaaagacatcttggaggtggttaaaattggcatactagtgtctaacgtgcacgtgttgcatgagatggaggagtaaagtttaattaaagaccaaagatacagcgtgctcacgtagccctggcgcaccagagactttaggccaaagaaggagtacgtttcggtgaaaagcacacaacattactgcctgttcttgaaaacttgatctgtggtccctagttcccaaggatgggaaagtggccaaagcccactcaatgctgggagccgtcctcctagagccagagggatcctgcctgttccaatgtctccgtgggttttacgggcatatttttcacaccctgttttgctattaaaaataaaatgaggcacacatcacatgtctttcccagactgcaagacccattt

SEQ ID NO: 3629 - DNA, 519 bp, Homo sapiens
  MAP TO AL137183.1; EXPRESSED IN HELA, SIGNAL =  18; EXPRESSED IN FETAL LIVER, SIGNAL =  14; SWISSPROT HIT: P12750, EVALUE 6.00e-69; NT HIT: AB015610.1, EVALUE 0.00e+00; EST_HUMAN HIT: BI253546.1, EVALUE 0.00e+00
atccaccagtcctcacaagcttagagagtgtctccccctcatcattttcctaaggaacagacttaagtatgccctgagaagaaatgaaaaagatttgcatgcagcagttcattaagatagatggcaaggtccaaactgatataacctaccctgctagatttatggatgtcatcagcattgacaagggacacaatttctgtctgatctatgacaccaagggttgctttggtgtacattgtattacacctgaggaggtcaagtacaagttatgcaaagtgagaaaaatcttagtgggcacaaaaggaatccctcatctggtgactcatgatgcttgtaccatctgctaccctgatcccctcatcaaggttaatgaaaccgttcagattgactcggagactggcaagatactgatttcatcaagcttgatgctggtaaccagcatatggtgactggaggtgctaacttgggaataatttgtgtgatcaccaacagagagaggcaccctggatattttgccat

SEQ ID NO: 3630 - DNA, 506 bp, Homo sapiens
  MAP TO CHR22_72.0; EXPRESSED IN ADULT LIVER, SIGNAL = 0.44; EXPRESSED IN BONE MARROW, SIGNAL = 0.45; EXPRESSED IN HELA, SIGNAL = 2.9; EST_HUMAN HIT: BE144271.1, EVALUE 1.00e-114; SWISSPROT HIT: Q9Y217, EVALUE 1.00e-03; NT HIT: gi14778210, EVALUE 1.00e-114
ggacttgaagctgacccaacacttacctagaattagactgttcattaaggcacttaaaatctattttgtgtgagtacagagagcatctgaatgggtacagttgttgtctcttgttcctcacacaggcaccagagcaatggagctgtcattgcccgctgtggacagccagaggttagctggtggggctggcgaaatgcagatgatgagcatctggtacagtcagtagccaaagcttgtgcctctgactcccgatcgagtggcagcaagctgtcaactaggaacacttctcgagactttcccaatgggggagacctttctgacgtggagttcggtaaggtgctccctggacccatggcaatgatttttatagcatctaagaaccttttcttgaaatggcctcttccttacaagacatagatttacttttatagaagtgaatgtgcagagcttcacttgatgggattgattgaggagtcatgggtcttggcagagaatcagaagaccct

SEQ ID NO: 3631 - DNA, 563 bp, Homo sapiens
  MAP TO CHR22_139.0; EXPRESSED IN HELA, SIGNAL = 0.85; EXPRESSED IN ADULT LIVER, SIGNAL = 0.36; EST_HUMAN HIT: AW611542.1, EVALUE 2.00e-81; SWISSPROT HIT: Q62318, EVALUE 2.40e+00; NT HIT: AF123535.1, EVALUE 5.40e-01
agataagtgcggaacaacggcattccccaaagccccttccatacctggagaagttgtcttgcagctcctttagatgcttgtcaaaataattccattcagtccaatgatgctggtacaactgattgaggttgtctttccgcttcttcatgctgcacagggtctcgctgatgacatcagtatacgttggggtgcagtcagtggcttccgctgtcaaggaaatccccgtactgtggaactgtgttgacgctgcattattagtggcatgagcgcagtgcatggggaagaggggcatggaggacagaacagggaaaatgccctgcgtttctggataagatacctgaaatctgagcaagagatgactctcctgctctttgaccatggcctgctttggagggaagaggccatcctatccgtggccaggcgttctctacgtaggaataaagtccttctctgcccctgtggatggaaggcagggctaagaaatacttttttagactgtcatctgaaattcttattctattatcacagcggtgaataggaagggctcccagctttccttttct

SEQ ID NO: 3632 - DNA, 597 bp, Homo sapiens
  MAP TO CHR22_76.0; EXPRESSED IN LUNG, SIGNAL = 0.5; EXPRESSED IN BONE MARROW, SIGNAL = 0.41; EXPRESSED IN HELA, SIGNAL = 1.5; EXPRESSED IN ADULT LIVER, SIGNAL = 0.53; EST_HUMAN HIT: BI224985.1, EVALUE 0.00e+00; SWISSPROT HIT: P29274, EVALUE 3.00e-50; NT HIT: U40770.1, EVALUE 0.00e+00
agctcaccatgctgacactgcagaccaggccctgatcccaggctcaccctggctccgggcacagaccaaagcctgggcaccaacagcctttgcacagatgtaaccccggccctgctcaccggagcgggatgcggatggcaatgtagcggtcaatggcgatggccaggagactgaagatggagctctgcgtgaggaccaggacgaagcaggcaatgaagaggcagccgtggcaggcagcgcagaacccggtgctgatggtgatggcaaaggggatggcgagcacacccactgcgatgtcggccgccgccagtgacaccacaaagtagttggtgacgttctgcaggttgctgttgagccacacggcccagcacaccagcacattgcccaggatggccagcacagcaatggccagctccaccgtgatgtacaccgaggagcccatgatgggcatggccacagacgacaggcaggctcagcacggacgcgggctgggccagctcacggtccattgctgcagcccagccgcccgcctggctcccagcccggcccaggcggaggggcccagacccctgagccccttcctcacaggagccaagt

SEQ ID NO: 3633 - DNA, 522 bp, Homo sapiens
  MAP TO AL136362.1; EXPRESSED IN FETAL LIVER, SIGNAL = 1.3; EXPRESSED IN PLACENTA, SIGNAL = 1.5; EXPRESSED IN ADULT LIVER, SIGNAL = 1.6; EXPRESSED IN LUNG, SIGNAL = 1.5; EXPRESSED IN HELA, SIGNAL = 0.66; SWISSPROT HIT: P11369, EVALUE 9.00e-43; EST_HUMAN HIT: BG003148.1, EVALUE 7.00e-38; NT HIT: AJ271735.1, EVALUE 5.00e-32
aatttttgcccagaccaatgtcctggagcatatctccaatgttttcttgtgttcatttcataatttcatgtcttagatttaagtctaattcattgtgatttgacttttttgtatatggtgagagacagggatctagtttcattcttctgcacatggatatccagttttcccaacatcagttactgaagcgactgtctttgccccagagtatgttcttggcacctttgttgaaaaggagttcactgtaggtgtatggatttatctctgggttctctattctgttccactgatctatgtgtctgtttttaatgtcagtgcatgccatttttgttactatagctctgtagtaaaatttaaagtcatgtaatgttattcctccggttttattcttttttctcaagatagctttgtttactctgggtgtttggtgttcgcatataaattttaggatttttaaaaattatttctgtgaagaatgttattggtattcttttagggattgcgttgaatctggagattgca

SEQ ID NO: 3634 - DNA, 586 bp, Homo sapiens
  MAP TO AL136228.2; EXPRESSED IN BONE MARROW, SIGNAL = 2.1; EXPRESSED IN HELA, SIGNAL = 1.1; EXPRESSED IN LUNG, SIGNAL = 2.1; EXPRESSED IN FETAL LIVER, SIGNAL = 2.5; EXPRESSED IN PLACENTA, SIGNAL = 2.7; EXPRESSED IN ADULT LIVER, SIGNAL = 2.3; SWISSPROT HIT: O70137, EVALUE 8.50e-01; NT HIT: U28422.1, EVALUE 1.40e-01; EST_HUMAN HIT: BF843858.1, EVALUE 0.00e+00
atggacccccattcctactcctctacagtatccatgccacgtgaagatagcagtaggagaagattcctccagcttcctccagagtgtgaagggggtgctgaggatggagcttctgagcctgaatctctgccgactcaggagacgtcagagtctgtgttccgtgactggctccccagcaatctcaccagatgtgcttagatttgggtggactcagtcacgctgcccaaagctgcattcactcatagggagagcaagggacccacagtactgctgccatgtccctttgaggtggcctctgtgtgcacctgctggtcctccagcccagtctgctctctgtacacaatccccatgagcagcatgagtgccaagaactgctcagtgctcaggtctggcacctgggcttctttcacgtgctcataaggcagccagcgtgtttccctaggtaccccggaggctttgggcacagaggaccacacgtccagaagtttgggccattcacatgtgtgccatgtggacctctctggagaagagagctgggtgcacatctcagcgtgtgcaatgggcatgagtgtgtttggcaagcatg

SEQ ID NO: 3635 - DNA, 515 bp, Homo sapiens
  MAP TO AL136312.1; EXPRESSED IN HELA, SIGNAL =   1; EXPRESSED IN FETAL LIVER, SIGNAL = 0.83; EXPRESSED IN PLACENTA, SIGNAL = 0.62; EXPRESSED IN BONE MARROW, SIGNAL = 0.85; NT HIT: AL163246.2, EVALUE 9.00e-09; SWISSPROT HIT: O67293, EVALUE 8.20e+00; EST_HUMAN HIT: BE543497.1, EVALUE 8.00e-10
aaaggtaaatctggcccctgttactctgcattggctagaagaggaagatataaatatactttaaaaaataacataaactgacctaaaaattagttcgtactaagaactagcaatctttgagtcaaaggttttactctgcatacctgcattttgtgcctctctctctctctggcaagactttagattcctcattattaagcccaggcgtggcctttgaacatgaaccagtggaatctgagtggaagtatcatgtctcttctgagcagaagttttaagagtcaggctgaggtttgccatgttcttttttgcctctgtcacaacgactgcccatctttcagatggaggctgctctttcagtgtattagtcagggttccctagagtgacagaactaataggatagatatatacttataaaggagagtttcttaagtattaacttacacggtcgcaaggtcccacaatagggaggtttagtaagtattaacttacacgatcccaagttcccacaatagga

SEQ ID NO: 3636 - DNA, 590 bp, Homo sapiens
  MAP TO CHR22_148.0; EXPRESSED IN HELA, SIGNAL = 0.64; EXPRESSED IN PLACENTA, SIGNAL = 0.31; EST_HUMAN HIT: AW473254.1, EVALUE 3.00e-03; SWISSPROT HIT: Q9VCS9, EVALUE 2.60e+00; NT HIT: gi13937343, EVALUE 8.80e+00
gggggacaagttccttcttcccacctagggcccgtgcaaaagcagtgtcttctacttggaagacttccccatctctccaaatctgtgtgcagttgatacttacacatctacagtgaacgctgctggtgccctgccacagccccttgcacttaccatttctgtgcatgcccacccaactatcaactgccagcagccctttccagcacccttggaatgtttctcctgggcacttgaaccctggctgctcttgcacaaagcacaccaggattaatgctctctggaagcatcccttaaccagtgaccgatgagaattaggagagaacaactctgaccctctcatcccttaagtgacgggagttggaggctgcagtatgctctacagagcctcccagattttccagatgggaactctagttccctagaatggttcctggctggataatgcaccttctattggttctttcctatccctgtctcatctcttctctcctctacaagtgcttccctggatcatctcctgaatcagctacttttattcaaatctttgtttcagggtcagattctggagaactcaaactaaggcagcagcc

SEQ ID NO: 3637 - DNA, 563 bp, Homo sapiens
  MAP TO CHR22_172.0; EXPRESSED IN HEART, SIGNAL = 2.8; EXPRESSED IN PLACENTA, SIGNAL = 3.4; EXPRESSED IN LUNG, SIGNAL = 3.4; EXPRESSED IN HELA, SIGNAL = 2.5; EXPRESSED IN ADULT LIVER, SIGNAL =   3; EXPRESSED IN BONE MARROW, SIGNAL = 2.7; EST_HUMAN HIT: BE894362.1, EVALUE 0.00e+00; SWISSPROT HIT: Q13625, EVALUE 2.10e-01; NT HIT: gi14778276, EVALUE 0.00e+00
actactgacactgggctggggtattaaagaggacaagcgtctcaccggggagagtttgatgggtgactctgtcttcttcaccactggagtcttgatgactttgggagaaggaacctcccgagggctcttggagttgggcagtaaagatggtgacagttgctgcaccagaggggcaggtcgggatgcagtcttgacgagagtgttggcaggctttcggggtgcctcaggtggctggagcagcctagatgtgctggcctcctcccgggctgccaaagcagggagctttggggtactgctgatgacaggagcctttcggggctggctggctggtctaggagttggcaaagaagggggtctgctgggggcgttcctgatcacagcaggtaaagggggcgaccgaggacgctgaggtctacgcacaggttcctaaaaaaaggcccacagagagtgagaacactgatcctagcatgagacacctgaggaaaagcccttcccaggcccctggacttcacctcagtggaaggtctggtggtcacttccaagggcaatttcttcaggtctgc

SEQ ID NO: 3638 - DNA, 500 bp, Homo sapiens
  MAP TO AL138832.2; EXPRESSED IN HELA, SIGNAL = 0.87; EXPRESSED IN FETAL LIVER, SIGNAL = 0.78; EXPRESSED IN BONE MARROW, SIGNAL = 0.84; EXPRESSED IN PLACENTA, SIGNAL = 0.84; EXPRESSED IN ADULT LIVER, SIGNAL = 0.93; SWISSPROT HIT: Q9WVC7, EVALUE 1.40e-01; NT HIT: AF281870.1, EVALUE 9.00e-12; EST_HUMAN HIT: AW292779.1, EVALUE 8.00e-53
gagaagaggccaggtgtctgggacaaagctgatataaatttgtgagcaaaagcaaattaatgtatttctccatgtcaaatagcttaagtcagctatttcccacgaaagcaatcctttctgtacctggtggagcttctcctggacggctgggatattggttagcaggtcagtccactggctatcaatgcgcgacagctcagagcgcagcgtggctgtgtccaccttttttagtcgaaggagctgatttccagtactcagaacagatgatttcagggaagattgggcatccacttctttagaaaactcctgaaacaagtagcgatgttcaaattagggttaaatagctagaccattcattaaaaggaaagcgaccaatttagtgcatgaaacaatttcctttacatcctggagggggttatgctgaacactcaaaagaaaatgaaagcagtacacccttgccctcgaatgaaaggaaactacgaagccccgacttgagaact

SEQ ID NO: 3639 - DNA, 585 bp, Homo sapiens
  MAP TO AL137844.2; EXPRESSED IN FETAL LIVER, SIGNAL = 0.72; EXPRESSED IN BONE MARROW, SIGNAL = 0.83; EXPRESSED IN HELA, SIGNAL = 0.6; SWISSPROT HIT: O95751, EVALUE 5.70e-02; NT HIT: gi15312977, EVALUE 0.00e+00; EST_HUMAN HIT: BG497744.1, EVALUE 8.20e-01
cctggggaatccttctcttcagccagctggcactcggtgtacagagacctgtctatcagctcctttaggctgccagccaccttcaggaagatccgacccattttggtggtaacagcttctgagagtccttccagaaacctggtccgtagaatggcatcagaccaagacaaatgtcgggccagcagcaggaagtcagtggcatactgcctgactgacttttggccctgtttgggatggcaaagaacagcactgaggatgtctatctcagatagggagtcatatatgccctgggatcttctcaggaaagatttattttcatgtgagagaggttctcctacctccatttgcaagatgaaccacctctctgctgctcccagatgaagagataccagaaatgccattctctctgaatcgtccaaaaaccccttcatttgcttctcctcatcaatctccatctcttcctccacagagcatgagccccgggctgcttcctgctcttctaagaggtagcagagtgctggggtcaacattccgaaggatggcacttcctttggtggtggtttcgcagtttcaggagttgtggca

SEQ ID NO: 3640 - DNA, 508 bp, Homo sapiens
  MAP TO AL135920.4; EXPRESSED IN BONE MARROW, SIGNAL = 8.7; EXPRESSED IN HELA, SIGNAL = 3.5; EXPRESSED IN FETAL LIVER, SIGNAL =  13; EXPRESSED IN HEART, SIGNAL =   8; NT HIT: AE007739.1, EVALUE 7.50e+00; EST_HUMAN HIT: BI489200.1, EVALUE 4.60e-02
aaagcacacaccacacatgctatccattgattagcattgaatatgtatagatatcgtcttatttcacattgaataaacagaaagaacactactttaggtctccgataaaacaatacagaaccaaagaaatagaatttcacctgaaatatcccatatgctttttaaaatcatttaatgcaggtctagaagtaaaatatttttagaactcatgggcatccttaatgcatgacaagaaaacatgttgtctatgaaataccacaaaaccataacatgctgccaagatatcagagatacttaaggggatttgttgaagttcacacacacacacacacacacacacacacacacacacacacacagagagagagagagaaagagagaaggaggaagaagaaggaggaggaggaggagggggaggaggaggaggaaaaggagaaggagaagacgataaaaaagtaatcttataattttaaaatgtatattcaatgcaaggaaaagccaaatggtt

SEQ ID NO: 3641 - DNA, 576 bp, Homo sapiens
  MAP TO AL049647.7; EXPRESSED IN PLACENTA, SIGNAL = 8.1; EXPRESSED IN FETAL LIVER, SIGNAL = 7.4; EXPRESSED IN HEART, SIGNAL = 6.2; EXPRESSED IN LUNG, SIGNAL = 7.1; EXPRESSED IN ADULT LIVER, SIGNAL = 7.8; EXPRESSED IN BONE MARROW, SIGNAL = 5.7; EXPRESSED IN HELA, SIGNAL = 0.95; EST_HUMAN HIT: AL045189.1, EVALUE 3.20e+00; NT HIT: M95823.1, EVALUE 1.40e-01
gtgaggggatgtgtagtgggacagtgggtgtccctggaaagaaatttatccctgacatcagtagttgtggtcagacattcagttggttatgaagagtggtacccttttatcttcccccctggacttaatatttatctgccctaatgcatctgttcattacaaccagggtgctcaaactaggggctgagaaacagattctggtgggagcttcagtggccccagcagatgcaggagtcttagggggaagtgacagatttggcctgttgcaaagagcggtgtgggaagagaagggaattgtttcaccaaagcggtttgtggtatcagtaataatcagagaactagggagaaacgaaattttttaaaagaatacatttttgtgtgggaatttgtatttcgttgagcaaacaatatgttactggtgagtccagtcttgctagtgtgtgtgtgtgtgtgtgagtgtgtgtgtgtgtgagagtgtgtgtgtgtgtgtgcagtataactgattattttactgccctggggattaggtgagttgatgactgaacacggtaattctgaaaaatggaggggaaggag

SEQ ID NO: 3642 - DNA, 504 bp, Homo sapiens
  MAP TO AL133418.2; EXPRESSED IN FETAL LIVER, SIGNAL = 1.2; EXPRESSED IN BONE MARROW, SIGNAL = 1.3; EXPRESSED IN PLACENTA, SIGNAL = 1.4; EXPRESSED IN HELA, SIGNAL = 0.88; EXPRESSED IN LUNG, SIGNAL = 1.5; EST_HUMAN HIT: BI755074.1, EVALUE 0.00e+00; SWISSPROT HIT: P22736, EVALUE 2.70e+00; NT HIT: gi14741746, EVALUE 2.00e-55
acattccattttgtgatgcgctggacattgacggttcagctaaagttaacataacagcagctgttatggaactggatgaaggtgaagaggaggatgaggatgtagcagcacctaaggaaaagggagaccaaaccaagagcttaataaaaatttatgtctaacaatagacagaaaatactagtcctctgaactaaaattccgctatattgtccaaaatcatttagcttacaacaacagtggtcaattctcacagttctacgatgtgaagaaaggaaaagctagtgtagctcaagaagctagacagtgcccaactacagaagtaatgaaaaggacagaccagggaaggctcctgcgtgggtcaaagagggaaagaactgtgcctagtctacaagacacagaaataaaatacagaatacactttttgtaacagtgaaacaagtatcaaaacaggaaaaatctgcaatccatccaaaaatcatttgtcccctcctaatccctccatct

SEQ ID NO: 3643 - DNA, 585 bp, Homo sapiens
  MAP TO AL137855.1; EXPRESSED IN HELA, SIGNAL = 1.2; EXPRESSED IN HEART, SIGNAL = 1.5; EXPRESSED IN FETAL LIVER, SIGNAL = 1.9; EXPRESSED IN BONE MARROW, SIGNAL = 1.8; EXPRESSED IN PLACENTA, SIGNAL = 2.2; EXPRESSED IN LUNG, SIGNAL =   2; EXPRESSED IN ADULT LIVER, SIGNAL = 2.1; EST_HUMAN HIT: AL517989.1, EVALUE 3.30e+00; NT HIT: AF288742.1, EVALUE 1.40e-01; SWISSPROT HIT: P10052, EVALUE 4.30e+00
actgccttttctccctctcccctcatgaatctaaaaggctgggggagagaaggttttaacagggagactcttatggcagtggcaactgagttggaaactcatcagggaaggttttatggtctcctagcaaatccctgcaggctgctgtgttaggatccttggtacaggtgttgtgcaacaggaaatttggaaagccctaataacactttctgattagctggaccttcagggtcagatggggttttgtcttggttgctgctagaatactttaagatctttcaaggaggagaggcacagtaggaaacacggatgttctagtcatatttgacatgtaagagtaagaggtcaggttaattttctctttctccttccttccacctagaataaaagacaacaactgcgtgatcgtagatttttgttttccatttttcaactcgttgctatggtgtcatgtggggagaacccatctgcaactcatagtgttttgtatcaggaggcgactgtcagtcctcaattaattattcatgctttcattaggagcaataatgagaaacagtttaaatgacaggtttctcggattaccga

SEQ ID NO: 3644 - DNA, 574 bp, Homo sapiens
  MAP TO AL138843.2; EXPRESSED IN PLACENTA, SIGNAL = 1.2; EXPRESSED IN BONE MARROW, SIGNAL = 0.85; EXPRESSED IN ADULT LIVER, SIGNAL = 1.1; EXPRESSED IN LUNG, SIGNAL = 0.98; EXPRESSED IN HELA, SIGNAL = 0.56; EXPRESSED IN FETAL LIVER, SIGNAL = 0.88; EST_HUMAN HIT: BE883091.1, EVALUE 6.00e-85; NT HIT: gi14733037, EVALUE 4.00e-85; SWISSPROT HIT: Q9UL18, EVALUE 2.00e-24
tgcttttgttgctttgcttcattctttccttaaaaaataagataaaataaaattgtggggggcattttcacaagagaatctctgaaccttgccaatccaaattatttttttaccaaaatgtctacgaatctcccatagtaggaattattaagggggtctcttacacagcccttatagtagttagatatggtcatatatagacaaatgaagatataaaaataatattttcataagcgattagcatatcttacctttgatgaggtacaagaatattattgatccctccgagtttaacatttatctttaggcacaagtttgacagagtttgaggagatgtttttattacattcttgacttgaacacattgtgtagccatacccaaaagtgtgtctcctacacgtttcacttccgctatggaatagatgcaaaacctctagtcagaaaaaaagacctgaaaataattttacatactgaaaataaagctactatgtttcccccttaaaatccatcattgtattacaggataccaaaaattatgccaatacagtactaaggcgatgctgttaaaattgaa

SEQ ID NO: 3645 - DNA, 595 bp, Homo sapiens
  MAP TO AC018678.5; EXPRESSED IN LUNG, SIGNAL = 7.2; EXPRESSED IN FETAL LIVER, SIGNAL = 4.6; EXPRESSED IN ADULT LIVER, SIGNAL = 6.3; EXPRESSED IN BONE MARROW, SIGNAL = 5.7; EXPRESSED IN HELA, SIGNAL =   2; EST_HUMAN HIT: BG111003.1, EVALUE 6.00e-85; NT HIT: AL163227.2, EVALUE 7.00e-53; SWISSPROT HIT: Q01565, EVALUE 3.00e-01
tttttcccttctaggcctccatgcctgtgatgggaggggctgctgtgaaagtctctgacacgtcctggagacatgttcctccttgtcttggtgattaatatttggctcctcattacttatgcaaattcctgcagccgcttgaatttctttccagaaaatgggtttttcttttccattgtattgtcagtctgcaaatttttcaaactcctatgctctgcttcctcttgaacactttgacacttagaaatttcttctgccagataccctaagtcatctccctcaagttcaaacttccacagatctttcaggcagggacaaaatgctgccagggtctttgctaaagcattgcaagagtcacctttattccagttaccaataagtttcttatctccatctgcactcacctcaacctggacttcattgtccatatcactatcagcctctttgtcaaaaccattcatcaagtctctaggaagttccaaactttcccacatcttcctgtcttctgagcactccaagtttctaggaagttccaaactttcccacattgactgtcttcttctgagccctccaaactgttccaacctctgcctgt

SEQ ID NO: 3646 - DNA, 515 bp, Homo sapiens
  MAP TO AC012360.2; EXPRESSED IN HELA, SIGNAL = 1.1; EXPRESSED IN FETAL LIVER, SIGNAL = 1.6; EXPRESSED IN HEART, SIGNAL = 1.5; EXPRESSED IN PLACENTA, SIGNAL = 1.6; EXPRESSED IN BONE MARROW, SIGNAL = 1.4; EXPRESSED IN ADULT LIVER, SIGNAL = 1.6; EXPRESSED IN LUNG, SIGNAL = 1.7; EST_HUMAN HIT: AI205914.1, EVALUE 1.00e-116; NT HIT: gi14751554, EVALUE 1.20e-01; SWISSPROT HIT: Q62556, EVALUE 1.20e+00
gaagcttgggtctcaaatggggcaactatgtatttcaaaacatatcctgaagactgatctagttctaaaagtttatttgctcttctttcctttctcttttttgcatttcatagtattttggaattttgtaacaagaaaatgaggtgcattaaagtagaaaaacttaaaggacagtaaagtacgattgctttgcttcaactgagaagggctcttttgtgtacacagtcagctttcggacctccccctgatcatctgtggccagtggagaagaaaggcctgaccgggaaattgaaggagccagcagggtacctccacatgatggaactcttggaaacattcgaaaaaccccactcccattctcaagatgaaaaatacaccaacctggccccgcggtttccatacctagtgaggacacaccggggaggtggtcaggggactgcggtgattatccaccttcacacatacagaggaaatacggcctcagatgcaggccatgtgcccctctccttcttgat

SEQ ID NO: 3647 - DNA, 512 bp, Homo sapiens
  MAP TO AL138752.2; EXPRESSED IN BONE MARROW, SIGNAL = 3.1; EXPRESSED IN HEART, SIGNAL = 2.3; EXPRESSED IN HELA, SIGNAL = 1.9; EXPRESSED IN PLACENTA, SIGNAL =   3; EXPRESSED IN LUNG, SIGNAL = 3.5; EXPRESSED IN ADULT LIVER, SIGNAL = 3.5; NT HIT: gi5453538, EVALUE 0.00e+00; EST_HUMAN HIT: BF795488.1, EVALUE 0.00e+00; SWISSPROT HIT: P22234, EVALUE 3.00e-51
ataccaagtgcagcaaagccaaattttgctgcaattagctgttgcctagaccactgtgggtcatgattggcatcatccttgaaaaacatctccactttaggtgggcaaaactcacatccttccttgacaccaggatttctttcgagtgaagaaccagttggtattcttctgcaaaccattcagttggaattatttcacactggggcacaatgaaagctgtctcctcacattttctggtgaaagcagttttaatacctgcttcctgtaacaacagaaaaatgcaactggtaattttatttgagattgcagcttttccttccaggtgattctgactgcatttcctgctgtaatctggtccttagattgcaggacttttcctggcctatctaacaagcaattcatagacctcttttgttttaccctcacatagttttttagcaatgttcagtacctcagctctcactattatcctgagtgggatgaaagttgcacccatgctgagaggcagaaat

SEQ ID NO: 3648 - DNA, 600 bp, Homo sapiens
  MAP TO AL121962.4; EXPRESSED IN HELA, SIGNAL = 0.78; EXPRESSED IN PLACENTA, SIGNAL = 1.2; EXPRESSED IN ADULT LIVER, SIGNAL = 1.3; EXPRESSED IN LUNG, SIGNAL = 1.3; EST_HUMAN HIT: AI240049.1, EVALUE 3.30e+00; SWISSPROT HIT: Q53665, EVALUE 7.70e+00
agttctgaccactggggttgatctcttacctctgatctataaaaagaatgacagtctcacaaggggatctctaacatgcttggaagagcatgttagaagcatgccccaaacattttattttccaacacacaccttcatgagagaaggagaataatctatccactccccagagaacatgttagaagcatcatctctttcactattggatgaacatgttttatgttcccccatttgttcagggtatagcacattagctctgatgaaaacaaacagtaacaaaaaaaaaaaactccccatatgttgatgaaaaaaagaactaaaagctagaatgatatcactttagaacaggacaagttcttagagataattcaatcccaccccattatgtcacatctgggtgttttggctccagcccagtggtagttctgaccactggggttgatctcttacctctgatctataaaaagaatgacagtctcacaaggggatctctaacatgcttggaagagcatgttagaagcatgccccaaacattttattttccaacacacaccttcatgagagaaggagaatctatccactccccagagaacaaacctg

SEQ ID NO: 3649 - DNA, 511 bp, Homo sapiens
  MAP TO AL137799.2; EXPRESSED IN FETAL LIVER, SIGNAL = 0.88; EXPRESSED IN LUNG, SIGNAL = 1.9; EXPRESSED IN BONE MARROW, SIGNAL =   1; EXPRESSED IN PLACENTA, SIGNAL = 1.4; EXPRESSED IN HELA, SIGNAL = 1.3; EXPRESSED IN ADULT LIVER, SIGNAL = 1.8; NT HIT: AB027132.1, EVALUE 5.00e-04; EST_HUMAN HIT: BI756183.1, EVALUE 2.00e-78; SWISSPROT HIT: O00519, EVALUE 1.00e-08
agaggctcggagaaggaaactgacctctgagaaatttttgtcagaactatctccgtagcaccccttgtagaaggccagttcctcctcgtcctgtagtgtcacgatagtgacaggcaccacgcccgcgggaaagtccaggaggttgtacagggtcacataagactgactttctgcaggaagatccagataagcccaggaaatcgtcagcgcagactcaggtggggaagaatgtgggtgggcgccccctcccggtccttctgggaacttcagcgctctgggctcggactagccaatttgtgtcaggggtcatcttgacaatggcctcatgctctccccagggtggagggaaggacggaatctgcattgcagaagcctcactcagtgccaggcactgtgctggcctcatcacattgctgatcccttgaatcctctccactctgtgaggtgtggattactattgactgtgtacaagtgaggaaatcgaggtggcaggattaggggcaggattagc

SEQ ID NO: 3650 - DNA, 592 bp, Homo sapiens
  MAP TO AC013371.4; EXPRESSED IN HELA, SIGNAL =   2; EXPRESSED IN PLACENTA, SIGNAL = 1.9; EXPRESSED IN LUNG, SIGNAL = 1.2; EXPRESSED IN ADULT LIVER, SIGNAL = 1.8; EXPRESSED IN FETAL LIVER, SIGNAL = 1.4; EXPRESSED IN BONE MARROW, SIGNAL = 1.1; EST_HUMAN HIT: AA362165.1, EVALUE 2.00e-07; NT HIT: U80017.1, EVALUE 6.00e-07; SWISSPROT HIT: P23960, EVALUE 1.20e-02
tcaaaaccctggaatcaagcagtcttccaaccccagcctccttactagctgggactataggtgcatgtcaccatgcccatctctgagactcattcatgagggcaaaactctgtcttcgtgacctaatcagctcccaaaagtccccatctactaatatcatcaccttggaggttaaggtttcaacatgtgaattttgggtgtacacaaatattcagactgtagcagtcaaaatgatttgtcacagtggtcacagctccttcccagttatcatggccctgtcttctgccacttttagccatgagcccctagagagagagatggctcagattatcatactggggcctaatgatatgtatgtgagtgactttgaccacctggacattcagctggtatttctaagtgaaaatcatatcaagagttatgtttatgttcagattttaaaatgaacaatgtcagttaaataacacgttgtaaaccaaaaataaaattcgaaacaacccatccatctaaatggaatcctcttctcagctaggcatattccgaaggtaacctgaaaaactagttcaggccatgatgagaagtgggagctgga

SEQ ID NO: 3651 - DNA, 555 bp, Homo sapiens
  MAP TO AL138743.1; EXPRESSED IN BONE MARROW, SIGNAL = 0.6; EXPRESSED IN HELA, SIGNAL = 2.7; EXPRESSED IN PLACENTA, SIGNAL = 0.86; EXPRESSED IN ADULT LIVER, SIGNAL = 0.94; EXPRESSED IN LUNG, SIGNAL = 0.85; EST_HUMAN HIT: BF359764.1, EVALUE 4.00e-67; NT HIT: gi14757722, EVALUE 2.00e-59; SWISSPROT HIT: O35777, EVALUE 3.00e-16
ttctcccattggaaaacctgctattgcttgcttggacctgttttactgatgataaacgagattgctttcaaaaattgttttatatgttatctttacgaatctcattgcatccaggcaagctgatgaagaattccagatcctggcaaactcctggcgatactccagtgcattcaccaacaggatattttttgccatggtggattttgatgaaggctctgatgtatttcagatggtaagatctttggtttattctgctatataaaaataggtaaaatatagtgaaagtggaatatatttttttcagtggctataagacattaaatgggattgctcttatgtaagatctagagtagcaaactaaaagttaaacttgagctaaccataaaatgtagttatcaatgctaacctactagaatatggaaattgagtagtatttaaataacatacatttttattgtagtaaaatatataaaacaaactttatcattttaaccattttaagtatataatttattaaggaattttttaaatcacagcacgagtcccaccattatg

SEQ ID NO: 3652 - DNA, 576 bp, Homo sapiens
  MAP TO AC015534.5; EXPRESSED IN HELA, SIGNAL = 0.61; SWISSPROT HIT: P39944, EVALUE 4.20e+00; NT HIT: AB040944.1, EVALUE 0.00e+00; EST_HUMAN HIT: AA206184.1, EVALUE 4.00e-86
ttgacctctgtgtctgtggcaaagcctatcatgtacgtgtgtaggagatacccaatacataatttatgaattgatgaatttacatgtaaaatgagaatctaagtttattactctagaatctctaaacacagtttcttttgtgtttccttaggctttcatctgagtggcacagtaactgagctggccactgcctctgaaccagcagtgacttataaagttgcaatcagttttgatcgatgcaaaatcacctcagtgacatgtggctgtgggaacaaggacatattctactgtgcccatgtggtagcactctcactctacaggatccgtaaaccagaccaagtcaaattgcgtcttcctatctccgaaacccttttccagatgaatagggaccagctacaaaagtttattcaatatttaatcacggcacaccacactgaagttcttcctactgcacagaaactggcagatgagattctatcctccaactcagaaatcaaccaagtgaatggtaattgtacaacttttttattgaaaaaaaaggtctttttcatcaccactgtcaccaaagcaaccctc

SEQ ID NO: 3653 - DNA, 542 bp, Homo sapiens
  MAP TO CHR22_144.0; EXPRESSED IN LUNG, SIGNAL = 0.6; EXPRESSED IN HELA, SIGNAL = 1.5; EXPRESSED IN FETAL LIVER, SIGNAL = 0.57; EXPRESSED IN PLACENTA, SIGNAL =   1; EXPRESSED IN ADULT LIVER, SIGNAL = 0.8; NT HIT: AF118569.1, EVALUE 2.00e+00; EST_HUMAN HIT: BI832330.1, EVALUE 5.00e-70; SWISSPROT HIT: P22166, EVALUE 5.10e+00
aatgctccagatgggttgaccaactggctccatgtgatcagaccccacccctctcttttcacccccatattccctccctctcatcccccagatcctttcctaccatcttctgggctttggcggtttcactgcggaaggcactagattcccggcgggtaagatcctgggagaagtggcgattgagtacacgcagactgcctgagtacacctggctgaccatcacctccgccttgtaccctgcccaggaaggaaccagcagggttagtggaggaagcaggtgggaaagtctcctgtctcttccatgccttctcctgccacccacaccctcagctcagcctcagtgtcttgggtctccatggcaccatcaatgtcatcatcatcatctttgtcactcccattgtcatcatggtcatctaaagtttattggatgacaaactggctgcaaggtaccagggaggtgaaaggctcccagatggatggtgtcctacaggttcccagggagaggctgacacagtgaccagtccaggacaccaatgacatga

SEQ ID NO: 3654 - DNA, 525 bp, Homo sapiens
  MAP TO AL137861.1; EXPRESSED IN BONE MARROW, SIGNAL = 0.78; EXPRESSED IN HELA, SIGNAL = 0.75; EXPRESSED IN LUNG, SIGNAL = 0.84; EXPRESSED IN ADULT LIVER, SIGNAL = 0.9; SWISSPROT HIT: P18175, EVALUE 2.00e-04; NT HIT: AL163202.2, EVALUE 4.00e-85; EST_HUMAN HIT: BF929482.1, EVALUE 3.00e-71
tctggaatcctttgtgagggacaaacattcagaccccagcagcagtgttcttgaatgttatgtgagggacaaacattcacaccacagctggagtgttctgggatcctatgtaagggagaagcattcagacactcatagctgttttctggaatcctatgtgatggacaaacattcagacccacgtagcagtgttccagaatcctacgtaagggaaaaacattcagaccccagcatcagcgttctggatttctatgtgagggacaaacattcagaccccagcagcagtgttctgggatctcatgtgagggacaaacattcatagcatcgtacacgtgttctggaatcctatgtgagggacaaacactgagatcccagcagcagtgttctggaatccaatgtgagggacaaatattcagaccccagcagtagtgttctggaatcctatgtgagggacaaacattcagatcccaacagcagtgttctgaaatcctatgtgagggacaaacattcagagcatcgtagcca

SEQ ID NO: 3655 - DNA, 551 bp, Homo sapiens
  MAP TO CHR22_140.0; EXPRESSED IN HELA, SIGNAL = 1.4; EXPRESSED IN PLACENTA, SIGNAL = 0.54; EXPRESSED IN ADULT LIVER, SIGNAL = 0.6; NT HIT: X73636.1, EVALUE 9.00e-03; EST_HUMAN HIT: AL533754.1, EVALUE 1.30e-02; SWISSPROT HIT: P40600, EVALUE 2.40e-01
catgtgaagatgatgctggggtgatgtttctgcaaggcaaagagtgccggagactgcgggccacccaccagaagctaggagagaaacacggagcagattctctctcgcagcccccagagggaccccaccctgccaaagccttgacctcggacttctagccttcctggggacttcctagagaatgcccagtccttcctccctcttcctcccccttctgcgtggggagtgctctgcgtgtcatccctactcacctctcctcggggcctacagttacctcctctcctgtctccgcaggacccagccaaccctttcttcccgtccccaaggctccacttccccctgcagccaccaggtgtcagcaaagcatcatccttggggctcatggccgggtggcctgagctgcgcaggccctgtaggagccttgggtttcaggggaactagttcttggtgttggagagccggactcagcagccagactagtccctgggaagtggattggagtctggcagaaacaggtaggaagccacagggcagccctaagagaggcagtg

SEQ ID NO: 3656 - DNA, 590 bp, Homo sapiens
  MAP TO AC025735.1; EXPRESSED IN PLACENTA, SIGNAL = 2.6; EXPRESSED IN ADULT LIVER, SIGNAL = 2.5; EXPRESSED IN FETAL LIVER, SIGNAL =   2; EXPRESSED IN HELA, SIGNAL =   1; NT HIT: AB008681.1, EVALUE 0.00e+00; EST_HUMAN HIT: AV730914.1, EVALUE 0.00e+00; SWISSPROT HIT: P29168, EVALUE 7.50e+00
ctctccaagcgaggtcaaaggtttgccctagaccctgtaggacatctacgtacctatcaggatcatctgaaaacttccccaggtctgccttgatctgctttaaatcagagagggagaaggggacatgcacctgggttgggccaagttctctgccccctacagcttgaaggggacataaccgattgcctggggggcgggttgtggtcctctggagatttctttgcttatttccttctgggcaggggagattagaggaggattatcattcataggaaggggagctatagggaggctaggatatgggggtaagctgagaggtcctcctgtgggatgtaaattgtaagctttgcatagttgtgtattctccctcaatgaaaagaaagcttggacataaggtatttcactccatttgccttccctcttacagaaaaggtcaggatgcaggatagtattgtaatttctacttccctcacgtggccatttttccccatcaaagagggaatattgggaccaagccgtagtgcagaaaaaaaatgagccacctctttttcagggtttgtgggttaaattggtcccaatggtttagcatg

SEQ ID NO: 3657 - DNA, 598 bp, Homo sapiens
  MAP TO AL137006.2; EXPRESSED IN ADULT LIVER, SIGNAL = 5.1; EXPRESSED IN HELA, SIGNAL =  18; SWISSPROT HIT: P29692, EVALUE 1.00e-45; NT HIT: gi14739952, EVALUE 2.00e-37; EST_HUMAN HIT: BE278378.1, EVALUE 4.00e-43
tccgtcttattgtcccaaggcttgatgtccagcaggatggaggacttggccaccagcgagggattcttggccttcttggcgtacagccgcagccgctcctcccgcagccgccttgcctccttgtcttcctccttattgtcgctgccaacagatcaatgtcatcgtcctcgttatcctctgcttcttggccggggtcgtagtaaggggggcgaggggaggggcgctccacttggcgcatgggagacacgtgctgtgtctgcgggactgtggaccatggccaggcgagctcttctctcttctccggcatgttcagccaggcctccaggttggagaccgcctgctgcagctcctgcaccacgccgcgcaggctctggttctccacttccaggctggcgatctggaggacgagctcgctgtggtcttccctggggccgagctctggcgggaggcgctggccacaggcccattcatctgcttgtagaatttcctttctgtatcttcatatttgaatttgtcgagccagatcttctcatgtgctaggaattttgtagccatttttctgacgcctgccaagaatgcggctaccagaaatgaggaa

SEQ ID NO: 3658 - DNA, 563 bp, Homo sapiens
  MAP TO AC011792.5; EXPRESSED IN HELA, SIGNAL = 0.86; EXPRESSED IN LUNG, SIGNAL = 3.2; EXPRESSED IN ADULT LIVER, SIGNAL = 3.1; NT HIT: U82828.1, EVALUE 3.00e-24; EST_HUMAN HIT: BF112103.1, EVALUE 7.00e-32; SWISSPROT HIT: P15305, EVALUE 1.80e+00
gcacatagaccaggggagtccaatcttttggcttccctgggccacattggaagaagaattgtcttggggccacacataaaatacagtaacactaataatagctgatgagcttaaaaaaaaaagaaagaaaaagcaaagcacctcataataatgtttaaagaaagtttatgaatttgcattggaatgcattcaaagctgtcctggatcacatgtggcccgtgggccaccggctggataagcttgaatagcctataatgaatacaatatttctaattttttacatagttaagcagcgtgattgactcacattgagaatgtggaataaggtgtatgatgggaaaattcgtataattaattaccctctcaaagcctaggctttgaggcacagcagcaaaaaaactaacctgagcatgtgggcagcattgaagacaacatcaaactctgtgctgtctagttcagctgctttttttgccatctcagctgcttctatgagacgagcttcttccagaagaaactgacctgaaaagtataaaaaccagtgagcttcaactcagaaaatccca

SEQ ID NO: 3659 - DNA, 594 bp, Homo sapiens
  MAP TO AC015930.3; EXPRESSED IN BONE MARROW, SIGNAL = 0.45; EXPRESSED IN PLACENTA, SIGNAL = 0.77; EXPRESSED IN ADULT LIVER, SIGNAL = 0.83; EXPRESSED IN HELA, SIGNAL = 1.4; EXPRESSED IN FETAL LIVER, SIGNAL = 0.56; SWISSPROT HIT: Q63604, EVALUE 1.00e-18; NT HIT: gi14740035, EVALUE 3.00e-67
tccacaatccttccttccagaaccataaacctgacacaagcttcagctgagcttggaacaagcacctaacaatttgaggagacacatgtgagtcttcaggaaggactcagctggtcgaattctgtttggccccactgacttccatccaaaattcagttagcatggacttggaagagtagctcagagctcttcacagcctgcagacttgtcagtggccactgagaagaacctctgacagttggatgtgccccaaatgtcctttccactgtccatttagtttaaaggaatttgaatacatccatcatagcaggaacaatttactcctgcattggccaccaaaatataataaaatagagttaaatttccacacgtaagtgtgatcatggttaatgagacattctggaatgttctcttaccttcactgccaccaagatcttgtcctgctcaggacagaggttatagcattcagctaggaacacttttccaaaggctccttcgcctagctcccttttcagaacaatgttatgtcgcttgatgtgctgaacaactgcaaaacaaagacagaatggaaattggaattgaagcatgtggagg

SEQ ID NO: 3660 - DNA, 512 bp, Homo sapiens
  MAP TO CHR22_105.0; EXPRESSED IN FETAL LIVER, SIGNAL = 2.5; EXPRESSED IN BONE MARROW, SIGNAL = 2.1; EXPRESSED IN LUNG, SIGNAL = 2.4; EXPRESSED IN HELA, SIGNAL = 4.3; EXPRESSED IN PLACENTA, SIGNAL = 2.2; EXPRESSED IN ADULT LIVER, SIGNAL = 2.4; NT HIT: gi6912491, EVALUE 9.00e-49; EST_HUMAN HIT: AA323581.1, EVALUE 1.00e-88; SWISSPROT HIT: P38114, EVALUE 4.80e-02
cagagaagggagagtggacgcccctggtcatcatggaattaactcagagcgtgaactcttggtaggtgcccagccctgtgcttgggctgaaaccaaaaaaagacaacttcagatcttgaaattgtgcgacccccacactcctgtcccttaccctctccccaagccctttgttcctgcctcttctctctacatcatttgtggggtggccaaggctgggccagggctctgacgtgccctccacactgacttgcccgcagctatttcggcttcatcaccaaacaccccctgctgagccgcttcgcctgccacgtctttgtctcccaggagtccatgaggccggtggcgcagagtgtggggtgagtggggccccagggtgtgggtgcagaatgggtgcagggttacggaggtggggagcggaggtgagcaggtgggggcaggagcctggcaggggaggtctggggaaggagaaccagatgtgctgtgtagagagggcagtggtgggtgacagtttg

SEQ ID NO: 3661 - DNA, 596 bp, Homo sapiens
  MAP TO CHR22_143.0; EXPRESSED IN HEART, SIGNAL = 1.3; EXPRESSED IN LUNG, SIGNAL = 0.84; EXPRESSED IN FETAL LIVER, SIGNAL = 1.2; EXPRESSED IN PLACENTA, SIGNAL =   1; EXPRESSED IN BONE MARROW, SIGNAL = 0.84; EXPRESSED IN HELA, SIGNAL = 1.6; NT HIT: X67319.1, EVALUE 2.20e+00; EST_HUMAN HIT: U46370.1, EVALUE 0.00e+00; SWISSPROT HIT: P36028, EVALUE 4.40e+00
gtcttcacctgctagaccgcctccttcctaacctccatcttcatgggctgcctttggggttgtggtcagaaaattctcttggtctggtgtttctaaggcagtggctgttcccaagaagtgtcattgatgggatgtcccttactgtattccggaatgcttgcgttcctctcagaccctcttttctctgcccctcattttccactctgtaactttctgcggtgtcttaggtcttaacatccatcgctggtaactcactaagtccatctgaccgtggaaaggaaaagctcacagtgtgaaaggcgacgatgaggctgctcccacctacgagggccctgcagtagcagactcggaaggatcagccggaaaatgcgagagcctgctcgaggtcccctcacctgctgagctgcaagacagacgcctgctgcaaacacctcatcttccgttagatcagccagcttacctggagcctgcaaaacctgaacttggggctcctggcctctattccattttttccatttctgtgagggttaagaggttctctgaaaaagcctgggaaattttatagtacaactgaaagggtgtgcactactttgtgg

SEQ ID NO: 3662 - DNA, 569 bp, Homo sapiens
  MAP TO AL138974.1; EXPRESSED IN HELA, SIGNAL = 1.5; SWISSPROT HIT: P41849, EVALUE 5.50e+00; NT HIT: gi9964314, EVALUE 2.10e+00; EST_HUMAN HIT: BE768095.1, EVALUE 1.30e-02
aaaagggggttataggctgccagccaaaacactgacggcattgctgaattcagagattcagaaactctatatgtcccaaagattctgtatggctgccattaattacactctcttatgctctatcattgaaagtatctcaatccagttccctcatgtggatcagaacaggtaggaattttaatatagaacttgttaacttacattttaaaaatatattcaatattaacattaagaacattgaagagtattgccatctcagtgaaatgaatcaatcagaaatagacataatcacacttgtttaccacaacatttatcatcagattggatggaaggtgatttatatagctcatgtaggttgggtcaaaactgacccaatagtagctcttgaagatgttaaagatgttgttacttggagaaatcatagaaaataaatcaaaggggtataattttaaaagtatatattgtatatgtgaaaaaattactaaatataatcaatagtaggggcttaaattattattttttacttcattaatttttatataagttattgccacaggtttggaggtatc

SEQ ID NO: 3663 - DNA, 597 bp, Homo sapiens
  MAP TO AC009472.2; EXPRESSED IN HELA, SIGNAL = 1.2; EXPRESSED IN PLACENTA, SIGNAL = 1.8; EXPRESSED IN LUNG, SIGNAL = 2.1; EXPRESSED IN ADULT LIVER, SIGNAL = 2.1; EST_HUMAN HIT: R59904.1, EVALUE 0.00e+00; SWISSPROT HIT: P36456, EVALUE 1.00e+01
tcaagggggttatgaggttgctcgccccattccatgatcttagacatcttgtagggacggtcaaccactgataataccagctcctattacacatctcttttaggtgttcttcaagctaatcaaccacaagtcaaggtcacctttcagacattccataccaccatgtcctcaactcttgtgttgcctgcaaggaccaatccagatcaggtgataaaaaaaaaatttgtcctcaaataaatttattattattaattatttcacatattaataaatgtaaaatttgattaataaagagtagtcattgttcctctaatatttttaaaatctctttgcctttttgctctactttcttggaaatttcttgattttatcttctaattcttcaattgagttcttcaactgctaacagctttttaatttccaaaagctcttttttagtttcctggatgttcctatcctatagcatcctgttcttgctttctgcatacaatgtcttcttttgtttcttgaggatatcagtaaagttttaaatacattctttcttttggtatagctttttttctgcaagttacttttgctgctggttccctttcttgt

SEQ ID NO: 3664 - DNA, 547 bp, Homo sapiens
  MAP TO AC021722.4; EXPRESSED IN BONE MARROW, SIGNAL = 0.58; EXPRESSED IN LUNG, SIGNAL = 0.79; EXPRESSED IN HELA, SIGNAL = 0.71; EXPRESSED IN FETAL LIVER, SIGNAL = 0.64; EST_HUMAN HIT: AA559348.1, EVALUE 7.70e-01; SWISSPROT HIT: Q9WY12, EVALUE 6.70e+00
ttcatggtcaatgccctaccttttactgaagagaactgttgaggttgtgaatttaacttgcatggtaattttgcaggctgcagcctcaaagtttgggcctgattttttaatgcataagtcctgaggctacagaagataaaagatgattccagtccaggtataggcattctagtgttctgatcatgccttgagctgagagtttaaaatcctgagcattcttgttctttaatctcagtgtggacatcttcccccacagtccttgtgctcatcgctttcttgtcattcttttccaagtcacttggactctccagcttcactttcattaggctctgtatgccaggtaactacaagtgacaatttaagtaactgttttgtctgcattttatggactttcatctcattttccaccgatggtaaagtcattactgcctacaaatctcactaaatgaaatagccaataaaaaatattatcttcaggtgattctttacctaggaagtgcttatggtgccaaatgatttatcagtcaggggcagacaagaaaacaga

SEQ ID NO: 3665 - DNA, 515 bp, Homo sapiens
  MAP TO CHR22_166.0; EXPRESSED IN BONE MARROW, SIGNAL = 1.1; EXPRESSED IN PLACENTA, SIGNAL = 0.66; EXPRESSED IN HELA, SIGNAL = 1.5; EXPRESSED IN FETAL LIVER, SIGNAL = 1.7; SWISSPROT HIT: P25325, EVALUE 3.00e-56; NT HIT: gi4507706, EVALUE 0.00e+00; EST_HUMAN HIT: BI755886.1, EVALUE 0.00e+00
tctcgagcaccacaaatacgaggtaccattcatagcatccttctatttgtcccctcctccctgctcccctgctgtaggcattgaacctggccacatcccaggtaccgtgaacatccccttcacagacttcctgagccaggaggggctggagaagagccctgaggagatccgccatctgttccaggagaagaaagtggacctgtctaagccactggtggccacgtgtggctctggcgtcacagcctgccacgtggcactaggggcctacctctgcggcaagccagacgtgcccatctacgatggctcctgggtggagtggtacatgcgcgcccggcccgaggatgtcatctcagagggccgggggaagacccactgaagctgggcaggacacaggcgagctcaggtgatgccggccaccagcaatgcctggcctggtagctccgcttctgctttcaccaagagagtgtttcttcactcaactcaggtggcatttggggtgacatctcaaaggccag

SEQ ID NO: 3666 - DNA, 552 bp, Homo sapiens
  MAP TO CHR22_183_2.0; EXPRESSED IN HELA, SIGNAL = 1.2; EXPRESSED IN FETAL LIVER, SIGNAL = 1.6; EXPRESSED IN HEART, SIGNAL = 1.3; EXPRESSED IN BONE MARROW, SIGNAL = 1.7; EXPRESSED IN PLACENTA, SIGNAL = 1.7; EXPRESSED IN LUNG, SIGNAL = 1.5; EXPRESSED IN ADULT LIVER, SIGNAL = 1.7; NT HIT: U07000.1, EVALUE 0.00e+00; EST_HUMAN HIT: BF948511.1, EVALUE 3.00e-74; SWISSPROT HIT: P10162, EVALUE 1.80e+00
acagacaggcacatgagcagctttgctgaggactcctttccatcccagacccctgcccttggggcctgccagggacctctgccctcatggttggatctggacactcccgggatgctgcggcttctctacctgctgcaactgcctcacctcacgggagggtctctctacgcaacttctgagtcgaggtgcataagcagtgtgggggctgtaggcccctgtagctggctgcagagagccaagcgcctcccacacggtacagcacagaaggctcctggtgtcactgggaaaagcccagattcaaaaaggctgggctccggagtcatgcacatcctctctcaggtatccctgtgcagaaaacagtgtccacgggggagaaagaggccaggctggtgtcgcagagcgccaatggcatagtcaccaccactcctccgacttacttcctcctgggatcccacaaacaagccccccagctgggagcctggacctccagggaccagggcagccgccacctacttggcgtgagtcatgaatgcccttcacacagcaatcaga

SEQ ID NO: 3667 - DNA, 543 bp, Homo sapiens
  MAP TO CHR22_185_1.0; EXPRESSED IN FETAL LIVER, SIGNAL = 1.4; EXPRESSED IN LUNG, SIGNAL = 1.7; EXPRESSED IN PLACENTA, SIGNAL = 1.8; EXPRESSED IN BONE MARROW, SIGNAL = 1.4; EXPRESSED IN HELA, SIGNAL = 1.6; SWISSPROT HIT: P53924, EVALUE 3.90e+00
agggagggactcttctcacctctactttataggtggacattgagatagagacagcgttcgagtaggatctcatcccaaggagcctggcttcagggttggtgcatttcattatctctgttttgttgcatttaaatcctgacattgttacttacttgctgcgttatcttggatgagtttcatcacctctttgagccttgactttctccccatgaagatgagggcaggaataccttccatgtgaggttgtggtgggtctagggagggaataagcatatggaagttctctgtaggtatgacattgtattatgtttaccatcaagagagaaggtgagtggaggctccgtcagataaagaataggacaaatattagtattcggtatttttacttgttaagtgggtagcactcaggttggcatcaggcctacctggtgaacagcaggttctcttcccacctcccacctcttccgtcttccatgtgagtgggtgcatcggtcccgagcgctcctcttcccctcccatctctccacactttccctagcacgt

SEQ ID NO: 3668 - DNA, 542 bp, Homo sapiens
  MAP TO CHR21_53.0; EXPRESSED IN HELA, SIGNAL = 0.53; EXPRESSED IN BONE MARROW, SIGNAL = 0.47; EST_HUMAN HIT: AL589258.1, EVALUE 1.00e-106; SWISSPROT HIT: Q9Y3R5, EVALUE 2.00e-31; NT HIT: gi14780345, EVALUE 1.00e-106
cgactgcttagccactttccattggccaagacaccgcgctgcctagtgacattggttttggcaaatccagggtcagtgtgacagccagcaggtggacacacacagcagggtgagagatggcagcggctcccggcgatgaggaaggtggggcttccccagccaggcgaatccgctgtggttcttcatgcagcattcgcagagcagtgtgcagtgggactcgggaagatggggcgagcccttgaaccctatcctctctcatcaacagaacggatgctctgctcctgagactgtcgctggtggttggcaaagaggtgttttacaccgccctctgggggagcgtcctggccagcccgtccatccgcctccctgcctcagtcttcgtggtgggccacatcaacagggatgcccccggccgggagcagaagtacatgctggggaccaatcaccaactcacggtgggtgctgtgttcctcacagggcatggggaggaggcgacatgtgggcacagcatcctcatgggcaggttgtcactgaagctgcaa

SEQ ID NO: 3669 - DNA, 583 bp, Homo sapiens
  MAP TO AL136230.3; EXPRESSED IN BONE MARROW, SIGNAL = 2.9; EXPRESSED IN PLACENTA, SIGNAL = 2.8; EXPRESSED IN HELA, SIGNAL = 1.7; EXPRESSED IN ADULT LIVER, SIGNAL = 3.1; EXPRESSED IN HEART, SIGNAL = 2.3; EXPRESSED IN LUNG, SIGNAL = 3.4; EXPRESSED IN FETAL LIVER, SIGNAL = 2.6; NT HIT: AF125348.1, EVALUE 6.00e-10; SWISSPROT HIT: P11369, EVALUE 4.00e-05; EST_HUMAN HIT: AI656272.1, EVALUE 9.00e-04
tgcctctctgaatttgaccactctaggtatctcatatgggtggaatcatgctgtatttgtctctttgcgactggctaattttacttagcacaaaatcctcaaggttgttgagcatgtcctcaacatgcttatccatgttgtagcatgtgtccaaatcatcttccttataagactgaataataatattccattttatgtttataccacattttgtttattcatttattcattaaaggatacttgggatccttccaactttttggctattgtgaatagtgttgctatgaacatgaatggacaaatatctctttgtgtccctgctttgacttacttttgttatatactggggatgcaattgctagatcatatggtaactctctgtctaattttgaacaacttccctactatttcccatagtaattgcccattttacatccccaccaataatgcacaagggttcagtttatccatgtctttaccaacactcgttattattattttccctttgatagttagctattctaatgggtgtgacagagcttgtataatattgattaccttcagtggtctctaacccccgaac

SEQ ID NO: 3670 - DNA, 588 bp, Homo sapiens
  MAP TO AL132765.16; EXPRESSED IN BONE MARROW, SIGNAL = 3.3; EXPRESSED IN ADULT LIVER, SIGNAL = 3.6; EXPRESSED IN HELA, SIGNAL = 9.9; EST_HUMAN HIT: AL554385.1, EVALUE 0.00e+00; SWISSPROT HIT: P18282, EVALUE 9.00e-56; NT HIT: gi6466447, EVALUE 0.00e+00
acccctgtgcagtagtgaggaatggcatatatttgtgatcttttaaaaagtttgatgtctaaaattagtagtgattacagctcaaatttctagttttttaattagatgatatacctttaaaatgttaaatatatgccaatctataagcagaatttattattttatgtttggcacaataaaaattgtaagtctttttctcatgtattttctcatcataggcctcaggagtgcaagtagctgatgaagtatgtcgcattttttatgacatgaaagttcgtaaatgctccacaccagaagaaatcaagaaaagaaagaaggctgtcattttttgtctcagtgcagacaaaaagtgcatcattgtagaagaaggcaaagagatcttggttggagatgttggtgtaaccataactgatcctttcaagcattttgtgggaatgcttcctgaaaaagattgtcgctatgctttgtatgatgcaagctttgaaacaaaagaatccagaaaagaagagttgatgttttttttgtggtaagcatgttagaaatattgagcctctgtaaaactcattttgttagcactcgggaagacca

SEQ ID NO: 3671 - DNA, 597 bp, Homo sapiens
  MAP TO AL138499.1; EXPRESSED IN HELA, SIGNAL = 0.71; EXPRESSED IN PLACENTA, SIGNAL = 0.72; EXPRESSED IN BONE MARROW, SIGNAL = 0.62; EXPRESSED IN ADULT LIVER, SIGNAL = 1.5; EST_HUMAN HIT: AW801531.1, EVALUE 1.00e-42; SWISSPROT HIT: P22182, EVALUE 2.60e+00; NT HIT: gi15300836, EVALUE 2.00e-44
atccgtccttgcagaaacagtaggaaatgatttttaatctacattttgattttactttaaatcattaccttcttccttcatggcctaaatagttttatcttggcattagaacatgaatttttcaaaacaactatgcttttgtctgtaggaaggaattttacagaagctacagagaagtgttgagcaagaagaaaataaatggaaagttaaggtcgatgaatcacacaagactattaaacaggtatttacaaaagaaaagcttagagcagtggttctcgatgtgtggggcttgaaccagcagcatcagcatcaccatgcacattcttgggccccaacccagctaccaaatccaaaacatgtatgtggggtggcagcagtctgtgttttcatgagccctccagaatagtctaatgcccacccaagtttgaaaatcactggttttaaagtatgactaaagggtaatcatatagaatgtagaatgctagttacagaactattgtgtgataaggtaaagaatactgggttcaaaatcagttttaaagtatttaacccataatatagaattcaagaaaaagtcattcttctattcctgggacc

SEQ ID NO: 3672 - DNA, 526 bp, Homo sapiens
  MAP TO AL133263.2; EXPRESSED IN PLACENTA, SIGNAL =   1; EXPRESSED IN BONE MARROW, SIGNAL = 0.83; EXPRESSED IN LUNG, SIGNAL = 0.9; EXPRESSED IN ADULT LIVER, SIGNAL = 0.99; EXPRESSED IN HELA, SIGNAL = 0.59; SWISSPROT HIT: Q9Y603, EVALUE 6.00e-43; NT HIT: AJ276205.1, EVALUE 1.00e-128
gcctccctgaccttctaaccaggggctggttggagaaagagcatcaggagtgctgccccacagggctcccaggctcaccattgagggattgagttggggaggcttggggcccactgcctgctaccactggtgctcatctgcttgcagaggtgactggcccctctcagatggacacccgaaggggccacctgctgcagccaccagacccagggcttaccagcaacttcggccacctggatgaccctggcctggcaaggtggacccctggcaaggaggagtccctcaacttatgtcactgtgcagagctcggctgcaggacccagggggtctgttccttccccgcgatgccgcaggcccccattgacggcaggatcgctggtgagtgggaggctgttcctctggccatggaaggtgcactgagtctgagtctcagagtcacgagtgatgaggacagggctattttgacctggtgatgggaggtctgtggctgggggattgcagggtagcgttgactgtcctgtgtgct

SEQ ID NO: 3673 - DNA, 561 bp, Homo sapiens
  MAP TO CHR22_172.0; EXPRESSED IN LUNG, SIGNAL = 0.52; EXPRESSED IN ADULT LIVER, SIGNAL = 0.59; EXPRESSED IN BONE MARROW, SIGNAL = 1.5; EXPRESSED IN HELA, SIGNAL = 1.8; EXPRESSED IN FETAL LIVER, SIGNAL = 1.4; NT HIT: AF288742.1, EVALUE 0.00e+00; SWISSPROT HIT: P22059, EVALUE 1.00e-32; EST_HUMAN HIT: BI907573.1, EVALUE 3.00e-99
cctgaacatccgagaaaagcaagggcaccatgccaagccggggctggtgcccagcctgaccacccacctgtccacccacaggtgaacttcaatgagcccctgtccatgctccagcggctgacagaggacctggagtaccaccacctgctggacaaggcagtgcactgcaccagctcagtggagcagatgtgcctggtggccgccttctctgtgtcctcctactccaccacagtgcaccgcatcgccaagcccttcaaccccatgctgggggagaccttcgagctggaccgcctcgacgacatgggcctgcgctccctctgtgagcaggtgagggggctaggctggcactgggtggcgcccacccacactctggccaagctgttcctgccaggcccaaggtgacaaatgggaggcagcgtctgtctgaccctgactgcccatacccaaggggccatcaagctgaggtccagccagggagcagggccttccatggcaggggcaggcacacggcctcctggagatggcgaggggcatgagaactcagcttggtgaggacaaggt

SEQ ID NO: 3674 - DNA, 547 bp, Homo sapiens
  MAP TO AC018432.4; EXPRESSED IN HELA, SIGNAL = 0.51; EXPRESSED IN ADULT LIVER, SIGNAL =   1; EXPRESSED IN FETAL LIVER, SIGNAL = 0.73; EXPRESSED IN BONE MARROW, SIGNAL = 0.69; SWISSPROT HIT: P29144, EVALUE 1.00e-42; NT HIT: gi14754137, EVALUE 0.00e+00; EST_HUMAN HIT: AW294917.1, EVALUE 0.00e+00
ttccacactgaattcattcccatagctaagacttcaaaaatcaaaggaagaaataacttcagccaaaaaaaaaatgactacatcctctaaatttagcctagatgtcataaactgacattaaaaggactacagtgtataagatgggcagtaagtataagcaatgttatcacttacttatcatcaggtaaggaagtaacaaagaatggctggttatatttgggtggtaatgtcaaattgcttgatttcttcttccctagaagtgcaaaactatgattttcatgaatatctaagctcaaggtattagacaatctatgagaaacaataaatggaaggtctttaaggcgttccaaatcactgatttgctcatggcgaatctgtagtcgaattgtataatctcctttctccagtttcaaagaatactgaaaaagaaaaacaacatttgggaaaagttaagtttaaccaagtcaacggaaatcactgaaagaggataaagtgaaagttaccattcacagacttgttcataatatgtgaggtacagtgcaaggca

SEQ ID NO: 3675 - DNA, 579 bp, Homo sapiens
  MAP TO AC013816.3; EXPRESSED IN FETAL LIVER, SIGNAL = 1.1; EXPRESSED IN BONE MARROW, SIGNAL = 1.2; EXPRESSED IN PLACENTA, SIGNAL = 1.3; EXPRESSED IN HELA, SIGNAL = 0.79; EXPRESSED IN ADULT LIVER, SIGNAL = 1.4; NT HIT: AJ229042.1, EVALUE 2.00e-19; EST_HUMAN HIT: T15344.1, EVALUE 7.00e-20
agacagatgcctccacatccctccccaagacaggacagggatgtcctgtgtggaacacagctaggtctggctcagtaactactgactagaaggggctataatttagaggttggcccgctccatagggtgaggtaggcacctgtggctgggaacttaacatgtattaagaaagcactcacaaatacctagaaggaggatattgaatgtccccaacacaagtaaatgataaatgttcaagatgatgaatatgctaattaccctgatccgatcctgtacaatatgtgtattgaaacatcactatgtaccccagaaatagttaaaattgttataagtcaattaacaaataaaataaaagaaaaaaaaacaaagtactcacaaaatggctggagcatagtcataggcactacagaagcaaggataggagatctgagcagagaggcagcatatagtattcaagaaaatagcaagacaggaccgattccaagaaccaggagaaagctgagttttcaagagaaaggaaaaaaaaaagaaagaggaaaaacagcttttttatccagtgccttcgttgtaccaggcact

SEQ ID NO: 3676 - DNA, 585 bp, Homo sapiens
  MAP TO AC015937.3; EXPRESSED IN HELA, SIGNAL = 2.4; EXPRESSED IN HEART, SIGNAL = 1.2; EXPRESSED IN PLACENTA, SIGNAL = 1.3; EXPRESSED IN BONE MARROW, SIGNAL = 1.1; SWISSPROT HIT: Q14168, EVALUE 2.00e-33; NT HIT: gi14772401, EVALUE 1.00e-111; EST_HUMAN HIT: BF306083.1, EVALUE 1.00e-110
gcagtagttgagggcaaagggggtacatgggcgtgttcaggtgacaggtgtctggaactatatgggggagcaatgaggcagcagagaggacattgggcaggctgggaaggagcagagtggcggtacctgggggttgacatccagcacgcacaccttcccagcagcgaccacgccccggatggagtcaatacgtgtgccatacaggttgccctcgtattcgccatgctccaggtagcgcccagcacggacgtcagcctccatctccccacgggacacaaagctgtaaccctgaccttcccgctctgagtctttcggccgccgggaggtgtctagggggatgggggtaggttggaccaaatgggcaggggcaggttacagtgcctcagacacatatatgcacccctacccaggcccccgtttcccagccttggaggtgcagtctgctccccatcttgccagcactgctgcctttgcacacacctgccccccactctccccattggcacacacagagacatgagctggtaatcatggtccagcccagagcccacagaagagaggctgaggtccagaaagggcaatgta

SEQ ID NO: 3677 - DNA, 559 bp, Homo sapiens
  MAP TO CHR22_234.0; EXPRESSED IN HELA, SIGNAL =  34; EXPRESSED IN FETAL LIVER, SIGNAL =   7; SWISSPROT HIT: P55281, EVALUE 3.10e+00; NT HIT: AF216213.1, EVALUE 5.30e-01; EST_HUMAN HIT: BF797797.1, EVALUE 0.00e+00
ttgcacattttctttgcgaggttcatctgcattgttgagagtagttgcagagggttcatttgggttgccagataacatttcatcctgaatacttacccgtttccaagttatcgatcttttttaccatagacgggtattgcggccgtttcccttttccgtcgtgaggaagagcagagccgtgacatccctgtgagcatctttcagggagtgtgcaggcctttctgtgggctgtgctccccatgattgggcggaatcgtagagcacgtatgtcaacgtcgctgggtaacttccacaggttttccaccgtgctagtaccgtctccttctcccaccagcaccgcgtctgcgctccttcctcccacgtcctgtccggcgctggacgttgtctctgtaaggcttgtctctccttccgtgctgtctccgacccgtggcacctgccagggacaaagcctctgctgaatcggtcctccctatgccatttataaccaacggttgaagtggaggaaaacagaataatgaaaagtacttgttcatccaaaagactgcaagacgaggagagg

SEQ ID NO: 3678 - DNA, 517 bp, Homo sapiens
  MAP TO CHR21_12.0; EXPRESSED IN ADULT LIVER, SIGNAL = 5.3; EXPRESSED IN HELA, SIGNAL =   5; EXPRESSED IN FETAL LIVER, SIGNAL = 3.6; SWISSPROT HIT: O26057, EVALUE 3.60e+00; EST_HUMAN HIT: BE004561.1, EVALUE 4.60e-02
gcctcttagcctaaagcactgaaatattatgtagaatattgtgttagggtacaacaataagggaatttgattttacaattaggagaatttgtacagcttgttccaattatcactcttcattttatatatacaactaaccttaaggcctcatttacatgaaagttggttcactttcaaccggtgtgcatgtcacttgtgatgatttctagtctacttcatgcaaagcaatttcagtaagtgcttaccttgaagtgatttatgttcacacaaagaccacggggatcccacttactgattccatcatacgacaagctctcataactctctatttctctagaaataatattttatataattgcatcaggttatattgtttaaaatgttgaatctgtttcttacctcttccctggaggttataaaaaaaatcactttttttcctccattgtaagaagattttaaaatttttctttctatggtatcattgaattcaggagggcggggcaagtgagtttaggaa

SEQ ID NO: 3679 - DNA, 592 bp, Homo sapiens
  MAP TO CHR22_32.0; EXPRESSED IN FETAL LIVER, SIGNAL = 2.9; EXPRESSED IN BONE MARROW, SIGNAL = 2.9; EXPRESSED IN LUNG, SIGNAL = 3.5; EXPRESSED IN HELA, SIGNAL = 2.8; EXPRESSED IN HEART, SIGNAL = 2.9; EXPRESSED IN PLACENTA, SIGNAL = 3.4; NT HIT: AL163246.2, EVALUE 5.00e-32; EST_HUMAN HIT: N47359.1, EVALUE 5.00e-33; SWISSPROT HIT: P54259, EVALUE 3.30e+00
taatctcccttggcaacaccctcacagacacacccaggatcaatactttgcatccttccatccaatcaagttgacattcagcattacccatcacaactattgatttgtgttgccacccacaggtcctcagtgtttagggttacgccattgtttacgccactactatcattctcatcatcattattgtgattttggaaaactcttaacatctggtaaagcaagcattccttcttggttctcctgctttccaagttggcttttacacccatcccccagccccagctgaagtgtgtgcatcagatccctgggaaagcctggctggactgggctcagagcggcactgagccggggggactgcagacggggctggcgccctgcacacattatatccacccatccagggtcttccttcaggtcccaggatatatatgtgctgctgccgtctcgggaccacccccatcctgcctggcatcacccctgtgtgcctgtgcccatggcctgagccgagaccgggattcacagcctgacttcctggagtccacgtccctcctggatttcctggagggccaggtgttggcccttgtagcctgta

SEQ ID NO: 3680 - DNA, 552 bp, Homo sapiens
  MAP TO CHR21_17.0; EXPRESSED IN HELA, SIGNAL = 3.8; EXPRESSED IN FETAL LIVER, SIGNAL = 1.9; EXPRESSED IN BONE MARROW, SIGNAL = 1.8; EXPRESSED IN PLACENTA, SIGNAL =   1; EXPRESSED IN ADULT LIVER, SIGNAL =   2; EST_HUMAN HIT: BF895582.1, EVALUE 2.00e-01
ctgtgagtcccaggagaaggaaagtctgcaggatggacctctcccagaaccacactcccactgacaaaacaagactaaactaaggaatgttctcgaatgtttttgatatggaattcaaaggaaaatgtgtcctgcagtgatgctgatctgagaagaccgcctgaacacactggcctgaggattgtgctaaagaggaatttcttgtttcctctaccaatcctacttcttataaacttgttcttagagaattatgacaaagaagacagacaagcacaaaaagtaagatttttagtaatgaggcaggtatccaccaagaataaaaatttttcttggcatgaaagtcatgtcaactctgacagttcaatagtactcatattcatttgaatagtcttaatgtgctgtgtggctgtatacgactaacttctcacatatgacctatacatccatgatttatgtaaacaaatgcttaaaaagaagtaccagaaaggtacacactcaaaaaataaagatacatacagctagtgtgacaactggcaacaaagatggtgatca

SEQ ID NO: 3681 - DNA, 539 bp, Homo sapiens
  MAP TO AL138842.2; EXPRESSED IN HELA, SIGNAL =  13; EXPRESSED IN FETAL LIVER, SIGNAL = 3.7; EXPRESSED IN LUNG, SIGNAL = 6.3; EXPRESSED IN BONE MARROW, SIGNAL = 4.3; SWISSPROT HIT: P75870, EVALUE 3.90e+00; NT HIT: gi16161421, EVALUE 0.00e+00; EST_HUMAN HIT: BI061616.1, EVALUE 0.00e+00
tcctttgaccccttcatcagtgtgtcacccggccaattcgctgatctcactttctcctctctctctctctccctctccctgtctttctctttcattcttttctacctggccctggtctatcccaacataaaggcaataattcgttacctcattaatggatctgtcctttttctttttaaacagttccttatgttagccatgaaatctagctggggctgtgtggtttctgattccccctggcttattctttactttttcctacttttccaggctcagcagggagctgctggatgagaaagagcctgaagtcttgcaggactcactggatagatgttattcgactccttcaggttatcttgaactgcctgacttaggccagccctacagcagtgctgtttactcattggaggaacagtaccttggcttggctcttgacgtggacagtgagtaccttactatgaaggtgataagcctccacctggtcttccagataggggtgatattcctattccaagtggcccttactgacccgagagacg

SEQ ID NO: 3682 - DNA, 548 bp, Homo sapiens
  MAP TO CHR22_192.0; EXPRESSED IN HELA, SIGNAL = 4.7; EXPRESSED IN LUNG, SIGNAL = 4.5; EXPRESSED IN FETAL LIVER, SIGNAL = 2.8; EXPRESSED IN PLACENTA, SIGNAL = 1.5; EXPRESSED IN ADULT LIVER, SIGNAL = 3.4; EST_HUMAN HIT: BE788804.1, EVALUE 2.00e-69; SWISSPROT HIT: P29341, EVALUE 1.00e-45; NT HIT: gi14743624, EVALUE 1.00e-69
cagcctctttagcttggtggtcttgtagtacagctatacctttgtcaaccttagtatagagaggctctggagattcaagcatatgaaggagttctaaattaccaatctgcaacaacttgccaatgattttaccagcacgactagggcatggcttgaagaagaggaaacagccattcactcatttccttttgcttttgaggaggagcagatgccatcatggaagtcaaaggttcttgaccttctacatgaacagtaggctgctgcatggtaatctggggctgtgcatgaaaatgccattgaggattgtgagcttccatagcatatttatactgtgaaatggtacaaacagcaggagtatctgtagtagccatagcggcaactgcaggatgtgctcctattttctgtgtcgatgtgttacaacagctgtgttgacatgacttgtggaatctgtgaagaagctgttctcttactactaaatgtagtgagctaggagtggcttagacatatttttcaatggatgaggtctggcaccctgagcaatttaggga

SEQ ID NO: 3683 - DNA, 516 bp, Homo sapiens
  MAP TO CHR22_171.0; EXPRESSED IN BONE MARROW, SIGNAL = 2.5; EXPRESSED IN HELA, SIGNAL = 1.6; EXPRESSED IN PLACENTA, SIGNAL = 2.7; EXPRESSED IN LUNG, SIGNAL = 3.1; EXPRESSED IN FETAL LIVER, SIGNAL = 2.4; EST_HUMAN HIT: BI560870.1, EVALUE 1.00e-119; SWISSPROT HIT: Q92523, EVALUE 4.00e-31; NT HIT: AB003286.1, EVALUE 0.00e+00
caggacaaaccacacaccaggcaccagtgccctgtctgcctctcccgtctagctcagaaccccaaaggagtccaaagagtctcaacccaggtgcctgaacccctccactggctgctgctcacagcccagatcctggtcaagttgctggtcttgccatgcatctcaaacatccacccatggtagcagagaagcagcttcagggtttggcggaagaagaagatgcccgtcacccagacgcccgtggagaagatggccatgctgagaagtgcccgggtctgcggggtctggtaggggccacacctattggagaggggcaagggctgcagggggtcctcttgaggccagcctcgggtggctgtgaactgtctcaggggagacaccaaggggaagaacctccctgggcacactcatgtctgactgcatcaaatgagcggatgtagggctaagacaatggttgtcataggggagggctgccccgtgactgccaatggctgctgtcctgtatctgcccagctc

SEQ ID NO: 3684 - DNA, 538 bp, Homo sapiens
  MAP TO CHR21_52.0; EXPRESSED IN HELA, SIGNAL = 0.62; EST_HUMAN HIT: BI459936.1, EVALUE 0.00e+00; SWISSPROT HIT: P11845, EVALUE 4.00e-06; NT HIT: AJ229041.1, EVALUE 0.00e+00
tgaagggaggttttccagtggggaaaaaatggctcattcgaaataagaataaatgtgttcggcgtcggcgtcgctccgcgcgggggctccaggccgaagtctcgccgcgggctgcgagtcaaatgccggtggttaagggggctcgagaggcctctacccgtttggcgttggctctggcgtctgggtcgttgtgtcctgacaaccgctcaggtaaccgtttcctagacagcgggtgcggctactttagccctgagcgtgctctgcggctgcctgcgggtctcagctagtgtccgacccctctcttcgcggactccacgccgagcagccaccctgagccaagagccggaagtcccggcattggcggcctggacagcctcgcaccggccaatcaaggagaacctcaagaacaacttcctctatgacttcctctacggcggtgtcggcctaacagctccacgggagtgtggacgaggagctgagcaaaaaaattccagaagtgagatgaaatgaacatcctggcgacatatcatccagcaga

SEQ ID NO: 3685 - DNA, 500 bp, Homo sapiens
  MAP TO AL137013.2; EXPRESSED IN ADULT LIVER, SIGNAL =   9; EXPRESSED IN HELA, SIGNAL =  21; SWISSPROT HIT: P46778, EVALUE 6.00e-79; NT HIT: U14967.1, EVALUE 0.00e+00; EST_HUMAN HIT: BG614048.1, EVALUE 0.00e+00
agctggtaaatgcccttttggctggaaccgccatcttccagtaattcgccaaaatgacgaacacaaagggaaagaggagaggcacccaatatatgttctctaggccttttagaaaacatggagttgttcctttggccacgtatatgcaaatctataagaaaggtgatattgtagacatcaagggaatgggtactgttcaaaaaggaatgccccacaagtgttaccatggcaaaactggaagagtctacaatgttacccagcatactgttggcattgttgtaaacaaacaagttaagggcaagattcttgccaagagaattaatgtgcgtattgagcacattaagcactctaagagccgagatagcttcctgaaacgcatgaatgaaaatgatcagagaaagaaataagccaaagagaaaggtacctgtgttcaactaaagtgccagcctgctccacccagagaagcacactttgtgagaaccaatgggaaggagcctgag

SEQ ID NO: 3686 - DNA, 506 bp, Homo sapiens
  MAP TO CHR22_76.0; EXPRESSED IN PLACENTA, SIGNAL = 0.65; EXPRESSED IN LUNG, SIGNAL = 0.71; EXPRESSED IN HELA, SIGNAL = 4.9; EXPRESSED IN FETAL LIVER, SIGNAL = 0.66; SWISSPROT HIT: P53814, EVALUE 3.00e-07; NT HIT: gi14777812, EVALUE 3.00e-61; EST_HUMAN HIT: BE737493.1, EVALUE 4.00e-61
agcatgaatgacctgatcccagaagacccagatggcacgaggcaatcgcaagccagcgctgtggcatgtgacctgctgaggcaggtgctgcccttggttctcagccctccaaccctgtgaggtgggtgccaggagctggccctccatggcctaccttatcctggctgttcagttcttgatatggaatgtgggcagggagatatgtatgcaggagggcacagaaggccagcccatcattccagctgctgctgaagtttgtaatgtcaatattctgaaggaaaggaagaaaaacatgtaaccaacacatgctgggaccctcttaggagatgccaaggaggacgcaggaggcctcagatgctgcatggcctccaaaacacaaaaccaaaaccagggcagggcggctgtgtccaagggctacctggtatctatgactccccaacccgtcccacccaccagctgtagatggctgcccctacgtggtcacgcctgggcctggtataacacgt

SEQ ID NO: 3687 - DNA, 521 bp, Homo sapiens
  MAP TO AL135786.2; EXPRESSED IN FETAL LIVER, SIGNAL = 0.67; EXPRESSED IN PLACENTA, SIGNAL = 0.57; EXPRESSED IN HELA, SIGNAL = 0.5; EXPRESSED IN LUNG, SIGNAL = 0.58; EXPRESSED IN ADULT LIVER, SIGNAL = 0.68; NT HIT: AF051160.1, EVALUE 7.70e+00; EST_HUMAN HIT: BF675195.1, EVALUE 4.00e-30
taatgccccttgctcatttctgttttcaattttttcttgtcaagacatttgccttctgtttcaatacttagtatttactttacaactaattctgatttgtgctaaccatcatttcttcctaaatttcaaaaacgttaaggacttaattttgctgtcctacttttacactttataaaaattttgaaactgatttaaacaagaactctaaaaatagtctgtcatgctgattcagatcactatttgacataagttgggtggagacctgaacattctctgtttgatgtcctaccacaacctgcccacctggctcctccataccctgctcttcctcgtccgtcactgccctgtgctctgagtctgaccctccacactgcatttcccagattcccttgccctctggcttctgatggggatcagccagtgtggttcccagcaggagtctggagggtagggagacagtgagtttaggtatgtggtctggctatggcagtgggttcctaagccacagatccttttaggca

SEQ ID NO: 3688 - DNA, 502 bp, Homo sapiens
  MAP TO CHR22_149.0; EXPRESSED IN ADULT LIVER, SIGNAL = 0.29; EXPRESSED IN PLACENTA, SIGNAL = 0.33; EXPRESSED IN HELA, SIGNAL = 0.52; EST_HUMAN HIT: BI669892.1, EVALUE 1.80e-01; SWISSPROT HIT: Q9Z6X2, EVALUE 1.60e+00; NT HIT: X55663.1, EVALUE 3.10e-02
aaaagccgtgtttctgatgggccaatttcctggccccaagtggccctcctttgtccccacacacctagtaccttctcagaatgctgccagagaagggaagagaggccaggtctctgtggatgaagcaccccccagagagatactggtgaggctcagttgtctgaacgcgtgggctcctggaattttgttgttggctgggtcatggtcagtgtgagaagcagggcaggttccctgttggctgtcaaaagagtcagaccgtagatgtgtttccctttggggactttgtccaggagctgtggtaggagaggcttgaagaggtaggagagggtgtggccaagtgagcaagcagggaggggtttgactctgggttgatgctgaaggtgagatgtcacagggttgggaatgggtgggtgcttgatgagtaaatgccggctgctgcattcatcagcatattagagaagttctcctgggggccatgccctgggataggctctgggaattc

SEQ ID NO: 3689 - DNA, 508 bp, Homo sapiens
  MAP TO CHR22_86.0; EXPRESSED IN HELA, SIGNAL = 0.65; EST_HUMAN HIT: AA703902.1, EVALUE 1.00e-106; SWISSPROT HIT: Q64444, EVALUE 4.00e-06; NT HIT: gi14750209, EVALUE 1.20e-01
agttacccgtgagcggtatggggtgaaagtgggagggtccagcctggggcacgctgtggaacagggtcatctgagggtgcagggcaaagagatcaaaacggggtgggagaggggcagcgcctgcgggaggagccaggcaaggcccggggaggggtgtggggggcgagggggaacggtggctccacctgcacccaccggatgggtatggggtcctcgaagacggtccagagcaccgtgggctcgcagtcaggcggggtcagtgacccagcgaagcgacagtagctcgaggtgttgggccgcatcgacgccagcaggaaggtggacctcagattcactgagagccctgggcggcagagggagggggattggaaccagcctccccgtgccctgctggtgccatccccagcaaaccccccgcccctgagccggaaaacgacccggtggctcctcacctggctcaggcactttcctcaagcccgacactatggcgcagaagttggtgttgcta

SEQ ID NO: 3690 - DNA, 500 bp, Homo sapiens
  MAP TO AL137251.2; EXPRESSED IN HELA, SIGNAL = 0.76; EXPRESSED IN FETAL LIVER, SIGNAL = 0.75; EXPRESSED IN BONE MARROW, SIGNAL = 0.9; EXPRESSED IN PLACENTA, SIGNAL = 0.89; EXPRESSED IN LUNG, SIGNAL =   1; EXPRESSED IN ADULT LIVER, SIGNAL =   1; NT HIT: AB038490.1, EVALUE 1.00e-29; SWISSPROT HIT: Q9Y618, EVALUE 2.10e+00; EST_HUMAN HIT: BF855842.1, EVALUE 2.00e-28
tgtgtggtacctctcccctcactcttttgctcctgctctggccatgtgacatgcagtgcttgctctgccttcactttctgccacgattgtaagtttcctgaggcctccctagaagctgagtagatggcagtatcatgcttcctgtatagcctacagaaccatgagcccagtaagcttcttttctttataaaatacccagtgtcagagttctgaaggataatggtggatgggaggcaagactaaattgcagctcccactcagacagagcagcatgtagagactcacatcataaacttttgcttcaagtagtaccccatgaatgtaccaggaaagctgagagaatccacagacacattgatggaagtggattgctcctgcaggccccaggagacgctgaaaaactgtgagtacccaaagtgtgaaaatatgaaaggggaattgtccgcccccaaacacacaccctcactgggaaaactaaaagtccagatcacgggagaaga

SEQ ID NO: 3691 - DNA, 565 bp, Homo sapiens
  MAP TO CHR22_180.0; EXPRESSED IN BONE MARROW, SIGNAL = 0.88; EXPRESSED IN HELA, SIGNAL = 2.1; EXPRESSED IN LUNG, SIGNAL = 1.2; EXPRESSED IN ADULT LIVER, SIGNAL = 1.4; EXPRESSED IN FETAL LIVER, SIGNAL = 0.99; NT HIT: gi15319110, EVALUE 0.00e+00; SWISSPROT HIT: Q07960, EVALUE 1.00e-08; EST_HUMAN HIT: AA514271.1, EVALUE 0.00e+00
ggaagaggagatagtggggggttgaggctgtcacagaaggtcagagccagagggtcctccaggacatggaggccaagccttccttttagagatagggtaactaaggccctgagtgggcaggtggctgcacagggtccccattactggctgccggctcccagtccagtgctcctctcactacacctacgcctctccctaagttcgggagggagttccaggtgcccgtgccccttggtgttcactcccctttacttgtgtgtggtttcctccaggtgtcccgggagagcatcttcaacaaaatgaacagctctaacctggcctgtgtcttcgggctgaatttgatctggccatcccagggggtctcctccctgagtgcccttgtgcccctgaacatgttcactgaactgctgatcgagtactatgaaaagatcttcagcaccccggaggcacctggggagcacggcctggcaccatgggaacaggggagcagggcagcccctttgcaggaggctgtgccacggacacaagccacgggcctcaccaagcctaccctacctccgagtcc

SEQ ID NO: 3692 - DNA, 542 bp, Homo sapiens
  MAP TO CHR22_154.0; EXPRESSED IN HELA, SIGNAL = 1.2; NT HIT: K03241.1, EVALUE 5.20e-01; SWISSPROT HIT: Q09699, EVALUE 8.80e+00; EST_HUMAN HIT: BF171318.1, EVALUE 9.00e-13
ctgcagaagagtgagcgatggggagatcggggagtggagtcagggctcaggccatgcgctgccaagaccttggatttctggtgatggggaggccataggggagggttgaaccaggtggtgacctactcagatagacatttcaaaaataattgttttggatactgtttgcacaaatgactgtagggccaggagcaagatgggaggcattcctgctatccaggtgggaaaggaaggtggccaagaccaagaggtagagaggggagagatgagtgcacttgaagtcatttttggaatagagctgccaggacttgttgatgaattggacattggatgtgacaaggagggaggaataaaggttgggttgtttgagtgaaggttgagttgtttcaggcctgagcacctatttgcatgatggtgcctgttcctgaaatgaggactggaggtgataccaggttagagaaagagtggcatgggatctagattttggcgaggggttgtgaagcttgagatgccgttagtttccaaatggagaggtcaaggga

SEQ ID NO: 3693 - DNA, 563 bp, Homo sapiens
  MAP TO CHR22_163.0; EXPRESSED IN HELA, SIGNAL = 0.81; EXPRESSED IN ADULT LIVER, SIGNAL = 0.97; EXPRESSED IN BONE MARROW, SIGNAL = 0.93; EXPRESSED IN LUNG, SIGNAL = 0.93; SWISSPROT HIT: Q61125, EVALUE 1.80e+00; EST_HUMAN HIT: BF212287.1, EVALUE 2.00e-01; NT HIT: gi12018235, EVALUE 5.40e-01
agttatgtggccctggagtgacaaaattggagacccgggtgggcccaagttatgactggtttccctttgcagacaggagccgaactctgcaaggatggaagcccccacactttcgtggtacgcaggggatcgaagcccagggagaaaggccctgagaatacaaaagtgagcatatggagagccctagaggaggggtcagctgaggctgtggctgcttttgccctcagggaacgtgcccttcggggcacagctggatgccaagagaatctggccgtgtcctcggtggaaggacattgctggaggatggaggaataagtaacaacttctgaaggttgtgtagggcttggactgacaaaactgaagatgtgagggacctccaatacaaagctggtcatccccttaaaatatccacagaattaggaagctgtttggaacaggaagctcaagaactaaacctattcactcctcccccaacacacaccagctgccctcagtaatgtgaggctgccaccggtttctctaggtgtttcctcagcccctgaacaaggatggagaacctttgc

SEQ ID NO: 3694 - DNA, 583 bp, Homo sapiens
  MAP TO CHR22_145.0; EXPRESSED IN HELA, SIGNAL = 1.1; EXPRESSED IN ADULT LIVER, SIGNAL = 0.61; NT HIT: gi14778388, EVALUE 1.00e-130; SWISSPROT HIT: Q13164, EVALUE 2.50e-02; EST_HUMAN HIT: BI910498.1, EVALUE 1.00e-100
acacttcctgttggagcctgcgcagagccagaggtccctggggtgcagcaccgtgggcaggcagggggagatggtcaggggtccccaaaggcagcgggcacctccatgtggggcctgtgttttggcagccctggggtgggtggccccctttccttcttgttctttggtcccagaggagggtcctgtggcctgaccaggctcttgccttccctgtgctcaggcctcagaagccacaggaacatggcctaggcatggctcagccagcagccccctccctgacgcggcccttcctggcagaggccccgacagcactggtcccacacagccccctgcctggggccctgtcaagcgcccctggcccgaagcagcccccgacggcaagcacaggcccggagctgctgctgctgcctctttcctccttcatgccctgcggggcggctgcaccagccagggtacgtcctccaccaccaggcctgggcactggggctctcactctggtctgacttctggtgctttctcatgccacagctgtactagtttctggaaaaccttggcacagggaggccactcatccatttgacaa

SEQ ID NO: 3695 - DNA, 558 bp, Homo sapiens
  MAP TO CHR22_148.0; EXPRESSED IN HELA, SIGNAL = 3.8; EST_HUMAN HIT: BG199793.1, EVALUE 3.00e-03; NT HIT: AJ271348.2, EVALUE 4.00e-05; SWISSPROT HIT: P08640, EVALUE 6.10e-01
tgggtagaagtgaggcaagggaggaggatggggcaggagggaaattcactggagacctcaccgtctctggagaccttcctgcctctctgatggagcacgttggtggaacagtggaccctgttgtctctgatgcagacacagtctcccacttattgaatccaccatccacctcttgccattcacaggagggctctgggtcactggagagtgctgggacacacggggaaaggggccaggacctctgcggagtcagaagccctggcaaagaggaggcaccacccaaaagctcgccaacacttaggtgtggggtgggaatgggagaagacccaggctcttgcacgaggttctcccaaagctttctgcagtgaaatccatcaagtcatggagtcttagccaagtcacttcccttgctgggtctcagttttctcatctcagtaatgggaacaacagttactaaactctaataaaacctgggaaagggaaagtatagcatactgtattagtttgctagagatgctgtaacaaaattccaccgcctgggtggcctaaacaacagaa

SEQ ID NO: 3696 - DNA, 584 bp, Homo sapiens
  MAP TO CHR22_153.0; EXPRESSED IN BONE MARROW, SIGNAL = 0.84; EXPRESSED IN HELA, SIGNAL = 0.53; EXPRESSED IN FETAL LIVER, SIGNAL =   1; EXPRESSED IN ADULT LIVER, SIGNAL = 0.72; SWISSPROT HIT: Q28247, EVALUE 8.50e-01; EST_HUMAN HIT: BF795325.1, EVALUE 2.10e-01; NT HIT: U62749.1, EVALUE 3.60e-02
ctggagaggctcagggtatgtgaccagccgacgtggagcagactccggggagtggctggcagggccctgtgctcgtgactgctgctcctggcagggaagccctggagaatgtggtgcgctcattcctgccattccatccagggaacctgcgcggctgcgctcagcatagttgggcacagagaatgcaagggagtgcctgaggcatctctggccccacggcccaggaagtcctattggttcaggaccttgaagctgcaggaccagccccgggggtgcagtggccactctgccttctcaaacatccacaaatcttcgtctagtctctggatgggggaacttccgtctctttatagcctgcaggttcagcgtttaaattgtgagctggggatgaagaaaaggagtatcctcttacttcctcactctagtgtggcagaggggagcagggtgcctctgctgacaggcaggctctctgtgaaatggacgaactgggaggaggcggccaggagcagggccagctgctgccatctgatcttgctcaaagactgacccatgggctcatgggaagtgcctggtgtcaagatgaa

SEQ ID NO: 3697 - DNA, 542 bp, Homo sapiens
  MAP TO CHR22_194.0; EXPRESSED IN LUNG, SIGNAL = 0.88; EXPRESSED IN PLACENTA, SIGNAL = 0.91; EXPRESSED IN ADULT LIVER, SIGNAL = 0.92; EXPRESSED IN HELA, SIGNAL = 0.77; EXPRESSED IN FETAL LIVER, SIGNAL = 0.86; NT HIT: AF288742.1, EVALUE 0.00e+00; SWISSPROT HIT: P04258, EVALUE 1.70e+00
catctgaaactctggggaaaactaggattctttaaccttgtagacctaaaagacacagaggcagttaatttcacttaacacgaatttattagaaacagctcctttagaaatcagcgttctctgatctgtaataaaccttgtaattaactttgctaacttactggttatgcctgtgggcagctggacagtggagttgtgttcaaaggcctgggcaaataccttgtgaccagatgcctgcaggcctgtggcagcagaactaagggagcccagctccccggggccctgcctgttgccttcttcctgcatggtggccaggtgtctgcaggtggccagacacaggtgcaccagccacggcagcggggtcagaagatgagagggtctcagaggtgaccccgatttcctggaatcaccgtcaggcccctggccatccccatttcccgcgtgccccttagctctcaagggcatctttgccctttgagataaagcaacgccgagcttgttgctgcaggggacagcactttcgctcggattttcgcattaaa

SEQ ID NO: 3698 - DNA, 596 bp, Homo sapiens
  MAP TO CHR22_181.0; EXPRESSED IN HELA, SIGNAL = 0.69; EXPRESSED IN PLACENTA, SIGNAL = 0.93; EXPRESSED IN LUNG, SIGNAL = 0.76; NT HIT: gi4507332, EVALUE 1.00e-85; SWISSPROT HIT: O14994, EVALUE 4.00e-26; EST_HUMAN HIT: BF948386.1, EVALUE 3.00e-74
ctactgaggcctccatgctggggagtgggcttgtcgcagagtgggaggccacccactgcctcccagatccctccaggtcagcctgccctgtcacctaccacccagggcttgctgcagaagttgtagacggagtagagagagttgacagcaggcagccctccatactgcaggccgatgaccaggctgcggtagtcttcccccagggccatgctgtaggcatgctggcggaccaggatgaagtctggcttgaaggatctgctgagaaagccaacagcagtgttaccacactgggacattgatgaaacaccagggcatccggccacagcttgctggggatgatagcactgacttgcagggcggcagcttagttcagaagtgggagcaggtgggggatgagggcagttaaatgcaaaggcacagctactccactataaagtcaaagggctggaaacactatatatattctctctctctctctctctctctctctctctctctctcacaggctctttcctaaattccctgcattgaacatctatttcatttgcaaccagaaaaaaatatatcaaagtgaatcaaccgagattctgcaaggt

SEQ ID NO: 3699 - DNA, 591 bp, Homo sapiens
  MAP TO CHR22_114.0; EXPRESSED IN HELA, SIGNAL = 1.1; EXPRESSED IN FETAL LIVER, SIGNAL = 1.4; EXPRESSED IN BONE MARROW, SIGNAL = 0.65; EXPRESSED IN PLACENTA, SIGNAL = 0.6; EXPRESSED IN ADULT LIVER, SIGNAL = 1.4; EXPRESSED IN LUNG, SIGNAL = 1.3; NT HIT: X15892.1, EVALUE 0.00e+00; SWISSPROT HIT: P14648, EVALUE 9.00e-35; EST_HUMAN HIT: BI196916.1, EVALUE 0.00e+00
ataatgcctagaggtggggctgctctgccaacaggtgggggtggagcccccggtcctggtgggtactgtgttggggctccagtaatgctcttctctgtggagtcattacctgctgggatggtcccccaactcctgggacggggcctgctaatccaccaggagcctggggaattggtacaccagctgatactcctctaccagctgccctaacaactccagggcctcctgcagctccagcaagtggtacccgagcaatgccagtatattttgggggtagcccctccacagtcatggataccaagttctccccatgcagcaacaccagaccccaaaagtgcttttcttcgagctctggttgcttcacgttctttggcttgatctttctgaactcatcacaatcgcagaggatcaaattcacatgcttgtcaaacgccttaaagatgccaaagaagattgtgccttcctgtaggatgcatttcattctatagtcaatgtgctgctgcagccttgctactcgtgcccacagtcgtgattgctgcttcaccaaatcccgtgtccacagttaaaacttcgtgcttcttaagacctggg

SEQ ID NO: 3700 - DNA, 517 bp, Homo sapiens
  MAP TO AL160236.1; EXPRESSED IN FETAL LIVER, SIGNAL = 8.1; EXPRESSED IN HELA, SIGNAL = 8.7; EXPRESSED IN ADULT LIVER, SIGNAL = 8.7; EST_HUMAN HIT: BG740985.1, EVALUE 0.00e+00; NT HIT: gi14752838, EVALUE 0.00e+00
agaagaggcaagaacgacccctggaccgaccaaagcccgcgcgctgctgcgtcccacacccggtgcccacatcccgccgccgccgccgccgccatgcccaagagaaagactgaaggggatgctaaaggagataaagccaaggtgaaggatgaatcacagagaagatctgcgaggttgtctgctaaacctgctcctccaaagccagagcccaagcctaaaaaggcccctgcaaagaagggagagaaggtacccaaagggaaaaagagaaaagctgatgctggcaaggagcgggaaggtgctggagatcccaagtgaagtgtgtgcattttttataactgtacttctggtgactgtacagtttgaaatattctttatcaagttttataaaaatgcagaattttgttttactttttttaagctatgttgttagcacacagaacacttcattgttgtttttgggggaaggggtatgtgtcactaatagaatatctctgaagctggattgatacggggaaaa

SEQ ID NO: 3701 - DNA, 584 bp, Homo sapiens
  MAP TO CHR22_81.0; EXPRESSED IN PLACENTA, SIGNAL = 0.41; EXPRESSED IN ADULT LIVER, SIGNAL = 0.29; EXPRESSED IN HELA, SIGNAL = 0.82; NT HIT: AF093266.1, EVALUE 3.60e-02; EST_HUMAN HIT: BF345885.1, EVALUE 1.00e-110; SWISSPROT HIT: Q27972, EVALUE 2.90e-01
acatgaatcaggaccaagccaagtcaggctcctgcttcctggggactttggaacctggcccaccacccaccaaggtctcacccctcctgccccatggccaaccttatctgctccacactgtcttcctttgatgggggttctcctggcactgggcctggaggctggtgtccgcttggcctttctggcagcccagcccgggcagtcttcaaagacagcagctgcagccttcaccctctggccacgggcattgggaggggtggcgcaggtggcccccacccgcaggttcagcccagtaagccacctgaagagaaaagagagctggggagctagctgtgctgattctgctccagtggcctggagcaggtgggcactgggtgtggggcagggttggtgcagaaggcagcacaaggccacaggcagcatgcattcattcgctcaacaagcatttgccagctttcctgaggaggtcaaggaggccaccaggaatttgggagcggtggagcctataggtgacagcaggctctgctgagaatcttggcggctcaccaattatgtgacctacaagccacttcaagcctctgatc

SEQ ID NO: 3702 - DNA, 599 bp, Homo sapiens
  MAP TO CHR21_31.0; EXPRESSED IN BONE MARROW, SIGNAL = 3.7; EXPRESSED IN LUNG, SIGNAL = 3.8; EXPRESSED IN HELA, SIGNAL = 4.9; EXPRESSED IN ADULT LIVER, SIGNAL = 3.1; EXPRESSED IN FETAL LIVER, SIGNAL = 3.2; NT HIT: AL163227.2, EVALUE 2.00e-37; EST_HUMAN HIT: BG281812.1, EVALUE 8.00e-38; SWISSPROT HIT: Q39786, EVALUE 3.40e+00
ttcccaacaatcctccaaagtctgaactcattccaacataaaatgtccaagtccaaaatctcatctgagacaaggcaatttccttctgcctataagtctataaaatgaaaagcaacttagttacttcctagatgcaataggagtataggcatggggaaaatatacctgtttcaaatgggagaaattggccaaaacaaaggagctacaggcctcatgcaagtctgaaattgaataggccagttctgaaattatctctttaatcgatgtctcacatccagggcatgctgatgcaagaagttgactcccatggccttctgcagctccactgctatggctttgaaggtatagctcccctcctggctgctttcacaggctggtactgagtgtgcagcttttccaagagcacagtgcaagctgtcagtggatctacaattctgcagtctggaggacaatggccctcttctcacagttccactaggcagtgccccagtggggaccctgtgtgggggttccaaccccacacttcccttccacattgccctagcagaagttcttcatgaggggtccacccctggaacacacctctgcctggacataca

SEQ ID NO: 3703 - DNA, 554 bp, Homo sapiens
  MAP TO CHR22_89.0; EXPRESSED IN HELA, SIGNAL = 0.84; EXPRESSED IN LUNG, SIGNAL = 1.1; EXPRESSED IN FETAL LIVER, SIGNAL = 0.43; EST_HUMAN HIT: AW855468.1, EVALUE 4.00e-89; SWISSPROT HIT: P04275, EVALUE 5.00e-34; NT HIT: M60676.1, EVALUE 0.00e+00
agatgtgtttggggctcttgttcccactgtttaatttttcctcctttggtcttagtccagcgcttcctcttactattatcttgtttttgagggtccatctgtacatcttgtgttttgcttcctgtctcatgtacaggaggcctccttgctgtgtaggcccgtgttcaattctaggggtcagttgtctggcagatgggcttagagttggagtacctcatcttattccctgcctgaatctgctgttttcttctgcagcccggggacgtctggaccttgccagaccagtgccacaccgtgacttgccagccagatggccagaccttgctgaagagtcatcgggtcaactgtgaccgggggccgaggccttcatgccctaacagccagtcccctgttaaagtggaagacacctgtggctgccgctggacctgcccctgtgagtcctttgcttctccagccagggcagcgtcaaaggggcagtgcttttagcttggctgtgcagaaaagtagagcaggcacccaccagcccagaagtaccctttccctcatcaccacat

SEQ ID NO: 3704 - DNA, 505 bp, Homo sapiens
  MAP TO AC022528.3; EXPRESSED IN HELA, SIGNAL = 0.53; EXPRESSED IN BONE MARROW, SIGNAL = 0.96; EXPRESSED IN PLACENTA, SIGNAL = 1.1; EXPRESSED IN LUNG, SIGNAL = 1.1; EST_HUMAN HIT: AI682392.1, EVALUE 1.00e-118; SWISSPROT HIT: P04030, EVALUE 4.60e+00; NT HIT: gi14745789, EVALUE 6.00e-53
cttctcccatcttcctgctggaagtattgtttagttgtacatgacaaccaatgttataaaggctgttttgcaaaagaaacctgaaagggtaatgcatagaatgcattgaaatggtcaactattaaagctcttatttcaggccatcacctgaattgaaattatttttatacaaataaaagtataaaaattgaccttaatctgatatattctctatacaagtgattagaaaacttgaattatatttttgccttttaatttttgttaatcattcccagcaacttattccatatgtggaagaagatggctcaaagaatgatgatcgggctggcccacctcgttttgctagtgaagagaggcgagaaattgctgaagtaaataaagtgagttgttagtttttacattttatgttttagagttattgataaaaattactagggagtctgatgtaactccaaaacataatttgaattatcaaattacatgaagttgtttctgcggcaaactt

SEQ ID NO: 3705 - DNA, 584 bp, Homo sapiens
  MAP TO CHR22_212.0; EXPRESSED IN HELA, SIGNAL = 2.1; EXPRESSED IN FETAL LIVER, SIGNAL = 1.1; EXPRESSED IN LUNG, SIGNAL = 0.67; EXPRESSED IN ADULT LIVER, SIGNAL = 0.78; EXPRESSED IN BONE MARROW, SIGNAL = 1.2; SWISSPROT HIT: Q03816, EVALUE 7.40e+00
gatggaatgagctgcaaagcctcattgcaaagaggcatagacatgaagaggaagaagggattgtggccatttttgcaaacaatataccccaggtacttagaaaattactggaaggactgaggaaacaagccccatgctcagcctctagcaatgagtgagaatttgcctgctgggggaaattctgcctctgccacaatcaggaacctggaaaatccagaggccacaaccaggaccactgactttaacaatatgccattgtcattgtgacccaagaatcgagaagccactcttgctgccacttcagcagcaacagcttttccacatcctggaaggcggtgataggagcctggaacccctaagaagaaaaatctaacgtctcagctactgaagcaggaagatggcctttaccttccaaatatcatgaaagtgtctataattggaggaacctgatttttaacctgatttcactgcaatgccagctgcaagggagtctgggaagtataattaatataatatattgctagctttccagcctcactagtataggaagttactctagaaggactttggaatgaatgctgggt

SEQ ID NO: 3706 - DNA, 592 bp, Homo sapiens
  MAP TO AL138499.1; EXPRESSED IN LUNG, SIGNAL = 1.6; EXPRESSED IN ADULT LIVER, SIGNAL = 1.4; EXPRESSED IN BONE MARROW, SIGNAL = 1.2; EXPRESSED IN HELA, SIGNAL = 0.55; NT HIT: gi4885610, EVALUE 2.00e-84; SWISSPROT HIT: P10569, EVALUE 2.00e-04; EST_HUMAN HIT: BF977440.1, EVALUE 6.00e-82
atgcatcctgctaggtttggaagtcatcatagtccaggcaggtcagcttcattaaatcagaaaccaaggcagacaatgaaagtagtggaggaagggaagtcaagaaaacagaggaagcagtagtgttagtattcacatagctgtacctataccttcaccccctattattggatagtttaactcctccaccaccgacaccaccagataatgttctcatgtttgatgactttccacctccaccatcacccactccagtggattatgaagacgaggaggctgcaatagttcagtataatgtttcatatgcagataaggatactgcaaggtccccaaagaattatattgagaacatcattgcagtgtatgattatacaaaagacaaggatgatgagctgtcatttatggagggtgcagtcatttatgttataaagaatgttaatggcttatatgaaggagtcttcaatcaggtgactggtctgttccctgggagctgtgttgaatcaatcattcactatgccgattaatttttttttttgcttttaaagtagattcttgttattactcagtcatactgtgggactgttgtggttaa

SEQ ID NO: 3707 - DNA, 599 bp, Homo sapiens
  MAP TO CHR21_44.0; EXPRESSED IN BONE MARROW, SIGNAL = 0.99; EXPRESSED IN HELA, SIGNAL = 0.98; EXPRESSED IN FETAL LIVER, SIGNAL = 0.79; EXPRESSED IN LUNG, SIGNAL = 1.3; EXPRESSED IN ADULT LIVER, SIGNAL = 1.1; NT HIT: AL163209.2, EVALUE 7.00e-87; SWISSPROT HIT: P70213, EVALUE 2.00e-14; EST_HUMAN HIT: BE222256.1, EVALUE 3.00e-68
agctggggacactgagtttgtaaactctgatgacccttttctatttgccagaaggaacagcttccccatccccagtagtggcaatatccactcccctccccgacccatgctaccatcatcctttccacctttgtctgaggaggtaaaccctgtgttgcctgaggcaacagtaatggcctcccctgaggcagttgccaggcaagataatgttgattatcctcaggagccacccccaacacccttgtttgcttctagacctataactagactaaagtcctggcaggcccctagaggtgaggttgagagtgtgaccaatgaggaggtgtgtgctatactcaaaaagaactgtttatctaatttatatgaacagaaatcaggggaacagttatgagaatgggtattaaaggcatgggataatagcagaaagaacatagagttggatcaggctgaatttattgattttggccctctagttgggactctgtttttaattttgcagctcagggagttaagaaaaggttctcaatagtttatttgcttggtaagctgaaatacggattaaaagatggcccactaggagtgagctggaaatgcctgat

SEQ ID NO: 3708 - DNA, 509 bp, Homo sapiens
  MAP TO AC021260.4; EXPRESSED IN HELA, SIGNAL = 5.8; EXPRESSED IN FETAL LIVER, SIGNAL = 6.6; EST_HUMAN HIT: AU134814.1, EVALUE 0.00e+00; NT HIT: gi16157353, EVALUE 0.00e+00; SWISSPROT HIT: P80272, EVALUE 2.00e-05
tagtgacgtatgccccttcccccaaaaacaacaatgaagtgttctgtgtgctaacaacatagcttaaaaaaaagtaaaattatgcagttttataaaacttgataaaaaatagtatttcaaactgtgcagtcaacagaagtttacacagttatcaaaaatgcacacacttcacttggcgtctccagcaccttcagttttatgtgcctggtctgttttggcatctccattttctacagggctattcccctccttgccagcatcagcttttccctttttccctttgggtactttctctcccttctttgcaggggcctttttacgcttgggttctggctttggaggagcaggtttagctgacaacctcatggatcttctgtgtgattcgtccttcaccttggctttatctcctttagcatccccttcagcctttctcttgggcatggtggcggcaggatgtaggtgctggacgcgggatgcagtggtgcacgggctttggttggttaggggtt

SEQ ID NO: 3709 - DNA, 579 bp, Homo sapiens
  MAP TO AL133520.2; EXPRESSED IN FETAL LIVER, SIGNAL = 1.2; EXPRESSED IN BONE MARROW, SIGNAL = 1.4; EXPRESSED IN HEART, SIGNAL = 1.3; EXPRESSED IN HELA, SIGNAL = 0.73; NT HIT: gi14786180, EVALUE 2.00e-68; EST_HUMAN HIT: AW138748.1, EVALUE 8.00e-69; SWISSPROT HIT: Q13183, EVALUE 5.00e-05
agttcctgtggcccctattcctgtcaacatggggattcatcagcttccttatttctgcctgtctcattgattaaaatgttattgtttcaatttgcatttctctgagtactggtgatgctgagcatctctttgaatgctgtaaaacaaggtttaattatagtacttacttcatagagctgttttgagagttaaggaagataatgtatgtaaagagttcaactcactgctcagtatacagtatgtgcttaataaatgcaaattttaaacaaccaaggtaccatgatttcttatctaattatcagtcattgtcataactaaaacacctgacgcatagtaggtgctcaataagtgtgcatgcccttggccttccctaacatcctttggacatcccattcccacttccaaatcctggtggatttggccccaatcccttagcacagcctcacctgtgttctcttcactctcctggctggggtcctttcgaacctccttctggccaaagagacttttcaggatggcattggcaatgggaagcatcatggcagtggaggcggtgttgctcagccacatggacaagaa

SEQ ID NO: 3710 - DNA, 569 bp, Homo sapiens
  MAP TO CHR22_180.0; EXPRESSED IN HELA, SIGNAL = 0.78; EXPRESSED IN ADULT LIVER, SIGNAL = 2.2; SWISSPROT HIT: P02583, EVALUE 9.40e+00; EST_HUMAN HIT: BF961392.1, EVALUE 1.00e-103; NT HIT: J05096.1, EVALUE 2.10e+00
cgccattatcaccatcactgtgatcagcaccatcaacaccaccatcaccataatcaccaccataatcaccattatcatcaccaccatcaccatcactgtggtctgcaccatcaccatcatcaccatcatcattacaaccatcaccatcaccaccatgatcaccatcaccaccaccatcactgtgatcagcaccaccatcattaccaccatcaccatcaccaccaccattacgaccaacaccatatcatcatcaccatcaccatcatcaccaccaccaccattatcatattcccatcaccactatcatcaccatcaccattactaccatcaccatcatcaccaccaccacaaccatcatcttcattatcttgtctatctccatcctatggaggaggaattacgttcactttacacaagaggaaacagattcggaggtcagggccctgccaaggggcctgagcaggcgcacagccagggtgctgtcaatcgcttgataaatatttgttgaatgagtcacagcgctgccttctccacatactggcttgctgggggatgcttggtgagtctgt

SEQ ID NO: 3711 - DNA, 541 bp, Homo sapiens
  MAP TO AL136304.2; EXPRESSED IN BONE MARROW, SIGNAL = 0.52; EXPRESSED IN PLACENTA, SIGNAL = 0.64; EXPRESSED IN ADULT LIVER, SIGNAL = 0.79; EXPRESSED IN HELA, SIGNAL = 0.85; NT HIT: gi13631976, EVALUE 2.00e-37; SWISSPROT HIT: Q14738, EVALUE 6.00e-09; EST_HUMAN HIT: BI769262.1, EVALUE 3.00e-37
tgtggacttttccccttttgcccaggatcccagaacctcccgctttttgccctaagaaaaaggaattctcaacattccaagttggtaagcagagaaacaactttcataggaatctctggggagtctgaagaactagagaatgtatttggtctataccaaccaaaggtaaatcctgcctgagggcagtctggatgggctgtccaggtccctcccaggatatggaagccttcccttctgcctcaccccctgggatcccctacccaactagccatcatggagttgcgggtggcacctgcaccacatctaaggctacgcctacattcattacctcctcagtgttctcgcctccaccatccttgcccgagctgctaggcttggctgtgcatttggcaaccttggggggctcctgaaaggaaaagatgaaagtaaagttagcagatgccaggagaagggagaggtcttatctggctcccttagatctttgttgcaaatatcctctgtccagttgaatcaatcaattagaatctaccttgtgcggagc

SEQ ID NO: 3712 - DNA, 542 bp, Homo sapiens
  MAP TO CHR21_57.0; EXPRESSED IN HELA, SIGNAL = 0.58; SWISSPROT HIT: P50747, EVALUE 6.00e-47; NT HIT: AB063285.1, EVALUE 0.00e+00; EST_HUMAN HIT: BE708069.1, EVALUE 0.00e+00
acaaagcacaaccaccttccattcccataaaaaacaaacctgtgatcaaagaacttcaatttcctttcccacgatttaactcttctaggacaagagtacttccaccttgctaataggtctggtcaaacgtattcctctacaactctatcccctccccgtctattggtaagagaggatgatcaatggaacaggactcctctgagcagatgcagacctgctcacaccttacccatccaggagacgcatcgttgtgggggtcacttcggcaaacaaaattactttccccaactgcttggtctgcagattttggcgatagatctctaagttgaaatgttctgatgagaaggcctccatgttggtcaccacaggtatacaagatggggttatttctacttcagacacgtaggatgaaacaaatctaagagagagctggccggattttatttctccctcggagtccacatgtttcccaagccactgcataagaggatccctgatttcctgtgtcataaagaaagaaatgagatggtcgtaatttggca

SEQ ID NO: 3713 - DNA, 586 bp, Homo sapiens
  MAP TO AL160313.1; EXPRESSED IN FETAL LIVER, SIGNAL = 4.8; EXPRESSED IN BONE MARROW, SIGNAL = 7.2; EXPRESSED IN LUNG, SIGNAL = 4.6; EXPRESSED IN ADULT LIVER, SIGNAL = 4.3; EXPRESSED IN HELA, SIGNAL = 5.4; SWISSPROT HIT: P40103, EVALUE 5.70e+00; NT HIT: AF016052.1, EVALUE 7.00e-19; EST_HUMAN HIT: AW090434.1, EVALUE 2.00e-75
agacacaaacacacacattagcctaggcctacacagggtcaggatcatcaatatcactgccttccacctccgcatctttcctcactggaaagtcttcaggggcaataacaggcatggagctgtcatctcctatgataataatgccttcttctggatgcctcctgaaggacctgcctgaggctgttgtatagtaaacttttaaaaaatctgtaagtagaaggaacccattctaaaagaatgtttaaaagtatagtaaacacataaatcagtaacatagtcaattatcatttatcaatattacgtactgtccataattgcatctgctagactttggcatgactggcagtgcagcaggtttgtttacaccagcaccaccacaaacatgtgagtaacacattgcactacgccattaccatggttacagcatcactaggcaatagcaattttcagctccattataatcttacgggaccactgtcacatatgcattccatcgttgaccgaaacatcgttatacaaagcacaactatatcaccaaaacataaaaactcaaatgaataaaagaagaagccctgacaaggagtga

SEQ ID NO: 3714 - DNA, 581 bp, Homo sapiens
  MAP TO CHR21_53.0; EXPRESSED IN HELA, SIGNAL = 0.68; EXPRESSED IN BONE MARROW, SIGNAL = 0.43; NT HIT: AF137255.1, EVALUE 2.20e+00; EST_HUMAN HIT: BF373566.1, EVALUE 0.00e+00
tcagggaagcctcactatgcctacatagccatcaggagtctcactgtaaataactccaacaaccaggcacaggctccttgattcacacagttaacattacatagttattcccactcaccacattctgaagttgcaggacggtaaattgaggcctcctggtagatgaccagggtggggttaaattcagaccacttcccttgtgagcatcattgttgttctttcctccaggagttaaagatgagccggtcacttccctcctgtgacagcgaatatatattgcgttgctggcgaatgttgagtgtagtggcctgagggacagctgagctttcccaggagctgcaggttagatttggtcatcctccttttgcagaggagaaaccgcctaggtcacacaataggtagtaagttggagaaccaggacttggacctgggacactctgactgtagtctgagctttcactgcctggactgtgcttcctcgctttggagcggtgatctcagaatcctcatcctgagagctacagagcggggtaggccagtttcctggtgagtgtcctgggacctaatgctttgcagccttc

SEQ ID NO: 3715 - DNA, 540 bp, Homo sapiens
  MAP TO CHR22_164.0; EXPRESSED IN FETAL LIVER, SIGNAL = 0.8; EXPRESSED IN HELA, SIGNAL = 2.6; EXPRESSED IN PLACENTA, SIGNAL = 0.87; NT HIT: AF164622.1, EVALUE 4.00e-17; EST_HUMAN HIT: BG945324.1, EVALUE 4.00e-52; SWISSPROT HIT: Q08379, EVALUE 5.00e-04
cagagggcttagacactgggggacagaacatctcaggtgcaatctcctctctcgtagtcaacaacatctgtcaaaggggagggcctgcatcgtctgctaacctgaaggatctggaggtgagagttccggagccatagcccagtgtccctgcagcccagccctccaacctccatcccacagcgggggctgggtgcccctctgccagctgagggagcccacacagctcccaaccctaatgcctcctcccatagagcaggctggatgcccctctgccagctgagacagcccacacaacccccagccctaatgattgctctacctgtcctcacagtcctcttccacctccttctctctgcatgcacctcaggatgagaggctgtgggagcaggagaagacgcaggaagaggagaggctgcaggagctgggcataaggccgagctctggggggagcaggtgaaggcgcgcgtgcaaaccctggaggccatgcagaccgagctcaccaccgtcagctgtgcgctctcctagaaccacgagctggag

SEQ ID NO: 3716 - DNA, 513 bp, Homo sapiens
  MAP TO AL137800.2; EXPRESSED IN BONE MARROW, SIGNAL = 4.5; EXPRESSED IN LUNG, SIGNAL = 5.9; EXPRESSED IN HELA, SIGNAL = 3.5; EXPRESSED IN FETAL LIVER, SIGNAL = 6.2; SWISSPROT HIT: P87568, EVALUE 2.80e+00; NT HIT: AE008683.1, EVALUE 7.60e+00; EST_HUMAN HIT: AA928152.1, EVALUE 1.00e-126
tgaccacagacaatccaaacactcttagtatttgaaatagatatatttgttttttttgacaggccctaaaagagctgccgtaatgaccttaatagaattcaactctaaacatttctcttcttacctcctccaaagactgtatttgaaataataccaatggccaaatatcacaaatactagaattactttccattgaaaaagtttattctgcaacaggttgaaaaataaataacgaaccaaactgttttaaagtctcggtgaaattcttgatcttacagggacttctcaaatgataggtaatacttacagatcctgttctactttcttgtctaaagcgtattccaaatcggtaactagcattttctggtacaggtcctgcagagcctgcctggatgtccagacttcagctggacccagcttagaatctgagtaacaaaaacaaaaacataacggtagatagataaaccccagcagttaaaaccattataccacaccagtgactccttcctgctc

SEQ ID NO: 3717 - DNA, 540 bp, Homo sapiens
  MAP TO AL138784.1; EXPRESSED IN FETAL LIVER, SIGNAL = 1.1; EXPRESSED IN ADULT LIVER, SIGNAL = 0.52; EXPRESSED IN HELA, SIGNAL = 2.1; NT HIT: AF195953.1, EVALUE 5.10e-01; EST_HUMAN HIT: AI762712.1, EVALUE 4.80e-02; SWISSPROT HIT: P57616, EVALUE 1.00e+00
ttgctgtcagagtttgctgcttgagctatcagtgtacaaaaccactagaggaggcctggaagaaggatgagtggtctagcctggcttcaatctaaccccatcaacttattacatctttaatttgggggaaatcaactaaatttatttgcttctgaaaattgaggataatttcatatatctttgaaaatgtatctgtgagaatttgagataatgtgatttaaagcatctagcaataagaaactacaatgtagtttaaacaaaacagaacttttgtgaaactggacgttttggctctcttattttttaaaaagtctttcctaaaatactaaatgcattcctaactgtagtgtagtaaacatagttcaatatttctttggaattgaagactctcacattgcttctaggtgttattctgaaaaaacaaggattgtcaacatgaagcccatcattttaaagatgaggaaatcaaggctcagggagattaagtgggtgaccagggtcacacagctggtaagtgacgcagtcctcaaagaccaccgt

SEQ ID NO: 3718 - DNA, 565 bp, Homo sapiens
  MAP TO AL138842.2; EXPRESSED IN HELA, SIGNAL = 1.1; EXPRESSED IN PLACENTA, SIGNAL =   1; EXPRESSED IN BONE MARROW, SIGNAL = 1.1; EST_HUMAN HIT: BF698828.1, EVALUE 1.00e-105; NT HIT: gi14744499, EVALUE 3.00e-33; SWISSPROT HIT: P20128, EVALUE 4.10e+00
tttggcattcaccttccttcctgtgtaccagacccctttcctctcagtcacaccattccaggcctgagacatctcttccagctgtagtttgtagaaggggggcagatgaagtagagagaagcccctaccctggggggcactatctctgttggcatgccaaccctctgaggagagcaaccctagtataaagagggtaaagggagggggactaaggtggaaggagtccccttcacctcttcatgttcttcttcatcatactcttcttcttcctcctcttccttctcttcttcttcttctttctcctcatcctcctctgaagttacttcttcttccttcttctccagggtctcatgtggggatgaataggaatagaaactcaggttcagttcacagaagggaaaaattgaggcacacatgggccaagagagagggaatggatccagggctcaggaggtctctatgcacacttcctcctcacctctagtttctgtattgtttcctccttatcttctgtggtcttagggggcctcttggggagcagaattgtaatccctggtggagggat

SEQ ID NO: 3719 - DNA, 596 bp, Homo sapiens
  MAP TO CHR21_52.0; EXPRESSED IN HELA, SIGNAL = 0.54; NT HIT: AJ229041.1, EVALUE 0.00e+00; SWISSPROT HIT: Q9UKN7, EVALUE 2.00e+00
tacgcagcatctccatcatctcagtcaaggtattgacaggaaattgatggcatgcttgaaggtttaaccaaagagaaatttacaaatggactatttccagaggtaaagatggggctgagggaaccatcaagggatgataaagctcccagaagttagcaatagtggaaaaccatgacctccctcggtcctgaagggagaggagaaggagcagttaccagaaaccagggaggatagtagccacaatagagagtgtcccaccaggagttctcgctgtagattagaaaataccaccactgcctagcccagggcagggaagaaaggaagagcaatactccaacctttcttcctatcctccagcttcagtgggagtctccctttgactggaccagttggaaggctgacggcaagggaagtccactgatgcagagatcagcttcctggggcccagaagaaggcaaattgggacagagcttggacctggaagacaaactgaaaaaaaccagaacatcctcccagcagatcatcatgcccaacccccagtcaccagagataagcacctgtggtcagcactggcatccacagaggggcagatagtg

SEQ ID NO: 3720 - DNA, 578 bp, Homo sapiens
  MAP TO AC012186.3; EXPRESSED IN HELA, SIGNAL = 0.65; EXPRESSED IN BONE MARROW, SIGNAL = 0.76; EST_HUMAN HIT: AA468562.1, EVALUE 0.00e+00; NT HIT: AB058702.1, EVALUE 6.00e-13
tctcatataccccacgaccccctgatgtgcatagccttccgcatttttatttttatttttatttttttatggcatatttatataatactgtttcttacaataacacagctagagaaaagaaaatattgttaataaaatcataaggaagatagaatatgttgacttcattaagtgtaagtggatcatcatcctcattctcatcatcttcaagtagagtaggaagaggagttggttttgctatctcaggagtgggagagatggaggaggtggaggcggtggaagaggaggcagaagaggcaaggacacttggtttaactttacggaaatacatcataatttcttgtctgacgttattggcttttcatttctctaagaatatttctctatgataccaatctttcactgtttgctttagtttcagtgtccatatcatagaagggtccatgtcataaaataagtcaaagcagtcatgaataattggaactcttctaccagattgtctaatgtcaatttgtttccttgcattgcttcttctacgtcttcttccttatcatctggcactggtttggaagcattca

SEQ ID NO: 3721 - DNA, 515 bp, Homo sapiens
  MAP TO CHR22_144.0; EXPRESSED IN HELA, SIGNAL = 1.4; EXPRESSED IN PLACENTA, SIGNAL = 0.32; NT HIT: gi6678126, EVALUE 1.20e-01; SWISSPROT HIT: P39881, EVALUE 1.20e+00; EST_HUMAN HIT: N24289.1, EVALUE 2.80e+00
tatgcagtatccaggcctcctcgccatggaaagcccaggcctgcggcctctctggcttcttctctcccttgccccactgcccctggctgtctggcagttcctggaagtctccaagctcttccctgcctcgagcccctgcccacgttctctctgccccaggcctcagcctgcggtcactttctcagggcagctttcccagcaccccgtgcatctaaagtggatgctgccctgcccatcactggatcaggtgctcatattcctaattgactgggcataggtgggaggatttgcctggtgtctgtcttcctggctggactgcggtgcctcaaggccacaggtgaagtgcatggagtcccacagcttctctgagcctaaagctttgtgtgacaaatgcattcaaactgcatttattgaaagatgggaagcaagggaggaagggaaggggtgcgggagggagggaggacaatcttggtgttgggctgaggtggcgtctgtcccctttgcatgagttcagt

SEQ ID NO: 3722 - DNA, 597 bp, Homo sapiens
  MAP TO CHR22_150.0; EXPRESSED IN HELA, SIGNAL = 0.84; NT HIT: X03833.1, EVALUE 5.70e-01; SWISSPROT HIT: Q05204, EVALUE 4.40e+00
tccctaaaacttcatcaccccccagcggactctcactgctgtggcctgtggccctactcaaggagctcaaggaggccactagccatttggagaaggaggtagttggggccctgaaagtttacaggacttcctcaaggccacagcaggtgtgtgagaaaaggaagatggccagcctgcctccacttctctttccaatctcccactttgcctgagctaagctcaagctcagggccacccacgtcttggaagggcttcctaccagctggtcttgtgagatgagagctgccctgcatatcatgcttgtcatcgccaaggaccccaagctccagttagctcaagtcctagagaatgtgccagctacatagagctatgcagagcatggccctggggatgcgggatgttattgcccttgggttgggaaggagagatgagagggagaattggctggatcttaaaattgtgttgcaccccttcaaacactctaccatctttgcctctgtagttcaatattagtctgttcctatcttctaaacttgcaaatgaacttgcatggcaataaatctctgcacactcaaagccatgatttcctcagcaggt

SEQ ID NO: 3723 - DNA, 512 bp, Homo sapiens
  MAP TO CHR22_78.0; EXPRESSED IN HELA, SIGNAL =   5; EST_HUMAN HIT: AL519615.1, EVALUE 1.80e-01; SWISSPROT HIT: O13263, EVALUE 6.20e+00
ctgagcatcagtctccgttgttttgttgtgagacagaagaaggagaaggaggaggaagagaaggatgaggaggaaaggaggaggaagaggagcagaaggaggaaggggaggggcagaacaaccatcaccatggccatcccccgccagagcacccaccccacttgctttcttctcctcttggtgtctgtgagaaagcccaggattttgtcacctcccagcccagtctctgggacgaggagcctcggtggcatgggtactccaggatcttctgagtctttctttgatcttcatttggtgtggtttacggctttaggataaaacccttccctttttttggttgctgggggtgatggggggtgaaatggcggtggggaggttttttgcagccttttactagagtttctcacgtggttggtgtttgcggccaagaacttccacagggacagttcagtcggctgcctcactggggacttccatcctggcagtgcctgggctcctcaggaagacagtgg

SEQ ID NO: 3724 - DNA, 574 bp, Homo sapiens
  MAP TO AL139227.1; EXPRESSED IN HELA, SIGNAL = 3.2; EXPRESSED IN BONE MARROW, SIGNAL = 1.1; EST_HUMAN HIT: BF842501.1, EVALUE 0.00e+00; NT HIT: gi14589890, EVALUE 0.00e+00; SWISSPROT HIT: P22223, EVALUE 2.00e-19
gactcatagcctgtctccgccaagttgctacggccacttcctgacaagctccgaagtcctcagctgaagggggaactgagaccccttggagatgctctgtggcctgacgtttggtccccagccctgcaggcaggccgcctagtcgtcctccccgccaccgtacatgtctgccagcttcttgaagcggctgccccactcgttcagataatcgtaatcttggtcttggtcggaggcggaggaggtgagggagctcagggacgcggcgtcggagccgctgccctcatagtcgaacaccaagagggtgtcgtagggcggggctgtggggtctgtgttagccgccttcaggttctgcggcaacagagaacaggtagttaggagcggcgggtcctgccgcttgccagctgcaagcctccatttcctctctgtgagcccctctctcccctcccctaaaggttttggaggtagaaatgaaagaatgcgttattcatgcagaattcattcactcagggaccagcagacagcaagtgctcagtgcaacacaggccagggggtaagggcaaggactgaaatcaga

SEQ ID NO: 3725 - DNA, 544 bp, Homo sapiens
  MAP TO CHR22_143.0; EXPRESSED IN HELA, SIGNAL = 1.1; EST_HUMAN HIT: AW249775.1, EVALUE 1.00e-128; NT HIT: gi14779562, EVALUE 1.00e-128; SWISSPROT HIT: P06909, EVALUE 2.00e-01
ttcagtgcaaagacggacagtgttgagagggctgacggttctgagcgaggctgctggctctgagagaaacgctgtgtgggtgcagagacccgggctggagggaggacggaaggccactcctcacagtgagggcaagtgctccccgaggcctcccagttctcagggaaccagtcctgattttgtgctgtcctgttggctccctgtcttagatgtattaagttatttcagcatttaatgtttagcatattacagactcctttggtggagctatagcttctataattttgatgggttttgtttgtttgaatgcaggcaacatattgctgaacgttctgattccacccaatatgccatgtacgcgaacagggaagaataacgttcttatcgtctgtgttccaaatccaccaattgacgagaagaatgccaccatgccagtcaccatgttgattcgggtaaaaaccagcgaggatgcagacgagttgcacaaaattttactggagaaaaaggatgcctgaacacgcaaagtcggctgcagaattattgc

SEQ ID NO: 3726 - DNA, 541 bp, Homo sapiens
  MAP TO CHR22_79.0; EXPRESSED IN HELA, SIGNAL = 0.75; EST_HUMAN HIT: BE870010.1, EVALUE 4.90e-02; SWISSPROT HIT: P06487, EVALUE 1.00e+00
gaggactgcttgtccagagggttccccagggtcccattcttaacagatcctccttgaatgccctgcagccaccgctgatgtgctggaagtcacttctgctggctttgatgaagggaaggaagcagatgagaaagagggtgtatatgagtgactcattgaacctattgtctatccatagagagaggggacgagagagtgccttgtccccaagacctgggcccacagtggccccttaagtaagttcaggccctctcacctgggcaggggtcagaagcctagagcaacagcaaccactgaaagccctcagcactccacttaggcctccactccagagcctcagagctgccagcttcttctccctgatacccctgcagaaactcagccaccttctatttagaaggatcagccatcagatgcttctaaataaatccaatccctccaccctcctgctttccacttgcaactgtctctgtccactggcacttggacccaagagctaattgcagaagcttcatcttaaaggaaaccacaaacacgctct

SEQ ID NO: 3727 - DNA, 501 bp, Homo sapiens
  MAP TO CHR22_96.0; EXPRESSED IN HELA, SIGNAL = 2.1; EST_HUMAN HIT: BF222856.1, EVALUE 2.80e+00; SWISSPROT HIT: Q12816, EVALUE 5.00e-04
tttttctgcccaagaaccagtaaacacggagttactcctgtactgagctgagtaaaataatctgactgagaggatgcgctgacctcagtttcgacaactgcgtttggtaccaagccctgcaagggctccacggagcagctttgggggagacctgcctgcaggaacatgtaccccacggagcagctttgggggagacctgcctgcaggaacatgtaccccacggagcagctttgggggagacctgcctgcaggaacatgtaccccacggagcagctttgggggagacctgcctgcaggaacatgtaccccacggagcagctttgggggagacctgcctgcaggaacatgtacctcacggagcagctttgggggagacctgcctgcaggaacatgtaccccacggagcagctttgggggagacctgcctgcaggaacatgtaccccacccgacacgtcctgggagcctcgtctgaggtacaaacaacaggaaagcactgatgc

SEQ ID NO: 3728 - DNA, 509 bp, Homo sapiens
  MAP TO AL138895.4; EXPRESSED IN HELA, SIGNAL = 0.63; NT HIT: gi14735271, EVALUE 1.00e-123; EST_HUMAN HIT: BF969269.1, EVALUE 0.00e+00; SWISSPROT HIT: P54817, EVALUE 3.70e-02
gggtgggacagatgttcttgttttcacaggacaaaatcgagggctagagaaggaaagggacttcagggctggcctcttcttccatgtggggctcctgagaaaaaccaaggtctgggccaggggagggtgttcctccacacccccggcacctcccttcctctaacctttgtatccctctctccctaggctctgaagggctccaagaagctggtgctgtctgtgtactcagcagggcgcatccctgggggctacgtcaccaaccacatctacacctgggtggacccgcagggccgcagcatctccccaccctcgggcctgccccagccccacggtggtgccctgaggcagcaggagggtgaccggaggagcaccctgcacctcctgcaaggaggggatgagaaaaaggtgagtggggtggggaaaggaggccagcctctcagacaccgtattctccctccgaacccagaacagcagagctgcttggaggccgcaagaagaggctggttctg

SEQ ID NO: 3729 - DNA, 505 bp, Homo sapiens
  MAP TO AL137861.1; EXPRESSED IN LUNG, SIGNAL = 1.3; EXPRESSED IN BONE MARROW, SIGNAL = 0.96; EXPRESSED IN HELA, SIGNAL = 0.93; NT HIT: AL163202.2, EVALUE 7.00e-65; EST_HUMAN HIT: BI064298.1, EVALUE 1.00e-108; SWISSPROT HIT: P18175, EVALUE 1.00e-04
ttcagaccacagcaggagtgttctggaatcctatgtgagggacaaaaattcagaccccagcatgaatcttctggaatcctatgtgagggacaaacattcagactctcatagcagtgttctggaatactgtgtgggggacaaacattcagaccacagcaggagtgttctggaatcctacgtgagggacaaacattcagaccctcgtggcagtgttctggaatcctatgtgagagacaaacattcagaccctcataacagttttccggaatcctatgtgagggaaaaacattcccaccacagtaggagtgttctggaatcctatgtgagggcaaacattcagatcacagcaggagtgttctggaatgctatgtgagagacaaacattcagacactcgcagcaggcttgtggaatcctacgtgagggacaaatattcagacaacggcagcagtgtactggaatcctatgtgggggacaaacattcagagcctcgtagtgttgtgggat

SEQ ID NO: 3730 - DNA, 540 bp, Homo sapiens
  MAP TO CHR22_75.0; EXPRESSED IN HELA, SIGNAL = 0.59; NT HIT: gi14779513, EVALUE 1.00e-122; EST_HUMAN HIT: BF325951.1, EVALUE 0.00e+00; SWISSPROT HIT: P38486, EVALUE 1.70e+00
taaagccccatacccctttctccgggtgacaaacacctgtgctcgttctcttcccttcccctcttccccttgcatttggctaataacaggccagctgcctgcctccctgcagtttggtagatgggtgggtaacgaccaccactcccacgttcgcctgatgggcttgttttccgtgcccttcacaggcatctgcaacaggccccagccaggcctgaagtcatcctcagaagggatggatcctgaggtcgccatgcccagctgggcaaacatgagtctggattcttccccggagtcggctgccttggctgtgaggctggagggagatgagctgctagaccacctgcgtctcagcatcctgccctgggatgagagcatcctggacaccctctcgcccaggctcgctacaggtacccactcctcggggtgagcacgggcagcaccttgttttctttcttgtgcattatggaggaagatggtactgccacatgggagcgatagggtgaggcaaccatgacaggtggttgggaacatctccttcca

SEQ ID NO: 3731 - DNA, 519 bp, Homo sapiens
  MAP TO AL136109.1; EXPRESSED IN HELA, SIGNAL =  22; SWISSPROT HIT: Q26481, EVALUE 9.00e-60; NT HIT: gi14591908, EVALUE 0.00e+00; EST_HUMAN HIT: BG762124.1, EVALUE 0.00e+00
gcagacgtgggtctctgttctgcaggatggggtttgtaaaagttattaagaataaggcctactttaagagatatcaagtgaaatttagaagacgacgagagggtaaaactgattactatgctcagaaacacttggtgatacaggataaaaatgaatacaacatacccaaatacaggatgatagttcgtggaacaaacagagtatcatttgtcagattgcttatgcccgtacagagggggatatgatagtctgcacagcatatgtacacgaactgccaaaatatggtgtgaaggttgacctgacaaattatgctgcagcgtattgtactggcctgctgctggaccgcaggcttctcaataggtttgacatggacaagatctatgaaggccaagtggaggcaactggcgatgactacaatgtggtaagcattgatggtcagccaggtgcctttacctgcaattaggatgcaggccttgccagaactactactggcagtaaagtttttggcactctgaaggg

SEQ ID NO: 3732 - DNA, 577 bp, Homo sapiens
  MAP TO CHR21_36.0; EXPRESSED IN HELA, SIGNAL = 0.67; NT HIT: AL163247.2, EVALUE 1.00e-20; EST_HUMAN HIT: BF951418.1, EVALUE 3.00e-22; SWISSPROT HIT: Q9Y6R4, EVALUE 1.10e+00
caggagagtgaagcagaccctgtgagggtccttggttttatttttgttaagtgtgctgcttttgtgttggttggcctccagccagaaggtggcgcttttgagagtgcatcagctgctgtggtatgaggaggatcacgtggtggatagggacctagagctcccaagagattatgacatttgtcatcagctaccagggcagatagagaaaaaccatcaggtagaggcacggttaggtgtgtctgaagtcagattttccttgggtgatgctcactgtggctgctgtggggtataggggtgtggttcccaggccaatgaagtcatattctcaggagcattatggctgcctctgttgcatcacacaggacgctagggaagtggggaaaagctgacagccacatgtctcacccggctgccgtgctgcccacagccagaaaggctggtcttactcctattgtgcccccacaacagaaccaagtttatttccaagcagctggtaagcagggctgagaacgtgctccaggctacaagcctcccagctgagaatgcaagccaactcacagtttctcaggcatcccat

SEQ ID NO: 3733 - DNA, 532 bp, Homo sapiens
  MAP TO CHR21_41.0; EXPRESSED IN HELA, SIGNAL = 0.68; NT HIT: D16561.1, EVALUE 1.00e-04; EST_HUMAN HIT: AL598448.1, EVALUE 1.00e-05; SWISSPROT HIT: Q9Y5Y6, EVALUE 3.80e+00
cttctcattacctgcagtccgaaatcattgttccttatgctacctgcttttaatgaagggtccagtatgggtatacaggttgaacatccctaatgtgaaaatccaaaattcaaaattcaaaatgcttcaaattctgaaacattttgagtactgaaaagatgacgcaagtggaaaattccacacctgccctcctgtgatggctcacagtgaaaatgtggtcaaagctttggagccgggctctattgtggccacaaccagcctctagcaatctgtagttggagctggatggatcttcggaggtgtgccaaatacagcgaaggtgtccacgccctcatggccttacatccacctttctctggatgccagcaggccctgggaagggagatgacttccatcaaggatcaagatggctctcctcagtggagggttatcacagggagggaggtgtgaatgggaaaactgggagtaagagggagcattcagcattgaggaagaagctcctcagtctagaaggagaatccctgggctaaac

SEQ ID NO: 3734 - DNA, 586 bp, Homo sapiens
  MAP TO CHR21_51.0; EXPRESSED IN HELA, SIGNAL = 0.62; NT HIT: AF027153.1, EVALUE 1.00e-104; SWISSPROT HIT: O50999, EVALUE 5.70e+00
ttgagaggtttgcgtgaatgatgaactgtgacaaaaagcatatataaatataaaaatacaagttaaaaagcctcatgttagctgaagattcttccatgtgtattcttataaaaataagggaaccctggacagtgctcattgtattttgttgaagaaatgttaacttctttaaaaggaagaaaaacatatatatatatataacatactgtatattcagaaccatttttaaggaatgtagtttatctcttgaaagactgaaattcaaggctgtgactgtgactagagtgtaaaatatagctgcattgcattatagtattttatatatttctacaaaccaaattgacctgtttttggttttgtttttccttttccagtctttaccaggtgctggtctctgcatgtgttttgtttaagttggaaaaatctagacacgacccacagagtggtatggtatccagtgagaagggaactgtccgcagtggctttgaaggatatgaggaagcctaggcggagagttgagaattcagccttgagctagtgttagggtactatttggtacctctcctgtgggcagagcgactttact

SEQ ID NO: 3735 - DNA, 566 bp, Homo sapiens
  MAP TO CHR22_79.0; EXPRESSED IN HELA, SIGNAL = 1.1; EST_HUMAN HIT: AI217699.1, EVALUE 3.10e+00; NT HIT: AL163282.2, EVALUE 4.00e-05; SWISSPROT HIT: Q28295, EVALUE 2.40e+00
aactgtgatggagaccctgggagaagagcaggcatggggtgggaagacaggagatgaatctacagtcacaaaaatgctcttggcagccagcaatccccgccctgttaatttacagatgggaaactgagctgcttaaaagcaatgtctttcctaagatagcacattgaggccgtggccaagccaggccaaaattgaggtcccatgtgaatgactatgaggcatcagctataatccagccaagacggaaaacttcattcattcatttatttgttcattcattcaataagcattttttgattggataaatatatcccagttcctgccctccaggagtttttggtgggggagacagacacatccacctgccatggtaacccagagtgggtaagtctcccaggggggctcatcacagctgcagaaagtacagagaaagaagcacaaattgtgctcgagagggttgaaaggtagggagggatctcaagagacttcatgaaggagatactttgtgagttgaatctctaggtatgagattattcattgtccaaaggggaaaaagaaaatcaggc

SEQ ID NO: 3736 - DNA, 530 bp, Homo sapiens
  MAP TO AL049647.7; EXPRESSED IN HELA, SIGNAL = 0.63; EST_HUMAN HIT: AI743673.1, EVALUE 2.90e+00; NT HIT: AE000989.1, EVALUE 7.90e+00; SWISSPROT HIT: O00743, EVALUE 4.90e+00
cagagcgagtctgtcagcaggccacaccgcaggtagctcaggtctaaacagaccgtcatctagacaggaggcttcagtaccatcttcccatgtaggcaagccctgaagacctcaggcttggcaatgaatgccatcatctctgctgcattgactatttctaacaacaggatcagaacattgccacagacacatgtgagccctggttacctccatgcccttaccagaatgctgtcgaagctggctcctcggtctggactggacagatattttatgaaaaaagttgagagccaaagcacccataaggtcctgatttagaagcatcattttaataatattcatcttctctgcctctaacttgttgttgggtgaaatggttgagcaggagtgaggtgagggcaggttcattctaaaactttgttcagttttccttaagaggccctgggcacaatgaatactacttgtgctggttaaatatagtgccatctgccctcgaaaatcttaaatagagaggctaggaagtgagccctgtg

SEQ ID NO: 3737 - DNA, 573 bp, Homo sapiens
  MAP TO CHR22_86.0; EXPRESSED IN HELA, SIGNAL = 0.76; SWISSPROT HIT: O95180, EVALUE 3.70e-01; NT HIT: gi12742736, EVALUE 1.00e-60; EST_HUMAN HIT: BI011261.1, EVALUE 2.00e-60
tgtgcatagattagcgctggggaaagtccccgtgggggcaggctgtgggcagggaggagggctcaccagccagccaagtgcccgcacgagggaaggagtggccatcgtccagtgagatggtgaaggggacgtggccgctctcatagagcaggggcgacacgaagtgcacttgcccggaggagtccacatggccgagggtctggatgctctcctgtggcatgcaaacctgtgggcctggtggtggtaggaggtgctgggccactgcaggctgagcatctcgacagtctgggcccccaacctccctggggaacccatccaaccagctgtcctgtgccctcctgcctgtcctgggtctgaggggctccattcagcctgccagtgggtctgagccctcagcatgcacagggatgggggcgtggggccccagtgcccggcctcctgggcctcccaacctgcagatcacactggcgtctgtggggctggacatcttgaagtgccgcaccacaaagtccttgccgcccatcatggatcctgagtagggcaatatctccaggcagaagtcctggaaatcca

SEQ ID NO: 3738 - DNA, 557 bp, Homo sapiens
  MAP TO CHR21_50.0; EXPRESSED IN HELA, SIGNAL = 0.79
gaattcctgtttgcctggacaagaaaatatagatattgagaatgttaaagatgaggaggaggaagaagacaaaggagaaggggataaagaaaagaagataaaggagaggaaagggatggaaagggaggaagaaggtttaagggacaggaagaatgacgaggaggaggagggtgaagaaataatcgtgacatataacgtattggtaatttttttatctataagaagaaaatatcaccatggttgattatattaatgcatcacagcacatttattgtgataaaaatttgaggctcaaaacacatttaccacatgagaaaaagttcatggttagatatcagatattgaaagacaatctttcttagagtataatggctctccagccaataaaaaagtgaatatctggagaacatcactaatcaaatgccaatatctagttgatcaagttttcttcacactattgtcaaaaggcaggtgatccaagcagctgttttgttatggaatatggaattccatatggttatggaataaagtttcttggaagaattgggaatctcaca

SEQ ID NO: 3739 - DNA, 574 bp, Homo sapiens
  MAP TO CHR22.1; EXPRESSED IN BONE MARROW, SIGNAL = 2.6; EXPRESSED IN ADULT LIVER, SIGNAL = 3.8; EXPRESSED IN FETAL LIVER, SIGNAL = 2.2; EXPRESSED IN LUNG, SIGNAL = 5.4; EXPRESSED IN HELA, SIGNAL = 2.2; EXPRESSED IN HEART, SIGNAL = 4.7; SWISSPROT HIT: P11414, EVALUE 1.10e+00; NT HIT: gi14777006, EVALUE 0.00e+00; EST_HUMAN HIT: AA527682.1, EVALUE 0.00e+00
tggaaagcagacttgaaccctggtcattcctactctcaggggcagcatgttaaggatagcagcctgcaagtctatctcttaaactccacttgtgtgtacaccttggtgatgtcattgtacctgccttcagggggttggtagttagggatcggtggtgtgtaatgtggcccttccttctcaaaggggaacaggttaggatcccgcttgatggcctcagcatggagcttcggggattccagttgcagttcctccagagcttcctgctgggcttctagcatagccctgatggtgtccctctccatcttacgctcttgctgcttgtacaaggaccacttcttcagaagcagagctctcctctcagtctcctcaaaggtgagctccacctgaggccgctctctgcaaagaagctaagggttaccaatctcactggcatgtaagtctgtgactgcaactgacacaagtattcccattgccagacacagacaggacttaggagataaaacaagtttgggacaaattaagaaatggaatgttgaatgtggctgcagctgcaactgatgcttggaaccaaggt

SEQ ID NO: 3740 - DNA, 569 bp, Homo sapiens
  MAP TO CHR5.1; EXPRESSED IN LUNG, SIGNAL = 0.8; EXPRESSED IN HEART, SIGNAL =   1; EXPRESSED IN ADULT LIVER, SIGNAL = 1.6; EXPRESSED IN PLACENTA, SIGNAL = 1.3; EXPRESSED IN HELA, SIGNAL = 1.9; SWISSPROT HIT: P30397, EVALUE 1.90e+00; NT HIT: gi14727636, EVALUE 6.00e-84; EST_HUMAN HIT: BE407738.1, EVALUE 9.00e-84
ttccacaagaatgctcaacgaataagagctgaatgaagaaacaaaaatatccatttgtatagctacataatacatatacatttatatatccacttaaaatgtaatatcctttcagctaaagtttataagctccaccaaaagatatatttaaccaaaattggctacttccccaaaatctattcaagaaaatgtctaatatccaaaagtcattaaacacatacgtgtccacttgtcctgcattgtggctgttttctgctttcatccgtgtcagtgcagcagcagcttcatccagtgcacaactaactgaggatgtcagtctccggagtacctcaggatctgcaaaagctttaccatcagcagttgacaatttgccaattccttcagtgtgcatcaatcaatcaggtagtgcagaacaacaaaaaaaaaagtataaaagtgcaaattgtaattatatttctaaacactattatctaggaaaaagaaatggtatagaatccataggttaggttgacagaagataaggcttatcaattcaattctgccactaatgtcaaaaggccatggcataa

SEQ ID NO: 3741 - DNA, 576 bp, Homo sapiens
  MAP TO CHR15.1; EXPRESSED IN LUNG, SIGNAL = 0.68; EXPRESSED IN HELA, SIGNAL = 0.82; NT HIT: gi13650507, EVALUE 6.00e-81; EST_HUMAN HIT: BI772688.1, EVALUE 0.00e+00; SWISSPROT HIT: Q9TU67, EVALUE 2.00e-24
tggcaagctgaacatgactcttgtcttactgcttctagactgttggcaagagtagcaagatgctgcagcacattgactatagaatgagatgtatcctgcaagatggccgaatcttcattggcacctttaaggcttttgacaagcatatgaatttgatcctctgtgattgtgatgagttcagaaagatcaagtaaggctgatttgggcaaatgggggttggacacagaggcagtgggaagggaaggccagagctggagtaagggatttccgagggtaactgaagtagttagggaaactatggtagagccagtctattgtttaacctcttgacctgatctctgaattaggtcagagtctgcatctgaactcttttaagtttgtaaaacaatcatggatttattactgggagtaaaagtatatgctatggtcagaatactcgtatttatttttaaaattgagaaaaatgctatattaattaattggttggcttctgcagcagtcttagaccaaatcttggttgaaatggagaagaacagttgttcttcatggttgaggagttgggatatggttgccatt

SEQ ID NO: 3742 - DNA, 514 bp, Homo sapiens
  MAP TO CHR3.1; EXPRESSED IN ADULT LIVER, SIGNAL =   3; EXPRESSED IN BONE MARROW, SIGNAL = 4.5; EXPRESSED IN PLACENTA, SIGNAL = 3.4; EXPRESSED IN FETAL LIVER, SIGNAL = 3.6; EXPRESSED IN LUNG, SIGNAL = 1.9; EXPRESSED IN HELA, SIGNAL =   3; EXPRESSED IN HEART, SIGNAL = 1.6; SWISSPROT HIT: P54922, EVALUE 8.00e-60; EST_HUMAN HIT: BG024441.1, EVALUE 0.00e+00; NT HIT: gi15297849, EVALUE 0.00e+00
ttttggatggagaatcagcccctaccttccctgagtctttcggtgtgaaggagagggatcagttctacacctccctgagctactctggctggggtggcagcagtgggcacgatgcccccatgattgcctacgatgctgttcttgctgcaggagactcctggaaggagcttgcccaccgagcctttttccatggtggagacagtgattctacagctgccattgctggctgctggtggggagttatgtatggttttaaaggagtgagtccctccaactatgagaaactagaatacagaaaccggctggaagagacagctagggctttatattctctcgggtcaaaagaagacactgtaatttccctttagggagacgtgatgttcacttctgatggattcttcttttgtgtatttccttttctgctatttcttttcagtttttccaaagtcaagagtcttaaccttgtactcagggaattttgagataacaagtcccttgggcaccttaagctcag

SEQ ID NO: 3743 - DNA, 574 bp, Homo sapiens
  MAP TO CHR22.1; EXPRESSED IN BONE MARROW, SIGNAL = 1.5; EXPRESSED IN PLACENTA, SIGNAL = 3.2; EXPRESSED IN FETAL LIVER, SIGNAL = 2.4; EXPRESSED IN HELA, SIGNAL =   3; EXPRESSED IN LUNG, SIGNAL = 1.7; EXPRESSED IN HEART, SIGNAL = 0.92; EST_HUMAN HIT: BI755346.1, EVALUE 1.00e-110; NT HIT: Z26491.1, EVALUE 1.00e-127; SWISSPROT HIT: P21964, EVALUE 2.00e-39
tcctgtaagggctttgatgcctggtcctgggtccctgtcccagagctgagcacctgctggcccggaccccacctttcttgtcgcccacgttcatggcccactccttctgctcgcagtaggtgtcaatggcctccagcacgctctgtgcgttcccgggctccgcatgctgcagcacgtggttcaggatgcgctgctccttggtgtcacccatgagcaggttgtggatgggctgcaggatgaactcgttccagccgataaggcacaggccccagccccagtgcctcagaagcagcagcagcaccaccagcagcaccaggcccagcaacacagctgccaacagcagaggcggggcctccggcatctgcagggcgggaggggaggggcgccagtgctctgtgctcctcctgcagcacccacacgcccctttgcttggagtgccaccatcgcccccttgtgtttgcagaggggcaaggttcagaaatgccagccttgtgcctcagttgcctgacgtgtcagcgccagggagccagccttctcgtgccctctggtgccctcgggtagacagagcaggtgt

SEQ ID NO: 3744 - DNA, 597 bp, Homo sapiens
  MAP TO CHR11.1; EXPRESSED IN HEART, SIGNAL = 1.5; EXPRESSED IN ADULT LIVER, SIGNAL = 2.4; EXPRESSED IN FETAL LIVER, SIGNAL = 1.7; EXPRESSED IN HELA, SIGNAL = 1.4; EXPRESSED IN LUNG, SIGNAL = 1.2; SWISSPROT HIT: Q14139, EVALUE 3.00e-31; EST_HUMAN HIT: AL039888.1, EVALUE 1.00e-103; NT HIT: gi16183763, EVALUE 1.00e-103
tccactggtatcagcttcccagttctgggctcagcttcatgactgctttacctgtaaattcgatgtccacaaaaaccttgattagagcctctgcaagttggggtgcatactgaaagttgcagaacacacgtttccggtggaacacactggataccaagggatttggggtctgatccaggtggggcatcactgcttccaacacctctgctagtttggccctcaggtggggattcttcattctgcaaaatgggcaaaaagcaagatgagcagataagcttaactccaaatttatgactctgttctctccacataagaatcaaaatccaccctaaaccatattacaggaaaaaaaaggatccacttctgcagttttaagtttgtcagtttcttggtgcggctgggcggggggtggggtggtgatgcagggtacatcatttaactcttgagttgacagcttaccaaatatgacggtgagcacttaagtttctattgaatgcttagccattgtttacttctctgtaataatgcattatttactgcttcctattctctgacagtttcatgtggaataaacttgccttttcaagctttctgagg

SEQ ID NO: 3745 - DNA, 592 bp, Homo sapiens
  MAP TO CHR19.1; EXPRESSED IN PLACENTA, SIGNAL = 3.4; EXPRESSED IN HELA, SIGNAL = 1.9; EXPRESSED IN LUNG, SIGNAL = 1.7; EXPRESSED IN HEART, SIGNAL = 1.9; EXPRESSED IN BONE MARROW, SIGNAL = 0.76; SWISSPROT HIT: Q9TTR7, EVALUE 3.30e+00; EST_HUMAN HIT: BE740100.1, EVALUE 0.00e+00; NT HIT: gi14764241, EVALUE 0.00e+00
tagaaaaccacgaaccggaggaggaagaggaagaggagatggagacagaagagaaagaagctgggggctcaggtaaatctggacaggccagactctgggagccctgggagggtggaaaagtgggtttcatctctctccactcccttccagatgaggagcaggagaagggcagcagcagtgagaaggagggcagtgaagatgagcactcgggcagcgagagtgaacgggaggaaggtgacagggacgaggccagtgacaagagtggcagtggtgaggacgagagcagcgaggatgaggcccgggctgcccgtgacaaagaggagatctttggcagtgatgctgattctgaggacgatgccgactctgatgatgaggacagaggacaggcccaaggtggcagtgacaatgattcagacagcggcagcaatgggggtggccagcggagccggagccacagccgcagcgccagtcccttccccagtggcagcgagcactcggcccaggaggatggcagtgaagctgcagcttctgattccagtgaagctgatagtgacagtgactgagtcccagggcattcagggctggttcagac

SEQ ID NO: 3746 - DNA, 544 bp, Homo sapiens
  MAP TO AL355310.9; EXPRESSED IN HEART, SIGNAL = 1.8; EXPRESSED IN BONE MARROW, SIGNAL = 4.4; EXPRESSED IN ADULT LIVER, SIGNAL = 3.1; EXPRESSED IN PLACENTA, SIGNAL =  36; EXPRESSED IN FETAL LIVER, SIGNAL = 1.9; EXPRESSED IN LUNG, SIGNAL = 2.6; EXPRESSED IN HELA, SIGNAL = 2.1; NT HIT: X68676.1, EVALUE 0.00e+00; SWISSPROT HIT: P46439, EVALUE 2.00e-18; EST_HUMAN HIT: AA815279.1, EVALUE 6.00e-57
ttcagatagggtctggcacccagtcagagtctaataaatgctgatgtatccaattgaagcctgggcactgccccggttttagttgtggggaagatggctgcttgcctgtggccagcctgggccatctacagccctggggaggccacctctgtgcagggagcttttgtctgagggtggtgacagctgttttctgcctcaggagaaactgaagccaaaatacttggaggaactccctgaaaagctaaagctctactcagagtttctggggaagcggccatggtttgcaggagacaaggtaaaggaggagtgatatggggaatgagatctgttttacttcatgtgtttcggggttttcagcccacacattcttggccttcttcagatcacctttgtggatttccttgcctatgatgtccttgacatgaagcgtatatttgagcccaagtgcttggacgccttcctaaacttgaaggacttcatctcccgctttgaggtgatgcccccatcctcctttctctttgatgccccttgttcctttctctcc

SEQ ID NO: 3747 - DNA, 589 bp, Homo sapiens
  MAP TO CHR22.1; EXPRESSED IN PLACENTA, SIGNAL = 9.1; EXPRESSED IN HELA, SIGNAL = 8.3; EXPRESSED IN FETAL LIVER, SIGNAL = 5.5; EXPRESSED IN LUNG, SIGNAL = 7.4; EXPRESSED IN HEART, SIGNAL = 5.1; EXPRESSED IN BONE MARROW, SIGNAL = 8.5; EXPRESSED IN ADULT LIVER, SIGNAL = 6.7; EST_HUMAN HIT: BG675767.1, EVALUE 2.00e-87; SWISSPROT HIT: P54198, EVALUE 4.00e-24; NT HIT: gi14776998, EVALUE 2.00e-87
ctctgtgtagtgcctgctgccccatcatggaaactctcctggtctctgcagctcgggaaggcaggctgcccggctcttctccgtgcctcatgtggtgcagcaagagaccaccctggcctacctagagaaccaggtggcagcagcactcaccctgcagtccagccacgagtaccgccattggctcctcgtctacgcacggtacctcgtaaacgaaggtgaggctcctggcagccctgagcagccttctccttctgcccctccatcctcccaggcctcacttagtccctgtgaaatcagggaaaagatgtgatggcccagcagcctctacctcccagcctgagctgcagtcaaggcagctcagcaggcacccagccccttataggctctgaggctctgaatagagtgaccctgagggtgttcccgcagagaagcagcaggacaggcagcaggacggaggaatagatgcctgggtggaaagacatggtctgaaggagcagattctatgttctggctcctgccctgcaccacaacttggcagtgctgctaatcagtgagggcatcttgtagcagtggttctcttcctcctccc

SEQ ID NO: 3748 - DNA, 554 bp, Homo sapiens
  MAP TO CHR5.1; EXPRESSED IN ADULT LIVER, SIGNAL = 2.3; EXPRESSED IN PLACENTA, SIGNAL = 2.8; EXPRESSED IN FETAL LIVER, SIGNAL = 2.8; EXPRESSED IN LUNG, SIGNAL = 2.8; EXPRESSED IN HELA, SIGNAL = 3.5; EXPRESSED IN BONE MARROW, SIGNAL = 2.3; EXPRESSED IN HEART, SIGNAL = 2.6; NT HIT: gi14782931, EVALUE 1.00e-123; EST_HUMAN HIT: BI831168.1, EVALUE 0.00e+00; SWISSPROT HIT: Q62241, EVALUE 2.00e-31
ataccagggtgaggaggacctggaagactagggggaggtggtatcattgctcctacaggaggaggagcagagaatggagcaggaggtatctttccttgttgaaatgcagccgttgttttgtcaatcaggctctgagcctgctctttcatccatttctgatagtagtctttcacattctctttgtgtttcctaccactgcagtgtgtctttctcacaggaggagagtcatgggtgaggtatgtattgcagtagtcacaataaaacttgggcatgttgctctgcaggccattggccactccattccgtgacacccagaaatgaatgacttgtctaattttactaaagcaaagctctagctccttgaggatggggactgtttaaagtttgtcttaattatctgtatgtattcttttcactgtatctggcattcgataaaaccttagtaactataagttgaatgaatgaatgacccagcaagaccatgaggagtgaccagaagctcatcagaaggatttgagtttcagaatacaaaatgttttcctcattaaggggcc

SEQ ID NO: 3749 - DNA, 545 bp, Homo sapiens
  MAP TO CHR11.1; EXPRESSED IN LUNG, SIGNAL = 0.97; EXPRESSED IN HELA, SIGNAL = 0.53; EXPRESSED IN BONE MARROW, SIGNAL = 0.64; EXPRESSED IN ADULT LIVER, SIGNAL = 0.59; EXPRESSED IN FETAL LIVER, SIGNAL = 0.67; SWISSPROT HIT: Q14896, EVALUE 4.00e-28; NT HIT: U91629.1, EVALUE 0.00e+00
tgcagtgcacataaggaacctcaagtgtctgaggggtggtgatgctcaccaggcccgtatgaccctctcagtaccctctggagcggtcacctcagcatcgtcattttagagatgagaaggatgaggtttaggctgtcaaaggcccaaggtcacagaggccttgagcccaggtttgcctgctcccctacagggctaggtggggtgggggctgaggggtccaagccctaaagcctcatgtgcccccccagccaggctcaccctgcacaatgagctcagccagcgcctggcccccgctagtgcacagtgcatagtgccccgcgtcctccagcatggcctcgttgatgatcaggtggtgtctctgcccgtccttcttgaaccggtatttgaaggtctcctcccgggtcagctccaccccgtccttcagcctagccgggtgggtgggtggcaagtgctgtggcctcttctgggcagatgcccccaacacccatgccccgtgcttctggaactcaccatttgacttgcgccccctcctccgatacttcaca

SEQ ID NO: 3750 - DNA, 537 bp, Homo sapiens
  MAP TO CHR3.1; EXPRESSED IN FETAL LIVER, SIGNAL =   2; EXPRESSED IN LUNG, SIGNAL = 3.3; EXPRESSED IN HELA, SIGNAL = 2.4; EXPRESSED IN BONE MARROW, SIGNAL = 2.1; EXPRESSED IN HEART, SIGNAL = 1.9; EXPRESSED IN ADULT LIVER, SIGNAL = 2.7; SWISSPROT HIT: P30305, EVALUE 5.00e+00; NT HIT: X07855.1, EVALUE 0.00e+00; EST_HUMAN HIT: BG741443.1, EVALUE 0.00e+00
aaacatttggacttgggctggggcaggggctggtgttgggcaaagctgggggtccaggctggagaagcaggggcccctccagacgcagccttgggagactcagcatgtgcccccctcccctcatcacagaacaagacaatggttaaaaaccagaacagatgcccagaagggggtaccatggccattaccagcatctcagacaagggcaggcttcaaacagggaggcctgtggcaacccctcccctacgtctggagctgaggggacagggggagctgagaacaaagagaggaaagaggagaaaagcggcgggggaacaggcggggagcgtgatcttcttgcccccatcttcctcaggggttggggggtacaaagtcggcggtggccctggaggtgggggaaagcagagcatggatcgggaagcagccagggcgtgcctctctcccgcctccctagacaatgacccttctctatttttcctacccatttgttaccagggacacagttgccgcccaggagccagtttctgttgctgggtt

SEQ ID NO: 3751 - DNA, 554 bp, Homo sapiens
  MAP TO CHR5.1; EXPRESSED IN ADULT LIVER, SIGNAL = 0.87; EXPRESSED IN LUNG, SIGNAL = 1.1; EXPRESSED IN HELA, SIGNAL = 0.84; EXPRESSED IN HEART, SIGNAL =   1; EXPRESSED IN BONE MARROW, SIGNAL = 0.74; EST_HUMAN HIT: AA923262.1, EVALUE 4.00e-92; SWISSPROT HIT: Q9Y496, EVALUE 9.00e-21; NT HIT: gi6857803, EVALUE 3.00e-95
tgtggttgtcctttttgtggtacactcgtgtattagcccataatagtgtcctttggaaactcatgtggttgacactctcattttcgagaaggccaagggtgcatatgtgctttaaatgtttttgatgtatttgtaatggtagtattaattttaactctgtcaagtgtaaaatgatttgtttcatatttctaattcaatagtgtgcaaatattgggccagcagattacaattatgatgaaactatcagtacattacggtatgccaatcgtgctaagaatattaaaaataaagctagaattaatgaagatccaaaggatgctttgctgcgtcagttccagaaagaaatagaagaactgaaaaagaagcttgaagaaggtagcttttcctcaaaatattaatctttatgttggctaaaaatacattgttgaaccactaactgttctaacaaaagccctctattaaaccttttttgagcctctaacattggtagttaaatgaatatttctagaaagtgacttggtacttacatactttcgcattttcatattaagctt

SEQ ID NO: 3752 - DNA, 589 bp, Homo sapiens
  MAP TO CHR9.1; EXPRESSED IN HELA, SIGNAL = 0.82; EXPRESSED IN ADULT LIVER, SIGNAL = 1.3; EXPRESSED IN LUNG, SIGNAL = 3.4; EXPRESSED IN FETAL LIVER, SIGNAL = 0.81; EST_HUMAN HIT: AI188762.1, EVALUE 0.00e+00; SWISSPROT HIT: P57512, EVALUE 7.00e-03; NT HIT: AF062072.1, EVALUE 0.00e+00
gcctgtagtgcagcagagtgaaaagttaaagataccagtttcccaaattgattaaaacataaccctgagagctaacagaccttttcataaattgaaaccaagaatagtgataggtaaaaataccctaataattgataaaatttctttttgggtttttttttggtcctaaaacagtttgcttttataaaggcaacaaaatattgataattatctctgcccaccctttttaatgattaacggaatttgggcttttgttaaaacttgcgtagcaattacaacggtataccgatgattatattagactatattttggtgataacactaatttctgaaatttcgtttcatctatagcagaaaaatatggctcaggagactaaccagaccccggggcccatgctgtgtagcacaggatgtggcttttatggaaatcctaggacaaatggaatgtgttcagtttgctacaaagaacatcttcagaggcagcaaaatagtggcagaatgagcccaatgggtaagttatttccaaggaaaaacacatttgaaagaactggtggacagaaatacagaaccaagaattggggctgagaat

SEQ ID NO: 3753 - DNA, 543 bp, Homo sapiens
  MAP TO CHR19.1; EXPRESSED IN PLACENTA, SIGNAL = 2.9; EXPRESSED IN LUNG, SIGNAL = 2.1; EXPRESSED IN FETAL LIVER, SIGNAL = 1.8; EXPRESSED IN HELA, SIGNAL = 2.5; EXPRESSED IN HEART, SIGNAL = 1.5; EXPRESSED IN ADULT LIVER, SIGNAL = 2.3; EXPRESSED IN BONE MARROW, SIGNAL = 2.2; NT HIT: gi14785858, EVALUE 0.00e+00; EST_HUMAN HIT: AL575262.1, EVALUE 0.00e+00; SWISSPROT HIT: P20126, EVALUE 1.70e+00
gtttctgcttggcaaactcctcttcaccctttagaacccaccccagatgtcccctcttctgagaagccctccagggatatgaagggcctgttggggtaacctctgcctgaacagcccttcactgacccccgcctccccggcaggatatgtttgccttcatgggcagcctggataccaagggtaccagctacaagtatgaggtggcactggctgggccagccctggagttgcacaactgcatggcgaaactgttggcccaccccctgcagcggccttgccagagccatgcttcctacagcctgctggaggaggaggatgaagccattgaggttgaggccactgtctgaaccatccctgtacatctgcaccttcttgtgcaaggaagtccttggcctaaagccttggttctcaaactgggttccttgggacctccggggtgggggggttccaggaggcacgtagggtaccttgcagggtcctaggagggaaacccaggattccaggagggatcccaggaactgtgggcacccattttctgtgtct

SEQ ID NO: 3754 - DNA, 580 bp, Homo sapiens
  MAP TO CHR5.1; EXPRESSED IN BONE MARROW, SIGNAL = 0.68; EXPRESSED IN ADULT LIVER, SIGNAL = 0.98; EXPRESSED IN HELA, SIGNAL = 0.93; EXPRESSED IN FETAL LIVER, SIGNAL = 0.66; EXPRESSED IN LUNG, SIGNAL =   1; EXPRESSED IN HEART, SIGNAL = 0.87; SWISSPROT HIT: Q9Y5H8, EVALUE 1.00e-104; NT HIT: gi14861872, EVALUE 0.00e+00; EST_HUMAN HIT: BI465306.1, EVALUE 1.00e-125
agcagtgtgagcaccaacagactggacaccgcgcagatggcgacgatcaagtacacgttgacatccaccagtgcagcttccgggcccgtggcgccagcggacgcctgggacgaggccttgggtgcctggccactctccaccagcgacaccagcacagtggccgtggcggtcaatgagggttcaccgtggtccttcaccagcaccagtaggcgatggcgcggggcgtccacctcgtccagggcacgggtcgtgctgatctctcccgtgtacagccccacgcgaaacgggatgcgcgcaccgccggtcccaggctgcagctcatacgaaagccacgcgttgtagcctgagtctgcatccactgcgcgcaccttcgctaccacgtggcccgcacccactgaccgcggcaccagctcgctcactgcgccaccgatgccacccacccgaggcatcagcagtgccggcgcgttgtcgttctcgtccagcacgaacacctgcagcgtcacgttgctgcccagaggcggcacgcccgcatcgcgcgcactcacctggaactgcagcagctctagctcctcgtggtcca

SEQ ID NO: 3755 - DNA, 540 bp, Homo sapiens
  MAP TO CHR5.1; EXPRESSED IN ADULT LIVER, SIGNAL = 2.2; EXPRESSED IN PLACENTA, SIGNAL =   2; EXPRESSED IN LUNG, SIGNAL = 2.1; EXPRESSED IN FETAL LIVER, SIGNAL = 1.3; EXPRESSED IN HELA, SIGNAL = 1.5; EXPRESSED IN HEART, SIGNAL = 1.4; SWISSPROT HIT: P08133, EVALUE 3.00e-16; NT HIT: gi15297028, EVALUE 3.00e-64; EST_HUMAN HIT: AA779742.1, EVALUE 4.00e-64
atctgacactcacccgcttcctgctaacctctagcccctccccttacctcaatggcttggtggagagacttgtcatatttctcaatgaattccctccggatgttgagcaggtcaatctcactgcgggataccatgatcctggtcagagtcttctcatctgtgccagcaccctggtggagccaggcaggagggagacacaggcggaaggagagatagagcccagtcaggcaagaaacagtggtatcccatctgcctttctcccttgttccttccaaaaacagggcggatgttccacctctgtcttctgcaaacagtcctgaccaaaatccctctgtgcccaggactggccagactgacacgcaaaaaagatgtgtgtgggttgaatagtgtccccatgtccacctggaaactcagaacatgatgtaatttggaaataaggtatttgcacatgtaattagttaagatgaaggcatactgaattagattgaagcctaaaccaataaccaatatctttagaagagggagggcacagacatacac

SEQ ID NO: 3756 - DNA, 572 bp, Homo sapiens
  MAP TO CHR18.1; EXPRESSED IN HELA, SIGNAL = 0.56; EXPRESSED IN LUNG, SIGNAL = 0.73; EXPRESSED IN HEART, SIGNAL = 0.84; EXPRESSED IN ADULT LIVER, SIGNAL =   1; NT HIT: gi16163805, EVALUE 4.00e-88; EST_HUMAN HIT: BE396507.1, EVALUE 6.00e-88; SWISSPROT HIT: Q10802, EVALUE 8.30e-01
actgcgagacagtaatccccaaacacttctctcatcctaaaaataaaccatttacatcaggttggcggttagggcggggaccaggaggcaaatacctgcagctggggtattttcctgcagctgggggtggagccggggacgtaccttccattttcattccctctttctgttctatatacttcctaaagcagattctattaaccaagaactgggaataagcaagcaagcaaacaaacaacctgtgattttgcagaaatgactgaaaacggaaattcacttacttcctgtactgcaccgggggcttcgaagtgatgaaaggtctaagcagggtctgtcctcgaccctcccagcaccagaccgtcgggtagtacgtttctgtaaccacgggacagtggtcttgaaggaagcggctgaaactctcacccccggtcactaactggggtttctgaagggaaaagcagtatcagagaagggcccagagcaaagtttctgccaaccgtaaaccagaaaccggcaaagacttgtcgctcgcgcgcgcgcttcctccgattacaactctttctggagggctg

SEQ ID NO: 3757 - DNA, 569 bp, Homo sapiens
  MAP TO CHR12.1; EXPRESSED IN HELA, SIGNAL =  18; EXPRESSED IN LUNG, SIGNAL =  22; EXPRESSED IN HEART, SIGNAL =  11; EXPRESSED IN BONE MARROW, SIGNAL = 4.3; EXPRESSED IN ADULT LIVER, SIGNAL =  25; EXPRESSED IN PLACENTA, SIGNAL =  25; SWISSPROT HIT: P50914, EVALUE 1.00e-66; NT HIT: gi16163693, EVALUE 0.00e+00; EST_HUMAN HIT: BG104310.1, EVALUE 0.00e+00
ccttgcacctacaaatttctgtcttgatccagaaagtcattagcataaaaaagataatagtggccttctcacctaacgccaccaacatggtgttcaggcgcttcgtggaggttggccgggtggcctatgtctcctttggacctcatgccagaaaattggtcgcgattgtagatgttattgatcagaacagggctttggtcgatggaccttgcactcaagtgaggagacaggccatgcctttcaagtgcatgcagctcactgatttcatcctcaagtttccgcacagtgcccgccaaaagtatgtccaacaagcctggcagaaggcagacatcaatacaaaatgggcagccacacgatgggccaagaagattgaagccagagaaaggaaagacaagatgacagattttgatcgttttaaagttatgaaggcaaagaaaacgaggaacagaataatcaagaatgaagttaagaagcttcaaaaggcagctctcctgaaagcttctcccaaaaaagcacctggtactaagggtactgctgctgctgctgctgctgctgctaaagttccagca

SEQ ID NO: 3758 - DNA, 570 bp, Homo sapiens
  MAP TO CHR5.1; EXPRESSED IN BONE MARROW, SIGNAL = 0.83; EXPRESSED IN HEART, SIGNAL = 0.84; EXPRESSED IN ADULT LIVER, SIGNAL = 1.8; EXPRESSED IN FETAL LIVER, SIGNAL = 1.2; EXPRESSED IN LUNG, SIGNAL = 0.6; EXPRESSED IN HELA, SIGNAL = 1.6; EST_HUMAN HIT: BG719192.1, EVALUE 1.00e-104; SWISSPROT HIT: Q9UN75, EVALUE 1.00e-104; NT HIT: gi14861872, EVALUE 0.00e+00
gtaccaactcgctaactgcgcctcctgcgctgccagccggagtcgccagcagtgccggcgcgttgtcgttctcgtccagcacgaacacctgcagcgtcacgttgctgcccagaggcggcacgccggcgtcgcgcgcgctcacctggaactgcagcagctccagctcctcgtggtctagcggctgcagcgcgtacaccttgccgctctccgcgtgcaccgacacgtagctcgacagtgcgtgctcgcccacccgccgctccaccagcgagtaggacaccagcgcgttcttctgcgcgtccgcgtcccatgccgacaccgtgaagatgtggcagcccggcgggttgttctccttcacgaacactgtgtactcgggctgcgcgaacgcaggcgcattgtcgttcacgtcggccacctccacggacactctagccgtggcccacagcgaaggcgagcccccatcccgcgcagtcaccaccagctcataggccgacacgctctcgcggtccagggcgctgtccagcaccaacgagtagtaattcttgtaggtggacaccagcttgaagggaacat

SEQ ID NO: 3759 - DNA, 547 bp, Homo sapiens
  MAP TO CHR17.1; EXPRESSED IN BONE MARROW, SIGNAL = 0.57; EXPRESSED IN ADULT LIVER, SIGNAL = 0.61; EXPRESSED IN LUNG, SIGNAL = 0.91; EXPRESSED IN HELA, SIGNAL = 0.41; EXPRESSED IN HEART, SIGNAL = 0.84; EST_HUMAN HIT: AW294468.1, EVALUE 0.00e+00; SWISSPROT HIT: Q04844, EVALUE 3.00e-26; NT HIT: AF105999.1, EVALUE 0.00e+00
tcttcggcattgtacgtctgagagctgcggagccagggccgggagcccaccccagaagctctgacctgggccccggcctcaggcccagccctggaagctgggatctagcggggccgcgatcccaagcccaccccttcacccaagcccagcccgcacgcctctgttcccatctgtacctccggccgcgctggagcgtcccacccagtgcctacgcctggctccgcctccagcgcgaagccccgccccgagggcggtgcttcccggttggccccgccccataaggcccccccccaacaataatcgtccgggcctcggagtagctcttcccaccggaaaataagcgaacagttctgccaatcgaaggggaagtaggtgacctccactgcgcagacgctgcggtagatggccggaggcagccacgtcacggagccgccctcgtagacgagcacgttggcgtcgtaggccactccgaactggccatcaatactgtgggctcggggaaaccgagctttttgcacaggtctgcaccctctcagagtaccccctt

SEQ ID NO: 3760 - DNA, 514 bp, Homo sapiens
  MAP TO AC009789.19; EXPRESSED IN ADULT LIVER, SIGNAL = 1.4; EXPRESSED IN FETAL LIVER, SIGNAL = 1.2; EXPRESSED IN LUNG, SIGNAL = 1.5; EXPRESSED IN HELA, SIGNAL = 1.3; EXPRESSED IN HEART, SIGNAL = 1.4; SWISSPROT HIT: P17482, EVALUE 5.00e-33; NT HIT: AY014296.1, EVALUE 0.00e+00; EST_HUMAN HIT: BG830524.1, EVALUE 0.00e+00
gagctttggaagtgctgaggaagcctgggcccacgtttggctccatcctttccacacagcctctcacctggaggtgtctatagcaatggctggcccatctgtgacacccttcctgggagcttgaagacccaggtggcctcttctccagtgcaagatggggagtggagaccaagggagtgccctcttgatctggggcccttcacccccttcctttctttgattctatcgctgcttctctttcagccaacccctccgccaactggctgcacgctcgctcttcccggaaaaagcgctgtccctacaccaaataccagacgctggagctagagaaggagtttctgttcaatatgtacctcaccagggaccgtaggcacgaagtggccagactcctcaatctgagtgagagacaagtcaaaatctggtttcagaaccggcggatgaaaatgaagaaaatgaataaggagcagggcaaagagtaaagattaaagattacccccagtcctccctagctctt

SEQ ID NO: 3761 - DNA, 563 bp, Homo sapiens
  MAP TO CHRX.1; EXPRESSED IN LUNG, SIGNAL = 1.1; EXPRESSED IN HELA, SIGNAL = 0.49; EXPRESSED IN HEART, SIGNAL = 0.85; EXPRESSED IN ADULT LIVER, SIGNAL = 0.57; EXPRESSED IN BONE MARROW, SIGNAL = 0.74; EST_HUMAN HIT: BG008447.1, EVALUE 3.00e-65; NT HIT: AL163209.2, EVALUE 2.00e-84; SWISSPROT HIT: P07572, EVALUE 2.00e-06
aaccaagtggtgactccgacagtagctgccgtattagatgtggtttcattgcttgagcaaatttacacatctcctggtacctggtatgtagccaatgacttgacaaatgcctttttctccattactgttcataaggcccaccagaagcaatctgccttcagctggcaaggccagcaatatacctttaccgtcctacctcaggggtatatcaagtctccagctttgtgtcaatcttattcagaaagagcttgatcgcttttcacttccacaaggtatcacactggttcattccattgatgacattatgctgattggatccagtgagcaagaagtagcaaacacactggacttattgtgtgtcagaagatggaaaataaatctgactaagattcagggatcttctacctcagtaaaatttctaggggcccagtggtgtggggcctgttgagatattccttctaatgtgaaggatgagtttggtgcatttggcgcctcctacgaccaagaaagaggcacaatgcctagtgggcctgtttggattttggggcaacacatttctcatt

SEQ ID NO: 3762 - DNA, 532 bp, Homo sapiens
  MAP TO CHR9.1; EXPRESSED IN BONE MARROW, SIGNAL = 0.91; EXPRESSED IN FETAL LIVER, SIGNAL = 0.99; EXPRESSED IN HELA, SIGNAL = 0.86; EXPRESSED IN HEART, SIGNAL = 0.7; EST_HUMAN HIT: AA969989.1, EVALUE 9.00e-13; NT HIT: AF011413.1, EVALUE 1.00e-14; SWISSPROT HIT: Q9QY96, EVALUE 1.00e-16
ctgctccttgctcttcactggctgtacaaacacagtcacttgtatcctctgacagacaacatttggaatcatttttactgtggttgtttcaactgcgttagctaaaactatcactgtgcttatagcctgtaaggctacagcatcagagagaaagccaaagtggttttggggactgggagtatttagcacagttattttcatctgtttccttatccaagtaactctctggaatttggcatgggatcaaagagtgccatcaggactctcaatgatgaggtattctttgccttccactctgttctgggattcttgacctttttggcactggggagcttcatcttggctttcctggccagcagcctgcctgacaccttcaatgaagccaagttcttgatgttcagcatgctgatgttatgtactgtttgaattaccttccaaactgtgtaacatagcaccaaagggaaggtcatggttgccttggaaatattctccaccttgacttccagtgctgagtgctaggcggtatctttgc

SEQ ID NO: 3763 - DNA, 582 bp, Homo sapiens
  MAP TO CHR1.1; EXPRESSED IN HEART, SIGNAL =   2; EXPRESSED IN BONE MARROW, SIGNAL = 0.84; EXPRESSED IN FETAL LIVER, SIGNAL = 0.98; EXPRESSED IN HELA, SIGNAL = 0.52; EXPRESSED IN LUNG, SIGNAL = 2.5; EST_HUMAN HIT: BE733488.1, EVALUE 2.00e-17; NT HIT: X14662.1, EVALUE 3.00e-15; SWISSPROT HIT: P32480, EVALUE 7.40e+00
ccattggtgtgggatgtatgaggtctgttttctttctggggaaaagccctggagactgtatacattgaggagcagacattgtctgtataatgaatgaagtaacgagctactgttgtttattcttctgtaatataattggttgaattcagacaataatgtagcatctgttatactatgcagggaaatgtcaaaacagaaagcaagcagacaggtggattaaagggagaaaaggagagaaaaccaagaaatatcacattaagttctgatttaaagtaggcgaaaaggaataatcataacaaaaatgataacaccaacagctgtcatatgttgatcacagtattacatatagcatgaggatcaatgctcagcacttgtcactgagtgctgaccaagtgtcagcatttgctaagtggcgtcagggacagcgccaagatggccgattagaagcagagtctcccatcaaaaagaaccataattagcatgtgaatcctgcaccagcaaccaagtattcaggttctctcatcagaactgactaggcagctggcgtgatccagagaggaaggtagagcagtgtggtgtggc

SEQ ID NO: 3764 - DNA, 587 bp, Homo sapiens
  MAP TO CHR20.1; EXPRESSED IN PLACENTA, SIGNAL = 3.7; EXPRESSED IN HELA, SIGNAL = 1.2; EXPRESSED IN LUNG, SIGNAL = 4.1; EXPRESSED IN BONE MARROW, SIGNAL = 2.7; EXPRESSED IN HEART, SIGNAL = 1.4; EXPRESSED IN ADULT LIVER, SIGNAL =   3; NT HIT: gi4502380, EVALUE 1.00e-125; SWISSPROT HIT: Q07817, EVALUE 3.00e-19; EST_HUMAN HIT: BE873153.1, EVALUE 0.00e+00
cccacccacctacatcactctctgaggactaaaactgcaccttccttctctctccctgcaggatacttttgtggaactctatgggaacaatgcagcagccgagagccgaaagggccaggaacgcttcaaccgctggttcctgacgggcatgactgtggccggcgtggttctgctgggctcactcttcagtcggaaatgaccagacactgaccatccactctaccctcccacccccttctctgctccaccacatcctccgtccagccgccattgccaccaggagaaccactacatgcagcccatgcccacctgcccatcacagggttgggcccagatctggtcccttgcagctagttttctagaatttatcacacttctgtgagacccccacacctcagttcccttggcctcagaattcacaaaatttccacaaaatctgtccaaaggaggctggcaggtatggaagggtttgtggctgggggcaggagggccctacctgattggtgcaacccttaccccttagcctccctgaaaatgtttttctgccagggagcttgaaagttttcagaacctcttccccagaaagg

SEQ ID NO: 3765 - DNA, 509 bp, Homo sapiens
  MAP TO CHR10.1; EXPRESSED IN FETAL LIVER, SIGNAL = 0.3; EXPRESSED IN LUNG, SIGNAL =   1; EXPRESSED IN HELA, SIGNAL = 0.46; EXPRESSED IN BONE MARROW, SIGNAL = 0.32; EXPRESSED IN HEART, SIGNAL = 0.78; EXPRESSED IN ADULT LIVER, SIGNAL =   1; EST_HUMAN HIT: BG773369.1, EVALUE 0.00e+00; NT HIT: M14660.1, EVALUE 0.00e+00; SWISSPROT HIT: P09913, EVALUE 1.00e-98
cctcttcaccttcttcacgcatcttatgaagcttcagagccaggaggactttaaggtactggttgtcaggattcagccgaatggcttgcctcagagggtcaatggcgttctgagatggtggccagttgtccagacggtagcttgctattgccagtccagaggtgaattctgggttctttggcttcttttccagagccttctcaaagcacaccttcgctctttcattttggtttcctccacactttaaccgtgtccacccttcctcacagtcaagctctggactctcaattctatagggactggaaaacttctcacagacatgtttcaccttgtctacataaatctgaacgtctgagagtcggcccatgtgatagtagacccaggcatagtttccccaggtgaccagacttctgatttctgcctggtcagcatgctcttgctggattaactcttcagctttacgtaagcattccagggctgcctcgttttgccctttgaggtgctttaga

SEQ ID NO: 3766 - DNA, 575 bp, Homo sapiens
  MAP TO CHR13.1; EXPRESSED IN PLACENTA, SIGNAL = 3.9; EXPRESSED IN FETAL LIVER, SIGNAL = 3.7; EXPRESSED IN HELA, SIGNAL =   6; EXPRESSED IN LUNG, SIGNAL = 2.2; EXPRESSED IN HEART, SIGNAL =   2; EXPRESSED IN ADULT LIVER, SIGNAL = 3.5; EXPRESSED IN BONE MARROW, SIGNAL = 3.2; EST_HUMAN HIT: AL583419.1, EVALUE 1.00e-112; NT HIT: gi14759734, EVALUE 1.00e-112; SWISSPROT HIT: P39052, EVALUE 3.00e-29
acttggaaccaaggatgctgggcacatcccatgctcagaggcacctggaagaggggactgccctaggctcagggttaccttggggatcgacttccttggccagcttgagggcgtcggagttggccaggtccatgttggcgggcgtgacagccagaatgaggctgctctcccggctgatgaactgcaggatcatgtccttgatctggtactcgatgtctggaggctggtcgcccacaggcaccttggtgatacccgggaggtcgatgagggtcaagttcaacactgggagggaaaccagaaggaaaggcattcagagccaggagaggggaggcacaaacaggcccgcagccacccagctgactaccaaagttcctgcgcggggctcagacttgaggatgtcgcctgacactctgcctgaaccacacctttgatccagtaactccccttctaggatcccatcctacagataccttctacctactccatttcaatggcacagttctaaatcaggacagttcagactggaatagacctaaatgactgaataaatttcagcccatccattcagccaatac

SEQ ID NO: 3767 - DNA, 524 bp, Homo sapiens
  MAP TO CHR12.1; EXPRESSED IN HEART, SIGNAL = 0.8; EXPRESSED IN ADULT LIVER, SIGNAL = 1.1; EXPRESSED IN BONE MARROW, SIGNAL = 0.86; EXPRESSED IN HELA, SIGNAL = 0.81; EXPRESSED IN FETAL LIVER, SIGNAL = 1.1; EXPRESSED IN LUNG, SIGNAL = 0.64; EST_HUMAN HIT: AL536522.1, EVALUE 0.00e+00; NT HIT: gi14784204, EVALUE 1.00e-103; SWISSPROT HIT: P25490, EVALUE 1.70e+00
ttcctgggttcctgtctgtctctacggttcctggtccacctctgttcctctccctcctgaccgcagggctttgtctccagcactctccccgaccttcctctgagtcagtcccttccctctgttcactccatctccacctccgcttcgcctctgttggagcacagggatcaggcattacttctgacgtcttgcccaccagctgcactaggatatggggttcaggtgggctcctcagctctggccctgacccagcccgctcccacccttccccaggtggtgagcttcttctccctcaagtcggactcggcgcccccctggatggtgctggctgtgctgtggtgctccatggcacagacgctgctgctgccctccttcatctggtcctgcgagcgctaccgcgccgacgtgcgcacagtgtgggagcaatgcgtggccatcatgtctgaggaggatggagatgacggtcagaggaggggctgggctttggctttcctggacatctgtctattcccttttctgccgct

SEQ ID NO: 3768 - DNA, 549 bp, Homo sapiens
  MAP TO CHR6.1; EXPRESSED IN ADULT LIVER, SIGNAL = 0.86; EXPRESSED IN LUNG, SIGNAL = 0.58; EXPRESSED IN FETAL LIVER, SIGNAL = 0.91; EXPRESSED IN HELA, SIGNAL = 0.73; EXPRESSED IN BONE MARROW, SIGNAL = 0.78; SWISSPROT HIT: P21416, EVALUE 1.50e-01
ccttccgcagaaagtcagaggccgaggagatggaagaacaggtgttcaagggggacccggacacccctcactccatctccttctcgggcagtggattcctctccttctaccaggcgggggctgtggacgccctgcgggacctggccccccggatgctggaaacagcccaccgctttgcggggacatcggcaggtgctgtgatcgccgccctggccatctgcgggattgaaatgggtgaggcctgtgttctgggtcccctgggaagtctcttgggggattccacagagacagaaggagcgtgagggaggctggggatgctttgggggacaaagccaggcctgggtggcaggaagggaagggaagagctggttggagtaggatagcggcagctgtgacgtttgaaggttggggtctgccaggccccagactctaacatgcagggtgagcctggacccctgtccctctccctcagtgcccttacctgtgagatgctctgtctcccagtgcctgggagagtaaaggacagtatctccctcgaacatcgaacat

SEQ ID NO: 3769 - DNA, 530 bp, Homo sapiens
  MAP TO CHR17.1; EXPRESSED IN FETAL LIVER, SIGNAL = 1.3; EXPRESSED IN HELA, SIGNAL = 0.8; EXPRESSED IN BONE MARROW, SIGNAL = 1.2; EXPRESSED IN HEART, SIGNAL = 1.9; EXPRESSED IN ADULT LIVER, SIGNAL = 1.3; SWISSPROT HIT: Q01097, EVALUE 1.50e-01; NT HIT: gi7212472, EVALUE 5.00e-01
catcactcagagccccctaccctcccaggggcccacactatggactcttggcagtggcagcagttctggagctggcagatggcacatgtctgcctcagaaggattcccagttctgtttgcagctcccctaggataccaccgatgttcccaagaggggctgtgaaattctcagataattctcaaaataaaattaattttgatacattttcatttaaaaataataagtgctagacagaactgtgtgggggaaaagctgcagaaggaagtcagaaaaggaagccagccaccacgttctgctgtccctggaagagccggcgggggtcccctccgtagcggccagatccctagatccatctgcaggggcccacaaaccccatcactccacctgtgatgtggggacctgggactcaaactccttggaggcagtgcctgtggccgctgaaaaatgctcattgcagatcccagtgcctgggatcctgaaggcatctattggacatcattacctccctaccttgcactctctcactccc

SEQ ID NO: 3770 - DNA, 515 bp, Homo sapiens
  MAP TO CHR19.1; EXPRESSED IN FETAL LIVER, SIGNAL = 0.82; EXPRESSED IN LUNG, SIGNAL =   1; EXPRESSED IN HELA, SIGNAL = 0.73; EXPRESSED IN HEART, SIGNAL = 0.82; EXPRESSED IN ADULT LIVER, SIGNAL = 0.87; EXPRESSED IN BONE MARROW, SIGNAL = 1.1; NT HIT: gi14766687, EVALUE 3.00e-21; EST_HUMAN HIT: BI035714.1, EVALUE 1.00e-125; SWISSPROT HIT: P17027, EVALUE 2.00e-67
gtaaggagtgtgggaaagcctttcgacttcacatacaatttactcgacatcagaaatttcatactggtgagaaaccttttgaatgtaacgaatgtggaaaggcctttagtcttcttaccctgcttaatcgccataagaacattcacacaggtgagaaactgtttgaatgtaaggaatgtgggaagtcctttaatcgtagctcaaaccttgttcaacatcagagtattcattctggtgtaaaaccatatgaatgtaaggagtgtgggaaaggctttaatcgtggtgcacaccttattcagcatcagaaaattcattccaatgagaaaccctttgtatgtaaggaatgtgggatggcctttcgatatcattaccaacttattgaacattgccaaattcatactggtgagaaaccctttgaatgtaaagaatgtggaaaggcgtttactcttctgacaaagcttgttcgacatcagaagattcatactggtgagaaaccctttgaatgcagggaatgt

SEQ ID NO: 3771 - DNA, 546 bp, Homo sapiens
  MAP TO CHR19.1; EXPRESSED IN BONE MARROW, SIGNAL = 1.4; EXPRESSED IN ADULT LIVER, SIGNAL = 1.8; EXPRESSED IN FETAL LIVER, SIGNAL = 1.5; EXPRESSED IN PLACENTA, SIGNAL = 2.1; EXPRESSED IN LUNG, SIGNAL = 1.2; EXPRESSED IN HELA, SIGNAL = 1.6; EXPRESSED IN HEART, SIGNAL = 1.3; EST_HUMAN HIT: BG752149.1, EVALUE 1.00e-100; SWISSPROT HIT: O08808, EVALUE 2.60e-01
acttgagctggaaggctttgctgctgctgctgccacctccaggggctggggggttagttggggggccctcagctgggcggcggcttctcccggcgcctccccagccccgggcctccttacccgccaggttgctggccgggagcaggctgtgtaggttcaggtagggattcaggggaatccggtagtccttggggggctcccccagcagtgagacctgtggcgggaaggcaggattcgagagggcccccgggagagggaaccctgcggaacaggaggctggtgtggtgccgcgcgcagggcagggccttaccccagggggcgtcggcagaggcccactgtctttctggaggcctctgaggccagagcctcggagccccacaggggcggggggaggagtgagctgggccgctgggggacccaagcccagggcctcccggtcacccccagcagggccaagcacggatggcagcaggggtggtggcttccctcgccggggcggcagctccgggggcaggccccctcctagggagggaaggaggatttcag

SEQ ID NO: 3772 - DNA, 585 bp, Homo sapiens
  MAP TO CHR12.1; EXPRESSED IN HELA, SIGNAL =  79; EXPRESSED IN BONE MARROW, SIGNAL =  12; EXPRESSED IN HEART, SIGNAL =  10; EXPRESSED IN FETAL LIVER, SIGNAL =  18; EXPRESSED IN LUNG, SIGNAL =   7; SWISSPROT HIT: P04406, EVALUE 3.00e-76; NT HIT: AF017079.1, EVALUE 1.00e-116; EST_HUMAN HIT: BE560105.1, EVALUE 1.00e-112
cagccctcttcctgagacaccagagtgaaagtgaaggcaggagtaaatggatttggccatattaggtgcctgttcatgatagctgcttttaatcctggcaaagtggatactgttaccaccaatggccctttcattgacctcaactacatggtctacatgttccattatgatcccacccatggcaagttccatggtaccatcaaggctgagaatgggaagctagtcatcaatggaaatcccgtcactatcttccaggagtgagagctcaccaaaaccaaatgagataatgctggtgctaattatgtcatggagtccaatggcatcttcactaccttggcaaaggctggggctcacctggagaggggaaccaaaaggttcatcatctccatcccctctgcagatgtccccatgtttgtgatgggcatgaaccataagcatgaaaacaaactcacagtcatcagcaatgcctcctgtaccaccaactgcttagatcccctggccaaggtcattcatgacaactttggcatcagggagggactcatgaccacagtccacagcatcattgccacccagaagactgtggat

SEQ ID NO: 3773 - DNA, 507 bp, Homo sapiens
  MAP TO CHR4.1; EXPRESSED IN HELA, SIGNAL = 0.47; EXPRESSED IN HEART, SIGNAL = 0.65; EXPRESSED IN BONE MARROW, SIGNAL = 0.72; EXPRESSED IN FETAL LIVER, SIGNAL = 0.57; EXPRESSED IN LUNG, SIGNAL = 0.6; EST_HUMAN HIT: AL561234.1, EVALUE 7.10e-01; SWISSPROT HIT: Q9ZDV2, EVALUE 4.10e-01; NT HIT: gi15828471, EVALUE 7.50e+00
tagggcaagtgaatgggatggtgttataggcctcagaatgtagaaaaaaacagacaaatcttgaaagaagagacaacttcttactttataattattcctagtcttctgtcatgccagagctacattggaataaactatggcatacaactctttatctgttgaatagctttttctgacaagtatgacagaaagatgaggtattgaacaaatgtggacaaatgcttctttacaatggagttgtgcaagtgtgaaattgaccaccttgtaaacataaatttcacagttatatagcctgttaattattaagcctacatggttgaagggatacatgacttggggatttttgttcagtgggtagcataaatgcatttgagaaaaaccacttagatattttgtatttcaggtaaattatagcaacatttaaatctatatttttcaatagtaccacaatgaaaaaaatatgttctgtttctgaatgtgtctgttagcacagcagattagccatca

SEQ ID NO: 3774 - DNA, 584 bp, Homo sapiens
  MAP TO CHR14.1; EXPRESSED IN FETAL LIVER, SIGNAL = 0.94; EXPRESSED IN LUNG, SIGNAL = 0.98; EXPRESSED IN HELA, SIGNAL = 1.1; EXPRESSED IN HEART, SIGNAL = 0.93; EXPRESSED IN ADULT LIVER, SIGNAL =   1; EXPRESSED IN BONE MARROW, SIGNAL =   1; NT HIT: gi8922304, EVALUE 1.00e-107; EST_HUMAN HIT: AA987455.1, EVALUE 1.00e-102; SWISSPROT HIT: P51484, EVALUE 9.70e+00
agaactgttccgcgttcttcctccttacccgttaaggtgaagtttcagcatgaagtctacccgccatgcaaacctgattgtgattccagcctctcagaacacccagtctcccggcaggtgttcattgttcaggatcttgagattcgagatcgtttggcaacatcacaaatgaataaatttttatacctgtattgcagtaaagaaatgcctcgaaaagctcactccaacatggtaagagttaacctcatcgttgtgttatgttagttttggaaacgtgtttttattatatctaacttcaggagagttaaagtagggaaaattactagatatcttttctcattttaatgtgaaaagtcccttttgaatgtattgcttaaagttttatgtttaaaaaattattttgcatgtcacttctagggtccattaactctaattgctaataaattgatatctgaggaaaagtagaagtccctagtgatcagtacaaaataggtagtattgctgaaggtgttccagatttctaacactctttacattttagtaaggtagaaatgattctttcaggactttggaggtccctcaca

SEQ ID NO: 3775 - DNA, 590 bp, Homo sapiens
  MAP TO CHR17.1; EXPRESSED IN HELA, SIGNAL = 0.88; EXPRESSED IN HEART, SIGNAL = 1.3; EXPRESSED IN PLACENTA, SIGNAL = 1.7; SWISSPROT HIT: Q24020, EVALUE 4.00e-14; NT HIT: U80184.1, EVALUE 0.00e+00; EST_HUMAN HIT: BG539072.1, EVALUE 0.00e+00
tcctgtcccatttcaagaggaagttcatcatccaccggggcaagaggaaggcggtccagggcgcccaacagcccagcctctaccagatccgcaccaacggcagcgccctctgcacccggtgcctggctgggggaggacgcagtggcgagcaagcgtcagggagccaggcctgaatccttgctgatgccccatcccttccacaggtgcatccagatcaacaccgactccagcctcctcaactccgagttctgcttcatcctcaaggtggggttgtgggtgtgagccaggactccgtggaccaaggggtggggtgtttgggggctgagtcagctgcgaacacccccacccctgcacactccccaggttccctttgagagtgaggacaaccagggcatcgtgtatgcctgggtgggccgggcatcagaccctgacgaagccaagttggcagaagacatcctgaacaccatgtttgacacctcctacagcaagcaggtcaggaggcgggcgggcaggcgggcacacacagaggagccagggcaggcaggggccctgggctggactggcctttcccgcaggttatcaacgaaggt

SEQ ID NO: 3776 - DNA, 536 bp, Homo sapiens
  MAP TO CHR6.1; EXPRESSED IN FETAL LIVER, SIGNAL = 1.6; EXPRESSED IN LUNG, SIGNAL = 1.6; EXPRESSED IN HELA, SIGNAL = 2.2; EXPRESSED IN HEART, SIGNAL = 1.8; EXPRESSED IN BONE MARROW, SIGNAL = 2.1; EXPRESSED IN PLACENTA, SIGNAL = 2.3; SWISSPROT HIT: P48728, EVALUE 1.30e+00; NT HIT: gi15303148, EVALUE 0.00e+00; EST_HUMAN HIT: BG110601.1, EVALUE 0.00e+00
cttggctaaggtgctgttcctgttcctgcaaggtctccagaacccctttggaaatggtgaaggaaccagcccaatagaagtacagagccagctgacaagtccttgtaaagctcactcctcagtccttggcacagccatgttttgtcttctctcttggtatttcttctctcccaactttagccattttgccttggaatcatgattacaattttttcctttgcagatgccttcctgggggatactcctccccaccctaaagggtcgcctgcaacttaggcggattgggtctctctgctgtggcgttctctcttgagagaccctctgaattttagcacaaagtgccttctgtttcacagctgccaccacctttagaggaatttcgtcagaaaaatgtggaggctccatattaatgcattattttttaaaaagttttgataactcttaaagcatcatttgcacctatgtgggaactttgcctgttgcaaagtattgtggccgagctgcagctgggagcctgctttctgccagtcttgagg

SEQ ID NO: 3777 - DNA, 592 bp, Homo sapiens
  MAP TO CHR11.1; EXPRESSED IN PLACENTA, SIGNAL = 2.7; EXPRESSED IN FETAL LIVER, SIGNAL =   2; EXPRESSED IN LUNG, SIGNAL = 2.4; EXPRESSED IN HELA, SIGNAL = 2.6; EXPRESSED IN BONE MARROW, SIGNAL = 2.2; EXPRESSED IN HEART, SIGNAL = 2.2; NT HIT: gi14765984, EVALUE 0.00e+00; EST_HUMAN HIT: BI549846.1, EVALUE 1.00e-36; SWISSPROT HIT: P34644, EVALUE 5.00e-04
gcacctgcagaatgtgagagagcctgggaggtcttgcagcttggtgtcaccccaccaccctaatccccgagggtggggggaggtcgacggccctcctcccaaccccgacgggtcctgaaaaatgggaatgggtcagcatcgggggtacctaagccgccaagtccttgactcgcccctgctctgccgcgcagggtgctggagaagaagcaagacaccggggagacaatcgagctgacggaggatgggaagcccctagaggtgcccgagaggaaggcgccgctgtgcgactgcacgtgcttcggcctgccccgccgctacattatcgccatcatgagcggcctgggcttctgcatctccttcggtatccgctgcaacctgggcgtggccattgtggacatggtcaacaacagcaccatccaccgcgggggcaaggtcatcaaggaggtgggcaacgtctggccgccctggctcctgcccttcggccatgcggcctcgcaaaaccacatctcctgtttgagccccgttcccccgccactgagaggaaggtttgggtgctccctaagctcctctctggctctgccgttctagaatg

SEQ ID NO: 3778 - DNA, 509 bp, Homo sapiens
  MAP TO CHR5.1; EXPRESSED IN LUNG, SIGNAL = 0.77; EXPRESSED IN HELA, SIGNAL = 1.4; EXPRESSED IN HEART, SIGNAL = 0.62; EXPRESSED IN ADULT LIVER, SIGNAL = 1.9; EXPRESSED IN BONE MARROW, SIGNAL = 0.93; NT HIT: gi14724241, EVALUE 1.00e-130; EST_HUMAN HIT: AA732869.1, EVALUE 5.00e-88; SWISSPROT HIT: O60610, EVALUE 1.00e-08
tcctcacccccttctttacctggaggtactgctatctctccaccccctcctttgtctggggatgctaccatccctccaccccctcctttgcctgagggtgttggcatcccttcaccctcttctttgcctggaggtactgccatccccccacctcctcctttgcctgggagtgctagaatccccccaccaccacctcctttgcctgggagtgctggaattccccccccacctcctcccttgcctggagaagcaggaatgccacctcctcctccccctcttcctggtggtcctggaatccctccacctcctccatttcccggaggccctggcattcctccacctccacccggaatgggtatgcctccacctcccccatttggatttggagttcctgcagccccagttctgccatttggattaacccccaaaaagctttataagccagaggtgcagctccggaggccaaactggtccaaggtaagagtttctgtctatttcttcaccagtca

SEQ ID NO: 3779 - DNA, 557 bp, Homo sapiens
  MAP TO CHRX.1; EXPRESSED IN FETAL LIVER, SIGNAL = 1.5; EXPRESSED IN LUNG, SIGNAL = 1.9; EXPRESSED IN HELA, SIGNAL = 1.7; EXPRESSED IN HEART, SIGNAL = 1.7; EXPRESSED IN ADULT LIVER, SIGNAL = 0.99; EXPRESSED IN BONE MARROW, SIGNAL = 1.9; NT HIT: gi14764587, EVALUE 0.00e+00; EST_HUMAN HIT: AW949577.1, EVALUE 8.00e-78; SWISSPROT HIT: P51793, EVALUE 2.00e-72
gtacaaaggatgccattcggctcttggtaaaatgtgagcttccctctctttactcacttattgcgagaatcagttccctcctctgggcaaatccaatgaggcgctcggagtctctggagaccaccacggggaagccgttgtagtcggtctccttgatgagcgtctccacgtcctcgacagtcatgctgtcctgggtgagcaccgacagtggcggctctccccgccggggccgcatgacgtcggtggccagtgtgcggtgagtaaactcgtccttcacgtcaaggaaagggtacccatttaagtggatgtgggcctcgtagatgccttctttcccaaatgcatcagctacccacttgctggtcacagccgccgccatcaggggcacgatgtactccagacccccggttaattcaaacatgatgaccaccaatgacaccgtcatcctggtaactccacctgcaacagaggggaggagtaagattccaaagtgcaagccgggcagctcacggaagcatgatttggggaaaatgacagacaggctgtaaattcccctcaca

SEQ ID NO: 3780 - DNA, 599 bp, Homo sapiens
  MAP TO CHR4.1; EXPRESSED IN LUNG, SIGNAL = 0.72; EXPRESSED IN FETAL LIVER, SIGNAL = 0.65; EXPRESSED IN HELA, SIGNAL = 0.73; EXPRESSED IN HEART, SIGNAL = 0.86; EXPRESSED IN BONE MARROW, SIGNAL = 0.81; NT HIT: U63834.1, EVALUE 0.00e+00; EST_HUMAN HIT: BF835202.1, EVALUE 9.00e-10; SWISSPROT HIT: P20730, EVALUE 1.30e-01
gttctcaaactttcgcctgcagcagaatcacctggagagcttgttaaaacagatggctgggccctgctctcagagtttccaactcagcaggttcttgggtgggggcggagagtttgcatttctaacaagtcccaggtgatcctgatgctgctggtccagaccacactcgggaacccagctaccacaagaaactcagggcattagcgcagcaaacaattttaccaggatctgtatcttggaactcaaagcaaacctgcaaaaacagattttcttgagtgagcaaatctgcctggcttttacacctagaaatcggcctagcactgggtccccctgacaagctttggcagccagtcgggcacagatttctcgaatccccaagctttagaagtgggaaatgttgcagaattctccagtcacagctacgggactccagaatagtgacaccgggtggcaaatacaacttctgcagcacatcagacctcaatctggtgcactacatctgagagcccggagcccacatccacagcccatactaatccagtgagatcctctgagctgccatttgtagtgagtgaaaaacagcaaatatcctccctgga

SEQ ID NO: 3781 - DNA, 568 bp, Homo sapiens
  MAP TO CHR2.1; EXPRESSED IN HEART, SIGNAL = 0.68; EXPRESSED IN HELA, SIGNAL = 0.41; NT HIT: gi13375937, EVALUE 0.00e+00; EST_HUMAN HIT: AW732955.1, EVALUE 0.00e+00; SWISSPROT HIT: P21574, EVALUE 4.00e-09
ctctgcctgctcctcaaaacttcctgatagcaaaagaatagcctccacccattgtggctcaattctgtgcctccgggagcagggcagggctgtggatttcttcttcctcccgaaagtaggttggctttccctgtgcactagggccctgctgggccttcagtggacatgaagctaccatatgactgatgctctggcagaagtggcacttcttggcctggggtggcatcttgcattccttggcatgatggtctagacctccacagttgtagcacctgtcttttgatctgcgcttcttgcatgttcttcccctttggctacctctcactcccaatacggaacgccccaccaggtccggtgacacggatggattccagacccttggctgacttcttaaaggtgaactccactgcctcaccctccttcaagctccggaagccttccatgggcagcttactctggtgcacaaagacgtccactggtgggtcgagcgcgaccacggcgcgggcagtcacggacagtaagccgaatcccatgcgcaagttgaaccacttacagatgccctcaccgt

SEQ ID NO: 3782 - DNA, 590 bp, Homo sapiens
  MAP TO CHR17.1; EXPRESSED IN HELA, SIGNAL = 1.2; EXPRESSED IN HEART, SIGNAL =   1; EXPRESSED IN FETAL LIVER, SIGNAL = 1.1; SWISSPROT HIT: Q12809, EVALUE 7.00e-07; EST_HUMAN HIT: AI129614.1, EVALUE 1.30e-02; NT HIT: gi6912445, EVALUE 1.00e-114
cttggccactttctcaggacagcaaagatgtctttcctgttgcagcctgccctggctccaggttgtctggtgggaaggccctgggaggggactctgagggctcggaggaggtgtgcctgctgacagcctcccccgccaccttcctgcagacctcgctggtgcacctactgaagacagtgcggctgttgcggctgctgcggctgctgcagaagctggagcggtactctcagtgcagtgctgtggtgctcacgctgctcatgtcggtctttgcgctccttgcccactggatggcctgcatctggtatgtcatcgggcgccgggagatggaggccaatgacccgctgctctgggacattggtgagccaccgaccccaaactttcacagaccacctgtccacctgtcccatccccaagctgatgcctccaccagtacccacacccctcatcccacattcctctatccatccaacaaacatgcgttgagctctttctggatcaagcatgggaatattgatttgcagacaagggctctgttttgggggcaggttggggggaactcacagcctagtgggggagcaagaccagtgata

SEQ ID NO: 3783 - DNA, 597 bp, Homo sapiens
  MAP TO CHR7.1; EXPRESSED IN BONE MARROW, SIGNAL = 0.84; EXPRESSED IN ADULT LIVER, SIGNAL = 1.3; EXPRESSED IN FETAL LIVER, SIGNAL =   1; EXPRESSED IN LUNG, SIGNAL = 1.1; EXPRESSED IN HELA, SIGNAL = 1.6; EXPRESSED IN HEART, SIGNAL =   1; NT HIT: gi14719407, EVALUE 0.00e+00; EST_HUMAN HIT: BI560941.1, EVALUE 0.00e+00; SWISSPROT HIT: O35111, EVALUE 5.10e-01
gccccaccctagaaaatgtgcaataaatagagttgtcaaaaatacaaaatacactcccacctaccttggttggttctccacagtaacgttctccccccgctgatagccactgtctgccacctgggttgtagacctcttcacaatttgcttcaactcctgctccaagcgctctatgattgccttaactgtttctgggatcttcttcagtttcgccaagcccttaatgaggatacccataaacagggtgctgttttcctctggatccaattctaaatcttccttgatgtcctgcagatttatctccctcactgaaaaattaaataataacaataatagatacagactccactcaaaaaccccaaaacagagcagtctaataaacgaaatcactgccttgattactctcttaaagaattaaagaggatttttcaattaaattatatttgcacagtaaccatccaaaagtcacaaaataacatttatattcctcaaatcatacccatcagttagtaataagaggcagatgcaataaaaattagtaaacaaatcaccatgggaagttttccacagactactacttctgccatgagtccactg

SEQ ID NO: 3784 - DNA, 526 bp, Homo sapiens
  MAP TO CHR19.1; EXPRESSED IN LUNG, SIGNAL = 1.7; EXPRESSED IN HELA, SIGNAL = 1.4; EXPRESSED IN HEART, SIGNAL =   1; EXPRESSED IN BONE MARROW, SIGNAL = 0.94; EXPRESSED IN PLACENTA, SIGNAL = 1.9; EXPRESSED IN FETAL LIVER, SIGNAL = 0.96; SWISSPROT HIT: P50037, EVALUE 1.70e+00; NT HIT: gi8922288, EVALUE 1.00e-116; EST_HUMAN HIT: BI160521.1, EVALUE 0.00e+00
caggatttcctgctaggctgtggctggtctcacctttgcccatcacccgtgtaaactggctggggatgtctccgtcggcgacgggagccggggcaggctcactgccatcagtgggagctggagctggtggaggtgggtagttctccacagctggagggtccttggcctcggtgcctttgtctgtgccggggtgggctaggggaggctcagcacctggcagcggtggttcccccggggccccatccttggcagtaggggtggtggtggcggcagccacggtggcctggaggacactgtaggccttgatgggagtgatgatgatctgctgcagctcctgcagagcgtttcgtaggttcccgccttccagcacatcctggatgggaggacacaggctggggtcacatgcagaccctacaatgagggacagagagtatctacacagagagtcagacagggcttgcagaaggctgggtaggaccctgggttccagcacatagagaaggcatgtaagggtactgcaagccca

SEQ ID NO: 3785 - DNA, 556 bp, Homo sapiens
  MAP TO CHR12.1; EXPRESSED IN ADULT LIVER, SIGNAL = 3.9; EXPRESSED IN PLACENTA, SIGNAL = 6.4; EXPRESSED IN FETAL LIVER, SIGNAL = 3.9; EXPRESSED IN LUNG, SIGNAL = 5.6; EXPRESSED IN HELA, SIGNAL = 4.6; EXPRESSED IN HEART, SIGNAL = 4.4; EXPRESSED IN BONE MARROW, SIGNAL = 4.2; EST_HUMAN HIT: BF525411.1, EVALUE 1.00e-102; NT HIT: gi11436303, EVALUE 1.00e-107; SWISSPROT HIT: P18165, EVALUE 1.40e+00
tgctacttgggggaattgtcatgggtctggtctgtgtggccatcaccttctaccagacactgtgggcccggccccggagggctcggcaggcccggagagtggggggtggtggggggaccaaagcgggtgggccaggggccttgggtacccggccagcttttgaggtaccagccattgtggtggaggatgcccgagggaagcggcggtcctcgctggatggctcggagtctgccaagacatccctgcaggtcaccaacttggtcagcgccatcgtctttctctatgactcactcacaggggtgcccatcttggtgagatcggggtcctccccacctgttctccccaatatccaggccccagcatcatcacctgacctccaacttcatcagccatacagcagctccgtcatctctcctccagttccatcatccatcttcctctcctctgtccatcccccactccatttgtggcccccatcttgatcatctgtcttttagttcccactaccctgtttaccccagctccagcatctgcttcagttcccactcctcagctc

SEQ ID NO: 3786 - DNA, 549 bp, Homo sapiens
  MAP TO CHR12.1; EXPRESSED IN PLACENTA, SIGNAL = 1.9; EXPRESSED IN FETAL LIVER, SIGNAL = 1.9; EXPRESSED IN LUNG, SIGNAL = 1.2; EXPRESSED IN HELA, SIGNAL =   4; EXPRESSED IN HEART, SIGNAL = 1.3; EXPRESSED IN ADULT LIVER, SIGNAL = 2.3; EXPRESSED IN BONE MARROW, SIGNAL = 1.5; EST_HUMAN HIT: BG425401.1, EVALUE 1.00e-128; NT HIT: gi16187894, EVALUE 1.00e-102; SWISSPROT HIT: P50085, EVALUE 9.00e-21
gaaggaaaggctgacaccacgcagatggtggtgggagtcagacctgggcccgctgggtgatcagctgtgaggcattgaacttggccaccacactcttgagcacctcgttgacaatggacggcaacactcgttcctcgtagtccagccctaggcgctggtacatgctaggaagctcctgagcattgggtcgagacaacactcgcagggagatattcaccatctgtaggtctgagattgaggtcagcagtggctggtcaaggccaaacaccctttcccaagcattttctccttcatgttcctccctgtatgccctgtgcaatggtgtacagcctggcactaccctggggggaggagagttaatcaggctgacaaggaagacaagacgcagcacagctgaaatgcaccctcacccactgtgaagccttgaactgcaaaccccgtcaccagcagagctgactactctttccccctctgtactctgtgcaacctctaacgtgggcgctttcgtgctgtaccgtaatcatgtctcctgtaaggacttgggggaca

SEQ ID NO: 3787 - DNA, 524 bp, Homo sapiens
  MAP TO CHR12.1; EXPRESSED IN FETAL LIVER, SIGNAL = 0.97; EXPRESSED IN LUNG, SIGNAL = 1.1; EXPRESSED IN HELA, SIGNAL = 1.3; EXPRESSED IN HEART, SIGNAL = 1.4; EXPRESSED IN BONE MARROW, SIGNAL = 0.8; EXPRESSED IN ADULT LIVER, SIGNAL =   1; EST_HUMAN HIT: AI914903.1, EVALUE 1.00e-112; NT HIT: gi16186511, EVALUE 9.00e-83; SWISSPROT HIT: O43306, EVALUE 2.00e-24
atggaggattcaggcagttggctgggatctggggtcctgtgggtaatgggagagatatattgcaggggtggcagtggcttggggacagacagggtgcaggaccctggcttccttcctcagagaacctagcaagttgtgtgaatgtgtgtgtgtgtttaggggggcaggcagaggagatggtcactgtctgcctctgccacctcctgcagctcggtgccaatgtgctgctgttcctctgcaccaacgtcattggcatctgcacacactatccagcagaggtgtctcagcgccaggcctttcaggagacccgcggttacatccaggcccggctccacctgcagcatgagaatcggcagcaggtggggctgctccccgtgaccagggcctgcccccaccttacccccaaataacttgcacattggatctgctgccttgtccagttccgtgcagcacagtgtgatggttcccctgggttgtgcgtcacagaggccctgtgatactggggttttgtcctgtccaaggga

SEQ ID NO: 3788 - DNA, 531 bp, Homo sapiens
  MAP TO CHR9.1; EXPRESSED IN FETAL LIVER, SIGNAL = 3.8; EXPRESSED IN PLACENTA, SIGNAL = 3.2; EXPRESSED IN LUNG, SIGNAL = 2.4; EXPRESSED IN HELA, SIGNAL = 5.5; EXPRESSED IN HEART, SIGNAL = 2.5; SWISSPROT HIT: Q08379, EVALUE 4.00e-34; EST_HUMAN HIT: BI014637.1, EVALUE 0.00e+00; NT HIT: gi14745290, EVALUE 0.00e+00
acactgccccactttacaggtgggaaaacaaaggtctggagggctagggaggagggcgggctctccaggtggggcagcgcaccagctttacaaatccgctctgcagctcagccagctgctccttgagctcccggttctgggagagtgcgcggctgatggtagtgcggtcgttctgcatggtctccaggatttgcctgcgcgcctccgcctgctccccccagagctcggccgcccgctccagctccagcagcctctcctcctgctcccggttcaggcgactcaagccctcattgtcttgcacctgggcttgaagctgtcctgccagaccctccagctccttccgcaggtgctcagcctccgcttgtagctgctgctccacctcggagggccctgctgggggctctgggggcgggggttcagctgagaaaggacgcagacaataaaagcctctggattctcaaaaaaaccctcctcttggtccatacctcctctcaagctccccaaacttggcctccctgctgatgattcctc

SEQ ID NO: 3789 - DNA, 576 bp, Homo sapiens
  MAP TO CHR19.1; EXPRESSED IN FETAL LIVER, SIGNAL = 0.65; EXPRESSED IN HELA, SIGNAL = 0.46; EXPRESSED IN LUNG, SIGNAL =   1; EXPRESSED IN HEART, SIGNAL =   1; EXPRESSED IN BONE MARROW, SIGNAL = 0.41; EST_HUMAN HIT: BG391650.1, EVALUE 5.20e-02; SWISSPROT HIT: Q9NP85, EVALUE 4.30e-02
tcaagcacaaaaggagatggttttcaacagataattttacatatttacatattttaccttaagcattttgtagtctctgcctactggtgaatggatcagatttttacacgctttcaaaatgaaccagctcggcttctaagccattgcaaggacggaaatgaattctaacttttttttcacttcattttcacatcttcacatttccttatttcacatggtttcaaataaaatgcctccagcatgatttttcctttctcaagagcaaagtgaatgtgacttttcggaggggtcacaggatgcccgggaggcctgtggctgtggctggaccgctgcctgctttcagcttgactgaagggcttgtcagagttttcatctcctaagaaatgagcccctgggctggccagaaggaggagaaggcagcagtttgacccccacactgtgtttttcccactgacatcaaatcctgaggttttaaaattaatcccatacaaagacagttcttcattgtggtgcctgtttgaaattagaccagcaataaggacctttctaaaatgtctcgttgttaagataggcccc

SEQ ID NO: 3790 - DNA, 582 bp, Homo sapiens
  MAP TO CHR5.1; EXPRESSED IN HEART, SIGNAL = 0.53; EXPRESSED IN ADULT LIVER, SIGNAL = 0.96; EXPRESSED IN BONE MARROW, SIGNAL = 0.68; EXPRESSED IN HELA, SIGNAL = 0.74; EXPRESSED IN FETAL LIVER, SIGNAL = 0.47; SWISSPROT HIT: P57052, EVALUE 5.60e+00; EST_HUMAN HIT: BF963801.1, EVALUE 0.00e+00
tggccatgtagaaatgcaagcctagtcttccccaaatttccaatttttcagtagaggccagatatttggattgttatgtatggtctcccaattttcaaatgctggcaagcaactaaaaatgtattaaaatgttgtgcaggccattcaaacaagactgggggccaaatggaccacccatctgtgactactgacacctacctccagggcaggattagtattgagtgaggaagcatcatttgcctggattgagactgggacagctttggcttctcttgtttgatgccccatctctccttggtaactggtttaagctggtgggagtctcattaccatgatacaatggtgatactttgcacttgcatggtgaattttctccaaggagctcaaaagactttgtgttgcctcagtcaacctcacagcaagcctgtgaagcaggcaggtagccattgcccccaaacacaatgagcaacaacagaaagtattttacacaaagcagctaggtggactcattggcttaaatccagcatctacactattggcaaatacagcattcaagaagcgtgggcaggatttcccactaat

SEQ ID NO: 3791 - DNA, 561 bp, Homo sapiens
  MAP TO CHR19.1; EXPRESSED IN HEART, SIGNAL =  13; EXPRESSED IN BONE MARROW, SIGNAL =  11; EXPRESSED IN ADULT LIVER, SIGNAL =  11; EXPRESSED IN PLACENTA, SIGNAL =  12; EXPRESSED IN FETAL LIVER, SIGNAL =  10; EXPRESSED IN LUNG, SIGNAL =  15; EXPRESSED IN HELA, SIGNAL =   8; NT HIT: gi13631834, EVALUE 0.00e+00; SWISSPROT HIT: P53539, EVALUE 9.00e-62; EST_HUMAN HIT: BG686263.1, EVALUE 1.00e-110
ctcttctgtgacctggcctccctggcctcaggagacagatcagttggaggaagaaaaagcagagctggagtcggagatcgccgagctccaaaaggagaaggaacgtctggagtttgtgctggtggcccacaaaccgggctgcaagatcccctacgaagaggggcccgggccgggcccgctggcggaggtgagagatttgccgggctcagcaccggctaaggaagatggcttcagctggctgctgccgcccccgccaccaccgcccctgcccttccagaccagccaagacgcaccccccaacctgacggcttctctctttacacacagtgaagttcaagtcctcggcgaccccttccccgttgttaacccttcgtacacttcttcgtttgtcctcacctgcccggaggtctccgcgttcgccggcgcccaacgcaccagcggcagtgaccagccttccgatcccctgaactcgccctccctcctcgctctgtgaactctttagacacacaaaacaaacaaacacatgggggagagagacttggaagaggaggaggaggagga

SEQ ID NO: 3792 - DNA, 520 bp, Homo sapiens
  MAP TO CHR6.1; EXPRESSED IN HEART, SIGNAL = 2.5; EXPRESSED IN ADULT LIVER, SIGNAL = 4.2; EXPRESSED IN PLACENTA, SIGNAL =   4; EXPRESSED IN FETAL LIVER, SIGNAL = 3.3; EXPRESSED IN LUNG, SIGNAL = 2.1; EXPRESSED IN HELA, SIGNAL = 4.9; SWISSPROT HIT: Q08345, EVALUE 8.00e-49; NT HIT: U48705.1, EVALUE 0.00e+00; EST_HUMAN HIT: BF909984.1, EVALUE 0.00e+00
agtttgagtttgaccggctgagggccttccaggctatgcaggtgagtgagtccggctctcgaggagggctctgaagccatgcagggtgccgttggggtgcccccaccactcctagccttgaccctgtgccctcttcccttccccccaggtccactgtaacaacatgcacacgctgggagcccgtctgcctggcggggtggaatgtcgcttccggcgtggccctgccatggcctgggagggggagcccatgcgccacaacctagggggcaacctgggggaccccagagcccgggctgtctcagtgccccttggcggccgtgtggctcgctttctgcagtgccgcttcctctttgcggggccctggttactcttcagcgaaatctccttcatctctggtaagccctggagtagcccagtctccagtccctgaaattgacaactgatttcattcctaaccctgcagtgtccctaaaatactcattccttgcattatatctacccatcacccaccgaaacttct

SEQ ID NO: 3793 - DNA, 503 bp, Homo sapiens
  MAP TO CHR13.1; EXPRESSED IN HELA, SIGNAL = 0.9; EXPRESSED IN HEART, SIGNAL = 1.1; EXPRESSED IN ADULT LIVER, SIGNAL =   1; EXPRESSED IN BONE MARROW, SIGNAL = 0.94; EXPRESSED IN FETAL LIVER, SIGNAL = 0.85; EXPRESSED IN LUNG, SIGNAL = 0.75; EST_HUMAN HIT: BI823483.1, EVALUE 0.00e+00; SWISSPROT HIT: P16036, EVALUE 1.60e+00; NT HIT: gi14757710, EVALUE 1.00e-126
cttaaccttgcctgtttcgcctagtaaatgaggtaacttaatttgtttttatggtgtttctcaaaactaaaagttggctacagcataaattcacaatccaccttgactccagagtaatcaaaactgtgtgccttgagaatctaggtctcattctggagagggtcagactcacctgcactgttcactggagctctgcctcagcagaggggaacgcacaccctgagccctcccatcctgcaaattcagctttctctttgtgcttgaaggtgggtggctgaacgtgtgtgcccgtcttcgaaactgcggggagtcggaatcctcttcgggaaacgtttgccaagctgaggacggtggggacgctggcggtgtccctggtggagaatcccctggtgagtagtcctgaaacacaagcggaagggagccctttatttcccacgtgggtcatggcagacctgccaaaacacagagctcaaaagtgacagtgtgcctcatcttcctcctga

SEQ ID NO: 3794 - DNA, 556 bp, Homo sapiens
  MAP TO CHR10.1; EXPRESSED IN HELA, SIGNAL =  24; EXPRESSED IN HEART, SIGNAL =  19; EXPRESSED IN ADULT LIVER, SIGNAL =  14; EXPRESSED IN BONE MARROW, SIGNAL =  12; EXPRESSED IN PLACENTA, SIGNAL =  21; EXPRESSED IN LUNG, SIGNAL =   8; NT HIT: gi16044804, EVALUE 0.00e+00; EST_HUMAN HIT: BI084157.1, EVALUE 1.00e-100; SWISSPROT HIT: P05065, EVALUE 1.00e-50
gcattcacagacgacaccacacaccactgtcacgagggaggcaagagcacgggcaagccaacctggagacctgaggagaaggcccgctcttcaagagagtaggggcggggcctggagtgttgggaacagccggggaacacctccacttagtaggtatggttagagatgaagagggactctctagcagcagccccagtctcactgcttggggtgtactttccttgacaggccaggctgttggccacggctcacttgactcctcctgggcagccttcaggttctccttcttcctgccccaggccttcagggcagaggcctgcagggctcggccataggagaaggtcacagggagcacttgttaatggcgttgaggttgatggatgcctcctcctcattctggcctccagacaggaatgtgatcccagggacagcggggggcactgtgcggtgcagcgttgtgacagtcaccatggcaatctcctcgtgagaaaacttctggatgcagggatggcctggggtgaccatgctggggttcagcaagatgccctccaagata

SEQ ID NO: 3795 - DNA, 586 bp, Homo sapiens
  MAP TO CHRX.1; EXPRESSED IN ADULT LIVER, SIGNAL = 0.88; EXPRESSED IN BONE MARROW, SIGNAL = 0.6; EXPRESSED IN FETAL LIVER, SIGNAL = 0.67; EXPRESSED IN HELA, SIGNAL = 0.4; EXPRESSED IN HEART, SIGNAL = 0.75; SWISSPROT HIT: Q93008, EVALUE 3.00e-38; NT HIT: X98296.1, EVALUE 1.00e-119; EST_HUMAN HIT: AU138833.1, EVALUE 1.00e-119
attgtcctgcttctcatccccagacatatcatcatctacatcactacctgtgccttcaatggcaagaataccgttcctaatggaaggaatcatgtagagttgctgaatcacagaattcatgtaacaagtagcaccggcatttttcagccccacgaatcctttgggtgggcggggtccaacaggtggcagatattcccactcagtaagtgcttcacaagctgagagaaggaaagattcttgtagcatgaacacggccattctgtcctttcaaactctattatgctgacaaagcaaccctggcaataattctaccacccataattcgactaaccctacagcaacctgaagcagtgttctgagtttgcacttcatcttccaacaatctaaaatatacagcaacaggcaccactgtgcagcttcttatccaatcacccgcaaacccgtttcatatgatgttgcttctatggcagtctcaaaagtacaagatagtataattctaatgtctacatgctaactttacttgcatctttatttttagccattattcactttcttaatatttgatacttttgccttcaaatttggc

SEQ ID NO: 3796 - DNA, 540 bp, Homo sapiens
  MAP TO CHR11.1; EXPRESSED IN HEART, SIGNAL = 1.4; EXPRESSED IN BONE MARROW, SIGNAL = 1.6; EXPRESSED IN PLACENTA, SIGNAL = 1.5; EXPRESSED IN FETAL LIVER, SIGNAL = 1.6; EXPRESSED IN LUNG, SIGNAL = 1.5; EXPRESSED IN HELA, SIGNAL = 3.5; NT HIT: gi7705812, EVALUE 0.00e+00; EST_HUMAN HIT: AV758467.1, EVALUE 0.00e+00; SWISSPROT HIT: Q02877, EVALUE 1.00e-57
ctgtgcgctggaatatgttggtgagcatgtccaacagttacataggatagagcttaacaaagagttattagcacaaagcaaggaggcttgaagaaagttagtctttaaaagaaactgttgagggtctgaggcagctagtagccggagggtcaccatgaagttcaatcccttcgttacctcggaccgcagtaaaaaccgcaaacgttacttcaatgccccctcacacgtgcgcaggaagatcatgtcatccccgctctccaaggagctgcggcagaagtacaatgtccgctccatgcccatccgcaaggacgacgaggtccaggtagttcgaggacactacaaaggtcagcaaattggcaaggtagtccaggtgtacagaaagaaatatgtcatctacatcgagcgggtgcagcgtgagaaggccaacggcacgactgtccacgtgggcattcacccaagcaaggtggttatcaccaggctaaaactggacaaggatcggaaaaaaattcttgaacgcaaagccaagtctcgacaagttgg

SEQ ID NO: 3797 - DNA, 508 bp, Homo sapiens
  MAP TO CHR3.1; EXPRESSED IN HELA, SIGNAL =   2; EXPRESSED IN LUNG, SIGNAL = 0.71; EXPRESSED IN ADULT LIVER, SIGNAL =   2; NT HIT: U18247.1, EVALUE 9.00e-92; EST_HUMAN HIT: BE006004.1, EVALUE 0.00e+00; SWISSPROT HIT: Q13200, EVALUE 4.00e-31
  unsure 227
tccatgttcctccttccatcaccacagatacttccccggcacgctctgtggaggagttctattctttacctgtgccaagcgcacccatgaaaagggtggttgggcccctggcatgatattgagcctaactggcgcagcattgcagccagacgggcattattggtacctggaaatgttaggcataccagaagtgaaaaaaggggcttcaaatcttcccccaatctgtntatgaccttcttctgccggatactcaccactgcccaccatgcccatggcaaaaatggagttataggaaacttctggatcagcatcatgagagaatttgcttagggtatccaggatgttgagtcgtggatttgaaacagagatgagggccagtgctaaaggtacagccctccggagtgtaggctccccatatctcagctgatgatccaagaaaatacaacagtaaggcggaatgcagtaaaaacaaattccattacaggagtggactgatgggtaaaagggg

SEQ ID NO: 3798 - DNA, 561 bp, Homo sapiens
  MAP TO CHR11.1; EXPRESSED IN HELA, SIGNAL = 2.3; EXPRESSED IN LUNG, SIGNAL = 1.4; EXPRESSED IN ADULT LIVER, SIGNAL = 3.9; EXPRESSED IN BONE MARROW, SIGNAL = 2.1; EXPRESSED IN HEART, SIGNAL = 1.6; EXPRESSED IN FETAL LIVER, SIGNAL = 2.3; EXPRESSED IN PLACENTA, SIGNAL = 1.9; SWISSPROT HIT: P55782, EVALUE 9.20e+00; EST_HUMAN HIT: BF689262.1, EVALUE 2.00e-01
tggattcagaaggaggcaacagatgcaaagagaagaaacaaaacacaaaattatcatgattttagctctagtattcccttcccaaatgacatttcaacacgagaggcttctcactacccaatttactgacatttacttctaactctgctttacaaacccattctgatacaaattcagagagaaatgaatgtaaaacatttatttcagattgtgcctcatctcacagtaacatgtttgactaaattccagttctcaggaagagataactgagtaaagtttttcatgtagacttctatctccaggctttaaaaaatatgcttatgtcaaccgatccaattttacatgagaaacaaatagttttcatacacatttgcactcaccaacagagaaacaatcttgcctaaagctactcacttttcctaaaattatgggtagcctgtgcaagttggaaatgtctatttgaaagctttaaagccagaattaattttgttttaaaatattcaccagatttcttccctcttaataggaaagttagttcttagggcctgaatacattgcaaa

SEQ ID NO: 3799 - DNA, 502 bp, Homo sapiens
  MAP TO CHR10.1; EXPRESSED IN PLACENTA, SIGNAL =  19; EXPRESSED IN FETAL LIVER, SIGNAL =  13; EXPRESSED IN LUNG, SIGNAL =  17; EXPRESSED IN HELA, SIGNAL =  12; EXPRESSED IN HEART, SIGNAL = 4.9; EXPRESSED IN ADULT LIVER, SIGNAL =  10; EXPRESSED IN BONE MARROW, SIGNAL =  11; EST_HUMAN HIT: BG613925.1, EVALUE 0.00e+00; NT HIT: U14967.1, EVALUE 0.00e+00; SWISSPROT HIT: P46778, EVALUE 6.00e-37
gaaaagtatcctttcggctggagcagccatcttccagtaattcgccaaaatgatgaacgcaaaggaaaagaagaaaggcacctgatgtatgttctctaggccttttagaaaacatggagttgttcctttggccatgtatatgcgaatctataagaaaggtgatattgtagacatcaagagaatggatattgtttaaaaaggaatgcccacaggtgttaccacggcaaaactggaagagtctacaatgttacccaacatgctgttggcattgttgtaaacaaagaagggcaagattcttgccaagagaattaatgtgtgtattgagcacataagtgctctaagagctgagatagcttcccgaaacacgtgaaggaaaatgatcagaaaaagaagccagagagaaaggtacctgggttcaactgaagtgccagcctgcttcacccagagaagcaccctttgtgagacccaatgggaaggagcctgagctgctggaacctactcc

SEQ ID NO: 3800 - DNA, 583 bp, Homo sapiens
  MAP TO CHR9.1; EXPRESSED IN PLACENTA, SIGNAL = 2.1; EXPRESSED IN FETAL LIVER, SIGNAL = 1.2; EXPRESSED IN LUNG, SIGNAL = 1.7; EXPRESSED IN HELA, SIGNAL = 2.1; EXPRESSED IN HEART, SIGNAL = 1.7; EXPRESSED IN BONE MARROW, SIGNAL = 1.1; EXPRESSED IN ADULT LIVER, SIGNAL = 0.66; SWISSPROT HIT: P12011, EVALUE 3.80e-01; EST_HUMAN HIT: AW501530.1, EVALUE 1.00e-109; NT HIT: gi14783225, EVALUE 1.00e-109
aacctggacgttccagtcacagtggccagggcctgggtggaaggggccatcgtctcatcatcttcctcaattcctgggacagtagaagctagagagtgtggtcattccagtctgtgtgtctccacctctctgcttttttatcaaggattcagaacaaggctctggacagagcaaggagcacagaccaggacccatcggcaacgagcgttctctgaaaaacagaaagggctcggagggggccgagcggctgcaaggggctgtcgtcccgcctgttaacggggtggagattcacgtggactccgtgctgcctgtgccacccattgaatttggagtcagtccaaaagtgaggctttgatttgttttcttgcttgctttttttactttttattttggtacttggagaggctgggggctcagatgggattgtctcctagaaggaatagaaggatgggagccaagcagtcttccagcggctagagtgttggtgtggagtcctgcacatggccagtgctctgttgagttgctttaaagattgcttcactgacaccagacaggccagtgatcttccctgtttctgtcaggc

SEQ ID NO: 3801 - DNA, 514 bp, Homo sapiens
  MAP TO CHR12.1; EXPRESSED IN PLACENTA, SIGNAL = 2.1; EXPRESSED IN FETAL LIVER, SIGNAL = 0.68; EXPRESSED IN HELA, SIGNAL = 0.88; EXPRESSED IN HEART, SIGNAL = 0.78; EXPRESSED IN ADULT LIVER, SIGNAL = 0.8; EXPRESSED IN BONE MARROW, SIGNAL = 0.87; SWISSPROT HIT: P49023, EVALUE 4.00e-48; NT HIT: U87946.1, EVALUE 0.00e+00; EST_HUMAN HIT: AW452127.1, EVALUE 0.00e+00
agtcgggtttaccccttcacccccgggtgaagtctctaggtcacagtcgcagttggggatgctggctggggaaggggggcagagacaggggcagggcacctagcagaagagcttgaggaagcagttctgacagtaaggcttgtcgttctgctccttgaaggtgcccttgttgagctgcttgaggcagaaggcacagacgaagtgctcggggtggaacttcttggccatggcggtgatgcagcggccggtgatgggcttctggcagccagaacacagcgagccgcgccgctcgtggtagtgcacctcacagtagggctgcccgtcgtgctcgaagaagctgccgttcacgaatggcgtgaagcattcctgccaggcggagagaggggctcagggagctgcccctcgggctagagctgcaccctgtgtgatggggccgaggtgggcatagtcggcacgctcggagtgactcctacttgctaggcgtttcccatgtgccgtgttgtcctaaacgctc

SEQ ID NO: 3802 - DNA, 534 bp, Homo sapiens
  MAP TO CHR15.1; EXPRESSED IN HEART, SIGNAL = 0.87; EXPRESSED IN ADULT LIVER, SIGNAL = 0.85; EXPRESSED IN BONE MARROW, SIGNAL = 0.63; EXPRESSED IN FETAL LIVER, SIGNAL = 0.74; EXPRESSED IN LUNG, SIGNAL = 0.56; EXPRESSED IN HELA, SIGNAL = 0.77; SWISSPROT HIT: Q9UKN7, EVALUE 4.00e-03
agttggactcagcaggatgcatggacgctcccatggggtggaggcggcaggcagggctcccaggcctgagcagccggcacggggcgcccgtccctgaggtgggggcgccgagaggagcggccgctttgtcgaggcccaggagacatctgggcgggggtgtcgcgtgggctgtgcaggctgagctcagcagaggggcccggctggaggacacatttgggagtcgtgagcacttgggtgatatttacagcccaggaagagatgagctcaccggccggccgctgctgacgaggggcccggagtgggcggggcgttgggccagggcccagggactcagctccttcctgcgccgaccccggcactccccagctctgcctgaccagccccggccggctgggcccctgaggtcaggtgctggaccaggcaggggttgggggtggcagctggtgtccagccttgatcacccagaccccagagcaggtgcagaaagctaattaaagctgcgtgaatcagccttgagggtatcaaatcctggcc

SEQ ID NO: 3803 - DNA, 574 bp, Homo sapiens
  MAP TO CHR8.1; EXPRESSED IN FETAL LIVER, SIGNAL = 1.3; EXPRESSED IN HELA, SIGNAL = 1.4; EXPRESSED IN LUNG, SIGNAL =   1; EXPRESSED IN HEART, SIGNAL = 1.2; EXPRESSED IN ADULT LIVER, SIGNAL = 0.94; EXPRESSED IN BONE MARROW, SIGNAL =   1; SWISSPROT HIT: P10272, EVALUE 6.00e-20; NT HIT: AF110520.1, EVALUE 0.00e+00; EST_HUMAN HIT: BF971469.1, EVALUE 4.00e-64
ctacagctgctgctgattgccagatctgccaacagcagaaaccaacactgagccccagatatggcaccattcctcgaggtgaccagccagcaacctggtggcaggttgactacattggaccacttccttcgtggaaaggacagcgttttgttcttactggagtagatacttattctggttatggatttgcctttcctgcacgtaatgcctctgctaaaaccaccattcacggactgacagaatgcctcatctatcgtcatggtattccacacagtattgcttctgaccaaggaactcatttcacagccagagaagtacgacagtgggctcacgatcatggaattcactggtcttaccacattccccatcatcctgaagcagctgggctgatagaaagatggaatggccttttgaagacgcagttacagcgccaattaggtggtaacagcttggaaggctggggtagagttcttcagaaggcagtatatgctttgaatcagcgctcgatatatggtacagtttcacccatagccaggattcatgggtccaggaatcaaggggtggaaaaaggaat

SEQ ID NO: 3804 - DNA, 597 bp, Homo sapiens
  MAP TO CHR1.1; EXPRESSED IN FETAL LIVER, SIGNAL = 3.4; EXPRESSED IN LUNG, SIGNAL = 2.8; EXPRESSED IN HELA, SIGNAL = 7.1; EXPRESSED IN HEART, SIGNAL =   3; EXPRESSED IN BONE MARROW, SIGNAL = 2.8; EXPRESSED IN ADULT LIVER, SIGNAL = 2.4; EXPRESSED IN PLACENTA, SIGNAL = 5.6; SWISSPROT HIT: P50993, EVALUE 3.00e-21; EST_HUMAN HIT: W22069.1, EVALUE 2.00e-81; NT HIT: J05096.1, EVALUE 0.00e+00
aagctcatcattgtggagggatgtcagaggcaggtgagcacagccacgggaggcagatgacaggcagggaccggggaggcagggacagggccaagacaagcatggagtgagaggcgaggagccaggcttgggaaggggtttcgtcctcaagtgtggccgtcttccctccagggagccattgtggccgtgacgggtgacggggtgaacgactcccctgcattgaagaaggctgacattggcattgccatgggcatctctggctctgacgtctctaagcaggcagccgacatgatcctgctggatgacaactttgcctccatcgtcacgggggtggaggagggtgaggaggctgcatgggttgggatggtttgcaggatactgaagccggcacctctgttccctgtccctttaccccagttgaagaatcattccacaactctaggcagcccagcccactttagcttcccttgaacacaaaatcttcctctcttgggaagacaggcagccatgcttcaggggctgggggtggggaagagtccctctgacctccctgatgccctcagaatctccccacaggccgcctgatctttgacaact

SEQ ID NO: 3805 - DNA, 562 bp, Homo sapiens
  MAP TO CHR1.1; EXPRESSED IN BONE MARROW, SIGNAL = 4.2; EXPRESSED IN HEART, SIGNAL = 2.6; EXPRESSED IN ADULT LIVER, SIGNAL = 4.2; EXPRESSED IN PLACENTA, SIGNAL = 4.3; EXPRESSED IN FETAL LIVER, SIGNAL = 5.1; EXPRESSED IN LUNG, SIGNAL = 2.8; EXPRESSED IN HELA, SIGNAL = 3.6; NT HIT: gi13640862, EVALUE 2.00e-62; EST_HUMAN HIT: AA199703.1, EVALUE 0.00e+00; SWISSPROT HIT: P05142, EVALUE 4.00e-03
tgtgtgacatggacccaatctcttctgtacaggtaccccctgtaccggctgggtggcccacaacttcgggtgttccgaaccaacttcttcattcagctggtgcggcccggtgtggcccagcccgaggacaccgtgcagttccggatccccatggagtgagtccgggaggattccggctggggttggggagcaccctcggggggatccccgtggagtgagcccggaagttttcccgctgggttgggagagtgccctcaggggggcctgggtcctgagttaaaacaactctgctcacgtgctagcctcttcctgctgggaaggcacctcaggcggccctgcccggcaagtattgatggagtgcctgtaggtgtggagcccggcaggcaggctgcacgccgccctccacccggggacggcttcactggaagccttaaaatttggacctctgtgctcgcgtcttctgttgagttcttgcagcttctttttaggagaggcgccctgagaggctgggttgggagcaggccgtgatgtacagaaccgctcagaagagcctgcttgacct

SEQ ID NO: 3806 - DNA, 581 bp, Homo sapiens
  MAP TO CHR5.1; EXPRESSED IN HEART, SIGNAL = 1.1; EXPRESSED IN FETAL LIVER, SIGNAL = 0.67; EXPRESSED IN LUNG, SIGNAL =   1; EXPRESSED IN HELA, SIGNAL = 0.47; SWISSPROT HIT: Q9Y5I0, EVALUE 7.00e-34; NT HIT: gi14861871, EVALUE 0.00e+00; EST_HUMAN HIT: AL589367.1, EVALUE 0.00e+00
cagtggttaagggcagaattgaaaataattctggaggaagataagaatgattcctgcgcgactgcaccgggactacaaagggcttgtcctgctgggaatcctcctggggactctgtgggagaccggatgcacccagatacgctattcagttccggaagagctggagaaaggctctagggtgggcgacatctccagggacctggggctggagccccgggagctcgcggagcgcggagtccgcatcatccccagaggtaggacgcagcttttcgccctgaatccgcgcagcggcagcttggtcacggcgggcaggatagaccgggaggagctctgtatgggggccatcaagtgtcaattaaatctagacattctgatggaggataaagtgaaaatatatggagtagaagtagaagtaagggacattaacgacaatgcgccttactttcgtgaaagtgaattagaaataaaaattagtgaaaatgcagccactgagatgcggttccctctaccccacgcctgggatccggatatcgggaagaactctctgcagagctacgagctcagcccgaacactcacttct

SEQ ID NO: 3807 - DNA, 509 bp, Homo sapiens
  MAP TO CHR17.1; EXPRESSED IN HELA, SIGNAL = 1.5; EXPRESSED IN BONE MARROW, SIGNAL = 0.63; EXPRESSED IN HEART, SIGNAL = 0.5; EXPRESSED IN PLACENTA, SIGNAL = 1.3; EXPRESSED IN FETAL LIVER, SIGNAL = 0.77; EXPRESSED IN LUNG, SIGNAL = 1.2; EST_HUMAN HIT: BG769421.1, EVALUE 5.00e-76; SWISSPROT HIT: Q23356, EVALUE 1.00e-22; NT HIT: gi14774519, EVALUE 3.00e-76
tgcagtacgacgtgaggaagggttctgtggtcaacgtgaatcccaccaacacccgggcccacagtgagacccctgagatccggaagtacaagaagcgattcaactccgagatcctctgtgcagccctttggggtaagccagggcagggacagctgaggaggctctggcgtggctcttgtgctcctggttaggtgagggcctggctgagcctctgacctgcccaagggctcctgttgcaggggtcaacctgctggtgggcacggagaacgggctgatgttgctggaccgaagtgggcagggcaaggtgtatggactcattgggcggcgacgcttccagcagatggatgtgctggaggggctcaacctgctcatcaccatctcaggtacaggtgtggtgagtgggggagggaggaggggctcagctccttggcgctgtcaccatcttctgcctgggaggagggcaggcactggaaggtggggccacactttctcaccccttgtggtatgct

SEQ ID NO: 3808 - DNA, 503 bp, Homo sapiens
  MAP TO CHR17.1; EXPRESSED IN HELA, SIGNAL = 0.4; EXPRESSED IN BONE MARROW, SIGNAL = 0.36; EST_HUMAN HIT: BI550656.1, EVALUE 2.00e-16; SWISSPROT HIT: Q13495, EVALUE 1.60e+00; NT HIT: X59289.1, EVALUE 7.50e+00
tgttctaccccatcctcagctcagaagaggaactgtttcccccaactctcattgtcagctctagaccctaaagattctcctctcctttgggggtcagcctccttcgtggggtgcctggcagtgctgggctcagctctgcctcacaatacccacgtgccacccccagacaatggacaagggccggctgcagaggctgactcactctctgagggttagccaagccagtggggactaccccagaccactgtggagtcccagctagagtgaggaagataagatagccacagtcttcctgcaaagggaagaattgagggaggcagatatgcatactgccaggtgtatgccagagggaagaggttgagatagggaggttagagggaaaagtctgctaggagctactgccaggctgttgcctctgaagtcttcacacctgcttatagccatagtctccagtgctcgcctggacagaggggaggaaaagaggccccttagcccaaaactag

SEQ ID NO: 3809 - DNA, 565 bp, Homo sapiens
  MAP TO CHR22.1; EXPRESSED IN FETAL LIVER, SIGNAL = 1.1; EXPRESSED IN LUNG, SIGNAL = 1.1; EXPRESSED IN HELA, SIGNAL = 1.1; EXPRESSED IN HEART, SIGNAL = 0.96; EXPRESSED IN BONE MARROW, SIGNAL = 0.85; EXPRESSED IN ADULT LIVER, SIGNAL = 0.79; EST_HUMAN HIT: BF874516.1, EVALUE 1.00e-115; SWISSPROT HIT: Q9Y6J0, EVALUE 9.00e-34; NT HIT: gi6912457, EVALUE 1.00e-115
ctggcaggtgagaggaaaagtatgaggggaggtggagtcaaggactcagatgtgaccagtaaacccaggactgtttagtcacaggacagactctccagcctctcctgcccctcagtctggtacagagcagaaaaagaagcaaaggagcatatacagcagtggcagagcggaagagtgtgacccagccctgtcccccacgtcctcaaggttgtgggcccacctcagttgaagttccctcaatgtaggcagagactttgtccaggctaagggctggcctctctgtgcgaggcacaatggtggcaattctcttcagtaggttggccaagtcagcagacacggtgctggtcttatagctgtcaaattcaggaagggtcttgggcttaaaatactcaaacatgaacagtgcatcctcccatataagatccaccttgaaaaaaagacagaaggcagattagcaacacattcagggtaaatgaagaaggaaaattgcattcctccatagaaacgcactttgtccaatgtaaatgaggttatggcatattggagagcctaaaacaaatcccca

SEQ ID NO: 3810 - DNA, 579 bp, Homo sapiens
  MAP TO CHR2.1; EXPRESSED IN HELA, SIGNAL =  14; EXPRESSED IN HEART, SIGNAL = 3.3; EXPRESSED IN PLACENTA, SIGNAL =  17; EXPRESSED IN FETAL LIVER, SIGNAL = 6.7; EXPRESSED IN LUNG, SIGNAL =  15; SWISSPROT HIT: P08526, EVALUE 3.00e-54; NT HIT: L05094.1, EVALUE 0.00e+00; EST_HUMAN HIT: BG777815.1, EVALUE 0.00e+00
tccaacagctgcagaatacgtattcttctccccagcatgtggatcattttcaaggataggccatatgttaggtcacaaaacaagtcttaaaacattcaaaaaattgaaatagtaagaaacgccctttttgctgtaggcccaagtggttgctgctgaaatgggcaagttcatgaaacctgggaaggtgtcgcttgtcctggctggacactactctggacgcaaagccatcatcatgaagaacattgatgatggcacctcagatcgcccctacagccacctctggtggctggaattgactgctacccccgcaaagtgatagctgtcatgggcaagaagaagatcgccaagaggtcaaagatcaagtcttttgtgagagtttataactataatcacctaatgcccacaaggtactctgtggatatccccttgaacaaaactgtcatcagtaaggatgtcttcagagatcctgctcttaaacgcaaggcctgacgagaggtcaaggtcaagtttgaagagagatacaagataggcaagaacaagtggttcttccagaagctgcggttttagatgctttgtttt

SEQ ID NO: 3811 - DNA, 579 bp, Homo sapiens
  MAP TO CHR1.1; EXPRESSED IN PLACENTA, SIGNAL = 1.5; EXPRESSED IN LUNG, SIGNAL =   1; EXPRESSED IN HELA, SIGNAL = 1.7; EXPRESSED IN HEART, SIGNAL = 1.3; EXPRESSED IN ADULT LIVER, SIGNAL = 2.2; SWISSPROT HIT: Q9D4V0, EVALUE 1.70e-01; NT HIT: U41453.1, EVALUE 5.50e-01; EST_HUMAN HIT: BF530906.1, EVALUE 2.10e-01
ctggaagcaatcacttggtgtcttttcagattgcaagtttgaaaacgttagtcttcatggtggcgagctattcaaagtcactattcatttgggggaaaaaaagtaggaaaggtggtcaggagtggggaaggattcaagggtaaagagtcacttcatttcgcattgtagacttcggagtgatttgggcaagaaaactgggacatctggagttcagaagtcgaggaaaatggggaagaaccaggaagatgaatacatgatcatcagctacacaaaagaacggagcaaaaagaagccgggatttgggcacaggcgtctggcaaggaggccggcagcagggctaatgaagcatttgcggcgtgggacatttgccaacgcaacaaagaagatgtgcttgggctctgcagatgtgccagggcccccagagcaaaataatgacataatcaccatcagtgtcacagaccagactgtacacaaggtgacaggggaggggaggcctgtaatgcgcacacagggaggcctcccatggcccacgacggctgctgccctgagggtcgggatgcaggcaggactacccaccta

SEQ ID NO: 3812 - DNA, 513 bp, Homo sapiens
  MAP TO CHR7.1; EXPRESSED IN PLACENTA, SIGNAL = 3.5; EXPRESSED IN FETAL LIVER, SIGNAL = 2.8; EXPRESSED IN LUNG, SIGNAL = 4.7; EXPRESSED IN HELA, SIGNAL = 3.5; EXPRESSED IN BONE MARROW, SIGNAL = 2.7; EXPRESSED IN ADULT LIVER, SIGNAL = 1.6; EXPRESSED IN HEART, SIGNAL = 1.3; NT HIT: AJ132695.5, EVALUE 0.00e+00; SWISSPROT HIT: P15154, EVALUE 9.00e-27; EST_HUMAN HIT: BF905989.1, EVALUE 0.00e+00
taggtgtctggcatgagtgccgccggctgggtgtgatttaggtgaaggacatctgtaaaggagcgtgtcacaacctctgttccttcttcacatctagtggtatcctgaggtgcggcaccactgtcccaacactcccatcatcctagtgggaactaaacttgatcttagggatgataaagacacgatcgagaaactgaaggagaagaagctgactcccatcacctatccgcagggtctagccatggctaaggagattggtatggaatcctgtgtttttcctcctccttgtacctcttttattgtagtgacagagactggagtccagtctgggaaaggagggtgtgtgtctcccactcagggcctggtgtactcttggggaaccagctggcaaggccctgtgggtcttaacgtcagcgttggaaggtggaagcagggctgggagccggcagaaggcgcccgggccccaggagctgcctcccgctggtggtgtgatcagaagagagtggggtcgag

SEQ ID NO: 3813 - DNA, 593 bp, Homo sapiens
  MAP TO CHR20.1; EXPRESSED IN ADULT LIVER, SIGNAL = 1.2; EXPRESSED IN HELA, SIGNAL = 1.1; EXPRESSED IN HEART, SIGNAL = 0.83; EXPRESSED IN BONE MARROW, SIGNAL = 1.2; NT HIT: M60701.1, EVALUE 0.00e+00; SWISSPROT HIT: P11387, EVALUE 4.00e-32; EST_HUMAN HIT: AW383850.1, EVALUE 0.00e+00
tcatgtctcttccattcatgctcatcttttctttctttcctgggcagcttgctctgagagcaggcaatgaaaaggaggaaggagaaacagcggacactgtgggctgctgctcacttcgtgtggagcacatcaatctacacccagagttggatggtcaggaatatgtggtagagtttgacttcctcgggaaggactccatcagatactataacaaggtccctgttgagaaacgagtaagttaatgtacctgtactgtctgacttgttttccattattcaacaagcatgggttgactgcttttttgtgtgctttgcactttgctgggcaccagcaaaagtgacttgagacaggcaacatggcacatgcctgtagacccagctattcagaaggctgagacaggaggatcactggagaccaaaagtttgaggctgtagtgtgctgtgatcacacctgtgaatagccactgtactccagcctgggcaaaatagtgagaccttgcctctcatattaaaataaataaaaataaatgacttgaaagaggggagaggtattatttgatatcttgtgtacctccttttagtcactgttccgcc

SEQ ID NO: 3814 - DNA, 566 bp, Homo sapiens
  MAP TO CHR19.1; EXPRESSED IN HEART, SIGNAL = 1.5; EXPRESSED IN FETAL LIVER, SIGNAL =   1; EXPRESSED IN LUNG, SIGNAL = 1.9; EXPRESSED IN HELA, SIGNAL = 0.89; EST_HUMAN HIT: AL135668.1, EVALUE 1.00e-101; SWISSPROT HIT: P13807, EVALUE 1.00e-32; NT HIT: Z33624.1, EVALUE 0.00e+00
tcctcagttcctgtcaacccctgaggaggcagtcacttgagcccaggagttcaagaccagcctgggctgcctcagggatttacaggtccctgtccggttgggattgctgcagtgggccgctgcccactctgtgcagtagtggtgacagattgacctctccccgagtccttgtccctactggggattgccgattcttttcccaacactcgtggagacagtggccctgtccctgttgcccacagttcctggcacagagtgaggagaagccacatgtggttgctcacttccatgagtggttggcaggcgttggactctgcctgtgtcgtgcccggcgactgcctgtagcaaccatcttcaccacccatgccacgctgctggggcgctacctgtgtgccggtgccgtggacttctacaacaacctggagaacgtgagctgggaccgtggcagatgggggactgcgagtatgccaggaaaacccaaagctctggggggcccaaggggatggcaccccctcttctcccaggatccaggagtccaagtccccagacccctcctacctcagacc

SEQ ID NO: 3815 - DNA, 545 bp, Homo sapiens
  MAP TO CHR22.1; EXPRESSED IN ADULT LIVER, SIGNAL =   2; EXPRESSED IN BONE MARROW, SIGNAL = 1.2; EXPRESSED IN FETAL LIVER, SIGNAL = 1.3; EXPRESSED IN LUNG, SIGNAL = 3.2; EXPRESSED IN HELA, SIGNAL = 1.1; EXPRESSED IN HEART, SIGNAL =   2; SWISSPROT HIT: O43272, EVALUE 1.00e-12; NT HIT: gi14776952, EVALUE 0.00e+00; EST_HUMAN HIT: AI971509.1, EVALUE 0.00e+00
acagctgctaggcatgtgtgaccagatcagcttcccgctgggtgagtggggccctccctggtgcgatggggtacggtgctgggcctgggcctcatggtgtatctgcccccatgcaggccaggccggctaccccgtgtacaagtacgtgccctatggccccgtgatggaggtgctgccctacttgtcccgccgtgccctggagaacagcagcctcatgaagggcacccatcgggagcggcagctgctgtggctggagctcttgaggcggctccgaactggcaacctcttccatcgccctgcctagcacccgccagcacacccttagcctccagcaccccccgcccccgcccaggccatcaccacagctgcagccaaccccatcctcacacagattcaccttttttcaccccacacttgcagagctgctggaggtgaggtcaggtgcctcccagccctgcccagagtatgggcactcaggtgtgggccgaacctgatacctgcctgggacagccactggaaacttttgggaactctcctcgaatgtg

SEQ ID NO: 3816 - DNA, 506 bp, Homo sapiens
  MAP TO AC009789.19; EXPRESSED IN HELA, SIGNAL = 1.7; EXPRESSED IN HEART, SIGNAL = 2.5; EXPRESSED IN PLACENTA, SIGNAL = 1.7; EXPRESSED IN FETAL LIVER, SIGNAL = 1.8; EXPRESSED IN LUNG, SIGNAL = 3.1; SWISSPROT HIT: Q01818, EVALUE 9.30e-01; NT HIT: AF287967.1, EVALUE 0.00e+00; EST_HUMAN HIT: AL601154.1, EVALUE 1.10e-02
tggctctttcaatcctccacccctgggagaggcaggcctgttttcaagaacccttaacccccaggctgtgtcaggaaggtggggtccatgagcatgggccaacactggagcctttccaaactctcattcctctctccaaattgctccagtttaagaacttgcctactgaaagattagcttgttaattctctcactctctcccaagcctccatttgtgtgttcatcttgactccttctcttcctatttggatgagggaggagaaatgcaaaggaaaaataccaaatggcctcacggagatcttttttacgggagttgaaacaggcaacctgaaatgaactttgaatccatacattaaacttagctcatgagcaaatgcctagagagactcagtaattataacactggggcatatgtctattttgggtctttaaatgactgttgtattatgagatgtcattatctgctcttccaagcatttactataggaggtacactgtgggcgttt

SEQ ID NO: 3817 - DNA, 545 bp, Homo sapiens
  MAP TO CHR5.1; EXPRESSED IN FETAL LIVER, SIGNAL = 0.94; EXPRESSED IN HELA, SIGNAL = 1.5; EXPRESSED IN HEART, SIGNAL = 1.2; EXPRESSED IN BONE MARROW, SIGNAL =   1; EXPRESSED IN ADULT LIVER, SIGNAL = 0.8; EST_HUMAN HIT: AW839062.1, EVALUE 0.00e+00; SWISSPROT HIT: O95704, EVALUE 2.00e-17; NT HIT: AB024745.1, EVALUE 0.00e+00
agagctacttctccctcccggctgcaggctgtgatccccactgatgctgatccccagtacttgaacccctggacacagatcctctgatgtggacccaggactgcttcccctgcctggtccagccctggttggggagggtgggcccagctcagcagggacagtttggggagagtccgagaggctgggctgattcccttctgtgctcccacatgcttccggaacagtgacaggtgagtgaaaaccaggtatcctgagccccatccctgatgtccctactccatccctgctatatccctagcctgactttccagcctcctgcaggctcctgcctctaaccagcctctaccccagccccatctctgcccctgctagggacttcgcttttgtggcaagtgacaaagatagctgtatgctcaagtgccatgtgtttcgctgtgatgtccctgccaaggccattgccagtgccctacatgggctttgtgcccaggtaagtgtcaggggtggggcagggaatgtgggtaaggggttgggtctgaagcttccaa

SEQ ID NO: 3818 - DNA, 507 bp, Homo sapiens
  MAP TO CHR17.1; EXPRESSED IN FETAL LIVER, SIGNAL = 2.1; EXPRESSED IN HELA, SIGNAL = 2.2; EXPRESSED IN LUNG, SIGNAL = 1.8; EXPRESSED IN HEART, SIGNAL = 1.2; EXPRESSED IN BONE MARROW, SIGNAL = 1.4; EXPRESSED IN ADULT LIVER, SIGNAL = 1.2; EXPRESSED IN PLACENTA, SIGNAL = 2.3; NT HIT: gi15314378, EVALUE 0.00e+00; SWISSPROT HIT: P17600, EVALUE 2.70e+00; EST_HUMAN HIT: BF088961.1, EVALUE 1.00e-118
cactcacctgcttcttgctgcctgtgtctgtcctgacttagctgtcatcaggctcaaggaaccccttgtccttcaatggaggaaggggcagctaaagtcctttcccaccccagaccccaattcgcaggtggggatgtgccatggagcaggcagcccaccctccctggtctctccctgcagagcctggtggcacaccgggtcccactgaagccatatgcagcacctgtaccccgatcccagtccctgcaggaccagcccacccgaaacctggctgccttcccagcctcccatgaccccgaccctgccatccccgcacccactgccacgcccagtgcccgaggagctgtcatccgccagaattcagaccccacctctgaaggacctggccccagcccgaatcccccagcctgggtccgcccagataacgaggccccacccaaggtaaggacagttctgcaggcccagggaaaagcagagagctagtcatgaagagaaggagggcagtga

SEQ ID NO: 3819 - DNA, 598 bp, Homo sapiens
  MAP TO CHR9.1; EXPRESSED IN LUNG, SIGNAL = 1.8; EXPRESSED IN HELA, SIGNAL =   3; EXPRESSED IN ADULT LIVER, SIGNAL = 3.9; EXPRESSED IN HEART, SIGNAL = 2.3; EXPRESSED IN FETAL LIVER, SIGNAL = 2.8; SWISSPROT HIT: P27033, EVALUE 8.80e-01; EST_HUMAN HIT: AI272924.1, EVALUE 5.40e-02
gcaggatgagtaggagcctgctgggtagaatagaggtgggtggcaggggttgctgggggtgccccctgctgagtgctctggccagtgcccaggcagcatgcagagctccaagtggccctgcccacttcgccccaccagctcgccgtgggcggttctgacggcagctccaggaagggaggcaggcgagtgcctcccatttatggccatttctgttccagaaccgattagtagagaattgcagctgtaatctgtgcccgtgatggtgggccataaagagggatgggatgtgcacagcgctcccaaggtggcgcccgcagacatggcccggggacgccgggaatgaaaaatggttttaattccctcccagcagcaataatttgattcttcataaatttttccatcaaagtgttgttgagctgagttcccacagagcaggacacgtgacagggtgggggagtgtcgggaggagcggtcagcagacacagcagaggaggggccgtgctgcccagccctcctgctagtgctgaccagggcccggagaccacctctcccggccctcgtttgtctgcagagatgatgggagatgggagatggaatc

SEQ ID NO: 3820 - DNA, 590 bp, Homo sapiens
  MAP TO CHR19.1; EXPRESSED IN HELA, SIGNAL = 1.1; EXPRESSED IN HEART, SIGNAL = 0.69; EXPRESSED IN ADULT LIVER, SIGNAL = 1.4; EST_HUMAN HIT: BF530819.1, EVALUE 5.00e-70; NT HIT: AF254411.1, EVALUE 0.00e+00; SWISSPROT HIT: Q13164, EVALUE 3.40e-02
cctcgggttaggagaggaaccgcgggcctggcagctctggggcaaggtatcggcctgaagaggagcctgttgcctcagctgtggggaagtcagcgtgggaacagtggggtgcacgtcccctcttcccctccacctccctttactcatcacccctctgtcctcgtcccacagatcctcagccacagaaagccaccctcaagtctggggatgaccccagctcctgtgcccacctctttgggtctgccccctggcccctccagctacctgcttcctggcagcctccctctggggggctgcggttcgaccccccccacccccaccgggctggctgccacgtctgacaagagagagggcagcagcagctctgagggccgtggggacacagataaggtgagctggcctggggagaggtggggcggtgctgacagttctgtagagaatatggacaggaactgagacgcgggggcccaaggagaaagggagactgaggcagggagacagggccgtagagaccaaagtcatggaaccataaggaactccactttgctggaatgggtgagcaggaaatgcgttaggcgtgtccaaaggaa

SEQ ID NO: 3821 - DNA, 537 bp, Homo sapiens
  MAP TO CHR9.1; EXPRESSED IN FETAL LIVER, SIGNAL = 0.86; EXPRESSED IN LUNG, SIGNAL = 0.78; EXPRESSED IN HELA, SIGNAL = 0.88; EXPRESSED IN HEART, SIGNAL = 0.79; EXPRESSED IN BONE MARROW, SIGNAL = 0.86; EST_HUMAN HIT: AL525795.1, EVALUE 0.00e+00; NT HIT: gi6005867, EVALUE 0.00e+00; SWISSPROT HIT: Q63342, EVALUE 5.00e-09
gggaggtaacaccatagggcccttatttccctgggtactcagcacagcccccagcgtgtcccctctgcaccccacccagctctgattctctccccagctccctgttttgctgaggcctggagcccccatggcctcactgagccgagccctacgtgtggctgctgcccaccctcgccagagccctacccggggcatggggccatgcaacctgtccagcgcagctggccccacagccgagaagagtgtgccatatcagcggaccctgaaggagggacaaggcacctcggtggtggcccaaggcccaagccggcccctgcccagcacggccaacgtggtggtcattggtggaggcagcttgggctgccagaccctgtaccacctggccaagctgggcatgagtggggcggtgctgctggagcgggagcggctgacctccgggaccacctggcacacggcaggtagggaccgggggccaggtaggggcagggaaggataggacatagcgaggggccacagcccattgctagctgggacagt

SEQ ID NO: 3822 - DNA, 549 bp, Homo sapiens
  MAP TO CHR18.1; EXPRESSED IN HELA, SIGNAL = 0.93; EXPRESSED IN FETAL LIVER, SIGNAL = 1.6; EXPRESSED IN LUNG, SIGNAL = 1.3; EXPRESSED IN HEART, SIGNAL = 0.85; EXPRESSED IN BONE MARROW, SIGNAL = 1.5; EXPRESSED IN ADULT LIVER, SIGNAL = 0.82; EXPRESSED IN PLACENTA, SIGNAL = 1.5; EST_HUMAN HIT: BE064410.1, EVALUE 4.00e-86; NT HIT: AF224669.1, EVALUE 0.00e+00; SWISSPROT HIT: P03361, EVALUE 2.00e-07
aaagtgtctgggtggcaatcttaacttccagtttaatggaatcattgtgtctcctggtggcagcgttccttcctctggaactaagacctctaggccagcagactgtaatgttgcaggaaaaggaagcaaaaattttgctagtggatccctaggggtgatggtgagtggtgccacttctagcccttgattcctggacctgtgaatcttggctatgggagaaacagtaccatatattggatgctgattcagagcatacacgaccttctggagaactttgccccagccctgccaagtattgtcacctagttgacactgtaattgtgacttcaaaaggccattccaccattctatcaatccagctgcttcaggatgatgggaaacatggtaagaccagtgaattccatgatcatgagcccactgccgcacttctttagccataaagtgagtgccttggtcagaggcaatgctgtgtgggatatcatgatggtggataaggcattccgtgagtccacaaatggcagtcttggcagaagcattgcatgcaggata

SEQ ID NO: 3823 - DNA, 567 bp, Homo sapiens
  MAP TO CHR12.1; EXPRESSED IN FETAL LIVER, SIGNAL = 1.8; EXPRESSED IN PLACENTA, SIGNAL = 3.9; EXPRESSED IN LUNG, SIGNAL = 3.4; EXPRESSED IN HELA, SIGNAL = 3.1; EXPRESSED IN HEART, SIGNAL = 2.6; EXPRESSED IN ADULT LIVER, SIGNAL = 2.8; SWISSPROT HIT: Q01815, EVALUE 2.00e-26; EST_HUMAN HIT: AA927640.1, EVALUE 1.00e-30; NT HIT: Z26300.1, EVALUE 0.00e+00
acatcccacacttctctgccagctccccccacaccctccagttaactaaccccactctccccatcctccaccaccctcccagcgacagtgcgtggaatacgccctcaaggcccggcccctgcggaggtacatccccaagaaccagcaccagtacaaagtgtggtacgtggtcaactccacctacttcgagtacctgatgttcgtcctcatcctgctcaacaccatctgcctggccatgcaggtcagtcccaggaggagcacagccatggtgctgcagaagggagtgtgccatggggatggaaagtgtaacggagcggcaggcagctcagtgcatcgctttcctggtcaccaagggaggcatttggagaaagacgagtgttctctgtcaaggatgtgctcctctctgggccttacggaagaatccatggcaccctgggttgatcaatggagagaggggaggagatggagaagggagggttgagctgaatgcattcattgttggttgatcaatggagagaggggaggagatggagaacggagggatgagctggatgtgttcgttgttgg

SEQ ID NO: 3824 - DNA, 501 bp, Homo sapiens
  MAP TO CHR5.1; EXPRESSED IN PLACENTA, SIGNAL =  83; EXPRESSED IN HELA, SIGNAL = 1.8e+02; EXPRESSED IN LUNG, SIGNAL =  53; EXPRESSED IN BONE MARROW, SIGNAL =  67; NT HIT: AB004047.1, EVALUE 0.00e+00; SWISSPROT HIT: P53505, EVALUE 3.00e-79; EST_HUMAN HIT: BE563536.1, EVALUE 0.00e+00
gtcacagtccgcctagaagcatttgcggtgaacgatggagggccagactcctcatactcctgcttgctgatccacatctgctggaaggtggacagcgaggccaggatggagcctccaatccacacagagtacttgcgctcaggaggagcaatgatcttgatcttcgtcctgctgggcgccagggcggtaatctccttctgcatcctgtcagcaatgccagggtacatagtggtgccaccagacagcactgtgctggtgtacaggtctttgcggatgtccaagtcacacttcatgatggagttgaaggtagtttcgtggatgccacaggactccatgcccaggaaggaaggctggaagagcgcctcggggcagcagaaccactcgttgccaatggtgatgacctggctgttgggcagctggtagctcttctccagggaggagctggaagccgcggtagccatctcctgctcgaagtccaggacgaggtagcacagcttctcc

SEQ ID NO: 3825 - DNA, 544 bp, Homo sapiens
  MAP TO CHR11.1; EXPRESSED IN HELA, SIGNAL = 1.2; EXPRESSED IN HEART, SIGNAL = 1.3; EXPRESSED IN BONE MARROW, SIGNAL =   1; EXPRESSED IN PLACENTA, SIGNAL = 1.3; EXPRESSED IN LUNG, SIGNAL =   2; EST_HUMAN HIT: AI640393.1, EVALUE 0.00e+00; NT HIT: gi5453979, EVALUE 0.00e+00; SWISSPROT HIT: P96335, EVALUE 3.90e+00
ctacggctgaatcacgactgagttgattgaatcccgttgttgctgcagaacagactgtgcgtttggtcatagtggcaatttttttttctcttcacattgtgaaatcactttacattgttttctagtagaaaaggcaaaaaactgtacaaaacccctagtgttaaatacaacgtttgtaccaataaaaaactcacacaggtttgtctccaaaatgtaaagtttctttttttttttctttttaaattattcacaaaaagcagctggaaatcagaaaggcagctgccgctccagggtctcaaatccattaaaaccaccacagaacaattaaaacaatcagagagagaaaaggaaaaggaaacaacgtccaacatttggcatttggttttatccacaggttttcccagagctcctcttggaattgaaagcaaaatatattggcaaacactgcttctcaatacacaggaaggggagcctcagtgcctcctgccaacagaggcggctctgtgcagtcagactgtggggtgcacagcagtctctcaggctg

SEQ ID NO: 3826 - DNA, 552 bp, Homo sapiens
  MAP TO CHR17.1; EXPRESSED IN FETAL LIVER, SIGNAL = 1.2; EXPRESSED IN LUNG, SIGNAL = 1.3; EXPRESSED IN PLACENTA, SIGNAL = 1.2; EXPRESSED IN HELA, SIGNAL = 1.2; EXPRESSED IN HEART, SIGNAL =   1; EXPRESSED IN ADULT LIVER, SIGNAL = 0.89; NT HIT: gi14786062, EVALUE 1.00e-113; SWISSPROT HIT: P51692, EVALUE 3.00e-35; EST_HUMAN HIT: AI028626.1, EVALUE 1.00e-113
ttttggtttgtggccgttagaacataggatttgactgttagttcagcagctcatttacaaaacagcatggatagcatgggttaccttctagttgtgtgtaaagaaggtgaaacggaaccttctgaatttcacagaaccgtgtaccccagcagagtctgaatttatcctcaggccctgcaagacaaatgtgtgtaaccactcccagccatcagcgtttttcttttgtggcttgagggaataaatcatgcaactgttttctcatcagattctggcctctctccctctcagggcagggtgccatttgccgtgcctgacaaagtgctgtggccacagctgtgtgaggcgctcaacatgaaattcaaggccgaagtgcagagcaaccggggcctgaccaaggagaacctcgtgttcctggcgcagaaactgttcaacaacagcagcagccacctggaggactacagtggcctgtctgtgtcctggtcccagttcaacagggtgaggagcccagctgccagccgctgttagatcagtccttcccaaccagatgctctc

SEQ ID NO: 3827 - DNA, 538 bp, Homo sapiens
  MAP TO CHR20.1; EXPRESSED IN ADULT LIVER, SIGNAL = 1.6e+02; EXPRESSED IN PLACENTA, SIGNAL =  89; EXPRESSED IN HELA, SIGNAL =  54; EXPRESSED IN LUNG, SIGNAL =  79; EXPRESSED IN HEART, SIGNAL =  11; NT HIT: gi16194881, EVALUE 0.00e+00; SWISSPROT HIT: P02792, EVALUE 4.00e-50; EST_HUMAN HIT: BG569123.1, EVALUE 0.00e+00
gcaagttggaggaaaccaagatttatttttaagaataagaggtgataggcagttcggcggtccagtgggtctgtctcttgcttcaacagtgtttggacggaacagatccggggacggtcttccagcctccgaccgccctccaatttcctctccacttgcaacctccgggaccatcttctcggctatctcctgcttctgggacctgccagcaccgtttttgtcgttagctccttcttggcgaccaaccatgagctcccagattcgtcaaaattattccaccgacgtggaggcagccgtcaacagcctggtcaatttgtacctgcaggcctcctacacctacctctctctgggcttctatttcgaccgcgatgatgcggctctggaaggcgtgagccacttcttccgcgaattgaccgaggagaagcgcgagggctacgagcgtctcctgaagatgcaaaaccagcgtggcggccgcgctctcttccaggacatcaagaagccagctgaagatgagtggggtaaaaccccagatgccatg

SEQ ID NO: 3828 - DNA, 539 bp, Homo sapiens
  MAP TO CHR13.1; EXPRESSED IN HELA, SIGNAL =   1; EXPRESSED IN HEART, SIGNAL = 1.6; EXPRESSED IN BONE MARROW, SIGNAL = 1.9; EXPRESSED IN ADULT LIVER, SIGNAL = 2.5; EXPRESSED IN LUNG, SIGNAL = 1.9; EXPRESSED IN FETAL LIVER, SIGNAL = 1.6; NT HIT: X95177.1, EVALUE 0.00e+00; SWISSPROT HIT: P51587, EVALUE 1.00e-67; EST_HUMAN HIT: BG166449.1, EVALUE 1.00e-113
taggggagggagactgtgtgtaatatttgcgtgcttaaatattttcaatgaaaagttactttgatttagttttttatgttactacataattatgataggctacgttttcatttttttatcagatgtcttctcctaattgtgagatatattatcaaagtcctttatcactttgtatggccaaaaggaagtctgtttccacacctgtctcagcccagatgacttcaaagtcttgtaaaggggagaaagagattgatgaccaaaagaactgcaaaaagagaagagccttggatttcttgagtagactgcctttacctccacctgttagtcccatttgtacatttgtttctccggctgcacagaaggcatttcagccaccaaggagttgtggcaccaaatacgaaacacccataaagaaaaaagaactgaattctcctcagatgactccatttaaaaaattcaatgaaatttctcttttggaaagtaattcaatagctgacgaagaacttgcattgataaatacccaagctcttttgtctggt

SEQ ID NO: 3829 - DNA, 595 bp, Homo sapiens
  MAP TO CHR5.1; EXPRESSED IN LUNG, SIGNAL = 3.1; EXPRESSED IN HELA, SIGNAL = 0.65; EXPRESSED IN HEART, SIGNAL = 1.4; EXPRESSED IN BONE MARROW, SIGNAL =   1; NT HIT: gi4557416, EVALUE 0.00e+00; SWISSPROT HIT: P08571, EVALUE 1.00e-101; EST_HUMAN HIT: BF344679.1, EVALUE 0.00e+00
ggttcctgctcagctactggtaggcgccctgcgtgtgctagcgtactcccgcctcaaggaactgacgctcgaggacctaaagataaccggcaccatgcctccgctgcctctggaagccacaggacttgcactttccagcttgcgcctacgcaacgtgtcgtgggcgacagggcgttcttggctcgccgagctgcagcagtggctcaagccaggcctcaaggtactgagcattgcccaagcacactcgcctgccttttcctgcgaacaggttcgcgccttcccggcccttaccagcctagacctgtctgacaatcctggactgggcgaacgcggactgatggcggctctctgtccccacaagttcccggccatccagaatctagcgctgcgcaacacaggaatggagacgcccacaggcgtgtgcgccgcactggcggcggcaggtgtgcagccccacagcctagacctcagccacaactcgctgcgcgccaccgtaaaccctagcgctccgagatgcatgtggtccagcgccctgaactccctcaatctgtcgttcgctgggctggaacaggtgcctaaaggactgccagccaag

SEQ ID NO: 3830 - DNA, 528 bp, Homo sapiens
  MAP TO CHR7.1; EXPRESSED IN HELA, SIGNAL =   1; EXPRESSED IN HEART, SIGNAL = 0.78; EXPRESSED IN BONE MARROW, SIGNAL = 1.1; EXPRESSED IN FETAL LIVER, SIGNAL = 1.1; EXPRESSED IN PLACENTA, SIGNAL = 1.2; EXPRESSED IN LUNG, SIGNAL = 0.6; NT HIT: AF223425.1, EVALUE 7.80e+00; SWISSPROT HIT: Q28929, EVALUE 1.70e+00; EST_HUMAN HIT: AA309511.1, EVALUE 1.90e-01
tcagtagccaatttggggagtacagaagatggggaaggaagttaggatgcatttccttagttgacgttctatttctttgaagtgtcaagtacacctacaaatcacttaatatttaaattttactttttcctaaaattgtaatgaaggggtgaaataacctcattgctctttacattttaaggagtccttattttatctgctaccaatgtaggttttaattctctttggaaaatgaatactcttctgggtcccatgggagctgttccttgtggcatttgcacagacggccatctgagctgagtgcttattagatcggatgaaatatcgtttaaggttagcagccagacatcacaggccacccactggacatgctgggaatgaaaaagaggccaaaggacgagcgtctgtagttagcaaagtacaattgcaagattaacaatggcaaccccagtgcgcagtactgctggtggagagcgagtgcatgatatcataacagagtaagaaaaggcagcaaattcgcattcaaag

SEQ ID NO: 3831 - DNA, 533 bp, Homo sapiens
  MAP TO CHR2.1; EXPRESSED IN FETAL LIVER, SIGNAL = 0.61; EXPRESSED IN LUNG, SIGNAL = 0.97; EXPRESSED IN HELA, SIGNAL = 0.6; EXPRESSED IN HEART, SIGNAL = 0.86; SWISSPROT HIT: P52789, EVALUE 1.00e-32; EST_HUMAN HIT: AL040601.1, EVALUE 1.00e-100; NT HIT: Z46359.1, EVALUE 0.00e+00
catagccgtcccttgttttggcaggcacgggcagcaacgcctgctacatggaagagatgcgccacatcgacatggtggaaggcgatgaggggcggatgtgtatcaatatggagtggggggccttcggggacgatggctcgctcaacgacattcgcactgagtttgaccaggagattgacatgggctcactgaacccgggaaagcaactgtgagtaggcccttcctgtgcgagtgggcttggcgggggcctggagctgagtctggggctggtcggggccagggggttgtttctttacagtcttacatccccaaagcttgccaaggtggccactggtcataggaatgtctgtgactataaattgctgagaggatctaaaacagagagcaagcggatataccagattatagctaataatgtgtttccttcacaggagtcattttggaaggttctattctgagtgtaagtgggtggccctgctctttctttccaccttctatttgtaaattgtccatgggaactgtgagccacctaa

SEQ ID NO: 3832 - DNA, 569 bp, Homo sapiens
  MAP TO CHR19.1; EXPRESSED IN HELA, SIGNAL = 4.1; EXPRESSED IN LUNG, SIGNAL = 1.5; EXPRESSED IN BONE MARROW, SIGNAL = 2.9; EXPRESSED IN HEART, SIGNAL = 1.5; EXPRESSED IN ADULT LIVER, SIGNAL = 3.2; EXPRESSED IN PLACENTA, SIGNAL = 3.3; EXPRESSED IN FETAL LIVER, SIGNAL = 3.1; NT HIT: gi14763032, EVALUE 1.00e-102; SWISSPROT HIT: P12955, EVALUE 1.00e-30; EST_HUMAN HIT: BE906470.1, EVALUE 1.00e-101
atggcctccgtataccacagggagccatggggcccatccctgccatcccaatacacgcctgctgcctcctagagtcccaccctgccctgggggtcaggctcagcggcagctgatgggcaggccactccgcctgccatgtccacactgacctctgggtagcctcccacgtcgtgcacgtcaatgcccaggaagtggccaagcccgtgaggcataaacacggcccccaggtgagcctggaccatggcgtccacgctgccgctcaggatgcccatgtgggccagctcctccaggtggatgcggtcagccaggcggtgcatgtcaggccaccagacacctgtgggccagagggagctgccgtgagccacagagcccagcagccaacaccgcagggccaggggctgggagatgtgaagccctcacactggctgtggtgggagggcctgaggtggggggtgagggggcaagggtactacatcgggggcccaggggggacaaggactagggtggccccccgtgctgggctttcccagcaaaagctctggccctcgggacccttcttgtccctccat

SEQ ID NO: 3833 - DNA, 555 bp, Homo sapiens
  MAP TO CHR5.1; EXPRESSED IN FETAL LIVER, SIGNAL = 1.4; EXPRESSED IN LUNG, SIGNAL = 0.7; EXPRESSED IN HELA, SIGNAL = 1.5; EXPRESSED IN HEART, SIGNAL = 0.87; EXPRESSED IN BONE MARROW, SIGNAL = 1.4; NT HIT: AF026534.1, EVALUE 3.40e-02
tctctctcagtggggaatggagtagaaaaatattttcaaagaattgggttggaacgagaagcatggaaaatttgttggtaggtttttaaaatactgtttctgaaaatttatggatgagctcaatttagaaaaagtgaggaaattacatgatgacattcaggcagcttgtgagcctatttttttccatataatgttgtgctgaataaaatcacaaagtaatgatttccacttgttaataaataattcttgcttgaagtgaggaagtctttaagaaggagaagaaataatcataatcataataaaagccagtaggatcatcttcattccttttaaatatgttcaactccaaccttggaaaagttaactaaacctcatctcaacatcaaatgctgcctctcctatgggtttcttttttttaattggtgtatcttttttcctacagtcttcgagcctgtgtttatataattattgtcgcaaatgtaggtatttgacactttaataacatattactgcactttaaggaaaacacgcccttctgcacgattcttcttgcct

SEQ ID NO: 3834 - DNA, 547 bp, Homo sapiens
  MAP TO CHR4.1; EXPRESSED IN ADULT LIVER, SIGNAL = 1.5; EXPRESSED IN FETAL LIVER, SIGNAL = 0.77; EXPRESSED IN HELA, SIGNAL = 1.3; EXPRESSED IN LUNG, SIGNAL = 2.1; EXPRESSED IN HEART, SIGNAL = 1.8; EXPRESSED IN BONE MARROW, SIGNAL = 0.75; NT HIT: gi16170230, EVALUE 2.00e-99; EST_HUMAN HIT: BG654910.1, EVALUE 3.00e-99; SWISSPROT HIT: P16870, EVALUE 3.00e-32
tccctaaggcttgaatttggaaagtagggtagttaacaatattcaatttattattttccaaatgaatgtcttcagttcatttcctgtatctcttcaattagcatcacaatttttaaaatccacaaaaacaaaattatacatagtaatcattcacgcaaaaagttgactttaatggaagaactatagattcagtctactttttaatgatggaggacgattgaagattctctaaatctaaatcactctctaaacctaaatggtcattgtaaataagctacaatcacataatcagagagcacaatggaaactcacctccaggtacgctgtaccaagcaccaccgttggtggttccatctacaaagctgctgtcatcatcattcttgcgacatggtggccgattggggtcagacatggccgggttgaaagaagagtatgcccgggccaagctttggaaaatggcgtcatctggggaggagctgtattcgtgagcactacctagaaaacaaatccacaagattaaagaaacagacacagaccaagcagcaca

SEQ ID NO: 3835 - DNA, 551 bp, Homo sapiens
  MAP TO CHR7.1; EXPRESSED IN ADULT LIVER, SIGNAL =   1; EXPRESSED IN HEART, SIGNAL =   1; EXPRESSED IN HELA, SIGNAL = 1.2; EXPRESSED IN LUNG, SIGNAL = 0.78; SWISSPROT HIT: Q99985, EVALUE 5.00e-26; EST_HUMAN HIT: AL598354.1, EVALUE 9.00e-87; NT HIT: gi13626465, EVALUE 6.00e-87
gttttcctttcaggcccttcactggttacacagagatgacaaagtagatcttccttttctctgaccatttctttcatgcactaccctataatcccttttttctttatatatttatacacaggtagtattttttcagttagctccaggttttgaattgttaaaaactatggaactagacgatgagaactgaacttaataccttttcagtccatgaaataagtactaactttcatagtaacatgggaccagtattttctattgttctaataaaatgcatattattttttacttatttattttttttaaaaaagagacattgaaaaggtggacactgtcctcgtgaaagtgataaacttacactcaaagcttcttgacttatattgttaatattcagggaaagaatgtgatctttgcttcccacatatatccggtcctgatcttcatccattaataaaatcctgtagtctaaaggatggtgggaaaggctgaagtattcagaggtcttggtttctcgaagttctgaaagagtgaacagcacaagtgtagataca

SEQ ID NO: 3836 - DNA, 535 bp, Homo sapiens
  MAP TO CHR19.1; EXPRESSED IN PLACENTA, SIGNAL = 1.5; EXPRESSED IN LUNG, SIGNAL = 0.72; EXPRESSED IN HELA, SIGNAL = 1.5; EXPRESSED IN BONE MARROW, SIGNAL = 1.3; EXPRESSED IN ADULT LIVER, SIGNAL = 1.5; EXPRESSED IN HEART, SIGNAL = 0.94; EXPRESSED IN FETAL LIVER, SIGNAL = 1.4; NT HIT: gi4759195, EVALUE 1.00e-125; EST_HUMAN HIT: AL040970.1, EVALUE 1.00e-125; SWISSPROT HIT: Q92797, EVALUE 1.00e-36
tcttgagtgtggagtccgagtcatcgcggggccgcttgcgggtgtccttgctgctcggcatgttgcgggcgatctcggcctgaggtgtgcccaggtccaccagcagggtggtgatctgggcctggaactccaaggaagccgggtgcttcagcacactcaacaggtgcagcttcagattcttacgcacactgctcacctgcgatttggccagcgtcgggggcaggttggctgtgaggaaagtggcaggagctgtgtcttgtggaagatctcatggcatgctgccagtcttaattctcaaccccaaacttgggcagtggtcttgcaggcatctactagaaaagttccttcaccctcagatctaacgtgtggctttccgccttacaagctgatgcttcaaaccctgggggtctccatcagtatcagtcaatcttaaagagaaaaactcaccctctcttttagtaaatacatacaatttcgtcctcctccatctctggtctggaaattcacatatgcttcgcttggggagggttataat

SEQ ID NO: 3837 - DNA, 545 bp, Homo sapiens
  MAP TO CHR19.1; EXPRESSED IN BONE MARROW, SIGNAL = 2.1; EXPRESSED IN ADULT LIVER, SIGNAL = 1.5; EXPRESSED IN PLACENTA, SIGNAL = 3.7; EXPRESSED IN FETAL LIVER, SIGNAL = 2.4; EXPRESSED IN HELA, SIGNAL = 4.2; EXPRESSED IN LUNG, SIGNAL = 1.5; EST_HUMAN HIT: BI223682.1, EVALUE 0.00e+00; NT HIT: gi14764288, EVALUE 0.00e+00; SWISSPROT HIT: P27692, EVALUE 1.00e-06
gctgcctacaacactcctccccaagagctccacatgcctcacgccctccgatccttcagacctttactcaacacgcctgggaatgtgcacagaagacagccaaccgtttcctgtgtgctcacaaaacccaggctctgcttcaactcatctgagtgggattctattctctgcagcacaaagagggtgggaaggacaaaaggaaaggaagggagaacagaatggagggaccctgacccccatgccaccccgccccgggcacctgagcaatgtcatccttgtagatgccccgcttgaggcggacccaggactttggtttcaggttggccacctccttcaccactttgagcacgtctgtcatctccttgatgggcaccatctgctggttccagtagccaagccgcaggttgcccaccccctcaatggcctgcttcacgtgggtctgcttgtaggcctccacgtagatgtagcccttcacatgctctggtgccactactgacttgatctgcaggggctgcagggtgagccggtggaaggaggaaacagtg

SEQ ID NO: 3838 - DNA, 593 bp, Homo sapiens
  MAP TO CHR19.1; EXPRESSED IN LUNG, SIGNAL = 2.2; EXPRESSED IN HELA, SIGNAL = 2.6; EXPRESSED IN BONE MARROW, SIGNAL = 2.2; EXPRESSED IN HEART, SIGNAL = 2.4; EXPRESSED IN PLACENTA, SIGNAL = 3.6; NT HIT: AF037338.1, EVALUE 0.00e+00; EST_HUMAN HIT: BG011048.1, EVALUE 1.00e-115; SWISSPROT HIT: P02465, EVALUE 5.00e-03
tggtgagaaaatcccctcagtcctgggagtgaggcacttgctgggaatcccccgggggccagctccagggtccagctgggccacactaccccctcccaacccctgcagctcccgagacagcatggcgccccagccttacccggacgtccatgaccttggtgatcttccagaggtcgatgaggaccccaatgaagacgctgacctggaccacgaagttggtctcgttgtccaggatgtagaggaggaccacgaatgactggaaaacgccgaagaagacggagcgcacggacaggccctccagggactgccggctgttccagaactggatatctgtgcgcagggggtaggggggaaccaggaggctgaggaggtgctgagaccctactgcagctccctcaggcccccttggcctgcatcctcacaccctggggtggggctgggtcctcaggaggggtgctgaacgagacccctctctcccaggaaggctctcatattcattgggtgacccccagagcaccagacaggcggcacccctggagccctcccataggacgtcagcacccagcaccccaaggtgcagtcccttgactgat

SEQ ID NO: 3839 - DNA, 571 bp, Homo sapiens
  MAP TO CHR2.1; EXPRESSED IN ADULT LIVER, SIGNAL = 1.1; EXPRESSED IN BONE MARROW, SIGNAL =   2; EXPRESSED IN PLACENTA, SIGNAL = 1.7; EXPRESSED IN FETAL LIVER, SIGNAL = 1.6; EXPRESSED IN LUNG, SIGNAL = 1.5; EXPRESSED IN HELA, SIGNAL = 2.4; NT HIT: gi16163226, EVALUE 0.00e+00; EST_HUMAN HIT: AI752772.1, EVALUE 0.00e+00; SWISSPROT HIT: P58215, EVALUE 2.00e-43
ttgcatacagggcatctgaggctcagagaaagcactgactagcctaaggtcacacagctctgggaagtaactatgttgcttggtttgtcatccatggatttactcaatgctggctgttcttggtgtcgtgtgtccctatggctgtgccatcctcgtgttccctttccctgcactttggccacacataggaaatatctaggatatgcctggatcattgctcacctgttccagggccatatttggcactgtgggtccagcctgtggcctctgtgaagcccagctcccggcagaggatgtgggcagcctgcagcgtgaagtcatcatcgcagatggtgccccattcaccagctcgctgtatctccacgcggccctcgtagggcttcctggggaagccagccagccggaaccgaagcccctggctcccggccttcttctcagggcccgtggaaggggacggagaccccaagcacgaactgcacagcaggcacagcagcagcccccaggggctccactgccagacactgacaggtcgcatggcagggaaggcctgggtgccccagagacaaagtgt

SEQ ID NO: 3840 - DNA, 530 bp, Homo sapiens
  MAP TO CHR19.1; EXPRESSED IN ADULT LIVER, SIGNAL = 0.71; EXPRESSED IN LUNG, SIGNAL = 1.3; EXPRESSED IN HELA, SIGNAL = 0.9; EXPRESSED IN HEART, SIGNAL = 1.1; SWISSPROT HIT: P53686, EVALUE 3.00e-05; NT HIT: AF095714.1, EVALUE 7.00e-68; EST_HUMAN HIT: AW374987.1, EVALUE 0.00e+00
acaggaaatcaggcagttgggctgcagtgagccatgatcacccactgaactccccgcgtgggcgacagagtgagactctgtctcaaaaacaaacaaacaaaacaaaaaaaccccaaagaattgagcaggacagaatgggtgcccactgcatggagacactgctcctggtgctgagaggaggcctgccctcaggatgccctccagcctcacctttcatccagcttagcgggtattcgtgccggcagctggcgctgacgcagtgtgatgtgtagaaggtgccgtgcgcctccaccaagtcctcctgttccagcccggctattcgctccagggtatctatgttctagagggagagatggagggaagaggggtgaggagtgagccaccccttgtaggccagaaggcacagtagggagttgagggccacgaggagcagtgaggtggtggggacaggtggagaagggagggaggagaagcaagtggcagggtttatctgaagactcttctgttcatcccaatggtgccacttaaag

SEQ ID NO: 3841 - DNA, 587 bp, Homo sapiens
  MAP TO AC021705.4; EXPRESSED IN HEART, SIGNAL = 6.1; EXPRESSED IN ADULT LIVER, SIGNAL = 2.5; EXPRESSED IN PLACENTA, SIGNAL = 2.9; EXPRESSED IN FETAL LIVER, SIGNAL = 3.1; EXPRESSED IN HELA, SIGNAL = 2.4; EST_HUMAN HIT: AA206066.1, EVALUE 6.00e-88; SWISSPROT HIT: P20549, EVALUE 2.90e-01; NT HIT: gi14770778, EVALUE 7.00e-96
tgttcagagtggctcactggctgggagtccttacctcggggagagggggaggttggttccttggggggccaaagaaggcagggaatgcctggagggtaactggggggccaccatgaccccttctctctccagaaacagctgcttctccccccatcccagggtcccacccccaacccccagaggtggcccttgtttacagtgaggactcggccactgtgtctctgtttcctgaaatataaactgtagcgaccccagactgtagagatttttatgtgtttggatacatctgctgtgtggaaaaaaaaaaaaactacaaaaaccctaattttgtacatactgtatttttactattgaactgtattctagtggctgttcatgctccaagactttagttaccgagacatgaatactatccatgtaataagcacttgcctggaataaaatataaaactgaaataaacctgcactgaaacctgagatggagctgccagcctgcagcatctgggtcattttattgcaaaaggaggctgaggcctgtagggaagcatgtggcaggagcggtgagatcacctgtctcgaccctgtct

SEQ ID NO: 3842 - DNA, 577 bp, Homo sapiens
  MAP TO CHR7.1; EXPRESSED IN LUNG, SIGNAL =   1; EXPRESSED IN HELA, SIGNAL =   1; EXPRESSED IN BONE MARROW, SIGNAL = 0.97; NT HIT: gi14753236, EVALUE 1.00e-72; EST_HUMAN HIT: BF848741.1, EVALUE 2.00e-72; SWISSPROT HIT: P31386, EVALUE 1.10e+00
aaaggctgggtcagatgttggctatggtttgtcaggtgtgctattttttcatttcccataggcttccaactctttcccaagctctggagtcagtgccaccataaagacctcccctgagagtgcagtttactccagccctgatatttcccttttggtcttctccacagctttccatgaagtctcagtttacccaaagaaggagcttcccttctttattctctttactgctggattatgttccttcacagccatgctggccctcctgacacatcagttcccggaacttatgggggtcttcgcaaaagctgtgagtgtttgcctagagggaggccttggggaatggatggggaaagccaagggcataaaagcagcgtgagagaaatggggttgccttacagaaatgggtacgagcctgcaaagatcattgctcaccatttaattttcatgatcgtcaatggaatcaaagcattaagggtcaaatgagaaagtgcaggttgttactgcatgccttgcctcatttcacaacaaattcttagcagtttccaaaaaatgcaggaggtccaaaaggatggaatga

SEQ ID NO: 3843 - DNA, 567 bp, Homo sapiens
  MAP TO CHR17.1; EXPRESSED IN ADULT LIVER, SIGNAL = 1.7; EXPRESSED IN PLACENTA, SIGNAL = 2.4; EXPRESSED IN HELA, SIGNAL = 2.3; NT HIT: M94048.1, EVALUE 0.00e+00; SWISSPROT HIT: Q01453, EVALUE 7.00e-26; EST_HUMAN HIT: AW853029.1, EVALUE 0.00e+00
tggacctggaagcagatttccttccagaggtagaaatgttcttcctacccagcaattgtcagcatccggggtggcggagagggggccgctctgccatggactctccgtcacccagcttgtccctctccttccccaggtctgtgcgtgatgagtgctgcggccatctacacggtgaggcacccggagtggcatctcaactcggattactcctacggtttcgcctacatcctggcctgggtggccttccccctggcccttctcagcggtgtcatctatgtgatcttgcggaaacgcgaatgaggcgcccagacggtctgtctgaggctctgagcgtacatagggaagggaggaagggaaaacagaaagcagacaaagaaaaaagagctagcccaaaatcccaaactcaaaccaaaccaaacagaaagcagtggaggtgggggttgctgttgattgaagatgtatataatatctccggtttataaaacctatttataacactttttacatatatgtacatagtattgtttgctttttatgttgaccatcagcctcgtgttgagccttaaa

SEQ ID NO: 3844 - DNA, 545 bp, Homo sapiens
  MAP TO CHR17.1; EXPRESSED IN HELA, SIGNAL =  22; EXPRESSED IN LUNG, SIGNAL =  53; EXPRESSED IN HEART, SIGNAL =  32; EXPRESSED IN ADULT LIVER, SIGNAL = 1.1e+02; EXPRESSED IN BONE MARROW, SIGNAL =  19; EXPRESSED IN PLACENTA, SIGNAL =  45; NT HIT: gi14776482, EVALUE 0.00e+00; EST_HUMAN HIT: BF727004.1, EVALUE 0.00e+00; SWISSPROT HIT: P02248, EVALUE 5.00e-37
tgcgtctgagaggtggtatgcagatcttcgtgaagaccctgaccggcaagaccatcaccctggaagtggagcccagtgacaccatcgaaaatgtgaaggccaagatccaggataaagaaggcatccctcccgaccagcagaggctcatctttgcaggcaagcagctggaagatggccgcactctttctgactacaacatccagaaggagtcgaccctgcacctggtcctgcgtctgagaggtggtatgcagatcttcgtgaagaccctgaccggcaagaccatcactctggaggtggagcccagtgacaccatcgaaaatgtgaaggccaagatccaagataaagaaggcatcccccccgaccagcagaggctcatctttgcaggcaagcagctggaagatggccgcactctttctgactacaacatccagaaagagtcgaccctgcacctggtcctgcgcctgaggggtggctgttaattcttcagtcatggcattcgcagtgcccagtgatggcattactctgcactatagccatttgcccca

SEQ ID NO: 3845 - DNA, 503 bp, Homo sapiens
  MAP TO CHR7.1; EXPRESSED IN HELA, SIGNAL = 2.3; EXPRESSED IN HEART, SIGNAL = 1.5; EXPRESSED IN ADULT LIVER, SIGNAL = 2.2; EXPRESSED IN BONE MARROW, SIGNAL = 1.5; EXPRESSED IN PLACENTA, SIGNAL = 1.8; EXPRESSED IN LUNG, SIGNAL = 1.8; EXPRESSED IN FETAL LIVER, SIGNAL = 1.9; EST_HUMAN HIT: AA522934.1, EVALUE 7.00e-01
ttacctttagcagggggagctgagcagtcttcaacttgtttgtgttcattgattgataatgagcagtttctctgtctacatctgtgtgggaccatgtgaggtctgctttagcctgctgggagttgagaggagggagaggcaatcacagtgtgtttaaaaaattgttctaaggatgacatttgggaggcaaatattttggccacaagccaatgtaattttttttaatgctaagacaagcttggcactttacatttaactttaatctgttttcataattcaatataaattgacacatcactatttctatgtaatggaaagtttcttcaagtggttacctctatcaataggttatttttaaaatacagttatggaattttattctgatttcatcatttgcttaaaaaaatctattaggcctcaacttttacttgtcaattattaaataccagtttcttgcttttgttttctattcaatttgacaaagtatgcgtatgtccagcacg

SEQ ID NO: 3846 - DNA, 588 bp, Homo sapiens
  MAP TO CHR17.1; EXPRESSED IN ADULT LIVER, SIGNAL = 1.8; EXPRESSED IN LUNG, SIGNAL = 1.6; EXPRESSED IN PLACENTA, SIGNAL = 1.9; EXPRESSED IN FETAL LIVER, SIGNAL = 1.5; EXPRESSED IN HELA, SIGNAL = 2.2; EXPRESSED IN HEART, SIGNAL =   1; NT HIT: gi11425900, EVALUE 6.00e-78; SWISSPROT HIT: P57082, EVALUE 1.00e-24; EST_HUMAN HIT: BF084356.1, EVALUE 5.30e-02
tttgtgattagccccagtccttcaattaaatgatcccatttccctgtaacctcccttttcttttctactgcagtaaaataaaggagattcagaactgctctctcctcctcagcattctctcctctgaacctcacactcctacccttgaagtactaatttgacaatgtggtgggaccagcagctattttttcctctggtcaatgggggtttgctccaagaggggacggggaatctggcctcaccagcccctggagtaatcacctgctcttatctgctctgttggcaggatggtggcagggaaggctgagccagccatgccaggaaggctgtatgtccacccggattctcctgccacaggagcccactggatgcggcagctggtctccttccagaagctgaagctgacaaacaaccacctggacccctttggccatgtaagcatgggggctgcctggccccaggaggcaagtctggggcagttttaggggtgggacaggccaggatggggatagggagaatccactccgggatccagctccaggctttggcgctcactgaccagtttagggaaggagctcaagcctctga

SEQ ID NO: 3847 - DNA, 558 bp, Homo sapiens
  MAP TO CHR14.1; EXPRESSED IN HELA, SIGNAL = 0.52; EXPRESSED IN HEART, SIGNAL = 0.6; EXPRESSED IN FETAL LIVER, SIGNAL = 0.84; SWISSPROT HIT: P27448, EVALUE 2.00e-31; EST_HUMAN HIT: BE613879.1, EVALUE 1.00e-119; NT HIT: gi16189330, EVALUE 1.00e-122
cctggtgtctagctggttccaaccctaccaccctaagaccactctatagttcaacaacacttacactagggacagtggagcttttcttgcgttcaggaatatccgccttattaggattacttgcattcccaagcatgggactggctggagcaattccctttcctccaacagcactgccacttgatttccgggaggaaattccatcttctttgaggtcactatctgcagtgctggtctgactccttttcggatacgccacaacagaaggaatagctggtccagctaaaataaagagttcattttttaaatgactgaatatagtttcaagttttattttgtgacagtaaccatattttgtaagatgatctaaggttgctattcacctaaaaaatgtaaaacagtaaaatcctctaagatgtttcccacttatatctaatgtttgccttatgcaatgaattcaatattgaaatttcacttaatactcctttctacttaaaacattttttttttaatagtaagagtttagagttgtcctttggaaacatcttaaggtggtgg

SEQ ID NO: 3848 - DNA, 503 bp, Homo sapiens
  MAP TO CHR17.1; EXPRESSED IN ADULT LIVER, SIGNAL =   1; EXPRESSED IN BONE MARROW, SIGNAL = 1.2; EXPRESSED IN LUNG, SIGNAL = 0.89; EXPRESSED IN HELA, SIGNAL = 0.83; EXPRESSED IN HEART, SIGNAL = 0.61; EST_HUMAN HIT: BF846361.1, EVALUE 1.00e-70; NT HIT: gi4557568, EVALUE 1.00e-109; SWISSPROT HIT: Q09499, EVALUE 9.00e-16
gctcctggtaagcattggactaatctggagttctctgttagttcacagagacctaaagccacacaacatcctcatatccatgcccaatgcacacggcaagatcaaggccatgatctccgactttggcctctgcaagaagctggcagtgggcagacacagtttcagccgccgatctggggtgcctggcacagaaggctggatcgctccagagatgctgagcgaagactgtaaggagaaccctgtgagtaataggctatggccctttgaaaactacagaaccagcccattgtatcttcaggagtagaacctttaaattccaggtttgggggctggtgcccgtgtagctggagaatggcattcctttcaccaagagcttctgtgtgaacattctgtgtcatctcatgttcagctgattaaaggggcaaatgtgggcaattatctattttttttccctattcttccaatcacttgttttttttttttgtttggttggttggctgttt

SEQ ID NO: 3849 - DNA, 510 bp, Homo sapiens
  MAP TO CHR19.1; EXPRESSED IN FETAL LIVER, SIGNAL = 4.3; EXPRESSED IN LUNG, SIGNAL = 2.7; EXPRESSED IN HELA, SIGNAL = 4.6; EXPRESSED IN HEART, SIGNAL = 3.2; EXPRESSED IN ADULT LIVER, SIGNAL = 5.2; EXPRESSED IN PLACENTA, SIGNAL = 3.1; SWISSPROT HIT: P20615, EVALUE 4.20e-01; EST_HUMAN HIT: AL560889.1, EVALUE 1.20e-02; NT HIT: AF041428.1, EVALUE 2.00e-06
gaggcaaaagtgaggtcctggtggcgagcgggcctcgggtatttcaagctttaaggctccactgggctccctgggggccgtttcttccttgcttcttccttgcctcctgtcataggattgggctactctttggacctgattccaaggcagctctgaggaaaacaaaccctcagctccctgaaacatagatgacctttttaaaattccaggttcatggagtgcctctctccagatggccccaaacacttccatctattaactcgtgctcattcaacgtgcagcagaggctattgatcaccttccctgtgccggggactgtgctaggtgctgggaatacaaagatggggagaggcctcgatgcgattcccgattcagaggcaggtggcaaatgcttttcccacagtgagggaagggctgtcaccgcgatggtgctctcagggaaccaaggttcacacattcagggaattcggggcactgagtcagcattctagactctgccaggatgaggag

SEQ ID NO: 3850 - DNA, 584 bp, Homo sapiens
  MAP TO CHR5.1; EXPRESSED IN ADULT LIVER, SIGNAL = 3.2; EXPRESSED IN PLACENTA, SIGNAL = 2.7; EXPRESSED IN FETAL LIVER, SIGNAL = 2.6; EXPRESSED IN LUNG, SIGNAL = 4.4; EXPRESSED IN HELA, SIGNAL = 2.1; EXPRESSED IN BONE MARROW, SIGNAL = 2.2; EXPRESSED IN HEART, SIGNAL = 3.8; NT HIT: gi14861871, EVALUE 0.00e+00; SWISSPROT HIT: Q9UN66, EVALUE 6.00e-50; EST_HUMAN HIT: BI488619.1, EVALUE 0.00e+00
tgtatgcgctgcaatctttcgactatgagcagatccgagacctgcagctactggtaacagccagcgacagcggggacccgcccctcagcagcaacatgtcactgagcctgttcgtgctggaccagaatgacaacgcgcccgagatcctgtaccccgccctccccacagacggttccactggcgtggagctggcgccccgctccgcagagcgtggctacctggtgaccaaggtggtggcggtggacagagactcgggccagaacgcctggctgtcctaccgcctgctcaaggccagcgagccgggactcttctcggtgggtctgcacacgggcgaggtgcgcacggcgcgagccctgctggacagagatgcgctcaagcagagcctcgtggtggccgtccaggaccatggccagccccctctctccgccactgtcacgctcaccgtagccgtggctgacagcatccccgaagtcctgaccgagttgggcagtctgaagccttcggtcgacccgaacgattcgagccttacactctatctcgtggtggcagtggctgccatctcctgtgtcttcctcgcctttgtc

SEQ ID NO: 3851 - DNA, 502 bp, Homo sapiens
  MAP TO CHR7.1; EXPRESSED IN PLACENTA, SIGNAL = 2.4; EXPRESSED IN FETAL LIVER, SIGNAL = 0.99; EXPRESSED IN HELA, SIGNAL = 1.1; EXPRESSED IN HEART, SIGNAL = 1.1; EXPRESSED IN ADULT LIVER, SIGNAL = 1.1; EXPRESSED IN BONE MARROW, SIGNAL = 0.84; SWISSPROT HIT: Q04960, EVALUE 7.00e-01; EST_HUMAN HIT: AI751985.1, EVALUE 5.00e-54; NT HIT: AF004877.1, EVALUE 0.00e+00
caaaacacttcacccaacccctagaggaattcatagatgagcatcctgcaaaagtaggtcaacattgtttccaggccaattttataacatattaaattgagagtcactgatttaataaggcagatggaaagcagatgctttttttgcctaagaaaacacagtcagtaattttgaccaattcccagtgaaggggtatcataatctgcctctggtgtgttagggtgttgggagcatttgaaacctactctcagcccaggaggtcctggagggccggcagatccagcttccccattagggcctctctttccttcttcaccactgggaccaggaggaccttggggcccagcagagccctgtttaatgaaaagaacaaaagaagagggagtaaaaaaataattttaatactatgtccagctggagaaactggaatgagaaaaacaattaactttataaaagtgtgatgatagagctacttacgggctcacccttgttaccgctctct

SEQ ID NO: 3852 - DNA, 599 bp, Homo sapiens
  MAP TO CHR11.1; EXPRESSED IN FETAL LIVER, SIGNAL = 3.9; EXPRESSED IN LUNG, SIGNAL = 3.1; EXPRESSED IN HELA, SIGNAL = 2.6; EXPRESSED IN HEART, SIGNAL =   4; EXPRESSED IN BONE MARROW, SIGNAL = 4.9; SWISSPROT HIT: O28377, EVALUE 3.40e+00; NT HIT: U00481.1, EVALUE 9.00e-03
aacgggaatgactcaggttggagaagagaagaccgagaggaaactgaatcatttccaagacaaagaagggctctcttgctgggggatgatggccagctgtcctcctttgcctctgcttgcagagcaaggggaaatgggcttagaccgaaggcagggctaagattagagagaaggaagaacttggcagtgaaggatgttgtataacctagtttttgagacaacttggggactgaggagactcccacacgcctggtctgagcccagtggacgtgcatgtggggtgatctggctgactggctgggaagggaggaggaggtcctgaggctgcatttttctgtgtcctcgatttcccgttggaagttaagttcccaaattgtggagctggcaaggcagcacctcccccacccaccacgcactgcaccagtgttcctgggctgggtaataatgcctgtcatttcctctcccgggggagtggggctgcaaccgccctgacagccccgagggattgaaggcaactaaaaatagtgcattaaatataatctgttgaggggcacatttgcattgcttttctttccccctcgcctgtctcttcatccttc

SEQ ID NO: 3853 - DNA, 500 bp, Homo sapiens
  MAP TO CHR17.1; EXPRESSED IN FETAL LIVER, SIGNAL = 1.1; EXPRESSED IN LUNG, SIGNAL = 1.4; EXPRESSED IN HELA, SIGNAL = 1.3; EXPRESSED IN BONE MARROW, SIGNAL = 0.96; EXPRESSED IN HEART, SIGNAL = 1.2; EST_HUMAN HIT: AI565738.1, EVALUE 0.00e+00; SWISSPROT HIT: Q14161, EVALUE 8.00e-44; NT HIT: gi14773832, EVALUE 1.00e-121
gcgtccacagaggtagaaggccagccggtcagtgagctcatattggcactcaaccagcctttccgccagctcatggtgccccgcctgcctgtgaggagggggtatggctcagacctgcagcagcagccctcacccacacccccacccacccacactgcacccttcagccgaccctcacctggcatagtcaatgggtgtgcggccattaacatcaggggagccagggtcagccccatacactacaagcagctcggcctgcagtgtctgtcctgccttggcagccacgtgcagaggtgtggtgcccttctctgggtggaagaagttggcctgggcacccagggagagcaggcgcagacatgtctccaggttgcctgtccgcacgctcgagtgtagttgctaagaggagcagagtgtgcagtgaatacgcatgtgcgtgaggcgcacctccccacccacaagctgcaccctggctgcccctgggacacctagcagctccaagg

SEQ ID NO: 3854 - DNA, 593 bp, Homo sapiens
  MAP TO CHR19.1; EXPRESSED IN BONE MARROW, SIGNAL = 0.97; EXPRESSED IN HEART, SIGNAL = 1.3; EXPRESSED IN ADULT LIVER, SIGNAL = 0.55; EXPRESSED IN LUNG, SIGNAL =   3; EXPRESSED IN HELA, SIGNAL = 1.3; NT HIT: gi4759195, EVALUE 0.00e+00; EST_HUMAN HIT: AL040970.1, EVALUE 0.00e+00; SWISSPROT HIT: Q92797, EVALUE 9.00e-39
acatttcagcatggtctgcctgccccaccccaccagcccctctcacccagcttcatcttcttgagtgtggagtccgagtcatcgcggggccgcttgcgggtgtccttgctgctcggcatgttgcgggcgatctcggcctgaggtgtgcccaggtccaccagcagggtggtgatctgggcctggaactccaaggaagccgggtgcttcagcacactcaacaggtgcagcttcagattcttacgcacactgctcacctgcgatttggccagcgtcgggggcaggttggctgtgaggaaagtggcaggagctgtgtcttgtggaagatctcatggcatgctgccagtcttaattctcaaccccaaacttgggcagtggtcttgcaggcatctactagaaaagttccttcaccctcagatctaacgtgtggctttccgccttacaagctgatgcttcaaaccctgggggtctccatcagtatcagtcaatcttaaagagaaaaactcaccctctcttttagtaaatacatacaatttcgtcctcctccatctctggtctggaaattcacatatgcttcgcttggggagggttataat

SEQ ID NO: 3855 - DNA, 575 bp, Homo sapiens
  MAP TO CHR20.1; EXPRESSED IN ADULT LIVER, SIGNAL = 2.5e+02; EXPRESSED IN PLACENTA, SIGNAL =  91; EXPRESSED IN HELA, SIGNAL =  21; EXPRESSED IN LUNG, SIGNAL =  67; EXPRESSED IN HEART, SIGNAL =  11; NT HIT: gi16194881, EVALUE 0.00e+00; EST_HUMAN HIT: AV651066.1, EVALUE 0.00e+00; SWISSPROT HIT: P02792, EVALUE 2.00e-67
tgcaggcctcctacacctacctctctctgggcttctatttcgaccgcgatgatgcggctctggaaggcgtgagccacttcttccgcgaattgaccgaggagaagcgcgagggctacgagcgtctcctgaagatgcaaaaccagcgtggcggccgcgctctcttccaggacatcaagaagccagctgaagatgagtggggtaaaaccccagatgccatgaaagctgccatggccctggagaaaaagctgaaccaggcccttttggatcttcatgccctggattctgcccacatggacccccatctctgtgacttcctggagactcacttcctagatgaggaagtgaagctcatcaagaagatgggtgaccacctgacgaacctccacaggctgggaggcccagaggctgggctgggcgagtatctcttcgaaaggctcactctcaagcacgtctaagagccttatgagcccagcgacttctgaagggccccttgcaaagtaatagggcttctgcctaagcctctccctccagccaataggcagctttcttaactaccctaacaagccttggaccaa

SEQ ID NO: 3856 - DNA, 513 bp, Homo sapiens
  MAP TO CHR17.1; EXPRESSED IN LUNG, SIGNAL = 0.76; EXPRESSED IN HELA, SIGNAL = 0.9; EXPRESSED IN HEART, SIGNAL = 1.1; NT HIT: gi14774013, EVALUE 1.00e-118; SWISSPROT HIT: Q64237, EVALUE 2.10e+00; EST_HUMAN HIT: BE260736.1, EVALUE 1.00e-101
accccatgacttagtggctgaaggtggggccagggcagatggagagactttgggttgtgagaagagacaaggagagggactgggcacgtgtgggagcacctggagagctggtgggacctacagccctctccccactccctccctaggtgttcagcgacatcggcgccatccagagcctgaaacgcctggtttcctactctaccaatggcactaagtcggcgctggccaagcgcgcgctgcgcctgctgggcgaggaggtgccacggcccatcctgccctccgtgcccagctggaaggaggccgaggttcagacgtggctgcagcagatcggtttctccaagtactgcgagagcttccgggtagagtcgcgtgggatacgcctcccccgagtcagagcgggcgccctgtgcacagggactgcgttccctccccgcctcgcaatcccgcggcgccagggtcgcttttgggggcggggagcctgtacgcagccaccgttagggtcactcggctctg

SEQ ID NO: 3857 - DNA, 544 bp, Homo sapiens
  MAP TO CHR1.1; EXPRESSED IN FETAL LIVER, SIGNAL = 0.96; EXPRESSED IN LUNG, SIGNAL = 0.73; EXPRESSED IN HELA, SIGNAL = 0.88; EXPRESSED IN HEART, SIGNAL = 1.1; EXPRESSED IN BONE MARROW, SIGNAL = 0.93; NT HIT: AB037810.1, EVALUE 0.00e+00; SWISSPROT HIT: P31442, EVALUE 5.10e+00; EST_HUMAN HIT: BI006075.1, EVALUE 0.00e+00
ggacactctgaggaaggtgctccaacacaaagcaaaacattgtgactggttcttaaaaaactactcccgagacacatgcaaacgcccatggctcttccttacctttcccatagaagaatttgcggtaataataggccccaaggtcaatgtgttctatgatgtagcgcttcactttctccctgtgaataggctggttttctctgggcacttccaagacggagacacctgcatttgtgcagtgagagctgagtgacgattcgaaagagcagctttccccagaactgaaagaggatgagttggctcgagagagcgcaatccgcctgtcgccttcccctccagtctcatttctaaagtaaggacaactaaggacgaggtcgttacttttcccatcaccctcatcggcatccaggttctctttggagttgaggtcctccttgctccctaaaggggactcacagttgcctgtctggcccgtaggcatctgagtctgggatgctgcagatgccccagtggttatgtttttccttttccccacattagccct

SEQ ID NO: 3858 - DNA, 545 bp, Homo sapiens
  MAP TO CHRX.1; EXPRESSED IN FETAL LIVER, SIGNAL = 0.61; EXPRESSED IN HELA, SIGNAL = 0.79; EXPRESSED IN HEART, SIGNAL = 0.62; EXPRESSED IN ADULT LIVER, SIGNAL = 0.91; EXPRESSED IN BONE MARROW, SIGNAL = 0.88; NT HIT: AF154505.1, EVALUE 2.00e-77; SWISSPROT HIT: P77172, EVALUE 5.10e+00; EST_HUMAN HIT: BI832734.1, EVALUE 3.00e-03
tggaaaataaaaggccaagcaaattatttacctatctcataatgatacaaaaagacctacaaaatgtgctagggatgctaagagaagtaacatttgtgtaacttgttgaaatatttgaaaacataaggaagaaggaaaaacaacattccagaagagcttactttggttggctgaatttccctgcaagaggagctaatgagctgtcatttcagttctcccaaaggtggtattagtttgtacaagctcttgctcattgccctgcccttcctgcctgctccccatcagacatctcaaacctctaagggtatacaggccattacccacaatgaattcaccaacagaggggatgcagttaaacaggaaaaaacaaaaacaaaaacaaaaaaacagatcctacaggtcattaataaaaagcctgaggaacaacaacaaaagaaaaaccaacaacccatcctccctgccatcatcccacaatataaaatgctacacaggaaattaaaaattggctgttatgatgcacacagtgcacggctagttcagtcctc

SEQ ID NO: 3859 - DNA, 510 bp, Homo sapiens
  MAP TO CHR19.1; EXPRESSED IN FETAL LIVER, SIGNAL = 1.4; EXPRESSED IN LUNG, SIGNAL =   1; EXPRESSED IN HELA, SIGNAL = 1.7; EXPRESSED IN HEART, SIGNAL = 1.3; EST_HUMAN HIT: BI196652.1, EVALUE 6.00e-94; SWISSPROT HIT: P11642, EVALUE 1.10e-01
tgatcaagctccctgaggactgtggtcagccaggtagtggccctgcctacctggatgtgggcctctgtcccgacacccgctgccccagcctggcaggctccagcccccgctgcggggacgccagctcccgctgctgctctgtgcgccgtctggagagaagggagattcactgccctggctacgtcctcccagtgaaggtggtggcagagtgtggctgccagaagtgtctgccccctcgggggctggtccggggccgtgttgtggctgctgactccggggagccgctacgcttcgccaggattctgctgggccaggagcccatcggcttcaccgcctaccagggcgactttaccattgaggtgccgccctccacccagcggctggtggtgacttttgtggaccccagcggtgagttcatggacgctgtccgggtcttgccttttgatcctcgaggtgccggcgtgtaccacgaggtcaaggccatgcggaagaaagccccggtcattttac

SEQ ID NO: 3860 - DNA, 403 bp, Homo sapiens
  MAP TO CHR5.1; EXPRESSED IN HELA, SIGNAL = 1.1; EXPRESSED IN BONE MARROW, SIGNAL = 0.94; EXPRESSED IN HEART, SIGNAL = 1.3; EXPRESSED IN LUNG, SIGNAL = 1.1; EST_HUMAN HIT: AA251481.1, EVALUE 2.00e-83; SWISSPROT HIT: O02491, EVALUE 1.50e+00; NT HIT: AB006628.1, EVALUE 2.00e-83
gaggttgggggaaaggatacgggggatcatcaggccatcctcctagagcgaggagtctggggagccacatgggcaccagttggaaaccgaagagaaggggaaggatgaggcaccaggcagagccctaagccaacacccagtcccctcatcctccctagctgcctggctcgagtaactggggagctgaccatgaccttccctgctggcatcgtgcgtgtgttcagcgggaccccaccaccacctgtcctcagcttccggcttgtacacacaaccgctattgagcacttccagcccaacgccgatctgctgttcaggtactatggaggggcagtgggagagggcctcggaggctgctggggatcaggcttccggactctgagttccctctctgcttcctgggatt

SEQ ID NO: 3861 - DNA, 567 bp, Homo sapiens
  MAP TO CHR1.1; EXPRESSED IN ADULT LIVER, SIGNAL = 0.89; EXPRESSED IN BONE MARROW, SIGNAL = 0.99; EXPRESSED IN PLACENTA, SIGNAL = 1.6; EXPRESSED IN FETAL LIVER, SIGNAL = 0.86; EXPRESSED IN HELA, SIGNAL = 1.5; EXPRESSED IN HEART, SIGNAL = 0.91; NT HIT: gi11421868, EVALUE 1.00e-112; EST_HUMAN HIT: BI007445.1, EVALUE 0.00e+00; SWISSPROT HIT: Q14814, EVALUE 2.00e-34
atgtccagccatctgtaggctgggactcccaatcaggccttaactgagccagatctggccgcccacccatccttctctgcaggtgactttcaccaagcggaagtttggcctgatgaagaaggcgtatgagctgagcgtgctatgtgactgcgagatcgcactcatcatcttcaaccactccaacaagctgttccagtacgccagcaccgacatggacaaggtgctgctcaagtacacggagtacaatgagccacacgagagccgcaccaacgccgacatcatcgaggtgggcccatacacacaggcaccaggatatacccccgcctgcatccacatggacacgtgcccacgttgcatgtacacgcagacctgcctatgcacacacactggtatacatgccccttgtagcccctcacctgtgtgcacacacatgcaaaccctccttctgtcatacaaacccagggtctgaggaggaaggaagggcagttcaagtgaacaggccagtgccaggctgccagcccacacccaccctgccctctccaagagtctgctgtcgtccagtgtgat

SEQ ID NO: 3862 - DNA, 553 bp, Homo sapiens
  MAP TO CHR12.1; EXPRESSED IN PLACENTA, SIGNAL = 1.4; EXPRESSED IN LUNG, SIGNAL = 0.87; EXPRESSED IN HELA, SIGNAL = 1.6; EXPRESSED IN BONE MARROW, SIGNAL =   1; EXPRESSED IN ADULT LIVER, SIGNAL = 1.3; EST_HUMAN HIT: BE065970.1, EVALUE 7.00e-63; SWISSPROT HIT: Q01636, EVALUE 1.00e+00; NT HIT: gi14761652, EVALUE 0.00e+00
atgtctcgcggtaccttgtcaggtcgcaaggctgtgccaagctgctccataaactctgccacttcccgctcatcctcctgccgcccactgcccttctggatggtcagcagcagccgaagccgcttccagcgcactcctttccatttcttgaggcgaggaggacgggaatcttcaccttcttcagggggccgggcacggggcttgggtcgggctgattcaggggatgaggccagtggcagaggtgaggggacgggtggctcagccaagggttcggtgggaagttcaaccaagggctcagtagggggactggcaggagaaggtgccaagggggaagggggcggggagggttcttcaggaggtggggccgagagctgtcgcacatccagattggagacattgtaggtatagctgtgctgagtgggtggctctggggcggggctctcctgtaggagggtgccctgtatcattagtgccagctcctcatctaactagctccctccttcccctcacccatatgccaccctcccaaaaggcctccacattctttgcccta

SEQ ID NO: 3863 - DNA, 557 bp, Homo sapiens
  MAP TO CHR2.1; EXPRESSED IN PLACENTA, SIGNAL = 1.2; EXPRESSED IN LUNG, SIGNAL = 0.57; EXPRESSED IN HELA, SIGNAL = 0.88; SWISSPROT HIT: P52583, EVALUE 1.00e-06; NT HIT: gi16157781, EVALUE 0.00e+00; EST_HUMAN HIT: BF577176.1, EVALUE 1.00e-129
tgggctgagctacaaagtctgcctacagtggatccaaacaactttatagtaactgtgaattctactttctatccctcaatgctttttgctcctaatgacaactttttttaaataatctaggcccaccatcaattgatctaaaagaattcatggaggttgaagaaggaaccaatgttaacattgtggccaaaattaaaggtgtgccattcccgacactaacctggtttaaagctcctccaaagaagcctgataacaaagaacctgttctctatgacacccatgtcaacaaactggtggtagatgatacttgcactttagttattccgcagtctcgcaggagtgacactggcttatataccatcacagctgtaaataatctgggaacagcatcaaaggagatgagactgaatgtcctgggtaaagactgcatggtttggttaaaattacttgtttttctgttcataaataacatttggctttaaaatcatctgagtgataaagggttccttctttaaaccattttaggtcgtcctggccctccagtgggacccataaaa

SEQ ID NO: 3864 - DNA, 590 bp, Homo sapiens
  MAP TO CHR19.1; EXPRESSED IN BONE MARROW, SIGNAL = 3.6; EXPRESSED IN PLACENTA, SIGNAL = 4.5; EXPRESSED IN HELA, SIGNAL = 6.1; EXPRESSED IN FETAL LIVER, SIGNAL = 5.5; EXPRESSED IN LUNG, SIGNAL = 2.7; EXPRESSED IN HEART, SIGNAL = 5.4; SWISSPROT HIT: P18887, EVALUE 6.00e-19; NT HIT: AJ011712.1, EVALUE 1.00e-38; EST_HUMAN HIT: AL578409.1, EVALUE 2.00e-69
ttgtctcctgggaagactggcagctctcccagtatggcacagacccaggcatctcatgcccccagcctcaactgccctccagatccagtcgtctgggcccccagcccctcctccctctgatccaggagtccaggccccagcccctcctccctcagacccaggagtccaggactcagcccttcctccctcagacacaggagtccagcccccagcccctcctccctcagacccagaagcccaggcccccagcccctcctccctcagacccaggagtccaggcccccagcccctcatccctcagacccaggagtccaggtccccaggctctcttccctcagactcaggagtccaggccccagcccctcctccctcagactcaggagcccaggccgcaggccctcctccctcagactcaggagcccaggccccagcccctcctccctcagagtctgacctgactgtaccccctcaatgtctatatcttcctggagcactggtgaggctgctttggtctcttcaggggttgggggcttctggggtgagctgggtccagctgcctgagtgggcttggttttggtctggggttgcta

SEQ ID NO: 3865 - DNA, 541 bp, Homo sapiens
  MAP TO CHRX.1; EXPRESSED IN LUNG, SIGNAL = 0.84; EXPRESSED IN HELA, SIGNAL = 3.5; EXPRESSED IN BONE MARROW, SIGNAL = 0.87; EXPRESSED IN PLACENTA, SIGNAL = 2.2; EXPRESSED IN FETAL LIVER, SIGNAL = 3.1; SWISSPROT HIT: P51805, EVALUE 1.00e-31; NT HIT: L44140.1, EVALUE 0.00e+00; EST_HUMAN HIT: BI918234.1, EVALUE 1.00e-104
aacatggccaactccttcaccttcacccgctccctcagccgctacggtaggtgtcctcagtgtggtggccatgtgcccttcgagggaacccccacttccaagtgccatcgattctgtagagtgtagacggagggtcggccagcgagggcagatgggtccccacatgctgctgagctcccgggagagtggggcaggggccaggtggtggcctaagggtcacatgcattctctgctccagagagcttgctccgcacggccagcagccctgatagcctccgctcacgggcacccatgattacgcctgaccaggagacaggcaccaaattgtggcacctggtgaaaaaccacgaccatgccgaccatcgcgagggggaccgtggcagcaagatggtctccgagatctacctgacacggctgctggccaccaaggtatgggcctgcctctcgccaccttggcctccgcccagaggttgtcccggccttacaggggaggggccatggatcatttgcttccagtgggcctttcttcgggtctttgctg

SEQ ID NO: 3866 - DNA, 580 bp, Homo sapiens
  MAP TO CHR12.1; EXPRESSED IN ADULT LIVER, SIGNAL = 1.7; EXPRESSED IN BONE MARROW, SIGNAL = 1.7; EXPRESSED IN LUNG, SIGNAL =   1; EXPRESSED IN HELA, SIGNAL =   1; EXPRESSED IN HEART, SIGNAL = 1.2; SWISSPROT HIT: P11680, EVALUE 1.40e+00; NT HIT: gi14765036, EVALUE 8.60e+00
agcacaatgggtctggtttctaccctcctagagattacagtccagtgggagagactgacagtaaacatattaatatgttacagttgggccaagtccacaaaggatagggtatgataacaggtatgatgggcggttccctagggagaagtttccctagggagtgacagtcacccagagtgctgatgggtggaggtcttccttgccagccccctgctaagctttcatcctggacattcctgcattcctctgcactgtccctttaagaggagcatctcttccctgagcaaaggtggttcgggcacacagcctgagcctgccaaggttgtgggccataaatcaatgctggcactcccttggcagtgggctctcctctgagctgcccagatggcaggcaagcctggggctccaggggcagccaggcactcaggaggggggaggtgggaaaggtggggacacagttgggccccaggctcctgatggcagctgcccacttctgtctaagggccctaggccagggaaaatgccaaagtccttctattctagtcccacgtaccttctgactcccaagtcagtctggcat

SEQ ID NO: 3867 - DNA, 598 bp, Homo sapiens
  MAP TO CHR19.1; EXPRESSED IN LUNG, SIGNAL = 1.6; EXPRESSED IN HELA, SIGNAL = 0.93; EXPRESSED IN HEART, SIGNAL = 1.2; EXPRESSED IN ADULT LIVER, SIGNAL = 0.51; EXPRESSED IN BONE MARROW, SIGNAL = 0.97; EST_HUMAN HIT: BF112208.1, EVALUE 0.00e+00; SWISSPROT HIT: Q15653, EVALUE 1.00e-36; NT HIT: gi14756987, EVALUE 0.00e+00
aaagatgtggagatggtccggctgctccgagatgctggagctgaccttgacaaaccggtgagccccaacctcggggaagatgccgtcggcgggagggggcttgtcccctcttcgggccctctgacctttctgttgcacccccacaggagcccacgtgcggccggagcccccttcatttggcagtggaggcccaggcagccgatgtgctggagcttctcctgagggcaggcgcgaaccctgctgcccgcatgtacggtggccgcaccccactcggcagtgccatgctccggcccaaccccatcctcgcccgcctcctccgtgcacacggagcccctgagcccgagggcgaggacgagaaatccggcccctgcagcagcagtagcgacagcgacagcggagacgagggcgtgagtcaggaggagagacagggcagcccagctggggggtcaggatagaccggcaggcaagaagcccaagaagataattaggcaccgaccttgggctgctgttagagaactcaggcagcagcgccagtgacacggggcactagtcaggagagacctggacaggggtggtgggaagagcttgggcagaagtg

SEQ ID NO: 3868 - DNA, 545 bp, Homo sapiens
  MAP TO CHR3.1; EXPRESSED IN HEART, SIGNAL = 1.2; EXPRESSED IN BONE MARROW, SIGNAL = 0.64; EXPRESSED IN LUNG, SIGNAL = 1.3; EXPRESSED IN HELA, SIGNAL = 0.41; EST_HUMAN HIT: BF926439.1, EVALUE 2.00e-19; SWISSPROT HIT: P49199, EVALUE 3.00e+00; NT HIT: gi14731590, EVALUE 2.00e-16
attccagggtttttatgggcttcagaagggaggaagtgcatgctgattagtccatgggtggccatgggcaagcctggaaaaagcaccgtaagttctcactctgagccatggactccacctggaactgacagcctggaccccagatttcaagccatccctggcttgaaggtctggctttaccggggacctgccccttttcttgtctgcctcctgtcatcattaatcatgttgtccaggcacccaggctgtttgtgctgaggggtgcattcaggcctacactgagcttccctcagggcccccttggccttcctcccatgttcattggtgatcaaagtccagagggggctgaggtgggagggggctggcatttcagcactgccccaagtgcaagcacaccttgccaggttgcaacagcacccaagcttggcctcaacttggctccgaaatcagagtaggcactgggggtggggagaggccaggcgtggggagcaggcacttccaagcccgtgagtgaagggggcttcacagtcttcaagagcccaagg

SEQ ID NO: 3869 - DNA, 596 bp, Homo sapiens
  MAP TO CHR19.1; EXPRESSED IN BONE MARROW, SIGNAL = 1.2; EXPRESSED IN ADULT LIVER, SIGNAL = 1.4; EXPRESSED IN PLACENTA, SIGNAL = 1.8; EXPRESSED IN FETAL LIVER, SIGNAL = 1.7; EXPRESSED IN LUNG, SIGNAL = 1.1; EXPRESSED IN HELA, SIGNAL = 1.7; EXPRESSED IN HEART, SIGNAL = 1.1; SWISSPROT HIT: Q9JHD2, EVALUE 3.40e-02; EST_HUMAN HIT: BE902938.1, EVALUE 1.00e-118; NT HIT: gi14786907, EVALUE 1.00e-120
tcacccccaaagagaatgtccccatctccttactagttcccctcagggcacaggccctcccgcctcagattcaggatgccaccaccctcagttactgacctgcccctctctccccgtgcagatggggggacagcaggcacccccagggctggggcccattctggaggaccaagccaggccctcacagaatctggtgaggacagggctggcggggtcggggctgggttggggaggccccaaggctgcgctctgtgcctgcagaaggggcgtgaggccctgcccatctccctcacccctgtgtctcttcccaccagctccagctccgcccaccgcagccccagcctcagggtaccgtaggggcctctggggccacggggcagccccagccccaaggtactgcccagcccccgccaggtgcccctcaaggccctcctggagcagcttctggcccaccccctcctggacccatccttcggccccagaaccctggggccaaccctcagctgcgaagcctcctcctcaacccaccaccggtgagatgttggggtggggtagcgagagttccagatcctggccctggtggttctggtcctgtt

SEQ ID NO: 3870 - DNA, 569 bp, Homo sapiens
  MAP TO CHR12.1; EXPRESSED IN HEART, SIGNAL = 1.8; EXPRESSED IN PLACENTA, SIGNAL = 1.2; EXPRESSED IN FETAL LIVER, SIGNAL = 1.1; EXPRESSED IN LUNG, SIGNAL = 1.8; EXPRESSED IN HELA, SIGNAL = 1.4; SWISSPROT HIT: P34657, EVALUE 4.00e-25; NT HIT: gi14769150, EVALUE 0.00e+00; EST_HUMAN HIT: BI754142.1, EVALUE 0.00e+00
acagctccagtgtgacctcctccagggggatgatgtgctggctgcggtacttgcgcttgttgagcacgatgctgccatacaccaggatgtcgttaaagaggaagaagatgcgcggcttggccttcttgcggcactctttggtcagcacgccctcgcccagcagcactcggcctggcagcgccagcggctgccccgaggccccgaagcagctctccactgccgcgatgcgctggctgttgatctccgtgttggccaagtggtccaccatcgtctccagctggcggctgcaggaggagacagacaaggagtatgtccaggctcaggcatgggggtgtcagaaccacgctgcccacccccaactgactaacccaccatgccaggcagcccactgactacgcacagtaacccgcaggcctgcccagcactgagaagcatcacctcggaagctgacccttagacgggagtacagggaactacggggagggaagggggatttcccagtaaaggggatgtggaggccagacagggatgggaaggcagtgataaagtgtgctacttaggccaggtgc

SEQ ID NO: 3871 - DNA, 562 bp, Homo sapiens
  MAP TO CHR1.1; EXPRESSED IN BONE MARROW, SIGNAL = 3.1; EXPRESSED IN HEART, SIGNAL = 1.8; EXPRESSED IN ADULT LIVER, SIGNAL = 2.9; EXPRESSED IN PLACENTA, SIGNAL = 3.6; EXPRESSED IN FETAL LIVER, SIGNAL = 2.8; EXPRESSED IN LUNG, SIGNAL = 1.3; EXPRESSED IN HELA, SIGNAL = 4.7; EST_HUMAN HIT: AA984658.1, EVALUE 1.00e-106; SWISSPROT HIT: P24798, EVALUE 9.00e-34; NT HIT: J05096.1, EVALUE 0.00e+00
aatcctatccaccccctctggagcacccaatcaccagactgatcttcggtggtgtcagcctcatggatttggttgtcgaaccacatgtgggcgacggtcatgcggttctgggtgagggtgcccgtcttgtccgagcagatggtggacgtggagcccagcgtctccaccgcctccaggttcttcaccaggcagttcttccgtgccatgcgcttggctgtcagggtcaggcacacctggtagagaaagaggagaataaaaaaggttaaggctgaagccggagatggccataaccttaccctagaccgtggctccattcctcctcccctgattctactccactaacttgaatgggtgggacttagctgtaaataatgaatgttcaattttagatgtgttgagatcatgagtatctgttaagatgaaatgcccattagggggtttaagacgtttgactagagctccagagagggccagagcagagctgagcatagggatgtctgagtcatcaacacagaagggacactgcaaactgggaggagattggctcttgctcagggtgtag

SEQ ID NO: 3872 - DNA, 540 bp, Homo sapiens
  MAP TO CHR1.1; EXPRESSED IN FETAL LIVER, SIGNAL = 2.5; EXPRESSED IN LUNG, SIGNAL = 1.8; EXPRESSED IN HELA, SIGNAL = 2.3; EXPRESSED IN ADULT LIVER, SIGNAL = 3.6; EXPRESSED IN HEART, SIGNAL = 2.3; EST_HUMAN HIT: BG831108.1, EVALUE 2.00e-72; SWISSPROT HIT: P48778, EVALUE 4.00e-16; NT HIT: gi14764748, EVALUE 0.00e+00
gacccaggtggaagctgaggctcacgctggggcccgcatgcccggccttgcccacatcccgcacctgcccacctaggccgtcgcaggccagcgactcacagtccttgggcctcttctcctcagctgtgaagatgattgcgcccccgggccgctctgggtgcgggaaggggtagccgttctccttgagctggtcctgggtgagcaggtactccctgaggcggctgtacagggcagcccctgtggacaggcacagtggtcagcccctgcctgggatggcccacggggcggtagacaccaccgggaaaggcggctgggccggcaggggcccacgaagcaccgtgtggcacagcaggggctgggccggcagaggcccacgaagcaccgtgtggcagagcaggggcagggccttacctttcaggtcctccacccgggggctgcttggacggctgagcgagaagctggtcttggcggccaacctgccccccaacaccacctcgtgggacacaaccctgcggccactggtttctggaaggaagggag

SEQ ID NO: 3873 - DNA, 500 bp, Homo sapiens
  MAP TO CHR19.1; EXPRESSED IN ADULT LIVER, SIGNAL = 4.4; EXPRESSED IN BONE MARROW, SIGNAL = 4.2; EXPRESSED IN PLACENTA, SIGNAL = 6.1; EXPRESSED IN FETAL LIVER, SIGNAL = 4.6; EXPRESSED IN LUNG, SIGNAL = 3.1; EXPRESSED IN HELA, SIGNAL = 7.9; EXPRESSED IN HEART, SIGNAL = 1.9; EST_HUMAN HIT: BG180722.1, EVALUE 0.00e+00; NT HIT: gi4506072, EVALUE 0.00e+00; SWISSPROT HIT: Q16512, EVALUE 1.00e-10
tgtggctgtatgcacctctctgggtgttggtggctacgggggtcatggcatgcatctccctgggggtccgtggagatgggttaacctggctctggagaccatgggtgagccagtgagcagtggaatccctggagtcccgcatccccagaggcatcccagctcaccgtgggtggccgccgggtcgggaagcaccacgtgggcgtgcagctcctgcagctgctggtgcagcaggtcgaggcggcgcgaggagccccgcagcagcagctctacggggcccaggctgcggcccaggtcagtggtggcccgccgcaggttctcagcaccctccttcagcttcagctccttgcggatttcccgccgcagccgctcccgctccagctccagctgctgctgtaccccgggggccgccaggtctgccccggccaggcccagctgctctagcagggaccagctgcgaggctcactctgcggaggacagaacagggtcagtggagctagga

SEQ ID NO: 3874 - DNA, 518 bp, Homo sapiens
  MAP TO AC011435.1; EXPRESSED IN FETAL LIVER, SIGNAL = 0.71; EXPRESSED IN LUNG, SIGNAL = 1.1; EXPRESSED IN HELA, SIGNAL = 1.3; EXPRESSED IN HEART, SIGNAL = 0.8; EXPRESSED IN BONE MARROW, SIGNAL = 0.83; NT HIT: gi7706136, EVALUE 1.00e-116; EST_HUMAN HIT: AW978157.1, EVALUE 1.00e-116
cacgtggaatcaagagacccatggtactattctttgtgtttgttttatagagccatttcctgcttttaagtcttggcaggaggactctgagtctggagaagctcagctgtctccacaagctggaagaatgaatcatcaccccttggaagaggactgtcctccagtattatcacaccgcagtttagattttggtcaaagccagcgtttcctacatgatccagaaaagttggattcctcatctaaagcactgtcttttactaggtatatgatttttatgtacttacaagaggcaattcctattatgtacccaagtcttttgagagatttagtcttccagcctgggcttcaatagtgaaactccatctcaaaaaaaaaaaaaaaaaaaagagagagattgagtcttctagacatagaattcagagctttctcactgattttatagagcacatttttgtaagttttggttttttttgaccctgctgagttcagtgaggtgtagcgtttgaagtttgctctca

SEQ ID NO: 3875 - DNA, 599 bp, Homo sapiens
  MAP TO CHR17.1; EXPRESSED IN FETAL LIVER, SIGNAL = 0.94; EXPRESSED IN LUNG, SIGNAL = 1.6; EXPRESSED IN HELA, SIGNAL = 0.94; EXPRESSED IN HEART, SIGNAL = 1.4; NT HIT: M12036.1, EVALUE 0.00e+00; SWISSPROT HIT: P04626, EVALUE 1.00e-30; EST_HUMAN HIT: BF757265.1, EVALUE 0.00e+00
ctctcagcgtacccttgtccccaggaagcatacgtgatggctggtgtgggctccccatatgtctcccgccttctgggcatctgcctgacatccacggtgcagctggtgacacagcttatgccctatggctgcctcttagaccatgtccgggaaaaccgcggacgcctgggctcccaggacctgctgaactggtgtatgcagattgccaaggtatgcacctgggctctttgcaggtctctccggagcaaacccctatgtccacaaggggctaggatggggactcttgctgggcatgtggccaggcccaggccctcccagaaggtctacatgggtgcttcccattccaggggatgagctacctggaggatgtgcggctcgtacacagggacttggccgctcggaacgtgctggtcaagagtcccaaccatgtcaaaattacagacttcgggctggctcggctgctggacattgacgagacagagtaccatgcagatgggggcaaggttaggtgaaggaccaaggagcagaggaggctgggtggagtggtgtctagcccatgggagaactctgagtggccacctccccacaacacacagttg

SEQ ID NO: 3876 - DNA, 560 bp, Homo sapiens
  MAP TO CHR17.1; EXPRESSED IN HEART, SIGNAL = 0.66; EXPRESSED IN BONE MARROW, SIGNAL = 0.51; EXPRESSED IN HELA, SIGNAL =   1; SWISSPROT HIT: P06459, EVALUE 7.10e-02; EST_HUMAN HIT: AA535360.1, EVALUE 1.00e-101
taggccagaccagtcaaagccacctccaacctccgcttccaccagtgcccctggtgtccaagatctgccctagtgacacctacaaagtgtggaagagcggccagaacctgagggtagacaccacactcctgggctttgaccacatgacctggcagcgagggaaccgcagctttgtcttcaggggccaaggtcaggcaggcaggaagtggggcagggtggggacgatgggaggcagccccaggccacccctgatccccctgtgctgttccgtgtctggcagacacaagcgccgtggtcatggagattgaccacgaccgccgggtggtgtacacagagactctggcactggctgggcaggaccgggagctgctgctggctgctgctcagcccactgaggaacaggtgctgagccggcttaccgcgcccgtcgtcaccactcagcttgacaccaagaatatctcctttgagaggtgggtggacatggccttggtcacccttgagccagcccggtggggtgcctgcctcacctggaccactctgcttccccaggaacaagactg

SEQ ID NO: 3877 - DNA, 598 bp, Homo sapiens
  MAP TO CHR2.1; EXPRESSED IN PLACENTA, SIGNAL =  56; EXPRESSED IN LUNG, SIGNAL =  19; EXPRESSED IN HELA, SIGNAL =  38; EST_HUMAN HIT: AA640068.1, EVALUE 0.00e+00; SWISSPROT HIT: P46250, EVALUE 2.00e+00; NT HIT: M92383.1, EVALUE 0.00e+00
ctttgcggcaggaactctactccatcgaggggctttgctgcagtggcactgcccacgcatactcaactaaaagactcagaccacgccagccatgccacgaggtgtgttttattttcattattcatacaaataattttctataatatcccggggcaaaccggagaatttggcagtccgattgggggggggtcccttcagagacccacaggccggtggcatcggcgcggagtgcccaggttcacagtgcagcttgtggctcgtgtccatcttgcaggtggctcttcctccacatcacgactggggtctcgaagaggacgggggtaggaaatcctccaggatcttaggaaatttcactccgcttctcctgctcaatggctgtggagagcgggaagcgggcgctggaggggagctgcaacccccacccgcaaccgaggtgcttcccggtgtgggcgaggcacccacgaggtgtggggatttagaaggaagcttggggctggggagaaacaaggcgctttgtgaaactgaaagagtggccggggccgcccacaccggggacaacggcggggtggggggtggaggagtgggtttgcaaggaaga

SEQ ID NO: 3878 - DNA, 565 bp, Homo sapiens
  MAP TO CHR4.1; EXPRESSED IN BONE MARROW, SIGNAL = 4.3; EXPRESSED IN PLACENTA, SIGNAL =   2; EXPRESSED IN LUNG, SIGNAL =   5; EXPRESSED IN HELA, SIGNAL = 9.9; NT HIT: X02153.1, EVALUE 0.00e+00; EST_HUMAN HIT: AU120068.1, EVALUE 0.00e+00; SWISSPROT HIT: P00338, EVALUE 1.00e-55
agccacttccaataacacggcttttgggaaagccacttatcttccaagccacacaggtcaagatatccactggatttaaaacaataagcaacttgcagttgggctgtattttacaacattagaaatgatgaatttaaagatgtttacattacactggacccaattaagagagctttctccttcttgctgatgtgccccagctgtgataatgaccagcttggaatttgcagttacattatagtctttgccagagacaatctttggcattccaaggaaaaggctgccatgttggagattcatcatctctcccttcaatttgtcctccatgacatcaacaagagcaagttcatctgccaagtccttcactaagatactgatggcacaggccatgtgaacagcaccatcctcaacaactataatcatattctggggggtctgttcttcctttagaagattatgaatcagctgatccttgagaattgccatattggacttcaaaccaaaaggaatcgggaatgcacatcgggtggccatcgggggcacatggcaaggagatctggacttg

SEQ ID NO: 3879 - DNA, 593 bp, Homo sapiens
  MAP TO CHR5.1; EXPRESSED IN FETAL LIVER, SIGNAL = 1.1; EXPRESSED IN LUNG, SIGNAL = 1.6; EXPRESSED IN HELA, SIGNAL = 1.2; EXPRESSED IN HEART, SIGNAL = 1.3; EXPRESSED IN BONE MARROW, SIGNAL =   1; SWISSPROT HIT: P49590, EVALUE 1.00e-41; EST_HUMAN HIT: BE292784.1, EVALUE 0.00e+00; NT HIT: gi16171280, EVALUE 0.00e+00
cccaaagctctgcaataagcttcaaccgttcttggagaaagttcttctgtggtgtggccacaaacacttgagtctctgtagtccgcaccttctcacctttggtctaataagagagaagaaagtaaaactaataaaaacctcctttccaccagcaattccaaaaatcaagacaaaaagaatcatcagaaaaccactccaactacacctccagaaacaggagggtttttaggtctccagccccacctcacacctatctaggacctaccttcatcctctgctccacaatgtagaagattcgctcaaccccaatgctgagtcccacacatggcaccttgtggcccttggggtcaaacatgcccaccagcccatcatagcgcccaccagcagccacactgcccacattcaggggctcctccccagcctgagttggggtctgcagcagcactgcttcatagatcactcctgtatagtagtctaggccccgagccaggctgaggtcaaaggagatctgtggggacaagattacagtcagtcccaaactagactcgggaccctgagagccctagagctcagcaggaggtccatttgcaatt

SEQ ID NO: 3880 - DNA, 533 bp, Homo sapiens
  MAP TO CHR7.1; EXPRESSED IN HELA, SIGNAL = 1.2; EXPRESSED IN LUNG, SIGNAL = 1.2; EXPRESSED IN ADULT LIVER, SIGNAL = 2.1; EXPRESSED IN HEART, SIGNAL = 1.1; EXPRESSED IN BONE MARROW, SIGNAL = 1.9; EXPRESSED IN PLACENTA, SIGNAL = 1.4; SWISSPROT HIT: P46743, EVALUE 3.80e+00; EST_HUMAN HIT: AV748133.1, EVALUE 4.80e-02; NT HIT: D50525.1, EVALUE 3.20e-02
tccatcctcacagacactgctcaccagtgggcacttgcaggaccagcacttacttcccctcatctttctttatttttcccaagacttttactactgctctgtcatctgctttgtttcccttttctatttccaaaccctaattccctcattttcttattatccccaattggagtgactgatagtttgtgtatattaaaatttgaagtacttgctgagaagggatatctgctgaattacttgaattttacataaggagaacctcctgcatgaggaagcataattatatcaacttatgaatcaaatgaacattttatagaccagaggaaaatagctactgatttaattaatggtacttctgttcttcaggttaataaattcgttacgcctttctacttttattagaggagttactttgtttctttagtaaacatttattgtgttgtcatgtttacacagctctatatcaggtaggtgcattgagggatagcaaaggagtaaaatgactcagctcttgcctgccttgaaagactttg

SEQ ID NO: 3881 - DNA, 557 bp, Homo sapiens
  MAP TO CHR20.1; EXPRESSED IN BONE MARROW, SIGNAL = 1.8; EXPRESSED IN HEART, SIGNAL = 1.6; EXPRESSED IN PLACENTA, SIGNAL =   3; EXPRESSED IN FETAL LIVER, SIGNAL = 2.2; EXPRESSED IN LUNG, SIGNAL =   2; EXPRESSED IN HELA, SIGNAL =   7; SWISSPROT HIT: P48553, EVALUE 2.00e-33; EST_HUMAN HIT: BI830148.1, EVALUE 2.00e-97; NT HIT: AB001517.1, EVALUE 0.00e+00
gaagttagacccaagctgcgccgacactcacctggggacgggcaaagccacacggagccaggctgaacgtgcagaatgccacccgaggctgcccctttacagagcactctgtgcacagaggcttggctttcagagcaggtgcctaagattctaacagcggatgaggcttctagtaccagtttctaccggcactgaaaacacgccgctagttctccaacctgctcagtcataagtttatcacctctcgcacaaagtgctcacctgctcaaatactgaaggtaaactttttcttccaaagtccttaccagcgtccagttgggaggagtgtgcagaatgatgggggaggtacttgaacagcctgacgtcgggcagggggagatacccggcgaagagcggcatcacttccatgtggaccctgtgagtggcccgagcagccactggcatggagatgacaccgcagcttttcccacacactgcccagttgctactgttgtcgacaactgaaacgagaggaagcgatgtgtcatccaggacgggccttccagtactcaggcgag

SEQ ID NO: 3882 - DNA, 529 bp, Homo sapiens
  MAP TO CHR22.1; EXPRESSED IN HEART, SIGNAL = 2.2; EXPRESSED IN BONE MARROW, SIGNAL = 2.8; EXPRESSED IN PLACENTA, SIGNAL = 2.6; EXPRESSED IN FETAL LIVER, SIGNAL = 3.2; EXPRESSED IN HELA, SIGNAL = 3.4; EXPRESSED IN LUNG, SIGNAL = 1.7; NT HIT: gi13994235, EVALUE 0.00e+00; SWISSPROT HIT: Q06853, EVALUE 9.70e-01; EST_HUMAN HIT: BE206767.1, EVALUE 0.00e+00
cctttcttgggtgagtgagcatttctacctccgtgctttcaacttttgttgcatcatgcactgatgctgcttgcaaaaaatgaagacaaaatactcagaagttgcatttgccatggccactggctccagctggggtttggtgccagtgttattacagggtctgcggagtatcagccattggcttggcctctctctgttcctccctctgcacctagaactcttatccttcctgtggtttggtgccgactgggtcggatctgggcttagagtaatagctttggtgggtttcctggatggatgtgaagttgggcctcccatgggcccaagggagtaggaagccccattccccacctgtccttcctctaggaagtgtagatcagaaagtgaggtggtgacctcccacctctggtctggttaagagtctcactagggccaaggcaggctgcagaactttccctcttcctctcattgagggtgatgacaagagacatccggggactgtgcacttacagtcggtgtggaatgtcac

SEQ ID NO: 3883 - DNA, 551 bp, Homo sapiens
  MAP TO CHR12.1; EXPRESSED IN FETAL LIVER, SIGNAL =   6; EXPRESSED IN LUNG, SIGNAL = 3.3; EXPRESSED IN HELA, SIGNAL = 7.4; EXPRESSED IN HEART, SIGNAL = 3.3; EXPRESSED IN BONE MARROW, SIGNAL = 6.1; EST_HUMAN HIT: AW245736.1, EVALUE 1.00e-108; NT HIT: X51956.1, EVALUE 0.00e+00; SWISSPROT HIT: P09104, EVALUE 1.00e-32
ttttctttccctcctcctccttgcccatccctcctgcttgtactataatctcactgtattctgtccccagccttggagctggtgaaggaagccatcgacaaggctggctacacggaaaagatcgttattggcatggatgttgctgcctcagagttttatcgtgatggcaaatatgacttggacttcaagtctcccactgatccttcccgatacatcactggggaccagctgggggcactctaccaggactttgtcagggactatcctggtgagaggaagtggtgtgagggggaggtctgggggcaggcagggacgtgtcccagcaactctggaccttatggggtgctgactcaggcaccaggtgggggtgtcctaagaagaacctgagaaccagggagagggtgcaggagccacctgcaaagactgggctttgtatgtagtgtaaaaatgcaggtacccgtgaccaatctgttctgtctcagatcctgattaaagtcatgggttctgaaaactactgggtcatggggaaggctctggaaggaaccagggat

SEQ ID NO: 3884 - DNA, 585 bp, Homo sapiens
  MAP TO CHR12.1; EXPRESSED IN HELA, SIGNAL = 1.5; EXPRESSED IN HEART, SIGNAL = 0.63; EXPRESSED IN ADULT LIVER, SIGNAL = 0.71; EXPRESSED IN BONE MARROW, SIGNAL = 0.97; EXPRESSED IN FETAL LIVER, SIGNAL = 0.83; EXPRESSED IN LUNG, SIGNAL = 0.63; NT HIT: gi14761659, EVALUE 1.00e-124; SWISSPROT HIT: P38898, EVALUE 2.50e+00; EST_HUMAN HIT: BE925891.1, EVALUE 2.00e-44
tgtcatcctgccactgagagagctgaataccttgcctcagagccacttagacgagacagcagtgcttaagggtaactgagtggcaatgtagcccccacccaacatcccactcccagagtcacgctccccctactctgccgctccctaagattccccaagctaaccttcacccttgagcagctcatcggtgtccaggtccccatccttcttgtcatcagggccaagggcatctgagggctcagaaccctccaatcctgcctcgcctgggaggccaagccgtcctcgccgttggcgccgcttgtgcagtggtgacatggtcaggttacgcagcaaggccatgccagtttctgtcagccacacaccttcgaagcgaaagtactggggctctgcataagaggaaagagtatgtgatccctggatggaagccccagggaaaccagaactgcaagtttcaacctatgtccttagctgagacaaaggcagtgacaaaagtccagcttagggtctaaatgctgaggagaacaggccaccaaggggcactggctgaggcccgagttctctgtcagtgacccagggagattcaga

SEQ ID NO: 3885 - DNA, 547 bp, Homo sapiens
  MAP TO CHR1.1; EXPRESSED IN PLACENTA, SIGNAL = 2.1; EXPRESSED IN HELA, SIGNAL = 2.1; EXPRESSED IN HEART, SIGNAL = 0.84; EXPRESSED IN BONE MARROW, SIGNAL =   2; EXPRESSED IN ADULT LIVER, SIGNAL = 1.2; NT HIT: gi14777484, EVALUE 1.30e-01; SWISSPROT HIT: P31276, EVALUE 7.80e-01; EST_HUMAN HIT: BG389471.1, EVALUE 4.90e-02
ctttccacaatgccacacagcttctttgaggaagggctgatcacctcactgtctcctgtgtgtcctctactctcaggctctgcccttcccctccacttccccctactggtacacacgcacctctggcctggcacgggtcacggctgccatgtaacactgggctgggctccaggccagggtgaacccagccgggcagagaaagccctgggaatgagccaggccatcacctgggagtctccacagctcacaggacatggctgcaggcataagccctcccatgggtgccctctgcacagctctgagcaggagtgtctgatctggcagcgacctgctgtgcagggggcaaatgacatttaatttcctcttggtttccctatagtacagatgaaaggccgtcacctgcgtctgggtctggcggcacagctggaagtgttcccagacatgctactctggagagttcccaacagaaaccagaacacaggcagtgcagagggatgctccatggtccaggctgctggtgccatgttgctcaaatccctagtgccaa

SEQ ID NO: 3886 - DNA, 518 bp, Homo sapiens
  MAP TO CHR22.1; EXPRESSED IN BONE MARROW, SIGNAL = 4.4; EXPRESSED IN ADULT LIVER, SIGNAL = 7.7; EXPRESSED IN PLACENTA, SIGNAL =   5; EXPRESSED IN FETAL LIVER, SIGNAL = 4.4; EXPRESSED IN HELA, SIGNAL = 4.9; EXPRESSED IN LUNG, SIGNAL = 2.1; EXPRESSED IN HEART, SIGNAL = 2.7; SWISSPROT HIT: P54198, EVALUE 4.00e-12; EST_HUMAN HIT: BE543250.1, EVALUE 1.00e-45; NT HIT: X81844.1, EVALUE 9.00e-46
aacaacccagtgctttccagttcttgtttgtttttgctttgttctgtgtgccctgataagctggctgcagggagcatttctatgcagtgcccagagcactccatgagtgcctttttggcccctttctcacacaggtacatcggccccagcaccgtgttcggctccagtggtaagcttgccaatgtggagcagtggcggtgtgtctctatcctccggaatcattcaggcggtgagtgggactgcctgttggggtgggtgggcccctgacacctggctcagatcagcagcaccgccacgtcccctgtgggactgtttggtccttaaagcagccctatgtctgggctgtcccaccccatcacaatcagtcacaccctgcctgtcccttaagatctgtgcagtcaccgggtccactacctgtctccagctgcattcagtctccccactcttgccctcatggggtatatgtttatatctttaatgtagaacttcccacgttctgctgtttgtcctgctgaaca

SEQ ID NO: 3887 - DNA, 562 bp, Homo sapiens
  MAP TO CHR17.1; EXPRESSED IN PLACENTA, SIGNAL =  11; EXPRESSED IN FETAL LIVER, SIGNAL =   5; EXPRESSED IN LUNG, SIGNAL =   8; EXPRESSED IN HELA, SIGNAL =  10; EXPRESSED IN HEART, SIGNAL = 4.3; EXPRESSED IN ADULT LIVER, SIGNAL = 2.7; EST_HUMAN HIT: BI090633.1, EVALUE 2.00e-87; NT HIT: gi15313693, EVALUE 2.00e-87; SWISSPROT HIT: Q12933, EVALUE 2.00e-03
tccctacccccagatctacccagacccggagctggaagtacaagtattgggcctgcctatccgctgcatccacagtgaggagggctgccgctggagtgggccactacgtcatctacaggtgaggctctgatgtgagggctggcaccacctctcccttggcaggcactaattgcagccttcccaccagggccacctgaatacctgcagcttcaatgtcattccctgccctaatcgctgccccatgaagctgagccgccgtgatctacctgcacacttgcagcatgactgccccaagcggcgcctcaagtgcgagttttgtggctgtgacttcagtggggaggcctatgaggtgggtggggtctggctgaatgtggaggagggggtacctgatggcctaggcatctcttaactcagcacctctgacatttccagagccatgagggtatgtgcccccaggagagtgtctactgtgagaataagtgtggtgcccgcatgatgcggcggctgctggcccagcatgccacctctgagtgccccaagcgcactcagccctgcacctact

SEQ ID NO: 3888 - DNA, 541 bp, Homo sapiens
  MAP TO CHR16.1; EXPRESSED IN PLACENTA, SIGNAL = 1.2; EXPRESSED IN FETAL LIVER, SIGNAL = 1.1; EXPRESSED IN LUNG, SIGNAL = 1.7; EXPRESSED IN HELA, SIGNAL = 0.77; EXPRESSED IN HEART, SIGNAL = 1.2; EXPRESSED IN BONE MARROW, SIGNAL = 0.9; EXPRESSED IN ADULT LIVER, SIGNAL = 1.3; EST_HUMAN HIT: AA487448.1, EVALUE 0.00e+00; NT HIT: gi16196542, EVALUE 0.00e+00; SWISSPROT HIT: P77306, EVALUE 6.60e+00
aatgctctaacacggggttggtgtcacttctgagaagagcgaggtgagtggggatgctatacaagagggctgtacaaactgggcactggataggtagttcctttggtggtcaaggtggctctacctgtccttgagctctcgtgtcactcgcttggtgatccgtccacacatcaggccaatcaggaacaatatacagatgctcccactgatcacagagagaatgtagttcttagatggagacgtcattacttgcatggcaagatcagagaagccatctgctggggccacctagaatgacacaaggcaatgtgattctctgagagagcactgggctggtggcagtgctaggtctaacttatccctctcagttcctagtttaatttatgtcttttcttttggagagggagggcaggagataagaaaaatcaacacagagctacaactctttttcctgatcataaaactatacacacgtctactgcacaaaattagaaatacagaaagagacaaagtggtgcagtcacccacaattccatcacag

SEQ ID NO: 3889 - DNA, 538 bp, Homo sapiens
  MAP TO CHR19.1; EXPRESSED IN BONE MARROW, SIGNAL = 1.3; EXPRESSED IN ADULT LIVER, SIGNAL = 1.6; EXPRESSED IN PLACENTA, SIGNAL = 2.1; EXPRESSED IN FETAL LIVER, SIGNAL = 1.7; EXPRESSED IN LUNG, SIGNAL = 0.84; EXPRESSED IN HELA, SIGNAL = 3.4; EXPRESSED IN HEART, SIGNAL =   1; NT HIT: U28356.1, EVALUE 5.00e-04; EST_HUMAN HIT: AA349751.1, EVALUE 1.00e-101; SWISSPROT HIT: Q92523, EVALUE 2.00e-17
caacgccacccctagactacatccgccacctccatgacagccaacacgtggctgtcttccaccggggccgattcttccgcatggggacccactcccgaaacagcctgctttccccgagagccctggagcagcagtttcagagaatcctggatgatccctcaccggcctgcccccacgaggaacatctggcagctctgacagctgctcccaggtaagggtcaggggtcaggggtcaggggctctcagaggccgccagtgtcctgagactgtggaagggcagggtggggccaggtggcggctgggcaggatggactcaggcacatcccgggccctccaggggcacgtgggcccaggtgcggacatccctgaagacccaggcagcggaggccctggaggcggtggaaggggccgctttctttgtgtcactggatgctgagcccgcggggctcaccagggaggacccggcagcgtcgttggatgcctacgcccatgctctgctggccggccggggccatgatcggtgagtgagtcttgggat

SEQ ID NO: 3890 - DNA, 508 bp, Homo sapiens
  MAP TO CHR5.1; EXPRESSED IN ADULT LIVER, SIGNAL = 2.9; EXPRESSED IN HELA, SIGNAL = 2.1; EXPRESSED IN LUNG, SIGNAL = 1.6; EXPRESSED IN HEART, SIGNAL = 2.2; EXPRESSED IN BONE MARROW, SIGNAL = 1.8; NT HIT: AF111103.1, EVALUE 1.90e+00
ggtttggactaagtgtgcccgaaggttgtttgcatttgagggtttataattcctttagctgctacatacctttcctggcttatgcaggttctaaatacggattaactggtgagaacacagagctcacaaattgtctgagatctgctcttaccctctgaggcatcttgtgtggaaaggagatggaccctcagtttaaaagtggttgggcatcatcttttaaaaacacatgattgttagacgtgctgacagtgagtggctgaagccaggctgcctggtattaccccttggttcttcatgagtctgtcttctcctgggccatgagcataccccttctccggcattattccatttcctttcacaagtccttaagatgaaggaaaataaaaattttaggtgaacagagggttttctgacttttcagcagtgatcaatgtgggtgtcaaatagactgatttccaaaatatacgtaaggggaataagtagaaccgggatgttaggaggctgcaga

SEQ ID NO: 3891 - DNA, 585 bp, Homo sapiens
  MAP TO AC021705.4; EXPRESSED IN HELA, SIGNAL = 0.79; EXPRESSED IN FETAL LIVER, SIGNAL = 0.76; EXPRESSED IN LUNG, SIGNAL = 1.1; EXPRESSED IN HEART, SIGNAL = 1.1; EST_HUMAN HIT: AL539655.1, EVALUE 1.00e-86; NT HIT: gi14770788, EVALUE 4.00e-88; SWISSPROT HIT: P25439, EVALUE 7.00e-03
cacctgcagtttttgggaacggggcggtcacctgcagttttggggggaacggggcggtcacctgcagtttttggggaacggggcggtcacctgcagtttttggggaacggggcggtcacctgcagttttggggggaacggggtggtcacctgcagtttttggggaacggggcggtcacctgcagttttccgccaggtattgcacgaccttgtccagaactttctcgatgagcgccgtgcgtacccatacgtgtttcaaggcctgagggctgagggccggggccttcccgctggctgagccctgtctccgcagggcctcctggctgacccctgagggtttcctgcaaaggcggggagggctccaggagtgcagtggtctaggggtaaaccccagaatgctggcattgggagtggggcttggtaccccaagatgggagcacagagaactgactggggttgggaggtgaaggaggggtacagagccttgtgcccacaaggaaccaatcccctccctcaagctgatccctcacccagaggccctgcaaggaacaggcccaggatgccaactttccgatgggtgtcctag

SEQ ID NO: 3892 - DNA, 550 bp, Homo sapiens
  MAP TO CHR17.1; EXPRESSED IN HELA, SIGNAL = 6.9; EXPRESSED IN LUNG, SIGNAL = 2.5; EXPRESSED IN HEART, SIGNAL = 3.2; EXPRESSED IN BONE MARROW, SIGNAL = 5.5; EXPRESSED IN ADULT LIVER, SIGNAL = 7.5; EXPRESSED IN PLACENTA, SIGNAL =   6; EXPRESSED IN FETAL LIVER, SIGNAL = 8.1; NT HIT: M64933.1, EVALUE 2.10e+00; SWISSPROT HIT: P08353, EVALUE 1.50e-01
cctcaggagaggaggaaaggaagctgcatgtcatatatcatttctctccaaacaggcagtgtcctctctgcccaaagcaggggtgggggtggtcggcggccatgaactggtctctggaaggagcccctctggcccatatttcacagacaccccagacggagcctgctgtcaggagcgctgtctaatttcctcccgactgccggcccggatccccccaacaaagaggggcattgtgtcctgcccccacccctggcatctgctccacagagatccggcaggggatgcacagaggggatttgtgggatgaaggccccgcatcctgtgccacagcccccagaagggccacagattcttgagtagaaagagcctggtcctgactgaggggtccccccaggctcacgggcctcggccactccagtgtccccaccagcagtcttctcgagtaatagcttctcctcatgcctgtcagggaagaggtgtgtgaacgggagcagctgaggatgaaagggcatttgaaggggcccaggcctcccccaccctctcttagaag

SEQ ID NO: 3893 - DNA, 516 bp, Homo sapiens
  MAP TO CHR13.1; EXPRESSED IN BONE MARROW, SIGNAL = 0.62; EXPRESSED IN ADULT LIVER, SIGNAL = 0.61; EXPRESSED IN LUNG, SIGNAL =   1; EXPRESSED IN HELA, SIGNAL = 0.5; EXPRESSED IN HEART, SIGNAL = 0.84; EST_HUMAN HIT: BF748731.1, EVALUE 2.90e+00; NT HIT: gi12957487, EVALUE 2.00e-90; SWISSPROT HIT: P40468, EVALUE 7.00e-03
ctttgccaaatcccaaacaccaaatccttacaaaatcatggctgttgtacttgaactgatttaaaggattccattgctctgctcaatcactcccagatgctggaggcccccattacagggactttcctacccaatatttgataaaccacttatgttatcttcttagattccctgctgtaaagaagaaatttatggcggagctaaaagaattacggcacaaagagcagaacccatatgtggttcaaagcattatcagcttaataatgggcatgaaattctttcgaattaagatgtatccagtggaggattttgaggcctctcttcagtttatgcaggtaatgtcttaggcaggagagctaaggtgctctcaacttgagcacttcccttcctcaaaatgatgaacctggaacatgaaaagccaattacttgtcaatacggagaaacattctactgtctaaataattcatgaagtcctttgtaaccaaatagtacagttgcgggcacataatttcattt

SEQ ID NO: 3894 - DNA, 538 bp, Homo sapiens
  MAP TO CHR12.1; EXPRESSED IN HELA, SIGNAL =   1; EXPRESSED IN BONE MARROW, SIGNAL = 0.91; EXPRESSED IN HEART, SIGNAL = 0.73; EXPRESSED IN PLACENTA, SIGNAL = 1.2; EXPRESSED IN FETAL LIVER, SIGNAL =   1; EXPRESSED IN LUNG, SIGNAL = 0.78; NT HIT: gi14755546, EVALUE 1.00e-102; SWISSPROT HIT: Q12860, EVALUE 1.00e-32; EST_HUMAN HIT: BI520118.1, EVALUE 1.00e-102
gactttgattcgcttttggcatctttagtcattcctgccctgtatgctttactatattctaaggctgataaaagggtagatatcattaagaaacatttgaaaatatgatgatcagccaacaccaatggtaatagaaccagttgaagagaacttttcatagctgaagactctaaatcatggcaaaatataactcatcctgaatgtttgcagattcggtattgggctgcccatgacaaagaagaagctgcaaacagagttcaagtcaccagccaagagtactcggccaggctcgagaaccttctgccagacacccagtattttatagaagtcggggcctgcaatagtgcagggtgtggacctccaagtgacatgattgaggctttcaccaagaaagcacgtgagtctcacgttttgtttttagacttgtcaaaaactaccactggattcaatcatgatacgaatatatttgaaggaaatttcctacctagctacctgagcacatttttcaatatcctttacagccacacaagatttccct

SEQ ID NO: 3895 - DNA, 505 bp, Homo sapiens
  MAP TO CHR5.1; EXPRESSED IN HELA, SIGNAL = 0.64; EXPRESSED IN ADULT LIVER, SIGNAL = 1.6; EXPRESSED IN LUNG, SIGNAL = 0.88; EXPRESSED IN FETAL LIVER, SIGNAL = 0.74; SWISSPROT HIT: P13015, EVALUE 6.10e+00; EST_HUMAN HIT: AI927652.1, EVALUE 8.00e-81; NT HIT: gi15295718, EVALUE 8.00e-83
  unsure 454
accccttcagtctgcctatgtccatacacagataagggaagtgactgttgatcagatctgcgggcttactggagatattatttagggacagctcctggacaagaacgctctcccaaaccctgacacattctcctgagaggacccagcctggagctcacatcttcactgtcacttccactgaatgagtgttctggctccagccccttctcagggatgcttctctcctcctctggcatcagctcatccagccagaggagttcctgtggtgagaagaccctctccagggcctttcggacccccacaaggcccagcaactgcaggaatagaaacatggcccaagcctgtcagcaacagtagtaggaacattaacaatagtaacacttattgagcactttctatgtgctaggcattgtatatcagtttcactgaatgctagcacattcctatgaggtanatagaataaattattcccattgtacagggaaggaaactggaaaccccaagt

SEQ ID NO: 3896 - DNA, 541 bp, Homo sapiens
  MAP TO CHR12.1; EXPRESSED IN HELA, SIGNAL = 0.95; EXPRESSED IN BONE MARROW, SIGNAL = 0.88; EXPRESSED IN HEART, SIGNAL = 0.95; EXPRESSED IN ADULT LIVER, SIGNAL = 0.86; EXPRESSED IN FETAL LIVER, SIGNAL = 0.86; EXPRESSED IN LUNG, SIGNAL = 0.92; SWISSPROT HIT: P17955, EVALUE 2.00e-01; EST_HUMAN HIT: H84977.1, EVALUE 6.00e-57; NT HIT: gi16163752, EVALUE 0.00e+00
tccacctgccagaataaagcctaggctctctgtcaggtggcactgctcactaggagcccggttctgtggtgccattccatctccaagtccctggccacccgcctgactcacctccaagtccttctcaagctccagtccagcctccatcagattgtgctcaaattcctcccgctgctccttcctctcctcctccagggcatcgagcggtcccagctcaatgtcacctgggcccccagcatgaggctccttgcctgtctccccattggagacgatagccagcgagtggccagggaagccttgggccaggtgcaccccgcgtttccggtagtggtaggcaagtacatagtcgaccttcctctgactgtcatggaagtgcatgcggctaagacgggcctccaaggacacaggctcattggcatccagatagttgttgatgacctggccagagagagaggagaggcagggcaaggtctggtgagtaaggggtgagaaacagaggaggctgatctatgctctgggctcagggaaacggactcagaag

SEQ ID NO: 3897 - DNA, 507 bp, Homo sapiens
  MAP TO CHR4.1; EXPRESSED IN HELA, SIGNAL = 0.88; EXPRESSED IN LUNG, SIGNAL = 0.76; EXPRESSED IN BONE MARROW, SIGNAL = 0.66; EXPRESSED IN FETAL LIVER, SIGNAL = 0.61; SWISSPROT HIT: P42858, EVALUE 9.00e-16; EST_HUMAN HIT: BE378835.1, EVALUE 4.00e-98; NT HIT: L27357.1, EVALUE 1.00e-128
ctagggttggaaacgagcagcgcagctccagagtccacacctctaactctcggttctgccgcttctcttccaaattaatcggttctttgaatgtcagtcattcacatgcagggcctagagtaaaccctgtgctcctacctggacaagctgctctgcagaaggagagacttccatttctttccttgtcactccgaagctgcctttcaggcttgtgtccttgacctgctgctgcagcaagggcaccaaatacctcagggtgagcagcacgccaagaatcagcagagtggagtgttcatcctcgacaggaacgagtaagcctgtgggggtggaagcaagacatcttaacatctgactcactgtttggagattcccggcttaatctgttaaaaaagaagagatcctgagagatcaagatggcacaaacatgatcatgaacgagtacgccatgaggcccactgggaatggctacacacccacatccctagctcagcaaggtcctttccagag

SEQ ID NO: 3898 - DNA, 511 bp, Homo sapiens
  MAP TO CHR5.1; EXPRESSED IN FETAL LIVER, SIGNAL = 1.1; EXPRESSED IN LUNG, SIGNAL = 1.4; EXPRESSED IN HELA, SIGNAL = 0.8; EXPRESSED IN BONE MARROW, SIGNAL = 0.72; EXPRESSED IN ADULT LIVER, SIGNAL = 0.98; NT HIT: gi14861871, EVALUE 0.00e+00; SWISSPROT HIT: Q9Y5E8, EVALUE 1.90e-01; EST_HUMAN HIT: AI805761.1, EVALUE 0.00e+00
cgggcctcacactctatctcgtggtggcagtggccgctgtctcctgcgtcttcctggcttttgtcacggtgctgctagcactcaagctgagacgctggcacaagtcacgcctgcttcacgctgaaggcagcaggttggcaggtgtgcctgcctcgcactttgtgggcgtggacggggttcgggctttcctgcagacctattcccacgaggtctccctcaccgcggactcgcggaagagtcacctgatcttctcccaacccagctatgcagacacgctcatcagccgggagagttgtgagaaaagcgagcctcttctgataactcaggatttacttgaaacaaaaggagaccctaatcttcaggtgagtcaatcttataatagatcataccacactgaaatatagacaaagagttgtgtaaatgtctctcattttatatgtaatatatcaaataaagttgcctcttttaatattttattgctttaaagaaaactggtggatgaccttccaat

SEQ ID NO: 3899 - DNA, 597 bp, Homo sapiens
  MAP TO CHR8.1; EXPRESSED IN HELA, SIGNAL = 1.5; EXPRESSED IN LUNG, SIGNAL =   2; EXPRESSED IN HEART, SIGNAL = 1.4; EXPRESSED IN ADULT LIVER, SIGNAL = 1.6; EXPRESSED IN PLACENTA, SIGNAL = 2.5; EXPRESSED IN FETAL LIVER, SIGNAL = 1.2; NT HIT: AF110520.1, EVALUE 0.00e+00; SWISSPROT HIT: Q99062, EVALUE 2.00e+00; EST_HUMAN HIT: AW262348.1, EVALUE 3.00e-71
gatccagaaccccttgaatgaaggggtggccaggttccactgaggaaggatcttgataagacactcaaaggttttgctgttaccctttctccagttcttccccagagggacctacggccttttacaagggtaactgtacactggggaaaaggaaataatcagacttttcggggtctgctggatactggttctgagttgacactgatcccaggggatcccaagaaacattgtggccctccagttaaagtaggggcttatggagggcaggtgattaatggagttttgactgatgtccgactcacagtaggtccagtaggtccccggacacatcctgtggtgatttccccagttccagaatgtataattgggatagatatactcagaaattggcagaattctcatattggttccctgaactgtagagtgagggctattatggttggaaaggccaaatggaagcctttagagttgcctctgccaaagaaaatagtgaatcaaaaaacagtatcgtattcctggaggaattgcagaaattactgccactatcaaggacttgaaagatgcaggggtggtggttcccaccacatctccgtttaa

SEQ ID NO: 3900 - DNA, 568 bp, Homo sapiens
  MAP TO CHR5.1; EXPRESSED IN HEART, SIGNAL = 1.2; EXPRESSED IN FETAL LIVER, SIGNAL = 1.1; EXPRESSED IN HELA, SIGNAL = 0.95; EXPRESSED IN LUNG, SIGNAL = 0.89; SWISSPROT HIT: Q9Z2V9, EVALUE 5.00e-18; NT HIT: AF228740.1, EVALUE 3.50e-02; EST_HUMAN HIT: BF446538.1, EVALUE 0.00e+00
tagagcgtgaccaagtgtggaaagcctagcctttgggcagactctttccagggttatggccagaacattttccagaggctacaagggcaaagggtacccctttggggtcagagtgtgtcagctaaaggggcaaaacacagagcctggtctggggcaaagttgatgtctacctgtgctttctttagcagatcagatataggagcacaccagccgggcatgagcctctccagctctaaggtgatgatgaccaaggccagtgtggagcccttgaactgcagcagctggtggcccgccatacagtgctgcagctgcctggtcagggatgcgacgtggagggaaggattcctctgaggcagcagctccaacacatggggccagctcaggaccaccagggcatggaactggagaccatggtttttaatgttagaacagaaaacgccatacttttcctatatcaatgatcaaaagtgcaaacaatttaaatttccatcagggaacatcaaatgttgcccaacccttttcattcctatccatggctccgtaaggggcttgaggcttaatgcccatc

SEQ ID NO: 3901 - DNA, 502 bp, Homo sapiens
  MAP TO CHR7.1; EXPRESSED IN HELA, SIGNAL = 0.72; EXPRESSED IN HEART, SIGNAL = 0.5; EXPRESSED IN FETAL LIVER, SIGNAL = 0.56; NT HIT: gi14751802, EVALUE 1.00e-81; EST_HUMAN HIT: BG750272.1, EVALUE 2.00e-81; SWISSPROT HIT: Q14168, EVALUE 1.00e-12
ccatggtctggtgcaaataacaaataagtattactactttaatatactcttattttttcaggctcatgagaggctagaagattccaaactagaagctgtcagtgacaataacttggaattagtcaatgaaattcttgaagacatcactcctctaataaatgtggatgaaaatgtggcagaattggttggtatactcaaagaacctcacttccaggtaactttccctatcactcaactctcaagttccctgtattcccaaagtattctcctttactttccagtttaaggtgatgttttcttcaaagattatttagggctataataggtaagtatgtaaattccaaccttggtattttaatgtcctcatatgctgaggatatataaagagacatatgtaacaataatgctacataaatgtacactgttacagaaatacatcacaatggatttttctttgtgccattaaagaaaacaaccttaattcaccgtcagaccacatgct

SEQ ID NO: 3902 - DNA, 561 bp, Homo sapiens
  MAP TO CHR1.1; EXPRESSED IN HELA, SIGNAL =   1; EXPRESSED IN BONE MARROW, SIGNAL =   1; EXPRESSED IN HEART, SIGNAL =   2; EXPRESSED IN FETAL LIVER, SIGNAL = 1.4; EXPRESSED IN LUNG, SIGNAL = 2.7; NT HIT: gi13635795, EVALUE 0.00e+00; EST_HUMAN HIT: AL574841.1, EVALUE 0.00e+00; SWISSPROT HIT: O14896, EVALUE 7.00e-30
tgtccttcaatcttgggtccattgtgctatttaaaaataccttttcctcagaggatacacctgtgttctgtgtcctgaacaggtcattccagtagtggctcggatgatctacgagatgttttctggtgatttcacacgatcctttgatagtggcagtgtccgcctgcagatctcaaccccagacatcaaggataacatcgttgctcagctgaagcagctgtaccgcatccttcaaacccaggagagctggcagcccatgcagcccacccccagcatgcaactgccccctgccctgcctccccagtaattgtgaatgccatcttcttccttctcttttttataatattgtacatatggatttttttattgtttagatttaaccagcttttaaatctctcttttctctaacagtgttagaagtttgtgattctccaaatatgcctagatttaaagctgatttaatttatggaaaaatcacccttcagactttgcttttctttttcaaatctcctaatggtagtatgatatagcatagtagaaggagatttggcctgggagttt

SEQ ID NO: 3903 - DNA, 599 bp, Homo sapiens
  MAP TO CHR2.1; EXPRESSED IN FETAL LIVER, SIGNAL = 0.98; EXPRESSED IN HELA, SIGNAL = 0.7; EXPRESSED IN HEART, SIGNAL = 0.84; EXPRESSED IN BONE MARROW, SIGNAL =   1; EXPRESSED IN ADULT LIVER, SIGNAL = 0.93; SWISSPROT HIT: P06108, EVALUE 2.00e+00; NT HIT: gi13384877, EVALUE 5.70e-01; EST_HUMAN HIT: AI064978.1, EVALUE 5.40e-02
gatgagaagccaggaggatggaactcatgttactctaagcaaagccacaaccttctccttactactaaggccatcatttagctccatttttcctctgagctctgatcattactgtgtattattgtgtatgaagtcaacgccccacaggcatttgattatttataacttcagaaagtttcttttgcacagtaatttgccaggctttcatctgcagcagccagcatttgatagaaatatggaaaatggcctgaaccttaaatggcaaacagatgaggaggtccaatgaaaatcacacatgtttgaagaccatgtgttttcccatgaaatatatattggatttttaattgatgtggactttagctcatggtaactttgtcagctatctgaattagtgggttacaagaaatactaaagaaaggaatgtgatcaaggtaaaccctagagaaaacctgaccctgagtgacctctccttaccccagggccctctccccaccccagggccctctccccaacctggtttccaggatcttgttgaaaatgaagcattctctcgtccattctgtccctctgaacacagtggaacgtgagaagctctgcct

SEQ ID NO: 3904 - DNA, 552 bp, Homo sapiens
  MAP TO CHR17.1; EXPRESSED IN FETAL LIVER, SIGNAL = 1.8; EXPRESSED IN HELA, SIGNAL = 0.48; EXPRESSED IN LUNG, SIGNAL = 8.6; EXPRESSED IN HEART, SIGNAL = 4.1; EXPRESSED IN BONE MARROW, SIGNAL = 1.4; SWISSPROT HIT: P02593, EVALUE 9.00e-61; NT HIT: X13907.1, EVALUE 0.00e+00; EST_HUMAN HIT: BE380080.1, EVALUE 0.00e+00
cacttcgctgtcatcgtttgtacaaactcttcctagtttacctgaccatcaccatcaatacctgcttccctgatcatttcatcaaccttgtcatctgttagcttctctccagggtttgtcatcacatggcaaagttctgctgcactgatatagccattgccatccttatcaaacacaaggaatgcttctctaatttcttcttcactttgtgtgtctttcatttttcttgccatcattgtcagaaattcaggagagtccgttctattaccatcagcatctacttcattaatcatgtctggtaaccctgctttcatgggattctacccaagagacctcattatcgtttccacttcctttgttgttatagttccatcattgtctctgtcaaatagggaaaaagcttctatgaattctggaatctgctcttcagtcagtttggtctgctatgctgcaagtcctaccggtttccgagacgtgaccacacaaccactcccatatcttcattctcaccaatgaaatctctaccctggggcatgtcatttgccttctgtt

SEQ ID NO: 3905 - DNA, 587 bp, Homo sapiens
  MAP TO CHR5.1; EXPRESSED IN PLACENTA, SIGNAL =  15; EXPRESSED IN LUNG, SIGNAL = 9.3; EXPRESSED IN HELA, SIGNAL =   5; EST_HUMAN HIT: BG256883.1, EVALUE 4.00e-95; SWISSPROT HIT: P11174, EVALUE 4.00e-19; NT HIT: gi14734624, EVALUE 3.00e-64
tgtcttcctggcatgaaatgatgtcttactcatcagttcatcatctgtgcttgcttttgtttatgatcatggagacttactactatatttatgttaggatagtgataaaaaaacagaattggacttaaaacatagtaacatggtagtgctattgaaaagtcaaatacacatacactatatagtggattgaatagaacagagcagtggggaaacagtcatcatggtgtattcaaatttgcatcagcaaactgaactcagtttgacaatcactttctaaatggtgattcggtttcaacgaaacaacaccttcagcggtgaaaaaaaaaaaagcagtattattgatatgcatactactggtatagttgttttctttgtagtcactttataaatgtcttttttttttttttggagatatgtgtgcctttattagcggagccactacttgagggagatgaagcgggaggagtgggtggacccaatgccaggccggccgtgcttcacgggcttgtaggtgatggagaactcgcccaggtcgtggccgatcatctccagcttgatctccacctggttgaaggtcttgccgttgt

SEQ ID NO: 3906 - DNA, 518 bp, Homo sapiens
  MAP TO CHR6.1; EXPRESSED IN BONE MARROW, SIGNAL = 1.1; EXPRESSED IN FETAL LIVER, SIGNAL = 1.1; EXPRESSED IN LUNG, SIGNAL = 5.1; EXPRESSED IN HELA, SIGNAL = 2.8; EXPRESSED IN HEART, SIGNAL = 1.6; EST_HUMAN HIT: AW177044.1, EVALUE 0.00e+00; SWISSPROT HIT: P15311, EVALUE 8.00e-36; NT HIT: gi13631371, EVALUE 2.00e-89
aagcctgtctgctccaaaagcgaggcaggctccctggagacagagccccttgggctccaccagcagctgccgctgcacacgctcgttcttctctgcctcagtgatgcgcttctcctcattgcggtcatcccggatgccctcactagacagctccgcgctgtagcccgtgggctctgcgccctcatcctgcaagctctcctggacatggtagctcaccggctcgtacacggggggtggtgggggcgggggtgctgtcatcaccaggtgcagctcctccttggtcttcaccaggtcatcctgggcttctttggcctttggaaagcaaattaataagaggacttctcacccagaagtcctatcctcctggctatgagaacagactgtcacctccctctgtcctggcaggctaaggcagcactgaactgtgctgggctgtggcttcgaagaggagcaccctcagggtgcatggggggtttacaaccctctgcgtccaagacaggaagaggaactgtgatgcc

SEQ ID NO: 3907 - DNA, 583 bp, Homo sapiens
  MAP TO CHR11.1; EXPRESSED IN HELA, SIGNAL = 0.8; EXPRESSED IN LUNG, SIGNAL = 0.84; EXPRESSED IN HEART, SIGNAL = 0.93; EXPRESSED IN BONE MARROW, SIGNAL =   1; EST_HUMAN HIT: AW058460.1, EVALUE 0.00e+00; SWISSPROT HIT: Q03164, EVALUE 2.00e-27; NT HIT: Z69774.1, EVALUE 1.00e-117
gcttctgctgatgggtcaacctgatttaatccactcaccttcaatactttctgcacagatctgaaagccatcatcactggaaatttcaaaaacaagtcctttcttgggttttttctcagtaatgctttccttccgcttttgttcttgctgaagccaaagcatcagtggggagctgaaattactttcctcttcttccactgttttaggttctaatagggagaaaatagatagtggttgcagtaacaaatgctcactgagcactgactacatgtagagtactttacataaatgatctctaagcctaacaacattccacagttggtttattattcccatttatagataacaaacccaagactcaaagagcttgcctaggtcattgctagaaagtggtgactaaaaccagatttttttttacatgaagttatgctctctgtggtagaatttctagtatgacgatctgatagtttttcaataagcaactgtcctcaatagagttatacccagaactctctaatcttgaagtgaccatttgtttcctaatcaaattcattagaactgatggaaaatgccatggagatgt

SEQ ID NO: 3908 - DNA, 525 bp, Homo sapiens
  MAP TO CHR5.1; EXPRESSED IN ADULT LIVER, SIGNAL = 0.73; EXPRESSED IN BONE MARROW, SIGNAL = 0.77; EXPRESSED IN HELA, SIGNAL = 0.59; EXPRESSED IN FETAL LIVER, SIGNAL = 0.62; SWISSPROT HIT: Q9Y496, EVALUE 3.00e-24; NT HIT: gi14781205, EVALUE 6.00e-90; EST_HUMAN HIT: AA663562.1, EVALUE 5.00e-85
tttgcttctctttcgcttttgttcttagttatcattgtacaattggacaacagtttgaatttagcaatgagttataaagttctaggagcataataaatggaaatgcatgatattattggtttgatttccttaaaatattgataattggttttgtattattgaggagtgtaggcatttctatattgaaggaggtaatttatataagtctgaaacattgattcattttagtgattgttgcaattaaatgattcaaataggaaaaaagaaagtctccccagacaagatgattgaaatgcaagcaaaaattgatgaggagagaaaagcacttgaaacaaagctcgacatggaagaagaagaaagaaacaaggctagagctgaattagagaaacgggaaaaagatcttcttaaagcccagtgagtattattgaattgagatgaattcatgatttaaatttctgttttttcctaggatatataaaataggaaaattgaatagtaattaaaagcttggatttttgtctccag

SEQ ID NO: 3909 - DNA, 552 bp, Homo sapiens
  MAP TO CHR22.1; EXPRESSED IN PLACENTA, SIGNAL = 2.4; EXPRESSED IN LUNG, SIGNAL = 1.6; EXPRESSED IN HELA, SIGNAL = 3.5; EXPRESSED IN HEART, SIGNAL = 1.2; EXPRESSED IN ADULT LIVER, SIGNAL = 1.7; EXPRESSED IN BONE MARROW, SIGNAL = 1.9; NT HIT: gi14778219, EVALUE 0.00e+00; EST_HUMAN HIT: BE276473.1, EVALUE 0.00e+00; SWISSPROT HIT: Q15459, EVALUE 1.00e-35
gaaaaggtgcggctaaagtggaacctagtgccttctctgccccccgtcttccatacttggtcttagttccagaagcattgtggctttgctttcacttgcaggtgacctgggatggccactcaggcagcatggcccggacccagcaggctgcccaggccaacatcaccctccaggagcagattgaggccattcacaaggccaaaggcctggtgccagaggatgacactaaagagaagattggccccagcaagcccaatgaaatccctcaacagccaccgccaccatcttcagccaccaacatccccagctcggctccacccatcacttcagtgccccgaccacccacagtaagccagcatctaccctggaactgacttttttagagcttcattcttgaggtcggacactgttggctgagaagtgcagctgccttttagtggggcctgagtgttgggtgggtcagtttgaaagagaaagagccctttaaatgcaagtgggaacctctctcttgatctgtttgtggaggagggttggaacagggagggaggtaag

SEQ ID NO: 3910 - DNA, 562 bp, Homo sapiens
  MAP TO CHR20.1; EXPRESSED IN BONE MARROW, SIGNAL = 1.2; EXPRESSED IN PLACENTA, SIGNAL = 1.4; EXPRESSED IN FETAL LIVER, SIGNAL = 1.2; EXPRESSED IN LUNG, SIGNAL = 0.96; EXPRESSED IN HELA, SIGNAL = 1.4; EXPRESSED IN HEART, SIGNAL = 1.1; NT HIT: gi14786682, EVALUE 0.00e+00; EST_HUMAN HIT: AL570166.1, EVALUE 0.00e+00; SWISSPROT HIT: P17886, EVALUE 2.00e-32
cctcagcagagaacagcctctagggcagtgcaataactgcacagattaaatccactacagtatcacagtggtctggttattttattttccagggaacttccataggcaaatgtccaaagaacaaattatttaaagtttacatagaattggagctacagcttcgagaatttgacagatgccggaagctttatgaaaagttcctggaatttggacctgaaaattgtacctcatggattaaattcgctgaattagagacaatccttggtgatattgacagagcacgggcaatctatgaattagccatcagtcagccacgtttagacatgccagaggtgagcatctcaagtcaaatataattttgtttgagatacgtgtttagtcttactttagatgaccatctaaatgtgggtgtattttagagtataacgatgatctaactaacttagtctcttctactcagattaggcttgtacgtggaaaggtggctgtgggggacaggggaagtagccctctcattagataccagagcagtagacatccaggatgatgcccaggatgaact

SEQ ID NO: 3911 - DNA, 567 bp, Homo sapiens
  MAP TO CHR3.1; EXPRESSED IN FETAL LIVER, SIGNAL = 0.63; EXPRESSED IN LUNG, SIGNAL = 1.3; EXPRESSED IN HELA, SIGNAL = 0.92; EXPRESSED IN HEART, SIGNAL = 0.97; EXPRESSED IN BONE MARROW, SIGNAL = 0.56; SWISSPROT HIT: Q27969, EVALUE 2.80e-01; NT HIT: gi15295424, EVALUE 0.00e+00; EST_HUMAN HIT: BG706552.1, EVALUE 1.00e-129
tgtttccatccccagaagaggccccgtctgctgccagccctggcactgagccccactggcacctcagagccactgggaacaggcactgtctcagcagaactgtccagcccatgggctgccagggactcggagcagagtgagtgcccaggtgtatgtgtgtggctgtattggagtgggcgctgggaggggtcagggctagggcccattctactgcctcccagcaggtactgatgctctgacagacccagtcacggatcctggacccaacccctctgacacagccatatggcgccgcatctttcagtcctcgtacattcgggagcagtatgtgctcacccactgctctgccagccccgagccaggcccaggctccacaggcagcagtgagtccccaggctcacagggccctggctcccccgaaggtagtgctcccttggagcccccttctcagcagggctgccgcagtctggcctggggagaacctgcaggctcccgctcctgtcccctgcctgcacccacaccagctccattcaaggtgagatccaacccacattcattcgccttgta

SEQ ID NO: 3912 - DNA, 590 bp, Homo sapiens
  MAP TO CHR7.1; EXPRESSED IN HELA, SIGNAL = 0.6; EXPRESSED IN ADULT LIVER, SIGNAL = 0.55; EXPRESSED IN BONE MARROW, SIGNAL = 0.84; SWISSPROT HIT: Q07785, EVALUE 2.00e-04; NT HIT: gi6912583, EVALUE 6.00e-47; EST_HUMAN HIT: AA812064.1, EVALUE 9.00e-47
tcaccgcttctcttctgtaggagtggatattctaattccagatttagttttcctaagcagaatatattgaagttttgtaacgattctttcttctctctctaggggagtaggttgcatctttgttgaaatgatccaaggagttgctgcttttccaggaatgaaagacattcaggatcaacttgaacgaatatttctggtaagtcctttacagagtatttctaagaaaaattggtttctaattagtcacttagtgacaaattctacagcagtctgtggaaaaataatttaaaacaaaatttgttgtcacatttggttctaacatattttggacctttgaaaaagcaggaaatcagttaagaattatgtttttatactactgtacgtgaataacatgtcaaagtggtaagaaggaatggggtgggagaggcaatatagagaaagtaatgggttaaaaatgaaggttctgacagaataattccaaataattgctatatagatactccctccccatcatgtaggtggagcttaactcccccgtcccccttgactgtgagctttgataactttcttccataaagcagagcagggag

SEQ ID NO: 3913 - DNA, 535 bp, Homo sapiens
  MAP TO CHR8.1; EXPRESSED IN HEART, SIGNAL = 2.5; EXPRESSED IN BONE MARROW, SIGNAL = 2.4; EXPRESSED IN PLACENTA, SIGNAL = 2.7; EXPRESSED IN FETAL LIVER, SIGNAL = 2.6; EXPRESSED IN HELA, SIGNAL = 2.8; SWISSPROT HIT: P14350, EVALUE 2.00e-05; NT HIT: AL163246.2, EVALUE 1.00e-102; EST_HUMAN HIT: BF971469.1, EVALUE 4.00e-98
atatggcaccattcctcagcgtgatcagccagctacctggtggcagcttgattatattggacctcttccatcatggaaagggaaaaggtttgtccttcctggaatagatactcaggatatgggtttgcctatcctgcatgcaatgtttctgccaagactaccatccatggactcacagaatgccatcatggtattccacacagcattgcctctgaccaagacactcactcactttacagctaaagtgtggcagtgggctcatgctcatggaattcactgatcttaccatcttccccatcatcctgaaggagctggattgatagaatggtggaatggccttttgaagccacaactacaacaccaactaggtgacgatactttgcagggctggggcaaagttctccagaaggcagtgtatgctctgaatcagcatccaataaatggtactgtttctcccatagccagaattcacaggtccagaaatcaaggggtagaagtggaagtggcaccactcaccatcacccctagtgatcca

SEQ ID NO: 3914 - DNA, 576 bp, Homo sapiens
  MAP TO CHR20.1; EXPRESSED IN HELA, SIGNAL = 0.93; EXPRESSED IN BONE MARROW, SIGNAL = 1.1; EXPRESSED IN FETAL LIVER, SIGNAL = 0.75; SWISSPROT HIT: O75363, EVALUE 3.00e-06; NT HIT: AF041260.1, EVALUE 0.00e+00; EST_HUMAN HIT: BE825197.1, EVALUE 0.00e+00
tgcttggtgatcatcgactcttctgacccaactaggtgacctgctaaaccatctttactgttatttgccagaaaagactggaccagagacgtaaataatacacctcaatatacaacagctcgggcttaatttctaggcagaatttcatttgctggccatcagaagaatatatacatggagcgtgtttggggaggagatggagtaaggagaacacatcttggtggcaggagaacctggtgggaaccgtgctgatttgtttacttggatttgccaactggtccgatggatactgggtctgtttgcacttgagcatccaacatccgctttggtccctggagaaaaacagaaagacgtggcagcctattgaagctctgtaatgtcaacagcaacaatggccatttatgtagcacttactctgtgctaggtgttgggctaaattaatatatctcattcctcagtgctgggtaagagaatggtctccagtcagatgcccgggttcgatacccagttacatgactttctagctttgtgaaatcttggacaaattacttatcatctctttgcgctttggtttct

SEQ ID NO: 3915 - DNA, 548 bp, Homo sapiens
  MAP TO CHR19.1; EXPRESSED IN FETAL LIVER, SIGNAL = 1.3; EXPRESSED IN LUNG, SIGNAL = 1.4; EXPRESSED IN HELA, SIGNAL = 0.97; EXPRESSED IN HEART, SIGNAL = 1.4; EXPRESSED IN ADULT LIVER, SIGNAL = 2.5; EXPRESSED IN BONE MARROW, SIGNAL = 0.85; EST_HUMAN HIT: AL134734.1, EVALUE 2.00e-97; NT HIT: gi14765215, EVALUE 1.00e-97; SWISSPROT HIT: P23468, EVALUE 7.00e-29
accccaattgagaaccactgatagaacagatggaatcacattatggacagcagccatcagttaaacacacacccaaagattcacggacagcagccatcagttaaatatacatctaaagatgtgtatttaaacagctcagggctaccagtatctccccagctctgtctcccacaagactggaggcctcttgagagtagagatgggctccttctggggccctgaggtgggaaaggcatggcacctacctgtagccatcaatgaagctggcgttgatgtagtcagagccctccacaccccggatgggttgcagacagacccgtgtgctctcatagggcatgatgttcaccaggcggttcttgaacttgttacaaggcagattggcactgatgaagcgtgacgtgtgggccttggagttagccagccgctgtggggaggaggaagccagaggccaccatcaggatgaggaaggctatgctttcagctggagcaccaatggtggataggtaggtaggggcaccctgccaccaccttctagtccccattgctcg

SEQ ID NO: 3916 - DNA, 534 bp, Homo sapiens
  MAP TO CHR7.1; EXPRESSED IN BONE MARROW, SIGNAL = 1.1; EXPRESSED IN ADULT LIVER, SIGNAL = 1.4; EXPRESSED IN FETAL LIVER, SIGNAL = 0.98; EXPRESSED IN LUNG, SIGNAL = 0.88; EXPRESSED IN HELA, SIGNAL = 0.45; NT HIT: gi16161904, EVALUE 8.00e-74; SWISSPROT HIT: Q44602, EVALUE 6.50e+00; EST_HUMAN HIT: BE837363.1, EVALUE 1.00e-121
caggagcctcaggtaagcactagcaagtgattattcgccaaagtcgaaggatgatttaacaaatggaacgcgaggactctgtcttacatgctgtgaacatggctttcctcctggtgggaaggccactgggaagtgaagggctcggtgcggcggtaccattttcttcttctttaagactgtgtttaaccagtgtgcagtaacacatctctttctttctcttattgcctgtcaaacataaaattataggtttgttgtttttgtttttctgctgcaggattaaagaaaattctaaggttgtataactacaatgcccttttcattggaagccccataaaagaatttcatgacatctagcacttgattaaagtaacgaattaaaaccgtgtagctggttacttgaaatacaacctaaaaatgttactatccatctgcaaacaagagtctacaaaagcaacaaattctacaacaaccttaaaaataacttcagtgatgactgaaacaacatgtgtgaccaccaaagttaaaagtgcccca

SEQ ID NO: 3917 - DNA, 524 bp, Homo sapiens
  MAP TO CHR19.1; EXPRESSED IN HELA, SIGNAL =   1; EXPRESSED IN HEART, SIGNAL = 0.88; EXPRESSED IN BONE MARROW, SIGNAL =   1; EXPRESSED IN ADULT LIVER, SIGNAL = 0.98; EXPRESSED IN FETAL LIVER, SIGNAL = 1.2; EXPRESSED IN LUNG, SIGNAL = 0.59; SWISSPROT HIT: P16415, EVALUE 2.00e-16; EST_HUMAN HIT: AV705863.1, EVALUE 7.00e-66; NT HIT: gi14759716, EVALUE 2.00e-65
aaccctgtgttgttgaagggtcaactatatcccctttcggtatttcaaatcattcaacagcattgatgaccaagaaaaaaatgtctctaattgactaagtgaagacataatgtcatttttacctatacagtccaggttcctaatggtttcccacatcacatctctgtacagactcttctgtgatggacccagcaaagcccactcttcctgggtgaagttcaccgccacatcctcaaaggctactgaatcctgaaacaccccacatgtacaaaggagtaaggctgagactgatagtaccaaaaatttacacccacttcataaactttgcatactattatttctaagcaatgattcaatgacatggtaaatccacccttattctctgtctacaatcactttctccaacacagcaattctgatgctagaattgaatgttgttgtacacataatagtcaaataggaacaagtctctttttgatgacttaaatgagtgaattttattgccggcatcatccctaatgtct

SEQ ID NO: 3918 - DNA, 512 bp, Homo sapiens
  MAP TO CHR1.1; EXPRESSED IN BONE MARROW, SIGNAL = 2.7; EXPRESSED IN HEART, SIGNAL = 1.6; EXPRESSED IN ADULT LIVER, SIGNAL = 1.7; EXPRESSED IN PLACENTA, SIGNAL = 2.1; EXPRESSED IN FETAL LIVER, SIGNAL =   2; EXPRESSED IN LUNG, SIGNAL = 1.7; EXPRESSED IN HELA, SIGNAL = 1.4; NT HIT: AF113513.1, EVALUE 4.90e-01
gcagtctccctgctcatctcaagtgggttaatggacttggaagtctgcattttaggctgaagtgtatgctttaaattgaagaagcagcgtgttgtgttgtgccgtgttgaggtgtgttgtgctgtgccgggatgtgctgggctgtgctctgctgtcttatctcatcttgtctgatgttactgacatagtagaatgcagatttcattgtggtgtaaaatgtcttctgggttatttcaaagcagccattgaaaattccctttctaacactgtcagaattggaagctgttgatgtcagtaaatgtcttagtgctgtttctaggcatacaaaatacctcacatcttttttctttctttttttaatatcacatttcttctttgttgacacactcaaataggttggacttgtcctaaattaataagaaaattggaatgtgccaatacttcccaaaaaaacctgattaataaggagccaggcaacctctcagtgattctcactttctgggatcttccca

SEQ ID NO: 3919 - DNA, 564 bp, Homo sapiens
  MAP TO CHR12.1; EXPRESSED IN BONE MARROW, SIGNAL = 1.3; EXPRESSED IN LUNG, SIGNAL = 0.91; EXPRESSED IN HELA, SIGNAL = 1.2; EXPRESSED IN ADULT LIVER, SIGNAL = 1.9; EXPRESSED IN HEART, SIGNAL = 0.93; SWISSPROT HIT: P46530, EVALUE 7.00e+00; NT HIT: AE006412.1, EVALUE 5.40e-01; EST_HUMAN HIT: AL527946.1, EVALUE 2.00e-01
cctggagtgaccttgctctcctctcatttcctgaaatactcatgatctatgtcattcttgtggctcattccaaatgtcttgcctggagacctcaccttttcactggtgtctgtcttgccttcccaacttgattttaagcctcatgagaagggggccatgaattcccacagcctaatacagtgctgagtgcctggtaggcatttgatttaatctgttttctttggaggaaacccagtaacatatgggagggagtttgtttgtatacacattcttttaaaatatacattgatcatctttcctgttgtgttagctttatttcctggggaagggtaaatacccatccatcattctacacaagtcactgggtgacgtctgtagctccaccaacctggtcaggcttattggacccatttgcctggcgggagtttccatcaagcctttctgggcctcctcaccaattatctcttcagatttgggatgtttttgatgagtgttttgacaagaacactgtttccccaaagccgagccaaccaaaccgctacatggtgaattggaggtgaagga

SEQ ID NO: 3920 - DNA, 558 bp, Homo sapiens
  MAP TO CHR14.1; EXPRESSED IN PLACENTA, SIGNAL =  12; EXPRESSED IN FETAL LIVER, SIGNAL = 8.5; EXPRESSED IN HELA, SIGNAL = 6.9; EXPRESSED IN LUNG, SIGNAL =  22; EXPRESSED IN BONE MARROW, SIGNAL =  27; EXPRESSED IN HEART, SIGNAL = 4.5; EXPRESSED IN ADULT LIVER, SIGNAL = 7.2; NT HIT: J03618.1, EVALUE 0.00e+00; EST_HUMAN HIT: BG686259.1, EVALUE 1.00e-106; SWISSPROT HIT: P01764, EVALUE 9.00e-40
cacagaccctgaaggagagcagcccttgacctccacctgcacctgccctggggctgcccctgtcctctgtgtatcctgagcgcccccttgtggctccagatgcccctgcaggaggtttgtgtctgggctcacactgacctcccctcactgtgcctctcacacagtaatacacggtcatgtcctcagctctcaggctgttcacttgcagatagagggagttcttggcattgtctctggagatggtcaatcggcccttcacagagtctacatagtatttctcacttccgtcacactttatgtcggccacccactccagccccttctccggagcctggcagacccagtgcatccaggagctactgaaggtgaatccagaggctgcacaggagagtctcagggaccctccaggctgtaccaagcctcacccagactccaccagctgcacctcacactggacacctgcaaacacagagacaccctggtcagaaactgccgcacacatccactgtttctctcactcatattcacttacattcaactcattccccatgaatcacc

SEQ ID NO: 3921 - DNA, 507 bp, Homo sapiens
  MAP TO CHR19.1; EXPRESSED IN BONE MARROW, SIGNAL =   3; EXPRESSED IN HEART, SIGNAL = 4.3; EXPRESSED IN PLACENTA, SIGNAL = 2.6; EXPRESSED IN LUNG, SIGNAL = 5.9; EXPRESSED IN HELA, SIGNAL = 1.6; NT HIT: gi4504038, EVALUE 8.00e-83; EST_HUMAN HIT: BE828759.1, EVALUE 0.00e+00; SWISSPROT HIT: P30679, EVALUE 6.00e-24
acagattcaatgaggtcgggcagtggatggagctgagtctagaacgcgggtctgatcctatgtgaaagttccggtgactccaggctgaagtagagtctggattagcatctctcttcggagctgcttttgggagttgaagggtatagaaagttctagaattacttaccctggaaactggggaaataggtagccaggtgggaggtggggattttctcctccaggatgtcggttttgttgagaaagaggatgacggatgtgcttttgaaccagggtagttccaggatagtcccaaacaatgcgaggctctccttcatgcggttctgtgttgggggcagaagcaggttagtgcttcaaccagccaggtgggacaggaaaccctcccatcgcggagacggggctgttggctccaggggcatgggctcacccctatctgcctggctggggctgaggcgggtgtgcccgtgtttccatatggacagctgcctgggtgtgcctgacatggttttg

SEQ ID NO: 3922 - DNA, 588 bp, Homo sapiens
  MAP TO CHR19.1; EXPRESSED IN LUNG, SIGNAL = 0.94; EXPRESSED IN HELA, SIGNAL = 0.41; EXPRESSED IN BONE MARROW, SIGNAL = 0.46; EXPRESSED IN HEART, SIGNAL = 0.66; NT HIT: gi7706227, EVALUE 0.00e+00; SWISSPROT HIT: P38334, EVALUE 4.00e-22; EST_HUMAN HIT: BG179347.1, EVALUE 0.00e+00
aaactgacattgcgtttccgttgtcggcctcccgctgcaggagccatatattgaagaccatgtctggaagcttctactttgtaattgttggtcaccatgataatccagtttttgaaatggagtttttgccagctgggaaggcagaatccaaagacgaccatcgtcatctgaaccagttcatagctcatgctgctctcgacctcgtagatgagaacatgtggctgtcgaacaacatgtacttgaaaactgtggacaagttcaacgagtggtttgtgtcagcatttgtcaccgcggggcatatgaggtttattatgcttcatgacataagacaagaagatggaataaagaacttctttactgatgtttatgatttatatataaaattttcaatgaatccattttatgaacccaattctcctattcgatcaagtgcatttgacagaaaagttcagtttcttgggaagaaacaccttttaagctgaatggagaaaattccaaaataaattatatcaccacaatggtgtatactcaggaatgtgtacattgtaaattacttgattaaatagcctggaaatcttttgtgtattc

SEQ ID NO: 3923 - DNA, 585 bp, Homo sapiens
  MAP TO AF322450.1; EXPRESSED IN BONE MARROW, SIGNAL = 1.7; EXPRESSED IN HEART, SIGNAL = 1.6; EXPRESSED IN ADULT LIVER, SIGNAL = 0.9; EXPRESSED IN PLACENTA, SIGNAL = 1.9; EXPRESSED IN FETAL LIVER, SIGNAL = 1.6; EXPRESSED IN LUNG, SIGNAL = 1.7; EXPRESSED IN HELA, SIGNAL =   2; SWISSPROT HIT: P48833, EVALUE 1.10e+00; NT HIT: AB036831.1, EVALUE 3.00e-55; EST_HUMAN HIT: AW140051.1, EVALUE 4.00e-55
cttgatgaagctcagaggggaaagcacatccatgaggaaactgctccacgagtcattaaaggcagcatcggaaaggaggcttatgatcccagagttcaattcctgcaaactgaccatgccagctcagaggcttggcccctggcctccaggctacttcccctgccacagatatttgataccatcttcacggactttcaaggcctgagttctgatggccatgaggtctccctcccctgcctgctgatctccagccccctttgccgttgctgacccgggaccagagacatgggactgtccctgaagcaggctgaaagctcccagccttcagactccagagcggaggagggcaggtcacagtgcttcccacagggaaacctgggactggtcagggatgggcgaaggagcctgcagatacctacccaataacatatatgtcaagattgaggttccggttgttcagctgaagcaggtcactgagatctagagggggcgctgccgaagccacgttccaagtcacgacgtgtatgctgcggaagggatgcagagggaagtcatggaggaaggaggataagatagtgcacgggg

SEQ ID NO: 3924 - DNA, 545 bp, Homo sapiens
  MAP TO CHR6.1; EXPRESSED IN LUNG, SIGNAL = 2.9; EXPRESSED IN HELA, SIGNAL = 1.8; EXPRESSED IN PLACENTA, SIGNAL = 3.2; EXPRESSED IN FETAL LIVER, SIGNAL = 2.2; SWISSPROT HIT: P53792, EVALUE 3.90e+00; EST_HUMAN HIT: BG013860.1, EVALUE 4.00e-98; NT HIT: AL163246.2, EVALUE 1.00e-109
ggttttggtcagtccaccaggaaaaaaaaaaaaaaacatgacctgctgaggtgcttgctgaagccaaaggaaatacagaatgggtagtagaaggtagtcatcaataccagctataaccacatgaccagctgcagaaacaaggactgtaattgtcatgagtatttcttccttcttctgttaaaaacatgtctgggaatgtatacacttgcactaagaaaatgtcttcattgtatttcctttcttctttatcacgtgataaaagatttattgagatcatatcagcatttaagtattgttaactttatgtaagagtatttgggttggggattggtgcatttctggttgtataaaggatagttgtactatgttaggcataattatgatgtctttatttgaagattatggtatgatctcaggagatgtgtattggttcaagatgacaaggggtggacttgtgatggtgaatactcggtgtcaacttgattggattgaaggacacaaagtattgatcctggatgtgtctgtgagggtgttgccaaaagaga

SEQ ID NO: 3925 - DNA, 557 bp, Homo sapiens
  MAP TO CHR19.1; EXPRESSED IN BONE MARROW, SIGNAL = 1.2; EXPRESSED IN HEART, SIGNAL = 1.2; EXPRESSED IN ADULT LIVER, SIGNAL = 2.1; EXPRESSED IN FETAL LIVER, SIGNAL = 1.6; EXPRESSED IN HELA, SIGNAL = 1.9; EXPRESSED IN LUNG, SIGNAL = 1.2; SWISSPROT HIT: P28994, EVALUE 5.30e+00; EST_HUMAN HIT: BF895779.1, EVALUE 0.00e+00; NT HIT: AL163278.2, EVALUE 2.00e-03
tcattcttggactgctgctgtccagcccctctgtccagagtggcagggttctagtgttttcttcccttctccatttggaagagcttcttagagttctcctgttttgttgtgtcctatcatctggtcatgcagggcccagctgtgtggacaagtatctcactacgccctctgtgtctccaggtgacgagcacagtgccccttgtagggcgctcgggcatcctgggcgagctgcacaacaacatcttctgtggtgtggcctgcggtcggggccggatggcgggcagtaccttctgtgtgtcctactcgggcctcctctgccagttcaatgagaagagggtgctggagaagtggatcaacctgaaggtaccacctccctctctgccatcagctggacagactctttctcgtgatatgtgtctgcaggggtgctcatcagcattgaccacacaggttctgcttatgtgactagtggtgaatgacgcccactctctgagcttaaggttccacatctgtaaaatgggagtactgctgccctccccgcagagctgataaggaag

SEQ ID NO: 3926 - DNA, 562 bp, Homo sapiens
  MAP TO CHR7.1; EXPRESSED IN HELA, SIGNAL = 0.56; EXPRESSED IN HEART, SIGNAL = 0.44; EXPRESSED IN BONE MARROW, SIGNAL = 0.74; NT HIT: U82671.3, EVALUE 8.40e+00; SWISSPROT HIT: P35363, EVALUE 5.30e+00; EST_HUMAN HIT: AI939404.1, EVALUE 3.00e-03
tggcttgtccagggctatacagcaagtacacagtgacattagttaacatttcataaatacttgcaggctctaggatctgagctaagtgctctgcatggatcattcatcttggcctcacaacaagcctaaggtgcaaagttcatttaccacctaaatgcatctctgtctgtcccctgtggagctcaggaactgactgtggcctggagagtgtaacctggactcagttctgaagcctgtgctcatctgactccacctttagcatatcctgactagcaaacccaagcagaaaacaaatgcatgcttttattatgcttaatgctgagagctcagaagacatgactgttttttattaaactaatgacaccaaactcatcttatgtaccagattgaccaaatcatgtgatagtgaaaaacactggattagctcctgtacttctgaaagttttaggaatatttaatttatataagtgcttacttatttctatctaagcctattagaatagagctcctttaaggaattttataaattaatttagtaataccattcggaggtgggaaaata

SEQ ID NO: 3927 - DNA, 580 bp, Homo sapiens
  MAP TO CHR7.1; EXPRESSED IN LUNG, SIGNAL = 1.3; EXPRESSED IN HELA, SIGNAL =  46; EXPRESSED IN HEART, SIGNAL =  18; EXPRESSED IN ADULT LIVER, SIGNAL =  45; EXPRESSED IN BONE MARROW, SIGNAL = 3.9; EXPRESSED IN PLACENTA, SIGNAL =  31; EXPRESSED IN FETAL LIVER, SIGNAL =  11; NT HIT: AF252549.1, EVALUE 0.00e+00; SWISSPROT HIT: P02452, EVALUE 9.70e-02
tggggagtctttctgacaccccctgaggtgcccagatgctcgatttcggtgctgagacaatactcagaaggtggccccatggatagcccctttccaccactaaatggagtaggggagctagcagaagcaggatgcccctgcctcgtgggcagcccctttgaacctcctcatggtggggcgccccagctggtcgctgccggtgtcccctcccctccagcctcagcctggggccggcagctgaattgctgacagcttatctcatcagcgccagtgagccacttggcccaaatggggactgcctccccttcctcccagcgggaaccagggagcttccctcccaccctcaaaccagcttttgcttcttcccctctgctctgagccagcccctcctctgctgagccaagggggctggagccaggcaccgccacgggggaggggagaggtgtgctcaggaaggacgaggcctggagaggggccgagagcccccgcagactggaggggaggggaaggctgagcggtttcctatatgtcttgccgaagcctccggctcttcccccagaccccacctggtacagtcagt

SEQ ID NO: 3928 - DNA, 526 bp, Homo sapiens
  MAP TO CHR17.1; EXPRESSED IN PLACENTA, SIGNAL = 1.4; EXPRESSED IN FETAL LIVER, SIGNAL = 1.3; EXPRESSED IN LUNG, SIGNAL = 1.1; EXPRESSED IN HELA, SIGNAL = 1.2; EXPRESSED IN ADULT LIVER, SIGNAL = 0.47; SWISSPROT HIT: P91682, EVALUE 3.70e+00; EST_HUMAN HIT: AA431640.1, EVALUE 0.00e+00; NT HIT: gi14771227, EVALUE 0.00e+00
ggtgatgtcagatgttccccatattgtgacatcgagctggatgtgtggggttcttggccgccatctgtactgtagcactggcctctgtgccacagctactgtttcttaaaggactgcttctgccctctgcctgccagtgcccattccactgtgaggtgtcattccctgcatctagtgacaactgtctggattgcctgctgcaaagctttgatttggcaaaggagaccatggaagaatcatggtggatccagaagttatacgtgacccacaccatggcttttaaaagtctacccatgtttgtggcagcaaatgagcacagtaagagcaaagctgaacaacttgcctcctctactcctccaaagcttttcttcaggcagccggtgcacagtggactttttcacttctatactttgtatgcggccttccacacttccagagaatgtcagtgtgcaatgtgtctggagggtggggagaggaattctgtgagccttttcatttcggtgacagaagagatgggcagagcaac

SEQ ID NO: 3929 - DNA, 524 bp, Homo sapiens
  MAP TO CHR7.1; EXPRESSED IN HELA, SIGNAL = 1.5; EXPRESSED IN LUNG, SIGNAL =   1; EXPRESSED IN BONE MARROW, SIGNAL = 1.7; EXPRESSED IN HEART, SIGNAL = 1.4; EXPRESSED IN ADULT LIVER, SIGNAL = 1.7; EXPRESSED IN PLACENTA, SIGNAL = 1.2; EXPRESSED IN FETAL LIVER, SIGNAL =   2; NT HIT: gi4826977, EVALUE 0.00e+00; SWISSPROT HIT: P14758, EVALUE 2.20e+00; EST_HUMAN HIT: BE938667.1, EVALUE 2.00e-87
ttcagcccagtacacagcacagtgagttctcaaaaatacttgttaaatgaatgaataagtgaatgttttatactaatgactttccatccttaaaaggtagggtaatataaataagtatattatctggtcctttaatagtggttttggtaaaatagctatctttatacaatttggtttattgagcttcacttttagaaaggagatgaaggattaaaacaacccaaaaactaaaaagagctctaaccttaactgtagctcctgggaagaaaagccagttgcctgtgtccactgggtcgagactatcttctaaaacgacttgtctgtgagctgaattgatgatcaagatgttatctaaggcccagcaggcttcatacacttcacctacacgaagattttcctgcttccactgaaattggacattctcccctttggcgtcctcaggaaggtagaggatatggatgattgtgctgacattggaaggggctctggaacatacagagagatggcaagtttagcaatgctga

SEQ ID NO: 3930 - DNA, 593 bp, Homo sapiens
  MAP TO CHR1.1; EXPRESSED IN PLACENTA, SIGNAL = 1.5; EXPRESSED IN LUNG, SIGNAL = 0.94; EXPRESSED IN HELA, SIGNAL = 1.9; EXPRESSED IN HEART, SIGNAL = 1.1; EXPRESSED IN ADULT LIVER, SIGNAL = 1.8; NT HIT: gi15301660, EVALUE 0.00e+00; SWISSPROT HIT: Q61116, EVALUE 1.00e-77; EST_HUMAN HIT: AV745182.1, EVALUE 2.00e-94
tctcctgtgtggactcgttgatgactatgaagattaaagctcaaactaaagcacttaccacactcatcacatttgtatggtttttcttcagtgtggactctctgatgggtatgaagatttgagctacaactaaagcgtttaccacaatccccacatttatatggtttctctccagtgtgaattctttcatgggcctgaagatgtgatctctgagtgaagcccttcccacacacctcacatttataaggtttctctccagtgtgaactctgcaatgaatgttaagatctgtgctacgactgaagcccttcccacaactgtcacatctatagggcttctctcctgtgtgaataggcaaatgagcataaagatgtgagctctgattaaagctcttaccacactcgtggcatgtatagggtttctaccctgtgtggactctctgatgagtttgcagatttgagctctgactgaaacctttaccacattcatgacaccaatagcggtttttcccattacgaacactctgttgaacaggaatacctgagctataactggtgtccttctcatgtgtactacacgctggagacttctttcc

SEQ ID NO: 3931 - DNA, 578 bp, Homo sapiens
  MAP TO CHR17.1; EXPRESSED IN FETAL LIVER, SIGNAL = 2.3; EXPRESSED IN HELA, SIGNAL = 1.3; EXPRESSED IN LUNG, SIGNAL = 3.5; EXPRESSED IN HEART, SIGNAL = 2.9; EXPRESSED IN ADULT LIVER, SIGNAL = 2.5; EXPRESSED IN PLACENTA, SIGNAL = 1.5; SWISSPROT HIT: P51116, EVALUE 3.00e-12; EST_HUMAN HIT: AL048333.2, EVALUE 1.00e-124; NT HIT: U31501.1, EVALUE 1.00e-124
aaatgctgggtgtgaaaagggaactaagactgctgtgggggtcagctcagggattttggttctctgtttgtctctccgtgtagaacagaaaacatctgtggaaatttggggctatagggttgggtcccagaattttccttgtttagccagtgtcttccttctccctgcattcctgagaggttagatatagagggacagtcagggtgcagaagcatgaagcaaggcactgatcttatttctccttccccttcttccatcttttacccaaccaggaggtagagcagcttcgcttggagaggctacaaattgatgagcagcttcggcagattgggctgggctttcgccctcctgggagtgggcggggcagcggtggcagcgacaaggctggatatagcactgatgagagctcctcctcctccctccatgcgactcgaacctatgggggcagctatgggggccgtggccgtggccggaggacaggcggtcctgcctatggtgagacagttatgggaacaggaggcaaggagtggcagggcttgtgggtagaggcagaggtctggatggaagtttggggaaat

SEQ ID NO: 3932 - DNA, 566 bp, Homo sapiens
  MAP TO CHR7.1; EXPRESSED IN HEART, SIGNAL = 0.89; EXPRESSED IN FETAL LIVER, SIGNAL = 0.49; EXPRESSED IN LUNG, SIGNAL = 0.79; EXPRESSED IN HELA, SIGNAL = 1.9; EXPRESSED IN BONE MARROW, SIGNAL = 0.36; NT HIT: M59783.1, EVALUE 0.00e+00; SWISSPROT HIT: P15121, EVALUE 4.00e-26; EST_HUMAN HIT: BI917326.1, EVALUE 1.00e-118
tttgctgaacaaagtggcaggctggtcagcagggatcggtggctgccactgcccctcctccttgctgtgcagactctgcattctgcggggctcacgttctttctcctttcagtcccctccagggcaggtgactgaggccgtgaaggtggccattgacgtcgggtaccgccacatcgactgtgcccatgtgtaccagaatgagaatgaggtgggggtggccattcaggagaagctcagggagcaggtggtgaagcgtgaggagctcttcatcgtcagcaaggtatcgttccgcggtggggctggaaggggctctcggtcccatcatctgttggtgcatcagcccaaagccaagtccacactcaatacagctacacttttcactgatgggcgattcttccaggggaaacgtatcacccacggccatacagggctccagagctcgcccatccttggctctctgttgaatggtcattccatctgggcccattgcttagagtcccgtgctgatgaggctgaggttgtggattggccctccctttccagggagtcgctttcaaggatggaac

SEQ ID NO: 3933 - DNA, 585 bp, Homo sapiens
  MAP TO CHR5.1; EXPRESSED IN ADULT LIVER, SIGNAL = 1.6; EXPRESSED IN PLACENTA, SIGNAL = 1.3; EXPRESSED IN LUNG, SIGNAL = 1.1; EXPRESSED IN FETAL LIVER, SIGNAL =   1; EXPRESSED IN HELA, SIGNAL = 1.4; EXPRESSED IN HEART, SIGNAL = 0.72; NT HIT: gi14735827, EVALUE 5.00e-60; SWISSPROT HIT: P49419, EVALUE 1.00e-16; EST_HUMAN HIT: AL578320.1, EVALUE 7.00e-60
acttggttgtgtcacatggcatggctctctatccctgcctgactccttatttccatttttctctgaccaactaagttagaaccaatatcaggaagagagaattttctttcatgattggaagttattttggagaaataattcacctataaatgatgctaatttttttctttataaatgtaggcaaagattgcatcctctgaccccaagtcctagaaaacaaaatgctttcattctttttatttcatttctctgcattaggttatggatcgccctggaaattatgtagaaccgacaattgtgacaggtcttggccacgatgcgtccattgcacacacagagacttttgctccgattctctatgtctttaaattcaaggtaaaaatgcattctgttcgctagcctgatgttgaaataaatgataagaggaaaatgatggtggattaaatttcactggatgaacctttaagagggttttagaaagtaatctgaatagtagatatatgaaggttcaggataaaatatgagataaacactttaaaactctatagcatgccaagctagctgccagggaaaccagattgggta

SEQ ID NO: 3934 - DNA, 511 bp, Homo sapiens
  MAP TO AC011430.5; EXPRESSED IN PLACENTA, SIGNAL = 5.3; EXPRESSED IN FETAL LIVER, SIGNAL = 4.1; EXPRESSED IN LUNG, SIGNAL = 4.5; EXPRESSED IN HELA, SIGNAL = 4.8; EXPRESSED IN HEART, SIGNAL = 3.5; EXPRESSED IN BONE MARROW, SIGNAL = 4.8; NT HIT: gi12731110, EVALUE 0.00e+00; SWISSPROT HIT: Q60716, EVALUE 7.00e-39; EST_HUMAN HIT: BF868618.1, EVALUE 0.00e+00
tcctctgccactctccattcccatcttaccttcccctagaatctccttaccaagggagagcaggcggcgggtgagctccagggcacggtgcagatcacccaactggaagacagcatagctgaggtagtccagcacctgtgacttggttgtggtggcctcctccccggcatcaagctgctttagcacctgctccatccacaacaccgtatgataatagtccccttcattgtaggccgagcggcccatcccaaagcagtcatccacactcagcattgcctggtacttggttcctacagcaggggaagtaaattgtcaggctccaaagagcctctggattagggaaagagattcccgcttcaaggaaagcctgagccactggatagggggcatcaccaagcagaactccatcggacatttagactgcatatcctaaagggccactgacacagtgagcacagacagatggcccagccctgccctggactggggttcacagccacctcttagcctc

SEQ ID NO: 3935 - DNA, 528 bp, Homo sapiens
  MAP TO CHR5.1; EXPRESSED IN HELA, SIGNAL = 0.69; EXPRESSED IN HEART, SIGNAL = 0.51; SWISSPROT HIT: O95704, EVALUE 6.00e-34; EST_HUMAN HIT: BI919092.1, EVALUE 0.00e+00; NT HIT: AB024745.1, EVALUE 0.00e+00
ggagaaggatctccctttgggggccgcagtccccagatcccctccgttccctgtagagtgggagttagtcagtttaacagcagacctaggtccacacatgggctcagacctcctcctcacactctacctaccgtgcctgggtcctctgcatctcctagttcccaggttgggcgctgccactgggtgctaccgctgggtacatgccagtagtaagtacctgcagcatcgtggatcttcctccagccaggaggcaggccagcctccacctccagactgtggtccccccacaagtcatctacaggaacaccggattagagaggagggagcatatgatttgtgagttcagaataacatgctgtcataatccctctccatccccaaaatgggtcagttcttaggctgaagatccaggctcctcaatcttgaagacatcacatgtaaagaccgggttcattcgccccctggtccctacacagagaggtatcccccaccgtctttgagccccagagtagcctttcggattccctc

SEQ ID NO: 3936 - DNA, 592 bp, Homo sapiens
  MAP TO CHR16.1; EXPRESSED IN HELA, SIGNAL = 1.7; EXPRESSED IN LUNG, SIGNAL = 0.71; NT HIT: U41302.1, EVALUE 0.00e+00; SWISSPROT HIT: P53796, EVALUE 5.00e-37; EST_HUMAN HIT: BF842245.1, EVALUE 0.00e+00
tggggacctctgaacatacctgcccgcaagggggaccggaggtgctcggagtgggcttgtgagggaggtggtgccgcagtccccgctgagcagcctggccccccagatcgtgtacttcactgctacattcccctacgtggtcctggtcgtgctgcttgtgcttggagtgctgctgcctggcgccctggacagcatcatttactatctcaagcctgactggtcaaagctggggtcccctcaggtgaggtggaggtggggaggctgcagcagggtgttgtgggggagccctgcaggcccctcatgcctgcactctccagccctcctctaggtatggatagatgtggggacccagattttcttttcttatgccattggcctgggggccctcacagccctgggcagctacaaccgcttcaacaacaactgctacaagtaagcactgctgccctgccacccgtgccctgtcccgccctgccctgcccagcagcctaacccatccactctggcccctccacccctccgggacgccatcatcctggctgtcatcaacagtgggaccagcttctttgctggcttcgtggtcttctccatc

SEQ ID NO: 3937 - DNA, 551 bp, Homo sapiens
  MAP TO AC019146.4; EXPRESSED IN FETAL LIVER, SIGNAL = 0.94; EXPRESSED IN HELA, SIGNAL = 0.88; EXPRESSED IN BONE MARROW, SIGNAL = 0.7; EXPRESSED IN HEART, SIGNAL = 0.97; NT HIT: gi14752378, EVALUE 0.00e+00; SWISSPROT HIT: Q9P2Q2, EVALUE 3.50e-01; EST_HUMAN HIT: BG493905.1, EVALUE 0.00e+00
tcttaccttttgttgtgttgtggtatccagtgatttcggtggaaaagtacaaggtattcttccatgatggatatgatatggtaataacaggctgggatctaatgggacccagggaactgagagactggaaggtacaccaggaaggccgcaatgtgttttatacaaattgtatgctgtcctagtaacttttccatcagaggccttataaatcaggagtgaagaatcttctgctgcatgagataacaagtaggaaccctcctgcaagctaaattcacacaatgaaactcaacccactggctcactgtgtcaatttcaacatcactttcttaatcataatctattagtaaaattgaaaattatgagaagatcacaccacctctaaaaatacttttatgacaaaataagatttaagaaatctttaaaactatttttatgctttttaggcaactaattttaattcttattccaaagttcagaatagttgatcattttctttttacttttatagcaattcgtaagttttcatttaatgggaaacaaacagtgtgcct

SEQ ID NO: 3938 - DNA, 535 bp, Homo sapiens
  MAP TO CHR5.1; EXPRESSED IN PLACENTA, SIGNAL =  38; EXPRESSED IN LUNG, SIGNAL = 8.7; EXPRESSED IN HELA, SIGNAL =  75; EXPRESSED IN HEART, SIGNAL =  23; SWISSPROT HIT: P04406, EVALUE 2.00e-74; EST_HUMAN HIT: BI858420.1, EVALUE 0.00e+00; NT HIT: AF261085.1, EVALUE 0.00e+00
caaggctgagaacaggaagcttgtcgccagtggaaatcccatcaccgtcttccagggcgagatccctccaaaatcaaatggggtgatgctggtgctcagtacattgcggagtccacttgtatcttcaccaccatggagaaggctggggctgacttgcagggaggagccaaaagggtcatcatctctgccccctctgctgatgcccccatgttcgtgatggatgtgaaccacgagaagtatgacaacagcctcaagatcgtcagcaatgcctcctgcatcaccaactgcttagcgcccctggccaacgtcatccacaactttggtatcgtggaaggacccatgaccacagtccatgctatcactgccacccagaagattgtggatggcccctccgggaaactggcataacggccgtggagctctccagaacatcatccctgcctctactggcactgccaaagctgtgggcaaggtcatccctgagctgaacaggaagcttactggcatgggattctgtgtcctcactgccaatgtg

SEQ ID NO: 3939 - DNA, 599 bp, Homo sapiens
  MAP TO CHR17.1; EXPRESSED IN BONE MARROW, SIGNAL = 1.4; EXPRESSED IN FETAL LIVER, SIGNAL = 1.9; EXPRESSED IN PLACENTA, SIGNAL = 1.7; EXPRESSED IN LUNG, SIGNAL = 1.1; EXPRESSED IN HELA, SIGNAL = 2.6; EXPRESSED IN HEART, SIGNAL = 1.8; EXPRESSED IN ADULT LIVER, SIGNAL = 2.9; EST_HUMAN HIT: BI160914.1, EVALUE 2.00e-72; SWISSPROT HIT: P34666, EVALUE 9.00e-05; NT HIT: gi7661671, EVALUE 1.00e-72
ccgctctaggtcttggtgtcagccactgtctagaggctactcaaccccacccaacacatgccaccacttggaagcagaaccacagggacatggtttatatttagactcccttcccccggcagtcaccttaaggacaccatacaccttggggcctacccctgctagaaggggtccaggctggccacataccctcatgcccatgtagaaggggatgacagtgacacgtatgttctcagttgtttcccgatgaacatcggagagctccagccaggggtgattcttctcttgccaggcccttagcgtctcccgagccacaaaaggaggtgctggggcaagatacaattggttagtccaattgtgtgttgtggatacaattgtatctagtccaatcacacaatagtccagtgcgattgcccctcctagaaaaccctccctagtggtggcccaggcaaacaaggtgctcatacatgaagcaaaagttcaggctggaagaaggcacaggactgctaccaagaataagccctgaggagctagtgtgatacaatgggaaaacaatcggactggcagttaagagccctggttttcagccctcactctgc

SEQ ID NO: 3940 - DNA, 565 bp, Homo sapiens
  MAP TO CHR12.1; EXPRESSED IN HELA, SIGNAL = 0.85; EXPRESSED IN ADULT LIVER, SIGNAL = 1.4; EXPRESSED IN BONE MARROW, SIGNAL = 1.1; EXPRESSED IN LUNG, SIGNAL = 0.59; EST_HUMAN HIT: BI255238.1, EVALUE 1.30e-02; SWISSPROT HIT: Q06938, EVALUE 7.00e+00; NT HIT: X04964.1, EVALUE 5.40e-01
tgtccatggagtcagtgagcttatgatgaagccacggctagcatgcatcatcgcttcagtcatcaaaaattcattaagtgcccatctgcaaaaggcactatactaattctcctagaaggagaatgtcaatatggcttccttgtgccctgccaagtttttattaatgtgcttattaggtgagaaatatctacttccctgtgtttaaagaggagactgagaaaatacaggaatcctagcttccttcttactccataaggcaaactttcaaataataagcagatccacagcagatggactggtttttagcactcctgagggggagaggatggagccagtctgtctctgtctctctctaaatctagagagaacgtgagccagcgtgagcgtgagcatgtccgcctgtgtgtgtgtgagaactacagggagaaagagaaggggacagggctgaaggaaggaaaggagggaagaggaaggagggcccagaaaggagaaaaaagaaacagtaatcacccagagcagagtagaagaatcacgaggacaaggaggccaaacaagggagaagtca

SEQ ID NO: 3941 - DNA, 506 bp, Homo sapiens
  MAP TO CHR17.1; EXPRESSED IN FETAL LIVER, SIGNAL = 1.3; EXPRESSED IN LUNG, SIGNAL = 2.1; EXPRESSED IN HELA, SIGNAL = 1.1; EXPRESSED IN HEART, SIGNAL = 1.5; EST_HUMAN HIT: AL558270.1, EVALUE 9.00e-93; SWISSPROT HIT: Q9QZZ4, EVALUE 3.60e+00; NT HIT: gi13385657, EVALUE 7.00e-31
agagatactctccccagccccacctgctagggtagctctcacacacacatttttggagacaagaaggaaattcaggaggcccacccaatccagagcccaaaagccaatacagaatcaagtgcggatttcatcttaaaatatctggatcaggcagtcaaactgaaataatgacgtgcatgacaatggctgagtgtcctacttcactatggccagagacaagattactttaatccaccatcccaccaccaagtgacatgtacccaaattcctccttacctcctgtggggggctgggaggagatggcaggcatgatgggtggatggctggtttcggggggatatattcagtcacagccatcagcttctgccgctgaaagtgcatcacacgacggtggcgggtaacagccttggagccatagcggacagtctggagggtaggcagccggcctgggagggcatatagcaacatggttagaggcaacctcctggaggccctagtttatccca

SEQ ID NO: 3942 - DNA, 589 bp, Homo sapiens
  MAP TO CHR3.1; EXPRESSED IN HELA, SIGNAL =  23; EXPRESSED IN HEART, SIGNAL =  12; EXPRESSED IN ADULT LIVER, SIGNAL = 2.6; EXPRESSED IN PLACENTA, SIGNAL =  17; EXPRESSED IN FETAL LIVER, SIGNAL = 7.2; EXPRESSED IN LUNG, SIGNAL = 4.9; SWISSPROT HIT: P05065, EVALUE 2.00e-51; NT HIT: gi14775810, EVALUE 1.00e-116; EST_HUMAN HIT: BF837605.1, EVALUE 1.00e-116
tcttcaagagagcgtgggaggggatggggcctggggtgttggggggcagcctgggaacacctccgcttactaggcatggttaaagatgaagagggactcactggcagcagccccagcctgaccgcttggagtatactttccttgacaggcgtggctatctgccagggctcacttgacatactccttctgcacagccttcaggttctccttcttcctgccccaggccttcagggcagaggcctgcagggctcagctatatgagaaggtcaggccccagggcttcaggagggggcacttgttaatggcattgaggttgatggacacttccttgctctggcctccagacaggaaggtgatcccagggacagtggggggcactgtgcagtgcagcacttagtttttgtgtctgtgaagtgagaatgaccccacctgcctcagtgatgagtctgggtgggccctgttctggcccagttgtgatccttctaggccgcttattccccagagtgtagtgcttgtgacagttgccatggcaatctcctcatgagaaaacttctggatgcaggcatggcctggggtgaccatattggac

SEQ ID NO: 3943 - DNA, 508 bp, Homo sapiens
  MAP TO CHR7.1; EXPRESSED IN FETAL LIVER, SIGNAL = 0.82; EXPRESSED IN HELA, SIGNAL = 1.1; EXPRESSED IN LUNG, SIGNAL = 0.73; EXPRESSED IN HEART, SIGNAL = 6.2; EXPRESSED IN ADULT LIVER, SIGNAL =   1; EST_HUMAN HIT: BF307668.1, EVALUE 1.00e-112; NT HIT: AF252549.1, EVALUE 0.00e+00; SWISSPROT HIT: P21333, EVALUE 4.00e-31
ctggtcaggaagtttcagggaggagagagtgcggccaagggggtgctgggcaggacgaggacaagtgcctgtgggaggcacccgctggaatgggggctctctggggcaggaggtacctgcattgcgagtgtccacgatgaactctgccacctggaatgtgtgtccctcggaaagccccttgccccagacccgcaccttgctggcgtccccgatctcagatggccccaccaggatcttgaaggggctgttggtgacatgcttgccactcttgcgcacgctcaccacgtgctccccgacctccttgggggtgaaggagatccctgtggaaagtgggtgttaggcagagcatcctgtgggcccccacccctgaggtccccgtgaggccccacgctcaccaatgtgccggttgggcaggcgcttcagcaggcagggctcctcgttgcccgagggggcacggatgctggcggtcagctggctcagatcactctcggtgatcttcagtgacacg

SEQ ID NO: 3944 - DNA, 570 bp, Homo sapiens
  MAP TO CHR13.1; EXPRESSED IN ADULT LIVER, SIGNAL = 1.4; EXPRESSED IN BONE MARROW, SIGNAL = 1.3; EXPRESSED IN HEART, SIGNAL = 0.89; EXPRESSED IN FETAL LIVER, SIGNAL = 1.4; EXPRESSED IN PLACENTA, SIGNAL = 1.2; EXPRESSED IN HELA, SIGNAL =   1; EXPRESSED IN LUNG, SIGNAL = 0.69; SWISSPROT HIT: P15374, EVALUE 9.00e-17; EST_HUMAN HIT: BG720417.1, EVALUE 7.00e-69; NT HIT: gi5174740, EVALUE 5.00e-69
caattccaaagaaatggagtttgaaaaaagaggttttatttcacatgttatgaatgttaaatgtttgttatgtgctataaataaattgctatctcttctcaccctattcatagaaaatctgctttactaccattctgcccccctagttttactgaagtataattgacaaaaattgaacatatttagagtgtgcattgtgatgttttgatatgtgctgctttactgcattcctactgaatgtcagttacatttgtattttatccctttataggtattagatacagagtacatatttgttgatcatttcccttttaacactatgtatagtatactagttttcttttaccaactaatgttccattgttttttttttctttctttcttttaccagtttcttaaacaattaggtctacatcctaactggcaattcgttgatgtatatggaatggatcctgaactccttagcatggtaccaagaccagtctgtgcagtcttacttctctttcctattacagaaaaggtaattgttatgtaaaatagaaagtttctggtaaatacaatttttgtttt

SEQ ID NO: 3945 - DNA, 507 bp, Homo sapiens
  MAP TO CHR3.1; EXPRESSED IN PLACENTA, SIGNAL = 1.5; EXPRESSED IN HELA, SIGNAL = 1.2; EXPRESSED IN FETAL LIVER, SIGNAL = 2.1; EXPRESSED IN LUNG, SIGNAL = 1.9; EXPRESSED IN ADULT LIVER, SIGNAL =   3; EXPRESSED IN BONE MARROW, SIGNAL = 2.2; EXPRESSED IN HEART, SIGNAL = 2.3; NT HIT: gi15299161, EVALUE 3.10e-02; SWISSPROT HIT: Q91616, EVALUE 4.70e+00; EST_HUMAN HIT: BI193780.1, EVALUE 2.80e+00
tgtggaagagtgcaaacaggggctgccaccactgcttggaccactctgccttgtcccccttgctgaccaggacagtgagaaaggacaaaggcaaccagctcactaggatcccctgtctgctttctgactctccaataagtggcatggaaaggtatcagtagaaaacaaaatgagcaatttgtcagtgaaaaactctagagtgactaagaggaccagccctgcaaaatccatacctggggaatgaagatgaagcagttgattgtagttgtacaaacaaagatccctccagatgtgagtccaaagaccaggttgggccaggaatgcaagtatctggtgactacaaaaagcagcccagcagccagtacaaggaggttgacccccaccatgatggttaaggactgattcacaggaggggagctgacatggccagtcaggccagccaggtaggcaccatacagcaggagcagaccctggggggtgaagaggtgacggaggctcagagaagtg

SEQ ID NO: 3946 - DNA, 548 bp, Homo sapiens
  MAP TO CHR7.1; EXPRESSED IN BONE MARROW, SIGNAL = 9.4; EXPRESSED IN ADULT LIVER, SIGNAL =  12; EXPRESSED IN HEART, SIGNAL = 6.3; EXPRESSED IN FETAL LIVER, SIGNAL =  11; EXPRESSED IN PLACENTA, SIGNAL = 9.1; EXPRESSED IN HELA, SIGNAL =   8; EXPRESSED IN LUNG, SIGNAL = 5.8; SWISSPROT HIT: P07942, EVALUE 3.00e-35; NT HIT: M61924.1, EVALUE 1.00e-115; EST_HUMAN HIT: BF841013.1, EVALUE 1.00e-111
atggtgcaaagggctaaatgtaactctgtaaaactaaaacccccagaaaatgtaaaaggcttaaggtaagactagcttcactttgcattttattaccagccacataaaggagaaaggtgcacagagggcttacttaccattccttccacttcttcattgaatccatccacaggggcacattcgctggcatgaccatagcagaagcaatttcctcgaaccaccatatcataaactgcataataatacttttctctgatttccatcctggaatccagaaggttatctcccaaagtatgcagtttcacaaacttgattctcaagttggtaatttttaataaatctaggaaggtcatcaagaagatgaaaagtctgatcagacaagcaagaagtttttttttttttccttgcatcatttctttttagagaaaggcatgacacatgaaaatagcttaagttcctcctcttgtatgatctagatgactccaatagtgaagcctaacataacatgactgcaaagaggaaaggttactgccctctcatcagtttca

SEQ ID NO: 3947 - DNA, 574 bp, Homo sapiens
  MAP TO CHR20.1; EXPRESSED IN FETAL LIVER, SIGNAL = 1.3; EXPRESSED IN HELA, SIGNAL =   2; EXPRESSED IN LUNG, SIGNAL = 1.1; EXPRESSED IN HEART, SIGNAL = 1.3; NT HIT: AB001517.1, EVALUE 0.00e+00; SWISSPROT HIT: Q15269, EVALUE 2.00e-27; EST_HUMAN HIT: AU122499.1, EVALUE 4.00e-98
gactcagcggtctcaggaacaaagaacaaggccaaaaatggagaagctgcaggagcctggtggctggctggggtctcaaatcaggaggcccgatgctgacactcacttccccttggccgcgtgcttggctgtaatcttgtccagctccttcctgccagtcttgaggtcatgcctgccctcaatggagcccgtctgcaccgcgttctcagggtcccagaaggtgatctgtgagttcagtgtggccacagccagctccgcaccatcagggcgaaaagtcacagccagagctaaacagagatgcaaagtaaggcccaacgaagaccccagtctcccgcaggcaggccaccaaccacccttggctggagaccaggccgtgccctggcacccctaagagaccagcgcctgtttggtctggtacacaagaatctcctcccaggagaagctccaacccagacaggtgaggaacaactcagcgccagtgaagagcaccaggcggtccagctggggccacaggacccacaaaggccgatggagggggcgctgggaaggtgaggctgatgggtgagtgatggtg

SEQ ID NO: 3948 - DNA, 599 bp, Homo sapiens
  MAP TO CHR2.1; EXPRESSED IN HELA, SIGNAL = 1.1e+02; EXPRESSED IN ADULT LIVER, SIGNAL =  17; EXPRESSED IN PLACENTA, SIGNAL =  56; EXPRESSED IN FETAL LIVER, SIGNAL =  27; EXPRESSED IN LUNG, SIGNAL =  35; EST_HUMAN HIT: BE876552.1, EVALUE 0.00e+00; NT HIT: AY014272.1, EVALUE 0.00e+00; SWISSPROT HIT: P48975, EVALUE 2.00e-99
acctatagccatgctcggtgaggatcttcatgaggtagtcaggcagttcccgcccagccaggtctaggcgcagggtggcatgggggagggcattcccctcatagatgggcacagtgtgggtgaccccgtcaccagagtccatcacgatgccagtagtacggccagaggtgtacagggacagcacagcctggatggccacgtacatggctggggtgttgaaggtctcaaacatgatctgggtcatcttctcgcggttggccttagggttcagggtggcctcggtcagcaggacggggtgctcctcgggagccacacgcagctcgttgtagaaggtgtggtgccagatcttctccatgtcatcccagttggtgatgatgccgtgttccatggggtacttcagggtcaggatgcctcttttgctctgggcctccttgcccacataggactctttctgatgcatgccccccatcatgccctgctgcctggggcgccccacgatggaagggaagacagcccggggggcatcgtcgcccgcaaagccggccttgcacatgccagagccgttgtcaatgacgagcacagcggtatcatcatccatg

SEQ ID NO: 3949 - DNA, 523 bp, Homo sapiens
  MAP TO CHR3.1; EXPRESSED IN HELA, SIGNAL = 3.7; EXPRESSED IN HEART, SIGNAL = 3.4; EXPRESSED IN PLACENTA, SIGNAL =   3; EXPRESSED IN FETAL LIVER, SIGNAL = 2.9; EXPRESSED IN LUNG, SIGNAL = 3.5; SWISSPROT HIT: Q12894, EVALUE 3.00e-13; EST_HUMAN HIT: AW960774.1, EVALUE 0.00e+00; NT HIT: gi14737419, EVALUE 1.00e-84
tcaagaaaggttggacctgggggtgtgtgggagacttaaactgggcagacactggcccttgctgcatgggctgactggaaagcatcccacagggaagggcgaggaacaagccctggctgctgctgtgctaggcctgctctgcgtgcagctgggccctggacctaagggtgaggagctgtttcacagcctgcagcctctgctggtctctgtgctcagtgacagcacagctagccctgctgcccggctccacgtgagtgtgcctgtgccccatgaaacccttcctgcaccttatccctcagcagagtggtgggttccccctatcttcagcctcctttactctgaggggagtgagctccagggctgggaacccaggttcacccgctgaccgtggcattgcattgcccttctcccaacagtgtgcttctgcccttggcctgggctgctacgtggctgccgctgacatccaggtgaggggtctttgggcacaggtggtagagcatctagggctgtaactctgcctctg

SEQ ID NO: 3950 - DNA, 578 bp, Homo sapiens
  MAP TO CHR7.1; EXPRESSED IN FETAL LIVER, SIGNAL = 3.9; EXPRESSED IN PLACENTA, SIGNAL = 2.7; EXPRESSED IN HELA, SIGNAL = 2.9; EXPRESSED IN LUNG, SIGNAL = 2.7; EXPRESSED IN HEART, SIGNAL = 3.3; EXPRESSED IN ADULT LIVER, SIGNAL = 4.9; EXPRESSED IN BONE MARROW, SIGNAL = 3.6; EST_HUMAN HIT: BG166837.1, EVALUE 8.10e-01; NT HIT: AL161498.2, EVALUE 5.50e-01
tgaattcaatggctttgctgtgatcctaaattaatttcttgaagggctatccctaggatattgtgaggatataaaataaatacaattctttacatatctaaaacattctgacagggaaaattttccagatgtagaatgctcatctgcactagaacattttctagtagaacttctgctagtggggaaaacatgataacaacataaggtttaaaaaaaaaattttagaaaatacttcaagattaagacaaagataagaggaaatgctgtcttgagtgttgttaaacattctgtgggttaccaaggaaggctgggaaatctcttctggagatctcagaaaatgagaaagattcttaaagttggagtcataaaaactcagggttggcagagaccttaaaggtcacttagctgaaccacccatctggtgcttgaatcacctcaacactatccttgccaagtggtcattgttaaactattttatgatttttctgaagaaggttacagaatcttcttcagagatcttagggaaaaaaaaaaaagattgtcgtgagagttgaaaatcctgccattgtaaccagttg

SEQ ID NO: 3951 - DNA, 558 bp, Homo sapiens
  MAP TO CHR14.1; EXPRESSED IN HELA, SIGNAL =   7; EXPRESSED IN BONE MARROW, SIGNAL =  16; EXPRESSED IN HEART, SIGNAL = 4.1; EXPRESSED IN ADULT LIVER, SIGNAL = 5.2; EXPRESSED IN PLACENTA, SIGNAL = 6.4; EXPRESSED IN FETAL LIVER, SIGNAL = 5.5; NT HIT: X57331.1, EVALUE 0.00e+00; SWISSPROT HIT: P04220, EVALUE 4.00e-74; EST_HUMAN HIT: AW338332.1, EVALUE 0.00e+00
agcatcgtgcactcaggaccagtatcttttgaatggatctttttatttctaattttataagatgcaacatctcaccccgttgacacggttagtttgcatgcacacacagagcggccagccgccccgagcctgtgggcaggccagcagggtcagtagcaggtgccagctgtgtcggacatgaccagggacacgttgtacagggtgggtttaccggtggacttgtccacggtcctctcggtgaccctgttgggcagggcctcatgggccaccacgcaggtgtaggtctcccccgtgttccattcctcttcggacacggtcaggatgctgtgggcgaagtaccggcctggggcctggggctcaggcattggggcgctggtcacatacttctccggggacaagggctgccccctctgcatccactgcacgaagacgtccgcgggagagaagcccgtcaccaggcacgtgatggtggccgactcccgcaggttcagctgctcccgggctggtggcagcaagtagacatcgggcctgtgcagggccacccctgtgaacagagat

SEQ ID NO: 3952 - DNA, 578 bp, Homo sapiens
  MAP TO CHR12.1; EXPRESSED IN ADULT LIVER, SIGNAL = 0.76; EXPRESSED IN PLACENTA, SIGNAL = 1.7; EXPRESSED IN LUNG, SIGNAL = 1.1; EXPRESSED IN HELA, SIGNAL = 1.9; EXPRESSED IN HEART, SIGNAL = 1.1; EXPRESSED IN BONE MARROW, SIGNAL =   1; SWISSPROT HIT: Q9RSH4, EVALUE 6.40e-01; EST_HUMAN HIT: BF852078.1, EVALUE 5.00e-05; NT HIT: gi14761652, EVALUE 0.00e+00
cagcagctctcgtagtcgctggcgctatgcaaaaaaaagagaagaggaataagcccattctactccaatcatagggctgccccagagacaggagcgatatagggggcttagctccagggtgtcaacttacctgccgttgcttctccagctctgtttggctaaggccggacatgcctgggtcctgggtacctgggagttcagctgtcgccaaagagctacccattccagtccctgggtcttctcgcttttcgacaggagaggtgatgcctgatcgctgtgaggctccatgggacaggtaggggagggatccgtcgggtgcaggtggtggcagaaccgacggagggcgtagtggggacagcccatagctctcccctgtggacccgctgctgggccccagggggctgcccgatgggtggaagttccctgtggctactgtgtagtttgtgctttgaggcttgcccaaggtggggccgggcccaaaatggctgttgatcccatggggtggcgggagaccaggctgagggacagggggctttagggaaggctcccctactgcctgagggaaagtgaaacgcatg

SEQ ID NO: 3953 - DNA, 512 bp, Homo sapiens
  MAP TO CHR22.1; EXPRESSED IN HELA, SIGNAL = 7.1; EXPRESSED IN FETAL LIVER, SIGNAL = 5.4; EXPRESSED IN LUNG, SIGNAL = 3.4; EXPRESSED IN HEART, SIGNAL = 4.4; EXPRESSED IN ADULT LIVER, SIGNAL = 4.8; EXPRESSED IN BONE MARROW, SIGNAL = 6.2; EXPRESSED IN PLACENTA, SIGNAL = 6.4; NT HIT: gi15317311, EVALUE 7.00e-65; SWISSPROT HIT: P39060, EVALUE 1.40e-01; EST_HUMAN HIT: BG330534.1, EVALUE 1.00e-64
gaggagcaaggagtgctttgccagtttggcccttagttcatatttagagctgttggcttttcagctcaaccagcctagatgcccgcatcccacaatgtggcctccaggctggccccagagcattcagcacacccttctgccccctgacaccctgctcggcttgtctgaaacaggtctcagagtggcctggtacacatctggagcctgcagacgcggagagcggttaccaccctggatggccacggcggccagtgtgtgacctggctgcagacgctgccccaggggcgccagctcctcaggtgggtctccaaggtgcaggagccaggtatggccttcgggggagtcaggaactctctgatggaggctctggtgtcccccactgaggggcagaatggggtgggggaaccagaaggggccagcaaagggtccgcagcaagggcagggtgtgcaggtccagccccttgtcacagggaggcaggcaggtctgcctctgcatctccaccatctccact

SEQ ID NO: 3954 - DNA, 587 bp, Homo sapiens
  MAP TO CHR19.1; EXPRESSED IN HELA, SIGNAL = 1.1; EXPRESSED IN LUNG, SIGNAL = 1.5; EXPRESSED IN HEART, SIGNAL = 1.5; SWISSPROT HIT: P55459, EVALUE 1.50e+00; EST_HUMAN HIT: BI830310.1, EVALUE 1.00e-117; NT HIT: AB037816.1, EVALUE 1.00e-117
tgaacaaagtcccagggaaggctttcattggcccagcccaggcccttggagccagtccctagggtgggtagatgtgttttgattgaccagataaggatcacctaaagccccaaatgtgggataaggagtagcctcccccagcaatggtaaaagttgggaggctctccagacagaagtttctggaaagagggtaggcaaaacccccaggtgacccttagagtgatgaccctcaccccctgaccctcaatttccccatctctagaatgagtatgaggacactctcaccagagtgaggtgaaggtgtatacagctggcactcagtgcttgcacattctccactggcagaatgactcccggcgtggctcgggctccccggaagacacccctcgaagcagtggtgcctctagcatcttcgacctgaggaacctggcagctgactcattgctgccctctctgctagagcgggcggccccagaagatgtggaccggcgcaatgaaacccttcgacggcagcaccggcccccggccctgctcaccctctacccggcacctgacgaggtgggtgccccttcccagatatcagccaa

SEQ ID NO: 3955 - DNA, 507 bp, Homo sapiens
  MAP TO CHR19.1; EXPRESSED IN PLACENTA, SIGNAL = 1.2; EXPRESSED IN FETAL LIVER, SIGNAL = 1.5; EXPRESSED IN LUNG, SIGNAL = 1.4; EXPRESSED IN HELA, SIGNAL = 1.1; EXPRESSED IN HEART, SIGNAL = 1.5; EXPRESSED IN BONE MARROW, SIGNAL = 1.6; NT HIT: gi14760067, EVALUE 1.00e-63; SWISSPROT HIT: P17024, EVALUE 4.00e-18; EST_HUMAN HIT: BE408214.1, EVALUE 2.00e-62
ggtttctcctgggatttttgtactcatcttcaattttctgatctttccatttttttcctaaaatacagaaccagaaaaatagtcctgaattagcaaaattatgaaaaaagtactagattctaagttcatggtacactgcagccttgcagcatttattcacattcctattccctgtcctcactattccctgtccacactccaaatcactcaacactactgacaagctagaaacacttgttctctaattcactgaggaaagtaatattgttacccttacctacagaagccaggttcctgaaggtttcctgcatcacatctctgtagagattcttctgggaaggatccagcaaagcccactcctcctgggtgaagttcacatctacatcctcaaagaccactgaatcctgaaacatcccacatgtgtaaagaaacatgggtgagactgacagcactgggttcctatactctattcctacaaagtttccatggtgctatggactccaaaca

SEQ ID NO: 3956 - DNA, 569 bp, Homo sapiens
  MAP TO CHR17.1; EXPRESSED IN LUNG, SIGNAL = 1.1; EXPRESSED IN HELA, SIGNAL = 0.75; EXPRESSED IN HEART, SIGNAL = 1.1; EXPRESSED IN ADULT LIVER, SIGNAL = 1.3; EXPRESSED IN BONE MARROW, SIGNAL = 0.84; NT HIT: gi6912445, EVALUE 1.00e-122; SWISSPROT HIT: Q02280, EVALUE 1.00e-07
ccctctcctggccttctatctcctttcattcatggtcaaaagtgcccttgcagtgcccacctgctaactttccccatcccctgcctttcccaccccccatcttggctcctctttccctcaagtgtccccaaccgccacccctctccccttagaacgtgtttgagccaaagccatcagtgcccgagtacaaggtggcctccgtgggggggtctcgctgcctcctcctccactacagcgtctccaaggccatctgggacggccttatcctccttgccaccttctacgttgcggtcaccgtcccctacaatgtctgtttctcgggtgacgatgacacccccatcacttcgcgacacacccttgtcagcgacatcgccgtggaaatgctcttcatcctaggtcagaccttctgcctcacccaccctggtgggtcggctggggggatccacttggccaagcctcacccactcctggggcccacatgacccagacattcagagccccttcctttctgcatctttaagtcccaatggcccatgtgtcctgctccccgcagccttcagccttgtaac

SEQ ID NO: 3957 - DNA, 504 bp, Homo sapiens
  MAP TO CHR19.1; EXPRESSED IN ADULT LIVER, SIGNAL = 3.2; EXPRESSED IN PLACENTA, SIGNAL = 1.9; EXPRESSED IN FETAL LIVER, SIGNAL = 1.8; EXPRESSED IN LUNG, SIGNAL = 1.4; EXPRESSED IN HELA, SIGNAL = 2.2; EXPRESSED IN HEART, SIGNAL = 1.9; EXPRESSED IN BONE MARROW, SIGNAL = 1.5; NT HIT: gi14764241, EVALUE 3.00e-61; SWISSPROT HIT: Q92793, EVALUE 2.40e-01; EST_HUMAN HIT: BI193954.1, EVALUE 4.00e-61
acagcattacagcaaaccccgagtcacaccggtggaggtcatgcctgtcttcccagactttaaggtcaggcccaaggtgggaggtagaaagggacagcctatttgtgcctgttcccatctaaccccagtgcctccatctccctagatgtggatcaatccatgtgctcaggtgatctttgactcagacccagcccccaaggacacgagtggtgcagctgcgttggagatgatgtctcaggccatgattaggtaggtggtcctgctgtccaccttggcctgctccttgctgcctcttgtcctcacacttcattgctactccttttcccccaaccaggggcatgatggatgaggaagggaaccagtttgtggcctatttcctgcctgtagaagagacgttgaagaaacgaaagcgggaccaggaggaggagatggactatgcaccagatgatgtgtgcgtgggttgcggttaagttttggggattgggaagttttggggattgggat

SEQ ID NO: 3958 - DNA, 541 bp, Homo sapiens
  MAP TO CHR7.1; EXPRESSED IN HELA, SIGNAL = 0.86; EXPRESSED IN ADULT LIVER, SIGNAL = 0.62; EXPRESSED IN HEART, SIGNAL = 0.63; EXPRESSED IN BONE MARROW, SIGNAL = 0.7; EXPRESSED IN FETAL LIVER, SIGNAL = 0.48; SWISSPROT HIT: P55416, EVALUE 4.50e-01; EST_HUMAN HIT: BI037414.1, EVALUE 1.20e-02; NT HIT: gi14743430, EVALUE 8.00e-03
ctcccagagttcaagaagcgtcacaccgaattccacagcctcgtccaggctgaggtttgtggagaaggagagacaccgcatggggtttggctagagaggagccagcccaccttccccgagtgcctttgtttgattgagaaattactgtggctgtggcagctgtaataaaagggaacagagccccatgggcgacagctttatcgccatctacaacccaggatggattcggtggcagcactgtgcccaaggccagagatttctttcatctgcggctggctgggcccagggacttgtcaagcccaagttagcatatcgattgcaggcgacaggctggttaagtgtgaagctggtgctcacctgcgcaggagagcccggctgcaccctgcagtgttggccccaggtgtggctgctcattgctgggttccttctcatgtaagccctggagaaaggcgagcatgtggattgcagcctcagagagcgaggtgtgaatgtggggtttgccatgtgggttggggtctgagcattggcacctcacaggata

SEQ ID NO: 3959 - DNA, 595 bp, Homo sapiens
  MAP TO CHR1.1; EXPRESSED IN BONE MARROW, SIGNAL = 3.9; EXPRESSED IN PLACENTA, SIGNAL = 3.2; EXPRESSED IN FETAL LIVER, SIGNAL = 3.6; EXPRESSED IN LUNG, SIGNAL = 4.4; EXPRESSED IN HELA, SIGNAL = 3.8; EXPRESSED IN ADULT LIVER, SIGNAL = 5.6; SWISSPROT HIT: Q08372, EVALUE 2.00e+00; EST_HUMAN HIT: AI565093.1, EVALUE 5.00e-64; NT HIT: AF310325.1, EVALUE 0.00e+00
atgaaatggaggtgaggcagggaaaaataggaaggtttatattttaaaaacgaaattctaagaacaccttaaaattttagtgaaatgtcttgagataatgacttttgaaggatgccataagtaacaactttaatgctggtagaattagtatagtaatgatggaaattaaactttagagaagatacattgagaataagtaatttttaaaaatcttatttttgaaagaccaaatattaacctcatatttggtaagtagttatttagaagctgaggacaataacagatcaagtcagcaattgactttacatgatttaaaattttctttctttggtttacattatgttttggaaatcactaatagtgtttttaatgtatattacctcaagtttatttaattaccagattatgtttcttgtttctttttttagtgaaatagaaaaatctggtactattccgatagccaaaccaagtgaaactgagcagtctgaaactgattgtgatgttggtgaggcccttgatgctagtgctccaattgaacaaccttcctttgtcagtccacctgacaggtgggtaggagcagttgtttgtccttctt

SEQ ID NO: 3960 - DNA, 563 bp, Homo sapiens
  MAP TO CHR17.1; EXPRESSED IN ADULT LIVER, SIGNAL = 0.86; EXPRESSED IN BONE MARROW, SIGNAL = 0.8; EXPRESSED IN FETAL LIVER, SIGNAL = 0.94; EXPRESSED IN HELA, SIGNAL = 0.37; EXPRESSED IN LUNG, SIGNAL = 0.65; NT HIT: gi14784508, EVALUE 1.40e-01; SWISSPROT HIT: P55268, EVALUE 2.40e+00; EST_HUMAN HIT: BF219851.1, EVALUE 7.90e-01
tatcccatgaaggcagaaggcaagggagagctggccttggctcaggggtatgtcctgtaacacagtggtggaacaagagtatccagaaagattgcatttggaagtgggtgagctgagtgatgccttgttgagagtataatgccaacaggcagaaggaggttccttcttctccagcatagccaaagtgaagagacaagtgctgagagatgagtggctattactccctctgaggagcagcactcccaagttcctgctcactccacttcctggcatctgtcctgatgcatgccaaggaggctctttctgtacagcatgttctaatggggatgtagagcaccctccaccccctcacatatgtcctgagctggcatgaacaccagctcactggctgagcttccctggctcagtccccagtgttgggggtgacaatgaaggcaggaaggggtagaaaagtcaggagtccccggtgcttggggctgcccttggacaatgcctaggagggcttctctgtctcccacctctcacacagtccacagaattcctgctttccacgtttccacact

SEQ ID NO: 3961 - DNA, 599 bp, Homo sapiens
  MAP TO CHR7.1; EXPRESSED IN BONE MARROW, SIGNAL = 1.2; EXPRESSED IN FETAL LIVER, SIGNAL = 0.95; EXPRESSED IN HELA, SIGNAL = 1.5; NT HIT: gi14744065, EVALUE 0.00e+00; EST_HUMAN HIT: AA382656.1, EVALUE 0.00e+00
tgcagctgctgacaaaactcttctggcaggtgtcagagctactggtgctgccgtaactcttcttataggtaatgctgctgttgctggtagtgcagtaactcttcccataggcctcactggcactggtgctgctgtcatagctcttgagaaagctcttgctgctggtctgggtgctggtgtaactcttgtaatagctctcattgtcatccacagtggtatcataagtcttgcgacagttctcattgctggggaccatgctaccatagctcttcccgtaggactcaaggctcatttttatagaaggggactggacttgaagcagctgcatttcttccaggcagagctgcaagtctgcctgcagcctcttccgctcctctaggagcctcccttgctcttgctgcaagagctcctgcttcgcctgaccggcgtcatacatcacctgcagggcctgcatctgctccatgagcagcttggattgctgggggcaggggtggggagacagtatcattactctgacacttcagtccttccagctgcacctctcctggtacagatgtctgagagcacaccttagagaatggcacacctacatttccacc

SEQ ID NO: 3962 - DNA, 540 bp, Homo sapiens
  MAP TO CHR20.1; EXPRESSED IN FETAL LIVER, SIGNAL = 1.2; EXPRESSED IN HELA, SIGNAL = 0.93; EXPRESSED IN BONE MARROW, SIGNAL = 0.81; EXPRESSED IN HEART, SIGNAL = 1.2; SWISSPROT HIT: Q9Y6D5, EVALUE 4.00e-28; EST_HUMAN HIT: AW897896.1, EVALUE 1.00e-112; NT HIT: gi14786247, EVALUE 4.00e-94
aaatgtggattgctgtgtgctataagaaatgtttaagtgctgcttctaagggatgagctatgttcatttctcttcccattctccaaagtacagacgatatggccgtcccattctttcctcaggtctcccaccatccgggacatggcgatccgctgcattgcccagatggtgaactcccaggcggccaacatccgctcaggttggaagaacatctttgccgtgttccaccaggcagcctctgatcatgatgggaacattgtggagctggccttccagaccacttgccacattgtcagtaagtggctctgttccctccctactaatgtcccacctgcaagtctagaagagtgtcacttgctgtctattttactacctacaggggcttccctaccttggctctactgtgatatagtaatgtgccaggccgtgttgtaagcgcttgatgagtattaatcttgatcttaactctgttttgactttctccttgccttctctaaatggcctttcctgttatcagtcagttggggtccagcagataaa

SEQ ID NO: 3963 - DNA, 505 bp, Homo sapiens
  MAP TO CHR5.1; EXPRESSED IN PLACENTA, SIGNAL =  31; EXPRESSED IN HELA, SIGNAL =  15; EXPRESSED IN HEART, SIGNAL =  16; SWISSPROT HIT: P25111, EVALUE 4.00e-36; EST_HUMAN HIT: AW328259.1, EVALUE 0.00e+00; NT HIT: gi16159822, EVALUE 0.00e+00
ccctgatttttagcccagtgttctgtacaataaaattctgctttttgtggagaatatatacaaacgtttttatttttatttttattttttgatttaataaagttttatttttccaaatgtacagctggttggacctattcatgcatcttcaccagcagctggagcatctccacccttggtatttctggtgtaaattacttgagctctgtgctttgaaaccagtttgataagtcctttactaaggagctcctgaagggctgccctggccagggagcctcgaatcttcagtctctcagagaccacagctggggttataagtttatagttgggaacttccttacagagtttgtcataggtagctttgtcaaacaagactaagttattgagcttgtcccgaactttgcctttggaccacttcttctttttggccttgcccccggatttgttcactgggtctttgtctttcttggctgactttccagcgtccttcttctcgtcgtccttg

SEQ ID NO: 3964 - DNA, 583 bp, Homo sapiens
  MAP TO CHR22.1; EXPRESSED IN HEART, SIGNAL =   5; EXPRESSED IN ADULT LIVER, SIGNAL = 4.2; EXPRESSED IN PLACENTA, SIGNAL = 8.1; EXPRESSED IN FETAL LIVER, SIGNAL = 4.9; EXPRESSED IN LUNG, SIGNAL = 5.7; EXPRESSED IN HELA, SIGNAL = 8.3; NT HIT: gi14777092, EVALUE 0.00e+00; SWISSPROT HIT: P08563, EVALUE 2.20e-01; EST_HUMAN HIT: W88734.1, EVALUE 1.00e-102
gttcacccacagcataagggagctgttgccattgaaccgaggggcagccctcgaccaagcccatagggatgtagcagaccaatgggccgggggctgtgtccccggaaagccggggcgtcagcctggcaggcaacaagcgaggcccctccctactcagcagagctgccgtggcctgcacgcccatcctcccttgctaggagtctgttttatttttttgtactttcaaaatgagcatcccccagacagtctgcctggcatgattgatgctgggggtggaagcttttcacagtccttggcctctgaccctgcttcccgagggcggcgcggcttctgcgcgcctgctgggggccgctcgggcatgtgctgacttcgctgctgctcagagccaggttttgtaaacattcaggagccacttcccaggtcagcaactgcgagcgttttctgctggtttgtacgataagcctttaaccaagctttatttctacttgcaataaaggatgatccactctgggaggttaaaataaagcgccctaggggcggcacagctggcaatgccaacatctccgactctgcttcctgtacc

SEQ ID NO: 3965 - DNA, 532 bp, Homo sapiens
  MAP TO CHR22.1; EXPRESSED IN ADULT LIVER, SIGNAL = 6.4; EXPRESSED IN PLACENTA, SIGNAL = 1.5; EXPRESSED IN FETAL LIVER, SIGNAL = 3.2; EXPRESSED IN LUNG, SIGNAL = 2.1; EXPRESSED IN HELA, SIGNAL = 1.5; EXPRESSED IN BONE MARROW, SIGNAL = 1.7; EXPRESSED IN HEART, SIGNAL = 1.8; NT HIT: gi5174644, EVALUE 1.00e-97; SWISSPROT HIT: O43272, EVALUE 7.00e-29; EST_HUMAN HIT: BI602093.1, EVALUE 3.00e-74
gagtctggagcacatgatggctgctggcgcctgggctgcacccacagggccgtccacaggccacacaggaagttgcagacgtccccactgccattgctccttggggacagaggttggaggcccatcctcacccacacctgctccaggtgccctgagctgcacctccccaggcagctgctgcccagccctggtgactgcacctgggcccaggaaggccccatcctgctgtcacttgggcttgcccaggctccctgtgacttttggccctggccccacaggatgcctatgacaatgtgaccctggacgtggagctggctcgccgtgagggctggtgttttggggccaagctggtgcggggcgcatacctggcccaggagcgagcccgtgcggcagagatcggctatgaggaccccatcaaccccacgtacgaggccaccaacgccatgtaccacaggtgcgcagctctcccacccctctgtcttctcagggcagggcgccaagaaaccaggcctgagggagaggcttggagact

SEQ ID NO: 3966 - DNA, 583 bp, Homo sapiens
  MAP TO CHR19.1; EXPRESSED IN HELA, SIGNAL = 4.5; EXPRESSED IN BONE MARROW, SIGNAL = 4.3; EXPRESSED IN HEART, SIGNAL = 6.3; EXPRESSED IN ADULT LIVER, SIGNAL = 4.6; EXPRESSED IN PLACENTA, SIGNAL = 3.4; EXPRESSED IN FETAL LIVER, SIGNAL = 3.7; EXPRESSED IN LUNG, SIGNAL =  12; SWISSPROT HIT: O35973, EVALUE 9.80e-02; EST_HUMAN HIT: BG287691.1, EVALUE 0.00e+00; NT HIT: AB011541.1, EVALUE 0.00e+00
ccatcttggtcatctcctgcaagtgccggcgctgctcctgccgctggtccagagcctgcttggccttccagaggagcacacagagtgagaggaagaggaagaagcaggagaagaagacggagaagaagacaaacaggtcaatgtgggcctggtcctgccggaagaagagcaggccctgcgagtcggctgagccgttggcgccgggcccacttgggtctcccacgcccagcagcagcaggtagaagcggctcgacttgagggcatggtgctcgtgtgggtaggtgatgaccagccggtcccgcacgccgcggaccaccagcactgccgacggctccgtcaccgtcacgtaggtaatcaggccccgcggccatacctcccgtacccgtggctctgctggggcgcccggcccactgctggcccctgctcctcctggatccccagccccccggggcccaccatctgcagggggtggtggaggtggtggggctgggggtggctggatgtgtacagtatggacgccagtgtcaggggccacacggaccacgaaggtgtcataggaggtggagacatagaggtccacggc

SEQ ID NO: 3967 - DNA, 509 bp, Homo sapiens
  MAP TO CHR5.1; EXPRESSED IN PLACENTA, SIGNAL = 3.9; EXPRESSED IN FETAL LIVER, SIGNAL = 2.9; EXPRESSED IN LUNG, SIGNAL = 1.8; EXPRESSED IN HELA, SIGNAL =   5; EXPRESSED IN HEART, SIGNAL = 1.3; EXPRESSED IN ADULT LIVER, SIGNAL = 2.5; EXPRESSED IN BONE MARROW, SIGNAL = 2.6; NT HIT: gi14781268, EVALUE 2.00e-68; SWISSPROT HIT: Q9Z0E8, EVALUE 4.00e-08; EST_HUMAN HIT: AL557809.1, EVALUE 3.00e-68
ttccagaaatggctggtagcatctatctgtggctccttctaaagagcatatttccacaagtccttgcgtacactgctccatgcttttgagacatggtgtctccacaggagctgagaatctcaaaagatatctcctgagcagatggatgcctgagacctaccaaggaggaagatgggaggatgtgacagagaaaaaagtctgccagagcctgaaaaaacactaagtctgcattgatgcctgactcagggcttgcaaccaccttggcaacctacacatctcatgttttgtgttatactgcattctctggtttggcaggaagaacgttctcttcgcaaccatggctgtacagactggttcagcttcctgcagattttctccatcagctgggagatgttcactgtgtatttgtcatcgtgggcatgggccagatctccaactatgtggtagccttctactaggtaggaatggcttctgggacatggggtgcttccctctaacccttgaaaggc

SEQ ID NO: 3968 - DNA, 592 bp, Homo sapiens
  MAP TO CHR5.1; EXPRESSED IN FETAL LIVER, SIGNAL = 2.7; EXPRESSED IN LUNG, SIGNAL = 3.4; EXPRESSED IN HELA, SIGNAL = 2.9; EXPRESSED IN HEART, SIGNAL = 2.4; EXPRESSED IN ADULT LIVER, SIGNAL = 2.3; EXPRESSED IN BONE MARROW, SIGNAL =   3; EST_HUMAN HIT: BG986274.1, EVALUE 4.00e-46; NT HIT: gi16171648, EVALUE 5.70e-01; SWISSPROT HIT: Q93100, EVALUE 1.90e+00
tttctcttggtgccagttcctactgggcttctggggtggggcctggctcctctcctacctcaagattctaatttgctaggaaccttgggactcctgagatttctgtgcttctgcaggaatttatcctgcttgagaagctcacctggaaaacgtgcggctgaagatggaaattcaacgttaggccccagagctgtggaaggtgttttcagtttggccttcttgccaggcacacttgagcctgcacaaattctgttccccacgcagagacagggaaagaaagctgccttgctgttaggactgtaagactacacccaggatctcagaacagcacttcccccaccaatctgtccacggtggccttagccaaacccgaggaatgaaggcttaacgggaatgtgtcataagaaaaatattccattagagttttctctcccagattccacgcccacatttctgcctgcctgttggacatctccagttagatgacccacaggcacgtccttaccaaaacaacatgcccaaaacgacacttcactctctcttcctgtcttgggtagtgtcacaagccaactgaaaagcctggaaatcctcc

SEQ ID NO: 3969 - DNA, 509 bp, Homo sapiens
  MAP TO CHR19.1; EXPRESSED IN HELA, SIGNAL = 3.2; EXPRESSED IN FETAL LIVER, SIGNAL = 4.3; EXPRESSED IN LUNG, SIGNAL =   6; EXPRESSED IN BONE MARROW, SIGNAL = 3.2; EXPRESSED IN HEART, SIGNAL = 5.6; EXPRESSED IN ADULT LIVER, SIGNAL = 3.5; EXPRESSED IN PLACENTA, SIGNAL =   3; SWISSPROT HIT: Q14112, EVALUE 1.00e-08; EST_HUMAN HIT: AW247958.1, EVALUE 7.00e-04; NT HIT: gi14756107, EVALUE 1.00e-07
tggcaacgctgaagactatggcccacagcctatgggtgccccatttccatggtaaccagggttacactggggaccctgtcactctaataaggacctagtgtgcaaggtaaaaacccctggctaactggggatgctggttccacaggaggggacccagcgccatgatggcttcctccctccacctccatgtgccccagcctggggcaacatctccatagcaacccccgcctcactcacgtgcggttgcagtgtgagatgccatcaccctggtagccccgctggcagtgacactcgtagctgaggggcgtgttcaggcaggtcgcccgcgggtggcaccgggccaggcccaggcgacactcatccacgtcaggacagcgggcgtatgcccagcgggcagggagggccacgggaagccccaggccctcccccacccacagggagcagttacccccaccgaggggccctgagaagtccccctgtaggcacctgcagggtgggagagtgaagaa

SEQ ID NO: 3970 - DNA, 565 bp, Homo sapiens
  MAP TO CHR19.1; EXPRESSED IN LUNG, SIGNAL =  11; EXPRESSED IN HELA, SIGNAL = 0.65; EXPRESSED IN HEART, SIGNAL = 5.3; EXPRESSED IN ADULT LIVER, SIGNAL = 1.2; EXPRESSED IN BONE MARROW, SIGNAL = 3.9; EXPRESSED IN FETAL LIVER, SIGNAL = 3.3; EST_HUMAN HIT: BI093435.1, EVALUE 0.00e+00; NT HIT: gi13430887, EVALUE 0.00e+00; SWISSPROT HIT: Q03923, EVALUE 5.00e-91
gtggcaaaggctttaactggtcttcaacccttacaaaacataaaagaattcatactggagagaaaccctacaaatgtgaagaatgtggcaaagcctttaatgtgtcttcacaccttactacacataagatgattcatactggagagaaaccctacaaatgtgaagaatgtggcaaagcctttaaccactcctcaaaacttactatacataagataattcatactggagagaaaccttacaaatgtgaagaatgtggcaaagcttttaaccaatcctcaaaccttaccaaacataagataattcatactggagagaaactctacaaatgtgaagaatgtggcaaagcttttaaccgatcctcaaaccttactacacataagagaattcacactggagagaaaccctacaaatgtgaagaatgtggcaaagctttcaaccgatcctcaaaccttactaaacataacataattcatactggagagaaatcttacaaatgtgaagaatgtggtaaagcctttaaccaatcctcaactcttactaaacataggaaaattcagcagggcat

SEQ ID NO: 3971 - DNA, 561 bp, Homo sapiens
  MAP TO CHR5.1; EXPRESSED IN ADULT LIVER, SIGNAL = 0.82; EXPRESSED IN BONE MARROW, SIGNAL = 0.86; EXPRESSED IN FETAL LIVER, SIGNAL = 0.56; EXPRESSED IN HELA, SIGNAL = 0.74; EXPRESSED IN HEART, SIGNAL = 0.76; NT HIT: gi14861871, EVALUE 0.00e+00; SWISSPROT HIT: Q9Y5I4, EVALUE 2.00e-47; EST_HUMAN HIT: BG910706.1, EVALUE 0.00e+00
aggatgttaatgaccacgcccctcaattccggaaagatgaaataaacttagaaatcagtgaatccgtcagcctggggatgggaacaattcttgagtctgcagaagatcctgatattagtatgaattcgctgagcaaataccaactaagtcctaacgagtatttctcattggtggagaaagacaatcctgatggtggcaaatatccagaattagtattgcagaagactctggaccgagaaacgcagagcgctcaccacttggtactgaccgccttagatggtggggaccctccccgaagcggtactgctcagataagaatcctggtaatagatgccaatgacaaccccccagtgttcagccaggacgtgtacagggttagccttcgggaagacgtgcctccaggcacctccatcctgagagtgaaggccactgaccaggacgagggcatcaactcagagatcacttattccttctttggtgtggctgacaaagctcagcacgtgttctctctggattacactacaggaaacattctaactcagcagcctttggattttgaag

SEQ ID NO: 3972 - DNA, 545 bp, Homo sapiens
  MAP TO CHR12.1; EXPRESSED IN PLACENTA, SIGNAL = 1.5; EXPRESSED IN FETAL LIVER, SIGNAL = 1.2; EXPRESSED IN LUNG, SIGNAL = 0.97; EXPRESSED IN HELA, SIGNAL = 1.7; EXPRESSED IN ADULT LIVER, SIGNAL = 1.4; EST_HUMAN HIT: BG335074.1, EVALUE 1.90e-01; NT HIT: X57075.1, EVALUE 0.00e+00
ggtgacttgaggctacggtcatcactaccacaagccttttcccatccctgcctctacctattgccctctaaataaggaagccagcgctgccaggcaaagaacttctgcccaatatgggtcctgggtggcctctcgcctctctctttccctgggcccccagccagctcccccctcccccagagatgctccctgctcacttcattcctgcctcatagttggaatgacagtggctcccagaacccctggggagtgtggagggtgatgggggtctggggaggcagccaggcccaagagcaggttaatgttacagccctggataagtgagctgggcgggttgacgtcagggcgatgatgggtggaggggagggccgggctgctgaagcaactataaagataggtcaaatcaaatatcatcaactagggacggagcaagcgggcgagctagagagcgtccccgagccatggtctctaccggccgcggctcagcctgggtccctctgctctcaacccgagtgcccgatggaggctttggtttcatgtcagca

SEQ ID NO: 3973 - DNA, 518 bp, Homo sapiens
  MAP TO CHR22.1; EXPRESSED IN HELA, SIGNAL = 1.1; EXPRESSED IN HEART, SIGNAL = 1.1; EXPRESSED IN ADULT LIVER, SIGNAL = 2.6; EXPRESSED IN FETAL LIVER, SIGNAL = 1.1; EXPRESSED IN LUNG, SIGNAL =   1; SWISSPROT HIT: P54198, EVALUE 2.00e-18; EST_HUMAN HIT: W94880.1, EVALUE 0.00e+00; NT HIT: gi14777004, EVALUE 1.00e-108
tactggatgtggcacctgactttcaaggctgacttttgttcttacttgatgacagggacttctccacggcattctttaacagcatccccctctcgggctccctggcgggcaccatgctctcttctcatagcagtccacagctactgccactggactccagtacccctaactccttcggcgcctcgaagccttgcacagagcctgtggtggctgccagtgccagacctgcaggcgattctgtcaataaagacaggttagtgggtgccaaggcttgttcctgtccctggggaaagttcaggtttgcacatagttttgaggacagagaattttattctgtttgcactttgtggccccttcaatcaaaaaagaaagaaaaaaatgcgtgatttgaaatggggacttctcagaggggaggacttgttcagtgagtctctgatgcacaggactgttgaggatttcacagagtgtatcaaggctgaccgagggtcaggctgctaagggtgggaactaccagtgaa

SEQ ID NO: 3974 - DNA, 587 bp, Homo sapiens
  MAP TO CHR7.1; EXPRESSED IN FETAL LIVER, SIGNAL = 0.9; EXPRESSED IN LUNG, SIGNAL = 0.86; EXPRESSED IN HELA, SIGNAL = 1.2; EXPRESSED IN HEART, SIGNAL = 1.2; EXPRESSED IN ADULT LIVER, SIGNAL = 1.8; NT HIT: AB032253.1, EVALUE 1.00e-97; SWISSPROT HIT: P54729, EVALUE 9.80e+00; EST_HUMAN HIT: BG721617.1, EVALUE 2.00e-97
cgactggagcctctacaaccagttttcattcaccttagtagtgaagctcttttcataccaaggttgtaagccaattactaagtttttctggatagcagcaaaagataacaaggaaaaaatacatatacataaggtatttttggttccatacatgtcttccaagacaaatccaaacatctgatttccaggagggtcatgttgggaagtcaagaacagcaccagggaagaacttcagattgagttgccatgagtaatctaagggggattttcttatattcctacccgggcttcaaattctgatgtttcttccacatatccaagtcctcctttttgtaaccttgttgcaacttcaatgagatcactacgaaggaagtttaaaagctcctggttgccatcacaagattttagacccaaatttggcttccgtgctagatgaatagagtgaataatgtcctggtacctagaagatttgggacaagagaatggggaaagaaacaaacttttgaagatgttcttcaaatttcaattacttaacatgttttatttctagaaaacttacttagatctctttcacctctccctggtgt

SEQ ID NO: 3975 - DNA, 523 bp, Homo sapiens
  MAP TO CHR14.1; EXPRESSED IN ADULT LIVER, SIGNAL = 0.67; EXPRESSED IN FETAL LIVER, SIGNAL = 3.6; EXPRESSED IN HELA, SIGNAL = 1.1; EXPRESSED IN LUNG, SIGNAL = 7.2; EXPRESSED IN HEART, SIGNAL = 2.5; NT HIT: gi14722100, EVALUE 5.00e-72; SWISSPROT HIT: P24049, EVALUE 3.00e-25; EST_HUMAN HIT: BF976493.1, EVALUE 3.00e-71
tgcagagagcaatgctgaactgaagggtttaggtgtagattctctggtcattgagcacctccaagtgaacaaagcacctaagatgtgccaccagacctccagagctcatggtgggattaacccatacatgagctctccctgtcgcatcgaaatgatccttactgcgaaggaacaaattgttcctaaaccagaagattgcccacaagaaaaagatatccctgaggaaacaaaaacttatggcacaggaataaattcagcactaaaataaatgcaatgaagagttttttgttttttaaagtgcacttcgtgatcttgttaactaccctgctctcgatcacttcttctgaaggaactttaaggttcttgacactccacagaacagtgtgcgggctcctggtagtgaagacaccgtgttaacccatctgatggacaggaagtgctgctcccgtgcctggtgatggcaggaaaggagccgctgcagcaactgtggtcaccggaagcttggacccttcgaggataaagg

SEQ ID NO: 3976 - DNA, 594 bp, Homo sapiens
  MAP TO CHR19.1; EXPRESSED IN BONE MARROW, SIGNAL = 0.93; EXPRESSED IN FETAL LIVER, SIGNAL = 1.2; EXPRESSED IN HELA, SIGNAL = 1.1; EXPRESSED IN LUNG, SIGNAL = 0.71; SWISSPROT HIT: P25341, EVALUE 8.00e-12; EST_HUMAN HIT: AL520607.1, EVALUE 0.00e+00; NT HIT: gi14759410, EVALUE 1.00e-115
atcaatatggagactgcggctcaggcaggccaccccgcagccctgaccagtgagcacggccccatcttccctgcagccccgcaggcagccacaccttccacatattccatgaccatgcagaggtggcgccgagtctcaaaggagcagaacatgccgaccacaaacgggttctcggcgaaggtgaggatatcgcgctccacaaaggcctgctggatctggttgcggaggatcaagttctgcttgttgatctttttcatggcaaagcgctgccgcgtgtcgcggtgccgcaccaggtagacagcgctgcagggggagagagcgaggaccggccgtcacctccgagacacccggcctccgccaccctccccccgccagagccccgggtggctcacccgtaggcaccgttgcttatgagcttgatggtatcgaagtcattctcccccggcggtttcttggccttgctgctgcggcccttcaggaaaaagatggagaccacaccaccatcatcatcatgagagcaggatgcttttaatttcattttacacatggggaaactgaggcacagaatgaaagagtccttcatccaagtgccat

SEQ ID NO: 3977 - DNA, 530 bp, Homo sapiens
  MAP TO CHR1.1; EXPRESSED IN PLACENTA, SIGNAL = 1.6; EXPRESSED IN FETAL LIVER, SIGNAL = 0.57; EXPRESSED IN HELA, SIGNAL = 0.96; EXPRESSED IN LUNG, SIGNAL = 0.86; SWISSPROT HIT: Q05513, EVALUE 5.00e-29; EST_HUMAN HIT: AL548317.1, EVALUE 1.00e-103; NT HIT: gi10864649, EVALUE 1.00e-103
ctgtgctgtttgggtttgtggagtgcacactgtgatgttcacacaacagtgccattacctaaccaggcactttccagaacacatcctggtcgttacacgatgcatgactattgattttgcacaaactccgtcaacgtgaggctaggtctctcgtgcatggattaattccgctaaagcccggaggaggccccagggcagcgcgttcccgggcccccgggccccatgagaagcggcacctacctcgtcatcatgcaccagctctttcttcaccactttcatggcgtaaatttggtcattcttcttcaaccgcaccaggagaaccttggcgtagctcccgcgcccgatgactctgattaggtcaaagtcctgcagcccaagcccctgagagattttgattccatccatcccatcgataactggcttaaggtcctagggagggagaacaagaccccagaaagtgagaggggggttcccgggagactcagaggaccacgcatcactcatgcggtcccaacagagacctgctcctc

SEQ ID NO: 3978 - DNA, 500 bp, Homo sapiens
  MAP TO CHR8.1; EXPRESSED IN LUNG, SIGNAL = 0.79; EXPRESSED IN HELA, SIGNAL = 0.85; EXPRESSED IN HEART, SIGNAL = 0.81; EXPRESSED IN BONE MARROW, SIGNAL = 0.79; EXPRESSED IN ADULT LIVER, SIGNAL = 0.89; SWISSPROT HIT: Q14596, EVALUE 1.00e-71; EST_HUMAN HIT: AA424085.1, EVALUE 0.00e+00; NT HIT: U25764.1, EVALUE 0.00e+00
tcaatgctcacctcttgctggcaggtgagatcatcagttttgcttgagctgatcatgcccttttcaatgttatcagggctctcttcggaggggaaaggatctactatgatactgcaccagacccgaggcccaaattgctggcctttgtgagaaagacgccaatgggaagtatacgttccctccaaggctggggcaatgaactccacagatacaactcccacatggccggccttgaggcagggaaccaaaacatccttcttttctgtggaagccaaagtcaggtttccccacatgaacttgagctgaaaagaacagtaagaagagaaagcaagcttgtcagctgagcactctgccacttcaaatcacctcatctttgcattttgtgggaaaaattacctttgtgtctgcactccactttacatttcctgtatttttcatcctccagtgtttgataaacttggttcctggctgaaggtgagtcccatcaggcaaattctcat

SEQ ID NO: 3979 - DNA, 591 bp, Homo sapiens
  MAP TO CHR5.1; EXPRESSED IN BONE MARROW, SIGNAL =   1; EXPRESSED IN PLACENTA, SIGNAL = 3.4; EXPRESSED IN HELA, SIGNAL = 3.1; EXPRESSED IN FETAL LIVER, SIGNAL = 1.1; EXPRESSED IN LUNG, SIGNAL = 1.7; SWISSPROT HIT: Q9Y5F2, EVALUE 2.00e-43; EST_HUMAN HIT: BI036374.1, EVALUE 1.00e-129; NT HIT: gi14861871, EVALUE 0.00e+00
agtggaagcccaccacttagcagcaatgtgtcattgagactgtttgttttggaccagaatgacaatgccccagaaatcctgtaccctgccctccccactgatggttctactggtgtggagctggcaccccgctctgcagagcctggctacctggtgaccaaggtggtggcagtggacagagactcaggccagaatgcttggctctcctaccgcctattcaaggccagtgagccagggctcttctcggtggggctgcacacaggtgaagtgcgcacagctcgggccctgctagatagagatgcgctcaaacagagccttgtggtggctgtacaggaccatggccagccccctctctcggccactgtcacgctcacagtagccatagctgacagcatcccagacatcctggctgacctgggcagtcttcagatccctgcagacctggaggcctcagaccttaccctctacctcgttgtggctgtggcagtcgtctcctgtgtcttcctcaccttcgttatcacgctgctggccctcaggctgaggcactggcactcctcgcatctgctgcgggctaccagtgatgggttggct

SEQ ID NO: 3980 - DNA, 520 bp, Homo sapiens
  MAP TO CHR19.1; EXPRESSED IN HELA, SIGNAL = 1.7; EXPRESSED IN HEART, SIGNAL = 1.2; EXPRESSED IN BONE MARROW, SIGNAL = 1.1; EXPRESSED IN PLACENTA, SIGNAL = 2.4; EXPRESSED IN FETAL LIVER, SIGNAL = 1.1; SWISSPROT HIT: P01267, EVALUE 7.20e-01; EST_HUMAN HIT: BG540566.1, EVALUE 0.00e+00; NT HIT: gi14277708, EVALUE 0.00e+00
tcctcctctctagcggactgtgtggtgggaactcccctctttccgggaatggtgctgtctgcccagccccacccggccttgtaatgaacactttcccccttttcctgtctttagtagcttcctgcccatctccatggtgatgcagtctctgggttgtcattcactttgagagcccgaggggtgggagggagtgatgcaggcagacgctgcgcctcctagtgggctcccggggcaccgtgggaggcagcggctcctggccgtaccagctagcctcatcctttggcctgcccccaggtgcatggcggcctgctgcagatcttccctgagggccggcccgtggtagccaacatcgagccactctttgaccggttgctcattttctggtctgaccggcggaacccccacgaggtgaagccagcctatgccaccaggtatgacctgtacttctggagacgcacccaggtgctccccctgtgacaatgtcctgtcagagcctcagagtgactagggagcgacgaag

SEQ ID NO: 3981 - DNA, 586 bp, Homo sapiens
  MAP TO CHR7.1; EXPRESSED IN PLACENTA, SIGNAL = 1.7; EXPRESSED IN FETAL LIVER, SIGNAL = 1.4; EXPRESSED IN LUNG, SIGNAL = 1.3; EXPRESSED IN HELA, SIGNAL = 1.9; EXPRESSED IN ADULT LIVER, SIGNAL = 1.8; SWISSPROT HIT: Q9Y2N3, EVALUE 9.00e-11; EST_HUMAN HIT: AI928722.1, EVALUE 0.00e+00; NT HIT: gi14782029, EVALUE 3.00e-86
aacaccacaaaattccgaccggaagacttagagccttctttcttgaaaataaacttttaacacgtttctacagaagcatgaggctaacatggctaatagctgtcagcttatctctgctactcacagaaaaggtaaattatgacatcgatctaacctgtgccttgaaatgaacagcattaaaacccttgttattaggttctctcatgaaagccaaagaaggaggcctatgaaggctcacaaactggacgtggcctctgtatctttacgggaatgtctacatctcatcccataggggtccaagcgggaaactggcttagtactctcctgagcctgttaccttcttttattttcctggccatcaaggaatatttggtcttcttcctccactgtccttttcttcttcttctctttgagggcactcagtacagtctcctttgcacatgggtctggggcattacttgatggtgacgacagtgttgagctgattatctgctctggtctataatgaaagacaagattctagccgtaagatattttaattcccatgccatatcagaaacggaaatcagaagctaaccaacaggcc

SEQ ID NO: 3982 - DNA, 597 bp, Homo sapiens
  MAP TO CHR7.1; EXPRESSED IN HEART, SIGNAL = 1.4; EXPRESSED IN ADULT LIVER, SIGNAL = 2.2; EXPRESSED IN HELA, SIGNAL = 1.3; EXPRESSED IN FETAL LIVER, SIGNAL = 0.97; EXPRESSED IN LUNG, SIGNAL = 1.4; SWISSPROT HIT: O00458, EVALUE 3.00e-21; EST_HUMAN HIT: AL597142.1, EVALUE 0.00e+00; NT HIT: gi16162420, EVALUE 1.00e-54
tcaacaatgtggtttttgccttaattgttactgaaactcagttgtgccttcaagtttatcaaaactagaccaattctacacccttacatacaggatagcaacagtttgtccacatctcaggtatggcagtatcagtttaagccatattgttcatttatctcagcatgtatatgactgtttagaaattgtgtttacataagatccctctgagccattttagtgcctgtggtaattttggttcttccattggttaggaacgggattttccaacagaaaccattaaatttggtcctgaacgcatgtatattgattgctgggtaaaaaaacacacctatgacacctttaaggaggttcttggatcagggatgcagtaccacttgcaggtaagtgtcatcctttctacatatttgcttttaaagtagggagcagtcttgaatatagctcacttaattggcttttgaaattaattaggtatccagagtgcttccacatgttagaaaacagtaaacttgtttttgaaagtagacttgaataaatctgaagctgttcctttttttttctttgtattgttaaagttgggtggacggttactgatgt

SEQ ID NO: 3983 - DNA, 580 bp, Homo sapiens
  MAP TO CHR19.1; EXPRESSED IN HELA, SIGNAL = 0.47; EXPRESSED IN FETAL LIVER, SIGNAL = 0.95; EXPRESSED IN HEART, SIGNAL = 1.1; EST_HUMAN HIT: AV726241.1, EVALUE 1.00e-107; NT HIT: gi13652274, EVALUE 1.00e-122; SWISSPROT HIT: P52737, EVALUE 2.00e-89
tcacactggagagaaaccccatgaatgtaaacaatgtggtaaagccttcagttgttccagttctgttcgaatacatgaaaggactcacactggagagaaaccctatgaatgtaaacagtgtggtaaagccttcagttgttccagttcctttcgaatgcatgaaagaattcacactggagagaaaccctatgaatgtaaacagtgtggtaaagcctttagtttttctagttcctttcggatgcatgaaaggactcacactggagagaaaccctatgaatgtaaacaatgtggtaaagccttcagttgttccagttcctttcgaatgcatgaaaggactcacactggggagaaaccctatgaatgtaaacagtgtggtaaggcgtttagttgttccagttccattcgaatacatgaaaggactcacactggagagaaaccttatgagtgtaaacaatgtggtaaggccttcagttgttctagttctgttcgaatgcatgaaaggactcacactggagtgaaaccctatgaatgtaaacaatgtgacaaagccttcagttgctcacgttcctttcgaatccat

SEQ ID NO: 3984 - DNA, 514 bp, Homo sapiens
  MAP TO CHR19.1; EXPRESSED IN HELA, SIGNAL = 0.81; EXPRESSED IN FETAL LIVER, SIGNAL = 0.75; EXPRESSED IN LUNG, SIGNAL = 1.4; EXPRESSED IN HEART, SIGNAL = 1.1; SWISSPROT HIT: P46821, EVALUE 2.00e-12; EST_HUMAN HIT: AI760654.1, EVALUE 0.00e+00; NT HIT: gi14766288, EVALUE 0.00e+00
ctgagaaggctctttgggtgctggttgggaggaacagggacctcacagacgggctgaccacccattgcagacctcaaggtggagcacacaagatcagggaaaagccaggaggggtctcaaatgccaggaaaggaaggcgacttgggcccaggccagaagggcagggggcacccccctcactggtggtccactctccccacacaccccccctccacctgcaggtgaccctgatccccactttcgactcggtggccatgcatacgtggtacgcagagacgcacgcccggcaccaggcgctgggcatcacggtgttgggcagcaacagcatggtgtccatgcaggatgacgccttcccggcctgcaaggtggagttctagccccatcgccgacacgccccccactcagcccagcccgcctgtccctagattcagccacatcagaaataaactgtgactacacttggctgtggcctctcttctttctgtgatgggagacttggcatgtacctcctggt

SEQ ID NO: 3985 - DNA, 537 bp, Homo sapiens
  MAP TO CHR22.1; EXPRESSED IN HELA, SIGNAL = 0.82; EXPRESSED IN HEART, SIGNAL = 1.2; EXPRESSED IN BONE MARROW, SIGNAL = 0.82; SWISSPROT HIT: P54198, EVALUE 1.00e-26; EST_HUMAN HIT: BE543250.1, EVALUE 9.00e-87; NT HIT: X77633.1, EVALUE 6.00e-87
tcagaactagccccttggtgcctgcctccttgatgctgtcatttcttcaattggcttttgccttggtggagatcaaatgaggaggcccttctgcttctgtctggtgtgggggctggccatggcagactgctgagtcccctctcttgcatatccatcccatggcccatggattgcaggtcatgtttccctcagacaacacctctccacattccttttttcttcacagaaattctagctactctgagaggtcattctggcttggtcaaagggttgacatgggaccctgttggtaaatacatagcttctcaagctgatgaccgcagcctaaaggtgtggaggacgctggactggcagttggagaccagcatcaccaagccttttgatgaggtaagtggggacagctcagggagctgagcccccgcagctgccccagcctcttcctgacttctgtgtacagagagggagctggccatgggccaggccacctggggaatgcacagagtccgggggcctgagcggattcaccaaggctctctg

SEQ ID NO: 3986 - DNA, 587 bp, Homo sapiens
  MAP TO AL355377.5; EXPRESSED IN ADULT LIVER, SIGNAL = 3.2; EXPRESSED IN LUNG, SIGNAL = 2.8; EXPRESSED IN HELA, SIGNAL = 3.7; EXPRESSED IN BONE MARROW, SIGNAL = 2.3; EXPRESSED IN HEART, SIGNAL = 2.4; SWISSPROT HIT: Q9QYJ3, EVALUE 6.00e-44; EST_HUMAN HIT: BI908057.1, EVALUE 0.00e+00; NT HIT: gi16180779, EVALUE 0.00e+00
gaggaaaaggtggggtaaggtgagtgggaaggaaggaaatagactgaggtggggaaagaatgtgccagctggcgggaagagagggaatgtccccaccatctccccagcacacacacacagcctgactaggccccacctccttgaggctgatcagggcactgtagagcacgttggtgccatctcggcggaagtgtgcatggggcttgtctttgagcacaaagacgatgtcagcagggatgttgtcaggtgtggcgtcgccttctttggggaaggtgatcttggtgccttccttccagccacgcttgatgactatgtgcaggatcttgtcctcggtgcgcacagttcgcccatcagggttgaggcgacgccttgtgatcttcatgcgcttggtggagccatggtagatctcctacagggacacccgcagctcgtgcaccactggggggtcctgcaccttgcgccgagggtacagtggttttggggctcgccttggacccctactcagcccattgaagccaaaacggccgaaagcgccaaatgggtcctcatcttcatcctcacccatgtcatctgggtcaaagccaatt

SEQ ID NO: 3987 - DNA, 520 bp, Homo sapiens
  MAP TO CHR7.1; EXPRESSED IN HELA, SIGNAL = 0.98; EXPRESSED IN HEART, SIGNAL = 1.7; EXPRESSED IN ADULT LIVER, SIGNAL = 1.1; EXPRESSED IN FETAL LIVER, SIGNAL = 1.4; SWISSPROT HIT: Q64430, EVALUE 2.80e+00; EST_HUMAN HIT: BE298028.1, EVALUE 2.90e+00; NT HIT: AF209964.1, EVALUE 1.30e-01
agcaccagctcatatcccacaaaaaaaaaaacctaatatagggaaaacttgtgatagaaacagtctattaaatgaaattatattttgatttctaaagctgccttgcaagaacagaggttacaatttctagaaggagccatatacaaatttaaaaagagccataattcatgcaaagaaacattttctaacctgtaatttatagttcagctgcctttctaaaatctcaagcttttagttaaataattgtagatttgttgctcagtttaaaaacccttctggaatcacgtctttaactggcgttgtgacgtcttacgtcatgatgttgcgtcaccacgtgatgacgctgtgccatcacaacacatcatcgcatattgacacaatgtcatggcataatatcatcaaattaaattcatcagcactccccacagcctggccccaggaagggcaagagagctttaaagtttctctttgttcttgtcaacacactcctggttggtaggcgagaacagcaactggacaa

SEQ ID NO: 3988 - DNA, 586 bp, Homo sapiens
  MAP TO CHR7.1; EXPRESSED IN PLACENTA, SIGNAL = 2.7; EXPRESSED IN FETAL LIVER, SIGNAL = 2.9; EXPRESSED IN LUNG, SIGNAL = 1.5; EXPRESSED IN HELA, SIGNAL = 3.4; EXPRESSED IN HEART, SIGNAL = 1.8; NT HIT: gi13628940, EVALUE 1.00e-112; SWISSPROT HIT: P10071, EVALUE 1.00e-26; EST_HUMAN HIT: BF746954.1, EVALUE 1.00e-109
gaagcagcagaacagaaccctagttaccagcagggatttgggaatcagaaacattttcaatgaattccacctctgccccttactagccatgggattgactgcgttgcaagtaaaccccactgcacgctgctattctgacatgaaaatggagataataacaccactgccaatgaggtgttacaaaactgaaacgcaatcatgcatgtaaggcacagagcacagcgcctggcacatgggaaacactcactaaacatcaggtctactttatacacgtcccgagtgaggagcggggaggaggctgcatgatctccagaagcagaatccatcctggacttaccatctgtagggctcagcccacgggttgctgagatcatggagagcgatgggctgctgtgcaaggagcggatatagtccatgtagggattaatgtagggatgtggagggctgaagggagactcggaagcagcagtggggttccggtgtggggagatcctaatgaagggcaggtccggatacgtagggctactagataaggcggaagtcctgggtacaaagaaaaccagatacaaggggtatgcatgagaca

SEQ ID NO: 3989 - DNA, 590 bp, Homo sapiens
  MAP TO CHR19.1; EXPRESSED IN ADULT LIVER, SIGNAL = 0.88; EXPRESSED IN FETAL LIVER, SIGNAL = 0.92; EXPRESSED IN HELA, SIGNAL = 0.92; SWISSPROT HIT: P17024, EVALUE 3.00e-64; EST_HUMAN HIT: AL536808.1, EVALUE 0.00e+00; NT HIT: gi14760109, EVALUE 0.00e+00
acccaggttccagatgacaggctgaacttccaggagaagaaagcttctcctgaaataaaatcatgtgacagctttgtgtgtggagaagttggcctaggtaactcatcttttaatatgaacatcagaggtgacattggacacaaggcctatgagtatcaggaatatggaccgaagccatgtaagtgtcaacaacctaaaaaagccttcagatatcacccctcctttagaacaccacaaagggatcacactggagagaaaccctatgcttgtaaagaatgtggaaaaacttttatttcccattcaagcattcaaagacacgtggtaatgcacagtggggatggaccttataaatgtaaattttgtgggaaagccttccattgtctcagtttatatcttatccatgaaagaattcacactggagagaaaccatatgaatgtaaacaatgtggtaaatcctttagttattctgctacccttcgaatacacgaaagaactcacactggagaaaagccttatgaatgtcagcaatgtgggaaagcatttcatagtcccagatgctatcgtagacatgaaaggattcacacgggaga

SEQ ID NO: 3990 - DNA, 524 bp, Homo sapiens
  MAP TO CHR8.1; EXPRESSED IN HEART, SIGNAL =   1; EXPRESSED IN HELA, SIGNAL = 0.73; EXPRESSED IN LUNG, SIGNAL = 0.69; EST_HUMAN HIT: BF669305.1, EVALUE 7.30e-01; SWISSPROT HIT: P74840, EVALUE 8.40e+00; NT HIT: AF192886.1, EVALUE 5.00e-01
gaagcttcttagcaatgccgagttttaacccctatacatagatctcctgaattcgaatctacatttagcaagacccccaagagacatatatgcacgtgaaaatggggaatcactggcccatgatgttgcatttctgttaggggctttctcccatagagtaaccaaagaaccagtcacccaagggagataaactgaggaccagatttgagaggtttccagccacacagggaggaatgcacagatgcatgctggattccgcggtgccaaaccaaacagtttgccatttgctctgactgttttattgccctgaaactatgcactcagcttcttctgaggcttccaacacacaatgaatccacagaaaaaataaataatgtaaaggttttctaaggcacttggcagcagaaggaatttttagtggggctcagattgagggaggggtggagaagaggaagaaatggaatttggacatatagcagaaaggaattcctaaacactttccgagtttcatcaccttggcaggt

SEQ ID NO: 3991 - DNA, 562 bp, Homo sapiens
  MAP TO CHR18.1; EXPRESSED IN FETAL LIVER, SIGNAL = 2.5; EXPRESSED IN HELA, SIGNAL = 2.9; EXPRESSED IN LUNG, SIGNAL = 1.1; EXPRESSED IN ADULT LIVER, SIGNAL = 2.3; EXPRESSED IN BONE MARROW, SIGNAL = 2.2; EXPRESSED IN PLACENTA, SIGNAL = 2.1; EST_HUMAN HIT: BI830442.1, EVALUE 0.00e+00; SWISSPROT HIT: Q01718, EVALUE 3.00e-86; NT HIT: X65633.1, EVALUE 0.00e+00
cgtgaaggtgatcactgtgggcacatgatgggagaagatcaccatggtgatgccagtccccgtgcagaacgtccagatgaccgtaagcaccaccacagcgcggcgcatggtcaacgatgctgtggtaccgcagctgcatggaagatggtgattgtatcgttccgcagcaatcacagacaggctgaagatggagccaagcagggagaggacaaacagggagtcgatgatgtcatcggctgtggtttcaaaactgccacgtggcttgagatagcccatgtttctcaatatgatcaggatattttccaagatcttatataggctgcccagcatatcagatatggccaagctacagatgaaaaagtacatgggtgcctggagattcttattcttgaacacagccagcaggacgatcagattctccaaaactccaacaatggaaattgtgaaaaatatctcctccggcaaaaccacacgaggacagtcggaattatttcttgctgtgttgttgatgttttcatacgagttgataatgtgcttcatttctcctgcttgtggttaaggc

SEQ ID NO: 3992 - DNA, 595 bp, Homo sapiens
  MAP TO CHR7.1; EXPRESSED IN BONE MARROW, SIGNAL = 3.8; EXPRESSED IN PLACENTA, SIGNAL =  15; EXPRESSED IN HELA, SIGNAL = 1.2; EXPRESSED IN LUNG, SIGNAL = 2.5; EST_HUMAN HIT: AW875259.1, EVALUE 0.00e+00; SWISSPROT HIT: P08123, EVALUE 3.00e-36; NT HIT: AF004877.1, EVALUE 0.00e+00
gttgggagaagatgacgctccattaattgggtgtgatttcacataatgtaatctttacccaaatgcattttcactctaaatgtcaatggaaactaattttgaaaagctcaacttgtgagaagggtcagtctggtctggacatcttgacctaccactgctccactctgggtggctgagtctcaagtcacggcatgtgcgagctgggttctttctagagccttcaggagtaagaagggtctcaatctggttgttgagagacttcagagtagcatcaacttcatagtccttgggtctgagagaaggtgctgagcgaggctggtcagccctgtagaagtctccatcgtaaccaaagtcataaccaccaccgcttacacctggaggtccaggagggccagggggaccaggggggccctgcaaaggtgaaagtgagataggagaggctttatattttgttacagtgagagacatccatggcagcagattttcagttgagcttcacacggaagcatgttctcatcagtaaaaaataatcaagttcacataaataaataacgagcccccaggcacacttgcagggatggacttaacaagccca

SEQ ID NO: 3993 - DNA, 593 bp, Homo sapiens
  MAP TO CHR7.1; EXPRESSED IN FETAL LIVER, SIGNAL = 0.81; EXPRESSED IN HELA, SIGNAL = 0.45; SWISSPROT HIT: P10071, EVALUE 2.00e-19; NT HIT: gi13628940, EVALUE 1.00e-109; EST_HUMAN HIT: BF746954.1, EVALUE 7.00e-26
acaggtgcaaacaagtgctgacattacatttaaaaaacacataatggattcaggaaaatacatacctgattgcacttgcagataagtgaccataggagccacttgctgaagagctgctacgggaattattgagaatcgtgaccaaggagttgggagacgtccttatcatggtctgaaggtcaaagctatgatcggagagtggtgatatggacagtgtacgttttcggctcggcctggctgacagcctggggctggagaatctggtgcctgttatataaacaaaaaagaacctaattacctgcagttggactctataccagctatttattgctacttgcctacgtggaagaagtgaaggataagaagctggcaacttgcggtgacaagcacctctcctcccccatgtgatctactagctacagttgaggaaactagggagaaatatttgtcttccaggggcttacctcgggggagctctgtttattaatgtgcagggaaaatgataaattgctaaacaaaagggagagatttttatgtgttatccctttcatttctggtgatttatgaatctgacggctgcttagatattccca

SEQ ID NO: 3994 - DNA, 579 bp, Homo sapiens
  MAP TO CHR2.1; EXPRESSED IN HELA, SIGNAL =  48; EXPRESSED IN HEART, SIGNAL =  33; EXPRESSED IN PLACENTA, SIGNAL =  99; EXPRESSED IN LUNG, SIGNAL =  34; EST_HUMAN HIT: AV759546.1, EVALUE 0.00e+00; SWISSPROT HIT: P05386, EVALUE 4.00e-32; NT HIT: gi13636437, EVALUE 0.00e+00
tccttccgaggaagctaaggccgcgttggggtaaggccctcacttcatcctgcgactagcaccgcgtccggcagcgcctgccctacactcgcccgtgccatggcctccgtctccaagctcgcctgcatctactcggccctcattctgcacgacgatgaggtgacagtcacggaggataagatcaatgccctcattaaagcagccggtgtaaatgttgaacctttttggcctggcttgtttgcaaaggccctggccaacgtcaacattgggagcctcatctgcaatgtaggggctggtggacctgctccagcagctggtgctgcaccagcaggacgtcctgccccctccactgctgctgctccagctgaggagaagaaagtggaagcaaagaaagaagaatccaaggagtctgatgatgacatgggccttggtctttttgactaaacctcttttataacgtgttcaataaaaagctgaacttaaaaaaaaaaagaagtaaccatcattaatattaggtgaacatctttcttgacagctctatgtagacactcagatattaggagtgatcggtgcataaat

SEQ ID NO: 3995 - DNA, 556 bp, Homo sapiens
  MAP TO CHR3.1; EXPRESSED IN PLACENTA, SIGNAL = 5.3; EXPRESSED IN LUNG, SIGNAL = 3.3; EXPRESSED IN HELA, SIGNAL = 2.5; EXPRESSED IN ADULT LIVER, SIGNAL = 3.2; EST_HUMAN HIT: BG912177.1, EVALUE 0.00e+00; SWISSPROT HIT: P04899, EVALUE 9.00e-21; NT HIT: J03004.1, EVALUE 2.00e-74
cttttgggaggtgggagagggtggggcggagggcacataccgctctggaggggtcggcaaagtcgatctgcaggttgcccatggctttgacaatggccatgatggactggatggtgttgctgtagacaaccgcccggtactgccggcattcctcctcggagtagccatcctcgtggatgatcctgatagccagggaccaggaaggttagtgtcccctgggcactgggagttcccacggctgcctggggctactgggacctgcttcagagaagggaaaactgcccctgacccactgggacctgagggtccttctgcttctcagaagattctgggcctggctaagactggctgggcctgtagtcgggggcagtgcaggcccagagggtgaagaggggaagctggagtttgagcactgcctctggaatacagcacttacttcatctgcttgacgatggtgctcttccctgactccccagcacctggaacagagggcacaggtggtcagggggcaggcccagaggggctccacaggcacagaacaaatgcccagacacct

SEQ ID NO: 3996 - DNA, 509 bp, Homo sapiens
  MAP TO CHR6.1; EXPRESSED IN PLACENTA, SIGNAL =  24; EXPRESSED IN LUNG, SIGNAL =  13; EXPRESSED IN HELA, SIGNAL =  11; EST_HUMAN HIT: BE894342.1, EVALUE 0.00e+00; SWISSPROT HIT: P30050, EVALUE 3.00e-47; NT HIT: gi16194624, EVALUE 0.00e+00
acagacaggcccagattgaggtggtgccttctgcttctgccctgatcatcaaagcccttaaggaaccaagagacagaaagaaacagaaaaacattaaacacagtgggaatatcacttttgatgagatcgtcaacattgctccacggatgcggcaccgatctttagccagagatctcactggaaccattaaagagatcctggggactgcccagtctgtgggctgcaatgttgatggccgccaccctcatgacatcatagatgacatcaacagtggtgctgtggaatgcccagctagttaagcacaaaggaaaatatttcaataaaggatcatttgacaaacaaaacaaaaataaaaggtctagtgacacacacacatgcacgcgcacgtgcatgtttttactggcgtaatctaatgtccctgggccacatgggttgcctttgagaggggaagcagctaggaaacaagtctgtgaaagaaactgtattttacataccctcctgtgccctta

SEQ ID NO: 3997 - DNA, 583 bp, Homo sapiens
  MAP TO CHR5.1; EXPRESSED IN LUNG, SIGNAL = 1.5; EXPRESSED IN HELA, SIGNAL = 1.1; EXPRESSED IN HEART, SIGNAL = 1.1; EXPRESSED IN ADULT LIVER, SIGNAL = 1.8; NT HIT: gi14727663, EVALUE 2.00e-96; EST_HUMAN HIT: BG698049.1, EVALUE 3.00e-96; SWISSPROT HIT: P51172, EVALUE 7.40e+00
ggtagaggcctccctcaaagctgtagtagcagagcacaaagtggcaaaacccaaatccctcaggtgttttcgggggatggggacatcttcaggacaaactactgtggacaactctgtgcactcctgaaattaagcaaaagatctagcaaagccacagaaacaaaagggagcattatttcaatacaaggtattccttaatgtgactacattggctgacaaagtgtcaatcaagttacagtgatgtttgtcaactcactttagaaaaatccacaaaaccacttgccataggctgatgaaaaatgttagagggggctaccattccagaatcatctctctccattggctgatgttgggagaatgtgcttgggtctgataattgttgatgcattggatggttccccatcacagattgcgaccaacctgataagccttctggaaagaataattgaaaacaaagttttaaatttatttggataaaacaacaaaacattaccattgttattaccaaacatgaccaaatgttactgaaatctttcctctgaagagctcaaagcgtatttatcacagtcttgctagccaaaaa

SEQ ID NO: 3998 - DNA, 507 bp, Homo sapiens
  MAP TO CHR10.1; EXPRESSED IN HELA, SIGNAL = 1.2e+02; EXPRESSED IN LUNG, SIGNAL =  29; EXPRESSED IN BONE MARROW, SIGNAL =  49; EXPRESSED IN PLACENTA, SIGNAL = 1.1e+02; EST_HUMAN HIT: BG231962.1, EVALUE 0.00e+00; SWISSPROT HIT: P40429, EVALUE 3.00e-83; NT HIT: gi15298452, EVALUE 0.00e+00
tttattgggctcagaccaggagtccgtgggtcttgaggacctctgtgtatttgtcaattttcttctccacgttcttctcggcctgtttccgtagcctcatgagctgtttcttcttccggtagtggatcttggctttctctttcctcttctcctccagggtggctgtcactgcctggtacttccagccaacctcgtgagccaggcgccccagataggcaaactttcttgtaggcttcagacgcacgaccttgagggcagcaggaaccaccatccgctttttcttgtcgtagggcggtgggatgccgtcaaacaccttgagatggtccagagcggcctggcctcgcttggtcttgtggggcagcatacctcgcacggtccgccagaagatgcggctgggggcccggaagtggtaggggactcgggaagggttggtgttcatccgcttgcggaggaaagccaggtacttcaacttgtttctgtagaaattgccagaaatgttgatgcctt

SEQ ID NO: 3999 - DNA, 510 bp, Homo sapiens
  MAP TO CHR14.1; EXPRESSED IN HELA, SIGNAL = 0.45; EXPRESSED IN HEART, SIGNAL = 0.52; EST_HUMAN HIT: BI908176.1, EVALUE 2.00e-07; SWISSPROT HIT: P04437, EVALUE 9.00e-18; NT HIT: M87473.1, EVALUE 0.00e+00
gtgagtcgagagcttttggggaacagagggtttagtaaatactcattagaagtctgaggaggagactcatctggtcttttccagaatgtctgaagttactacagtgaaaaaaataaaaaagcaaactccagagaatgatggcctgatgatcttgtctgacttttccttttgcacaggtatgagtagaggagaggatgtggagcagagtcttttcctgagtgtccgagagggagacagctccgttataaactgcacttacacagacagctcctccacctacttatactggtataagcaagaacctggagcaggtctccagttgctgacgtatattttttcaaatatggacatgaaacaagaccaaagactcactgttctattgaataaaaaggataaacatctgtctctgcgcattgcagacacccagactggggactcagctatctacttctgtgcagagagtacacattgcttctcaggcacctgtatcctgtacccaaacctgcacct

SEQ ID NO: 4000 - DNA, 594 bp, Homo sapiens
  MAP TO CHR22_121.0; EXPRESSED IN BONE MARROW, SIGNAL = 1.9; EXPRESSED IN FETAL LIVER, SIGNAL = 1.8; EXPRESSED IN HEART, SIGNAL = 1.8; EXPRESSED IN PLACENTA, SIGNAL = 1.7; EXPRESSED IN ADULT LIVER, SIGNAL = 0.64; EST_HUMAN HIT: BF347977.1, EVALUE 0.00e+00; NT HIT: AB055760.1, EVALUE 0.00e+00; SWISSPROT HIT: P29475, EVALUE 3.40e+00
accttggcgatgagatgaagaaacatactacaggaaacgttaacgtagagagaagagcacagggcagaacacaacacagaaaggcgggtcccatccagtgaggaagctctttatccctggcaacccttcccacaatcaggggtctccagtccgatggcccattggtcataagctttgccttggggaaacagagccaccctcctctgcccccacttctggctgcctcactcccctgctcaaagcttgattttgaattctgtgggctgcgtggtcacagaggcccctgaggacttgaagagtgccttcaggatggtgtcagggtccacttcggcaggggggttggaggaggaggcagagttcaccctgcgaggcagctcgctctcctttttcattgatgggctgtcactcagccgcctgtggagagcagagaagagtcaaaaattcttgtcagtttttccttagatggggaggggacccaccatttactgggcatctgtcatgagctaggcactgggtgtaacactttccataccccttcatctcattccacctcgcagcaaactcaatcacagctcacatcagcctccatctcct

SEQ ID NO: 4001 - DNA, 521 bp, Homo sapiens
  MAP TO AL138499.1; EXPRESSED IN FETAL LIVER, SIGNAL = 1.3; EXPRESSED IN BONE MARROW, SIGNAL = 1.2; EXPRESSED IN PLACENTA, SIGNAL = 1.3; EXPRESSED IN LUNG, SIGNAL = 1.7; EXPRESSED IN ADULT LIVER, SIGNAL = 2.2; NT HIT: gi4826813, EVALUE 2.00e-90; EST_HUMAN HIT: BF828451.1, EVALUE 2.00e-90
tttctcccatgaaacgcaagtatagcctgctacaggagcatgcaagaatggaagcaggagagattcaaagaaggttttctagaggagagaatgcctacacgaaagatgagtatgagtaactaggcaaagaaagagacctctgtaaaatgtaatgttttattacagatttacagagtaaatttgtggccaaagaaaatgaagtacagagtctgcatagtaagcttacagataccttggtatcaaaacaacagttggagcaaagactaatgcagttaatggaatcagagcagaaaagggtgaacaaagaagagtctctacaaatgcaggttcaggtattttttcttctttttttttttttaaaaaaatacaggtggtcacttattagatctgtgtgtctagaagagagactaaagtctaccttatcctaattctgaaatgatgatgaataattataactttgtcttttgagcacttgtcacaatatggtgtgtttgaaggtgtgctcacccacagtcttaggc

SEQ ID NO: 4002 - DNA, 563 bp, Homo sapiens
  MAP TO CHR22_125.0; EXPRESSED IN PLACENTA, SIGNAL = 0.54; EXPRESSED IN FETAL LIVER, SIGNAL = 0.48; EST_HUMAN HIT: AA758668.1, EVALUE 6.00e-54; SWISSPROT HIT: P08637, EVALUE 4.10e+00; NT HIT: AJ295844.1, EVALUE 8.40e+00
agagggtgaatggtcagcacagaagacagccacagatcaagaaaaactagttgtcaacaaggcccactcacttagaaacaatctaaataaaacccggaagatcagagcagattattttaacatttaatttgtgttttacccttaacaatatgtaaaatccatgaacaaaatttttgttctatactttgtgctatataaatttcttaatgcaactcattatccgaagactcagatgttgactctgggttttcaagcgtggtttttccaaataaacgttatgatggtagaaaccttttccactatttcagggcaggaacgtagttttatgcaatattgaatggcttcatcaggttccccaagggcctctcttggccctgatatcaccacacctgccttgtgtctgttggcaaatttgtttgttttttctccatagttaactctttgaagtccttacctgtcagtgactttgtggaattcaggcaatcctgcagcattactctcattgacttcatcaaagttctgactcctttgagaaacttgaaacaccagatcatatttggtca

SEQ ID NO: 4003 - DNA, 507 bp, Homo sapiens
  MAP TO AL160191.1; EXPRESSED IN FETAL LIVER, SIGNAL = 0.43; EXPRESSED IN PLACENTA, SIGNAL = 0.53; EXPRESSED IN BONE MARROW, SIGNAL = 0.43; NT HIT: X93017.1, EVALUE 0.00e+00; EST_HUMAN HIT: BI522813.1, EVALUE 0.00e+00; SWISSPROT HIT: P57103, EVALUE 1.00e-59
tgagcaatgtccgcatagaggaggagcagccagaggaggggatgcctccagcaatattcaacagtcttcccttgcctcgggctgtcctagcctccccttgtgtggccacagttaccatcttggatgatgaccatgcaggcatcttcacttttgaatgtgatactattcatgtcagtgagagtattggtgttatggaggtcaaggttctgcggacatcaggtgcccggggtacagtcatcgtcccctttaggacagtagaagggacagccaagggtggcggtgaggactttgaagacacatatggggagttggaattcaagaatgatgaaactgtgtaagtaaccttcctgtattctgcccctccctgaccccatcttttgccatctctttctgtctttctgtactgcactttacaacatttccttgtgtttgtgttaatgtcaaactttggttccatcacaggtatgcaggatcagcagacaccactggacaggttctgcttccaaa

SEQ ID NO: 4004 - DNA, 549 bp, Homo sapiens
  MAP TO CHR22_130.0; EXPRESSED IN FETAL LIVER, SIGNAL = 0.46; EXPRESSED IN BONE MARROW, SIGNAL = 0.48; EXPRESSED IN PLACENTA, SIGNAL = 0.31; NT HIT: gi15891923, EVALUE 8.20e+00; SWISSPROT HIT: Q10225, EVALUE 7.80e-01
tcccctttacaggatttcccatctcactttctggttgtttttgtggcccatactctgccctctgattcctcaatcaataaggctacaagtttctatataattttagtagcactgtgaggactggggcctacactcttacaaaaccaaacaaaaaatataaaaccaaggaattcactcagtgttattctctttttccaagtgttaattctcttccagtttctgcctgtttggttattctctagtaccctcatatagctgtttgttttatattttgcccacagtttataattgttatgtggctgtgctgatataagcgactttgccagaagcagaatcttctctctttcctttgcatagctacaggggataaaaatgatcctaatataaatagcatatactatataaaaatgaaaatagtctatgattcacattgctgcactttttgtcttctgattaaagagtcaatgtacaaaagactctggaagcactatccaatagaattttctaagatgataaaaaaatttcctgtgctgtcgaatatggccacta

SEQ ID NO: 4005 - DNA, 600 bp, Homo sapiens
  MAP TO AC025745.1; EXPRESSED IN ADULT LIVER, SIGNAL = 0.58; EXPRESSED IN FETAL LIVER, SIGNAL = 0.51; EXPRESSED IN PLACENTA, SIGNAL = 4.4; EXPRESSED IN LUNG, SIGNAL = 0.64; NT HIT: AL163284.2, EVALUE 3.70e-02; EST_HUMAN HIT: AU140532.1, EVALUE 3.00e-34; SWISSPROT HIT: P14077, EVALUE 3.00e-10
gcgaaaactcaaaaaggctgaagaaggccctcaaaccccacaacaagactttctcaacctggctttgaaagtctttaataatagggatgagcaggaaaaaataaataaggcccaaaaagatcatgccaaataccagctactagccacagctatttgccaacctggcaatagcacccaagggcacaaaagacccaaaagcagtcttcctcctggggtctgctttaagtgtggcaaagaaggccattggtcacaggtgtgtcctaacccatgagtactgaagagcccctgcccagtctgccaacatacaggccactggaactctgactgctctcttaacaggtgaacagaaaagcctgcccccgcccccgacccactgtcccttcatcaaaccaaagattgaagaatccctcgcactcccacagctcctcgacctggccactgaagactgacatggcccaggacaccaaacccctcctccatcatggcatcagagcccagggtaattctactagtagcaggtaagcctatctcttttttaatcaatactggggccacctatttagctttacctgaatttgcaggaccaactcatccctctca

SEQ ID NO: 4006 - DNA, 525 bp, Homo sapiens
  MAP TO AC022263.3; EXPRESSED IN BONE MARROW, SIGNAL =  12; EXPRESSED IN PLACENTA, SIGNAL = 6.5; EXPRESSED IN FETAL LIVER, SIGNAL =  13; EXPRESSED IN LUNG, SIGNAL =  17; NT HIT: gi14775227, EVALUE 0.00e+00; EST_HUMAN HIT: BG208889.1, EVALUE 0.00e+00; SWISSPROT HIT: P02248, EVALUE 3.00e-30
agaccatcaccctggaagtggagcccagtgacaccatcgaaaatgtgaaggccaagatccaagataaagaaggcatcccccccgaccagcagaggctcatctttgcaggcaagcagctggaagatggccgcagtctttctgactacaacatccagaaagagtcgaccctgcatctggtcctgcgtctgagaggtggtatgcagatcttcgtgaagaccctgaccggcaagaccatcaccctggaagtggagcccagtgacaccatcgaaaatgtgaaggccaagatccaagataaagaaggcatccccccgatcagcagaggctcatctttgcaggcaagcagctggaagatggcggtactctttctgactacaacatccagaaggagtcgaccctgcacctggtcctgcgtctgagaggtggtatgaagatcttcgtgaagaccctgactggaaagaccatcaccctggaggtggagcccagtgacaccatcgaaaatgtgaaagccaagatccaggatgaaga

SEQ ID NO: 4007 - DNA, 589 bp, Homo sapiens
  MAP TO AL159176.2; EXPRESSED IN FETAL LIVER, SIGNAL = 1.6; EXPRESSED IN ADULT LIVER, SIGNAL = 2.4; EXPRESSED IN BONE MARROW, SIGNAL = 1.9; EXPRESSED IN HEART, SIGNAL = 2.3; EXPRESSED IN PLACENTA, SIGNAL = 2.3; EXPRESSED IN LUNG, SIGNAL = 2.4; EST_HUMAN HIT: AI632836.1, EVALUE 3.30e+00; SWISSPROT HIT: O76041, EVALUE 7.50e+00
ggtaagatttcctgactgccctctctaaactttaaactaagataggtatccttctcttagttctcataggatcctacgttttcctgtatcaccacattcattgcactatactgtaactgactgttcttaaattctgcctggcacagaattggttctcaaaaatatttattaaaggaatcagtgaactgatatgaaatataggtatatcactagcagcactctcaccagaattagaatttttttttaactgacactagaataaagaaaaggaaagacgaattttcctcaagaaaactgcatacataatttagcaaaatctggaaaagcaagaaaaggaaaagagtttataaaatgtgtgaattatatatagtgcatccacatgatggattatgcatccattaaaaatgtctcctaaaatggggaaacactatgcagaatctgaaacttatgtgtcatatgacacaggcaagcgcagggacagcgaagggggaatgaagggagttagaaagtaagaaagaagtacagcaaaatgttaaaagtagtttctctgtggttatttttataccacagttgcccacattttccaaat

SEQ ID NO: 4008 - DNA, 595 bp, Homo sapiens
  MAP TO AC015956.3; EXPRESSED IN FETAL LIVER, SIGNAL = 0.49; EXPRESSED IN ADULT LIVER, SIGNAL = 0.64; EXPRESSED IN BONE MARROW, SIGNAL = 0.46; EXPRESSED IN PLACENTA, SIGNAL = 0.74; EXPRESSED IN LUNG, SIGNAL = 0.78; SWISSPROT HIT: Q04548, EVALUE 3.40e+00; EST_HUMAN HIT: AL602432.1, EVALUE 0.00e+00; NT HIT: AF100744.1, EVALUE 4.00e-76
tctgctgatccagtgcagtccacagacctccttctctactcacacgcttcttctagtggagtcactacctacctttttctagtagagtttgtcttaatgtctttgcaagcagcactcgcacgttaggaaccctgtcatttgctaaggttagcagatgcggcatgagatgcacagcaaactggtccatgggaaggcagtcatcctcaatgacagtctggggaagagaaacagctgctctaggcttctctgtcaatgtagccaaaaactcgactactggctaacaaaatctctgagtgaccacaggtacaaattttagttattgctttttaaccaaaattccacgtacttgggaactcaaatcaaaaattacataattaactgcccacacggacagacacagtttttaaactgctctacggagacctagagtgttcattcacaggtgtttcattttcacacctgcgctctgggtcccagacatgagcaccctctagtgggaaccgtggtatggtatatgtgtgcacagtatgtgtgtggtggggtacatgtatgtatgcctgtgtaatatgcagtgaggaacagtgaggaacatgca

SEQ ID NO: 4009 - DNA, 547 bp, Homo sapiens
  MAP TO AC023112.3; EXPRESSED IN PLACENTA, SIGNAL = 0.69; EXPRESSED IN LUNG, SIGNAL = 0.93; EXPRESSED IN ADULT LIVER, SIGNAL = 0.97; EXPRESSED IN FETAL LIVER, SIGNAL =   1; EXPRESSED IN BONE MARROW, SIGNAL = 0.92; NT HIT: gi14725345, EVALUE 2.10e+00; SWISSPROT HIT: Q62422, EVALUE 2.60e-01; EST_HUMAN HIT: N33739.1, EVALUE 1.00e-27
atggagtgtgaggcttcaggtgaagcggtgacaagggtggctttctggtacagattcatattcaaaaactttgggcagtatcggagcttgatctgcccatactgaattctgaacaagtgggtaaatgcatagcgtgtggtcacagcaatcagcccttccctggcaccccttggtagcaggacatggtctctgatcatttccatcctgactgcatcgcaacgggagcccgggctgcccggcggcggtgctctggccacggctctgagaggaaaggggaaagccagctcttacctgcctgtgcagctgtgattagggctgtgttcccctcgctgtcctgccagttgacgtcaacgtgggggcactctgctaaggccaccacggtatccacaaagccgtggtagcaggcgacaataaggccggtctagaaatgaagaggggaagcgggtcagaggggcagagtcggagcatggtgggtcagcactggggacccgaggggcacccactaccctccagggggctggacaaggcaatgacagggacctggagt

SEQ ID NO: 4010 - DNA, 520 bp, Homo sapiens
  MAP TO AL136362.1; EXPRESSED IN BONE MARROW, SIGNAL = 0.74; EXPRESSED IN LUNG, SIGNAL = 0.75; EXPRESSED IN FETAL LIVER, SIGNAL = 0.62; EXPRESSED IN ADULT LIVER, SIGNAL = 0.77; EXPRESSED IN PLACENTA, SIGNAL = 0.71; NT HIT: AL163303.2, EVALUE 5.00e-44; EST_HUMAN HIT: AL521707.1, EVALUE 9.00e-87; SWISSPROT HIT: Q10737, EVALUE 1.20e+00
ttggctcttcctttcctgacaaaaatactctgtagcatgcaatgctgtttgatagcgtgttacccacagcaaaacttctttcaagatttcagtcaatccttttatgccctgccactgccttatcaagtaagtttatgtaatattctaaatcttttgttgtcaattcaacaatgttcaccgcatcttcaccagaagtagattttatctcaagaaaccacttttttatcattcataagaagcaactttgtatcccttcaagttttatcatgatattgcaacaattcagtcacatcctcaagctccacttgtaagtctagttcttttgctacttccataacatctacagtggcttccttcaatgaagtcttgaacccctcaaagtcatccatgagcgggggaatcaccttcttccaagttcttgtcaatattgatattttgacctcctcccatgaatcatgaatgttcttcatgggatttagaatgatgaatctttttcagaaccatttccatttgcgtttct

SEQ ID NO: 4011 - DNA, 500 bp, Homo sapiens
  MAP TO AC011165.3; EXPRESSED IN FETAL LIVER, SIGNAL = 0.75; EXPRESSED IN BONE MARROW, SIGNAL = 0.69; EXPRESSED IN LUNG, SIGNAL = 0.89; EXPRESSED IN ADULT LIVER, SIGNAL = 0.95; SWISSPROT HIT: O74827, EVALUE 6.00e+00; NT HIT: AF240761.1, EVALUE 1.20e-01; EST_HUMAN HIT: AI394513.1, EVALUE 7.00e-01
tgcttgcaaacatggtcttctttaatttttacattaaacccaagatgtgggttccattataaccccaactttcacatgaataaactgaaccataggggttaaataacttgtttcagctagaaactggttcatctggaatataaacccactgtcttgtttcataattagaataggaaaacacagagaaagactgtggagattaatagaataaagacctgatgggaagcagaacttgaattccttgtgaccatagaggagtggccataggaagtgaccacagagaagtgactctctgtctctgggtaatgaaggtggtagacgaaatcaatcattgtcaaactttggacaggctcactcagaaacccaatgtgtgcaaccgatgagagtatcatggctttatcagcccttagagaggctcttagaagcacaatgagaaaaatgctactcacaatcatccctaggctgtgctcaatatgagcagggctctagggaagaaggaa

SEQ ID NO: 4012 - DNA, 568 bp, Homo sapiens
  MAP TO CHR21_19.0; EXPRESSED IN FETAL LIVER, SIGNAL = 1.8; EXPRESSED IN BONE MARROW, SIGNAL = 1.9; EXPRESSED IN LUNG, SIGNAL = 4.1; EXPRESSED IN ADULT LIVER, SIGNAL = 1.5; EST_HUMAN HIT: AI290596.1, EVALUE 1.30e-02
ctgagcccacatcaaaacagaatttttacaccaggagcaactttgaatcttcattgggcttgcatgaaaatgtcagtgtggcttatggtgaagaatgggctcaaattatataaagctgagtagggtaaagactgaatgaaagatagattatattctacttgagtagagtcagtaatggataacaaggcataaggacataatttcacatttgaatggtgttttattttgaagatatgtaagaatgcacacatatactactatacacatacatacatatgcattcaccaggactatgtctatatttcttattgcattatcatatgttgtgtctatttgtcctgtttgtgcagtagtttcctataaaagtgagtgaaatagatgtaacaataatgaaaatgcagaatatcataattgaaatttagattattttaatctttctaattatctgaatttattttcacattaaatacccattataccaagaataattccttcagttcatcagatgtgatactaccattgtgatcttgtaaaaataaactttacatgggttgggcatattctccat

SEQ ID NO: 4013 - DNA, 501 bp, Homo sapiens
  MAP TO CHR22_35.0; EXPRESSED IN BONE MARROW, SIGNAL =   4; EXPRESSED IN LUNG, SIGNAL = 4.5; EXPRESSED IN ADULT LIVER, SIGNAL = 4.7; EXPRESSED IN FETAL LIVER, SIGNAL = 4.1; EXPRESSED IN PLACENTA, SIGNAL =   5; NT HIT: gi13647183, EVALUE 0.00e+00; EST_HUMAN HIT: BG505552.1, EVALUE 0.00e+00; SWISSPROT HIT: Q01469, EVALUE 8.00e-66
acatttctcgacagcacgctgccacgccgacgcagaccctgctctgcacaccagcccccctgcacccaccatggccacagttcagcagctggaaggaagatggcgcctggtggacagcgaaggctttgatgaatacatgaaggagctaggaggaaatagctttgcaaaaaatgggcgcaatggccaagccagattgtatcatcacttgtgatggcaaaaacctcaccataaaaactgagagcactttgaaaacaacacagttttcttgtaccctgggagagaagtttgaagaaaccacagctgatggcagaaaaactcagactgtgtgcaactttacagatggtgcattggttcagcatcaggagtgggatgggaaggaaagcacaataacaagaacattgaaagatgggaaattagtggtggactgtgtcatgaaccatgtcgcctgtactcggatctatgaaaaagtacaataaagattccatcatcactttggacagg

SEQ ID NO: 4014 - DNA, 554 bp, Homo sapiens
  MAP TO AC016665.2; EXPRESSED IN BONE MARROW, SIGNAL =   1; EXPRESSED IN PLACENTA, SIGNAL =   1; EXPRESSED IN LUNG, SIGNAL = 1.2; EXPRESSED IN FETAL LIVER, SIGNAL = 0.83; NT HIT: AF428307.1, EVALUE 1.30e-01; EST_HUMAN HIT: BE619939.1, EVALUE 2.00e-01
attggggtcaacaggacaagttgtaaatctcatttgtaagaaatctgcaacaggcctcacaggctattctatgacccatagtagattctgcaacctccgtgaatattgagccccactattgttctgctacgctcagttttgctgtccagaaattgggtttcattggatttgctagggcttttcttgccttcttttccatggagattgatgctgacatgcatcagatgatggtaacactccaccctgcagcatttggggtcacagcatttgtagggtaagtaaaactattcccatcattttatatgttgtctgaaatataagctggattagttggtaggaaaggttttgggtattgttttagcagcacaatgtaattgaggaatggataagaaccatctgagaatttactggtcttttcctattgattctgttacttgtgattctacaatttaaaaaaaccttagaaagagtaatagtaagaaatcttaaaaatatctcttctttatctcccaacatatcattaagctttggattcacagaagcaaaatggcctt

SEQ ID NO: 4015 - DNA, 523 bp, Homo sapiens
  MAP TO CHR22_170.0; EXPRESSED IN LUNG, SIGNAL = 0.82; EXPRESSED IN ADULT LIVER, SIGNAL = 0.74; EXPRESSED IN FETAL LIVER, SIGNAL = 0.68; EXPRESSED IN BONE MARROW, SIGNAL = 0.66; EST_HUMAN HIT: BF355676.1, EVALUE 1.90e-01; SWISSPROT HIT: P78559, EVALUE 2.50e-01
ttgctggacagtgaaggatgaggtggttcagccaaggtcactgtggacaaatccgccaggcaggtggcaagttgggggaggttatttgcaaaatctggaataaatacacaatccatagctagagaaagaaaaagaaaacttataaaaataggagcttaaatggagaaaggggggaagcgatgtaaaaaggctttgtaagggagaggaagccaacaccagatgcatgttcattacgggagaaatgggagtgatgtctccagggacttctccagggtcccactcacctggcaggtgccatagagctaggtgatgtgggtggtgctgaggacagaggtgggaggacacttggactgctggcaggaatggactctgtggtcctgggagctgtggcatcccttccccacccctgtagccccggagcacctggaccacctctccctgcagagcggacaggcacttcctcagatatcttgcaggggaaaggtcttacaggacttaatggagcacacagatctcaaaggca

SEQ ID NO: 4016 - DNA, 586 bp, Homo sapiens
  MAP TO CHR22_124.0; EXPRESSED IN BONE MARROW, SIGNAL = 0.58; EXPRESSED IN FETAL LIVER, SIGNAL = 0.52; EXPRESSED IN PLACENTA, SIGNAL = 0.55; EXPRESSED IN LUNG, SIGNAL = 0.54; EXPRESSED IN ADULT LIVER, SIGNAL = 0.96; SWISSPROT HIT: P78411, EVALUE 4.40e-02; NT HIT: gi15277336, EVALUE 0.00e+00; EST_HUMAN HIT: BG575171.1, EVALUE 0.00e+00
ctttttccttttccggtgtggctgcccctgccagtgataaccctatgtctgacgtatacggcgccaacctgttccaccagtacctgcagaaggcaacgcatgatggggcgccagaactaggggccgggggcacacggcagcaacagccctcagcaagccagagctgcatctccatcctggtgtgtacaggcgtctacaatcccaggaacccacagtccacggagcctgtccttggaggaggggagcctccattccacgggcaccgagacttatgcttcagtccagggctcatggaggcctcccacgtggtgaatgacgtgaatgaggctgtgcagctggtcttccgcaaggagggctgggctttggagtgagggcagtgcggtggaggtgagggggtgagcctggacctgtgggcgagtcccattggctgggctctggcctgatcactgggctcaggtcagggcttggttcccttgccacccttcttgctgccccatgagtgtggcattactggtcacttggaagaagacagtgactctttttccctgctgggtagcattttgtatggaacggttggaattttctg

SEQ ID NO: 4017 - DNA, 501 bp, Homo sapiens
  MAP TO AC013632.3; EXPRESSED IN BONE MARROW, SIGNAL = 1.9; EXPRESSED IN FETAL LIVER, SIGNAL = 1.5; EXPRESSED IN LUNG, SIGNAL = 3.2; EXPRESSED IN ADULT LIVER, SIGNAL = 1.6; NT HIT: gi13357558, EVALUE 1.20e-01; EST_HUMAN HIT: BG202120.1, EVALUE 0.00e+00
ttttgcaccaaagtccataacattcataattatcaacgaatatctaaaaacgaaataataagtactaatcttattattaataggtgtgtctaaatacaactgtaaatacagctatgatgtacctaaatgaagaagaagaagaagaggaagaagcagaaaaagaagcagaagcagcagcagcagcagcagcggcagaagaagaagaagaagaagaggaaggaggaagaaattttaccaaaaatttgaaatattttaaaatattttccctcctttgttttgtcacaggcaagtcctggaaatgtgaacctctcatattttatcacacacttttgattattgtactagccagtcaagaacattagaaaaggcattaagaaattgatagaatattatgttcctgaataagatgacataatataaaaatgttaatttcctataaaactccatacaaatttaaatttattcaatttaaaactttgatgggaaaattgaaacttggca

SEQ ID NO: 4018 - DNA, 587 bp, Homo sapiens
  MAP TO AL159176.2; EXPRESSED IN PLACENTA, SIGNAL = 0.82; EXPRESSED IN FETAL LIVER, SIGNAL = 0.61; EXPRESSED IN ADULT LIVER, SIGNAL = 0.63; EXPRESSED IN LUNG, SIGNAL = 0.72; EXPRESSED IN BONE MARROW, SIGNAL = 0.67; SWISSPROT HIT: P53867, EVALUE 2.00e-04; NT HIT: gi14249577, EVALUE 1.00e-123; EST_HUMAN HIT: BF240386.1, EVALUE 1.00e-106
ggaaagagaattcaaaaccccaacaatttctctgaaggaaacaattgggaaatattctgatgatcatgaaatgcgaaatgaagtttatcataggaaaatcatctcttggtttggtgattcccccttggctctttttggcttacatcaactaatagaatatggaaagaagtctgggaaaaaagcaggagattggtatggaccagctgtggttgctcacattttaaggtaaaattgttttaaaatctttcttcttgtgacagaggtcctcaggattaagagatactgatttttgcaatgtgtatatataattggaactttaaaagtctaactgtatgagaatgttgataaagacgctttcatttgccagcagggaaaaaagaagacatattgcgactctagttacatttaatttatttactgacaaatttttcttctctttctcttaggtatagacatcccaggtctctttctaaccaggttttcattagaataccttactgaaatgctctaaacactaacatctctttcaaccttggaacgtgcataacattatagttttttttaatagtgtaacctgggggctgtaa

SEQ ID NO: 4019 - DNA, 594 bp, Homo sapiens
  MAP TO AL035367.1; EXPRESSED IN HEART, SIGNAL = 1.2; EXPRESSED IN LUNG, SIGNAL = 1.4; EXPRESSED IN PLACENTA, SIGNAL = 1.4; EXPRESSED IN ADULT LIVER, SIGNAL = 1.4; EXPRESSED IN FETAL LIVER, SIGNAL =   1; EXPRESSED IN BONE MARROW, SIGNAL = 1.1; EST_HUMAN HIT: AU130137.1, EVALUE 2.00e-91; SWISSPROT HIT: Q13472, EVALUE 2.00e-26; NT HIT: gi16178987, EVALUE 1.00e-91
tcctttatgatggagggcagtgtgatttgactttgaccttggtaacaccttgtgttctgcagtaaagcccaatctgcaggtgttgcgagcccgattctctgagatcacaccccatgccgtcaggacagcttgtgaaaacctgaccgagcctgatcagagggtgagcgatgctgtggatgtgaggcaggagctggacctgaggattggtgaggagctaggcagacctctcccatggccacattaatgttgtgttatgggaccaaaaatgggctctgtgtcgatatgtgcagccagccctggactctcattatccatcattttcaccttccttcactctccttcactctccaggagctgcctttactaggttccagaccctgcggcttcagaggatttttcctgaggtgctggcagagcagctcatcagttacggcagctgccagttccccacactgggctttgtggtggagcggttcaaagccattcaggcttttgtaccagaaatcttccacagaattaaaggtagggcctggagtgggtgttatggcctgggacctatgggctcaaggttaaggagggggactgtgagcatta

SEQ ID NO: 4020 - DNA, 565 bp, Homo sapiens
  MAP TO AC005283.2; EXPRESSED IN FETAL LIVER, SIGNAL = 2.2; EXPRESSED IN BONE MARROW, SIGNAL = 1.9; EXPRESSED IN PLACENTA, SIGNAL =   3; EXPRESSED IN LUNG, SIGNAL = 2.2; EXPRESSED IN HEART, SIGNAL = 2.4; EXPRESSED IN ADULT LIVER, SIGNAL =   2; NT HIT: AL163201.2, EVALUE 0.00e+00; EST_HUMAN HIT: AV707625.1, EVALUE 0.00e+00
tcccttgacatgggtattttggaacagtaatcagtcaaatttaaaatgaaagtttaaatttgtattcttgggattttgtaattttagacccacccaagacttatacccaggatgatgtgtgtttgattgaatcagggatgactcagttacagagcctcacagttacagttccaagaagaaaactgtcaaaaccaaaactgaaattgaagattataaatcagaatagcgtggccgtccttcagacccctccagacatccaatcagaacattcaagggatggtgatatggatgatagtcgaggtaatactaatttattttccatgaaattagtgcaagaattacagcatataaagtaacttttgaaatatgtgtatgatttaccaaagggtaaatcacactgacttagataaccccgatgtgacccttgccatctccaaatgagtgatcttcttagaccttgccttttcgggttctcttcctttcacacattttagaacagacctaccttacagaaatctcaaggagcaccatatctttgaagatcacaggtggggaactacagagg

SEQ ID NO: 4021 - DNA, 600 bp, Homo sapiens
  MAP TO CHR22_114.0; EXPRESSED IN BONE MARROW, SIGNAL = 0.69; EXPRESSED IN FETAL LIVER, SIGNAL = 0.61; EXPRESSED IN LUNG, SIGNAL = 0.99; EXPRESSED IN PLACENTA, SIGNAL =   1; EXPRESSED IN ADULT LIVER, SIGNAL = 0.9; NT HIT: gi7657125, EVALUE 0.00e+00; SWISSPROT HIT: Q61645, EVALUE 6.70e-01
ctgcagtgtgatttcatgggagaggttgggaaatcccaggaggaaactggtgcaggaaaagaggcaacacatggccacccctaaacagaagcagggacaccccctcatgtcaggaacccccaaggttaggttctgagctcaccctgaggttttaggccaccctgtgggccctggaggcctgtgggggccacatcaagcctgggagagaccatagggtcctggagggctgtggtgttggctttgctggggcgcttggaccctttctgatgtggtggccccttccgaaggtgctgcttctgtcgaggcttgggaggggctgggctccgggagctgggagttggggaggtggcccgggagctccaggaggcattgtagaaggtcctgggctgcaggcgagcgaggggcactgtgccgtacatcctacacctgggtggtggcagttggtggaaattggtgactgggaatcccccttccagaagcccccagggtcgtctccatggagatcaatgctctgccagtcccatcccccatcccgctgggttgtgggggacacccaaggagggtctgcatcccgggccctcaggagaggacatgcaggat

SEQ ID NO: 4022 - DNA, 537 bp, Homo sapiens
  MAP TO AL136317.2; EXPRESSED IN HEART, SIGNAL = 5.8; EXPRESSED IN LUNG, SIGNAL = 6.5; EXPRESSED IN BONE MARROW, SIGNAL = 6.3; EXPRESSED IN PLACENTA, SIGNAL = 7.5; EXPRESSED IN ADULT LIVER, SIGNAL = 5.6; EXPRESSED IN FETAL LIVER, SIGNAL = 6.9; SWISSPROT HIT: Q99439, EVALUE 2.00e-19; EST_HUMAN HIT: BE867826.1, EVALUE 3.00e-37; NT HIT: AL163204.2, EVALUE 6.00e-81
accttcaccctacacgcatcaggatatggccttgatcccttcccccacagcccggtggctcagtcctgagaaggaaccaaagcagggggaggtggggaaaaatccctgctgcctgatcccacgctgccactcacagaccctcggttgactggcagcactgaacaggtttaaaaaaaaaaagatgaaaacacagaaaaacccaaacacccagaggggagatcatgtgtggagagagcgtgctgggagcctcagtagccggtctcctcctggtagtaagggagatattcaggggccggagcccgagggagcgccgtgggccactgggcctccccagtagtacctggggtcgtatatctgtaggcccatgccgaaggcctggccgctctgatgagcgccctgcgtgtatcccatcttcagggacgtggaggagttgtcacacttgtcgattcccagcttggtgtcataggtgtgctcattactcctatctagctgtaagtttgtatttgttaaccaacctctccctgtcctcttctccct

SEQ ID NO: 4023 - DNA, 519 bp, Homo sapiens
  MAP TO CHR22_179.0; EXPRESSED IN PLACENTA, SIGNAL = 0.69; EXPRESSED IN ADULT LIVER, SIGNAL = 0.56; EXPRESSED IN FETAL LIVER, SIGNAL = 0.55; SWISSPROT HIT: P13983, EVALUE 4.20e-01; EST_HUMAN HIT: BI016426.1, EVALUE 0.00e+00; NT HIT: gi16167408, EVALUE 3.00e-73
tttccgaccaaggtgatttcctcatttatgttcactttattgcaggactctggccagaagaatggtacgagggggtctgtgaaatagccactaagtcccccttgctcacctttcccagcaaggagccactgcggtccgtcctccagtataactcagccatgaagaatgacacggtcacccccgtaaggattcacatctcatttttaccatgctctctgtgccaattagggcagatcttttcactgtcattattaacacatgttgccagccactgggacctgtttgtcctgggggatgccccatgagccctcggatgtttctctccctccaggctgagctgagtgagctccgcagcactatcatcaacctgctggacccccctcccgaggtgtccgcactcatcaacaagctggacttcgccatgtccacctacctcctctctgtgtaccggctggagtacatgaggtacacgtgccttcaccaccatgcacatgcacatccacatttgagcagggtttt

SEQ ID NO: 4024 - DNA, 588 bp, Homo sapiens
  MAP TO AC021607.4; EXPRESSED IN BONE MARROW, SIGNAL = 0.71; EXPRESSED IN FETAL LIVER, SIGNAL = 0.78; EXPRESSED IN PLACENTA, SIGNAL = 0.8; EXPRESSED IN LUNG, SIGNAL = 0.95; EXPRESSED IN ADULT LIVER, SIGNAL = 0.86; SWISSPROT HIT: Q9K920, EVALUE 4.30e+00
ccacatttggcaaaacactgctgttcatttccaatctaaaagatttttgtcttttagtagggaaattacacttagtttgattataaaatttacataatttagattcatctcccttagctgattttagttcttgtcacatcattttataccatgatttcttcattcttttgttaaatttctttttattgtgaaatatatcatgctcataaaacaatgtgtgtgtgtatatatacatatatatatatatatgttaatagtaagttgaataaacatctaatacccactacccagcttaagaaacagaagatcataaatgactttgaagttcttattgatctaatggatcacattcattccttcccccagatttaatactatcttgtattttgtgttaataattattttttatgcctttgccatatatatgcaccttaaaaaaacataatgatcagtttacctattcctggattttatacaaagggaattgacacctgctatttttgctctgcatgatgttttgtgttggtagctgttattaattaattttccataatgtgtggtattccatccaaagctgtacaacctccc

SEQ ID NO: 4025 - DNA, 547 bp, Homo sapiens
  MAP TO AC015833.3; EXPRESSED IN BONE MARROW, SIGNAL = 0.41; EXPRESSED IN PLACENTA, SIGNAL = 0.45; EXPRESSED IN LUNG, SIGNAL = 0.52; EXPRESSED IN FETAL LIVER, SIGNAL = 0.39; SWISSPROT HIT: P48380, EVALUE 9.00e-21; EST_HUMAN HIT: H69333.1, EVALUE 0.00e+00; NT HIT: gi4506494, EVALUE 2.00e-80
cgctcagatgtcgaagaatgtgggagtttgttttagtcttgacctcaacctactcagaaggaaaataatacttggtttagagatttaaatgctgtaatttacaagtgaactctctcaccaaatgaattttaaataagtgtcagaggcaagcatttaaaatttgtgaagggaaagaagatttgaaaattgcagtggtttcttttactggaggaaacagaatcccaacttaattggattgcgttacaggttgccgctgtaagtgcctttgcccagactctgcgaagatacacgtcgcttaatcacctggcccaggcagctcgtgcagtgcttcagaacacttcccaaatcaaccagatgcttagtgacctcaaccgtgtcgactttgccaatgtccaggtattctatttccttgcaaagcatgtctcttaaggaaagatacccaatttgttcttcttaattgggatcatcaaatttcttttcaaagtctcatctatatatggcagcatctatattcacagtgttctgaaggagaggagtttgacccaga

SEQ ID NO: 4026 - DNA, 526 bp, Homo sapiens
  MAP TO AC013613.3; EXPRESSED IN PLACENTA, SIGNAL = 1.1; EXPRESSED IN FETAL LIVER, SIGNAL = 0.99; EXPRESSED IN BONE MARROW, SIGNAL = 1.1; EST_HUMAN HIT: BE350127.1, EVALUE 4.00e-30; SWISSPROT HIT: P57182, EVALUE 1.70e+00; NT HIT: U93163.1, EVALUE 2.00e-19
aggactcaagttgcaggaccctgggtgtgtcagtgaaggcctgtgatgtcaatgtgaaggcctgtgatgttattgtactttatgataaatattgtacagttagactacatcagatttataaaaaatatttttcttttttcaatggtaaatgaactttagcttactataactttttacattatacattttttaattttaaaaaatattttgactcttttgtaataacagtgtaaaacaaacacattttacagctctacaaaaatattctcttgttgtgtctttataagcttttttctattttaaaattcttctattttttactttttaaactttttttgtcaaaaacaaaggcataaacacacacacgacctttggactagtcagggtcaggatcatcaatatcactatctcccacatccacaccttgttctactggaaggtctttaggggcaataacacccatggagctgtcctctcctatgataaaagtgctttcttctggaatgctcctgaagaacctgcctga

SEQ ID NO: 4027 - DNA, 520 bp, Homo sapiens
  MAP TO AC021635.3; EXPRESSED IN BONE MARROW, SIGNAL = 0.74; EXPRESSED IN PLACENTA, SIGNAL = 0.86; EXPRESSED IN ADULT LIVER, SIGNAL = 0.7; EXPRESSED IN LUNG, SIGNAL = 0.73; EXPRESSED IN FETAL LIVER, SIGNAL = 0.62; EST_HUMAN HIT: AV714371.1, EVALUE 8.00e-04; SWISSPROT HIT: P57901, EVALUE 6.30e+00; NT HIT: X84702.1, EVALUE 5.00e-04
tgggggtacagagaatgagggaaaaggcagtgctagagactttcccctaaagcaagagtcagttattcactaagcttcaccttctttagagaatgggtcttgacttttgtaggcacagaatcacctggcagacttgctaagacatcgactactaggccccacccaagagtgtctgattccacaggtctccagtgggacctgagattttgcattcctaacaagtttgtgggctctgctgttgctggtctggagatgacactttatgaatttctgcctcagagggtgcttttcctcatcaaatgtacaggtttttttttcttcttctcattattccagataatagtaccaatactgataagaattgcagatgtgcagatcaaaaagcgcctcagcttgatgtatagtattacaaaaggctatatcaaaagtcaagaagatgccaaacttctaataaaacaaatagctgtctgtgaatcaatatatcaggtgagaaacaagcactggtcatttggggagaaaa

SEQ ID NO: 4028 - DNA, 565 bp, Homo sapiens
  MAP TO AC015956.3; EXPRESSED IN PLACENTA, SIGNAL = 0.83; EXPRESSED IN LUNG, SIGNAL = 0.79; EXPRESSED IN FETAL LIVER, SIGNAL = 0.6; EST_HUMAN HIT: BI259201.1, EVALUE 1.00e-100; NT HIT: AF100744.1, EVALUE 1.00e-100
tttcccttagcatgtttttcgtatctcttagttattagatacctgaacatttgacattggtttttctcaactatttgagatgctatgttaaaatctatatatttaaaaataattttgcccaatttatgtctaaactgctcaaaatgcatctcagctgctcagtcactgtggtttctctttctccattaggatgttgtacctcaggcgttgttagatcagtatttatctatgactgacccttctcgtgcacagacggttgacactgaaattgctaagcactgtgcatatagcctccctggtgtggccttgacactcggaagacagaattggcactgcctgagagagacgtatgagactctggcctcagacatgcaggtgagtaaagcagttaaagaattagcagaacgtgcatgtggaaggcacagtgctttgctttttgtaacctaaagaatttctgttcatgttctagcatgttcttagtgttataggaaattatgtatggaagagcttaagagtaataacagagcatgttctttttgcagtgtcagagtcccacaatttggct

SEQ ID NO: 4029 - DNA, 571 bp, Homo sapiens
  MAP TO CHR22_183_2.0; EXPRESSED IN FETAL LIVER, SIGNAL = 0.56; EXPRESSED IN PLACENTA, SIGNAL = 0.86; EXPRESSED IN LUNG, SIGNAL = 1.2; EXPRESSED IN ADULT LIVER, SIGNAL = 0.87; SWISSPROT HIT: Q9UKB7, EVALUE 2.00e-96; NT HIT: AK024483.1, EVALUE 0.00e+00; EST_HUMAN HIT: BG741994.1, EVALUE 0.00e+00
ggccattactcagctcttttgtgacagggacggcttgttgtgggcacttctcacccctgaaaatctgggacctcaacagtgggcagctgatgacacacttggacagagactttcccccaagggctggggtgctggatgtcatatatgagtcccctttcgcactgctctcctgtggctatgacacctatgttcgctactgggactgccgcaccagtgtccggaaatgtgtcatggagtgggaggagccccacaacagcaccctgtactgcctgcagacagatggcaaccacttgcttgccacaggttcctccttctatagcgttgtacggctgtgggaccggcaccaaagggcctgcccgcacaccttcccgctgacgtcgacccgcctcggcagccctgtgtactgcctgcatctcaccaccaagcatctctatgctgcgctgtcttacaacctccacgtcctggatattcaaaacccgtgaccgtcagggccacccctgcctgtgggccaaggagaccagtgagtcagggacctctcttgcatgaagggtgcagtgatagttcctcccca

SEQ ID NO: 4030 - DNA, 547 bp, Homo sapiens
  MAP TO AC022478.3; EXPRESSED IN FETAL LIVER, SIGNAL = 1.8; EXPRESSED IN LUNG, SIGNAL = 3.6; EXPRESSED IN ADULT LIVER, SIGNAL = 3.1; EXPRESSED IN BONE MARROW, SIGNAL = 1.9; NT HIT: AL163210.2, EVALUE 0.00e+00; EST_HUMAN HIT: BE420422.1, EVALUE 0.00e+00; SWISSPROT HIT: Q90701, EVALUE 1.70e+00
caacattggaactggtgacggcagaggttggaacagtttggagggctcagaagaagataggaaaatgtgggaaagttcggaactccttagagacttgttgaatggctttgaccaaaatgttgataatgatatggacaatgaaatccaggctgaggtggtctcagatggagatgaggaacttgctgggaactggagcaaaggtgactcttgttatgttttagcagagacgggtggcattttgcccctgccctagagatttgtgaaacttcgaacttcagataggtgatttagggtatctggcagaagcaatttctaagcagaaaagcatttgaggggtgaatgcgtgctgttaaaggcattcagcttttaaagggaaacggagcataaaagtttggaaaatttacaacctgacaatgtgatagaaaagaaaatcccattttcttaggagatactcaagcctgctacagaaatttgcataagtaacaaggatccaaatgttaatcatcaagacaatggggaaaatgtctccagggcatgtcagaacttt

SEQ ID NO: 4031 - DNA, 500 bp, Homo sapiens
  MAP TO AC021252.3; EXPRESSED IN FETAL LIVER, SIGNAL = 1.8; EXPRESSED IN LUNG, SIGNAL = 2.5; EXPRESSED IN ADULT LIVER, SIGNAL = 2.6; SWISSPROT HIT: O60437, EVALUE 7.90e+00; EST_HUMAN HIT: BG213431.1, EVALUE 2.00e-63; NT HIT: gi16159910, EVALUE 2.00e-58
gttgctaccacccaggagagaagtcttcctcatggctctttaattgacggatggtaaatgactgcctcgctacctcttgttccaacaggtcctttgtcatccagcaaatcccaagcagcaacctgttcatggtggtggtggacagcagctgcctctgtgaatctgtggcccccatcaccatggcacccattgaaatcaggtatatccttttgtgtgcaggtccactcactaccacggaaaccagtaaggggtatcagtggtaaggaaacctgggggagaaatattagagaaggaaaattacatcctttccactgttggagagagagagtagttaagagagttgtcattgccaaattttgacctctgaaatgcagagtagaaaaaagcaatccttggaaacatgccttaactacagtcaacataatgaatcccttaagtgtgaacgtctaaaggcccagaagatcagaaggcgcccagaatcttgtcatggcttccatcct

SEQ ID NO: 4032 - DNA, 564 bp, Homo sapiens
  MAP TO CHR22_184_1.0; EXPRESSED IN FETAL LIVER, SIGNAL = 0.64; EXPRESSED IN ADULT LIVER, SIGNAL = 0.29; SWISSPROT HIT: P39572, EVALUE 6.20e-01; EST_HUMAN HIT: AA936053.1, EVALUE 1.30e-02; NT HIT: X15608.1, EVALUE 3.40e-02
gggaggagcatcacagagacagaagtcatgatagagaacagttacatcatctcccacatggtcaaattcaggttctactttgaaggtagacacaatagatttggtatgggtttggacctaggctggtgacaaaaagaaataaatgaagaatgacccctaggatttggcctgaccaactgtaaaggcagagctgtaattttccaagatgaagatgattatgggaggagcaggtgtggacatgccaagcttgagctgatcaccagacatccaagtacaaatggcaaggacacagttggatagatgagtctgaagttcaaagaagaggttcaagttggtgataccaatttgggagtcatgttgaatgcagaaagaatctaaagtacagaaaagcattcaaaaaagggaaactatgtaaaactagatgtgagctttagaatctacctttatgttcactaagccataaaagacaaggtatcatttgggaatttccaaattgtgaccatagctttgtctcatagagttaatatataacaacatctaaacagttgtttctggcgcgaatat

SEQ ID NO: 4033 - DNA, 540 bp, Homo sapiens
  MAP TO AC011676.4; EXPRESSED IN PLACENTA, SIGNAL = 2.4; EXPRESSED IN LUNG, SIGNAL = 3.3; EXPRESSED IN ADULT LIVER, SIGNAL = 1.9; EXPRESSED IN FETAL LIVER, SIGNAL = 1.9; EXPRESSED IN BONE MARROW, SIGNAL = 2.2; SWISSPROT HIT: O05519, EVALUE 2.60e-01; EST_HUMAN HIT: BI037357.1, EVALUE 0.00e+00; NT HIT: gi14747475, EVALUE 0.00e+00
aatctccaccacccactgagaaggtatcagccttattcctgctttacagatgagcaaactgagggacaggaaggcattcggtctgcagaagggctgcagctggtacttggcatggctggcagactgctcagggcccactccagccatctgtctcctaaacacaggtggggtctggcgccgtctgcctgtgctgtccttacctctatatttctgaaggtggaaatctccaagtagcctggccttccttcggttaggaggaacaggcgcttctgggtcatggcgatcttgccaacgcctaggtttgtcttgacggagctggacaacttacacacacactcgtttttatccaggtgttccatcaccagccacggcagactgacctcctgggcttctgcttccgtctccttccagcagttgtagaaatctttgaatgtttctgggtcgatttgtttctcctgtccttagtttgataagaagaaaagagaggtatcttacagccacatacctcgggagccccaagggcttctccatgacctgaag

SEQ ID NO: 4034 - DNA, 592 bp, Homo sapiens
  MAP TO AC023123.3; EXPRESSED IN FETAL LIVER, SIGNAL = 0.49; EXPRESSED IN PLACENTA, SIGNAL = 0.65; EXPRESSED IN ADULT LIVER, SIGNAL = 0.67; EST_HUMAN HIT: BG399536.1, EVALUE 0.00e+00; NT HIT: AF001295.1, EVALUE 4.00e-39; SWISSPROT HIT: Q02268, EVALUE 5.70e+00
ccaggagcttcagaggagtcaagaatgaaggaataaaaatcaccttaaatatttgaaggcataaagactttactttcaaacaaagcaacactagcttgaaatgtatgatatgcctcttcccagtttgttttattctccccattttggttattatgatttttaaaatcctttcattcttttcactcagaatgaggcaagtaattgatttccttatgaagaggccaggcagtccatttttcatggcgttcagcgtgcacagcaaatctaaaaccattgtctggcaaatgcagctcgcagccgcaattatttttttcaccaggtaagccggctggcgtatgtttttaaaattttattgttaagtattgtcttttactggttaaatcaatgataacattctttactttgtggttatgttactcaaaatgaggattttaaacaatgataaaaataaagcttgttagatcatttttaatggtaataaattggttcctgaagatttgattaaaaagaaaactaggtcaatctaagcagagtccaaattaggtagaaagtccatagagaacgggaaaaaaggaagttgtggaaccacaga

SEQ ID NO: 4035 - DNA, 596 bp, Homo sapiens
  MAP TO AL078623.28; EXPRESSED IN PLACENTA, SIGNAL = 0.52; EXPRESSED IN LUNG, SIGNAL = 0.47; EXPRESSED IN ADULT LIVER, SIGNAL = 0.54; EXPRESSED IN FETAL LIVER, SIGNAL = 0.45; SWISSPROT HIT: P87060, EVALUE 2.00e+00; EST_HUMAN HIT: BF872608.1, EVALUE 8.40e-01
agcaactgaattctgtgggagaaatagatgcagctactacagtagtaattttatgatcaataatataactctttaaaaatgtagttcactctttccttaataatgtcaaataatcacccattacatgaagaaagaactaacatactctggattggcaccttttggaaggttaatcagttcttgtgagtcatcaagctgaccccaacatattactgtgtgctcttcaatgacattttcaccccataagacactaagttcctggaagacaaacacaggaactatttactgtgtttttgtatcttccatacattccagcacattgctatgcacaaagctgatcctcccaaataagtcaaacacagaattattattattatggaagtttctaataggaattgtaggaaatgcagatctgattcttcatggttgagcacttattgaggcctgtttttctttacctactcacagtcttaactcaaaatttctatttatgatactgtctctgaccatgaactttgtctattcatgttgttattggggattctaaaagctgtaaggagctttgccagtatgcagccagaaattgctttctccca

SEQ ID NO: 4036 - DNA, 551 bp, Homo sapiens
  MAP TO AL096771.11; EXPRESSED IN LUNG, SIGNAL = 0.93; EXPRESSED IN ADULT LIVER, SIGNAL = 0.62; EXPRESSED IN FETAL LIVER, SIGNAL = 0.55; EXPRESSED IN BONE MARROW, SIGNAL = 0.59; NT HIT: gi14757166, EVALUE 3.00e-73; EST_HUMAN HIT: AW419020.1, EVALUE 2.00e-97; SWISSPROT HIT: Q99715, EVALUE 8.00e-22
tggttgagaagcacatctggatttaatatctcgtgcttctctagtgcctttacccagacctcaggatctgaaactcagagatgtgactcacagcactatgaatgtcttttgggaacctgtgcctggaaaagtgcgtaaatatattgttcgatacaaaacaccagaagaggatgtcaaagaggtaggttgaagatgatagtagatatgaaaatatttgttttcctagtaggtttaaaaaaagaactttatcaagtatggatgatagcatgttttgaatacttgtcactttgttaacacagtgttgaaaacttgtgatattaataaagcagtttttgaaaatcaatgatatattggactgtcttgtcaaaacagaaatgttttgctgtgtgatattaatctcaaaaagatcatcccttggtagataaaaagttatcaaatctaaatggtatttccttcccatccagattccttatatggctttctattctaagaattactagaaaatgtcatgtttctaaaaataaaaggtagcaagaggttgcagcaatgaa

SEQ ID NO: 4037 - DNA, 540 bp, Homo sapiens
  MAP TO AJ239319.2; EXPRESSED IN FETAL LIVER, SIGNAL = 1.4; EXPRESSED IN HEART, SIGNAL = 1.2; EXPRESSED IN BONE MARROW, SIGNAL = 0.96; SWISSPROT HIT: Q15233, EVALUE 1.00e-32; NT HIT: Y11293.1, EVALUE 0.00e+00; EST_HUMAN HIT: BF968377.1, EVALUE 1.00e-107
aaagaggcaggtctttgctgcacatgttcactggcagccattatcttggtcctcacaaggaatgcaattcttagctggggtaattctggacaaagttagtaacctaggaaccttgcctatagggaacgagagcagccacccagatttgcacagcctggctcctttgagtatgaatatgccatgcgctggaaggcactcattgagatggagaagcagcagcaggaccaagtggaccgcaacatcaaggaggctcgtgagaagctggagatggagatggaagctgcacgccatgagcaccaggtcatgctaatgagacagggtgagtctaggcctgtaagtcttaaagctgaaaggacaaaatgacatttttaaatgggtttctttgtatcaattaacagaagggcctacatctctgcttttatacttagtttgcgttgattttggtagataaataggcttggagatgtggcagagatactggattctgtggagaaggaaatgataggtataacttcattttggaatctggacaccacaggt

SEQ ID NO: 4038 - DNA, 592 bp, Homo sapiens
  MAP TO AL136978.3; EXPRESSED IN FETAL LIVER, SIGNAL = 0.74; EXPRESSED IN BONE MARROW, SIGNAL = 0.68; EXPRESSED IN PLACENTA, SIGNAL = 0.83; EXPRESSED IN LUNG, SIGNAL = 0.79; EXPRESSED IN ADULT LIVER, SIGNAL = 0.96; NT HIT: AJ011804.1, EVALUE 5.70e-01; EST_HUMAN HIT: BF805185.1, EVALUE 8.30e-01; SWISSPROT HIT: Q9ZD66, EVALUE 4.40e-02
ttacccaaagacacaagccctggaaggaaacacgggagttaataccctgttatgtctccatgggtcttgggattctggctccaacaatgttgggatgtttgtctcttactgagagtgaaattctttggagataaggttatgtgactgagactcaagaatctggtgctgagctgcaccagattgctctggccaagagtgttctcttcatatgctcctgtaaggtaactaaatccttatctcctaggagcagctgctgtgttgcatataaccgaggataccaatcatgctgtaatcaatataattcaaatttaaattatccagcattattcctgcttgcaattcacaaccaaactcatcagtggcaaagatttcatcatcttatcagaaaaactctcttcgaatgtattagactcattatacttgtgtacttaattcccaccaagacccaagtggaattatcttcaaatcagcttgtttatgataagcagtccaaaatgacctcaaaaatcgtggacaagcctgaaaacctgagaaggatgacagtcttctaccaggagcaagggattttccaggttgggtcccctttttgtct

SEQ ID NO: 4039 - DNA, 599 bp, Homo sapiens
  MAP TO AL136317.2; EXPRESSED IN FETAL LIVER, SIGNAL = 1.5; EXPRESSED IN BONE MARROW, SIGNAL = 0.92; EXPRESSED IN PLACENTA, SIGNAL = 1.3; EXPRESSED IN LUNG, SIGNAL = 0.91; EXPRESSED IN ADULT LIVER, SIGNAL = 1.2; NT HIT: AJ414160.1, EVALUE 1.40e-01; SWISSPROT HIT: P33327, EVALUE 7.70e+00
gcctgtggattgtgtgagagagagaatgagcctgtaaatacagaattatatcagaattcttgtagcaaataagctatcaggaaaattgagccaacttagtcttggtcttgtgaaggacattttctcttttctgacctagtcttttctattaagtgaaagatgtcacacaatgaccactcatctatttttgatggatacatgaattgtacattacatggaaagaagagagaaaataatcctaattttatataatgtacaggttagaaagcctgatacagactaatataaaattaatgctttgaataaatttgtttatactattgctctgttagtgttgctacttttggtttgtttttcaattgtttttccaatatgtatttagtttgatttttaataatcttctctctctcttttttcttttcttctcctttacctcttgctcctcttccttactctccttgccttcctcctcagtctcctcatcctcatcttcctcctcatcctctttctttgttttcattacaaaataaaataagcaatcagaaaagttcatacagatattgttacttatctttagggacctggatctaacttagtgc

SEQ ID NO: 4040 - DNA, 562 bp, Homo sapiens
  MAP TO AL080313.13; EXPRESSED IN PLACENTA, SIGNAL = 0.66; EXPRESSED IN LUNG, SIGNAL = 0.66; EXPRESSED IN ADULT LIVER, SIGNAL = 0.74; EXPRESSED IN FETAL LIVER, SIGNAL = 0.63; EXPRESSED IN BONE MARROW, SIGNAL = 0.66; EST_HUMAN HIT: AA398099.1, EVALUE 4.00e-83; NT HIT: Z93937.1, EVALUE 3.40e-02; SWISSPROT HIT: P16356, EVALUE 1.80e+00
agttgggacctgaacacacctgattctatatcatttcatgctcatgtttgtgccctgcccaggaatccccaaacccacctgcttcagtctttgctgagaatttacagtgacaatttatgggactctctttaggagaatgacaagttgcaggtgaactcttggaacaaatgtggattgtcttgtcttcatttggaatgtatgacaaactcatagggccatgtcagaatgcagagtgactgggggcttcaggaccccgtggggatgtggggggcattgtgtgtctgccttgttttgatccattctgctgctccagataatggcattggctgtaccagtggcccagatccttcacctgcagaagagcttcccagagaggagcaagccttcctgccgtcacctctggtgtcatcctataggacattaaaaccaactcaagattgtgttgaaaactgttttccttttgaggatgctaataagaacaagatcatatcaacgggtatggatcatggcaggattttccttcagctgagtcttttaatgagccgtttcataatgagggctg

SEQ ID NO: 4041 - DNA, 552 bp, Homo sapiens
  MAP TO AC012186.3; EXPRESSED IN PLACENTA, SIGNAL = 0.88; EXPRESSED IN FETAL LIVER, SIGNAL = 0.75; EXPRESSED IN LUNG, SIGNAL = 1.1; EXPRESSED IN ADULT LIVER, SIGNAL = 0.78; EXPRESSED IN BONE MARROW, SIGNAL = 0.84; NT HIT: gi8922645, EVALUE 1.00e-117; EST_HUMAN HIT: AU138790.1, EVALUE 1.00e-116; SWISSPROT HIT: P34110, EVALUE 5.00e-09
ccctagagtctgttccctttgaaatttaacactaagccaatgaagttgaaagtgattttttataaagcattggtgtactatagagataagtaggaaatacacaaaggagaaggatagtagtaagttggtcctgtaaatactgtgtaaagacttttctgtttctttgcagtgaagaaacaactggtgacatcagtgattccatggattttgtactgctcaactttgcagaaatgaacaagctctgggtgcgaatgcagcatcagggacatagccgagatagagaaaaaagagaacgagaaagacaagaactgagaattttagtgggaacaaatttggtgcgcctcagtcagttggaaggtgtaaatgtggaacgttacaaacaggtttatatatttttgttacctcttcttatgttcagagataaactgaaatctgatttttaaaatcagaatatttttgttatacaatagtacattgaaaaacatcttaaaatggctgttattgaagaagacttaaacggaaagatatatatgcagtgtttgtggattggaa

SEQ ID NO: 4042 - DNA, 545 bp, Homo sapiens
  MAP TO AL137785.2; EXPRESSED IN FETAL LIVER, SIGNAL =   1; EXPRESSED IN BONE MARROW, SIGNAL = 0.73; EXPRESSED IN ADULT LIVER, SIGNAL = 1.5; EXPRESSED IN LUNG, SIGNAL = 1.7; EST_HUMAN HIT: BG740732.1, EVALUE 0.00e+00; SWISSPROT HIT: P40986, EVALUE 1.00e-03; NT HIT: gi14761133, EVALUE 0.00e+00
atggggtgttcttttcctccggaggagcaacatcttccccagaacagttagtgtcgcttctccaatacagaggataacgctcttgggagcagttcagtctgtaagaaacttcagtgagctctgcttctgcttcagaacagatgccacagctgtcccccttcagtgccatgctgttgaccatcatgaagttaatcctttccaagaaaacaggctttcagagatgaacactttctcaaaccgttctacttcgtatgtgttcgtctcatagtggaagccagtgtcatggtttccagcaactaccttcagctgcacatgacttgggtgtctgaacattttccgaaactgctccacatcatccacccaggcctcagaggtgctccacttcccttcatcaaagacatcctccaggatgaagacgacttccggctgcagcaaccacagagctgtctggaaggctctctccacctgccattcccttcgtaatttgtccagccagtgacctaggaattccctaagcaagtgggtgtcagccaaaaacatggctt

SEQ ID NO: 4043 - DNA, 559 bp, Homo sapiens
  MAP TO CHR22_118.0; EXPRESSED IN LUNG, SIGNAL = 2.2; EXPRESSED IN FETAL LIVER, SIGNAL = 1.9; EXPRESSED IN BONE MARROW, SIGNAL = 1.2; EXPRESSED IN ADULT LIVER, SIGNAL = 3.8; NT HIT: gi14779124, EVALUE 2.00e-71; SWISSPROT HIT: P29126, EVALUE 8.00e-01; EST_HUMAN HIT: BE876665.1, EVALUE 3.00e-71
tggggtttagatgagtgcttgaagtatcaaaatcaagctgaattaagtcatttgaactgtatgatgaaaaaagcacaattttgatacaaagaaaaggacaactggatataattgccgattgctaagtatttcctagttttaaaaatttaagttactcactctgcataaagaaaataaatgtcactcttgcataattagctatttggtaactgtgataaataaaaaatagctatgagagtaacctttgtctccacacagaattatgaaagaattgccttaatgatacaaagtccaaagtttttcttccaagtcttacctgcatggctgcaagaacctctggatcactaagaatttcattgagtccaggcattccagccattccaggcatgccccctcccattccaggcattcctccgggaaaattaccaggcattcccccaggaaagccacctgtaataaaaaatgaatagacactaatcatactcccaaatattctgacacagtatttcatccacaaaaagtacaggttcaaagaatatgggtgccactaagcacaaag

SEQ ID NO: 4044 - DNA, 508 bp, Homo sapiens
  MAP TO CHR22_176.0; EXPRESSED IN FETAL LIVER, SIGNAL = 0.79; EXPRESSED IN LUNG, SIGNAL = 0.77; EXPRESSED IN ADULT LIVER, SIGNAL = 0.89; EXPRESSED IN BONE MARROW, SIGNAL = 0.59; EXPRESSED IN PLACENTA, SIGNAL = 0.69; EST_HUMAN HIT: BE349040.1, EVALUE 0.00e+00; NT HIT: gi15318173, EVALUE 0.00e+00; SWISSPROT HIT: P10235, EVALUE 5.40e-01
ccctcttaggggcaagtctctgactggttctggacctgccacagttcacttggccatgtcgatcaggctctgcagtgaggtgggcacccacgtcttctcgccctggacaaagaccactccccggtcgatgtagatcacaatgcggccaaaggtgtagagctgcttcccttcgtgtcgcttcccaatgacgggcatgaagacaatgttgtgctcctcagccttggtctcaatgaggtccttaaagttcatgggcacagagctagcggccacgccaatgcccctctgagccatgttctcagcctcccgcctctcctgcatggcctcgtactggaagtccttcctccgctccgtgtgggtgagataggcaatgttctcccgtgctcctggctgcatgtaggcacctaagatacaggaggacagggcggtgaggagaggtgtttccaggtgtatggaagttgacactgtggcttggcccaggtcttgggtgtgccagagtgcttgtgactca

SEQ ID NO: 4045 - DNA, 566 bp, Homo sapiens
  MAP TO AL035367.1; EXPRESSED IN BONE MARROW, SIGNAL = 0.66; EXPRESSED IN FETAL LIVER, SIGNAL = 0.74; EXPRESSED IN ADULT LIVER, SIGNAL =   1; EXPRESSED IN LUNG, SIGNAL = 1.5; EST_HUMAN HIT: BI918683.1, EVALUE 0.00e+00; SWISSPROT HIT: Q24020, EVALUE 5.00e-17; NT HIT: U80184.1, EVALUE 0.00e+00
tccaaatggagaaacttgggcgcacagcagttgtcacttgcctaagccacacagctcagaggtggcagagctggggttcacactagggctggctgccctggcacctggtgtatgggccccagctgatgcaccccaccctgcaccccagacgtggatctgtcctgcaatgacctgacacgggtgcccgagtgtctgtacaccctccccagcctgcgccgcctcaacctcagcagcaaccagatcacggagctgtccctgtgcatagaccagtgggtgcacgtggaaactctgaacctgtcccgaaatcagctcacctcactgcccgtgcgtctgaggccctcagtagggggatgggaggaaggccgtgagcctggccctgacctcccacccctgcccgttccccctccagtcagccatttgcaagctgagcaagctgaagaagctgtacctgaattccaacaagctggactttgacgggctgccctcaggcattggcaagctcaccaacctggaagagttcatggctgccaacaacaacctggagctggtccctgaaagtctctgca

SEQ ID NO: 4046 - DNA, 589 bp, Homo sapiens
  MAP TO AJ239319.2; EXPRESSED IN PLACENTA, SIGNAL = 0.6; EXPRESSED IN LUNG, SIGNAL = 0.6; EXPRESSED IN BONE MARROW, SIGNAL = 0.53; EXPRESSED IN ADULT LIVER, SIGNAL = 0.68; EXPRESSED IN FETAL LIVER, SIGNAL = 0.48; EST_HUMAN HIT: BG289819.1, EVALUE 4.00e-52; NT HIT: gi11056013, EVALUE 9.00e-03
ttactccggctgtgatttccaaagaatgggggaaaatgcgcatgccttgagctgtctaaacagcccccactagcagtgggattggctgggatatcagggaggagcatccaccctgggtgagagcccttggttaactcctcctacaggcacgtccctcaatgatgtgctatttgtgttccttactcagatgcgccagggccgaggtaggctgggcgaggaagactctgatgtagatattgaagggtatgatgatgaggaggaggatgggaaacctaagactccagccccagtgagtatgcttatagaaagcttatggttacgttatgcccttatatgataggagccccatcagtacaggccaggccaaatcctaagatgatatcagggggtctccttagtgagccccaatctgactttaatccttgggaccaactaaacagtctatccaccaaaaataattacttaacttcttgtgaggcagcaagtggagggatgggcggggcggggagggggggtgtgcctggtggtggcttctggtctcttatgtggtcagttgataggactttgacccccaactggtctcattcag

SEQ ID NO: 4047 - DNA, 504 bp, Homo sapiens
  MAP TO AL138839.1; EXPRESSED IN FETAL LIVER, SIGNAL = 0.41; EST_HUMAN HIT: AL531094.1, EVALUE 3.00e-03
cttcttaccacctccaaggcctccagctggccatgtctatctttccagcttcatctctagccattctaaaaatgatccaactacatgttgaatcttctatcttctatcagtacatcttctatcagtaccttgaaggcaccaagctcttttccattttagatatattgcaagctgtcccttctggcaaaatgagagtaggaaaaagaagaagccaggagtaaggataatgtctgtacttattgggttgagtaataaacttaactttgagtttcctagcaaccaaggcaacaagagatatagaaacagacacatggctcatacaatccattacaaaactcaattaagtttcttaggacaaacacagcttttattgacactgagacccaaggagagtaggagagagtgggcaatctttataaggagtagagtttattatatgataagcaacagtctccaccacatccttagacacaccctagcaataggaaaaacatttcatggggc

SEQ ID NO: 4048 - DNA, 596 bp, Homo sapiens
  MAP TO AC013697.3; EXPRESSED IN FETAL LIVER, SIGNAL = 0.91; EXPRESSED IN PLACENTA, SIGNAL = 1.1; EXPRESSED IN LUNG, SIGNAL = 1.1; EXPRESSED IN ADULT LIVER, SIGNAL = 1.1; EXPRESSED IN BONE MARROW, SIGNAL = 0.94; SWISSPROT HIT: P26808, EVALUE 1.00e-16; NT HIT: AL163246.2, EVALUE 2.00e-93; EST_HUMAN HIT: AA984295.1, EVALUE 2.00e-85
tagtaggggccaaatgcaacaacttttccttccccttagaaggaatatctcaacaggccccacaccattggacccctagtaattttactaagctagaaggccctgaattttagttggattcattttccatctcctggcacacaaatgtctcaccaataagttcagtgtgtttactacttcttgctcactggatccaatcaacataatgtcatcaatgtaatggaatagtgtgatatcttgtggaagtgaaaagtgatcaagatctctctgaacaagattatgacacaaagctggagagttgatatacccctgagataggacagtgaaggtatattcctggccttgccagccaaatgcaaattgcttctggtgggccttatggacacgaatagagaaaaaggcatttgctaaatcaatggctgcataccaggtacaaagagatgtgttaatttgctcaagcaataaaaccacatctggtacagcagctgcaattggagtcaccacttggttacacttaagataatccattgtcattatccaagatccatctgtcttctgcacaggccaaataggagagttgaatggggatatggtgg

SEQ ID NO: 4049 - DNA, 560 bp, Homo sapiens
  MAP TO CHR22_131.0; EXPRESSED IN PLACENTA, SIGNAL = 0.77; EXPRESSED IN LUNG, SIGNAL = 0.58; EXPRESSED IN FETAL LIVER, SIGNAL = 0.43; SWISSPROT HIT: P20908, EVALUE 3.60e-01; NT HIT: gi14724105, EVALUE 3.40e-02; EST_HUMAN HIT: BF902358.1, EVALUE 0.00e+00
tgcacaaagcagataaacggggtttgctctggttaaggcgttgggtgggggttgaaggcaccaaggggctccacctacttggctttaggcaagcaaggcagccccaggtgccagggggtgatgaggtcaccacggagaccatggtggtggtagcggcagaggtggcagcagggttggtggcaggcatggggaggtcaaccggtcccacaagaggttgggttctggtttcttctgtcttggcttctttctcgtcttcttggtgtctgcaacaaaaggtgccagtgagtgcctaccttgcagctggagcaggtagagtgggagccagacacagtggtatggggtcttcacgcagtccctccaacaggaaagtgagggggccccaaagaacaccatgaacaatacctagagccactgctgacaggggccaacatgccccatctcaccaacctcaccttggggggctacaggtgctgttggtccaacaatcagtggagggctcactctcaatgctccagaaagtgggacccccaggcaagctgggcctctccatgtgacacaga

SEQ ID NO: 4050 - DNA, 527 bp, Homo sapiens
  MAP TO AL136297.2; EXPRESSED IN LUNG, SIGNAL = 0.72; EXPRESSED IN ADULT LIVER, SIGNAL = 0.94; EXPRESSED IN FETAL LIVER, SIGNAL = 0.71; EXPRESSED IN BONE MARROW, SIGNAL = 0.69; NT HIT: gi12711695, EVALUE 2.00e+00; SWISSPROT HIT: O06000, EVALUE 4.90e+00
aaaaatgggaatggttgctgggtgttcaggatggccagatacccttgcaagaccgtttcccttagatccacagacatttgtatgcttgttctttttttaagaaacattaacttctctgcttgtactttttcttgcctttggggacaaatttccaaatatcccaaatcactgggctggagagcctagctgtgaatgttcacctggcgccaccagtccctcatccacattggcttcctcctgcatcccagacagaagggtaatcccaagggcctgatgagtgttaactcactttcctttgtctctgccaagctgaattatggattctgcttttcccaaacctttattttcttcataatcattcccagtttctgtcccgtattcctcacatgcatatttatctcaaggttccatgtgagtgtacaattctaatagtgtcctaatattataggtttaaattcctattttcatctatctgatgaaaaggccagctgacaagaatgttgtgttgccatgtgtcccttaaagga

SEQ ID NO: 4051 - DNA, 527 bp, Homo sapiens
  MAP TO AL137793.1; EXPRESSED IN PLACENTA, SIGNAL = 1.1; EXPRESSED IN LUNG, SIGNAL = 1.1; EXPRESSED IN BONE MARROW, SIGNAL = 0.83; EXPRESSED IN ADULT LIVER, SIGNAL =   1; EXPRESSED IN FETAL LIVER, SIGNAL = 0.82; EST_HUMAN HIT: BF980745.1, EVALUE 7.40e-01; NT HIT: U32844.1, EVALUE 5.00e-01
tttcctgttgggaatcttggaaatacaggtcaagatggagccttcttcaccctggctccatgaatatcgacacaaaacagaaagcacaccaaccacattggtcacatggcatgagtgaaaaatcgacttttaatccgataagccacagagagagggtttgattgtgtctgtgaccgcagcctacctcacctcccgcacctcatgtgatgctgccagagatggtgaggagggggctgctgctgctgctgctggtggaggagatgatgaacagaagtcagtagaggcgtggctctcacttcccatcatgtcacttggtccccctttgcccatagccagaagaaaagatcttgcctctaaattgtcataaaagtctgcctaaataaagagggaacaaaatttgaggcagtagttcccaaacttgttcacacaggaaacaacttaaaattgcagaaccattttctctttggatgattcccgaagacagcagtaatgaaagctacctcgggacacttgcttacaccccaggt

SEQ ID NO: 4052 - DNA, 593 bp, Homo sapiens
  MAP TO CHR22_154.0; EXPRESSED IN BONE MARROW, SIGNAL = 6.8; EXPRESSED IN ADULT LIVER, SIGNAL =  11; EXPRESSED IN LUNG, SIGNAL = 7.8; EXPRESSED IN FETAL LIVER, SIGNAL = 8.1; EST_HUMAN HIT: BF212527.1, EVALUE 1.00e-119; SWISSPROT HIT: Q9CZM2, EVALUE 4.00e-69; NT HIT: gi16157692, EVALUE 1.00e-126
ccattgggtgtcaggatttcttctgatagctttatggaatggatcaatgaggacaacctcagaaaatttttatgtggaatcttcaccaaccctgtaagaattcaggacgctcagagccccatggtggcgtccagctcgctcctctgcaacggactgaaggcttcgagcaaactttagctggttaacaccatgatggacaggcttgctgtaagttgcacccttaggaactgggcgttttcagccaccacggcgaacatgaatcctatatataacggcgaacacgaatcctatatataacgtaaccttgcttggccttgtttgtagcccagtcggtgcactttatcaggccgggtggggcggggagccctgtggagagcagatagctggcggtactgccagcagcggaccctcagaagaaagcgcatgacatcagactgcttctttctccatagctccaggatgtacttgtatgcacccatcttggcttatctgatggctgccgccagaccggagtctaattctttacttattcttctagaccacattgaaatgtcctctcacatcagaaggtttctattttgagccctccaggg

SEQ ID NO: 4053 - DNA, 590 bp, Homo sapiens
  MAP TO CHR22_3.0; EXPRESSED IN FETAL LIVER, SIGNAL = 1.7; EXPRESSED IN PLACENTA, SIGNAL = 3.1; EXPRESSED IN ADULT LIVER, SIGNAL = 2.9; EXPRESSED IN LUNG, SIGNAL =   3; EXPRESSED IN BONE MARROW, SIGNAL = 1.6; EXPRESSED IN HEART, SIGNAL = 1.8; NT HIT: gi14778870, EVALUE 0.00e+00; EST_HUMAN HIT: BI917384.1, EVALUE 0.00e+00; SWISSPROT HIT: P39053, EVALUE 4.40e-02
caataaataaaggcggcgtgagcactgtgccagctgcctcctggcctggtggtgaggctggaggtggggcacagcctgaccgtggctatggcgccagcacttccgccactgcagcccgcacctagaattcatcatcagagctgagcaggagagtcttctcgttgtcgcgggcgccactgaggctgtgggagcgggagaggccgtgggcgccaccacgccaggtgggcccaggctccagggtggactgctgcgtgtactgctggtaggcaggtgagaagttgtggatggcgtcctgcacgatgtcgtgcgggttcatggtctccttgaggctgctggagatgctcttcatgggggcacagcggcctgccgggcagggagcgggaggggcaggtgaggaggctgggacggtgagagggaggtggctcagcccctgcccgtgatcctgggacagacaccccccaacccaaagctatgcccttcaaccatcccttctgggacagagaatggggtccaggatatgagaaggggcaggaaaaaatggacttctttggctggggagccccaaggggaggctggactgtgaagaggag

SEQ ID NO: 4054 - DNA, 541 bp, Homo sapiens
  MAP TO CHR22_163.0; EXPRESSED IN PLACENTA, SIGNAL = 0.58; EXPRESSED IN ADULT LIVER, SIGNAL = 0.54; EXPRESSED IN FETAL LIVER, SIGNAL = 0.55; EXPRESSED IN BONE MARROW, SIGNAL = 0.51; NT HIT: gi14779488, EVALUE 1.00e-104; EST_HUMAN HIT: C01539.1, EVALUE 4.90e-02; SWISSPROT HIT: P11120, EVALUE 3.40e-01
gaaaacaagctcccaaacctctttgaaaattaaaataaaataaaataaaaatttccaacaaagtaaaggatgcatattcaccttctaatactctgtatataatttataccagtttttcatttagaatgagctaattacatgaggtgattgccaatttatctgatatggttctaatcaattatccattttgtaaaaactaattttagctcattttcaaagagatgcttatgtgctgcagacattcttacctcctcaaggaaacagctaaagttctggagaaaatatttccaatttatatagggggttagatgaattcttagtttcctcaaaaaataatgatactgattgtccgttagtttgtaacagaaatccttaagaacttgtccgaattctgtagcctttacaaatcctgtatcctctttatccaatgcagaaaatgcctaaaaagaaagaaaagaaaaaaagatggcaaatcctgtcaaatgaatacttctaaaacactttccttaagtactgtttctgctgaatgcaaatgaagcct

SEQ ID NO: 4055 - DNA, 510 bp, Homo sapiens
  MAP TO CHR22_121.0; EXPRESSED IN FETAL LIVER, SIGNAL = 1.8; EXPRESSED IN BONE MARROW, SIGNAL = 1.2; EXPRESSED IN HEART, SIGNAL = 1.4; EXPRESSED IN LUNG, SIGNAL = 1.7; EXPRESSED IN ADULT LIVER, SIGNAL = 1.8; NT HIT: gi13655188, EVALUE 5.00e-69; EST_HUMAN HIT: BE276923.1, EVALUE 0.00e+00; SWISSPROT HIT: P96942, EVALUE 1.20e+00
ggcttcttgaaggcagacacaagtctgcaggctgttcacgcccccatctcattatcttttctcacgggtacctcttctgatacaatcacagcaaccctggcctcggccccgccctgtccctgccatgcaacttcacaactcagctggcctagacccctgggaggcctccaagtccctagggttagacacctcctggggtgctatggactgtcggggctccaaggagccgagtgtgggggaaactcactgtgggaggcgctcctgacctgcagggagctggaatgctgtgggagggccctgaccccggggcccatggagctccctaggctcctctggccacacctcaccacccaccccctcccctctccagcagttccagtttgtggaagtcccaggcaatcactgtgtccacatgagcgaaccccagcacgtggccagtatcatcagctccttcttacagtgcacacacatgctcccagcccagctgtagctctgggcctggaactatga

SEQ ID NO: 4056 - DNA, 543 bp, Homo sapiens
  MAP TO CHR22_81.0; EXPRESSED IN FETAL LIVER, SIGNAL = 0.67; EXPRESSED IN BONE MARROW, SIGNAL = 0.61; EXPRESSED IN PLACENTA, SIGNAL = 0.95; EXPRESSED IN ADULT LIVER, SIGNAL =   1; EXPRESSED IN LUNG, SIGNAL = 0.75; SWISSPROT HIT: P21952, EVALUE 7.70e-01; NT HIT: AJ305226.1, EVALUE 1.00e-128; EST_HUMAN HIT: BE894488.1, EVALUE 1.00e-107
gtcctcctagggagtcagggccaaggtgagcctggcagcgcaggcagtctcatctgccacctcccgactgactgagtgtgggggataacaccacaccttccctgtcctccactcaccagagcaggagggtgggtgggaagagccctgagccatagcaggcctgtgttctgacgtcgtttcagatggtggagagcatgaagtacccctttaggcagggcatgcggctggaagtggtggacaagtcccaggtgtcacgcactcgcatggctgtggtggacacagtaatcgggggtcgcctacggctcctctacgaggatggtgacagtgacgacgacttctggtgccacatgtggagccccctgatccacccagtgggttggtcacgacgtgtgggccacggcatcaagatgtcaggttagcagagccccaggccagagggactgcatgctgtgcttccccagggacggagtgggagcaccttcctactcgtcacagcaggtcagcaggtggaggttggcatggcccccctgcagtgatgatact

SEQ ID NO: 4057 - DNA, 596 bp, Homo sapiens
  MAP TO AL137784.2; EXPRESSED IN PLACENTA, SIGNAL = 0.93; EXPRESSED IN LUNG, SIGNAL = 0.77; EXPRESSED IN ADULT LIVER, SIGNAL = 0.82; EXPRESSED IN FETAL LIVER, SIGNAL = 0.59; EXPRESSED IN BONE MARROW, SIGNAL = 0.67; NT HIT: AF292401.1, EVALUE 2.20e+00; EST_HUMAN HIT: AA954186.1, EVALUE 1.00e-92; SWISSPROT HIT: P10498, EVALUE 2.00e+00
aattcgtggaggaaagatggtaatatgacgttattttaatgcctacatcagttgagccagctatcagagttaagaacaattcctagaaaagttatccatgtagtcagtctgttttaaacaaatccagtgtatgaaaatcatgttataaggtaaattggaaacgtttatttcctttaactctttaaatgtgtcacactttttgctttctatttttaaactttgtgtctcctacaaaataataatcaaaaacaaaaaaagtaagcataacccgtagtttctttccaaatgcctttaaagtttcaaagcagtaattacaccttgcggcactacccggttcggccggtgcctggctggagggcgccggagagcctggagcagggcgccaggaggccggagcaggaggagaaggagtaggaggaagtggtcactagcgcggcggccgccggcccgcaatggtgctaccctggttgctgctcgagactgcgcgcagggcggtcctcgggtccgcggaggctgcgctctgcggtgagcttggtggtccctggggaaagggagagcgcctaaccttagacttcaggcaagggttaacattggtg

SEQ ID NO: 4058 - DNA, 571 bp, Homo sapiens
  MAP TO AL137798.1; EXPRESSED IN BONE MARROW, SIGNAL = 2.4; EXPRESSED IN HEART, SIGNAL = 1.3; EXPRESSED IN PLACENTA, SIGNAL = 1.9; EXPRESSED IN LUNG, SIGNAL = 1.9; EXPRESSED IN FETAL LIVER, SIGNAL =   2; NT HIT: gi14743839, EVALUE 0.00e+00; EST_HUMAN HIT: BE393305.1, EVALUE 0.00e+00; SWISSPROT HIT: O66137, EVALUE 1.50e+00
acgaggcatgggagaatatggaacagctttcctggtgtcacgactgtcactgtcactcagtaagtgctcactgtgtgccaggcatggagcacagcaaagcctcacgaacccccttctaatcctcccctcctgcaggtaaggaaactgaggcccccaagagggcagtggcctgccccagggctcctagctgccaagtggcagagcagggcccggccccagaactggagcagctcagagagcagcagaggccacgccagggctcacgaacctgctgcttctcgctctcggccaggaggaggccctcgtcatgctcctgctgcagggcagcaatctcctcactcagctgttccttctcagccttccgccgggccagcagctcctcctgctcacgctgcagctgactctgcagctgggcccgctcggcctccagctcccgccatgctgcctcctagggggccaggactggacgcgtgtgacacaccaggaggggcccaggcagaccccccaaaacatcagggcagcaagagccatctggcccccataccctcagagatggagggtgaccaggtaa

SEQ ID NO: 4059 - DNA, 522 bp, Homo sapiens
  MAP TO CHR22_196.0; EXPRESSED IN ADULT LIVER, SIGNAL = 0.33; EXPRESSED IN FETAL LIVER, SIGNAL = 1.3; EXPRESSED IN HEART, SIGNAL = 1.3; NT HIT: AF355273.1, EVALUE 5.00e-01; SWISSPROT HIT: P81439, EVALUE 6.30e+00
ttgctgcatatccatccatcttgtttattcttagctgcaaagatatcttatgtattctgctttgtgatcctgggactgagattctgcaagcaacatttcagctttgccagctgctccctgttgcgagtggtgggtggtaaagatctagaagaggcagagggatttgctcgtatcctcgtcatggccttcctctctgctgttcctgtgagtgctgccttaatgacatttctttatctctgcagcagcagtaccttcctgtagcagttactggatccagttagcagttttcccaacatttgaggaccagttttatcaagcttcctttagagtccactagagtcccaggctccttgggcctctcctgggaaattagaaaaaccagcacagctgagtagtgccctctcagaagtctgagtttaagttccctgggtccctcctctgagcgtttgttaactcagccttaggggtggtagctgcttcctgcagttgctatctgtgttatctttgcgtcctttcagcttt

SEQ ID NO: 4060 - DNA, 565 bp, Homo sapiens
  MAP TO AL133266.3; EXPRESSED IN BONE MARROW, SIGNAL = 0.48; EXPRESSED IN LUNG, SIGNAL = 0.46; EXPRESSED IN FETAL LIVER, SIGNAL = 0.43; SWISSPROT HIT: P39429, EVALUE 5.40e+00; NT HIT: gi14149790, EVALUE 2.00e-50; EST_HUMAN HIT: AW881506.1, EVALUE 2.00e-01
gagcaaactaccacaggatgcattcaactgaatgtggaaaacagagaaggatgaagtaaaaatgagcatcacataacttctgcatgtttctagaaaacaaaatattcttgctatcattgattatatattttctctccagacttctaatttttactcaagtacagcatttgctcaatagtagcactgaatgacactcacccagaatgctgtcattttgaatcaaagaatcattcttctcattcctgctaattttaaatataagtttgcagacattaagaagattctttctactcactttaagctgcagagaaagaaacacatctctattgcagaaggaaataaagacatgctgtattaaaaaaaataaaccacatctatttttaaagtacagcaacagtatttttaaacatgaagaaaagttctaaagaaatcaactttgaaaaatttagaccacatatttgccaattgtggtatctaattaactcaattagagtaaacacaatataaattatctttagaataaacattttaatgacagatcttagcgattgtgaatactgtggaa

SEQ ID NO: 4061 - DNA, 596 bp, Homo sapiens
  MAP TO AL136230.3; EXPRESSED IN PLACENTA, SIGNAL = 0.71; EXPRESSED IN LUNG, SIGNAL = 0.77; EXPRESSED IN ADULT LIVER, SIGNAL = 0.8; EXPRESSED IN BONE MARROW, SIGNAL = 0.61; EXPRESSED IN FETAL LIVER, SIGNAL = 0.73; NT HIT: AF008191.1, EVALUE 1.00e-08; SWISSPROT HIT: P08547, EVALUE 1.00e-07; EST_HUMAN HIT: T10573.1, EVALUE 1.00e-08
ggattaccaggacttttggcttttactgagtgaaatgggaagattacaggattttgagcatgaaaatgagatgattaacctacactttaagcatctgagttcagaatattaaacttgaaaatcagtttggaagtttttgcaataaaaaagttacgaagatctaatggcaaatgtaatcagcggtttaggttctgggtatgacttaatggtagatctgattggcttttttgactggctggatatagggtatgaacaaagtagaggaactgatgatgatgatgccagatactttcacccaacttagtgggaggatggattttaccatttactggtcatacaaagtgctggcgaggatgtggaggaactggaactcacacgcttctcgtgggaatgtaaaatggcacaaccactatgaaaaccactttggtaatttcttctacatttaaaacatatgtttactatatgaccaatcatttcatgcctaaatatttaccaaagtgaaatgaaaacttatgttcacacaaaaacctgcatgttaacatttacagccgtattatatttaatcacaaaaacgtggaaacaccccaaaagtccct

SEQ ID NO: 4062 - DNA, 567 bp, Homo sapiens
  MAP TO AL136115.5; EXPRESSED IN FETAL LIVER, SIGNAL = 1.8; EXPRESSED IN PLACENTA, SIGNAL = 1.7; EXPRESSED IN LUNG, SIGNAL = 3.4; EXPRESSED IN ADULT LIVER, SIGNAL =   3; SWISSPROT HIT: P38246, EVALUE 4.10e+00; EST_HUMAN HIT: BF744453.1, EVALUE 0.00e+00; NT HIT: gi14722706, EVALUE 5.00e-75
atggctctgaacctgtttcctcattggtaagagggaaataatggtagctacacctcatagggtttttgtatttgtgaccttaagcacaaacactgctcgttgcataatgtgtaacattgtttgttataatgctaagtgcatatcgtggtcaataaatgttaattatcattactgaatgtttgaccaaaaaaacctgtcaataaatgtagaaagaacacagagaaaacagtactagatatctctacagttcccaaatttcacaaaatgttcttgaaaaaatgtgctgtaactaacccaacccaattcaaaccaggattggcacgatgactccaaatacagaataaatggctttgtgctaacagaattttttaatgggattttacctagaaatcaatccaaaaagtagaccatgccacaatcttacctctgtgaacttgttgagagtagcattggtagggttgtgagttatcagaaaacgcatgttctcataggagatctccacaggggctggacggttcattatggcaaataaaaagtgtgagcgtgcgtgtgagtgtgatggggaaa

SEQ ID NO: 4063 - DNA, 502 bp, Homo sapiens
  MAP TO AC024326.2; EXPRESSED IN PLACENTA, SIGNAL = 1.2; EXPRESSED IN LUNG, SIGNAL = 1.4; EXPRESSED IN ADULT LIVER, SIGNAL = 1.3; EXPRESSED IN FETAL LIVER, SIGNAL = 1.3; EXPRESSED IN BONE MARROW, SIGNAL = 0.98; EST_HUMAN HIT: BF739117.1, EVALUE 0.00e+00; SWISSPROT HIT: P03341, EVALUE 3.00e-06; NT HIT: gi13937343, EVALUE 7.00e-71
ctaagggttgctgctaagcgggccatgagctaggctcggttttcatctttaccttgggtagtttctttaagcttgtcataattaacagctttgtaaactgcctttttaaacccttcaactaggcaggaaatcatgtaatctcaactagctatacctggggaatctgcctgatagttccattggggatcctcttggggaactgctctaatgccttcctggaggtctggctcatggagctggcagttgtcagcatgagattgggctagagaaaaaactctttcctgttcatctggggagagggtagaagttaggatgacatttaagtcactccaggttaaattgtaggatatcggaattcctgtacatatttagtggggtctgatgagaaagaacctaaatgctggctgatttgggaaaggtctgatagagaaaaaggcacatgtaccctgactatgccttcagctccagccacctctctaagagaaaattgttgggcaggttg

SEQ ID NO: 4064 - DNA, 521 bp, Homo sapiens
  MAP TO AL138832.2; EXPRESSED IN FETAL LIVER, SIGNAL = 0.89; EXPRESSED IN PLACENTA, SIGNAL =   1; EXPRESSED IN BONE MARROW, SIGNAL =   1; EXPRESSED IN LUNG, SIGNAL = 1.3; EXPRESSED IN ADULT LIVER, SIGNAL = 0.95; NT HIT: gi9507224, EVALUE 5.00e-01; EST_HUMAN HIT: BF376488.1, EVALUE 1.00e-110; SWISSPROT HIT: Q9QXZ0, EVALUE 5.60e-01
tgctactgaaagccagtgggtttgaatataaattttttggccatttttaaagaataacttatacaagtaagaactcataaaagactgagaatattaggttttactaaatatatatcagggtttgagagcatgctttccaattacattttctctctatcactcttttttgttatgtaccttatgtttgtcaagtagttgctggatttcctctttggaagacacgatgattttctggtctcctgccatcttctcctgaccagtttctagcaggtcagccagatcttgtagggccctctcatactgactcttgagtgtaaggttctgattcagaccactcctccgggagccaatgatcatcatcagctcatcatacatgtcctaagaagcagagaccacaagactcactctcaattcatattctggcaaccctctaaaagcatatgaactatgaacgcaccaagcccgagacccaaccaagaaaatgccttcagggatgtgcctcctggaaacgctctacctgt

SEQ ID NO: 4065 - DNA, 598 bp, Homo sapiens
  MAP TO AF235094.1; EXPRESSED IN HEART, SIGNAL = 1.2; EXPRESSED IN PLACENTA, SIGNAL = 0.93; EXPRESSED IN LUNG, SIGNAL = 1.2; EXPRESSED IN ADULT LIVER, SIGNAL =   1; EXPRESSED IN FETAL LIVER, SIGNAL = 0.85; NT HIT: AF087913.1, EVALUE 2.00e-56; EST_HUMAN HIT: BE565529.1, EVALUE 5.00e-61; SWISSPROT HIT: O77797, EVALUE 6.70e-01
tggcaagtgtgtcctttctgcaggaagtaaaaatgtccttgctgagtaaattaaatttatgttcaactgctgtttctttacggcaccggggaacaagcatttcaaacaatttggtggcaatccgtacagggctacattctcctgcgggggcggtctctgttcctctctcatgagggagcacgctcctctgcctcactgcagtggcctcagggatgagaaattgagacccacctggtgtgacgaataaacccggactctcagcaatgcagaaaaaaaaaaaaaaaagaaactggccagcaacctaaggtaaaggatgctcacataccagggctgcaactctgtgcacagaccaaggaaggagaagccacagaagctggtaaagtacttccttggtggtgaaattctggagggctgaatgtgtgtatgtgtgaatgatcacagacaaccctgcttgcagtgtggtttgtgtggacggtgacaagtcctcctgctggacagtgagtgggtcccctccatggttccggttctgtagtgacctcatatggcttagggcaggtcctgctgtgggatttataccagcacgcctacactaagaggg

SEQ ID NO: 4066 - DNA, 514 bp, Homo sapiens
  MAP TO AC015957.3; EXPRESSED IN FETAL LIVER, SIGNAL = 0.45; EXPRESSED IN PLACENTA, SIGNAL = 0.62; EXPRESSED IN LUNG, SIGNAL = 0.58; EXPRESSED IN ADULT LIVER, SIGNAL = 0.45; EXPRESSED IN BONE MARROW, SIGNAL = 0.56; EST_HUMAN HIT: AW867166.1, EVALUE 1.80e-01; SWISSPROT HIT: P15951, EVALUE 2.80e+00; NT HIT: X99650.1, EVALUE 7.60e+00
tcccagcttttctctaccccaaacctaatagaagaaagctaagtatgactattggaagcaatacagagtttcccaagaaatctccctttacaagtttgtccgtatttcattttttctcaccaaagactctgctgtgacttctgataacctaagcaacttagagagttgtagacatccccaggtaacttgcccaggcaggctgcataccgagacctgttgatggggatatcagaattctgtattaatcagagaagaatcatgtcctctttagattcaaatgaaggtaaaatgattctgcgagtttgttacatttattgagcaactgcatttagcctattcaatatcataggagcaccattcacagtcttagcagaactagccacagcaaagttatcaagtttgttttccaccttcctctttcccattttacttttcttaccctccatctccttgtgcctccattcacttgcttaaaactttcttcaatggaatcagagaaatccctgggaggtgt

SEQ ID NO: 4067 - DNA, 524 bp, Homo sapiens
  MAP TO AL138995.1; EXPRESSED IN PLACENTA, SIGNAL = 0.83; EXPRESSED IN ADULT LIVER, SIGNAL = 0.56; EXPRESSED IN FETAL LIVER, SIGNAL = 0.49; EST_HUMAN HIT: AW869633.1, EVALUE 1.90e-01
taccttgtttgtcggcttcctcactagaacatatgtcccacagggtcagacatttttctctgttttgttcacaactttattcgagcacctagaacaggaccactcatgtagtatttgttgaaaatttgaagaaattgattttattaattgaatatatttgagtaaccaaacatattgccatccaatatttttaaaggtatttggggagaaatatggcagaaatctagtttaaacttatgccagacctgggaaagataccatgcagtagtaaccttacccattatactcaagaatgagatctccaagaatagcgttttcttcgttgcaggccactggccagcatccagccagacgcctcattgccaatgaaaagccagcttcatgaccctaaggataagaaaaccagtgctcacaactaccaagcgaggcatcacagacagggtggaatcacttcttaccgattgataacatcacagtgatgggataatatctcggggcagtgaggaaaggtgccgtgttatggt

SEQ ID NO: 4068 - DNA, 506 bp, Homo sapiens
  MAP TO AJ239319.2; EXPRESSED IN FETAL LIVER, SIGNAL = 0.45; EXPRESSED IN BONE MARROW, SIGNAL = 0.49; EXPRESSED IN PLACENTA, SIGNAL = 0.44; EXPRESSED IN LUNG, SIGNAL = 0.46; EXPRESSED IN ADULT LIVER, SIGNAL = 0.61; SWISSPROT HIT: P35238, EVALUE 2.00e-35; NT HIT: X61588.1, EVALUE 3.00e-08
ttgtttttccactgggaacccatcctcttatgccaatgtgaggcataagtggcacccagaggtctcccatcattgccccaatgtgcctgttctgctggtaggcaccaagagggacctgtggagtaaccttgagacagtgaagaagctgaaggagcagagcctagtacccacgactccccagcaaggcacttccctggctaagcagttgggggctgtgaagtatctggaatattcggccctgatgcaggatggggtgcatgaggtatttttagaagctgtccgggctgtgctttaccctgctacaaagaacaccaagaagtacatcctcttatagcttctaggtgctacttggggactgcaactaagaagtataagggtgatattcctttgtcagcagttaaagagtgccagcatgggctattgcagaaaccctagactgcaggatattcagctcttggaggaacaaagacagacttgtttgtacatggctgctttgaagtttggtc

SEQ ID NO: 4069 - DNA, 517 bp, Homo sapiens
  MAP TO AC011950.4; EXPRESSED IN BONE MARROW, SIGNAL = 0.7; EXPRESSED IN FETAL LIVER, SIGNAL = 0.56; EXPRESSED IN PLACENTA, SIGNAL = 0.73; EXPRESSED IN ADULT LIVER, SIGNAL = 0.8; EXPRESSED IN LUNG, SIGNAL = 0.63; SWISSPROT HIT: P38041, EVALUE 2.10e+00; EST_HUMAN HIT: BG284492.1, EVALUE 7.20e-01; NT HIT: AE006504.1, EVALUE 4.90e-01
tgctagtgcatgcctcaaacaggcaaaggaaagtgatttgttcaattttattttttttctcaagagatagattgggcatcttattctttcatgaaatggggagatttttatttatgaccccagacctagcacacaatgtcacactaatcttaccaccaggttgtttccacagccctccaaggtgctgagattgatgataaaaatgaccactgctggaaaggtgttgttattgatgaaccctctgcagtgggagtccccatgccttccattcagtgccagatctgtttccgaataacccgagaaaagtaccgtgcaaaaattaatcttcatcgtaatagcctgcactccacaatagacactgatgtctctttcagctgaaataaaaatatataaaaaacaaacataagtcagaaaagcagaaagataaataacattaacatcctactgatatatttattcatctcctttgtctgtttaactcatttttatatttgatacaccataatccaatgtgcca

SEQ ID NO: 4070 - DNA, 569 bp, Homo sapiens
  MAP TO AL133215.16; EXPRESSED IN FETAL LIVER, SIGNAL = 2.3; EXPRESSED IN PLACENTA, SIGNAL = 2.4; EXPRESSED IN LUNG, SIGNAL = 2.4; EXPRESSED IN ADULT LIVER, SIGNAL = 3.2; SWISSPROT HIT: Q28183, EVALUE 4.00e-08; NT HIT: gi14747311, EVALUE 0.00e+00; EST_HUMAN HIT: BI601976.1, EVALUE 0.00e+00
tcatactgctcactgtcccgggtcgcttagggagttcgtggagcgggaggtgatcgacttcgcccgacggaatccaggggtcgtaatatatgtaaactcgcgtccgtgctgcgtgcccagagtagtggccgaataccgtgagtggggccgggctcgggctggagggcgggatcaggggctcgacccgctatcctccttctcgcttggtcgcaccggccagcttccacccactctcacccctcttctgccagttaacggggctgtgcgcgaggagagcatccactgcaagtcggtcgaggagatctcgacgctggtgcagaagctggccgaccagtcgggcttggacgtgatccgcatccgcaagcccttccacaccgacaaccctagcatccagggccagtggcaccccttcaccaacaagccgaccacgttccgcgggctacgcccccgagaggttcaggatcctgccccagcccaggtgcaagcacagtgaagagttgccccaccaactgcagccccaggctttggactgttactccggtaaaggtggttcttcccctttgggattc

SEQ ID NO: 4071 - DNA, 549 bp, Homo sapiens
  MAP TO CHR22_111.0; EXPRESSED IN FETAL LIVER, SIGNAL = 0.47; EXPRESSED IN LUNG, SIGNAL = 0.54; EXPRESSED IN ADULT LIVER, SIGNAL = 0.49; NT HIT: gi14777886, EVALUE 0.00e+00; EST_HUMAN HIT: BE908917.1, EVALUE 0.00e+00; SWISSPROT HIT: Q9NZ72, EVALUE 2.00e-18
accagcgagcaaacctaaagagaatacaggggtggatttaatcaaaataaaagcagaaatagtaaaaccttattaagctatgtctctgtctcttgtaactcaaagagcctcaattaatatactaaccttcaaaacactgttttacctagtttctgataagttctgcataacaagaaatcagtttccacttttgggagtgccaccctggaggccaacgcattgggcaggggaagcggctccgttcccttcccaacgcaggaggcgcaggtgctgaagcagctggtggagccgcgcgagcacgagcgggaggtgctgcacaaggcgctggaggagaataacaacttcagccgccaggcggaggagaagctcaactacaaatggagctcagcaaggagatccgcgaggcgcacctggccgcactgcgcgagcggctgcgcgaggagctgcacgcggccgaggtgcgcaggaacaaggagcagcgagaggagatgtcgggctaagggcccgggacgggcggcgcccatcctgcgagagaacacgttcgggttt

SEQ ID NO: 4072 - DNA, 586 bp, Homo sapiens
  MAP TO CHR22_169.0; EXPRESSED IN HEART, SIGNAL = 1.3; EXPRESSED IN FETAL LIVER, SIGNAL = 1.2; EXPRESSED IN BONE MARROW, SIGNAL = 0.97; NT HIT: gi14778605, EVALUE 0.00e+00; EST_HUMAN HIT: AI609798.1, EVALUE 0.00e+00; SWISSPROT HIT: O15371, EVALUE 7.00e-41
ctagaccaccggcttcaatctgggacttccctcatcttcctctacctctgccacagtccagccgcttctctaaaacaccgctatcctccccaaccacttgatgtgatctaaaggctctagaagaagctcttggagccaaagtgaatgcttcttcatacttaagtctcagggaattctcgaagttttatcaaggttaaagatcacaatggctacagagcttgctcccgtgctagcccacagatcactctagacctcagaaagtgggctgctacacaccttcttcttcctcttcttcctcctcctcttcctcctcatcttcatcagagctgaaggtgccatcagggaggctgtagacacggatgacctgcttgttggggtccttgaggatgaggtatttgccctcctccagcttcatgcagatgtcaatgacgcagcgtaaaatgccccaggcattctccacgctcaggttgatctggctggcaaactcattaggcttgaactgctgggtgcctaggatgacgtggcgtgaggagtctttcacgtggtaccgagacacataactaacaggggaagggatatcagtggt

SEQ ID NO: 4073 - DNA, 543 bp, Homo sapiens
  MAP TO AC015478.3; EXPRESSED IN HEART, SIGNAL = 1.5; EXPRESSED IN PLACENTA, SIGNAL = 1.4; EXPRESSED IN LUNG, SIGNAL = 2.1; EXPRESSED IN ADULT LIVER, SIGNAL =   2; EXPRESSED IN FETAL LIVER, SIGNAL = 1.8; EXPRESSED IN BONE MARROW, SIGNAL = 1.7; NT HIT: U93851.1, EVALUE 1.30e-01
tctggtttgaacttccctgccaagggagggagtatgggccttcttctcagtttgaccacatgtgaaagaaaaaggaaaagaagaggaatgtgaggtgagagtcatctgcagtgcaacatcaaaaatggagttggactctttattacaatggtgataatggtaataatggtgatggtggtggtgggagtggtggtggtgataattatagtggtaatgataataatgattgtgaaggtgatggtgatgatgatggtgatgataatcatgatggtgatggtggtgatgatggtgatgatgatgatggtgacagtgatggtgatggtggtggtgataataatggtagtggtgatggtgatgatgatgaaggtgggtcctgtggcttgcctctctcttgctccttcctctgttttggtcagagatgtcttcacaatccatcctcccatcctccttgggatttgataaacaaatctttgtcttcatccccatatcattaatgtctatttagtgaatattcttagctgagggttgtggggtatgcaaatc

SEQ ID NO: 4074 - DNA, 575 bp, Homo sapiens
  MAP TO AC016709.4; EXPRESSED IN FETAL LIVER, SIGNAL = 1.3; EXPRESSED IN LUNG, SIGNAL = 2.3; EXPRESSED IN ADULT LIVER, SIGNAL =   2; SWISSPROT HIT: P05500, EVALUE 4.20e+00; EST_HUMAN HIT: AW513296.1, EVALUE 1.00e-108; NT HIT: U91328.1, EVALUE 1.00e-57
taatcagaaaaacgcaggggggaatatgatctatatttttcccttcaggagtggaaacattgccagagtcattggaaccagaataattccatcttgaataggagctgggtaaaatgaggctgagacgtactgggctgcatgcccagacagttaaggcattctaagtcacaggaagagatgggaggtcagcacaaaatgcaggtcataaagaccttgctgataaaacagattgcaataaagaagccagccaaatcccaccaaaatcaagatggcgatgagagtgacctctggttgttctcacggctacacttccaccagcaccatgacaatttactaatgccatggcagagtcgggaagttaccccatatggtctacaaaggggaggcatgaataatccactacttgtttagcatatcactaagaaataaccataaaaatgggcaaccagcagccctcggggctgctctgtctgtggagtagccattctttattcctttacttactttcttaataaacttgctttcactttacatactcgccctgaattcttttttgcatgagttccaagaacgct

SEQ ID NO: 4075 - DNA, 544 bp, Homo sapiens
  MAP TO AC016687.2; EXPRESSED IN FETAL LIVER, SIGNAL = 0.74; EXPRESSED IN PLACENTA, SIGNAL = 0.87; EXPRESSED IN BONE MARROW, SIGNAL = 0.65; EXPRESSED IN LUNG, SIGNAL = 0.71; EXPRESSED IN ADULT LIVER, SIGNAL = 0.77; EST_HUMAN HIT: AW408974.1, EVALUE 1.90e-01; NT HIT: Y09990.1, EVALUE 8.00e-03
cagggaccaaaactggctacgtaaaataataataataataagattatactattttatgtataaagtatggatataaatatagtaaataaatacacagtataactgtggtattaaaatttaatggaaggcaatgacttggaaaaagaaatgttcatgaatgctcctaggaaaaggtaaatgtatttttaaaaatgaagttgagaaacattaatctgatagagggatgtgtcttcctttttttagtgaatgtatttctgagtgtcgtatgtaatttgtgaaatcagttctcatactaaatgtgacttaatggccacaaaatcacaaagactggtgatctccctctcttaacattcttacatcaaattcacagtctgacattctgacatattctgcccgctcagctgctgtggagttgaactcctctgtcgagtccatatccctaagggatcataagcttttatttctgagtaagccagaaacttaatgccaagataattagtgttagttattggaagatcattaatggcatcagcatcaaaaatca

SEQ ID NO: 4076 - DNA, 570 bp, Homo sapiens
  MAP TO AC021011.2; EXPRESSED IN FETAL LIVER, SIGNAL = 3.4; EXPRESSED IN BONE MARROW, SIGNAL = 2.8; EXPRESSED IN PLACENTA, SIGNAL = 3.6; EXPRESSED IN LUNG, SIGNAL = 5.1; EXPRESSED IN ADULT LIVER, SIGNAL = 5.6; NT HIT: AF154836.1, EVALUE 1.40e-01; SWISSPROT HIT: O19114, EVALUE 2.40e+00; EST_HUMAN HIT: N41963.1, EVALUE 2.00e-01
tcaaaaccgcagtcataaaggaacaatcacaataatttctacaatcttacaagtgctcgatatacaacccaagctacaaatagagccctgtgtcaagcagcatatgccaatttatcccagcatttttgtaagacatcctgttgatgctggagatggcagtcatggctcataccttcatttcctcaggactgtgaagttcttgactcatcctcataaagatgtcaatgatatgatattctgggggtccgggggaactactattccaaggtaagctggtatttcaagaaaaagccctccccagttcctttgaatatatccataaaattaataacttctagcctgcactatgtatgtgagagggaaacctcattttcctgcaaaatggtactcataaagactttctaaagctgcgggaaaacccttcagtgtgtggcaatttataacccatcactatgttctttacacacacacacacacacacacacgcagactcaaagacttatagccttatcactgaattgaaaacaacttgcagagtcaactttgtcttctatgggagcctggaaatga

SEQ ID NO: 4077 - DNA, 597 bp, Homo sapiens
  MAP TO AC013341.3; EXPRESSED IN ADULT LIVER, SIGNAL = 0.6; EXPRESSED IN FETAL LIVER, SIGNAL = 0.68; EXPRESSED IN LUNG, SIGNAL =   1; EXPRESSED IN BONE MARROW, SIGNAL = 0.84; NT HIT: AL163246.2, EVALUE 0.00e+00; EST_HUMAN HIT: BE064410.1, EVALUE 6.00e-82; SWISSPROT HIT: P25059, EVALUE 2.00e-07
cctctctgagtggtcaaaaactgtgaagatatttgtgtttcatgtgagtgctcactaacaggtgacctcagcagaggaggatcttaataatcaagtggataggatgacctgttcccaggccacccctgtcatcacccagtgggcccatgaacagagtggctgtggtggcagggatggaagttatgtatgggctcagcaacatggacttccactcaccaaggctgacttggatatgggcactgctgagtgcccagtttgccagcagcagagaccaatgttgagccttcaatatggcaccattccttggggtgatcagccagctacctggtggcagattgattgtattggatctcttccatcaaggaaatggaagaggtttgtccctactggaataaacgcttactccggatatgggtttccctatcctgcatggaatgcttctgccaagactaccatctgtgaactcatggaatgccttatccaccatcatgatattccacacaacattgcctctgaccaaggcactcactttatggctaaagaagtgcgtcagtggtctcatgcttagggaattcactggtcttaccatgtttccca

SEQ ID NO: 4078 - DNA, 561 bp, Homo sapiens
  MAP TO CHR22_13.0; EXPRESSED IN HEART, SIGNAL = 2.3; EXPRESSED IN ADULT LIVER, SIGNAL = 2.1; EXPRESSED IN FETAL LIVER, SIGNAL = 2.1; EXPRESSED IN BONE MARROW, SIGNAL = 3.1; NT HIT: gi7657020, EVALUE 0.00e+00; SWISSPROT HIT: Q9Y2N3, EVALUE 1.00e-03; EST_HUMAN HIT: AL041957.1, EVALUE 0.00e+00
cccagaggtcagaaccagagatcccagacctcccggaccagctcgtgccccaaatgaaatgccatctcgagcccctacagctctacgggaggcctcccggaacgaaagcggaagaggggccagcctcatcccactgccagctgaccctcagttcctgaaacacactgagtgaggacggacctcaggctgtctcttcgggtcacatccagtgtgaaaagacggcagatacagcaccagggcagacactcgcccccaggggtggctcccccagatcccaggcctctaggccccgtagatgcaagtttcccctgctgccacgcaggcgaggggagcctttgatgctgccacctcccttagagatggggtaccgggtcactgctgaagacctggaccgggagaaggaggcggccttccagcgcatcaacagtgcactgcaggttgaggaccaggccatctcggactgcagaccctcacggccttcccacactttgtcctcacttgcaacaggggcttctggtctgcctgccgtttctaaagcacccagtatggatgcacagcagg

SEQ ID NO: 4079 - DNA, 585 bp, Homo sapiens
  MAP TO CHR22_124.0; EXPRESSED IN BONE MARROW, SIGNAL = 0.61; EXPRESSED IN LUNG, SIGNAL = 0.8; EXPRESSED IN ADULT LIVER, SIGNAL = 0.93; EXPRESSED IN FETAL LIVER, SIGNAL = 0.66; SWISSPROT HIT: P36151, EVALUE 1.90e-02; NT HIT: gi14776799, EVALUE 1.00e-114; EST_HUMAN HIT: BG036068.1, EVALUE 1.00e-114
tgccctatcagaatcccatcttcatttttttgttctttctgacataggttttcaagggacatgagtgacccgaggatggtgttgagcctctctttgtaagggttgtttctttgttactcacgtactggtaattatcttaccatctctgcagagcccacccacctttgggttcctgttggacatcgatggagtgcttgtgcggggccacagagtgatccctgctgctctgaaagccttccgaaggctggtgaactcccaggggcagctgcgggtgcccgtggtttttgttacaaatgctgggaacatcttacaacacagcaaagcccaggagctgtcagccctgctggggtgcgaggtgagaaggcagccagaggcatggaagcccaaggacctggttcctaatggagccgctgccccagctccaagtccctttcccctgggttgggatatggaatcacctagtcctaggtcatggccacagctgaacacagaaatcctgcctgtgtatttggcagttgtagattatgtccttgtatctgtttcttttcttctgggcattgggggtgtgagtccctggaaagcaaa

SEQ ID NO: 4080 - DNA, 500 bp, Homo sapiens
  MAP TO CHR22_179.0; EXPRESSED IN FETAL LIVER, SIGNAL = 0.82; EXPRESSED IN BONE MARROW, SIGNAL = 0.69; EXPRESSED IN LUNG, SIGNAL = 0.61; EXPRESSED IN ADULT LIVER, SIGNAL = 0.63; NT HIT: AF012872.1, EVALUE 2.00e-55; SWISSPROT HIT: P53074, EVALUE 1.60e+00; EST_HUMAN HIT: BF770038.1, EVALUE 5.00e-79
acctggtgcacactagggactcagtaaatgagtggatggacaatgcttattggcagaatcatcactgctcagtgtgccttttcctacccagtctgagtttctgagaatgctcttagagaatgaatctgtggttgattttacacctacagggcttagggtttcctcagcaaataacctcctttctccctctcttcttggcacatcagctcacccgacgactgccacccatcaaagaagctaagcctcggttacagaagctcttccgagacttctggctgtattccgttctgatgggattcgctgtggagggctcaggtagggggatcatctctctcccagtgaagacggagtgcagagtgaaggtaaaggtgaggtcagagcccacgtaattatgaatgtgagcatgtttaaatgagtccacatgcagctgcttctttctgcaagtattagcaagtgttactgtccccagatgtagtttagggtgctgagaatgccataca

SEQ ID NO: 4081 - DNA, 595 bp, Homo sapiens
  MAP TO AC016672.4; EXPRESSED IN PLACENTA, SIGNAL = 1.1; EXPRESSED IN ADULT LIVER, SIGNAL = 1.9; EXPRESSED IN FETAL LIVER, SIGNAL = 1.2; EXPRESSED IN BONE MARROW, SIGNAL = 0.83; EST_HUMAN HIT: AW303981.1, EVALUE 0.00e+00; SWISSPROT HIT: O01975, EVALUE 2.00e-04; NT HIT: AF353992.1, EVALUE 3.00e-95
ttttgtgccatgtgactgtgtagtcttactgacatcttaacagactacaccattgtgattgatgagttttgtgtcatttgctacataggatcaagacttcaaatcccaaaagaacttcatcattaacatgacttgcagattttgctggcagcttcctgaaacagattacgagtgtaccaactccaccagctgcatgacggtgtcctgtcctcggcagcgctaccctgccaactgcacggtgcgggaccacgtccactgcttgggtaggtcagagttcaaggacatttgtcaacaaaatgtttttctccaagtttattgaagggactttaaccagaaatttgcgagtcaagttacttaattagaaacatttatcagcagctctttagatgtgccaagcatcatcaataaactcaacgtactaaagtaaagcatccagaaaattgcagttctttttaaatgtaatatttgataaaataagaaaaacatttgaagtataaagcataatacacagtaattgacctttacccaaaataacaatgaaagcagcaccaataccattgcggccgcctgagtgcctgagtgcttgccttcacct

SEQ ID NO: 4082 - DNA, 585 bp, Homo sapiens
  MAP TO AC023152.3; EXPRESSED IN FETAL LIVER, SIGNAL = 3.6; EXPRESSED IN BONE MARROW, SIGNAL = 3.8; NT HIT: AL163210.2, EVALUE 5.00e-94; EST_HUMAN HIT: BE420422.1, EVALUE 0.00e+00; SWISSPROT HIT: P03186, EVALUE 2.20e-01
tgacttgggtgctgttgaaggcattcagttttataaaggaagcagtgcataaaagtttgaaaaatttgtacccagacaatgtaatagaaaagaaaatcccattttctagggagaaattcaagccctctgcagaaatttgcataagtaatgagctgaatattaattcccaagacaatggggaaaatgtctccaagacatgtcagaggtcttcatggcagcccctcccatcacaggcttggaggcctagaagaaaaaagtggtttagtgggctggggccagggtccccatgctgtgtgcagcctgggaacttggtgccctgcgtcccagctgctccagccatggatgaaaggggccaacatagagcttgggccatggcttcagagggtgcaagcccaaagccttggccgcttccatgtggtgttaagcctgcgagttaacagaagtcaagaattagtatttgggaacctccacctagatttcagaagatgtatggaaactcctggatgtccaggcagaagtttgctgcaggggcagggccctcatggagaacatctgctatggcagtggggaagagatatgtggggt

SEQ ID NO: 4083 - DNA, 510 bp, Homo sapiens
  MAP TO CHR22_2.0; EXPRESSED IN BONE MARROW, SIGNAL = 1.1; EXPRESSED IN FETAL LIVER, SIGNAL = 1.4; EXPRESSED IN LUNG, SIGNAL = 1.8; EXPRESSED IN ADULT LIVER, SIGNAL = 1.6; EXPRESSED IN PLACENTA, SIGNAL = 1.4; SWISSPROT HIT: Q00131, EVALUE 7.10e-01; NT HIT: AF077207.1, EVALUE 1.00e-117; EST_HUMAN HIT: BF665418.1, EVALUE 1.00e-116
aacagggacaacgagattgggagtgacttgagatgtttgtatctctgagtattcaaaagggaattttacgcagacctgagtttagtttctggggtggtcttgccatttcgttctatcatatatgtgggtttgagcatactctgtatttgttgtatccaacctccaggagatccaaagcaggaccttgcttatgaacgtcagtatgaacagcaaacctatcaggtgatccctgaggtgatcaaaaacttcatccagtatttccacaaaactgtctcagatttgattgaccagaaagtgtatgagctacaggccagtcgtgtctccagtgatgtcattgaccagaaggtgtatgagatccaggacatctatgagaacaggtatgggctactggctgaaagggcctctttctgggtgggactggcctggtaatatagttcctacaaatgaggtgagcactctgtaaacagtactttcgggggggttggggggtgggggtctttgtgagtcctt

SEQ ID NO: 4084 - DNA, 570 bp, Homo sapiens
  MAP TO AL136128.2; EXPRESSED IN LUNG, SIGNAL = 0.56; EXPRESSED IN FETAL LIVER, SIGNAL = 0.49; EXPRESSED IN ADULT LIVER, SIGNAL = 0.65; SWISSPROT HIT: P50876, EVALUE 2.00e-03; EST_HUMAN HIT: AW859482.1, EVALUE 6.00e-91
tgtggcctccttaaattttgaagagtaatgcaaaaataagaatatacatggtttataaaaattttcagtttaattatataattacttttccaaaataaaagagcaatactctttttccacatacctgcattaagacagttataattcccttcaataatgtaaatattgttcagtcacatccagatgtacatgttttttcttttcctcctaaaagttatctcaccttgcactttggacacttctgggcattcctctgcccatgctcaatttcgctggcccagtgacgcaacaatttgtctccttttttgtactccttgcagttaacaccttcatgccaaggagagtggcacttaaaacaccagacgaattggcaggtagggcactggatctgtgtaagaaaaaaatcatattaattactagtggatatactgaaagtgtctaaaaggataagaaggtgatgcttggggaaattagctaaaagtttataatttaaaatacctccccctctataagactcaaactacaggaagatatgaatactctgttactacaggaaagaattgctttggc

SEQ ID NO: 4085 - DNA, 586 bp, Homo sapiens
  MAP TO AL132656.3; EXPRESSED IN BONE MARROW, SIGNAL = 0.57; EXPRESSED IN LUNG, SIGNAL = 0.59; EXPRESSED IN FETAL LIVER, SIGNAL = 0.49; NT HIT: U80017.1, EVALUE 6.00e-10; EST_HUMAN HIT: BI438403.1, EVALUE 0.00e+00
caggtttgcagcctaggaacaatagacaatgccatatatagcctagatgtgttgtagactataccatctatgtttgtgtaagtgcactgtatgatgtttgcacaacgatggaatcacctcatgatgaatttttcagactatatccttgttaagtaatgcatgaccttaatcaggaatgagtcagagcagtattgtaatcttgatgaagatgttgatgtagataatactcccatttccaatgcactggccaaattacaaggcattgcactgaaagctttacatactttatttaaaaacattttacaaccttttaggtaagtaccattaaccacttttacagatcagaaaacagggtctatgaggtgaaataatttgtcatacagtggtgatgtaaatatgcatataatgaaagagaataggcaagtcagaagtgatttttgtatttcttttaatagattaagggtacttactatcagcaaaagagtgaaagtctgacagaaaagaaaaagatggaaagaaatgtggggatgtgcaattccttatgttggttggttcagcagagctttgccgttgttcagatggagtt

SEQ ID NO: 4086 - DNA, 557 bp, Homo sapiens
  MAP TO CHR22_6.0; EXPRESSED IN HEART, SIGNAL = 3.5; EXPRESSED IN LUNG, SIGNAL =   5; EXPRESSED IN PLACENTA, SIGNAL =   3; EXPRESSED IN ADULT LIVER, SIGNAL = 5.7; EXPRESSED IN FETAL LIVER, SIGNAL =   4; EXPRESSED IN BONE MARROW, SIGNAL = 3.2; NT HIT: gi15305755, EVALUE 2.00e-37; SWISSPROT HIT: P35427, EVALUE 3.00e-33; EST_HUMAN HIT: BI552669.1, EVALUE 1.00e-45
agccaactttgtgatccagctgccccaggtaggcaaactttcttgtaggcttcagatgcacaacctggagggcagcaggaaccaccacctgctttttcgtcatagggtggtgggatgccgttaaacaccttgaggcggtcttgggcggcctggcttccttggtctcgcggggcagcatgcctcggggtccgccagaagatgcggctggggacccggaagtggtgggggcccagaagtggtaggtgcctcgggaagggttgctgttcatccacttgtggaggaaggccaggtacttcaacttctttctatagacattgccagaaatactgatgcccccgcagtgtacgaccaccaccttccggcctgcttagccaccatggccctcaggaagcccaggagatagctttgaccattgagcaccgggacctgcccctctgccatcttcggcagccgcctgggaaaggagttccctatttttagatgaaacagggaagggcatggggccccttcacccctgaggtacctctgccagatttccctggaaccctgtttgaaaa

SEQ ID NO: 4087 - DNA, 524 bp, Homo sapiens
  MAP TO CHR22_11.0; EXPRESSED IN LUNG, SIGNAL = 0.6; EXPRESSED IN ADULT LIVER, SIGNAL = 0.61; EXPRESSED IN PLACENTA, SIGNAL = 0.55; EXPRESSED IN FETAL LIVER, SIGNAL = 0.52; EXPRESSED IN BONE MARROW, SIGNAL = 0.55; NT HIT: gi14779016, EVALUE 0.00e+00; SWISSPROT HIT: Q03368, EVALUE 2.20e+00; EST_HUMAN HIT: BE260672.1, EVALUE 0.00e+00
gcccaaagtcatatggcaagtaagtggcagggccaggatttgagccctggtgaaccacaacctgtatgtttccagaatgggcatccagaggctggggtctctagttctagtcttgccattaagtcatacggtgacctggagcggggggtctctggaacttggattaaaaagccctcacatagtctctacaggtccttttgttattaattctgatactaggcttgtatgtctttccttctgtttatagtgtgacacccagcccctgccagtcccccatggccccgtggagccgagaggcggtgctgagtctctatcgggctctgttgcgccagggccgacagcttcgctacactgatcgagacttctactttgcctccatccgccgtgaattccgaaaaaatcagaagctagaggacgctgaggcccgggagaggcagctggagaagggcctggtctttctcaacggcaaattggggaggatcatttaggatcctccaagggaaagaggacaaaggtgccttctg

SEQ ID NO: 4088 - DNA, 580 bp, Homo sapiens
  MAP TO AL139177.1; EXPRESSED IN FETAL LIVER, SIGNAL = 0.52; EXPRESSED IN PLACENTA, SIGNAL = 0.66; EXPRESSED IN LUNG, SIGNAL = 0.55; EXPRESSED IN ADULT LIVER, SIGNAL = 0.5; EXPRESSED IN BONE MARROW, SIGNAL = 0.55; NT HIT: AB055060.1, EVALUE 5.50e-01; SWISSPROT HIT: Q9PJU7, EVALUE 8.40e-01; EST_HUMAN HIT: BG222179.1, EVALUE 6.00e-45
cctggattgaaaagtacgccttttgtgtgtgaaatttgtgtgtactgcgtatcccagtgctctctgcgctgaggcagagtacaaataaagatatggttagaaaacatgttatttagatatcatctttatttcctacctcagtagctgctgcaaggagtcttcaagctcctttgctcgagcctggcatatggactccattttttctaattcgaattcctgacccacgagccaactgataagctccttcacatgtgctttgggcagatgcttcttcacatgcttcagtacgctgtccacctgctttattttactgtttcttccttcaagagtcaagaaatccttcagaaagacaaaaagtccattacaatctcctggcaagtctgaatgtggtctctgccaccctcacgacacttttccaaaccagtacacagacataccaccttcttaagatcctatacgaaagaagggtgatggagatgtggctatctccaatggcagatgatttataatagttctgacttcttgggaattacatcaagcaaagtaacacagagccaccaggaagatcagcaggagcaag

SEQ ID NO: 4089 - DNA, 527 bp, Homo sapiens
  MAP TO AC011225.5; EXPRESSED IN FETAL LIVER, SIGNAL = 0.89; EXPRESSED IN ADULT LIVER, SIGNAL = 1.2; EXPRESSED IN BONE MARROW, SIGNAL = 0.93; EST_HUMAN HIT: T99218.1, EVALUE 1.90e-01; SWISSPROT HIT: P38631, EVALUE 2.90e+00; NT HIT: gi14523048, EVALUE 5.00e-01
taacaggatttggcgattggttggatgtaggagagaaaaacgagcaggaaaagacagaattggagatgactagtaggttcctagttcaagtaagggggtagatggtctgaccattcacagagataaagaagaatataaaaggggtacatgtctgtggaagtagaataatgagttttttttcgacatgttgaatttgagttgcctctaggatgttcaaatggaggtgttcactatatggtatggtggttctggagctcaggaaaaagatcaggctggaaatcttcagcacataggaaattctgaagtcatgggaatagatgaacttacccaggaagacaaaggcaaaggaaaacagaactcagatagaccttgacatttaaggtgtgggtaaaagaaaagtccctgaagaaattgctagagaggtagaagaaaaaccaaatgactggagtctcccagaagtcaaggaaagcgaacacaagtgtttcagtgagggagtggggacagtgtccatagatgcagaagccaca

SEQ ID NO: 4090 - DNA, 506 bp, Homo sapiens
  MAP TO AC004846.2; EXPRESSED IN HEART, SIGNAL = 1.5; EXPRESSED IN PLACENTA, SIGNAL = 1.9; EXPRESSED IN LUNG, SIGNAL = 2.7; EXPRESSED IN ADULT LIVER, SIGNAL =   2; EXPRESSED IN FETAL LIVER, SIGNAL =   2; EXPRESSED IN BONE MARROW, SIGNAL = 1.6; NT HIT: AF109907.1, EVALUE 0.00e+00; SWISSPROT HIT: Q9QZS3, EVALUE 3.00e-33; EST_HUMAN HIT: BG570885.1, EVALUE 0.00e+00
ttttaaaatctgctcttacagggtgaaaggttgagccatgcagtaggctgtgcttttgcagcctgtttagagcgcaagcagaagcgggagaaggaatgtggagtgactgctacttttgatgctagtcggaccacttttacaagagaaggatcattccgtgtcacaacagccactgaacaagcagaaagagaggagatcatgaaacaaatgcaagatgccaagaaaggtacaatctgttctacagtgtgtatttatggaatgcagtttttcccaacaaggtattattttgaagctaccaggggtaaattttctcataatcaaagagaacccttagcaatataaaaccttataacaaagttgaaaatcttaaaaaccgcttcctttagagtggctagtttaatggcttcaaaaatatttactccattatagtaagctatctgaggaatcagagtgcagttgaagaagctgcagagacatctcttacccccttcctcccatcctgaaat

SEQ ID NO: 4091 - DNA, 539 bp, Homo sapiens
  MAP TO AL035695.17; EXPRESSED IN LUNG, SIGNAL = 1.3; EXPRESSED IN ADULT LIVER, SIGNAL = 1.1; EXPRESSED IN FETAL LIVER, SIGNAL = 1.1; EXPRESSED IN PLACENTA, SIGNAL = 1.2; EXPRESSED IN BONE MARROW, SIGNAL = 0.97; NT HIT: gi6678827, EVALUE 5.10e-01; SWISSPROT HIT: Q06434, EVALUE 6.60e+00; EST_HUMAN HIT: BF676776.1, EVALUE 7.60e-01
aacctgcagacggtaacctggcaaattggtccttaaatctatggcggcttcaccagtttccggcatcaattcgaattttgctaattttgtttcaccatagcctggcttgacttacgggtctcaaacaatgcttaatgtttaatggccaaattatgctaacaagcaaatgatcaaacttaggggaagcactttattttttaaggtaagtgcaaaacagtggtagcattgtgatcattctgaaaaatctagcctaaaatgatggcttttttgtttctaatcactagaacacactatgtaagtgtagagttattccaaaatgtgaccatttttgtaacactgatttttttttcattccagttcaaatttcctataatagtagtaacagacggtggggaggaggggaagaaggaggaagaggaggaaaaggagatgactcagctatagttcccctaaccctcttggtttatgaagcagctcagaaacttattagaacaaattccagcatccgagaccactgagctaaccatccaaccacccac

SEQ ID NO: 4092 - DNA, 599 bp, Homo sapiens
  MAP TO AC012482.3; EXPRESSED IN PLACENTA, SIGNAL = 1.4; EXPRESSED IN LUNG, SIGNAL = 2.1; EXPRESSED IN ADULT LIVER, SIGNAL = 2.7; EXPRESSED IN FETAL LIVER, SIGNAL = 2.1; EXPRESSED IN BONE MARROW, SIGNAL = 1.5; NT HIT: Z14310.1, EVALUE 1.00e-60; SWISSPROT HIT: P52441, EVALUE 5.90e+00; EST_HUMAN HIT: AU148831.1, EVALUE 5.40e-02
ttcttccccaccgactactgcagggaccgaggaagccatgaacactacaagccttttggcgcctgctgctgagataatggccacacctggcagcccatcccaggccagccctacctcgggtaagagagggtgctcacttctacctctcccgttttaaattaaacttagcattgtctgttttgataaactttctaaatttttggaatataatacacacacagaaaactaagaaaacataatgatcatgaagcaaactcttccttctcctttcctttgccctacctctttcttcccatctgtagatgaatgaaagctccttctttcattccccagttcctctctcttttatgtaatcgcactccccaatttcttctctttttccctgtttcattgtccattaacaagcagtatgacaactgtgatggatggacccgggcctgaaattccaggcatgagccctgcctgctgctcagcctcacctcgcccctccaccttcctcctctagactccagccacagcacactgcttactgcccacatctcctgatctttatgtatgcactttgtgtgcctgcaaagcccactctcctccagaactgc

SEQ ID NO: 4093 - DNA, 553 bp, Homo sapiens
  MAP TO AL136311.2; EXPRESSED IN PLACENTA, SIGNAL = 0.84; EXPRESSED IN LUNG, SIGNAL = 0.87; EXPRESSED IN FETAL LIVER, SIGNAL = 0.73; SWISSPROT HIT: O95816, EVALUE 8.00e-73; NT HIT: gi14783246, EVALUE 0.00e+00; EST_HUMAN HIT: BI758084.1, EVALUE 0.00e+00
aaaaatttcatggcagaggtaaagaaaataataaatttagtcacaaacaaatgccttaatgtttttgacacagataagtttacatctcatattgatttttaggagaaagagaagaattaaatctgactgcaaaccgtttgatgggaagaactctcaccgttgaagtgtcagtagaaacaattagaaacccccagcagcaagaatccctaaagcatgccacaaggattattgatgaggtggtcaataagtttctggatgatttgggaaatgccaagagtcatttaatgtcgctctacagtgcatgttcatctgaggtgccacatgggccagttgatcagaagtttcaatccatagtaattggctgtgctcttgaagatcagaagaaaattaagagaagattagagactctgcttagaaatattgaaaactctgacaaggccatcaagctattagagcattctaaaggagctggttccaaaactctgcaacaaaatgctgaaagcagattcaattagtcttcaaacctaagagcatttacacaatacacaaggtg

SEQ ID NO: 4094 - DNA, 530 bp, Homo sapiens
  MAP TO AL133476.4; EXPRESSED IN FETAL LIVER, SIGNAL = 1.2; EXPRESSED IN HEART, SIGNAL = 1.5; EXPRESSED IN PLACENTA, SIGNAL = 1.9; EXPRESSED IN LUNG, SIGNAL = 2.1; EXPRESSED IN ADULT LIVER, SIGNAL = 1.9; EXPRESSED IN BONE MARROW, SIGNAL = 1.5; SWISSPROT HIT: Q05152, EVALUE 3.00e-03; NT HIT: gi15298905, EVALUE 0.00e+00; EST_HUMAN HIT: BG819049.1, EVALUE 0.00e+00
gagctcccaggtctacatcgatggctccattgagggttccaggttccctcgtggtagcagcaacagcagcagcgagaaaaagaaaggggcaggaggtgggggacctccccaggctccaccaccccgagagggagtagtggagggggctgaggcctgccctgcctctgaggaggccctgggccgggaaaggggctggcccttctggatggggagcccccctgactctgtgctggccgagctgaggcgcagtcgggagagggaagggcccgctgcctcgccagcagaaaatgaggaaggggcctcagagccttcacctggaggcatcaagtggggacacctctttggctcccgaaaagcccagcgggaggcccggcccacaaataggtgagagcctgcccatggtagggatggagggagtagggagcctgctgtaagccagggcacgggcagagcccatcctgggcagagcctgagtccagctgctgtccctaggctcccctcggactggctgagcctggacaagtccatgt

SEQ ID NO: 4095 - DNA, 594 bp, Homo sapiens
  MAP TO AC011585.3; EXPRESSED IN FETAL LIVER, SIGNAL = 0.57; EXPRESSED IN BONE MARROW, SIGNAL = 0.62; EXPRESSED IN LUNG, SIGNAL = 0.94; EST_HUMAN HIT: AW340174.1, EVALUE 4.00e-83; NT HIT: AF224669.1, EVALUE 1.00e-113; SWISSPROT HIT: P10271, EVALUE 5.80e+00
acgagatgggatggattcagtgtggtatggtcgtagagccattgaccttaatcccagggcatggtagtactaagagacgcccagagggatctcatgtgctccacacatactcttccttaccttcatcgaggagtagtagtcgatttcatcttgatagtccaggtcaatcaccccaaccaacactggaactctcttcttaacctgttgacttagaggcaggaggagcccagagtggccaggtggcagtgttaacttccagttcaatggaatcattgttgcgtctcctggtgacagcattcctccctctggagctaagacctctaggcttgcagaacatagtgtcacagtaacaggaagcaaaaattctgctagtggatcactagaggtgatggtgagtggtgccacttccactttcatcccttgattcctggacctgtgaatcttggctatgggagaaagagtaccatatattggaggctgattcagagtatacacagccttctggagaactttgccccaaccctgcaaagtatcatcacctagttggtgttgtaaggccattccactgttctatcaatccagctgcttcaggat

SEQ ID NO: 4096 - DNA, 563 bp, Homo sapiens
  MAP TO AC012661.4; EXPRESSED IN FETAL LIVER, SIGNAL = 0.62; EXPRESSED IN ADULT LIVER, SIGNAL = 0.35; EST_HUMAN HIT: BI906578.1, EVALUE 1.00e-113; NT HIT: gi14575809, EVALUE 3.00e-18; SWISSPROT HIT: P08547, EVALUE 5.00e-14
acacatcttttagcacccgcttatgagtgataaaatacgatgtttactctgtgtctggcttgcttcacttacaacaatggcctccagttccatccatgtgtctgcaaaagttatgattctattttttgtgcctgaatagtatttcattttgtatattttctacattttctttctccagtcatttgttgatggacatttaggttgattttatatctgtgctactgtgaatagtgttgcaacaaatatataagtacagttatctttctgatatactgatttcttttcctttgcatagatacccagtggtgggattgctgaatcagacagagccaatagacgatcagtaatggtggccaatcatcagctagaaacaaagtatttagcagtgcttgaaaacaccaaaactctgagaccactgaccttccaaaacttcaacagccctgagtgaaaagtccaaacacatttatccaccattcaaagaccctttattttctgtcctctgtgcatctcagtagtctctttttaccacactgtctatatactgcatgagccatttacgtgaa

SEQ ID NO: 4097 - DNA, 592 bp, Homo sapiens
  MAP TO AC018692.5; EXPRESSED IN HEART, SIGNAL = 2.9; EXPRESSED IN PLACENTA, SIGNAL =   3; EXPRESSED IN LUNG, SIGNAL = 6.8; EXPRESSED IN ADULT LIVER, SIGNAL = 6.4; EXPRESSED IN FETAL LIVER, SIGNAL = 3.6; NT HIT: AL163227.2, EVALUE 5.00e-72; SWISSPROT HIT: P49048, EVALUE 2.60e+00; EST_HUMAN HIT: BI258458.1, EVALUE 3.00e-65
gtggagctgtgagaagagggccgtcattctccggatcccagaatgatagatccaccaaaagctcacaccactcaccaggaaaagctgcaggcactcaacaccaacctgtgaaagcagccagaagggaggctgtaccctgccaagccataggagtggagcttctcaaagccatgatatcccatctcttgcatctgtgtgacctggatgtgagacatggagtcaaaggacatcattttgaaactttaaggtttaatgactgctctgttggatttcagacttgcatggggcctatagctcctttgttttggtcaatttctcccatctccaatgggtgtatttacccagtacctgcactcccattgtatctaggaaataactaacttgcttttgatgttacaggctcataggtggaagggacttgccttttctcagatgagattttgaacttgaacttttggggttaatgctgaaatgagttaagactttaggggattcttggaaaggcataattgtgttttgaaatgtgaggacatgagatttgcgaggggccatggacagaataatatagtttggctttgtgtccctacccaaa

SEQ ID NO: 4098 - DNA, 578 bp, Homo sapiens
  MAP TO AC018704.5; EXPRESSED IN FETAL LIVER, SIGNAL = 0.49; EXPRESSED IN BONE MARROW, SIGNAL = 0.53; EXPRESSED IN LUNG, SIGNAL = 0.58; EXPRESSED IN ADULT LIVER, SIGNAL = 0.65; SWISSPROT HIT: P39625, EVALUE 3.20e+00; NT HIT: Z21852.1, EVALUE 8.60e+00
attttcacccttgggaaaccctatcagtagccttctcttttttctctctgtcaggtgtttgcagggaaggaagtttggacctccttaaaggtactgagctttcagcattcaaataaagagttctattctgtagcagtctttctggcttaggaatttcagagggcttgatgagcaggttgcacactgacattccacagcagaaaactgtccacccaccacgtcttaggcagggtgatacagttgtatagatggtttctttagtggatgcttgacaaggcattatggcagtgttgacattggaatggagctgctttgcagaaaattcagaaaaacacattgactaccaatctttccttaacttttcattccaaatgtaactggagtctcttgtgattttttttttttttttttttttttggtggcaggtgagaaaagaaagagagataattaacaatatttgtgttctaattttcttatggatagttttaattctacctgctcctcctaattacctgcctacttcctcctcccccagcccagcccaaactcaaagtgagtggagaaggaaaggctatggg

SEQ ID NO: 4099 - DNA, 571 bp, Homo sapiens
  MAP TO AC012186.3; EXPRESSED IN FETAL LIVER, SIGNAL = 0.9; EXPRESSED IN HEART, SIGNAL = 2.2; EXPRESSED IN LUNG, SIGNAL = 1.3; EXPRESSED IN ADULT LIVER, SIGNAL = 0.95; NT HIT: gi16165102, EVALUE 0.00e+00; EST_HUMAN HIT: BE538665.1, EVALUE 0.00e+00; SWISSPROT HIT: P57161, EVALUE 7.10e+00
tgattctgggatgaaaagggtaaaggaagagttcaaaattggtgatcctgtgtgagggtcagggaaccttggtatagaaagcaaggcagctgcttgttgagaagactgtgtagaaatatatgtttttgttgggttagcttgtatatttaactttgttattatttgtttgtttctccagaaaataaagcgcttaaaattcagacaagtggagagccagatgtggctgaaagagtggatctagaagagctgattgagtgtgcaactggtaaaatggagctttgtgcaagaactgacccttctgagcaagtcgagggaaattgtgaaattgtaaatgaactaattgctgcctccacacagaaaggccagataaagaagaaaaggttgagtgaactggggatcacgcaagctgatgacaacttaatgtcacaggagatgtttgttgggattgtggggaaccagttcaagtggaatgggaaaggtagttttggcacatttcttttctgactacagtgatgtaagtagatagcaaaatactggattttgcacatgctgccctaagaatcactgctgc

SEQ ID NO: 4100 - DNA, 570 bp, Homo sapiens
  MAP TO AC011799.5; EXPRESSED IN FETAL LIVER, SIGNAL = 0.5; EXPRESSED IN BONE MARROW, SIGNAL = 0.64; EXPRESSED IN PLACENTA, SIGNAL = 0.59; EXPRESSED IN LUNG, SIGNAL = 0.49; EXPRESSED IN ADULT LIVER, SIGNAL = 0.55; NT HIT: AF167305.1, EVALUE 0.00e+00; SWISSPROT HIT: Q9Y6H5, EVALUE 5.00e-56; EST_HUMAN HIT: BF115573.1, EVALUE 0.00e+00
ttccctcaaggtagtgtgggcccacaatctgtgatattaggaacaacataatccatttgaaggaaaaaaaagaatattctccaaatagcacttactgccttattctttcctttgctagcggagctggcagggtttcccttggcatctgtcttcctcccaagtgaggtcaagggcaatgtagaggttttcagctggttggctgcctggtagttattattattgttttggttgccacttagtgtctccatgatagatcgaaaggctccaaaaggccttttcagttgatcccccgattcgttacttgtggaggtccgctggagagtcctgcccttatctttgtctttttctccattcagttcaaggctaggctgctccatctgcaccacaggctcctcaaaggtaactctcagttttaagttctgagatgtcctacgcttggaagatggagacttgagggcactcttgggacttgtggcaactttctgggcagcagtactgtcagggctgggctgctgagggtcaccagagggctggtttggaggaatactccctgagcctggatactgggat

SEQ ID NO: 4101 - DNA, 515 bp, Homo sapiens
  MAP TO AL138784.1; EXPRESSED IN PLACENTA, SIGNAL = 1.9; EXPRESSED IN LUNG, SIGNAL = 2.2; EXPRESSED IN ADULT LIVER, SIGNAL =   2; EXPRESSED IN FETAL LIVER, SIGNAL = 2.3; NT HIT: gi14733830, EVALUE 0.00e+00; EST_HUMAN HIT: BE745745.1, EVALUE 0.00e+00; SWISSPROT HIT: O75173, EVALUE 4.80e+00
caggcaccaataaaagcacctaaagctagcaaatgcctaaactggtttatttagagtccctccccacaatgttcataggggaggaaaataatgtaatttgaaaagcatcaaaactaaacaaatgcacactgaccttagaaaataagattttgaatttcatcatgatacccttttttcctataaaatttactttttcactctgaaagacttcttcatggtggatttgcccttgcccggcaattttacttcctttcttgcactggttgcaggcttctttgaggagccaccactaggtttcttgatgactgtggatgagggtctggtcttcttggcaggcgttttggccttaggaggtgctttcttaggcaagggcctagctttcccccgctgggcagctgagactttaggtgcaggtttggaccctctctgcttcacagatgcggccttccctggggacttggctggggttttcttctgcaacctgtgagaaccaaagagcaaaggccgtcatttag

SEQ ID NO: 4102 - DNA, 597 bp, Homo sapiens
  MAP TO CHR22_85.0; EXPRESSED IN FETAL LIVER, SIGNAL = 2.8; EXPRESSED IN BONE MARROW, SIGNAL = 1.4; EXPRESSED IN HEART, SIGNAL = 1.7; EXPRESSED IN LUNG, SIGNAL = 1.7; EXPRESSED IN ADULT LIVER, SIGNAL = 1.9; NT HIT: AF281074.1, EVALUE 8.90e+00; SWISSPROT HIT: P15974, EVALUE 5.00e-03
cgtgcaaacacatatgcacacatacacacataaacatgtgcacacataaacgttcacacacataaacatgcaaacacatatacacacaaacatgaacacatataacacatatacacacacataaacacaaacttgcacatacataaacacatatatacacacatatacgcacatatatacacacaaacacacacataaacatgcatacatatacacatacacacatatacatacacacataaacatatacacacatatacaaacacacacatacagacacatacacagacacatatgcacacatatacacacacacacatacacacacacacctttcatctgatttcactggtacatgggcaaatttatcattattatcgttggcccccaagcccatctttccctgcactgttagctgtgttgtcactggcctctgaaatgcagccttcttctgctcctgcacctgctgagctcctatgcatcccttatccacagcggccatcagtgcaggttcactgtctgccacctggtgctcggctaggacccagtgctggggagacaaatacaaagcacatgccctgccattcagaggctcag

SEQ ID NO: 4103 - DNA, 551 bp, Homo sapiens
  MAP TO AL160191.1; EXPRESSED IN PLACENTA, SIGNAL = 0.9; EXPRESSED IN LUNG, SIGNAL = 0.9; EXPRESSED IN ADULT LIVER, SIGNAL = 0.78; EXPRESSED IN FETAL LIVER, SIGNAL = 0.6; EXPRESSED IN BONE MARROW, SIGNAL = 0.6; EST_HUMAN HIT: BI906774.1, EVALUE 0.00e+00; SWISSPROT HIT: P57103, EVALUE 9.00e-91; NT HIT: gi15147253, EVALUE 0.00e+00
tggcctatcaggaggacaactggtgctgcaatagaagccagtggctaagtctcgtgtatggcgtggttaaggttgcagcctctcacctctgccttcctccattttgggctggttacctttgtgctcttcctgaatggtcttcgagcagaggctggtggctcaggggacgtgccaagcacagggcagaacaatgagtcctgttcagggtcatcggactgcaaggagggtgtcatcctgccaatctggtacccggagaacccttcccttggggacaagattgccagggtcattgtctattttgtggccctgatatacatgttccttggggtgtccatcattgctgaccgcttcatggcatctattgaagtcatcacctctcaagagagggaggtgacaattaagaaacccaatggagaaaccagcacaaccactattcgggtctggaatgaaactgtctccaacctgacccttatggccctgggttcctctgctcctgagatactcctctctttaattgaggtgtgtggtcatgggttcattgctggtgatct

SEQ ID NO: 4104 - DNA, 574 bp, Homo sapiens
  MAP TO AL136103.2; EXPRESSED IN FETAL LIVER, SIGNAL = 4.6; EXPRESSED IN HEART, SIGNAL = 5.1; EXPRESSED IN LUNG, SIGNAL = 6.1; EXPRESSED IN BONE MARROW, SIGNAL = 5.8; EXPRESSED IN PLACENTA, SIGNAL = 6.3; EXPRESSED IN ADULT LIVER, SIGNAL = 4.6; NT HIT: AE001317.1, EVALUE 8.50e+00; EST_HUMAN HIT: AL597191.1, EVALUE 5.20e-02
tgtccatgttatgaggagcgctaaaatatctgttggagaaatgtccctttaaatatattacgagtacaggacatgccccagcgtgccaggtattgccgttctttatctggtagctctttgaagtagaattcacatttgtacagggcattatgtcttttggggaaaacatttctatttagaatgtaaactatatcatcctcagggtaaccctgtaaagtgaggagtgcaaatatttttcccatttaacagagggagacatcaagaattgctggggatgatggagcaactcaacaacaggcaagggaaacaaaatcaaagccctgtgcccttaattctcaggtccccctgacctttgtcctttacccagtgcgtatgaagcaagtgtaggtaggactaactgtggccttgagctggaaggaagagtcaaaaaagtagagggagaggcatggcctggaaatgttcaccactgccatgcgtttccaaagcctgtgctaaggctgctaggagctacagcatcccacttgcctgcctctgtcaaaagaattgcattactcctgccctgccattctgtatt

SEQ ID NO: 4105 - DNA, 545 bp, Homo sapiens
  MAP TO AL138842.2; EXPRESSED IN ADULT LIVER, SIGNAL = 0.81; EXPRESSED IN FETAL LIVER, SIGNAL = 0.4; NT HIT: AB051901.1, EVALUE 0.00e+00; SWISSPROT HIT: P20796, EVALUE 2.60e-01; EST_HUMAN HIT: AV752858.1, EVALUE 0.00e+00
aaaggggtttcctcgatttggagctttttttttcttccaccgtcatttctaactcttaaaaccaactcagttccatcatggtgatgttcaagaagatcaagtcttttgaggtggtctttaacgaccctgaaaaggtgtacggcagtggcgagaaggtggctggccgggtgatagtggaggtgtgtgaagttactcgtgtcaaagccgttaggatcctggcttgcggagtggctaaagtgctttggatgcagggatcccagcagtgcaaacagacttcggagtacctgcgctatgaagacacgcttcttctggaagaccagccaacaggtaagcggcccaattcattgttggagggtgaaagctgattagagaagagaattgaatacacaaaacctgtacgaaatgttttaagttgctcagtttgagtggtttgaattacgtgttgttgcttccttttttctgttttaatttgcagacattctcctccccccccaaaaaaaagggtgatttgtacaattttttatggtgctgtgtcctaaagggga

SEQ ID NO: 4106 - DNA, 503 bp, Homo sapiens
  MAP TO AL137800.2; EXPRESSED IN FETAL LIVER, SIGNAL = 0.67; EXPRESSED IN BONE MARROW, SIGNAL = 0.6; EXPRESSED IN ADULT LIVER, SIGNAL = 0.87; EXPRESSED IN PLACENTA, SIGNAL = 0.72; NT HIT: gi13639134, EVALUE 0.00e+00; SWISSPROT HIT: Q92540, EVALUE 6.00e-72; EST_HUMAN HIT: BG029661.1, EVALUE 0.00e+00
ttggaaaacaccccaagttcattctgtgattctttagcattcattataagtaatattgcattttatcctcacctttatgacaggcgtctcttttttagtatcaacaggcagatgcctccaaacagctgtggaatccccctcaggttcaaggcccattagggaaaattatgcctgtgaaacagccctactaccttcagacccaagaccccataaaactgtttgagccgtcattgcaacctcctgtaatgcagcagcagcctctagaaaaaaaaatgaagccttttcccatggagccatataaccataatccctcagaagtcaaggtcccagaattctactgggattcttcctacagcatggctgataacagatctgtaatggcacagcaagcaaacatagaccgcaggggcaaacggtcaccaggagtcttccgtccagagcaggatcctgtacccagaatgccgtttgaggtgtgtgttctttcctatcaccaggcaatttgg

SEQ ID NO: 4107 - DNA, 516 bp, Homo sapiens
  MAP TO AL139014.1; EXPRESSED IN BONE MARROW, SIGNAL = 0.58; EXPRESSED IN PLACENTA, SIGNAL = 0.53; EXPRESSED IN LUNG, SIGNAL = 0.51; EXPRESSED IN FETAL LIVER, SIGNAL = 0.53; NT HIT: gi15295890, EVALUE 1.00e-97; EST_HUMAN HIT: AV656552.1, EVALUE 0.00e+00; SWISSPROT HIT: P11055, EVALUE 2.80e+00
cccaaatccaatgcaaaaacaacaaaaaacacttctattttactaaaagattcctgtcttccatttcattttaccagagcaagtacaaattcggagaaaagcttcttaagtcctgcagtttcaaattccttttgtaattcatccaacgctgaatactctttgacttcaaatgccagaaacctgcattatacaaaagaaactcatgaatatgctagatttgtcagagtataattatcgattcagttgcttttccatctgcaatagtactaaattataccttttgtgttctgtctgtacttttgtttcaaacagtacactaatcattttctctttgcatttctttccacttgagtccacatctactttggaggttttctgaagaatcaagtactcctaaataataaatcagtacattaaatacatatcttactctgagtctcaaagtcccagttttaaaggagctataaacctgtaggcttattttcatgcttaaataccccctttttaaatcaagca

SEQ ID NO: 4108 - DNA, 537 bp, Homo sapiens
  MAP TO AC022263.3; EXPRESSED IN BONE MARROW, SIGNAL = 0.5; EXPRESSED IN PLACENTA, SIGNAL = 0.49; EXPRESSED IN FETAL LIVER, SIGNAL = 0.52; EXPRESSED IN ADULT LIVER, SIGNAL = 0.43; NT HIT: gi13652777, EVALUE 4.00e-23; EST_HUMAN HIT: BE281270.1, EVALUE 3.00e-62; SWISSPROT HIT: Q9Y2G7, EVALUE 4.00e-11
acaattccctaagcagcaggtgaaaagtcacccagacaagtgaaagctacactcaaaattcatgagttatttggggatagacatacttacctagtgagaccaggctgctgtagttctccatcattacatctctgtataagtccttctgagcagtgtccaggcactcccattcctcctgagagaagtctatagacagatcctggaacatgcccaacccctgaaatgacaaactcaggcagcactgttgaaattaaaggaaaggtttttaagatgaagcaagagatggaagggtgctgaaggatggagcgaatatagtgagcagaccggctaggctcagaatggggaagagtaaaaaaattagtgtaacttcaacaaaggacctccatgttcatgaatattcctgttgtggccggcaaacctccttcatagaatgggacattcccagtattccatggttagagctgggaatgaataaagtacattgatatattatttcccaaataaatgaaatagagttgaaaagcacacagcaagctg

SEQ ID NO: 4109 - DNA, 550 bp, Homo sapiens
  MAP TO AL137799.2; EXPRESSED IN HEART, SIGNAL = 1.2; EXPRESSED IN BONE MARROW, SIGNAL = 0.82; EXPRESSED IN ADULT LIVER, SIGNAL = 1.9; EXPRESSED IN LUNG, SIGNAL = 1.2; EXPRESSED IN FETAL LIVER, SIGNAL = 0.74; NT HIT: AF098012.1, EVALUE 0.00e+00; EST_HUMAN HIT: BI822073.1, EVALUE 0.00e+00; SWISSPROT HIT: O00519, EVALUE 7.00e-20
cttcgtgcacaccaatgttccacagtccatgttcaggttgggtcttggggtggggcggggcggggcaggggcaccggtcccagcatggcacgggctgacccattcttggctcctccagctatgactgcagtaaccccctctttggccagaccgtgaacccatggaagtcctccaaaagcccagggggctcctcagggggtgaaggggccctcatcgggtctggaggctcccccctgggcttaggcactgatatcggaggcagcatccgcttcccctcctccttctgcggcatctgcggcctcaagcccacagggaaccgcctcaggtaaggtgggtggagggcgcttctgggcccctcgctgtgtgaccttggcctagcttccaacctctctgggctccaggcggggattcggtctccggggttttgctgggaggaagcattacagtaccactggccgggcgtgggtcctagtttccaaagcggtgagtgttcagagctgctctgtgggtgtggggatggcggcgggtggccatttcctgtttccagcat

SEQ ID NO: 4110 - DNA, 520 bp, Homo sapiens
  MAP TO AC023112.3; EXPRESSED IN PLACENTA, SIGNAL = 0.56; EXPRESSED IN LUNG, SIGNAL = 0.69; EXPRESSED IN FETAL LIVER, SIGNAL = 0.62; EXPRESSED IN ADULT LIVER, SIGNAL = 0.6; EXPRESSED IN BONE MARROW, SIGNAL = 0.56; SWISSPROT HIT: P74876, EVALUE 2.80e+00; NT HIT: AF293359.1, EVALUE 2.00e-18; EST_HUMAN HIT: AI201072.1, EVALUE 0.00e+00
tccaggctggtttctgtttcctgtcttcttgtgctgttgtctgatagatgagaattttgtattcttatttactacttctatggcttgaatgtgtctcccaaaattcatgtgttggaaacttaatccccaatgcaatggtgttgagaagtgggatctttaataagtgactggctcatgagggctctgttctcatgaatggatttatgctgttatcacaggagtgggctcccgataagaggatgaattcagccctccttcctcttctttcacgtgttctcttgcccttccaccctccaccatgggatgacacaccaagaaggccttcaccagatgtgggcccttgaccttggacttcccagcctccagaactgtgagaaataaatatttgttttttataaattacacagtctcaggtattctgttatagtagcataaaatggaccaagacaatgacccaggatttctctgatttctcctccattgttaattttgctcataaggggagagcgtcagtcattct

SEQ ID NO: 4111 - DNA, 506 bp, Homo sapiens
  MAP TO U82695.2; EXPRESSED IN FETAL LIVER, SIGNAL = 0.93; EXPRESSED IN BONE MARROW, SIGNAL = 0.81; EXPRESSED IN LUNG, SIGNAL = 0.77; EXPRESSED IN PLACENTA, SIGNAL = 0.88; EXPRESSED IN ADULT LIVER, SIGNAL = 0.88; SWISSPROT HIT: Q16720, EVALUE 2.00e-35; NT HIT: U82695.2, EVALUE 0.00e+00; EST_HUMAN HIT: BF346020.1, EVALUE 8.00e-50
taaaggcgatgtagggatggagatgtctgttttcatgggcatgaaatcctggtgatgtggaccccatgaggagcccccaggagctactgggtttccacccccaaccttcccgggcaggcggcccatggaaaggtgactgcctcctctccataggactctcctctcaaagccgtgcagatgttgtgggtgaacttgatcatggacacatttgcctctctggccctggcgacggagccacccacagagtcgctgctgctgcggaagccgtacggccgcgacaagcccctcatctcccgcaccatgatgaagaacattctgggccacgccgtgtaccagctcgccatcatcttcaccctgctgtttgtcggtaggctggccagtggcacccgggaggacttcgggacactgttgccaccacctcgggctcagattctgtctggtgtgtctccacctgtgtctccgcacccagtacggggtgggacgctgcacttcctgactggacagca

SEQ ID NO: 4112 - DNA, 561 bp, Homo sapiens
  MAP TO AL136443.5; EXPRESSED IN BONE MARROW, SIGNAL = 0.58; EXPRESSED IN LUNG, SIGNAL = 0.5; EXPRESSED IN PLACENTA, SIGNAL = 0.59; EXPRESSED IN ADULT LIVER, SIGNAL = 0.47; EXPRESSED IN FETAL LIVER, SIGNAL = 0.64; SWISSPROT HIT: Q13867, EVALUE 1.10e+00; NT HIT: AY058606.1, EVALUE 1.40e-01
tggattcaaaaaggacaggcccacacatctctggaagttcccagtgacaggaatgaccaaacggtcttgtctggacatctccactagattttcagtctttgcatcattcagttcaaggacgaaaatagcaattaccctagtcgtttgcctgaccattgcctgcagaaagaatgagcaccatgattgaaaatcccactggaatataatccaatgggagagagctaattcctccaaatgagtgctctgcccaaagacagttaaagggtgatggactactgaaagcaacatacatctgtgacataagtcagtatcaacatgcgagaacactaaccccagtggtgaaatggagcatcttgcctctgtggcagaaatcatcaggcatgtggatggtagtatgctgctgtattgcctgataaaacagaagtgagcttgctttgccccaagaagctaagaggcagttgagacagaagggtaattatagtctgagacaacacttgggaataatagatttattgttgtcttgtagcccatttgaatcctccaaactcctatagccaggcg

SEQ ID NO: 4113 - DNA, 538 bp, Homo sapiens
  MAP TO AC025170.2; EXPRESSED IN BONE MARROW, SIGNAL = 0.49; EXPRESSED IN LUNG, SIGNAL = 0.53; EXPRESSED IN PLACENTA, SIGNAL = 0.52; EXPRESSED IN ADULT LIVER, SIGNAL = 0.48; EXPRESSED IN FETAL LIVER, SIGNAL = 0.45; NT HIT: gi13385681, EVALUE 4.00e-08; EST_HUMAN HIT: BE540757.1, EVALUE 0.00e+00; SWISSPROT HIT: P13942, EVALUE 2.20e+00
gcccttttcataaggtgggacctgtataaactgtactaaccatttcttctgatgcagcagtagctgcagatcctgcaccaagagcagaaacaggaacgtgaacagaagatgcggaagcagccctggtagaagtcatcgaagcagctgagggaacggcagtcgcgctggctcctccgacggcggctggtggggatggcagcagtggtgatgtaactggtaagggcatcggaggagctgaaggatccaaatgagcagaatgttcttttccttgaacaccaggaccatactcttcctttttattatttgtggagtctatccctataaatcacaaattaattccattcaaattcttccaggttaggactactattatcttccaaacaatgaaaacacatactggctaaagtttggtcctaacaaaaatttagatgtttacagtatattagatacaatgttcagttaatacagtttgtcagtattaactggttaatgtcagcattaaccactaaaaacttcagactacttccttccacatgtg

SEQ ID NO: 4114 - DNA, 575 bp, Homo sapiens
  MAP TO AL136115.5; EXPRESSED IN LUNG, SIGNAL = 0.48; EXPRESSED IN PLACENTA, SIGNAL = 0.54; EXPRESSED IN BONE MARROW, SIGNAL = 0.53; EXPRESSED IN ADULT LIVER, SIGNAL = 0.55; EXPRESSED IN FETAL LIVER, SIGNAL = 0.59; NT HIT: gi11417471, EVALUE 6.00e-04; EST_HUMAN HIT: AA368455.1, EVALUE 8.00e-04; SWISSPROT HIT: P55135, EVALUE 2.50e+00
tctgggcagaagagaagagctcagctatcactgtgtgactggtagggcagagtgaggaggggcgttaggccaagtgcctctcttccccttggtcgttagtcgagagcctcagggaaaacgccagccttcctgatctgatctaatttcgagcccccctgctgtgtgacagaatgattctctctgcacatggtcagccgcagatttttctcaaggtgaaagcaattagggcttcattccctcctcccccagctgctagaaataaaaggaagatggaagagaagcttctgccaaggtcagccagaatgcccagtcctgttcctgtaattggctctgccacctgctcacacctctcacaggttgttgtggtctcaggcattttggtgtcccccagggctgaggcagtgaagacagcaggagctactgcttttacatctctctccaggacaagaaagagggcatcttcaccctgccctgggtggggaatgtgcaggaactgtgtgagccaggcctgggcggcacacacagatggagctgagctgttctctcctttctctggaagaatcaaaacccaggca

SEQ ID NO: 4115 - DNA, 557 bp, Homo sapiens
  MAP TO CHR22_105.0; EXPRESSED IN LUNG, SIGNAL = 3.1; EXPRESSED IN FETAL LIVER, SIGNAL = 2.5; EXPRESSED IN BONE MARROW, SIGNAL = 2.1; EST_HUMAN HIT: BI771034.1, EVALUE 0.00e+00; SWISSPROT HIT: P19971, EVALUE 1.00e-33; NT HIT: M58602.1, EVALUE 0.00e+00
aggggtctgaattccatcagtggatctttttcctgctccaaggggcctggtctggagccagaggggccccaagcgctgtgctggggaacggggtggggagaactgtgctggggagcagggtggggagaagccttggtagggtcttggaggctttgggccaggcttgaggttgggagctgcctgtggatggactggttgctgcatgtgcggtataggctcccgtctggaaaggaggtggtttctaaccttgcagccacatgccgccagggcaggtgcgaggaccaggctgaccttgtcacccacaccccctgtggaatgcttgtccacaagctgctggcgccaggcctctggccactccagctgctgtcccgactgagccagggcctgggtcagcaccgaggtctcctccagatccatgccccgaagtcggatggccatcagcatggcccctggtatgtgggggtacgcgtgagggtggcagcccacagcggtggggcaccctggggccggtgctggtagtggggcaccgtcgcacccccagggacccaaagtctctc

SEQ ID NO: 4116 - DNA, 597 bp, Homo sapiens
  MAP TO AC004846.2; EXPRESSED IN PLACENTA, SIGNAL = 0.44; EXPRESSED IN ADULT LIVER, SIGNAL = 0.56; EXPRESSED IN FETAL LIVER, SIGNAL = 0.56; EST_HUMAN HIT: R94493.1, EVALUE 0.00e+00; SWISSPROT HIT: P49757, EVALUE 2.00e-39; NT HIT: AF109907.1, EVALUE 0.00e+00
aaggacctagagggctttcgaatttgtcagctctctaaacgcaaattatttgaagacattgctaaggtcttcattctctttattttcttgagctgaaacagataagatagtcgttggttcatcagttgcccctggcaacactgccccatccccatcctctcccacctctcctacttctgatgccacgacctctctggagatgaacaatcctcatgccatcccacgccggcatgctccaattgaacagcttgctcgccaaggctctttccgaggttttcctgctcttagccagaagatgtcaccctttaaacgccaactatccctacgcatcaatgagttgccttccactatgcagaggaagactgatttccccattaaaaatgcaggtaatgtagcatctacctgactcactgggtactcgagcactgaagcattctcatcacttcccatgaagacactaatcccattaaactaggcattcctctttccctgaggttcgttgatagttgtatcttttgtcatttcccatagtgggaaaactaaggtccgtggagggggatgtgaatccataatttctcttcaacaaacaggcagcag

SEQ ID NO: 4117 - DNA, 504 bp, Homo sapiens
  MAP TO AC012482.3; EXPRESSED IN FETAL LIVER, SIGNAL = 0.53; EXPRESSED IN BONE MARROW, SIGNAL = 0.54; EST_HUMAN HIT: H08544.1, EVALUE 2.00e-53; SWISSPROT HIT: O43525, EVALUE 1.00e-19; NT HIT: AF071488.1, EVALUE 0.00e+00
ccatggcaatgtcatacagctatttcacagtctgtccgatctggtgctttgttggcctagacatccacaaggcttcgtggatatttgtcttcttaaaatctctccctgcattttgaattatttctgaatacctctcaccttaaactctaaggttcatagggctttgaggggagcgcagtccctccagatgtgactgtctcacctcgtctgaaggtactttatcctggaaagcatgtcgagatgcccggcagaatactgctcaatcacatccttcacatcgtaaggcctcaaagtctccttgaatttttttttatagagacggaattgtagaattctgcaaggcaaagtagaggcatttgtgcatcccatgtggagagtgcggggagctataacagaaggctagcaaactccagggcagggggagaaaagaaccaaagataaaagagcttgctggaagaacttccaacgtttggttctggttctaccccttggaacacacagagt

SEQ ID NO: 4118 - DNA, 569 bp, Homo sapiens
  MAP TO AL139022.1; EXPRESSED IN PLACENTA, SIGNAL = 1.7; EXPRESSED IN FETAL LIVER, SIGNAL = 1.6; EXPRESSED IN LUNG, SIGNAL = 2.1; EXPRESSED IN ADULT LIVER, SIGNAL = 2.1; EXPRESSED IN BONE MARROW, SIGNAL = 1.7; EST_HUMAN HIT: BI766055.1, EVALUE 0.00e+00; NT HIT: X66867.1, EVALUE 0.00e+00; SWISSPROT HIT: P25912, EVALUE 2.00e-17
agctcacgctccagtctctccacggggcttccacggcaggacggtgacatcacaagccttctcttcagagttgggtgggattgcagagtgtctgctggctcccaggtccagctgggaaaggcgggagggaaatgaagtgtgtgagtgaacagccacccgaagggagctacttctgagcatcttgagcctcgggggccaacaagcaagcccttaggaagaacaggctggaccctgagtctgagactcggttactccccaagtctccagaaggcagtaacacactcccttggttgccttttagtccgtgcactggagaaggcgaggtcaagtgcccaactgcagaccaactacccctcctcagacaacagcctctacaccaacgccaagggcagcaccatctctgccttcgatgggggctcggactccagctcggagtctgagcctgaagagccccaaagcaggaagaagctccggatggaggccagctaagccactcggggcaggccagcaataaaaactgtctgtctccatcgtctcatcctcctttcagttcgttggtagagccctca

SEQ ID NO: 4119 - DNA, 584 bp, Homo sapiens
  MAP TO AL121976.2; EXPRESSED IN FETAL LIVER, SIGNAL = 0.41; EXPRESSED IN PLACENTA, SIGNAL = 0.34; EXPRESSED IN ADULT LIVER, SIGNAL = 0.5; EST_HUMAN HIT: BI858483.1, EVALUE 0.00e+00; SWISSPROT HIT: P31111, EVALUE 2.50e+00
aggtgacagttttgctgttttgttactgttcccacatgatatcatctcttctcaatttcatttgaagattatgaactcgtattggatgaaagctgctgtttttctgaaaaaggttagtgtcagtcaaacattttctggggctattttttatgttctttgatcctttagggtagctgtcttcttgctgaatacctgaagcttcactcatctttgagttttgaactttttgctgcagtttacagacctggagagaaaaaaaaatctaacattttagtcaaaaatatactaaaaatatattccaaaatagataggttgaattgatggtttaacgttaaaaagttaaaattgaacattaaaaaattcaattcattaagtttttaatttattgaacatctattacatgcctaacactgtgcttgtcaggtagaaatataatgagaaaaaagctcttactttcaaggagcttactgctcctattagtgaaaaaaagcacatatgtgacaactagagaatactctgagccaggataactttgaataagacaaaaagtgtatatgtaagaaggccaaagtcggataaggtca

SEQ ID NO: 4120 - DNA, 575 bp, Homo sapiens
  MAP TO AL078623.28; EXPRESSED IN FETAL LIVER, SIGNAL = 0.72; EXPRESSED IN PLACENTA, SIGNAL = 0.69; EXPRESSED IN LUNG, SIGNAL = 0.72; EXPRESSED IN BONE MARROW, SIGNAL = 0.57; EXPRESSED IN ADULT LIVER, SIGNAL = 0.73; NT HIT: AP003016.2, EVALUE 5.50e-01
tccagtgaaagtctggacccacttccaacctccaaaaaaaatacacacatacacatttttcagttgattgaaactgtataatcactgctggaaccattttctctgacctgttttagagaaatgctcattcaagatatgataatgttcaaatgtccagataacaaatatcaaacacatctctaaaatccttgagctgatgatagccagatttgttcccagaatctttggagactgttattaattataaatatctccacgttattgcattgttttcttcccatattcaaagtgctgatcttccttacctgttcaggtccaccgaacatgcagacttaataaatgatgtcttgtcaatgccatgcattaattggctattgccataataatgctgtataatcaaccatctcaaaactgggtgtcttacaacaactagcatttcccaagtctgcaggtctgtatctggggtggctttggctgggctcagcaggcagttctgctttaagctaaacatcaggtagacttgacatggcttgggtttgagcatgatccaagtgtctcttgtatccttgggccaa

SEQ ID NO: 4121 - DNA, 525 bp, Homo sapiens
  MAP TO AL139152.1; EXPRESSED IN ADULT LIVER, SIGNAL = 0.75; EXPRESSED IN BONE MARROW, SIGNAL = 0.58; EXPRESSED IN PLACENTA, SIGNAL = 0.74; EXPRESSED IN LUNG, SIGNAL = 0.62; EXPRESSED IN FETAL LIVER, SIGNAL = 0.71; EST_HUMAN HIT: AI417759.1, EVALUE 0.00e+00; SWISSPROT HIT: P32229, EVALUE 6.40e+00
tgcctacctgtaccccagacagacttttctgtcttagaactacctgtccctctttggacagtgtcttcctggtactgcacatgaagatgtcccgctctcccctgctcaaggagagagtgcctgacctgagctgggcccatcagatccagtacttacctggaataggaaaaagatggggagagtgaccaaagactacaaaaatctctgaagcttatctacttgagagagagtccctgaagatactggcctctcattcctgctatgtatatccaatgtgactgaactctgaataaaatatacaagttataacaatgtagcaattgacccagcaaacgaggacacaaacgtgttgaagggtaaggtggtgagaggcgtgtttgggggtggtggtgatgagcaagtatgtgaaggagaggtagtgcctaaacttgaaaatcaaaaagtaataatatctatttaggcataaggagataaataatgaaataattgcttctatgtgatgaaactctgggagtacacaagggc

SEQ ID NO: 4122 - DNA, 506 bp, Homo sapiens
  MAP TO AL121993.2; EXPRESSED IN FETAL LIVER, SIGNAL = 1.3; EXPRESSED IN BONE MARROW, SIGNAL = 1.3; EXPRESSED IN HEART, SIGNAL = 1.3; EXPRESSED IN LUNG, SIGNAL = 1.6; EXPRESSED IN ADULT LIVER, SIGNAL = 2.1; EXPRESSED IN PLACENTA, SIGNAL = 1.7; EST_HUMAN HIT: BG261113.1, EVALUE 1.00e-67; SWISSPROT HIT: Q9UNX4, EVALUE 9.00e-14; NT HIT: gi5803220, EVALUE 2.00e-58
tttagcaatacccaccaccgataaatccatatttgagatagtttttgttagaattagtaggaatagaaaaaacaaacaagaaaagttcttaatgagggaaagataagtaacaacacctgaagctttggttaccctaactctcatacgctgctataatgaattgaagtgggagaaaattttttaatatttcttgtattgcactccaggatgttatcggcttcaatatggctggtcttgattatctcaagagggaatgcgaggcaaaaagtgaagttatgttttttgctgatgctactagccacttggaagagaagaagaggaagaggaaaaagagggagaagttgattctaacgttgacttagaactgaaatgtggtatctttttttttttcaactttttcctttaaaggactcctaaactaagcacagaagagttggcgtcatcttaaaaataccaaataacagaagatcgcattgcagatgatatcaggatgtggtttccagctt

SEQ ID NO: 4123 - DNA, 597 bp, Homo sapiens
  MAP TO AL136381.1; EXPRESSED IN PLACENTA, SIGNAL = 0.76; EXPRESSED IN LUNG, SIGNAL = 1.1; EXPRESSED IN ADULT LIVER, SIGNAL = 1.1; EXPRESSED IN FETAL LIVER, SIGNAL = 0.67; SWISSPROT HIT: Q16513, EVALUE 4.00e-40; NT HIT: gi15297908, EVALUE 0.00e+00; EST_HUMAN HIT: AI671415.1, EVALUE 0.00e+00
gattttcatggccgatgttcactcaacttaaactccatgaaactgtttccagtgctcatatttacgctgaagtacaatgaggagccacttttgaagaagtattagaatggtacttttaaacaaatcttcacgtgtttcaataaaaacaacaacaacaaaaaactcagaagctattggtggcacagagagcaaatgaagggttgctatttttaagaggtcttcttgtgagtcagcttggtttcgcagtgtctagcaacttaacaccaatcagcaatgtagtcaaaatctctgaacatttcctgctcctcttccgaaagtatccttggttctcgaggtggagtcagaataggtgcttctgaggtaaattcatcatcaaaattactaacatcttctcgtcctcttatggtaggtataaatggtggctttacttttttgtccatcagagcgctccaatcaattagctggatcataaaataaaaaatgactagtttagtttgttaaatctaatcgctctagtttcataaaaaattttaaatagtcacacttacccggaaaaatgggtgcttttttacatcctctgcatctttctcgctagcc

SEQ ID NO: 4124 - DNA, 590 bp, Homo sapiens
  MAP TO AL138747.1; EXPRESSED IN FETAL LIVER, SIGNAL = 0.4; EXPRESSED IN ADULT LIVER, SIGNAL = 0.32; EST_HUMAN HIT: AA464948.1, EVALUE 2.00e-04; NT HIT: AF044083.1, EVALUE 1.00e-08; SWISSPROT HIT: P08548, EVALUE 4.00e-09
caccaaaacccattggaaacctactctcaagtgcatatggatggaacattctccaggataaaccacatgctagacaataaaacaaatctcaataaatttaaagaatttaaatcaagcaaagtatatcctctgaccacagtagaactaatttgaaattaataacaaaaagaaatttaggaaatataaggaaattgaaatacacacttctaaataaccaaaggatgaaagatgagatcacaaggaaaattagaaagtagtttgagattaataaaaatgaagacatgaaacaccaaaatgcattgaatgcagctaaagaagtgcttaagggagaaattacagttgtaaaatactacactaaaaatgaagacagaaagacatcctgtgttcatgatttggaaaacaatattgttaagatgtcagtgctcaccacagcaattaacagactcaatgcaattcgaatcaatatcgcaattgcctttttgcagaactaggaaacccaaacatataattcatatggaattgcaaggggccctgaataggcaaaacatcttggaaaagaaaaacagtgctcagggactcaaacttcccaa

SEQ ID NO: 4125 - DNA, 565 bp, Homo sapiens
  MAP TO AL136122.1; EXPRESSED IN FETAL LIVER, SIGNAL = 0.75; EXPRESSED IN PLACENTA, SIGNAL = 0.9; EXPRESSED IN ADULT LIVER, SIGNAL = 0.96; EXPRESSED IN BONE MARROW, SIGNAL = 0.72; NT HIT: AF153836.1, EVALUE 0.00e+00; SWISSPROT HIT: P31629, EVALUE 1.00e-65; EST_HUMAN HIT: BE767354.1, EVALUE 0.00e+00
agtgcatgctaccttcagagccaagctcctctcccagggacttctcaccctcaagccaccattcctctccaggatatgattcttcaccctgtcgagataattcaccaaagaggtatctgatacccaaaggagatttatctcccaggagacatttatcacctaggagagatctgtcacccatgagacatctttcaccaagaaaggaagctgcattgagaagagagatgtcccaaagagatgtttcaccaagaaggcatttgtctccaaggaggccagtgtctcctgggaaagatatcacagcaagaagagacctctctcctagaagagagagaagatacatgaccacaataagagcgccatctcccagaagggctttataccataacccaccattgtccatgggacagtatttgcaagcagagccaattgtattggggcctcctgtaagtataatccacttttctttctaatacataagtggaagcacattggtcctcctgataatgcactggtgtgaagtttagtagaacatgggtatctgtcatgggtggagtgaatctggcta

SEQ ID NO: 4126 - DNA, 533 bp, Homo sapiens
  MAP TO AJ239319.2; EXPRESSED IN FETAL LIVER, SIGNAL = 0.6; EXPRESSED IN BONE MARROW, SIGNAL = 0.61; EXPRESSED IN PLACENTA, SIGNAL = 0.7; EXPRESSED IN LUNG, SIGNAL = 0.62; EXPRESSED IN ADULT LIVER, SIGNAL = 0.55; NT HIT: AF217413.1, EVALUE 0.00e+00; EST_HUMAN HIT: BF530894.1, EVALUE 1.00e-101; SWISSPROT HIT: P14943, EVALUE 5.00e-15
gggcagagaatgctgagttctggacatttgcagtttctgcagtttgtctcccacctggaggcatgcacttcaaatggtctgcagacccctccttccaagctggataacaggtgggaggcagggagctgacccctcctctgttgacgatgctggacattgcagaaaggagcactgctttaagttaactatgtgggaagaactacactgcgtgctcattctctattcccacctcccctgttgaccctgcctgccgtcatcacccaaatcctccatccctctgccttcattgtcttcatgccctttgttgaatccaggtttcctgagtactggagatcaggctgccaagggcaactatgggctccttgaccagatccaggccctccgctgggtgagcgagaatattgccttcttcgggggagacccccgccggatcactgtctttggctcgggcattggtgcatcctgcgtcagcctcctcacgttgtcacatcactcagagggtgagtaactcgtggggcaaaacatgaactagc

SEQ ID NO: 4127 - DNA, 558 bp, Homo sapiens
  MAP TO AL136972.1; EXPRESSED IN FETAL LIVER, SIGNAL = 0.59; EXPRESSED IN BONE MARROW, SIGNAL = 0.72; EXPRESSED IN PLACENTA, SIGNAL = 0.72; EXPRESSED IN LUNG, SIGNAL = 0.7; EXPRESSED IN ADULT LIVER, SIGNAL = 0.69; NT HIT: gi7662227, EVALUE 2.00e-74; EST_HUMAN HIT: AL044225.1, EVALUE 3.00e-74; SWISSPROT HIT: Q05140, EVALUE 7.00e-21
aaaagcctccttcctccatcaaaaaaagaaaagtttacttagtttacctcatttccatgcaccatgagatgatgtgttgtcactaaagccttaaacacaaccacccagctactgtttgttgcccgctcaaagagagtgtcggccatctgaggaatattaacattggtctcgttggtagcctggatcaaatctatgaaaatagaagatattaatcaatgatattaacaattacatgcaaaaattcatttcaaacttggaacatataaacctgtttactaatatatgaccttaaaagtactttgataatagctgataacaaaatttaaaaaattaaactgtaatattttacccatggacatgtacatatattatttacccaatatatttatttattcttgagtatattttgctacttaattttcttctgtactctcttctgaatttacctgtttgctggtacttatgccatttttaaaattataaactccaggaaggctaagcctcatgtatttaatcttctttgttactgctataagcacaatgtctcaaatgtgggca

SEQ ID NO: 4128 - DNA, 544 bp, Homo sapiens
  MAP TO AC015938.3; EXPRESSED IN BONE MARROW, SIGNAL = 0.5; EXPRESSED IN PLACENTA, SIGNAL = 0.62; EXPRESSED IN ADULT LIVER, SIGNAL = 0.61; EXPRESSED IN FETAL LIVER, SIGNAL = 0.59; NT HIT: gi15311706, EVALUE 8.10e+00; SWISSPROT HIT: O15553, EVALUE 1.50e-01
aggtgggtgcagataagtggccccaggggccgggcccgggctgaggcccctctaactggcttgttgccatggagatgctagctgtgaatacaggcctagaagtccagctcaagcctccccttcctggcaagagaagacccccagctggggtgtgtttgtctggcaagggaactgcagagccatgccgtccacgccccctcccccccattatttaaagcaaaggcttccgttccttccattttccctcaggagggctgtcctgggtcaagggagaaaatggctgtcttgatggtcccgacactggggaatggtgggtccccttgcggttgggtgaccagggcaggcagggaaacacatgtggttacgcagccacacctgtgttccagaccgtacagccaaccccacccagcgaccagactcctgctggcatcggggacgctgagaggttcgggtgggtccccgagcaggggcaagtttatgtgaaaaccaccagctctcctgaggtggattctacctggagtcaggacacgtgagggttttcgtt

SEQ ID NO: 4129 - DNA, 586 bp, Homo sapiens
  MAP TO CHR22_167.0; EXPRESSED IN BONE MARROW, SIGNAL = 1.2; EXPRESSED IN PLACENTA, SIGNAL = 1.2; EXPRESSED IN LUNG, SIGNAL = 0.92; EXPRESSED IN FETAL LIVER, SIGNAL = 1.1; EXPRESSED IN ADULT LIVER, SIGNAL = 0.77; SWISSPROT HIT: Q13323, EVALUE 3.00e-24; NT HIT: AB051441.1, EVALUE 0.00e+00; EST_HUMAN HIT: BE269083.1, EVALUE 2.00e-91
gtcatcctgtgagagagcccccagactgctcagttcttaggggtccagtcatatgctgtctttttgccccagaggagaaatgtctgaagtaagacccctctccagagacatcttgatggagaccctcctgtatgagcagctcctggaacccccgaccatggaggttcttggcatgactgactctgaagaggacctggaccctatggaggacttcgattctttggaatgcatggagggcaggtaggtccccatggcctgccctaccccctgcctgatagtgacttcaggggtgggctggatgagcagacattctatgagcgggggagcgcctgcagatgcctcccaggcagggcctccgagaggaagatttcccggatgtgggcatggaggcttctgccctgggagcggcttcactttgctgccccaccctcccctgataccagctcacagacccctggacagccagcatgttcacagtctcaagatggacctggggcccctggctgtcaaaatggcacagtgtttgggcctcagggagctagacaggcccttagcgacctgctgaggacatcagggcctcttgaag

SEQ ID NO: 4130 - DNA, 519 bp, Homo sapiens
  MAP TO AC023120.3; EXPRESSED IN BONE MARROW, SIGNAL = 0.57; EXPRESSED IN ADULT LIVER, SIGNAL = 0.49; EXPRESSED IN FETAL LIVER, SIGNAL = 0.56; SWISSPROT HIT: O83644, EVALUE 6.30e+00; NT HIT: AJ276674.1, EVALUE 0.00e+00; EST_HUMAN HIT: N74655.1, EVALUE 0.00e+00
ccccttcctcctggatactcacttctccttctgtaggttctcaatctgctcagtcagtactctctcctcctgctgcatagctgcttgctgctgttctgtgatgtcagtctccatggctgcctcactagtcaaggtctcctctgagacatcagacacagaaggcaaccgaactacaacaggagacgatggacctggatagtttcctcgacgaatacgcccctttccctgcagagaaaaattcatgttagaaagtaaattgagtgactgcatcagttttacattgctcttttaggataacaagtgtatttccatcacaccaggtgaatgataagaataaatggaaacactctgcgaggcctaggatatttagtgagacatattcatacaacacatttaagttaaaatatttcttgcaggagtactggaaaacggatactttggtaggtgggagtgtaagaacccattgtgtactgagatgagtttcttcttttaatataagctgcatccattccaaacaaa

SEQ ID NO: 4131 - DNA, 584 bp, Homo sapiens
  MAP TO AC020550.2; EXPRESSED IN BONE MARROW, SIGNAL = 2.8; EXPRESSED IN FETAL LIVER, SIGNAL = 4.3; EXPRESSED IN ADULT LIVER, SIGNAL = 8.8; EXPRESSED IN PLACENTA, SIGNAL = 3.3; EXPRESSED IN LUNG, SIGNAL = 4.1; EST_HUMAN HIT: BG541335.1, EVALUE 0.00e+00; SWISSPROT HIT: P19226, EVALUE 3.00e-42; NT HIT: AJ250915.1, EVALUE 0.00e+00
aggccaagaggaggaatgagagaaggattaatttcctcaagttaacactttccttaggtccaaggaatcaatgccttaaagcacactgaagtttagaacactgtggtgacaacagacattcctacctctcctgatttccactggattagcacctttgctaatcttctcgaagccttccttggctatagagcgtgccagtacagtagcagtggtagtgccatccccagcttcttcatttgtgttattggcaacatcttgaacaagtttagctccaatgtttttgtatttatcttttaagtcaattgactttgcaacagtcacaccatcttttgttactttgggacttccccaactctgctcaataatcactgttcttccctagaagaaaaaaatgtaacaggatcagacataccctaaggatgatttacatttttaaaaatgagcagtcttcataataaagcaactacttcaaagtctcaacgtaagttgtgtcatttttatcagtcttgcagcatgaacctcaagggcaagtttatcgacattctttgtctacagacaaaatgacctgattctctgccaagagc

SEQ ID NO: 4132 - DNA, 539 bp, Homo sapiens
  MAP TO CHR21_42.0; EXPRESSED IN LUNG, SIGNAL =   2; EXPRESSED IN FETAL LIVER, SIGNAL = 0.51; NT HIT: gi14780106, EVALUE 0.00e+00; EST_HUMAN HIT: BE767617.1, EVALUE 1.00e-107; SWISSPROT HIT: Q9UHI8, EVALUE 1.00e-56
aaacactggtgaaatgccttgtatatatctttttggtacaacgtagactcctaagaggacagtctcacagctggtaccatcttcctcttacctgtctggtgaaaagaattgctgtgtcatagtgctctgcatcccggtcactgggtgggttgtgctgcttctgccagttgcaaaagttccgcagagtgagggcagcattggaggtcacttccggccccttctgttcatcgtggatgaccaagatcttcaccaccaccaggctaactgaattacgaatgctggggtgtttgtacaatctggctgccaccgaaaacaacgtgagaaggtaatgctttagaccactgccgtggaattctgccatcgactggtctgccacaagcatggtttccacatagcggtgactggacacaaatcgcttctttcttatgcttccagttcctgtaaagaaaaaaaaaagtttgcttatggtcaggctgtccaagaatagttaccttcctagcatatattaggaaagcctaaccagtcaaagcaaacaaagc

SEQ ID NO: 4133 - DNA, 564 bp, Homo sapiens
  MAP TO AJ239319.2; EXPRESSED IN FETAL LIVER, SIGNAL = 0.69; EXPRESSED IN BONE MARROW, SIGNAL = 0.82; EXPRESSED IN PLACENTA, SIGNAL = 1.1; EXPRESSED IN LUNG, SIGNAL = 0.89; EXPRESSED IN ADULT LIVER, SIGNAL = 0.86; NT HIT: gi11419842, EVALUE 0.00e+00; EST_HUMAN HIT: AI291780.1, EVALUE 0.00e+00
tatttccctctttccctcccctcttccttctcccttttcatctctcatttctttcctctctctcccttattgtcttattcctcccttaccttttttcttaccttattaaaaatttctctctctcatttgtcaccactccaccctgaccccaatgcctttgatttcctcattctctctttcttctgttttcctttgctcctcctcaggtcataaacgtggagcagagctctgtcttcttgatgccatctcgggttgaaatctccctggtcaaggctgacccaggatcctgggcccagctggagcaccctgatgcactagctaagaaggctagggcaggggttgtgttagagatggatgaggaagaatctgacgattcagatgatgatctgagctggacagaggaggaggaagaggaggaagcaatgggggaatagtgacaccagacagttgatgtctagataggacctcaatgattcccttagaatcttagataccaggatattgttggccatgtggcatcattgagcagcaggaggctgaaggaggggagaacaaaattgtcca

SEQ ID NO: 4134 - DNA, 535 bp, Homo sapiens
  MAP TO CHR22_16.0; EXPRESSED IN FETAL LIVER, SIGNAL = 0.94; EXPRESSED IN LUNG, SIGNAL = 0.87; EXPRESSED IN PLACENTA, SIGNAL = 0.9; EXPRESSED IN BONE MARROW, SIGNAL = 0.8; EXPRESSED IN ADULT LIVER, SIGNAL = 1.2; NT HIT: AF172642.1, EVALUE 1.00e-04; EST_HUMAN HIT: R20885.1, EVALUE 3.00e-03; SWISSPROT HIT: P09951, EVALUE 5.10e-02
tcaatgagcaggtcagcatctgccctctgtccacgtctagaaagggccaggtggagctggtgttctcaggccacaagccccagctgccccacaggtcattcattctttcactcactcactcattcacctgacagctgttggtgaatacctcaatgtcccaggcaccctaccccctgctgaggatgcagcagagaatgagacaagatcccatccctcaaggagctgacattctgctggggggagcctgaggattaataaacaagtataaaatcagtagaggtacaagtaccatgaggaggaagggggtggagacaggagaaagaccggctttgctgttagagctgagacagaccccgactttggggacagcactctgaggatgcccctgtggcctcaggtctttccagtccaccctgtcccctgctcatggaggtgcagtgacccccttactccccacactctgcctcccttggagcccctgcccctccctccttggttggcttccaatcttggggcaaagccagatctctgaggg

SEQ ID NO: 4135 - DNA, 509 bp, Homo sapiens
  MAP TO CHR22_110.0; EXPRESSED IN FETAL LIVER, SIGNAL = 0.69; EXPRESSED IN LUNG, SIGNAL = 0.65; EXPRESSED IN ADULT LIVER, SIGNAL = 0.77; EXPRESSED IN BONE MARROW, SIGNAL = 0.7; SWISSPROT HIT: Q13415, EVALUE 5.50e-01; NT HIT: gi14779641, EVALUE 2.00e-77; EST_HUMAN HIT: BF947559.1, EVALUE 1.00e-116
tttctttggaaagctggaccggccgtgccctgcgtgtgggagctggctcgtggggcttggaggtgtgtgtgggagggacggtggcagggcggggtctctgggtcggggttttctttggaaagctggaccggctgtgccctgtgtgtgggagctggctcgtggggcttggaggtggcgagcgggagagtgaccacgcccctctcttgcagggaacccgagcgtcatgttagggtgaagcagaggacctcagtgctgaacatgctaaggaggttggacaaaatcaggttcagaggtcacaagagagatgacttcctcgatctagcggagtctccaaatgcctcggacaccgaatgcagcgacgaaatccccctgaaggtaccgcggacctcgccccgggacagcgaggagctgagggaccctgtgagtacctgtcctcgtcccccggtgtgggctggggtgtcgtccccgtcctctgtggccgggccaagcgtggactcaggcagattcgt

SEQ ID NO: 4136 - DNA, 575 bp, Homo sapiens
  MAP TO AC012661.4; EXPRESSED IN FETAL LIVER, SIGNAL = 0.6; EXPRESSED IN LUNG, SIGNAL = 0.81; EXPRESSED IN BONE MARROW, SIGNAL = 0.55; EXPRESSED IN ADULT LIVER, SIGNAL = 0.69; SWISSPROT HIT: O14581, EVALUE 7.00e-43; EST_HUMAN HIT: BI087915.1, EVALUE 0.00e+00; NT HIT: gi16163994, EVALUE 0.00e+00
tgcttgcatccagcattaagggctggtttttatcttttatttttccaatcctctttacttctcaaggtgtccaagtcacacagagccacggaatctcacaggtgtctgagaattcctcctcctgggactctcagaggatccagaactgcagccggtcctcgctttgctgtccctgtccctgtccatgtatatggtcacggtgctgaggaacctgctcagcatcctggctgtcagctctgactccccgctccacacccccatgtgcttcttcctctccaaactgtgctgagctgacatcggtttcaccttggccatggttcccaagatgattgtgaacatgcagtcgcatagcagagtcatctcttatgagggctgcctgacacggatgtctttctttgtcctttttgcatgtatggaagacatgctcctgactgtgatggcctatgactgctttgtagccatctgtcgccctctgcactacccagtcatcgtgaatcctcacctctgtgtcttcttcgtcttggtgtcctttttccttagcccgttggattcccagctgcacagttggattgtgt

SEQ ID NO: 4137 - DNA, 567 bp, Homo sapiens
  MAP TO AC018692.5; EXPRESSED IN LUNG, SIGNAL = 6.4; EXPRESSED IN ADULT LIVER, SIGNAL = 5.4; EXPRESSED IN FETAL LIVER, SIGNAL = 4.1; EXPRESSED IN BONE MARROW, SIGNAL = 5.2; SWISSPROT HIT: Q04836, EVALUE 4.10e+00; NT HIT: AL163210.2, EVALUE 1.00e-101; EST_HUMAN HIT: BE729966.1, EVALUE 3.00e-96
gctctctcttagcctgctgccatccatgtaagatgtgacttgctcctacttacctttcaccatgattgtgaggccttcccagccacgtggaactgtaagttgattaaacctccttcttttgtaaattgcccagtctcaggtctgtctatcagcagcatgaaaatggaataatacagtaaattggtaccagtagagtgggctctactgaaaagtgcctgaaaatgtggaagcaactttagaactgggtaacaggcagaggttgaaacagcttggaacactcagaaggagataggaaaatgtggcaacgtttagaaccacctagagacttgttgaatggctttgcctaaaatgatgttaatgatacggacaatgaaatccaggatgaggtggtctccaatggagatgaggatcttggcgactagaacaaaggtgacttttgttatgttttagcaaagagactggtggcattgtgctccaggcctagagatttgtggaactttgaacttgagaaagatgatttagggtatctcatggaagaaatttctaagcagcaaagcattcaagatg

SEQ ID NO: 4138 - DNA, 535 bp, Homo sapiens
  MAP TO AC013718.3; EXPRESSED IN BONE MARROW, SIGNAL = 0.5; EXPRESSED IN ADULT LIVER, SIGNAL = 0.62; EXPRESSED IN FETAL LIVER, SIGNAL = 0.62; EST_HUMAN HIT: BF753863.1, EVALUE 9.00e-87; NT HIT: gi15296146, EVALUE 0.00e+00; SWISSPROT HIT: Q09328, EVALUE 2.00e-35
gaggattgcagacgaagagggtgggcaccatttcatttctaaagtaggacaagacaactgaacatccccccatgcctcaagatgggggctcacagggccagtgacgaggaaaggctctgtcccttcatcaccaacacttgtgcctttctcttcctcttcaggtacaaggtgacctgccaaagctcagagctggccaaggacatcctggtgccctcctttgaccctaagaataagcactgtgtgtttcaaggtgacctcctgctcttcagctgtgcaggcgcccaccccaggcaccagagggtctgcccctgccgggacttcatcaagggccaggtggctctctgcaaagactgcctatagcagctacctgctcagccctgcaccatgctgctggggaagacagtggccccagccccgtcaggcagggccagggacagaagtcatgcagggactctggcaagagcctgaactttttcgtagaaggttctgaattggcattgcccttgctgcactccgagcaacccagtggagtctt

SEQ ID NO: 4139 - DNA, 581 bp, Homo sapiens
  MAP TO CHR21_19.0; EXPRESSED IN HEART, SIGNAL = 1.2; EXPRESSED IN PLACENTA, SIGNAL = 1.4; EXPRESSED IN LUNG, SIGNAL = 4.8; EXPRESSED IN ADULT LIVER, SIGNAL = 1.5; EXPRESSED IN FETAL LIVER, SIGNAL = 1.9; EXPRESSED IN BONE MARROW, SIGNAL = 2.5; EST_HUMAN HIT: BG995469.1, EVALUE 5.20e-02; NT HIT: AJ251029.1, EVALUE 5.50e-01; SWISSPROT HIT: P08548, EVALUE 5.00e-03
ttaatcacgtaccctgcaaccttgctataatcacttattagtttcaggagtcttttgactgttcttttatattttctacatagataataatgtcgtctacatctgaagatagttttctttctttccaatctgtaactatatgtcttgtcttgtcttatcggattagtgagggcttccggtatgatgttgtaaagaagcggtaaatggacatccttgccttgttattgatctcagcagcaagtctgtgtgtatttttcaaaattctttgtatctgaattttggaagaaaaaactttgaagcttccacataggttttagtcactgaataaagttgtattttgtactgcaataaattaaataggttactaaaagcttgcaatttatatcaaatctagtgatagctaacttttacatagtgcttactatatgccaaaaaatcttcttaaagattcacatgtactgattcatttaatattgtgttattatttttctagtaatcaggtaagacaccaggagcaggtggaggtttagtaagttgcacagccactttgctacagagccagcttgcagaatcagggagtc

SEQ ID NO: 4140 - DNA, 513 bp, Homo sapiens
  MAP TO AL136122.1; EXPRESSED IN FETAL LIVER, SIGNAL = 0.63; EXPRESSED IN BONE MARROW, SIGNAL = 0.46; EXPRESSED IN PLACENTA, SIGNAL = 0.5; EXPRESSED IN LUNG, SIGNAL = 0.54; EXPRESSED IN ADULT LIVER, SIGNAL = 0.81; NT HIT: AE007775.1, EVALUE 1.20e-01
tgaggaatgttaaggaccgctaggaaaaaaatacatcaaacccaatatatgagagaattgattatgaatgctctagatttttaccccaaccctaaactcatcccattcttccctaggtgccaggactggtgctcatctttgcccttcaacgctgtagcctcagttccaaggaggagaaggatcagctgcgtgccggggacaacttcctcatcatcctcccagggaagtctgtcggaggttgtttgtaatcaagccttaaaaatctatgacatgcagctgcactgtctgtgatggcacgtacgtcaaggagaaaaattcatgatttgggaatgcatagagctatgttttgctcctccacaccctagtcagatgcagagttgttttggtcctctacagagttataaataaaaagccagctctaaagatttgctgaagcaaacccaaggccgaaggagcaatccttcttaattgacctgacttacacaatgcttctggcatatggtcttgctctcc

SEQ ID NO: 4141 - DNA, 532 bp, Homo sapiens
  MAP TO AL135920.4; EXPRESSED IN FETAL LIVER, SIGNAL = 0.97; EXPRESSED IN PLACENTA, SIGNAL = 1.1; EXPRESSED IN LUNG, SIGNAL = 2.3; EXPRESSED IN ADULT LIVER, SIGNAL = 1.2; SWISSPROT HIT: Q16781, EVALUE 1.00e-63; NT HIT: gi14763418, EVALUE 0.00e+00; EST_HUMAN HIT: BI822117.1, EVALUE 0.00e+00
ttgttttaaaatcccatgcacatatatttcgtatatagctgtttaatacatgattaaatgatattacattttaagtagaaataaaagtataaagtactggatgagaccagaggccgaactcaggttctgatggccgagctgccccacaggatcatcaaggaaacccagcgtttgctggcagagccagttcctggcatcaaagcagaaccagatgaaagcaacgcccgttattttcatgtggtcattgctggggaatcaaaggattccccctttgagggagggacttttaaacgtgaactattacttgcagaagaatacccaatggcagcccctaaagtacgtttcatgaccaaaatttatcatccaaatgtagacaagttggaaagaataagttgagatattttgaaagataagtggtccccagccctgcagatccgcacagttctgctatcgatccaggccttgttaaatgctcccaatccagatgatccattagcaaatgatgtagtggagcagtggaagaccaacgaag

SEQ ID NO: 4142 - DNA, 559 bp, Homo sapiens
  MAP TO AL096794.3; EXPRESSED IN BONE MARROW, SIGNAL = 0.67; EXPRESSED IN FETAL LIVER, SIGNAL = 0.63; NT HIT: AE007390.1, EVALUE 5.30e-01; SWISSPROT HIT: P44700, EVALUE 2.40e+00; EST_HUMAN HIT: BG006860.1, EVALUE 7.80e-01
tggcagggaatttcattagcttaatgctcatgtggggggttctgcgcttacagccggaaggctcagcaggacacagggttggtttaatgaaccatgcaaatctcaaaagtggagcccactcctggaatagaaaaacgcacctgattcttagactgccttatcatatggccaaaaggaaggatgatcttctctatggttttgtgaatttttaggtgctttctgtcaggccactctgactcccaaaggaaataatttttaaaaccattgccaagccaaaatggaaggtggaattgcctaatattttagagaaaagaatcacacaactctatagaatatgaggtataacttacaggcttggctttgatcctttgccatctttagaaataaatgtttctggagccagaggccagaaataaacaccatgttttatccacagggagaaccatattctgccctgtcccttatacacagtaaaatgctttgaacttttctggacatcattagggatgtgtaaagccaacattctgactctgtaagagcatcacgggacatccttctt

SEQ ID NO: 4143 - DNA, 530 bp, Homo sapiens
  MAP TO AL137855.1; EXPRESSED IN FETAL LIVER, SIGNAL = 0.72; EXPRESSED IN PLACENTA, SIGNAL = 0.73; EXPRESSED IN LUNG, SIGNAL = 0.79; EXPRESSED IN ADULT LIVER, SIGNAL = 0.84; EXPRESSED IN BONE MARROW, SIGNAL = 0.72; NT HIT: AF408198.1, EVALUE 2.00e-52; EST_HUMAN HIT: AW996156.1, EVALUE 8.00e-44; SWISSPROT HIT: Q00713, EVALUE 2.90e+00
taaaaggagtcctccgcaaggcttcccttttaataaaaagcagcccccaaatcatttcttttctaacaaagagcagcctgaaaaatcaagtcgcaaaagtagaaaagcaagctggaaacttgcatgggtgaatgccagcagccgtgccaataaaaaggggctacctggaagctaggtatgttgaacatggaggctccatcttcccttttgtcaccacctgtacaataaggaacaagcaacatagctccatccaggtagagaacccatctgcataataaaattggggggtggggtggccagattttcacatgctatgcaaatggcacacctggtccaatcaatcttgtgcgtaagtcagacaccacctcctcaagctcatctataaaatctcctgcattctgccgcagaaccagcaacccattttctctgggacccttctctgtagcaagagagctcttttttttctttcacctattaaacttccactcttaacctcactctggtgtgtctgcatccttgttttctgaggc

SEQ ID NO: 4144 - DNA, 510 bp, Homo sapiens
  MAP TO CHR22_28.0; EXPRESSED IN FETAL LIVER, SIGNAL = 6.3; EXPRESSED IN BONE MARROW, SIGNAL = 6.1; EXPRESSED IN PLACENTA, SIGNAL = 6.6; EXPRESSED IN LUNG, SIGNAL = 6.6; EXPRESSED IN ADULT LIVER, SIGNAL =   7; EST_HUMAN HIT: BG770644.1, EVALUE 9.00e-96; SWISSPROT HIT: P33992, EVALUE 2.00e-28; NT HIT: X74795.2, EVALUE 6.00e-96
tgggaccaagttctctttgcccaggcctagaatctgtgtgtgtgtgtgtgtgtgtgtgtgtgtgtgtgtgtgtgtgtgtgtgtgtgtgtgtgtgtaaacgtgtatataagaaggcatctttgccatctcctcccccttttcgtcgtctgtcgcctgttaggctgggatcaccaccaccctgaactcccgctgctccgtcctggctgctgccaactcagtgttcggccgctgggatgagacgaagggggaggacaacattgacttcatgcccaccatcttgtcgcgcttcgacatgatcttcatcgtcaaggatgagcacaatgaggagagggatgtggtacgtccaggggcagggctggtggccatgggacctgcctccaggcaggcttgtgattgtgtgggaaggagaatggagaacaagggccttggctggcaaagtcctgactgtcaggctgtgaaattggggagcacgtgagagggcggttgttgtggactgcagaggattgaagc

SEQ ID NO: 4145 - DNA, 574 bp, Homo sapiens
  MAP TO AL160236.1; EXPRESSED IN PLACENTA, SIGNAL = 0.49; EXPRESSED IN ADULT LIVER, SIGNAL = 0.41; EXPRESSED IN FETAL LIVER, SIGNAL = 0.42; EST_HUMAN HIT: AL532540.1, EVALUE 8.10e-01; SWISSPROT HIT: P46963, EVALUE 7.20e+00
tggttggaattttaccagggaaatatgatggttcaagggataggcaagggattaaataacatactacaaaacctcaactggataaagagggaagtaagaatgagtgtggggggtcagtgcaaaggtggtagaatcaatgaattgatagaagtcttggtaggggtgaaaactgtcagagttgaagtacttgagagggtgagttagaaacaaaggagatggtggtggcagatgggcagatactaacaaatgctattttggtaatgacaagatcagtggtatgaccataggagaaaataagtggccagtgtaggtagagaatatgatcattagagaagaagaggttcaggaactgaaagcattagaaggattagctacatgcatattgaaatcatccagaattataacaggggtaatactgaagagaactaaaaggtgagtagaagctaaaatttagctaaaactttcatgaaatgacaggaaatggtctaggagtctatagatgacaatagtaaggagagccgtagatggtatacattcatgagattaaaagctggggggttcaaggagaggaaga

SEQ ID NO: 4146 - DNA, 590 bp, Homo sapiens
  MAP TO AL135926.3; EXPRESSED IN BONE MARROW, SIGNAL = 0.76; EXPRESSED IN PLACENTA, SIGNAL = 0.46; EXPRESSED IN FETAL LIVER, SIGNAL = 0.74; SWISSPROT HIT: P08547, EVALUE 6.00e-27; NT HIT: AB026898.1, EVALUE 3.00e-21; EST_HUMAN HIT: AU136217.1, EVALUE 3.00e-19
tgaaatgtttgctattttggtaggtacaaagcataccttattttttaagattacactcaactactagtgaagttaatttttttacatattaatccacttgcattttctatgtaaactgttaatatcttttttttaaagacagtgttttcaataagtggtggtgtaataactggacatccacatgcaaagaaaaaatgaacctagacacagaccttacacccttcacaaaaatttactcaaaatggatcacagacctaaatgtaatccacaaagttacaaaactcttagaagataatagaggagaaaatatagataaccttgagtatggcaatgactttttagatacaacaccaaaggtatggtccatgaaagaaataattggtatgctggactttattaaaagtaaaaacttctgctctgcagaagacaatgtcaatagaataagaagaaaagccacaggatgggagaaaaatagctgcaaaagacaaatctggtaaagaattgttattcaaaatttatgaagaactcttagaactcaagaataagaaacaaaccaccagatattaaaatgggccaaagaccataacaga

SEQ ID NO: 4147 - DNA, 515 bp, Homo sapiens
  MAP TO AL132671.19; EXPRESSED IN FETAL LIVER, SIGNAL = 0.76; EXPRESSED IN LUNG, SIGNAL = 0.56; EXPRESSED IN ADULT LIVER, SIGNAL = 0.42; EST_HUMAN HIT: AW610048.1, EVALUE 1.80e-01; SWISSPROT HIT: P08922, EVALUE 2.00e-45; NT HIT: gi14756936, EVALUE 0.00e+00
ttgggaatgctgtctccttcaatgcagccaaatgagcggcatgaggaatgaacactgtcctagcctcatcaacaaatgatccctggtgattatcggggtagcggatattactgcccaattgctctcccatttgagatgaggctgtaggtgaatttatggagaatccttggtttgcccttgcagatgtcatcctgatcagtgatattattgaactctttgaattaggcccttctgcctggcagaactggacctatgaggtgaaagtatccacccaagaccctcctgaagtcactcatattttcttgaacataagtggaaccatgctgaatgtacctgagctgcagagtgctatgaaatacaaggtttctgtgagagcaagttctccaaagaggccaggcccctggtcagagccctcagtgggtactaccctggtgccaggtgagaaaatgttctggatttagggagtgactctcacaaaaagaggactagctgagtgccctttaaatttccttgcc

SEQ ID NO: 4148 - DNA, 576 bp, Homo sapiens
  MAP TO AL135909.3; EXPRESSED IN FETAL LIVER, SIGNAL = 0.41; EXPRESSED IN PLACENTA, SIGNAL = 0.47; EXPRESSED IN LUNG, SIGNAL = 0.48; NT HIT: U28757.1, EVALUE 2.20e+00; EST_HUMAN HIT: AA416626.1, EVALUE 3.00e-03
tagggtccgttggtcgttagtatttgttattaatagaatgccattgccttctttcttgtgtcaaagcaagttctgcttcaaatggaaaatgtgccctcttggagctgtcagtgtccctcctccttcctcacctcaccttccttggttgtccatgcttaccttgtatttgctttgagtctcccctgaatccccacacgtggtgggtccactggaattctgtgtccagggggcatcgcgaacactgtatgtgaatgagcagcaaggatcaatggacatgcatgttgcatgtcactactcagctcacatgcatgctccgttttcatgttggagtacacctgcaagatccgagttcaaaggtattaaggattcattaaggattaataatttattaatccttattaaagattttaccatggcaacagcagaatgttaaaccggatatgagatgcttgtgagttcagggccctgggtaggtcactcaactgtgatgctaactttgatcacagagaaagggaggccatggcatgttgaacacccctaagtgggaatcacgcttctgcattacaaccagaggca

SEQ ID NO: 4149 - DNA, 593 bp, Homo sapiens
  MAP TO AL160231.1; EXPRESSED IN BONE MARROW, SIGNAL = 0.58; EXPRESSED IN FETAL LIVER, SIGNAL =   2; NT HIT: gi4557887, EVALUE 0.00e+00; EST_HUMAN HIT: BG822552.1, EVALUE 0.00e+00; SWISSPROT HIT: P05783, EVALUE 7.00e-74
ctgcagctgagtgacattggtgtcatcagtgatcttgtggagcccatggatgtcgctctccacagactggcgcatgaccattctgtctcatagttgactctaaagtcatcagcagcaagatgggcactgtcaatctgcagaacgatgcaggcatggctcacagtatttgcaaagatctgagccctcagatccttgatgttcttgaagtaatgcccccaatctctgacctggggtcccttcttctgcaggtgctcctgcattttgctctccagcttccatttcttggtctccagactcctcactctgtccaggcagtaggccagggagtcgttcaggccttgcatggtctccttctcattctggatgccctccactcctgccagacccctggccatccccacagccaggcccccagaccccaagttgccccagaaactggtggagtgggacatggagatctgggagcccaagcccccagcacctgcatagatgttggccatgctgctgactggcagggcgccatagcttggcggcttgatagagccaagggactggtagttagtagagaacatggtggaccaagtggtgaagct

SEQ ID NO: 4150 - DNA, 508 bp, Homo sapiens
  MAP TO AC011802.4; EXPRESSED IN PLACENTA, SIGNAL = 0.63; EXPRESSED IN BONE MARROW, SIGNAL = 0.69; EXPRESSED IN LUNG, SIGNAL = 0.64; EXPRESSED IN ADULT LIVER, SIGNAL = 0.74; EXPRESSED IN FETAL LIVER, SIGNAL = 0.69; SWISSPROT HIT: P35584, EVALUE 3.20e-01; NT HIT: AL163302.2, EVALUE 7.50e+00
gggcaacttgatgtcctcactcatgaggcccagggggccaggcggtgggctgcaggggctgggtgcccccagcgtctcccagggcagctctggcctcccagtgccaagctccttccaggaatttgaaagggccaggccggtaggggtggggctgggggtcccccctgggcagaggatgtggcctggggggaaaaggagggggacctggggacagtgggagggccaggagccaagccctaaacagggaatgcaaagcttctgcccccagctgccctacgaggtggccaagaaagagaggctcagcctgaggaggaagaagaagcctggtgggtgggggaccaagggccatgctctccccgccacccccgcccccacccagccagcagtgagctacgggggaaattagtcaatcctgattctgtgcggggcatcgctgggcaggtcactgttgctctggtgtatggctcgaggcaggaggagggagcacagttcatgcttccgtttgtca

SEQ ID NO: 4151 - DNA, 568 bp, Homo sapiens
  MAP TO AC025475.2; EXPRESSED IN BONE MARROW, SIGNAL = 0.76; EXPRESSED IN LUNG, SIGNAL = 1.2; EXPRESSED IN ADULT LIVER, SIGNAL = 0.81; EXPRESSED IN FETAL LIVER, SIGNAL = 0.77; EST_HUMAN HIT: BG955121.1, EVALUE 3.00e-77; SWISSPROT HIT: P07572, EVALUE 9.40e-02; NT HIT: AL163209.2, EVALUE 1.00e-115
atcgactctccggatttgtgtcataatcttattcagagagaccttgatcacttttcgctcccacaagatttcacactggtccattttattaatgacattatgctgattggatccagtgagcaagaagtagcaaacacactgaacttattggtgaaacatttgtgtgctagaggatgggaaataaatccaactaaaattcagggaccttctacctcagtaaaatttctaggggtccagtggtgtggggcctattggaatattccttctaaggtgaagggtaagttgctgcatttcacccttcctacaactaagaaagaggcacaaacctagtgggcctatttagattttgaaggaaacattcctcttttgggtgtgatactcagcccatttatcgagtgacctgaaaagatgccagttttgagtggggtccaggacaggagaaggctctgcaacaggtacaagcttctgtctaagctgctctggcatttgggccatatgaaccagcagatccaatggtgcttgaggtgtcagtggcagatagggatgctctttggagcctttgtcaagc

SEQ ID NO: 4152 - DNA, 593 bp, Homo sapiens
  MAP TO AF168787.1; EXPRESSED IN FETAL LIVER, SIGNAL = 9.8; EXPRESSED IN PLACENTA, SIGNAL = 7.7; EXPRESSED IN BONE MARROW, SIGNAL = 2.4; EXPRESSED IN LUNG, SIGNAL = 3.1; EXPRESSED IN ADULT LIVER, SIGNAL = 6.3; NT HIT: gi15314182, EVALUE 6.00e-75; SWISSPROT HIT: P38570, EVALUE 2.00e-21
tgcctagcaatcagacatgcagagctgaagcagagccctcgagctccactcaggagcctgagtttcacccagcccgggccctggcccactgtgcaccgtgggacccactcctttcccttgggggcctccagattccccatcggtcataaggggtggaggctttccccagcaggtacctgctctccctccagcactggcaggaagctggcctctctgccctccttctggagctcaaacacggccccatgatgtttgtaccgtggagcccccgcgatgtaggagaggctgcaggtcttgtgcagcacggccacagcgtaacctggggcaagggtggtgtggctgtgaacacaccgtgtgctcccacctggcctctctcttggccccggcaccttcccagtcaggccttcaaagtggcctggggaggggggcaaaataggagagactgtctttctcactatgttaaaaatcggcatcagcgagcactctcactttgccagtcacacacatccccatcacacagatatgatgcacacgctgtctgtcacgtatgcagctttgctcgaaatactcgttcgcacacattcactacccac

SEQ ID NO: 4153 - DNA, 525 bp, Homo sapiens
  MAP TO AC017082.3; EXPRESSED IN FETAL LIVER, SIGNAL = 0.58; EXPRESSED IN LUNG, SIGNAL = 0.98; EXPRESSED IN BONE MARROW, SIGNAL = 0.64; NT HIT: AL163246.2, EVALUE 1.00e-121; EST_HUMAN HIT: AA403053.1, EVALUE 1.00e-113; SWISSPROT HIT: P27401, EVALUE 3.00e-05
aacgggtaccaggagatgtgttaatttgctcaagcaattaaaccacaattggtacagcagctgcaattggagtcaccacttggttaagcttacaataatccactgtcattctccaagatccatctgtcttctgcacagctcaaataggagagttgaacagggatgtggtgggaatcaccacccctgcatctttcaagtccttgatggtggcactaatctccgcaatcccttggagaaacaatattgtttttatttactatttttctaggtagaggcagctctaatggcttttatttggcctttcccatcatcattgccctcaccccactagtcagggagccaatgtgggggttctgtcagctgctaaatgtcaatggcaattatgcattctggcactgggaaaatgaccacagaatgagtccgtggacccactggagccactgtaagtcagacctgagctaaaactccataaattacctgaccttcataagcccctactttaactggagaaccacaacgacgttt

SEQ ID NO: 4154 - DNA, 511 bp, Homo sapiens
  MAP TO AC025176.1; EXPRESSED IN PLACENTA, SIGNAL = 0.72; EXPRESSED IN FETAL LIVER, SIGNAL = 0.53; EXPRESSED IN ADULT LIVER, SIGNAL = 0.49; EXPRESSED IN BONE MARROW, SIGNAL = 0.54; SWISSPROT HIT: Q9UKP5, EVALUE 1.00e-37; NT HIT: gi14727533, EVALUE 1.00e-117
agggtgagctgatgtttcaagttaaaaaaaaaaaaaaacccttaaacaagatttaacaatccactaaaactgtcatattatctaaaaatgaatgataaggtcatctttaaatgtatttttatggaactgaaacattactagaccaattttttaccattttagacaggtaaattcttatcattatttacttcacagcaaaaatttatgaccttagtcaaaaacacaacaaatatgaagtaaaatattatatagagggatcaaacttacaatattcatcacactcaaaatgtaatgttcaatgtctttgcggccatggtagcccaccatcattttgtctgccactaccaatgtctccacaaaccgttcaatgctcactgatctcttctgtctgtggtggatatgtgtgttgttaattggtagtgaataagaaacagtggatgtgtcattcagccaccaaggtttgccacttcttgtgaaatctacaataaaagcagccaattcagataggttc

SEQ ID NO: 4155 - DNA, 565 bp, Homo sapiens
  MAP TO AC020721.4; EXPRESSED IN FETAL LIVER, SIGNAL = 0.49; EXPRESSED IN BONE MARROW, SIGNAL = 0.68; NT HIT: AL163284.2, EVALUE 8.40e+00; SWISSPROT HIT: Q06473, EVALUE 9.20e+00
taaacatgggcaaaattgggtccctaatcctgaccattattattatagtgttgcacatgcggtgactgtcttaattaccatgtgctgttcttttcatactctagaaatggactgagtggaccacaaaatgcatttcaaaagacaggtaatctgtggaaagaatggaaactttctttatctttgtacgaagaggcctatgtttcacaaacatggtaagaacagaaagatgattcttttagcatggaattctgattagaaaatgaacaggatgtatttgttgtatgtgtgagtgtgtgagagagaaaaggaagaataagtgaaggggaatatccaagttgtctaatttcctttcttcaccaaaggatactgaagcaggatcccacacttgaagccccacacttgcagaaagcaacaactgtttgtctagatttctttgggaaagaagatgagaaggatcaggtagttgatattctgtaaagtgctggcagtataataaagggtcagcatctccttaagagtgagctgtgtccaatgggacattctaagaggaagggttttgggtcat

SEQ ID NO: 4156 - DNA, 520 bp, Homo sapiens
  MAP TO AC015889.3; EXPRESSED IN FETAL LIVER, SIGNAL = 0.4; EXPRESSED IN BONE MARROW, SIGNAL = 0.46; EXPRESSED IN PLACENTA, SIGNAL = 0.45; EXPRESSED IN ADULT LIVER, SIGNAL = 0.38; NT HIT: AJ012008.1, EVALUE 7.70e+00; EST_HUMAN HIT: AV721843.1, EVALUE 2.90e+00; SWISSPROT HIT: P34708, EVALUE 3.70e+00
cacaagcccaatgtgtgaactggaggccaaggggctcagttggaaagaaaggtgggggtcctcagccttcctcttccccattcacctttccaaaggtttgagggtctcctctgctctgcagagcatggtctggaaacgcacaagaccatgcttcccctagtggtcagtggcatgtttgactgcggtcggagcctcagcttctcctgccccgttgcccagtcaccatgcctggtctcacctcttctccccaggcctcatccagctcaactactcatggagatgcagatgctgctagctcactcccattctcccctcatcttcaccatcagaagtggagggggtgatgcctggctcatgatggtcctgtgcgaaaggagggagaacaagcccacagtaggccttcacccagaggtggctactatgatcacctagatatgcatgccctgaaagctcatgagtgcacaggaagtggagggatagcctggcatcttcctgaaaaacctacccctgaacacaagga

SEQ ID NO: 4157 - DNA, 550 bp, Homo sapiens
  MAP TO AC015833.3; EXPRESSED IN FETAL LIVER, SIGNAL = 0.48; EXPRESSED IN PLACENTA, SIGNAL = 0.51; EXPRESSED IN ADULT LIVER, SIGNAL = 0.59; SWISSPROT HIT: P48380, EVALUE 3.00e-26; NT HIT: gi16160675, EVALUE 6.00e-84; EST_HUMAN HIT: BI011353.1, EVALUE 5.00e-05
gattgatgttttggccatcctagaaataaaccatgaactgctctcttgaggtttcagtgtgtgtatatagctcccatttgtactgatttgggggactgtggtagttatttcatcctcatggaattactatcatatctgcctttcataccgtcagaaaatacaaatgtgcatagacagctctgggggagtgttttatatatctgtctatctctctcggtatatatagccagctgtatggcaccagtgcaatggtggtatagttctaacctcagtaatatttggtaaacttaaactatttttaaagtccattttcttttttatcctcatttgccatctattcatttgctacatttattcacaccagcaatctgagtgaaatagaaagtcgacttccgaaagcaaagctgataactctgtgcaaacatgagtctatcctgaaatggatgtgtaactgtgaccatgggatgtaccaggctttggtggagattctcatccccgacgtccttagacctattcctagtaagttaaatgcagacgagtacggatgctt

SEQ ID NO: 4158 - DNA, 500 bp, Homo sapiens
  MAP TO AL158832.2; EXPRESSED IN BONE MARROW, SIGNAL = 0.71; EXPRESSED IN LUNG, SIGNAL = 0.68; EXPRESSED IN FETAL LIVER, SIGNAL = 0.62; NT HIT: U11687.1, EVALUE 1.90e+00; EST_HUMAN HIT: BF107121.1, EVALUE 4.00e-39; SWISSPROT HIT: P38144, EVALUE 1.20e+00
ttacttttgagagcgggtggctagcaaaaatcagctttttaaagtgtcataccatctagaaaatcttactataagagtatacttaatcttcaccaatgttcgtgataatttcttttggagatcaccgtccaaatctacgtaatccagtcataacagtgtttcattctatttatctccttctgcctccccacttcccacacctcactgtgcccccagtccccgctagtaagctgtggacctgggcagcgcacactggggagccctccctttcccactgcaggtgaaaatcttaccaaccacagagtccacatcagttacctccctctcaagggtggagacattgaagaagcttgataagcttatgggtgcccaggcaaagggcatccggtatttccccaaacgctggcagaaggattcagcttggagttttagtttttcaatcttttctttactctggaggaaaatggaaagaaacaagctgaaacaagcatcagcaccaa

SEQ ID NO: 4159 - DNA, 532 bp, Homo sapiens
  MAP TO AC011802.4; EXPRESSED IN LUNG, SIGNAL = 2.3; EXPRESSED IN FETAL LIVER, SIGNAL = 1.3; EXPRESSED IN BONE MARROW, SIGNAL = 1.5; SWISSPROT HIT: P56182, EVALUE 6.50e+00; NT HIT: gi13636969, EVALUE 5.00e-66; EST_HUMAN HIT: BI117625.1, EVALUE 7.00e-66
catcttgtggggattatggggattacaattccagatgagatttgggtggggacacagagctaaaccatatcagcatgtgatcctctcaacgttccaggggtctcgtaacatgccgggcctgtctgcagccacgctggcctctctgggtgggacttcctctcggagaggcagcggagacacctccatctccatcgacaccgaggcatccatcagggaaatcaaggtgagatgctctcttcttactgacaacttgagagaaccttttgtaaaaatcagtctttagattaaaaaaaaaaaagttaattcataaagttctggatctttcttcttggtcctctctccctcacctcccctaaaatacggtgttctcctaacatcaagacccagctcagatagtgtctcctgcaggaatctgatcctacccactgaccccccagcagggcggaccgtgtgccggccccctgcgcccctcagcacccggggaataccttagtgagagcacttggcacgttgtgttgatgcacttggtcgt

SEQ ID NO: 4160 - DNA, 599 bp, Homo sapiens
  MAP TO AC017112.5; EXPRESSED IN PLACENTA, SIGNAL = 0.41; EXPRESSED IN FETAL LIVER, SIGNAL = 0.4; NT HIT: gi14783321, EVALUE 2.30e+00; EST_HUMAN HIT: BF679486.1, EVALUE 0.00e+00; SWISSPROT HIT: P93162, EVALUE 2.60e+00
ttcatcttgcgaacaaccacgcaatttagatagtatcatttctgtcgtgttattgaaaaatacacagagagtcagaaatggcaaactcctaaatacacaacaaagcagaaacagaggcaggactataagctttttaccataactctgcttgctaaaatgtctgtctggtttgtttttattttagaaacagtttgctagatgatgctaaggcccgcttaagaaagtatgatattggaggcaaatattctcacttgccatataacaaatactccgtccttttgccattggtggctaaagaaggaaaactccatttgttgttcaccgtccggtcagagaaggtaggtggacaaaaaatttcctgcccttaaacctcaggacatcagaagacctcacgagattttgtcacttgcacacactttgatgccaaaattctcaaaagggctttcaaaattgtgatgtcagaggcatacaaccacaagccacaggataacatggtgtttcttggagaaggtttaacaagaaaatgaaggaatttagctagcaagcagtttaaaacgctttcacactagggttacctaaccttggtgctattggcattt

SEQ ID NO: 4161 - DNA, 524 bp, Homo sapiens
  MAP TO CHR22_182.0; EXPRESSED IN PLACENTA, SIGNAL = 0.78; EXPRESSED IN ADULT LIVER, SIGNAL = 0.75; EXPRESSED IN BONE MARROW, SIGNAL = 0.69; EXPRESSED IN FETAL LIVER, SIGNAL = 0.98; NT HIT: M14123.1, EVALUE 2.00e-28; EST_HUMAN HIT: BE395061.1, EVALUE 0.00e+00; SWISSPROT HIT: P10265, EVALUE 8.00e-60
aaagatgggcaaccattgtctggaaacaggaagaggggccagcctcaggccccccaacaaactggggcattcccagttaaactgtttgttcctcagggttttcaaggacaacaacccctacagaaaataccaccacttcagggagtcagccaattacaacaatccaacagctgtcccgcgccacagcaggcagcaccgcagtagatttatgttccacccaaatggtctttttactccctggaaagcccccacaaaagattcctagaggggtatatggcccgctgccagaagggagggtaggcctttgagggagatcaagtctaaatttgaagggagtccaaattcatactggggtaatttactcagattataaagggggaattcagttagtgatcagctccactgttccccggagtgccaatccaggtgatagaattgctcaattactgcttttgccttatgttaaaattggggaaaacaaaaaggaaagaacaggagggtttggaagtaccaaccctgcagga

SEQ ID NO: 4162 - DNA, 593 bp, Homo sapiens
  MAP TO AL135920.4; EXPRESSED IN FETAL LIVER, SIGNAL = 1.8; EXPRESSED IN LUNG, SIGNAL = 3.1; EXPRESSED IN ADULT LIVER, SIGNAL = 2.3; EXPRESSED IN BONE MARROW, SIGNAL = 2.1; EST_HUMAN HIT: AW340174.1, EVALUE 0.00e+00; SWISSPROT HIT: Q45920, EVALUE 8.00e-04; NT HIT: AL163246.2, EVALUE 0.00e+00
tggaatggccttttgaagtcacaattacaatgccaactaggtgacaatactttgcagggctggggcaaagttatccagaaggccatgtatgctctggattagtgtccaatatattgtactgtttttcccatagccaggattaaggggccaggaatcaaggggtggaagtggaagtggcactactcaccatcacccctagtaatccactagcaaaatttttgcttcctgttcttgcgacattatgttctgcttgcctagaggtcttagttccaaagggaagaacgctgccaccaggagacacaacaattccactaaactggaagttaagactgccacctggacacattgggctcctcctacctttaagtcaacaggctaagggagttacagtgttggctggggtgattgacctggactatcaagatgaattcagtctactcctccacaacagaggtaaggaagagtatgcatggaatacaggagatccattagggcgtctcttagtattaccatgccctgtgtaaggtcaatgagaaactacaacagcccaatccaggcaggaatacaaatggcccagacccttcaggaatgaa

SEQ ID NO: 4163 - DNA, 508 bp, Homo sapiens
  MAP TO AL137062.3; EXPRESSED IN BONE MARROW, SIGNAL = 0.71; EXPRESSED IN PLACENTA, SIGNAL =   1; EXPRESSED IN ADULT LIVER, SIGNAL = 1.1; EXPRESSED IN FETAL LIVER, SIGNAL = 0.8; NT HIT: AF325866.1, EVALUE 4.80e-01; EST_HUMAN HIT: BE243089.1, EVALUE 4.00e-30; SWISSPROT HIT: Q9JIZ9, EVALUE 4.70e+00
gaattcttatcgctgtgccccagccaatcgtgggctgcggaaatcatgggctgtagagtcatcgctgccggggcagaggcaccgttggtgcatgcccggctgccgttgctgcccctgcctcgtacaaacgtcagagaaggcacatgacacgcccctgggggccatctggcccaagtccacctgcgcggctgagtggaggatgctaggttgctgtgctgtttctcctactgtcttgctgccgcaccacccctcagaaaaaccgggtcgtcagtttcctgcggtttgcactcaccaaatatacttagcaatttgcaattcacccgcaggattattccagcctctgtgatcacacacagaaggatgagccttcctcgtgagggttggagatggagggagaagggatggagagtaaggatgggacggaggttgtggagcagcagaccaacacgccaggtgggtgaggttgtgtgattattctagcatcttttcttgatcctagcttgcaccc

SEQ ID NO: 4164 - DNA, 590 bp, Homo sapiens
  MAP TO AC017013.4; EXPRESSED IN FETAL LIVER, SIGNAL = 1.1; EXPRESSED IN BONE MARROW, SIGNAL = 1.1; EXPRESSED IN PLACENTA, SIGNAL = 1.2; EXPRESSED IN LUNG, SIGNAL = 2.1; EXPRESSED IN ADULT LIVER, SIGNAL = 1.3; SWISSPROT HIT: P40013, EVALUE 5.00e-18; NT HIT: gi13653496, EVALUE 1.00e-130; EST_HUMAN HIT: BF303879.1, EVALUE 1.00e-130
cgtctggcagtttgaatgagatgaagaaactggagccgggtgagggcagcggacgcgagagccgaagatggcagtgaatgtatacttaacgtcagtgaccagtgataacctaagtcatcatgacgtgctggcctggatcaatgagtctctgcagttgaatctgacaaagatcaaacagttgttctcaatatccataaactggatattgtcagtttatggacatgctgttccctggctccattgacttgaagaaagtaaaattccaggctaagctagaacatgagtgcatccagaacttcaaaatactacaagcaggttttaagaagctgggtgttgacaaaataattcctgtcgacaaatcagtaaaaggaaagtttcaggacaattttgaatttgttcagtggttcaagaagttttttgatgcaaactatgatggaaaaatctatgaccctgtggctgccagacaaggtcaagaaattgcagtggctcactccctccttgctccagctccgaataaacccaagttctagcaatgcaactccccagatgcccatctcaacacagagaactgctgtggctcctaagactgg

SEQ ID NO: 4165 - DNA, 503 bp, Homo sapiens
  MAP TO CHR22_145.0; EXPRESSED IN LUNG, SIGNAL = 0.61; EXPRESSED IN FETAL LIVER, SIGNAL = 0.7; EXPRESSED IN PLACENTA, SIGNAL = 0.76; SWISSPROT HIT: P36957, EVALUE 9.20e-01; EST_HUMAN HIT: BE828632.1, EVALUE 7.00e-69; NT HIT: gi14778388, EVALUE 4.00e-69
ctaagccagggggaagagagagtgagtgagagtgtgtgtatgtgtgtgcgtgtgtgtgtgtgtgtgtgtgtgtagaaatgtttaactaatgtttaagtgaaaatttttttacctatcctatttcatttttcacctagcatattggcaaagataataaataatgattcatctttttctcatttttattatataggaagcaatcctcccacaagggtgtgaccctgagaggtcatgtttaaaaaaaaaaaagttaagtacaaaggttattcattcttttactttagctgctacaggccagagcggatggtcatttccagcagagagccctgcctgctgccttccacacatggaacagactctggcgatggcgccaccaggaaaatgtcctcagtgcaagagcaacacgtttccacaggtatgttgcgcagctcctgtctgcactggggcaggtgtttcaaatctaactctgacaaccacacagcccatttgctgtgcttttcagc

SEQ ID NO: 4166 - DNA, 526 bp, Homo sapiens
  MAP TO AC021260.4; EXPRESSED IN LUNG, SIGNAL = 1.6; EXPRESSED IN BONE MARROW, SIGNAL = 1.7; EXPRESSED IN PLACENTA, SIGNAL = 1.6; EXPRESSED IN ADULT LIVER, SIGNAL = 1.4; EXPRESSED IN FETAL LIVER, SIGNAL = 1.8; NT HIT: X90761.1, EVALUE 2.00e-03; SWISSPROT HIT: Q9QY06, EVALUE 2.20e+00; EST_HUMAN HIT: BI868416.1, EVALUE 6.00e-60
ccacagacaaaactagcgcctagagaagttaagaaacttgcccaactaatgtcacatggacagcaagtatgaaaccagggaggtctgattctatacactgaactataaccaatatgtgatattaatacttctcagatgggttgaattatactgtcacatgcaataaccattttaacatggctaaataaacatccaaattcaagatttacattccatgaaagtgtttttcacaaacctcctgtagctgcagggacatgagtcccagttgatcctggcgtctttccaccagctccctttctgtgcgcatctctctctccagttcctgaagccgccgctccacccgatctgaaaccttaataagaattcagagaaacagcagcattatagagctagcaagcaaaacagactaaattgagaagatagttttatagcagatacactactgcttaaagcatttaagattgttttgtttgcaaagccccttctaatgacgctaacatgaaatagctggccaaaaagcttactg

SEQ ID NO: 4167 - DNA, 506 bp, Homo sapiens
  MAP TO AC013816.3; EXPRESSED IN FETAL LIVER, SIGNAL = 0.49; EXPRESSED IN PLACENTA, SIGNAL = 0.78; EXPRESSED IN LUNG, SIGNAL = 0.78; EXPRESSED IN ADULT LIVER, SIGNAL = 0.55; SWISSPROT HIT: P17841, EVALUE 8.00e+00; EST_HUMAN HIT: BF883808.1, EVALUE 1.80e-01
aaggctgtgcttcctttcagattttgtctttgatcattgtattgggaaatcttgtcaaaatatcccttgggtgtgcattgagctttgatgacaaagccaccgtgcagtaggtgtttactctcattggggcttctcttcctcctaattgctagatttgtgctacccactttgatattagaatgcatatttttttttctgtttgttctcctaatcaagaaatatatgggacctttatttcatttatgattgtggtttttaaaactcaagttttagagctacttctcaaactcttaacctaggaacttcttttcaagccaatcttatcttcattcgtagctttatttactctggttgttacagtccaaagctttgagctgattttcagcaattatccagtaattggattgaggatctgctaaatttttcatataacagattgccctttttcagattgtgttaattctctcattaggagctcttgatattcacaggtttgtcagcattgg

SEQ ID NO: 4168 - DNA, 542 bp, Homo sapiens
  MAP TO AL133553.2; EXPRESSED IN FETAL LIVER, SIGNAL = 0.95; EXPRESSED IN LUNG, SIGNAL =   1; EXPRESSED IN PLACENTA, SIGNAL = 0.79; NT HIT: gi15296870, EVALUE 6.00e-84; SWISSPROT HIT: P12270, EVALUE 9.00e-25; EST_HUMAN HIT: BI761519.1, EVALUE 9.00e-84
tttgcagattgtttcttggctaaaggaaaacaaatgtacaagtctgttgagactaaagcaagcaaaaacaacaaaataaacttttacccttcagattctgcctccacaaatacttcatctccatcatcacctgttgctgtttcatttgttgtagataaagtgccagtggatgtagtcaccattggaacagattgagaggcatgttccgaagcatcagaggtggtgctctcagtaaatacagtcactttaaaaagacaacacaagaaaaagaactttaaaactttgtggtttatcacatttttagccagaagatacttcataggttttcattttaccaataaaacagaacctactatctgcctttgatccctacctggggctgctacttgtagtggagtagtgggaacacttcggccacctgactcttcttcatgagctaggaacaggggtgtttcatacattcctaaacctaaagacaattctgaatattaatgaatgactgaaaaaaacataaaattatcaacaagtcagggatgtgaaag

SEQ ID NO: 4169 - DNA, 510 bp, Homo sapiens
  MAP TO AL133492.1; EXPRESSED IN FETAL LIVER, SIGNAL = 1.2; EXPRESSED IN LUNG, SIGNAL = 1.9; EXPRESSED IN BONE MARROW, SIGNAL = 1.6; SWISSPROT HIT: P39738, EVALUE 6.20e+00; NT HIT: AL163303.2, EVALUE 0.00e+00; EST_HUMAN HIT: AL521707.1, EVALUE 1.00e-100
gagaggcattcaccgttctcgatgtcattaagaacatttgtgactcatgggaggaggtcacaacatcaacaaagtttggaagaagttgattccaaccctcatggatgcctttaaggggttccatcctttattgaaggaagtcactgcagatgtggtgaaaacagcaagagaactagaattagaagtggagcctgaagatgtgactgaattgctgcaatctcatgatcaaacttgaatggataaggagttgcttcttatggatgagaagcagaaaagtggttacttgagatgcagtctactagtagtgaagatgctgtgaacattgttgagatgacaacaaagggtttagaatattaatattacataagcttagttgctaaagcagcagcagggtttgagaggactgactccaattttgaaagaagttataccatggtgaaaggctatcaaacagcatcacatgctacagagaaaactttcgtgaaaggaagagtccattgatgtggcaaa

SEQ ID NO: 4170 - DNA, 537 bp, Homo sapiens
  MAP TO AL133408.3; EXPRESSED IN BONE MARROW, SIGNAL = 0.73; EXPRESSED IN PLACENTA, SIGNAL = 0.78; EXPRESSED IN LUNG, SIGNAL = 0.86; EXPRESSED IN FETAL LIVER, SIGNAL = 0.75; SWISSPROT HIT: P03396, EVALUE 1.00e-02; NT HIT: AJ271736.1, EVALUE 2.00e-89; EST_HUMAN HIT: BI766212.1, EVALUE 2.00e-78
tgcgagacagaccgatagtgattcatgtaatacacttgtgctgaactattttggtgaattaaagtagtgacaaagcttctcattatttgaaggagcaaaggcagcaagcaggggagcaacaagcaggttcctaatactgttattactcctattataagagttttaaatcctaatgctgggaaccattttccaaatacagacccaggatcaaatccatgccaaacctgcacaggcatatgtgctagctttgtcatgtctctgacgatgttttcgactacttggccttggtcatctatatgcagacagcaattggtcaggttgaattttccacagacccctctttccactgctagcaagtagtctagggccaatctattttgataaatagcatttcttatctgggtttcttgccgggctaacagtcaaagttctgccagtttcattagtgattatttctaagacagcttggaaccatataatccagttgagcatgtaaatgggggtttggtatccccacgaaccatcttgtgcccagtt

SEQ ID NO: 4171 - DNA, 521 bp, Homo sapiens
  MAP TO AL136444.1; EXPRESSED IN BONE MARROW, SIGNAL = 1.1; EXPRESSED IN FETAL LIVER, SIGNAL = 1.1; SWISSPROT HIT: P48582, EVALUE 8.30e+00; NT HIT: AL163246.2, EVALUE 3.20e-02; EST_HUMAN HIT: AI749933.1, EVALUE 2.00e-04
accaccacctttcagaccagcacctcttcctttccagatcctgaatctgacacctcccccaaaactgagctcttcaatccatcatcctaactccttttttataaactacaaatctcaaatgagcacctaatactgccaagcaaatgtttctttgctaaatttactttcctgttctcttctcttctagatctctcacattttcttctctatcatttcctttcattgatacttccgggttttattttatttattcatccaacaaatatttattttgttcctttccaatagaattcaggtccatgaatgtggattctttcttgaagttttgctgaaaagtaaaatagaaatgaaaattataaaacataaaaaattgcggttaagagagggctttcaatgaaaaaaaataaaagcaggcaaaaaagtcctcaatagatctacaagccttttctgtatctgtgcccatattttcagtcttcatgccagtaataatcaagaagaggtcaaccaatccacatgtgctc

SEQ ID NO: 4172 - DNA, 565 bp, Homo sapiens
  MAP TO AC022263.3; EXPRESSED IN FETAL LIVER, SIGNAL = 0.83; EXPRESSED IN BONE MARROW, SIGNAL = 0.7; EXPRESSED IN LUNG, SIGNAL = 0.75; NT HIT: AB054296.1, EVALUE 5.40e-01; EST_HUMAN HIT: BI223279.1, EVALUE 2.00e-01; SWISSPROT HIT: P35325, EVALUE 1.40e+00
tagccctttgggactgtgtcttaccatattttatgtcccccgtgtccaacacagtgaccagtacataccaagtactcagtatgtgaaattagagtgcatggtgaatgacaaaactgcgccatacatggcaggagctcctctcttctaggggtctgtgggcttgcccagtagcctgccctaagccatgagccgatgcccaacagacaggtgtccccacacactccccaatgaccctgtgtcactgccaccctcacatcgttgccccctctgttctgctccacctctactttcttatgagatcccttctcagcaatgatctcctgcccatccacctaaacttggggatatttccatctatgaccctacaccccctctatccacaccatctctctccccttctgcctgttgtctacactctcgatccacatcatcaccttcactcctgacccactgtcctctgccttcagcaacacccttgaccagctggccttctggtggccacattggataagtgtactatggcctttatctaacttgacctttctgtagcccccttcttctggac

SEQ ID NO: 4173 - DNA, 595 bp, Homo sapiens
  MAP TO AL138788.1; EXPRESSED IN FETAL LIVER, SIGNAL =  12; EXPRESSED IN HEART, SIGNAL =  12; SWISSPROT HIT: P27817, EVALUE 2.00e-12; NT HIT: gi14742436, EVALUE 0.00e+00; EST_HUMAN HIT: AI937888.1, EVALUE 0.00e+00
ctgcctcactggtctaccttgttctcctgcaccctggttgtcagcaccctgaaaaagacaatggaaattaagcctactgggtcagtaatataataaaaaaacccaaccagataaatccaagagttaaaaaacaaacaaaacagaccatctagtaattgtgactacattataaattaatccttttggttcttactaggaatccaagttgctttccatataattaacagctctaaacagtcctaccagaacttatcacattgctgttgttgatggtgaaacttacctccatcacttctccctgcacaggagggttggaatactgtggtcgacgcccatagggtctccgcatgtagtaaggtgggaaccttcgcctgcggtagggccggcgttgttgggcctggccttcgggagcactctccgatccctcgttcttttccccactctcactattctggtaattttgctggtaattgcgtggaggacccctacgacgtggatagcgtctataatggttacggtctgctgcatatttactgccttgaactggaacaccaccaggacctgtaacatttgctgcctccgcaccctacaaaag

SEQ ID NO: 4174 - DNA, 505 bp, Homo sapiens
  MAP TO AL136445.1; EXPRESSED IN FETAL LIVER, SIGNAL = 7.3; EXPRESSED IN BONE MARROW, SIGNAL = 7.8; EXPRESSED IN HEART, SIGNAL = 5.3; EXPRESSED IN PLACENTA, SIGNAL = 7.9; NT HIT: D23661.1, EVALUE 4.00e-88; SWISSPROT HIT: P02403, EVALUE 5.00e-25; EST_HUMAN HIT: BG196007.1, EVALUE 0.00e+00
atgctacaacagctgccctcttgggtttagatgttgttccttctcagaatccacgcctgaatctgcggtatacaatattcaggtgcctcattcgaccagtcctggtattatttcatctttaagccttggcacttcagttatacttcctcttgcacttagcagggtagccacatttgccacaggatgacttctgaaggtggcaggccttagagccacagtggtggcacaatgtgtgcgtcttactgcaacacttttcaaacgatggcgttcccttcagtatcttgcttctgtggccaagaccaaagagtgttgttagctcttaggtaggcttttgcctttccctaatgcttttaagtagaagatagatgatccttcagaggaacaggagacagtgcggctgtattcggtgcagcttggggccttgaaggagggaaacaagacaagggagttaattcctaggggtccttggagagaagaacaatgatgtctgggagtaggcatggac

SEQ ID NO: 4175 - DNA, 584 bp, Homo sapiens
  MAP TO AC016729.5; EXPRESSED IN ADULT LIVER, SIGNAL = 9.5; EXPRESSED IN FETAL LIVER, SIGNAL =   7; EXPRESSED IN BONE MARROW, SIGNAL = 7.5; EXPRESSED IN HEART, SIGNAL = 8.4; NT HIT: gi5453993, EVALUE 0.00e+00; SWISSPROT HIT: P31009, EVALUE 7.40e+00; EST_HUMAN HIT: BF949515.1, EVALUE 0.00e+00
agtcatggtggaaggcaaagggggagcaggtgtgtcacatggcaagagagggcatgagagagatggctaggcgcttttaaacaagcagctcttgtgttaactaacgagcaagaattcactgattgccacagggagtgattgataagggatccaccaccacccccatccccaccccatgacacaaacacctcactaggctccatctctaacactgggaaattacgtttcagcatgagatttggaggggacaaatattcaaactgtatcagcatcctcactgaattactactttattatacagattaagttacccttttttggttttatttcagcgtgctcttgctaaaactggagctgaatctatcagtttgcttgagttatgtcgaaatacgaacagaaaacaagctgccgcaaagttctacagcttcttggttcttaaaaagcagcaagctattgagctgacacaggaagaaccgtacagtgacatcatcgcaacacctggaccaaggttccatattatataaggagctagaagcattatagctagtgtttgattcactagtgcttacaaattgcccccatgt

SEQ ID NO: 4176 - DNA, 501 bp, Homo sapiens
  MAP TO AL109804.24; EXPRESSED IN FETAL LIVER, SIGNAL = 0.45; EXPRESSED IN BONE MARROW, SIGNAL = 0.41; EXPRESSED IN ADULT LIVER, SIGNAL = 0.57; NT HIT: gi14771527, EVALUE 5.00e-72; SWISSPROT HIT: Q60571, EVALUE 2.70e+00; EST_HUMAN HIT: BG423340.1, EVALUE 7.00e-72
tgacttctccaaatgtttaggtcttagatacagtagaaagactctgtgggccacagacagagtgctgtatctgagaaagcaactggtcttgcagagtgaatctatagattacctggtgacaatcccattttctgcaagaatgaaggctgcagcaggattggcagccctgatgaggctctgcagctgaacaaggagagggtgccgctgctccgtggtgtgactggtgaataccacgttactcaccaggcctgggaataaaaccaaggacagtttagccttcacagtcctggttaggggtgaaggctcacacaaacgtgagcccttgctccatcccctaatcatgccttccagtagtctcctgatggagacaacccttacaccccaataccaacataaacagctatcattctcttcccacttcccggcactgccacctcttggaatgaatagcttcaagtctgtagctgccttactacctaacccctaacttcctctatcttt

SEQ ID NO: 4177 - DNA, 519 bp, Homo sapiens
  MAP TO AC019196.4; EXPRESSED IN FETAL LIVER, SIGNAL = 1.3; EXPRESSED IN PLACENTA, SIGNAL = 1.8; EXPRESSED IN LUNG, SIGNAL = 1.7; EXPRESSED IN BONE MARROW, SIGNAL = 1.5; EST_HUMAN HIT: AW340174.1, EVALUE 1.00e-118; NT HIT: AL163284.2, EVALUE 0.00e+00; SWISSPROT HIT: P43792, EVALUE 3.00e-05
ttgggctgttgtagtttcccgttgacattaatcacagggcatggtaatactaagagatgccctaatggatctcctatatttaatgcatactcttccttacctccattgtggagtagtaggctgatttcattttgatagtccaggtcaatcaccccagccaacactataactcccttcttagcctgttgacttaaaggtaggaggagcccaaagtgtccaggtggcaaccttaacttccagtttaatggaatcattgctgtgtgtcctggtggcagcattcctccctctggaactaagacctctaggtccaaagaatgtaatgttgaaggaacaggaagcaaaaattttgctagtggatcagtaggggtgatgatgagtggtgtcacttccacttccacctcttgattattcctggatctgtgaatcctggctatgggagaaatagtaccatatactggaggctgatccagagcatgcctggccttctggagaactttgtcccagccctgcaaagtatta

SEQ ID NO: 4178 - DNA, 596 bp, Homo sapiens
  MAP TO AL139144.1; EXPRESSED IN BONE MARROW, SIGNAL = 0.75; EXPRESSED IN PLACENTA, SIGNAL = 0.66; EXPRESSED IN FETAL LIVER, SIGNAL = 0.79; EXPRESSED IN LUNG, SIGNAL = 0.72; EXPRESSED IN ADULT LIVER, SIGNAL = 0.79; SWISSPROT HIT: P19837, EVALUE 8.80e-01; NT HIT: AJ243213.1, EVALUE 3.60e-02; EST_HUMAN HIT: BI014923.1, EVALUE 1.40e-02
tcctggaaacaatgaggaggatgaagatgcagcggggtcaggagagacagaagggtctgtgccagggctaggtggctcgtaagcatccttgcatcatcccagccactctgagtttctagggttcttaggtacggtgtcctctcctggcctttgcatctgctgttctctccacctagagcactcttccctctcttctctggattaactcttgcgtatccttcaggtgtcaaacttagacctctctctgcccgggaagcccttcctgaccctgaccctgcaggtctggctgaaaagcctcctctcagagctcccacggctgtctatacagctcatcatgatctttctcgccctggagtgggttgcgggtctacctgtctgccctctgtgatgtgtcatgctcagcaccgaatccccagagattcacagagcctggaacacggtgctaaataataagttgggaatgaatgaaataacgacttgtatgttgaataatagaatattgtcccattacacccagctgcttctcaaagacaaaatttgaagcaccagacataatgagatgctcaatgtggtggggccaagagtacaggctctgg

SEQ ID NO: 4179 - DNA, 500 bp, Homo sapiens
  MAP TO AL138889.2; EXPRESSED IN PLACENTA, SIGNAL = 0.39; EXPRESSED IN ADULT LIVER, SIGNAL = 0.42; EXPRESSED IN FETAL LIVER, SIGNAL = 0.45; EST_HUMAN HIT: AI076518.1, EVALUE 7.00e-01; SWISSPROT HIT: Q9ZNF8, EVALUE 4.60e+00
tctcggggcaatgttaaaagtctgttcaactacattcaaattcccatttcaagtgtaggctccaaaatcacataccaaagtgtaaccctttatggctccatcccccggaagaaatacacaaaattcataattgtgcatgcgtgtgcgtgtttaacatcagcggacactaagaaacaataggcttttcattatcttccttttttttttgtttttgttcttattctttaaaaggattatatgccagagagtgcaatggcagaaggcagaagaggagatacagaacaagaagatggtgggagacattttgcaatttatcaagatatgagtacagttccctctttgcaaatgcccaaagcgccctacattgagcttcttaaattacgaagtaatgttcttaatggctaccctgaggcaaggctatatctagaagagcaatttttaatcattaatgtaaaattatcctgctcagatgattccagtgattcgagccaggagtttga

SEQ ID NO: 4180 - DNA, 575 bp, Homo sapiens
  MAP TO AL137800.2; EXPRESSED IN FETAL LIVER, SIGNAL = 0.74; EXPRESSED IN ADULT LIVER, SIGNAL = 0.83; EXPRESSED IN LUNG, SIGNAL = 1.5; EST_HUMAN HIT: AI906403.1, EVALUE 5.00e-73; NT HIT: U00783.1, EVALUE 0.00e+00; SWISSPROT HIT: P19878, EVALUE 5.00e-22
aggccttggcatcacattacctggggctgctgctgagggtggatccgcagctcaactggttcaaggtagttgcagggaacaagccccttctgcagtgcagcaccacagaatcagaaaggaaaaaataaagatgtgctcatcagtacccacaccacagaacagcccagagtcctggggaagggatgacgaacagacaaaagaacttggctggtctgcaaagaaggcagcagatactgctccacagagactgcatttgctgccaggatcccatgcccatcgcaccagcccctgatcctctgcatacctgcccgttgaacatgaccgtggcccagttatcattgcccttcttcaagacaaagacaatgttccctggcatgacctggagctcttcttttgtctcaggcacaaacccaaatagcacacggtgagcctccccttccagagccctgcagaggatagacacaagatccagcccccatcccctcacatgatgccatggcgcaaatacactgaacttggagccagggacttggctccagcctggctctaactccacatctaactgcaactgccga

SEQ ID NO: 4181 - DNA, 577 bp, Homo sapiens
  MAP TO AC022057.2; EXPRESSED IN BONE MARROW, SIGNAL = 0.81; EXPRESSED IN ADULT LIVER, SIGNAL = 0.84; EXPRESSED IN FETAL LIVER, SIGNAL =   1; EXPRESSED IN LUNG, SIGNAL = 0.86; NT HIT: gi14762502, EVALUE 1.00e-04; EST_HUMAN HIT: BI918876.1, EVALUE 1.00e-08; SWISSPROT HIT: P08547, EVALUE 4.00e-07
tgccaatcacaaccaaagagatagcactttatacctgttagaatgggatggctattactaaaaacaacgacaacaacaacaagaaccaccaagaaaataatgtgttggcaaagatgtggagaaagtggaaatcttgtgtattgatggtgggaatgtaaaatggtgaatctggtatggaacacagtaatctatatagcagaaaattaaaaatagaattaccatatggtccagcaattctgactatatttccaaaaagatagaaaacaaggacttgaacagatatttgtggacccaagttcataattaacattacacacagtagtcaaagggaagtaatctaagtgtccattgatagatgtactgataaataaaatgacgtagatacataggatatttttcagccttaaaaagaacattctggcaccggatgcagcatagatgaactctaaagacatgataaatgaaataagctggtcacagaagggaaaagtactgcataaattcacgtatgtgagatgcttagatttgtcaaattcatagaaacacaaagtaacatggtggttacctgagactgggg

SEQ ID NO: 4182 - DNA, 550 bp, Homo sapiens
  MAP TO AF235094.1; EXPRESSED IN FETAL LIVER, SIGNAL = 0.73; EXPRESSED IN ADULT LIVER, SIGNAL = 0.76; EXPRESSED IN BONE MARROW, SIGNAL = 0.64; EXPRESSED IN LUNG, SIGNAL = 0.59; NT HIT: AF336797.2, EVALUE 8.20e+00; EST_HUMAN HIT: AW026981.1, EVALUE 4.90e-02; SWISSPROT HIT: Q01702, EVALUE 6.00e-01
tcagtctggggtacaaaggggagaattaataaaactaataagctggaattcatgaaaatgagtcactccccaggtgccccagggcggctgccacactgggatctggcctctgaagagggatggcagctgctgccagggtctgagctggaagggcctacggcctgaaacccagacccccaagatgaggtgtccctagcagtggtttgaggtctctagcagggagatcaagctgattctgcagagtcgggaaccagcaacccagttttagcagctaggtggggaagtgccactgccaggtgaaccagcagcatccagaggacacgtggccccagtggcaggtagaccggaagcctgggaaagaaaccggaagcaaactgaaaggagcacatttccccatcttccccagccttgcgtgctttctctggtgcccctagtgggagaatttagcacagcaccagctggcccagcagaaatgagtttgcggagctagggccagccacagaggtggagtggggatggttggtgtggagctgagtcaacaccaggcaaa

SEQ ID NO: 4183 - DNA, 591 bp, Homo sapiens
  MAP TO AL136454.3; EXPRESSED IN BONE MARROW, SIGNAL = 1.2; EXPRESSED IN PLACENTA, SIGNAL = 1.7; EXPRESSED IN ADULT LIVER, SIGNAL = 1.8; EXPRESSED IN FETAL LIVER, SIGNAL = 1.2; NT HIT: AL163207.2, EVALUE 1.00e-42; EST_HUMAN HIT: BF892172.1, EVALUE 2.00e-48; SWISSPROT HIT: P43465, EVALUE 3.30e+00
gagacgtgcctttcaccttccaccatgattgtaaggcctccccagccacgtggaactgtaagtccaataaacctatttctcttgtaaattgcccagtctcagatatgtctttatcagcagcatgaaaactaactaatacaacatgcatggccacaatacacatgcttcaagcactttcagaacaccatgggtctttctcattcaaattatacaaaatcagcctaatacggacataactagtaaatgatatcagaataattagcattctttactacttatttttccccttgaatacatggatatttgtactccaaaacagagtaagtctagagttttcagttttgcttaatattctgattttacctcctaaatacaggctttctgtcctgctccctcagcacctccacatcatggtgaacaaagaagatgccatgtggtgtcatgaaacaaaaagctttggattgaggtacaaagcaattagattagcatctgttcattcacctgatgttcttgtacctttaggaccagtaggcttcagcttcctcatctataaaataaagtaggatgagatgattgagtaagccacgtgct

SEQ ID NO: 4184 - DNA, 588 bp, Homo sapiens
  MAP TO AL121954.3; EXPRESSED IN FETAL LIVER, SIGNAL =   2; EXPRESSED IN BONE MARROW, SIGNAL = 1.4; NT HIT: gi14750722, EVALUE 0.00e+00; EST_HUMAN HIT: AW936207.1, EVALUE 0.00e+00
caaaggaagggcagtcagtccagtggtggcatgctcaaggaattataggactaattctctttttgttgtgtgtattttattccaggtaggaaaaactatggaatttttttctttaaacaagaagtctagctgtttatttatgaatcatttcttttaaaaatgttcttttttttctctcctcctaaactctctttcatacagcatccgtacttcaaacaatagtcaggttaataaactgactctaacaagtgatgaatctacattaatagaagatggtggagctagaagtgatggatcactggaggatggggacgatgttcaccgagctgtagataatgaaagggatggtgtcacttacagttattccttctttcacttcatgcttttcctggcttcactttatatcatgatgacccttaccaactggtacaggtatttatatttcatgaaaactctggatgtgtgaattctgatggcattttatgattctcttgtgaaaccatgatgtgatatgaagtactttttatcctctgatatatttcaaaatgtacagctaaatgaatagtgagatcagcatgagaaatgcag

SEQ ID NO: 4185 - DNA, 533 bp, Homo sapiens
  MAP TO AL136163.3; EXPRESSED IN LUNG, SIGNAL = 0.74; EXPRESSED IN FETAL LIVER, SIGNAL = 0.55; EXPRESSED IN PLACENTA, SIGNAL = 0.6; EXPRESSED IN ADULT LIVER, SIGNAL = 0.55; EXPRESSED IN BONE MARROW, SIGNAL = 0.61; NT HIT: AL161538.2, EVALUE 3.20e-02; EST_HUMAN HIT: BG432498.1, EVALUE 0.00e+00; SWISSPROT HIT: P49784, EVALUE 2.90e+00
tctgggcactgtgctaaatgctgggaacacaaatttaaatgagacattattttagtgtgatccccttacacaagattatgtatgtaaagcaagggccaggggcacatagcagctgctccataaactgttaccattattatgatcaatcacaaatgatagtcttttaaaaattcttatagattttttaaatgaaaatactgcagtaacgccatgaatactcaccaatactataatatctctttagttctgtacgcctgatctcctttaactgattactttttctcttttttttctcatcagtcatatattcctcttccacagcaatgttgcacttgtctggctctaaaactactgtattattatcttccttcccagtatgagtccttgtagctacagctgaggctgtctctgcattttgtttggcttgttttttctttttcagtctaggaaagagggaaaaaaaagaaaaaacattggagagatgatttgctggtagaaatcatattaatttcacgctgctggactttgaaaac

SEQ ID NO: 4186 - DNA, 560 bp, Homo sapiens
  MAP TO AC012186.3; EXPRESSED IN BONE MARROW, SIGNAL = 1.7; EXPRESSED IN LUNG, SIGNAL = 2.6; EXPRESSED IN PLACENTA, SIGNAL = 1.7; EXPRESSED IN FETAL LIVER, SIGNAL = 1.7; EXPRESSED IN ADULT LIVER, SIGNAL = 2.3; NT HIT: gi15318054, EVALUE 0.00e+00; EST_HUMAN HIT: AI695097.1, EVALUE 0.00e+00; SWISSPROT HIT: P34110, EVALUE 3.00e-10
gtggctctcaagagagggtgcagcatgttctgatatgaaggctgcagaagtctcacaggatggaggtttggtgacaagtactttggaaaatgctcaactagaggatggttggtccttgaaagtcctttctgctttatgttcactaggcattttctctgtatgaagatgaaatcagcgattccaaagcacagctagctgccatcaccttgatcattggcacttttgaaaggatgaagtgcttcagtgaagagaatcacgaacctctgaggactcagtgtgcccttgctgcatccaaacttctaaagaaacctgatcagggccgagctgtgagcacctgtgcacatctcttctggtctggcagaaacacggacaaaaatggggaggaggtaaggtcattcctgactgcatgatagcagacaggatccataacagggatcagttgtcatggccttgtgttctggaggtgaaacatttggggtgcttggaaatctgatgaacaaaattgctttgttttgttaaaaaagagagtctcatcctgtagtgaagcctctgctttgagg

SEQ ID NO: 4187 - DNA, 542 bp, Homo sapiens
  MAP TO AL133328.5; EXPRESSED IN FETAL LIVER, SIGNAL = 4.8; EXPRESSED IN BONE MARROW, SIGNAL = 5.7; EXPRESSED IN LUNG, SIGNAL = 8.5; EXPRESSED IN PLACENTA, SIGNAL = 7.8; EXPRESSED IN ADULT LIVER, SIGNAL = 7.7; SWISSPROT HIT: P07898, EVALUE 5.10e+00; NT HIT: AF029308.1, EVALUE 6.00e-56; EST_HUMAN HIT: AL603245.1, EVALUE 2.00e-63
ttccttctggtgggttcttggtcttgttgacttcaggaatgaagctgcagacctttatggtgagtgttagagttcttaaagatggtgtgtccagagtttgttccttcagatgttcagatgtgtctggagtttcttccttctggtgggttcgtggtctccctgacttcagtaatgaagctgcagacctttgtggtgagtgttacagctcttaaaggtggtgtggacccaaacaatgagcagcagtaagatttattgtgaagagcaaaagaacaaagcttccacagtgtggagggggacccaagcgggttgccgctgctggcttgggtggccagcttttattcccttatttggacctgcccatgtcctactgattggtccattttagagagtgttgactggcacattttacagagtgctgattggtccattttacagagtgctgattggtctattttacagagtgctgattggtgcatttacaatcctttagctaggcacagagtgccgattggtgtgtgtttacagagtgctgattggtgcat

SEQ ID NO: 4188 - DNA, 588 bp, Homo sapiens
  MAP TO AF235096.1; EXPRESSED IN FETAL LIVER, SIGNAL = 0.78; EXPRESSED IN HEART, SIGNAL = 2.6; EXPRESSED IN LUNG, SIGNAL = 0.77; EXPRESSED IN ADULT LIVER, SIGNAL = 0.76; EXPRESSED IN BONE MARROW, SIGNAL = 0.7; NT HIT: gi13644926, EVALUE 6.00e-47; EST_HUMAN HIT: BG747425.1, EVALUE 9.00e-47; SWISSPROT HIT: P27216, EVALUE 5.00e-12
ttcagcacaaggcatcaaagctaagggtccgttgggttccatagacacctccaaccacctttaagctgtgagtcctggcttcctcaccctggactaaaataaacttccaccttgtttcttattcactgtggctttgtttgtttctcctgtattttagggaccaatgaagcagccatcattgaaatcttatcgggcaggacatcagatgagaggcaacaaatcaagcaaaagtacaaggcaacgtacggcaaggtgattccaggggtggtcagcaagcttgcacccagccatggcctcagccgtctcggcttcctcatgtccccaggccacgcagaatatctttatagctttattgagtcagcccaggaggaaaagtgaaataaccacttaaaagcattaatggagttcagaaaaactgaaattgctttgttaactcaatagcctgtaaaatcaatactcttaaactcatttcttaaattgacttcatttttctatgaagaccctagtctttttttcacttaattgggactaactgtacatatgtagctagatcagtaatttgaaaatcagtttccacaagtgggtctt

SEQ ID NO: 4189 - DNA, 567 bp, Homo sapiens
  MAP TO AC011985.3; EXPRESSED IN BONE MARROW, SIGNAL = 1.2; EXPRESSED IN HEART, SIGNAL = 1.5; EXPRESSED IN LUNG, SIGNAL = 1.2; EXPRESSED IN FETAL LIVER, SIGNAL = 2.1; EXPRESSED IN PLACENTA, SIGNAL = 2.2; EXPRESSED IN ADULT LIVER, SIGNAL = 1.6; NT HIT: U66061.1, EVALUE 2.10e+00; EST_HUMAN HIT: BG105156.1, EVALUE 2.00e-01; SWISSPROT HIT: Q9QXY1, EVALUE 2.10e-01
acacaaaacaggccatacccaaagagacagagagataaaggtctcattacaaatggcacaggaaagagaaccaagcatacctgcttgcgaggtggcccctgactggcatctgggaacctggctcccagcacactccgagtcaacagctagctgatgagctgactccttatgcctagctatgaaaacaatatggtctaggctgaacactgcctttcttctaggggtgtgaaatttggcatgtgctaggcagaggatgcctagataaacagtccccaagaaaaactttgggtgctgagtctccactgggctcccctgggcagaatcctcacacatgtgctgctgcattttcactgctgggggaggagcgtgcattgtgggaccctgccatgggagggagagcatcgggaaaccatccatgtgttctccagactctgcttcttttcccttgtgatccagctgtagatctttgttacgtcactgtcatcaatcttagctgttaacacaactatacgccaagtcctgtgcatccttccagcagatctcaaatgtagggatggtcttggggat

SEQ ID NO: 4190 - DNA, 590 bp, Homo sapiens
  MAP TO AL121909.4; EXPRESSED IN LUNG, SIGNAL = 0.79; EXPRESSED IN PLACENTA, SIGNAL = 0.79; EXPRESSED IN ADULT LIVER, SIGNAL = 0.74; EXPRESSED IN FETAL LIVER, SIGNAL = 0.81; EXPRESSED IN BONE MARROW, SIGNAL = 0.78; NT HIT: L78810.1, EVALUE 1.00e-04; EST_HUMAN HIT: AA835001.1, EVALUE 3.30e+00; SWISSPROT HIT: P38164, EVALUE 3.30e+00
tttatgcaaactcatggggctggagtgttacatatacaatgagaaaggtatagttagtggccaaactgataccagactcaaagagtcgaattttgcagtacatgaaatgagatatcaccatgatatagtatatacgttgggacctattctggttatttattgttgtgtaagaagtcacttgaagatatagtggctgcaaacaacagcagtcacctttttacctctcagtttttctgtggtcaggagttagggaagggcccggctgtgcatttctggcttgagttctttcatgcagttgcagtcaggtggcagctgacgctggaagagcaggcagctggtatggctcagcgtttcttcctcctcacccagtctcatgtggtcttttctatgtggtctctcttcatgggcagctttattctcatagcatggcagcttcagagcagggggacagcctgcctgggcttcagtgtgattattctgtccaaccaggtggaagcagcattgctttatgacttggccttggaagtcatgcatggtcacgtctatcacattacagtagtcctctcttatctgtaggggttacgtcccaa

SEQ ID NO: 4191 - DNA, 546 bp, Homo sapiens
  MAP TO AL160233.1; EXPRESSED IN BONE MARROW, SIGNAL = 0.44; EXPRESSED IN FETAL LIVER, SIGNAL = 0.45; EXPRESSED IN LUNG, SIGNAL = 0.55; EXPRESSED IN ADULT LIVER, SIGNAL = 0.49; EST_HUMAN HIT: AI125402.1, EVALUE 4.90e-02; NT HIT: M11794.1, EVALUE 5.20e-01
ggatcgacacattattggggcacctagtatagaaactgagttctgaatagcactttaaattaacaccatacgtctaaatattaacaatccccaggtagcatttattgttacttctcaattaatacacatcattttaccctgagcattatgatgttttgccattattggcaggttcaagaagatgctaggaacttgccatccctttcctctgtcaagccatttaaacctcctgaaacacacctgtgacccttttgtttctgttggtgagttgaattcccttatgagatagttaattttgctcctttctatgacttagcctgcacccttaacactagacaggctctttgaaaatgtattacctgggccttgagggggataagaagtgggaatttgtattctcagtgcaaatccttcatcaccagcgagcagtcaacccaaagtctctccagcaaggctttattggtgttatcagggtggctgatggactgaatgctcaaaaggctttggattgtcatctgaattggtgcattcctttgcattcccact

SEQ ID NO: 4192 - DNA, 529 bp, Homo sapiens
  MAP TO AC012661.4; EXPRESSED IN ADULT LIVER, SIGNAL = 1.3; EXPRESSED IN FETAL LIVER, SIGNAL = 0.78; EST_HUMAN HIT: BG337845.1, EVALUE 6.00e-97; SWISSPROT HIT: P51582, EVALUE 2.90e+00; NT HIT: gi8393008, EVALUE 4.00e-97
actacggcctctctgaaggggaggcggtgggactccccatggggcctaaccccctggaccccactgatctgaacggggcgcatttcgacccggaagtttacctagacaagctgcatagagagtgccctctggcccagctgatggacagtgagacagacatggtgcggcagatccaggctctagacagcgacatgcagaccctggtctatgagaactacgacaagttcatcccagccacagaaattgacaaacagcataaaactgtatgaggaattgtaggagacccagaatttcccaaataaccttgtaaaagaagaacaaagttggaagactcacaaaaaatatctatatatatataaagttttgttttcgttcagttgtaaatatttagtaatttctattgtgatttttcatttaactcatgaaaggataatttaattttccaaatgtatgcttgtgtttagctatcttcttgctgttcacttctaattttgttgcattatggtcagggaaacgtggtctggacaat

SEQ ID NO: 4193 - DNA, 512 bp, Homo sapiens
  MAP TO AL139152.1; EXPRESSED IN BONE MARROW, SIGNAL = 7.7; EXPRESSED IN FETAL LIVER, SIGNAL =   8; SWISSPROT HIT: P75870, EVALUE 2.10e+00; EST_HUMAN HIT: BI061616.1, EVALUE 0.00e+00; NT HIT: gi16157256, EVALUE 0.00e+00
ttttacatctgcctgggtccaatgtgctgagagtgggctcaggttgccacaggcatggctggagactaggaatagagccttgctcactgacccatttcatgtctaggcttccagatgagactacagtttcattacaacctatatgcacccataggtcctgcctgtggcaatgacgtctctcgggtcagtaagggccacttggaacaggaatatcacccctatctggaaggccaggtggaggcttatcaccttcatagtaaggtactcactgtccacgtcaagagccaagccaaggtactgttcctccaatgagtaaacagcacttctgtagggctggcctaagtcaggcagttcaagataacctgaaggagtcgaataacatctatccagtgagtcctgcaagacttcaggctctttctcagccagcagctccctgctgagcctggaaaagtaggaaaaagtaaagaataagccagggggaatcagaaaccacacagccccagctagatttc

SEQ ID NO: 4194 - DNA, 575 bp, Homo sapiens
  MAP TO AL132765.16; EXPRESSED IN HEART, SIGNAL = 4.5; EXPRESSED IN PLACENTA, SIGNAL = 5.5; EXPRESSED IN LUNG, SIGNAL = 6.1; EXPRESSED IN FETAL LIVER, SIGNAL = 5.4; EXPRESSED IN ADULT LIVER, SIGNAL = 7.1; EXPRESSED IN BONE MARROW, SIGNAL = 4.6; EST_HUMAN HIT: BG334202.1, EVALUE 4.00e-98; NT HIT: gi16195013, EVALUE 3.00e-98; SWISSPROT HIT: O35625, EVALUE 1.10e+00
tctaaatcaccggaggatgggggagggaagggagcctctgaaaggggctcttctgcagaggacctgagcaccctcctgaaaaccctggccccccaagggtctttggtcccccgggctgaggctcaagtgagcaggcaggctgcttccccagcttaccgagtctgctgctggtcagcctccgcctggctggcctggaatgagagacaaaagctccttggtctccaggagactcatctcacgcagcggggctagtccacccacctgctagatggagttccctttcctccccgtggccccaggcagaaggctgacctggacgtcctgggcatcccgcgcctggcccgcctccagcagggcctcaatggaacggattctctctgtgagctgggagttctccgccctggcctcctggagctgcccgtggaggccactcagctcctcgcatttgctgcgcacctccgcctcggaggactgtaacttgctgtgcagctctggtgcagaggaagggaaacgagaagttaagagactgcaaaccccagggggtgtggaggatgccctcactgctgccctcttag

SEQ ID NO: 4195 - DNA, 593 bp, Homo sapiens
  MAP TO AL132656.3; EXPRESSED IN PLACENTA, SIGNAL = 0.6; EXPRESSED IN LUNG, SIGNAL = 0.63; EXPRESSED IN BONE MARROW, SIGNAL = 0.42; EXPRESSED IN ADULT LIVER, SIGNAL = 0.6; EXPRESSED IN FETAL LIVER, SIGNAL = 0.58; NT HIT: gi14756633, EVALUE 0.00e+00; EST_HUMAN HIT: BF803836.1, EVALUE 0.00e+00; SWISSPROT HIT: P33479, EVALUE 2.30e-01
ggaggtctactacccctcggtgaaggagagggctgtgtgacaggccgagtgcttgccccagctgaataagttcttcagccacttctgggcccagcgggagatggagaacagccagcccggtggccaggctgccagcttgaggctgagcagtggaccccggccacttcctggaccacaaagacgaggaggagggcctgtctctggactggagcagcaccatcgcctcagaccacgtggtggacatgtaggccctcacttagttcctgcatgaagcctcttcacaggcgagtttgccgtcttcctcctccactggctcttccctgagctcttccactaccgcaagctgggcgagcaggacagctgctacggggacggcggcaagcaggagctggacccgcagaggctgcagatcatctgcaacttcacggaggtctacttcccccacatgcaggaggaggaggcctggcggcaagcaggacctggacccgcagaggctgcagatcatctgcaacttcacggaggtctacttcccccacatgcaggaggaggaggcctgggctgcagcggtgcgcccagtgcatcaacgacaagct

SEQ ID NO: 4196 - DNA, 599 bp, Homo sapiens
  MAP TO CHR22_121.0; EXPRESSED IN LUNG, SIGNAL = 0.88; EXPRESSED IN ADULT LIVER, SIGNAL = 0.86; EXPRESSED IN FETAL LIVER, SIGNAL = 0.8; NT HIT: gi14779305, EVALUE 1.00e-107; EST_HUMAN HIT: BI772059.1, EVALUE 1.00e-105; SWISSPROT HIT: Q9Y3A4, EVALUE 3.00e-19
gttagctggaggctgacgagcgccagcactaagtgcacaggaacccagaggtgggcactgatgacctagggtccccacccactgagcaaatgcatctgcccctggggggtgatggggaaccgccacacagggtgctgccaggctgggcctctttccacagagtctggtgcgagccccgtgcttagggacgccctccctcctcgaccaccaagtccagcgcccgccctcaggagcactggccacaggcctcatccgtggctggggccaaggccgaggggtctgaggatggactcggggtggcttacgctccatcttgctctctcgatgctgccaggcgtagttgagcagctctttttggctgcgcttccgtctctccctctccagcacccgcaagctggctgcctcagtccgggggagcacaggccgccggccccggcgggtcaccttcacccagccctcctcgtcagggaccccctcctcctccttggccttagcttcttcctgcaaggaaggtgatcccatcgtccggtgggcgcctgggacctcccgcagcctccagcagcgcgccctccacgccctcctcccaaagtcagaactgc

SEQ ID NO: 4197 - DNA, 584 bp, Homo sapiens
  MAP TO AL138478.1; EXPRESSED IN FETAL LIVER, SIGNAL = 2.1; EXPRESSED IN HEART, SIGNAL = 1.7; EXPRESSED IN PLACENTA, SIGNAL = 2.4; EXPRESSED IN LUNG, SIGNAL = 2.9; EXPRESSED IN BONE MARROW, SIGNAL = 2.3; SWISSPROT HIT: O00409, EVALUE 5.00e-64; NT HIT: gi4885136, EVALUE 0.00e+00; EST_HUMAN HIT: BF115938.1, EVALUE 0.00e+00
agggactgatggttgaatgcaggcgggctgccgggtgcccccatctgaggacgtctaactgtgtcccttctttgtctcccgtccctccccactgtcctcgctctgcaggaatggcatcaccagctgccggatgcggactgagagtgagccatcttgtggctccccagtggtcagcggagaccccaaggaggatcacaactacagcagtgccaagtcctccaacgcccggagcacctcgcccaccagcgactccatctcctcctcctcctcctcagccgacgaccactatgagtttgccaccaaggggagccaggagggcagcgagggcagcgaggggagcttccggagccacgagagccccagcgacacggaagaggacgacaggaagcacagccagaaggagcccaaggattctctgggggacagcgggtacgcatcccagcacaagaagcgccagcacttcgccaaggccaggaaggtccccagcgacacactgcccctcaaaaagagacgcaccgaaaagccccccgagagcgatgatgaggagatgaaagaagcggcagggtccctcctgcacttagcag

SEQ ID NO: 4198 - DNA, 563 bp, Homo sapiens
  MAP TO AL137008.1; EXPRESSED IN FETAL LIVER, SIGNAL = 0.58; EXPRESSED IN PLACENTA, SIGNAL = 0.71; EXPRESSED IN LUNG, SIGNAL = 1.4; EST_HUMAN HIT: AV728502.1, EVALUE 1.00e-89; SWISSPROT HIT: O94833, EVALUE 6.00e-27; NT HIT: gi14759704, EVALUE 1.00e-91
tcaactaccccatgaaatctccaaatatatacaaaaaatgtttaaacataaatcattgaaagttctactcctgatagctctactcagaaataaggccaagtccaagacatgaaacaactaaaacactgattctattatattaatcaaagcacatactttcctttcattgagtttggtttccaccgattcccatttttctttcaagttatttatgtcttggtcaatatttgtctctgcagattttgggcatcttgcaagcatctgctggcctttctgcatcagactcttatatgtttcttctttagcttcaaaggcagcacagacttcctaaattgagataccctcaagttatatcactttaagaaagtaaaatttaagagttctatttttctaggtcatcagtcccaagctcctcatcatatattcatctctgtttgctctctcagggcaaccttgacgcatttatacttttcactacattgaaacaacaattaaacctacagtcataccctgtctactgggaaatctaaaaaatggtgttatcattatcagcccattctggc

SEQ ID NO: 4199 - DNA, 518 bp, Homo sapiens
  MAP TO AC013613.3; EXPRESSED IN FETAL LIVER, SIGNAL = 0.47; EXPRESSED IN BONE MARROW, SIGNAL = 0.46; EXPRESSED IN PLACENTA, SIGNAL = 0.59; EXPRESSED IN LUNG, SIGNAL = 0.63; EXPRESSED IN ADULT LIVER, SIGNAL = 0.52; NT HIT: AE007670.1, EVALUE 4.90e-01
ctgcattttctcttccctgctatgttaaatcacctgtgttcatctccaggactgtgttgcaataactggggtcttgaggttggatcctcctcaactgtctactaccagctgggaagcctttgatgatcactttaccaataaagatatcactttcctcatgggctaaatgggggaagttgagttagttaaaagctatgtgatatatgtatattacatatacatatatacaatacttaagtaacattttaaatatattgtctctttagggagtcatatttatacaaatgcaagaaaagtttatatccacacctagttcattgaataatcaagccctaataaagagaaggatagcatggaacgttgctggacccatgctgcatcttcccaaccctgttaaaagatgtatcagactgtctctgagaagtgagaaaggataaatttgtcataaagacccaaatcactgttactctctttctgacaccttagagtgagaatggacttttgccacattgcagaga

SEQ ID NO: 4200 - DNA, 554 bp, Homo sapiens
  MAP TO AC020582.3; EXPRESSED IN PLACENTA, SIGNAL = 0.7; EXPRESSED IN FETAL LIVER, SIGNAL = 0.53; EXPRESSED IN LUNG, SIGNAL = 0.53; EXPRESSED IN ADULT LIVER, SIGNAL = 0.57; SWISSPROT HIT: O35828, EVALUE 1.00e+00; NT HIT: AL163247.2, EVALUE 2.10e+00
tcatggtcctcgttcctctcatgaaggctctttttcctctcctgtcttcccttctaccatcacactctgcctcattttcatttttcacttccaggaaagaagaaatgcaaatttaaagcccttaagagcttttttgttaagaagaaggaaaaagaagccgaagatacccaggaagaagaaatgctagaactgagcttgtccagcagcaacattaacatctcttctctgcagcccgttcgggaaaatcaaccaactaaggccaggtgagctcagatgcggtggagagtgatggggacaggggaagaggcaggcagttggatctaggtcacctttcggcagccaaatcaccagggacaccaagagtccccacctgtgggggccaggcttgcagccattgccaatgcagtcatgtccgggggaggggggtggtgcttttctctgtgtgcatatgcatgtttgttgtctgagctgcacatctcagtgggttggagcatggcaaatgcataccccacttcccgagagcactgaataagagggtgcagatattcagggaa

SEQ ID NO: 4201 - DNA, 564 bp, Homo sapiens
  MAP TO AC021009.3; EXPRESSED IN BONE MARROW, SIGNAL = 0.54; EXPRESSED IN FETAL LIVER, SIGNAL = 0.46; EXPRESSED IN PLACENTA, SIGNAL = 0.49; EXPRESSED IN LUNG, SIGNAL = 0.54; EXPRESSED IN ADULT LIVER, SIGNAL = 0.6; EST_HUMAN HIT: BG014919.1, EVALUE 0.00e+00; SWISSPROT HIT: P90727, EVALUE 1.40e-02
gaagatgagcaaaggggatgataaagtatcgccatccaaagacccaggcaagaaaaatgccaggcccagggaaaagctccggggggatggcgacatgatgataatcagcttccagaggatgttctcccagaaggacctggagatcgaggagcgccacaaggggcacaaggagaggatgaagcagatggagaagctgaggcaccagtccagagaccccaacctcaaggagagggcgaagccagcagacgacgggcggaagaagggtctggaaattcctgccaagaaacctccggggctggaccctccctttaaagacaaaaagctcaaggagttgactcctattccacctgctgccgaaaataagccacgcccaggatcaggtgcagactccaaagactggctcgcagggcctcacatgaaagaggtcctacctgcatctcctaggcctgaccagagccgaccggtgtgcccacccctacgtcggtgctgtcctgcctcagctacgaggaggtgatgcacacgcccaggaccccgtcctgcagcaccgatgactacacggacctt

SEQ ID NO: 4202 - DNA, 556 bp, Homo sapiens
  MAP TO CHR22_170.0; EXPRESSED IN BONE MARROW, SIGNAL = 0.97; EXPRESSED IN FETAL LIVER, SIGNAL = 1.3; EXPRESSED IN PLACENTA, SIGNAL = 1.3; EXPRESSED IN LUNG, SIGNAL = 0.97; EXPRESSED IN ADULT LIVER, SIGNAL = 0.94; SWISSPROT HIT: Q92793, EVALUE 9.20e-02; EST_HUMAN HIT: AA132013.1, EVALUE 7.80e-01
tgctgggaaggacatttaggggtaaaatgagcctgtggctttgagtatgacattgaggggtctggatactgacatgaggatgctgggctcagcctgattctgaggaaactgtgaggcagaaacttcctgggggccgcggccaggcttttgaggacttgcatccctcggaggtgcatgtgtgtgtgtgtgtgtgtgtgtgtgtgtgtgactcccaggcatctcccggctgccagctcccactgcggaagagtgatcctcctgacgagggtgcagcggggagcccctcgcagctgggggtaagaagccagccttgggcgggctgccattcagagcacggtggggcccgcgacaggagcctccaccacagatgcaaggacaatggcctgggtttccatggcttcaggaccagctgccctcgtccgaccaaggcggcaggaatctcccagctgcaggtcagcggcttccctggtccaaagactcatctctaaagcggcggttcacgcgagctgcagagtggctggggcatgtagaggcctgttcatcccttcatgagcct

SEQ ID NO: 4203 - DNA, 534 bp, Homo sapiens
  MAP TO AC011580.4; EXPRESSED IN FETAL LIVER, SIGNAL = 0.41; EST_HUMAN HIT: AA843607.1, EVALUE 1.90e-01; SWISSPROT HIT: P25356, EVALUE 2.20e+00; NT HIT: AF388880.1, EVALUE 3.30e-02
aaacgtgcatctcatgttgttcttaaagacaaagaggaagttggaaagtgattactaagaaaaaaagaatgtgagtaacttgaattagataattattcacaagttaaaatatttggctgcagcttgaaatgtaacttcaccaatgaaaaggaaaggatgggcagttgtctagtaaattcaaagctttgtgaaacccttaaatattcatttttttcttagttgtctggataactacaattttcaagataaaattgccagagaatttgtttctgacaactgttataaatcttttgaaagtaggagttctagaatgatcacttctacttttaggtggggattattaaaaatcagcagtggagaaagaatgcaaagaaatggtttgcagactaaatacttttccatttggatttgttctatattggtttagtcttcctacaatagactacccatttcaggtaagagatactggtgtggattaagctcaacagaagtacttagcaaaattatctactctgaagcaactcacgttacctg

SEQ ID NO: 4204 - DNA, 598 bp, Homo sapiens
  MAP TO AL159176.2; EXPRESSED IN LUNG, SIGNAL = 6.8; EXPRESSED IN FETAL LIVER, SIGNAL = 4.5; EXPRESSED IN BONE MARROW, SIGNAL = 5.4; NT HIT: AF029308.1, EVALUE 1.00e-72; SWISSPROT HIT: O88436, EVALUE 8.80e-01; EST_HUMAN HIT: BG687097.1, EVALUE 0.00e+00
tggtgataggcgatagtcccatctgggctgccaaaatgtgtccagaattagtgggttcttggtcttgctgacttcaagaatgaagccatggaccctcgcagtgagtgttacagttcttaaagattgtgtgtccagagttcattccttcagatgttcagatgtgtctggagtttcttccttctggtgggtttgtggtctcgctgacttcaggagtgaagctgcagaccttcgcagtgagtgttacagctcttaaaggtggcgcgtctggagttgttcgtccctccccaggggtccatgatctcactggcttcaggagtgaagctgcagaccttcatggtgagtgttacagctcataaaggccatgtggacccaaagagtgaacagcagcaagatttattgcaaagagcaaaagaacaaagcttccatggcgtggaaggggacctgagcaggttgccactgctgactcgggcagcctgcttttattcccttatctgacctacccacatcctgctgattggtccattttacagagagctgactggcccattttacagagagctgattggcccattttgacagggtgcttattggtgcactt

SEQ ID NO: 4205 - DNA, 528 bp, Homo sapiens
  MAP TO AL133266.3; EXPRESSED IN BONE MARROW, SIGNAL = 0.6; EXPRESSED IN ADULT LIVER, SIGNAL = 1.1; EXPRESSED IN FETAL LIVER, SIGNAL = 0.67; EXPRESSED IN PLACENTA, SIGNAL = 1.1; EXPRESSED IN LUNG, SIGNAL =   1; EST_HUMAN HIT: BF966247.1, EVALUE 0.00e+00; SWISSPROT HIT: Q9Y6P5, EVALUE 2.00e-45; NT HIT: AF033121.1, EVALUE 0.00e+00
gtgatgagcatgtgaggcagtcaataaaaccctactgaatgaatagatataggggcccaatatctccacagtcttaacagggtgggtttttctaagaagccaactgaagaaataatataacagcaattattgtgattagttttatgacaatctcatgacaaataatacttacagaaacattttctgctgagttgaccggcatctcatccacactgtgattgccatttgtaatgtcacagatgcagtagttgctaacagaaggaggtctgaatgtgtggccaccatcacaatgaatttctggactgattccacagccgaatgtgaatgaggcaagagaatgatagtgtgtgagtaaaactactgcatgtaccaattccgcaagggaccagctgtgctcttcagcttttaaaagtcccttagggggaaaaaaaaaaagaatatatttttgtactggggtgtggtaaaagtatacagttcattttagtatttaatttattgaaaacatgagtcatcatacaaagcctagca

SEQ ID NO: 4206 - DNA, 521 bp, Homo sapiens
  MAP TO AC011225.5; EXPRESSED IN FETAL LIVER, SIGNAL = 1.9; NT HIT: L78810.1, EVALUE 0.00e+00; SWISSPROT HIT: Q05175, EVALUE 2.20e-02; EST_HUMAN HIT: AL532400.1, EVALUE 0.00e+00
cttcacttagtggatcccgcaccggggctgcaggtggagctgcctgccagtcccgcgccgtgcactcatactcctcagcccttgggtggtcgatgggactgggcgccatggagcagggggtggtgctagtcggggaggctccggccgcacaggagcccatggagtgggtggaaggctcaggcatggcgggctgcaggtcccgagccctgccctgcgggaaggcagctaaggcccggcgagaaatcgagcacagcgccggtgagccggcactgctggagaacccagtacatcctctgcagccgctggcccgggtgccaagttcctcactgcccggggccggcagggccggccggctgctccgagtgtggggcccgccaagcccatgcccacctggaactccagctggcctgcaagcgctgcacgcagcaccggttcccgctcgcgcctctccctccacgcctccctgcaagctgagggagccggctgtggccttggccagcccagaaaggggctcccatagt

SEQ ID NO: 4207 - DNA, 546 bp, Homo sapiens
  MAP TO AC021619.3; EXPRESSED IN FETAL LIVER, SIGNAL = 0.41; EXPRESSED IN LUNG, SIGNAL = 0.55; EXPRESSED IN ADULT LIVER, SIGNAL = 0.58; SWISSPROT HIT: Q9XSJ6, EVALUE 8.80e+00; NT HIT: gi16157562, EVALUE 1.00e-97; EST_HUMAN HIT: AW170300.1, EVALUE 1.00e-95
tgagggccattaaatatgggtcctccagcaccatcagggataggtgctactggaggaatcattgcattcccatacacagaaaaaggcatacccttaaaaaaggaaaacacacacattaacatccaagtcattgttcatttttcccaatataatcaatagccttaaaattgatatttgaaagttcacctcatcctgggaatgtgtaacttatctaagaaatctaaaaattattacccattatataacttattttaacattagattatacatatgcctactatattcaaaacattttctcagaaaatcctcccttaaataactagtacaaaatcaggactttaccccaactttaggaaagtccatgtagcctgcaggaacatgctgatggaatgtaccagaaggagttacaattcctgtactatctcgctccattgcttgatgttgtgaaaatactcctgggtcagacatcggtctgtggatcataggatttcccatcccagggttacaccagtctactttgtctgagggcaaacaaagaggcaaaac

SEQ ID NO: 4208 - DNA, 572 bp, Homo sapiens
  MAP TO AC011676.4; EXPRESSED IN FETAL LIVER, SIGNAL = 1.4; EXPRESSED IN HEART, SIGNAL = 1.6; EXPRESSED IN BONE MARROW, SIGNAL = 1.6; EXPRESSED IN ADULT LIVER, SIGNAL = 1.4; SWISSPROT HIT: O02626, EVALUE 3.00e-03; NT HIT: gi14747475, EVALUE 1.00e-122; EST_HUMAN HIT: AW504680.1, EVALUE 1.00e-122
tcacagaggggtcacaacagtaccatctatgagcacctgctgcaggcccagtgctggctactgcctcactcggccctcaccgggacaatgaggtgggcacactcactgtcctgtctccactaggagactaaggggtcccggcttcatcacaggacaatgacacagtgagtgaacagccacttctcacggtacccgtgacctctctgcggcacacagaccccgccttcaccgcggagcactttcagacgcatcttcccatgtgtccccgtgatggactcacaggaatttagcattccaaatcaaaggttcgctacctaaccttgctgacttcttcgaagtggtcgagatggcagcccatcaggaaggacgtgggggccatgacgaaatccagcatctggtccgacaggatgggcacgaaggggtgctgccactgcagcggatacaggtaggccatgaagcactcagtgaccagcgtcagcagagcccagtccgaggagaagaagacgatccgctgttccgtcaggatgcatgtcaggatctgaggggagaacccgccgcactgagtacatgct

SEQ ID NO: 4209 - DNA, 572 bp, Homo sapiens
  MAP TO AL136103.2; EXPRESSED IN BONE MARROW, SIGNAL = 0.68; EXPRESSED IN PLACENTA, SIGNAL = 0.68; EXPRESSED IN LUNG, SIGNAL = 0.64; EXPRESSED IN ADULT LIVER, SIGNAL = 0.82; EXPRESSED IN FETAL LIVER, SIGNAL = 0.64; SWISSPROT HIT: P33757, EVALUE 5.50e+00; NT HIT: AJ002428.1, EVALUE 2.20e+00; EST_HUMAN HIT: BG428932.1, EVALUE 2.00e-01
cataccccaaacaaacaggggctgaataatgaatgatcaatgtgcaaaatacaaaataagatagaatataaatgttaaatcaagggtatcaataattttcagtatcagggtagacaatgcaaaaacgtttgtgttttagaatctgaagggtgcaaaaaagtgattccatataattcttcactctgctactgtggatacaaaatcccctaccccaagctgaaccagcttgctcaaggtcactaaaatggaagatggcaaaaagagaatcatacctagctgtgctcaatacctgcccttcattctttccatcacatccaccaaacccaacaaggttactcctataaagtctaaggattaaattgcttttcagtttttcctggttaatttcatgttccttgaatcaaagtataaatacctcttctctggctcaggccttggctctacgtgtccctggattatttctgatgacaaaatacatttcaaaattttctccttgacaatgatcttaaatgtgaagacattgcctaaacatctaatttcaccagtcatctactctggatcctttctgccac

SEQ ID NO: 4210 - DNA, 545 bp, Homo sapiens
  MAP TO AL133268.4; EXPRESSED IN BONE MARROW, SIGNAL = 0.8; EXPRESSED IN LUNG, SIGNAL = 1.1; EXPRESSED IN ADULT LIVER, SIGNAL = 0.85; EXPRESSED IN FETAL LIVER, SIGNAL = 0.77; SWISSPROT HIT: O67169, EVALUE 8.80e+00; NT HIT: AJ006345.1, EVALUE 1.00e-04; EST_HUMAN HIT: BG620565.1, EVALUE 3.00e-03
atcctgctgggattttgatgggcattgtactgaatctataaatttggggataattaaaatatgaactatattgaacatccaattcatgaatatggtatgctgttccatttatctaattagagtctttgatttctttcatctgttttgtagtttttagcatatgtactctgatatcctttttagggtcaggtccacacacacagtgcagctttggagttaacccaggagtttatccataattttatgggctcactttcctaagcctcctcctatctgaaatctctccatgattttctgcttcccaggtatccccttcatcttctggttgaaaagccagggcttcgatttccctgtactgctgtgcatgttctggaaactgcatatgcttgtggggcaaagtggtgagaggttagcgagagaaaagactgcaacaaggattctcttcgtattattcgaaccgaaattgctttgatttgagaaaatgattctttttccttggagtgtcatctatgagtgaggcttctagcagtccttcaccaggagag

SEQ ID NO: 4211 - DNA, 558 bp, Homo sapiens
  MAP TO CHR22_99.0; EXPRESSED IN FETAL LIVER, SIGNAL = 1.3; EXPRESSED IN LUNG, SIGNAL = 2.2; EXPRESSED IN ADULT LIVER, SIGNAL = 2.3; SWISSPROT HIT: P21414, EVALUE 3.00e-16; NT HIT: AL163246.2, EVALUE 0.00e+00; EST_HUMAN HIT: BI767970.1, EVALUE 0.00e+00
aatacctccctccacaacccattactctgttctggatctcaaacatgctttctttactattcctttgcacctttcatcccagcctctcttcgctttcacttggactgaccctgacacccatcaggctcagcaaattacgtgggctgtactgccacaaggcttcacagacagcccccattacttcaatcaagcccaaatttcttcctcatctgttacctatctcggcataattctcatgaaaacccacgtgctctccctgctgatcgtgtctggctaatctcccaaaccccaatcccttctacaaaacaacaactcctttccttcctaggcatggttagtaaggtcaaaattcttacacaagtgccaggactgcgtcctgcagcctttctgtccaaacaacttgaccttactgttttagcctagccctcacgtctgcgtgcagcagctgctgctgctttaatacttttagagccccaaaaaatcacaaactatgctcaactcactctctacagttctcataacttccagaatctattttctttctcccacctgatgcat

SEQ ID NO: 4212 - DNA, 590 bp, Homo sapiens
  MAP TO CHR22_131.0; EXPRESSED IN ADULT LIVER, SIGNAL = 0.61; EXPRESSED IN PLACENTA, SIGNAL = 0.48; EXPRESSED IN LUNG, SIGNAL = 0.58; EXPRESSED IN FETAL LIVER, SIGNAL = 0.55; EXPRESSED IN BONE MARROW, SIGNAL = 0.5; SWISSPROT HIT: P54198, EVALUE 4.40e+00; NT HIT: gi14777617, EVALUE 0.00e+00; EST_HUMAN HIT: BG698163.1, EVALUE 8.30e-01
cgcttcctgtactcagagccaccctagtactacgggcacacacagaaaacagcagcctgcgtactttcaaaggaaaggcatctttaatcaccaatgcctggaaaaattattttgtttccctcttccttccgtcttgtttcctaacttcttaccaaagtttagagtctgagtttttcgtataataatgtcccacatccacacatcgggcctacagatgctctcccttgaatcgactggaaacatgacaccggttccatgctctggaactgtcacctgtgatgtgctgggctgtgtcccaagcacaggaatcccagcagtttcagctcgatgcagaaccaccatgctccagacacaggcttgggaaagacacgtcaaaattaaaatactaggtaagagaagcacctgattgggtagaagttggagaggaatcctggaattttgtggccagaaggagccactgccccttttgtttagtaagactagacagtaacagaagccagttgtcagctatgaaagtggtgggtgaagcaggggaggctcctctatggtgggaccctggacaagggaagccgaatgtgtgaagaaggggt

SEQ ID NO: 4213 - DNA, 584 bp, Homo sapiens
  MAP TO AC023123.3; EXPRESSED IN FETAL LIVER, SIGNAL = 0.42; EXPRESSED IN PLACENTA, SIGNAL = 0.37; EXPRESSED IN ADULT LIVER, SIGNAL = 0.63; SWISSPROT HIT: P70531, EVALUE 2.20e-01; NT HIT: gi14770732, EVALUE 0.00e+00; EST_HUMAN HIT: BG757412.1, EVALUE 1.00e-129
ctccttggttactgcttggcatataactatatcctataaagagaaacagagggatgctctatgtcaaaggatacagtagagctgctcttttttgtaccacagggcatgaagtgctctcctttgtttcgtcctggggctttttatttaactcttgatcacagttattgcatttatcttcttcaggattgaagccattttgaagaatttcagtttgctcttccattttctcatcatgtacagaatttatactatagtcaaaaactgactccatattaacatctgtttcttgaagactgtcatcaccaatgctatgatggtagttgaaagcaagaggttaatccttatcaccaagcttttgggaaaaatttcatttcctaagcatcaaaattttggaaatcaaataatgtaacagattataaatgtagtgaagaaaaaggaccattggagtctaacttacctcaagaaaatttttaagcaagcacaggtgactgattcaggaatgtcagggaactgctgtagacagagttgtaacaactgtacatctttcttttttaaggcaatctccattaagtcggggcacaaac

SEQ ID NO: 4214 - DNA, 525 bp, Homo sapiens
  MAP TO AL034549.16; EXPRESSED IN BONE MARROW, SIGNAL = 3.2; EXPRESSED IN FETAL LIVER, SIGNAL = 1.8; EXPRESSED IN LUNG, SIGNAL =   3; EXPRESSED IN ADULT LIVER, SIGNAL = 1.4; SWISSPROT HIT: P21107, EVALUE 2.00e-39; NT HIT: gi16165167, EVALUE 0.00e+00; EST_HUMAN HIT: BG028251.1, EVALUE 0.00e+00
gaaacttgggacgcagagaggaacaacctgagctggcagagtcctgtggctgagagatggaggagcagatcagatcgatggaccagaacctgaagtggctgagtgctgccgaagaaaaggactctcaaaaagaagacagatatgaggaagcaactgagattcttactgataaacgcaaggaggcagagacccgggctgagtttgccgagagatcggtagccaagctggaagagacaattgatgacttggaagataaactgaaatgcaccaaggaggagcacctctgtacacaaaggatgccagaccagacctgcttaactgaatgagatgcagagcaccccagtcccaccttgccactgctcctccctctgaccccaactccaactaggccagcctgcccaaagctgccctttaactgagggttgatctttaactggaaggctgctttctcctttcaccacccctacctcccccacgtgtcttttttgccaaactgtctctgcctcttcccagagattccagctg

SEQ ID NO: 4215 - DNA, 595 bp, Homo sapiens
  MAP TO AL136978.3; EXPRESSED IN FETAL LIVER, SIGNAL = 0.52; EXPRESSED IN BONE MARROW, SIGNAL = 0.49; EXPRESSED IN PLACENTA, SIGNAL = 0.63; EXPRESSED IN ADULT LIVER, SIGNAL = 0.56; EXPRESSED IN LUNG, SIGNAL = 0.54; EST_HUMAN HIT: AI038161.1, EVALUE 5.40e-02; SWISSPROT HIT: P50527, EVALUE 5.80e+00
taaatgcgtggcactgtttccaaactaaacgcaaaactcagtaacttcacctttaaaaacaccgtgcacataactaaaagacctgtgggtacacagtttaggatcactggggctattctgtctgcaaggaaaaacaaaaacatttgtcttcacacatttctttaataggtcaactagtaaaggaaacagtaggtttgtctgcaacccttaattgatggctattgaaacttgaactggagaagccacattgaactttgtagggctagagcccatttctcctactcctgcctgtaaagccagggtggcactgaccatcgatgtccactctgctgacaaccagggagctacttgacattgcaggatttggaaaactcctagcagtggaaactcttcctgtgtgaacaaatgtgttttctctttggatatcaatcttgcctctcatgggtctgtaccttgatgattagcaagtactttaccctatcctaatttgcatgtggtgaggaacattatgtttttcttagctctaatatgtttggtatatagaaaaaagcaccaagtcagaattactgagttaacgtcctggctgtgacactta

SEQ ID NO: 4216 - DNA, 554 bp, Homo sapiens
  MAP TO AL139100.1; EXPRESSED IN FETAL LIVER, SIGNAL = 0.72; EXPRESSED IN PLACENTA, SIGNAL = 0.69; EXPRESSED IN BONE MARROW, SIGNAL = 0.67; EXPRESSED IN LUNG, SIGNAL = 0.73; NT HIT: AL163204.2, EVALUE 4.00e-08; SWISSPROT HIT: Q01432, EVALUE 6.90e+00; EST_HUMAN HIT: BI461302.1, EVALUE 9.00e-87
acccaccattcctaaaagggttagcctatcattttctcccttatcttctaaaagcctaccctggccatccccatttgataacttgcaatcaagaaaggtcattaccaagcaaatagggtgtgtcttcaactttgtccactggatctgaaagaggaaagcaaagtctcagggctgtggtagctgaccctccagaaagcaggcctactggccaaagagaacagcagcattctgaccctcattctcacccggatggaggccctgttgcagtagacccgagtgatggctaaccaggtgggcagctccagtacattctgtagaacctcttcatccagctccaggttggtcagctgaccctcccctttcagggtgctcaggttgattttgtctggggaaagattcttagtgaacctgaaaagagtaatgataagaagctattatttccatgggaatctgctaattgggtattacagccaaaacacttctgaatctagagaaaagaaaaaattaaagaacatttgttaaggctagtcaagtgaagcagtgggagtgaagga

SEQ ID NO: 4217 - DNA, 523 bp, Homo sapiens
  MAP TO AL133330.5; EXPRESSED IN PLACENTA, SIGNAL = 0.76; EXPRESSED IN ADULT LIVER, SIGNAL = 0.83; EXPRESSED IN FETAL LIVER, SIGNAL = 0.54; EXPRESSED IN BONE MARROW, SIGNAL = 0.61; SWISSPROT HIT: P43004, EVALUE 7.00e-29; EST_HUMAN HIT: BI824607.1, EVALUE 1.00e-100; NT HIT: gi14763556, EVALUE 1.00e-129
gcaaagagggcaaaagagtgagcaaagagaaaggtgatttcttttgttctctacctggaagcggtgcccagggcagtgatccaagcttggaaaatgccagcaaaaaaggagaaggggtttttcctggtcactacaaagtaaatcaaggggagaaagatgcccccgtggatgatgaggcctatgatcactgttaccatgtacatccccagttgcctagcaaccacttctaagtccttgattgcaatgatctttccacagatcaggcaggcgatacccaggggagagtacctgaaaaacacaaaagggaaaaacagcattgaagagatcattagggattcagaacctgggcctcctctgtaccgcacactgaggaaaacgcttggctcttctgtacaaaaaaagacttttgctgagaaaagttcatgttattttttactttggaccacttcccttaaccaaaatctgttttgtggatctggtggcgcctgctctgatgaaaagtccaaaggcaaattttgtggct

SEQ ID NO: 4218 - DNA, 593 bp, Homo sapiens
  MAP TO CHR22_166.0; EXPRESSED IN FETAL LIVER, SIGNAL = 0.53; EXPRESSED IN BONE MARROW, SIGNAL = 1.3; EXPRESSED IN PLACENTA, SIGNAL = 0.71; EXPRESSED IN LUNG, SIGNAL = 0.58; SWISSPROT HIT: P97369, EVALUE 2.00e-10; EST_HUMAN HIT: BI029226.1, EVALUE 1.00e-105; NT HIT: U50721.1, EVALUE 2.00e-62
attcccaggtgaatctgtgcaattgacagcaatgtgttagactataatttggctattgctatatggtcaccagcttcccattcctacactcaatatggccaccagcttcccattcctgcactcagtatggccgccagcttcccattcctgcactcaaggcctgggctgtgtcttgttatctccgtattcccagggtcagtggctggacctggcctgggaaggggtgctgagagacgaatgttggcttcacaacattagtttgctttgcactctacctcatacccggtgggcccacaaaacacatcagggtgataagcaggatctcttttcccctccttcgcacagtgactttgaacagcttccggatgatgttgccatctcggccaacattgctgacatcgaggagaagagaggcttcaccagccactttgtaagacagactcctagtccttcacccaacaacctctgaacttccacccagctgacctctgaaccttgccctctgacctctgaacctccaattctctgatctcttaacttctatctcagtggttctcaacaggaccgattttgcccatttgacattaccctgg

SEQ ID NO: 4219 - DNA, 579 bp, Homo sapiens
  MAP TO CHR22_175.0; EXPRESSED IN BONE MARROW, SIGNAL = 0.52; EXPRESSED IN PLACENTA, SIGNAL = 0.63; EXPRESSED IN FETAL LIVER, SIGNAL = 0.62; EXPRESSED IN ADULT LIVER, SIGNAL = 0.89; EXPRESSED IN LUNG, SIGNAL = 0.61; SWISSPROT HIT: Q07869, EVALUE 7.00e-83; EST_HUMAN HIT: BE168040.1, EVALUE 0.00e+00; NT HIT: gi13630102, EVALUE 0.00e+00
gcatcccacatcacctgacttaccttggtgtcctcctttgtagccttttgtcatacatgatatggagacactgtgtatggctgagaagacgctggtggccaagctggtggccaatggcatccagaacaaggaggcggaggtccgcatctttcactgctgccagtgcacgtcagtggagaccgtcacggagctcacggaattcgccaaggccatcccaggcttcgcaaacttggacctgaacgatcaagtgacattgctaaaatacggagtttatgaggccatattcgccatgctgtcttctgtgatgaacaaagacgggatgctggtagcgtatggaaatgggtttataactcgtgaattcctaaaaagcctaaggaaaccgttctgtgatatcatggaacccaagtttgattttgccatgaagttcaatgcactggaactggatgacagtgatatctccctttttgtggctgctatcatttgctgtggaggtgagtggttgatttaatctgctggtatcatgtcactgacaggctcctgtcttgaaaaatttgacaatgggaaatccagtaccagcct

SEQ ID NO: 4220 - DNA, 505 bp, Homo sapiens
  MAP TO CHR22_176.0; EXPRESSED IN BONE MARROW, SIGNAL = 0.94; EXPRESSED IN PLACENTA, SIGNAL = 1.1; EXPRESSED IN ADULT LIVER, SIGNAL = 1.3; EXPRESSED IN LUNG, SIGNAL = 1.1; EXPRESSED IN FETAL LIVER, SIGNAL = 0.98; SWISSPROT HIT: Q9CKQ9, EVALUE 1.60e+00; EST_HUMAN HIT: BE693397.1, EVALUE 0.00e+00; NT HIT: AB051454.1, EVALUE 0.00e+00
acatcccaatctgcaaaaggaataacaaaaactcaaatatcatttggttcctaaaaaagggaatgttttcaagaaaaataaaatagaggggccttttcaattataaaaggcagagcttcctttgctggttttctccttcccagtcacctcctgggtgcagttcagagcaagttcaccccgtgcttcagcagcttctgctttgctttgccggagaggctgaaggcgccatcctgagggtttgggaagccggagctccgtgctgcaggtgccagctgctggaaatatgtctcctggatggggttgcaacaggcgtacacagccgtggaggcatttctgttggaggaagaaagaaggcaacggtccaatgctgctggtgctaatctcagaccacacagagacctcagtaaggttcttgtcacagaggacccaggacacccaatgtggcatgtgcagctgtcatggcacggaattctatttcttcagctgagtttcaggcttcagtgcc

SEQ ID NO: 4221 - DNA, 519 bp, Homo sapiens
  MAP TO AL136317.2; EXPRESSED IN FETAL LIVER, SIGNAL = 0.52; NT HIT: gi4758017, EVALUE 0.00e+00; SWISSPROT HIT: Q99439, EVALUE 2.00e-69; EST_HUMAN HIT: BG283519.1, EVALUE 0.00e+00
tgtagcccatcttcagggacatggaggagttctcacacttgtcgattcccaacttggtgtcatagatgtgccgctgggtcccgggagccgtcatgcccacctggctggcgcacttgtttgtacccatctggaggctgatggtcgaattgtccatggggggcaggatgcggttcttggggtcgtagagatgcctcctcgtgccatatgcggtcatgcctgactggctggcacatttgttggtaatctgcagccggatgacgcactggctggccttcatggtggtgtcgtcgaagttctgcttctctgagtacttgtcacggatgtccaccccgctccgcagccccttagtcttggccttccctgccagggcgagaagagacacccgcacctgcatattgttcccactctcaaacaggtcgttggcctcaaataggtccacgggatcatgccgtagctgaccattgccttgaggaagttggagaggttttctagctagtgccagttctacacggaagccgt

SEQ ID NO: 4222 - DNA, 583 bp, Homo sapiens
  MAP TO AC013341.3; EXPRESSED IN FETAL LIVER, SIGNAL = 0.59; EXPRESSED IN PLACENTA, SIGNAL = 0.47; EXPRESSED IN LUNG, SIGNAL = 0.45; EXPRESSED IN BONE MARROW, SIGNAL = 0.52; SWISSPROT HIT: Q70622, EVALUE 2.50e+00; EST_HUMAN HIT: BE156679.1, EVALUE 4.00e-09; NT HIT: AF224669.1, EVALUE 1.00e-04
tctattgacccaccttcaagctaattgattttttctttagctatgtcctgtttgctggtgagctctgtgaaggcattctttatttctgttgctatattttttattactatcatttccttttggttcttccttagaatttccatctctttgcttacaataaccatctgctcttccttggtatctacttttacattagagttctcaacatattaattatagttattttaggttttctgtctgataattctaacacctgtgttatatctgactctggttctgatgcttgatttttctctttagtccatattttgtcttaccctttgacataccttgtaattctttttaaatttaaataatatgtattggcaaatagaaactgaggtaaataggtcttttgtgggaggatttatgttgattgagaaaaacagaattgagctgcgtttaatgtttgttgtaaccatcagtgccagaggcttcaaatcctctagtggatggttgcttttgtctcccctcttgacttcagttgtccctaagtaccttcagacagacactgagccttgtgtctcttcggccatagctcact

SEQ ID NO: 4223 - DNA, 582 bp, Homo sapiens
  MAP TO AC013614.4; EXPRESSED IN ADULT LIVER, SIGNAL = 0.46; EXPRESSED IN FETAL LIVER, SIGNAL = 0.41; SWISSPROT HIT: P29128, EVALUE 2.20e-01; EST_HUMAN HIT: BF993794.1, EVALUE 6.00e-14; NT HIT: gi11467282, EVALUE 8.70e+00
cacggagttttctcagagggagcaccttcttcacatcttcccacaggcagtgaagggagggcctcgctgtgctgcaccccatgcacactcatccaacactgcacctgcagccacatttgtgcccacagcagagggaagagcaggaagcttcaaggcatcattgccttcctgtgccctgaatgcaggctttggactcagaagaaaagcatgggctccttccctaaagggcgagatgacatccccaaagagagaagggcagattcctggaattccagtcagtgaggctttggttttagccagactccctccgacacaaagagcaaaattcaggactgccaataagttcctaagaaccactggcccatgggatggactcttcaggactcccagatcaaaggattcagagggaaaggtcacctctgtgggatcctctttctgcacaagaagctgtccttctattctccagccagaggttggcagaacctttacggcatagcttcattctcctgctgccagagagatgacctgtccagggctcagtcccccacacccccactaccttgcttcacctccagtgatggt

SEQ ID NO: 4224 - DNA, 513 bp, Homo sapiens
  MAP TO AC013613.3; EXPRESSED IN PLACENTA, SIGNAL = 0.44; EXPRESSED IN ADULT LIVER, SIGNAL = 0.45; EXPRESSED IN FETAL LIVER, SIGNAL = 0.42; NT HIT: gi14861872, EVALUE 3.00e-24; SWISSPROT HIT: P08547, EVALUE 1.00e-24; EST_HUMAN HIT: AW852930.1, EVALUE 7.00e-32
gcagagtgtggtgaaagcacaaaggcggaataatgaggagtttgtaaggaaaagaagacttcatggagttgttagcatttagcatttttaaagacatgaaaacttgctgtgtggcctatgctggtcttgaactcctggcctcatgtaatcctcttgcctcagcctttagaattgttgggattacagatgtgagccactgtgctagtttagattttaaattaaaagtagaaattttcagtgacaacgaagtatatgaaaaggtgctcaacattattgagcatcagaaagatgcaaattaaaactacaatgagatatcatcttaccctagttaaagtgacttttattcaaaaatacaggcaataacaaatgctggtgagaatgtggagagaacggaacccttgtaaactgttggtgggaatgtaaattagcacaaccactatggagatggtttcctttaaaaatagaactaccatgtgatccagcaatcccactgcaaggcgtatgcacaaagaa

SEQ ID NO: 4225 - DNA, 584 bp, Homo sapiens
  MAP TO AC024066.3; EXPRESSED IN FETAL LIVER, SIGNAL = 0.42; EXPRESSED IN PLACENTA, SIGNAL = 0.39; EXPRESSED IN ADULT LIVER, SIGNAL = 0.45; EST_HUMAN HIT: AV730982.1, EVALUE 2.00e-07; NT HIT: AL163202.2, EVALUE 2.00e-07
tccaagatggcagattaggggcttttaccatacgttagcaacttggaaataaaaaaacagtgcataaagatcaactctgtgagctttaattcaaaaaggaaaacagaaactcactggtgttgttaaggacacccagatcctggagaagaaagcatgggaaaacagtccccgtgatgatgtctggctgataaaagtgagtgaagtcccactgtgtgagagaagcagaaagcgtccctctgtgactcatctttccactggaaatccaagcaacccaggctgagggggagcattttatttctcccaagccctggagctaacttagggagaagcttggagacactgagagggaaaggtgctaggaaaagctgcagacattttcccaaacccaggaccaatagcaggacatcatttttaatctgggtgcatacaaagtcagtcattctatggtgaccctgcagcatggccacgtaaggattatagtcttgggccagagatgggagttcttgccctggagtgggctaggagcctccacagctagaattgtggaaagtgtctcagcagtgagcactggaattgtgctctcc

SEQ ID NO: 4226 - DNA, 549 bp, Homo sapiens
  MAP TO AL137784.2; EXPRESSED IN PLACENTA, SIGNAL = 1.1; EXPRESSED IN FETAL LIVER, SIGNAL = 0.89; EXPRESSED IN BONE MARROW, SIGNAL = 0.92; NT HIT: U40738.1, EVALUE 2.00e-90; SWISSPROT HIT: P39947, EVALUE 2.00e-16; EST_HUMAN HIT: BE254846.1, EVALUE 4.00e-61
caggacaatagccagcagtgaaaaaaaaaaaaaaaaaagatggcacagaatcaaactgacatgaaactactatagttctgaattctgccctgaatttcagatgaacttacctaattctgtcagctttaaatttatggtatatgaccatatgttgagagatacctgtaatatacctccactgcattaggaaaagttactaatcagattagtgatttttttaaatgagacattctcaatcaaatcacaaatttaaaaaataaaattaacatggatcatgaagttttggaagaaatgttttaaaaactacaaaacaacataatctaagaaaaatatagtaagtatgatatatgattaaatgacatcaataattaaagtctacaaagtacctgtttggaggtggttttggttttggcatcttactaagaatggttgccatctcttttctctcatcgaaattcttccactgctcatatagttttaaaataaccctgattatttccaaaatctagaagaaaatatttgaaaagttctcagtggcaaaaacaagca

SEQ ID NO: 4227 - DNA, 598 bp, Homo sapiens
  MAP TO AL137222.3; EXPRESSED IN PLACENTA, SIGNAL = 0.56; EXPRESSED IN ADULT LIVER, SIGNAL = 0.75; EXPRESSED IN FETAL LIVER, SIGNAL = 0.52; NT HIT: gi7706526, EVALUE 7.00e-59; EST_HUMAN HIT: AW964474.1, EVALUE 1.00e-58
tgctccagaccatgcttatggctggtgtggcctggtaaaacaggcttgcaataagaacatgcactcacattcttacggagccacggtgattttgacaacttcatgaaggtcaaatgaggtttaaaacttctgctctctcctaccaggatgcctttttcttgaaatgtcctatttgcagtctctgaagaaaataaagagaaacaaagaaatgctactacagtattttcagttctttttaactgtaaaaaaaaataccagttcaaacaatcactaattattttacagtgaagattactttatacacctgcttcagatattttctttaaaagagagaaaaaatctacaatgtgtatgataacaaatgctatatgacagttaaatgtccagtgatttcacacctgtggtaaagcacacaaaagcaataatttgaaagggatatctaataaacagaataactgctgggctgacatgatgctgattttcacagaacattccagtggtttccctgagtataaaaaaggactagcttatctgaaacccttcatatctcaaacttctgcttccaagatgaagtagcagaaaccttccctgagcaatg

SEQ ID NO: 4228 - DNA, 503 bp, Homo sapiens
  MAP TO AC011165.3; EXPRESSED IN BONE MARROW, SIGNAL = 1.3; EXPRESSED IN HEART, SIGNAL = 1.2; EXPRESSED IN FETAL LIVER, SIGNAL = 1.3; NT HIT: U97688.1, EVALUE 1.90e+00; SWISSPROT HIT: Q9MLK8, EVALUE 6.10e+00; EST_HUMAN HIT: AI889529.1, EVALUE 2.80e+00
ttgcgaaccatgctgtattccaagaactgagaaaagacacatagatagggcatagtttgtgaatagaaggagtgattttattagctttctattgctactgtcacataataccacaaacttagttgcctaaaacaacacaagttacagttctggaggtcagatgtttgaaatgagtttccctaggctaaaatcaaggttgccaaggagtccatgcccctaccttttctggcagcctgtttttggttatggtccccctttctagcaatcgcatcattccaacctctgcttctgtcatcacctctccttccctgactctgaccttcctgcctccttcttctgaggacccctgggatttcattcagcccacacacataattcaagctaatcttatctcagcattcttaactcacctctgcaaagttctctttgccaggtaaggtaacatatttacaggtttaaagaattagaatgtcaatatttggtggggaagtggggaacattat

SEQ ID NO: 4229 - DNA, 506 bp, Homo sapiens
  MAP TO AC011950.4; EXPRESSED IN FETAL LIVER, SIGNAL = 0.54; EXPRESSED IN BONE MARROW, SIGNAL = 0.49; EXPRESSED IN PLACENTA, SIGNAL = 0.46; EXPRESSED IN ADULT LIVER, SIGNAL = 0.55; SWISSPROT HIT: P31563, EVALUE 2.10e+00
ctcctccttgcctctgtgacatttcatacaaacccagtatatttagagtggcacctgagcctcattgcatcgtgctgaaaggtggatactggaggataggaaaaacagcattttattatttgctataaataaataatcataactctgctctgttccagaacccttatgttggcattcaggacaataaacacagtattaaaaacgatgtctctcttatttttcatagctctgatcattgcctgatggtactgggtatctgtgtcactctgtggcagtccatgagtacagagccatgactgtgttcatgactactgcctaaaagagtttctagtaaatagcaaaatatcaataaatactagtcaaatatataaattaatcaatcattgaaatgaaattttttgagaactgaatattgtagctttctactgatttaatttaaagcagagaatagattgtaaattttaaaaaattgattgtttatcccagtggactcataaaggatggca

SEQ ID NO: 4230 - DNA, 575 bp, Homo sapiens
  MAP TO AC018691.5; EXPRESSED IN FETAL LIVER, SIGNAL = 0.39; NT HIT: gi7657117, EVALUE 5.50e-01; EST_HUMAN HIT: BI831861.1, EVALUE 0.00e+00
tcccatgcactgaagaaatgcatgtttctaaatctcttttaatgtgaaagctaagacaccctgtgcaaagcagataaaagttcctaagatttattcactgtgggattgctgctgaaattacatcttctaggaaagtataagataatgcctcttccctcaccagagagctaactgtgtcagctgtgctacttaattccaaatatgtacaaattactatgaactttcactaaaatactcccttcctatgggaactcaccgtatgatattgaactcggttatgtgagccacctgctcctggagaaccattgttagagcctctcggcacagatcaagctccccctccagaatgccgccaaaatccagcactatggtgacgcactgttccaagatgacaccaaaaatctgccggctcttgctggtgagccagtccattcgctgcttgtagctctccacagcttgtgttaaatgttccacaaactgataaatcagttctgatttagctgtcagcttaatgaaaataaaagacaaaaacaataaaacaacaccaaaataagtcatttgaaccacagtgctgc

SEQ ID NO: 4231 - DNA, 580 bp, Homo sapiens
  MAP TO AC021975.3; EXPRESSED IN FETAL LIVER, SIGNAL =  13; EXPRESSED IN BONE MARROW, SIGNAL = 9.1; SWISSPROT HIT: P04374, EVALUE 3.00e-22; EST_HUMAN HIT: BG286309.1, EVALUE 1.00e-128; NT HIT: gi14781853, EVALUE 1.00e-124
catcgtgacctaagccttccaaaaaccatcatggttattgatagacttttcatttctacttggaattagcataaagcaaattttttctctcactcatttacagacagcctcagcactcagaccaaaaatgagaatgatttttgttgttgttgttgttattatttaggtttttttcataatcataaacttaattcttcaatacagtttggcatggaagggaataaggaaaacatggaactggaaggaaataaggaaaacatggaacccaaagggaatgagagcacaaagattatagaatactgcaagcaaatggggtggaggggtgctctcctgaactacagaaggaatggtctggtggttaaggtaaaacacaagtccaacttactggaattgtccacagtcagcaatggtgatattcttgctggtcttgacattcctggacccaaagcactccatggcgtccacaatattcatgccttctttcaccttgccaagaccacatgcttgccatccaaccactcagtcttggcagtgcagatgaaaaactgagaaccatttgtgttgggtctagcattgccat

SEQ ID NO: 4232 - DNA, 595 bp, Homo sapiens
  MAP TO AL138832.2; EXPRESSED IN BONE MARROW, SIGNAL = 0.72; EXPRESSED IN PLACENTA, SIGNAL = 0.72; EXPRESSED IN ADULT LIVER, SIGNAL = 0.82; EXPRESSED IN FETAL LIVER, SIGNAL = 0.6; SWISSPROT HIT: P34510, EVALUE 2.60e+00; EST_HUMAN HIT: BF905660.1, EVALUE 1.00e-113
agtgggtggttttctcaaccttccatttctaggagcaaaaaatctttagcttctaatcctttaattcaacccccttcattttctacaatgctcttgttcttcattacgcatttagaaaaacaacaaccaggtctgtaacacagactcgtgactgactattactgaatacctagagaatggtcacgtatcctttgataatatcttacttacctggaaatttagtatttgctgaagtctttctttcatctgatgacatcgttgattcactactgagtctagcaaggataacctgcccaaaagacaacccaaagtatcttcaataacatctcgattatcaccattctctggaaaagcttgggaaaacaagtttttgttcttatccatttcttcagacatttccttaatgtctttggcaagaatctagaggtgataaaagggcatttttcagtgtttagatacatgaattgatatgcaaatcatgttattttctcatagaaagtcaactagatctctctggctgcttagtaataatcagacctaagacaactggaacctctttcaaatacttctatacatttcaggaagttgctctcag

SEQ ID NO: 4233 - DNA, 545 bp, Homo sapiens
  MAP TO AC021009.3; EXPRESSED IN FETAL LIVER, SIGNAL = 0.43; EXPRESSED IN ADULT LIVER, SIGNAL = 0.46; SWISSPROT HIT: Q05650, EVALUE 3.90e+00; EST_HUMAN HIT: BE255217.1, EVALUE 1.90e-01
actcttcccttttatgccgcttcagtaatttaattatgacccataaatttataatcacaggtatacttacaataaacactctagtcaaaccaggtataccctgctagaagactttacgagaaaacaactttcaaatgtctttctctagccaatcccatgtatattgtacaagtgtacctggtcaagttcattagcaggtttataaggaaatgtcctggtcactctattccacctcctatagcagagaaggggtaagtaataggaatgctgtaaatacttttctcacattattcagatgtttccatttctaaaagacagtgtcaaatctctacactcacctaatttcctttaggctcgggagctttctatcaccttctcaagtaactgagcaggaaaggtaagaaaagtccatattctgaattattgtgtctttgaaatatctatattgtatcacatatgattgattttaggggctgaatccagaattctaagttcattattatcttttctcagaatttcagaggtcgtattcaggtatgccccag

SEQ ID NO: 4234 - DNA, 581 bp, Homo sapiens
  MAP TO AL133406.3; EXPRESSED IN FETAL LIVER, SIGNAL = 0.75; EXPRESSED IN BONE MARROW, SIGNAL = 0.83; SWISSPROT HIT: P48147, EVALUE 4.00e-52; NT HIT: gi14759484, EVALUE 0.00e+00; EST_HUMAN HIT: BG741151.1, EVALUE 0.00e+00
taaaattcccacggcagttctgttcaactgtagcctgtgagtgcaggaataatgttcccgtggggaagcattatgcccagtggtttcttggtgtcaacgtgggaaagcccttgaggttttctgtcgctgtcaggaggaagcacgaaaactgtttatggaatccagtcgacgttcaggcaccgcgcgatgaacgcaaacatgtctgagacttcctctatcactttggctgtgggcttccccgccccgtggcccgccttggtgtccacgtggataagcagggggttgctttgcttcctgctgcggcccacgatgtactgaagggtggcaatgaacttcagggagtgaagcgggaccacgcggtcatcatggtcagcagtgaggagcagcatggacgggtactggatgtcatctgcttctggtaacttcacattatgcaatggagagtatctggaaggcaaaaacacctttgtgaggctggagagcaacagtagagttttatggcacagggacctaggtagttaattagcagtgaggactgcagttaactagtacgtgagtgaccaccatggactgtgcctatg

SEQ ID NO: 4235 - DNA, 566 bp, Homo sapiens
  MAP TO AL096771.11; EXPRESSED IN PLACENTA, SIGNAL = 0.59; EXPRESSED IN BONE MARROW, SIGNAL = 0.46; EXPRESSED IN LUNG, SIGNAL = 0.59; EXPRESSED IN FETAL LIVER, SIGNAL = 0.6; SWISSPROT HIT: Q99715, EVALUE 9.00e-49; NT HIT: U73778.1, EVALUE 0.00e+00; EST_HUMAN HIT: BG979833.1, EVALUE 6.00e-88
tctgactaggcatatgagggcaaagttaagaggtaggaatcaaatagaattctaaagttttattgcatctatctattccacagacagaataggatggacaactcaaaaagaagaaatgggcaattttagacaaattgagtgtgagtccagcaagtcagaatctctaccaggatcaatgaatataatacttaaatacctactagacatttttaaaaaagattcccttttaatttctgttctagaacgtggttctcctcaagatttagttactaaagacatcactgacacatcaattggggcttattggacatctgctccaggaatggttcgcggttacagggtctcatggaaatcactttatgatgatgttgacactggagagaaaaatctgcctgaagatgcaattcatacgatgatagaaaatctgcagccagagaccaaatacagaatttcagtatttgccacttacagcagtggagaaggagaacctttgactggagatgccacaactgaatgtaggtaacattatgggtgtgtttgggtgtgtgccggtgctacccaatagt

SEQ ID NO: 4236 - DNA, 574 bp, Homo sapiens
  MAP TO CHR22_168.0; EXPRESSED IN FETAL LIVER, SIGNAL = 0.79; EXPRESSED IN BONE MARROW, SIGNAL = 0.75; EXPRESSED IN PLACENTA, SIGNAL = 0.65; SWISSPROT HIT: P46196, EVALUE 3.00e-29; NT HIT: gi4506086, EVALUE 7.00e-99; EST_HUMAN HIT: AV686595.1, EVALUE 2.00e-97
catgtcagttgcatccatcctccctagcttgaggcctttttgtggataatatacatgctgccttcacgggtatgaaacaggtgtttacacagtgttaaaaatataatactttaccaacttgccttcttcaaatattctgagggctgtttttaatgccatctctctctctcttttttaagctctgcttatgataatgtcaacaaagttcgagtagctatcaagaaaatcagcccctttgagcaccagacctactgccagagaaccctgagggagataaaaatcttactgcgcttcagacatgagaacatcattggaatcaatgacattattcgagcaccaaccatcgagcaaatgaaagatgtgtatcctttttaggcaactggccaattccactgcttggtaaccttgttgagtaaatagaacttgaaatttcctgaacttaaaggaaaagtgcattaaacatgctaaagggaaaatcgtaatctgtttgctatttactccctaagtctagtcatggaaaatcttggttaactctgtttgcagtcatgtttcttctgtccaagggatggtttgt

SEQ ID NO: 4237 - DNA, 564 bp, Homo sapiens
  MAP TO CHR22_49.0; EXPRESSED IN LUNG, SIGNAL = 0.59; EXPRESSED IN FETAL LIVER, SIGNAL = 0.5; EXPRESSED IN PLACENTA, SIGNAL = 0.66; EXPRESSED IN ADULT LIVER, SIGNAL = 0.7; SWISSPROT HIT: P02812, EVALUE 2.80e-01; NT HIT: AL115061.1, EVALUE 2.10e+00; EST_HUMAN HIT: BG741722.1, EVALUE 0.00e+00
cagcttttcctgggtctgagtgagctgaggaaagcacttttgaatgtgcaaggacaataagattaataaccactaccatctctgcagtacgtactgtgtaccagacgctgtgccaagtgaccaacagacattaccgaattcatctttgccgcaacccaacaagggaactgagggtcagagaaggggtccagccaggggccgccaaggttcggactcagcctgggaccactggctccaaagctgggggtccttactcctgttgagctgcaggcccctccaacacaggcagtgggtgggcccccaaatagctcatcttcaaggatatggcctccggaaagcccagggaaagtgtggatcgattttcctgggtcaaggaagaatcaaacctacacttctttacctatttgatgacacaaacccctttgagaaccaggggttggatggagcctctccctgcaaaaaagaccccatctgccaaactgcaggggtccagagaccccctgccccctgaaacccttccatggacctcaggtttagaatctctccattaagccatgagcatga

SEQ ID NO: 4238 - DNA, 568 bp, Homo sapiens
  MAP TO AL136379.2; EXPRESSED IN FETAL LIVER, SIGNAL = 1.8; EXPRESSED IN BONE MARROW, SIGNAL = 1.4; EXPRESSED IN PLACENTA, SIGNAL = 1.7; EXPRESSED IN LUNG, SIGNAL = 5.4; EXPRESSED IN ADULT LIVER, SIGNAL = 4.9; SWISSPROT HIT: P51643, EVALUE 1.00e-26; NT HIT: M84332.1, EVALUE 0.00e+00; EST_HUMAN HIT: BI521394.1, EVALUE 0.00e+00
tcagcttcactgtgtgggacgtgggtggccaggacaagatccggcccctgtggcgccactacttccagaacacacaaggtaagtggctggggcctggtcccatgggcactcctgcttctagagagggggggccagcccatagatggggcatcgatgcccatagatgcggcaggggggctgtgttcccatgaccatttgacactggctgcccggcaggcctgatcttcgtggtggacagcaatgacagagagcgtgtgaacgaggcccgtgaggagctcatgaggatgctggccgaggacgagctccgggatgctgtcctcctggtgttcgccaacaagcaggtaggcgcccgggccagcctggggaatgtgaggagccagtgtgggttccgcctggtggtaggggttactggaggctggtggggcccctttctctgtcctgtggacagcccttcccaccaacccttccttcccccaggacctccccaacgccatgaatgcggccgagatcacagacaagctggggctgcactcactacgccacaggaactggtacattcaggccacct

SEQ ID NO: 4239 - DNA, 544 bp, Homo sapiens
  MAP TO AC021685.3; EXPRESSED IN FETAL LIVER, SIGNAL = 1.6; EXPRESSED IN BONE MARROW, SIGNAL = 3.1; EXPRESSED IN ADULT LIVER, SIGNAL = 0.85; EST_HUMAN HIT: BE887571.1, EVALUE 0.00e+00; NT HIT: gi7305272, EVALUE 0.00e+00; SWISSPROT HIT: Q9NV58, EVALUE 3.00e-02
actcacccagctcaaaggtgacaacctcttcttcatcgttgtcaaaggggctgctgttctctctttcctcaatgagttcccagaagtggttccttcattgggccgggtatctgcttgatgttcccaccttctgtctctgtggctcctctctatggccatcagggtacacatgcttataaaaaccgttccctccaaacgggcagctcccatgtccttcatcaaaatacctgcacgccttgttgctcattgcctccttgtatttcagaatgagtttctgcttctcttctttctcctccacacagtactcacttggaacgacaaagttagatgtgatccgacattctgggcaggactttatgatcttgctctcaaactgcttagcactcctccacttgcgaatgcacttaagacagtaggtgtggttgcagttggagaggatcccgaagcggtgctgtctggggttggctttctcatagatcatctccatgcagctctcacacaccatttcctcgctgcgctgcacagcaaatgagagctccctgtc

SEQ ID NO: 4240 - DNA, 534 bp, Homo sapiens
  MAP TO AC012360.2; EXPRESSED IN FETAL LIVER, SIGNAL = 0.65; EXPRESSED IN PLACENTA, SIGNAL = 0.89; EXPRESSED IN BONE MARROW, SIGNAL = 0.54; SWISSPROT HIT: Q24432, EVALUE 9.90e-01; EST_HUMAN HIT: BF970054.1, EVALUE 0.00e+00; NT HIT: gi13129093, EVALUE 0.00e+00
atcccagtgaactggtttgccgttccagatggtatttttcaagagtgcatctctttgatttcaggagtagcactgtagatgggttaaggaaaagacccctcatcgtatttgatggaagttcaacaagtacaagcataaaagtgaaaaagacagagaatggagataatgatcgactgaagcctcccccgcaggcaagctttaccagtaatgcctttagaaaattatcaaattcctcttcgagtgtttcacccctaattttgtcttccaatttgcctgtgaacaataaaacggaacacaataataatgacgctaaacagaaccatgacttaacgcataggaaaagtccttcaggccctgtgaagtcgccaccattgtcccctgttggaactactccagtgaagttaaagagagctgctcctaaagaagaggcagaggccatggtaagtatgggggtggtttccatgctggtaagtggtctgaatgaaacttgagcagtctgcctcatgacgggaggtgggtcgactgtgctacatt

SEQ ID NO: 4241 - DNA, 531 bp, Homo sapiens
  MAP TO AC020550.2; EXPRESSED IN FETAL LIVER, SIGNAL = 0.5; SWISSPROT HIT: Q14699, EVALUE 1.10e-01; EST_HUMAN HIT: BI823032.1, EVALUE 2.00e-93; NT HIT: AL161555.2, EVALUE 1.30e-01
tgcaaatttctctttgcttttgatatttcagcttcatcaaacccagaagtcatcaagataaattcaattctggatatagtaacaaaagtggaaaactattatcttaaaggatatattgtcggggctattcatcctgttatacaacctgtggggcagcgaaaacacctacctgcaagttacctatacagagtggtgctattgcgcttgaaattaaggtaagcacactattcaagaaagaggcaggtgagggtgacagttctctttgtctaaaagaaaaaaaaatttgaatcaagtggcagagaataaaggacacatgggggttttagtttaaagcacattttccagcagtggaacctggattgaagcaaggaaatgttacacctccttccttaaaactcctgattgatttttgcttcttgcagacaaatgtgtcctaagtgaggatgtcagtgaacaaagggaaagcaaaatagattccagaggcacctagaagctcctgtagccacttcagcagatgcaggagaagcagtg

SEQ ID NO: 4242 - DNA, 577 bp, Homo sapiens
  MAP TO CHR21_44.0; EXPRESSED IN LUNG, SIGNAL = 0.48; EXPRESSED IN FETAL LIVER, SIGNAL = 0.41; SWISSPROT HIT: P47043, EVALUE 4.20e+00; NT HIT: AL163282.2, EVALUE 6.00e-41; EST_HUMAN HIT: BG697724.1, EVALUE 2.00e-47
tttgccatgaaaattacaggttagaaattggagaaataaagagaggattataatttccaactttatagtcttttaggaaaatgagaatgattgctttttcttcagtagtggtgtgtgctagctgctaaattaaatttaaataaacttaaatattgctaacactgaaaatgtctaaataaaactttataatattaataagttaaaataaatagcgcacatcactacatgaggaagaatacatttatagtagcatccttctaatatgcaagattaaactgtctggtaggttagactatccaataatttaataacattgtgtttttaggttttagatcatgaaaagagagttcgtgatcatgaaaatataaatgggttaacccatttatacctagtgttccattattggaacactaagcctgtgggagttatttatatcctactgctcaaggtcatcaccaaggtctgattgcaaaaatttaaaaaattgcaacctcaggcctaaatgggatagccaagtgccttaaatttgccttcagctaatgatgggttcatggcaagaccttgcacttgggatgtt

SEQ ID NO: 4243 - DNA, 540 bp, Homo sapiens
  MAP TO CHR21_53.0; EXPRESSED IN FETAL LIVER, SIGNAL = 0.45; SWISSPROT HIT: Q14149, EVALUE 6.00e-26; NT HIT: D50926.1, EVALUE 2.00e-89; EST_HUMAN HIT: H79433.1, EVALUE 0.00e+00
aatctttttggctttgtgggccacataaagtctctgttgcatattctttgttttgttgctttgtttcttcacaccttttaaaaatacaaagccattcttagcctacttgcaggctggatttagttcattggtttacttgttgattcctggtatagcacaaggaatttacatgtttggaattgtttttgtgtcttctgggataagggggaagaggaagattatatcttgtgttttgggcatgtcacactagaaatagttcctttaaggtgatgatttttccctccaacagattaatgctgaactgttgtttcggccaactgctctttcaactccaagcttttcttctcctaaggaaagtgttccaagaagacatctttcagaaggaacaaattcttatgcgacaagacttctaaataatcatcaagttccacctcagtctgaacctgagagcaacaggtcagtggctaagattggttttccatttggggaatattaaacagagcttttacttgacacttctgtgacagtgatgcaattcgg

SEQ ID NO: 4244 - DNA, 599 bp, Homo sapiens
  MAP TO AC021619.3; EXPRESSED IN FETAL LIVER, SIGNAL = 0.4; EXPRESSED IN PLACENTA, SIGNAL = 0.49; SWISSPROT HIT: P09352, EVALUE 2.60e+00
atggcttgggtaccaatctgacaaagaagcacacagtgcaggcttttccctggtttctttgttccaagtatcctgaacacctacactcatacctcaactaattcttgttgctctcctctggctgccttctcaaacttgaatgtagccctgagggtcacaggctgcatctcttaactcccaggagagttcagccttggactcagttacccctgggcactttcttcactatgatgtcacagctgttagggaagttcctaataccctgcttgctgttgtccttgctcctggtaaaaatatctatggatctgcaatttgaggtttgaaggagatatttctcagcatgatgcttagttgaagtgtccacagcaacattgtctggtccatgtagacaacttttgattcatgtatttactcattgactccctcattttttctttcattcagggaaaatattcattgagtactacatgccaggaacaatgctaagagctgcacagaactttacttcatggtgtcacagggcctgggtgtgaggagctgagataaaacaggttccagcattagatgtatgctgatcctgaaacctgcattcccttcaa

SEQ ID NO: 4245 - DNA, 518 bp, Homo sapiens
  MAP TO AL137843.1; EXPRESSED IN FETAL LIVER, SIGNAL = 3.5; EXPRESSED IN ADULT LIVER, SIGNAL = 8.2; NT HIT: AL163227.2, EVALUE 2.00e-46; EST_HUMAN HIT: AL046596.1, EVALUE 5.00e-39; SWISSPROT HIT: P54929, EVALUE 4.80e+00
taccaggtgcaaagtgcaagctgttggtgggttctaccattctgggttctggaggatggtggccttcttctcacagctccactaggcagtgcctcagtggggactctatgtgggggctccaaccacacatttcccttctgcactgccctagtgaaggttctccatgagggctcaagccctgaagcagacctctgcctggacatctagatgtttttgtacattctctgaaatccaggtggaggctcccaaacctcacctcttgctttctgtgcacctgcaggctcagcaccacatggaagccatcaaggcttggggcttgcaccctctgaagcaatgatccaagctgtaccttggccccttttagccatggctggagctggagttgctgggacacaggatgccacgtcctaagggtgcacagagcaacagggcccatgaaaccactttttcctcttagaccactgggtctgtgatgggaggggctatctgaaatgccctggaggcattttccccattat

SEQ ID NO: 4246 - DNA, 599 bp, Homo sapiens
  MAP TO AL137798.1; EXPRESSED IN LUNG, SIGNAL = 3.3; EXPRESSED IN ADULT LIVER, SIGNAL =   5; EXPRESSED IN FETAL LIVER, SIGNAL = 1.2; SWISSPROT HIT: P13654, EVALUE 1.30e-01; NT HIT: gi14721641, EVALUE 0.00e+00; EST_HUMAN HIT: AW580194.1, EVALUE 0.00e+00
catcatcgaggatcttgcaggagccctctctgatacagaggaagcctgtaaaccattttctattctttctcttggccacagtcattcctttcaacatgtgctgaccttctgcttggaggtctccttgaggacattgtctcagaaatctctgttgcaatatttgagcggatcactcaaccctttccactcttaaattttctctaccgtctcaccttaggcaatataaagtcctggttcactctcaggaacgagagctgacccagttaagggagaagttacgggaagggagagatgcctcccgctcattgaatcagcatctccaggccctcctcactccggataagccagacaagtcccaggggcaggacctccaagaacagctggctgaggggtgtagactggcacagcaacttttccagaagctcagcccaggtaaggtggccataggccctgatgacccaaaaccccaggcttatgagaggctccagacctccatactttcacaatgacagttgtatcagtggggtttttttctgctatacatatgtggccatgacatgaccaggacttcctgggtaagaacagagatgggaaaccca

SEQ ID NO: 4247 - DNA, 515 bp, Homo sapiens
  MAP TO AL121836.9; EXPRESSED IN BONE MARROW, SIGNAL = 0.47; EXPRESSED IN FETAL LIVER, SIGNAL = 0.46; NT HIT: AL161574.2, EVALUE 1.90e+00; EST_HUMAN HIT: BI464806.1, EVALUE 1.20e-02; SWISSPROT HIT: Q9MLI6, EVALUE 1.60e+00
cttttctcccttcacaaggcagtaagatccttgaaataagaattttgccttaatttttgagtcctcaacattgagcatactgcttggtacgtaataggatcttttaaaaaatctgtgttgaacaaattaacaagaaaaggcagtgttaaaaggatgctttggttaagctttttcttccttgaaataggttgatacgctcataatgatgtacaaaactcactgccagtgtatcctggacaatgcaattaatggaaactttgaagaggtaagaatgacaaagaatgctttatttgaccctattatatatactttcatgttctgttcttaatgagttcatgttaaagaaaaaaatcttaacatactttttactctgcaactagatccagcattttttattacacttttggcaaggaatgcctgaccatctccttcccctgctcgaaaatcctgttatcattgatattttctgtgtttgtgactcaattctttataaggtaagcactttgggatgtctt

SEQ ID NO: 4248 - DNA, 585 bp, Homo sapiens
  MAP TO CHR21_52.0; EXPRESSED IN BONE MARROW, SIGNAL =  12; EXPRESSED IN LUNG, SIGNAL =  16; EXPRESSED IN FETAL LIVER, SIGNAL = 9.7; EST_HUMAN HIT: AW733007.1, EVALUE 0.00e+00; NT HIT: AL163278.2, EVALUE 0.00e+00; SWISSPROT HIT: P29316, EVALUE 1.00e-58
gacacaaacgcaatccaatgttatagtagaagatcactgcttagactatctccatagttcatctttgctttggtttccatcttaatttttttatgtgaaaagatatacatatatttagaattagccagctggactcagtttagatgatcccaattttgttggcaacatccaaagcatcataatcaggagccagtggaacatatgccttcttctctccatcaggccgaatcagggtgttgaccttggccatgtcaatatcatagagcttcttcacagcctgtttgatctggtgcttgttggctttaacatccactatgaacacaagtgtgttgctgtctcctatcttcttcatggccgactcagtggtcagcggaaacttgatgatagcatagtggtcaagcttgtttcttctgggggcactcttccaaggatatttgggctgcctccagagtcgcagtgtcttgggccactggaaggtgggtgacgtgtggatcattttttttgtggctgtggacacctttcaacactgccttcttggcctttaaagccttcgctttggcttcggctttaggagggcaggagctt

SEQ ID NO: 4249 - DNA, 524 bp, Homo sapiens
  MAP TO AL158832.2; EXPRESSED IN FETAL LIVER, SIGNAL = 1.1; EXPRESSED IN LUNG, SIGNAL = 1.1; EXPRESSED IN PLACENTA, SIGNAL = 1.3; EXPRESSED IN ADULT LIVER, SIGNAL = 0.96; EST_HUMAN HIT: AA700965.1, EVALUE 1.00e-119; SWISSPROT HIT: P55201, EVALUE 3.70e+00
ggccccagaaatcatacaagtgagccctgacaccatgggctgctatatagtaataatgaacaacacaattgtccacatgactctcagagtcttcactgagattctccagtatggaaacagtggcacccacctcgtccactgatgggtaaagggcaaagagctcggcctgcctattggtcctccgggcctcctcgttctgcttctcaaagtcctcggcactcacttgctgcaggaggttttctagccgcttgtcaggctgcaggctgcggaggtcaaagtcacaggcagtgacggggcctttcccagacacgtcgcacagcacgtttaagtggcgggggcctgcctgtgagagaaaacagtgggtctttgtgagagagacggcaagtctaaaatgagaaccgaagaatcttggatgtctcaagactgctccaatttgggactacagaatctcagccaggcctcaagtcttctgaagaaactgcggatttgataagaatgacatctcagcttcctggctggactac

SEQ ID NO: 4250 - DNA, 575 bp, Homo sapiens
  MAP TO AC004845.2; EXPRESSED IN LUNG, SIGNAL = 0.49; EXPRESSED IN ADULT LIVER, SIGNAL = 0.51; EXPRESSED IN FETAL LIVER, SIGNAL = 0.59; EST_HUMAN HIT: BE796537.1, EVALUE 5.00e-76; NT HIT: gi13899314, EVALUE 4.00e-76; SWISSPROT HIT: Q9NP86, EVALUE 2.00e-09
cctcctctcccttccatttccttttttctctttcctttttcttttcttcgtttcttttcttctgttcttcttctgtcctcccttttatctgattaaagagttttaacaaatcactgtttttaaagcagttaggagttctcagtaggcaatcaccaataactgcagtgcaataaagccagccatgtgaccactggactttctttgcttttccattgtagaaatccgagaggcctttcgggttctggaccgggatgggaacggcttcatctccaagcaggagctgggcatggccatgcgctctttggggtacatgccaagcgaggtggagctggccatcatcatgcagcgcttggacatggacggtaagacccggacaagcagcttctcccctgagacatgccccggtctcatcagtgagaccttcggtttatgcagggccttgcacttttaaatccagagacttggtttacatttgagaagcagaaacttggactagaacaggctttttcagtaactttccatagagttctaggggcctgtagagatggtttcagggccactataggatggggtga

SEQ ID NO: 4251 - DNA, 511 bp, Homo sapiens
  MAP TO CHR22_36.0; EXPRESSED IN FETAL LIVER, SIGNAL =  14; EXPRESSED IN BONE MARROW, SIGNAL =  14; SWISSPROT HIT: P49241, EVALUE 1.00e-65; EST_HUMAN HIT: AW248631.1, EVALUE 0.00e+00; NT HIT: gi15718688, EVALUE 0.00e+00
tggaccgatggttcatatccatcagctcattcaattttagcacctttctcatccttggtagctttttcaaaactactaccttcaccatgaagctacatgagttttcccaattcaaacttgggcttctttatttttactttcctaatgaagacaccatggagaggataaacagataggcaagccttttctatgtcttttccagtgctgtctggaatcaatttattgaccacttctttcaagtcatttgtctgcacctcttgggtcatgatttccatcatcttcttctggatttggcagacctgttagtgtcaattgtaagaagtcttccatgtgtaattgttgcattttttagtaaaatcaacacaaaacagacaaagtaaataatcattgatagtcttgacatcaatgtgaacttaaatcatggtctgctattttttagccatggaacacattttgtcacagataagatccatgccatggaaattaatcaggcatttttgccctgaacatc

SEQ ID NO: 4252 - DNA, 549 bp, Homo sapiens
  MAP TO AL133330.5; EXPRESSED IN FETAL LIVER, SIGNAL = 0.64; EXPRESSED IN PLACENTA, SIGNAL = 0.87; EXPRESSED IN ADULT LIVER, SIGNAL = 0.66; SWISSPROT HIT: P43004, EVALUE 3.00e-40; EST_HUMAN HIT: AV719930.1, EVALUE 0.00e+00; NT HIT: gi14763556, EVALUE 1.00e-129
atacatgcagggctttacggtttttttttttttaaagaaatcaagcatgcactactatatacaagtctcgatatccatgaatgggaaatgtaccttgcattcatctactatgacagagttgtgtgcagcatagacacattgattagagttgctttccctgtggttcttcatgtcatcataaatggattgagtcttggtcatttcaatatcttcatgcactcgatgctgggagtcaatggtatccagctcagacttggagaggtgatagactatcccagccccaaaagagtcacccacaacattgactgaagttctcatcctgtccctggggacaaagaacagaaaaggttcagtgaggaagcagtattatgtggtagttgagaggtcaaggtctggagtcagagagacatagggttgagtactggctctaccttttccctctgcctgatttggggcaagttacttaactttcatgagccttgacttccttgtttgtcagttggaggtgatgcttatacttctctcataggccgtgtgaaaattcagtga

SEQ ID NO: 4253 - DNA, 564 bp, Homo sapiens
  MAP TO AL133553.2; EXPRESSED IN LUNG, SIGNAL = 0.66; EXPRESSED IN PLACENTA, SIGNAL = 0.57; EXPRESSED IN FETAL LIVER, SIGNAL = 0.78; SWISSPROT HIT: P29788, EVALUE 1.00e-05; EST_HUMAN HIT: AA688415.1, EVALUE 1.00e-115; NT HIT: gi14730483, EVALUE 4.00e-85
tggtcaaaattcaaccgattaaccaagttaacacgttctctctatacttaaatctagaaaggagttccaaatcttttttcccaaagctgataacataattttctcttttaaattatcaggattctcagtactggcgttttaccaatgatataaaagatgcagggtaccccaaaccaattttcaaaggatttggaggactaactggacaaatagtggcagcgctttcaacagctaaatataagaactggcctgaatctgtgtattttttcaagagaggtatgtgttacataattgacaagattacaaaacttttaaagaattacactcagcattttcatttattattgactttactgtcaaaagatatctttaatggctgaaatcaaatattttcagtgaaaaaaatcaatattgagggtagtattcttattgccctcaatttttattttcatttcttcacaggcaagtcacaattcatttgagttttcaggtcactgatagaatgtcatttactttcgcttcacaaatgtgcatgtcatccttgcacaagggccatgctaatct

SEQ ID NO: 4254 - DNA, 596 bp, Homo sapiens
  MAP TO AL132656.3; EXPRESSED IN FETAL LIVER, SIGNAL = 0.53; EXPRESSED IN PLACENTA, SIGNAL = 0.56; EST_HUMAN HIT: BF037950.1, EVALUE 3.00e-68; NT HIT: AB046773.1, EVALUE 1.00e-94; SWISSPROT HIT: P09633, EVALUE 3.40e+00
acctgcactggaacaggaacagaggcgctcctaccagcagcagtgcaaggtccacgtgctggccccgagtgtaaagacatgaggagctatgcaatcaatcctgagaggttcagagaggagtctgagggtcccccgctgcccccgagaggagcagcaaggacttctgcaagatccccttggatgaggtggtggtccctcactgagcttcccggtgcgctctccctacctgctgtccgacaaggaggtgtgcaagatcgtgcagcagagcctctccgtgggcaactttgccgcggggctcctccaccgccgagaacctccagctgcagtacaacaattttcgggcttgcaacaagaagcagctggaccctacgcagctgcggctcatctgccactaggtggaagccgtctaccccgtggagaaggtggaggaggtgtggcactgcgaatgtatccccagcaacgacgagcagtgccactgccctaacaggaaaaaatgcaacatcctcaagaaagccaagaaagtggagaagtgaaggcccgtggcctgcccagagactcggggtcaccagagactgagcttaggagcatgcctatgg

SEQ ID NO: 4255 - DNA, 503 bp, Homo sapiens
  MAP TO AL118512.8; EXPRESSED IN FETAL LIVER, SIGNAL = 0.39; EXPRESSED IN PLACENTA, SIGNAL = 0.51; EXPRESSED IN ADULT LIVER, SIGNAL = 0.36; NT HIT: gi15296873, EVALUE 7.00e-65; SWISSPROT HIT: P35916, EVALUE 1.80e-01
ttgtttgccagctgcattagacacagtacattggtagcgccccttgtcatttctccgtgcattctttaaatgtaagacttgtcctctgtctagaagttcaacattaggatcgcccaaaaataaaggcctagaaaaaataaaactttattccatgggtctattttcagtttttcacatttcttatttatcacaacaaaaatcattagtacaggctaaaaatacaagtaaaagttaatttaaaaaataaaatgatatgattagcactccaagaataaaagttttaaaccactttgctaacagaagttaggtaatcataaatatctctttgagatgaaaagttcctccatttcaaacttaaattatataataatattaatagaaatccagtagtgtcattatttgttttattcattcatccattcttattcttttttcagctttttttaaattttttggtttgcatagctaaaattctaccattatctggaaaagaaaaattaaga

SEQ ID NO: 4256 - DNA, 590 bp, Homo sapiens
  MAP TO CHR21_54.0; EXPRESSED IN FETAL LIVER, SIGNAL = 2.1; EXPRESSED IN BONE MARROW, SIGNAL = 1.7; EST_HUMAN HIT: AW188636.1, EVALUE 0.00e+00; NT HIT: gi7705677, EVALUE 0.00e+00; SWISSPROT HIT: P55036, EVALUE 7.00e-38
aattgcaccacctaccttggagagcctctcatttcccatcagatatgaatgaaagatcagatataaacctgatgggaaatgagaggttccatttccttttttttttttttatgttgccaagctttatttaggctgtaatggttacagataacacacatctaaccctatattctctgcgtcccatgcagtcccctgagcaggctcagctaccctttccctccagtctcacttcttgtcttcctccttcttgtccttcttgccatccttggtggcctggcaggccagggagcccacagcgtttcaaatggcttcattgttgggatccacacctgggaggttctccaggacactctgaaggaactcaggatcctgcatcacgtcgtaatcatcctcctccttggctggctggcaagtgtccatggctgagctggcatcaatgtctactgattccgcctggccaaactctgctcctgcagggacatcttcatgacataagcaatcccctcttccttaggtcaggaagtccggtatggccaaactcttgttggctaatggtcatcttcagcaggacctcgtctgagccttcagtc

SEQ ID NO: 4257 - DNA, 572 bp, Homo sapiens
  MAP TO AC015896.4; EXPRESSED IN FETAL LIVER, SIGNAL = 0.41; EST_HUMAN HIT: BG717926.1, EVALUE 2.00e-04; NT HIT: gi15828471, EVALUE 8.50e+00
aggcacagccaaggaataagacacgtgaagatgtagtgctgctgttactacactcaccctgtaatgtgatgcttcctctgataaagattaaacaaaccatctttttcttcgaagagactgtcctgtatgtttataaacatgtgggctttctgagaaactgaaacctttaaaaaggctgaaattaaataatttatcatgctgaatgggggaaaaaaaacctgtttctagtaaaagagaactgaagggaactaaaagggtacagaagtagagattaattccttacaaaagttattttgatgtagcacacaatgataatgataggcagaaaagttcagattttgatagatctattaatatcctatcactgggtcttacactaaaaaatgtaactttaaagcttcttcctgtaaggaaatttctactcccccaataacattatttcaattatttaaaaaactcaactctagctgttgaccatttttttgcataattaatactttgacataactttcaaaatgatgtctggtaatgaagaaaaaatagtaccttttccaattctcttggtattcgca

SEQ ID NO: 4258 - DNA, 518 bp, Homo sapiens
  MAP TO AC011803.4; EXPRESSED IN FETAL LIVER, SIGNAL = 0.5; SWISSPROT HIT: P47013, EVALUE 1.60e+00; NT HIT: M38249.1, EVALUE 3.20e-02
cccttccattccttttagccacattatatgtcaagaactacatctcaggcttcttagttgaggagacatgtatgaaatcagcctttgataagtgttggctgataatgattttatttgtttctgtaaggccttgcccacccagagagaactcccttcttttttgtggcatttcatcttcctatttacttgttccaaaattcctttcactaggttattcctgacttagacaaccaaggcaaagcattgtctgttgatgaccatgtcaccaaaagcgggatgaggatactgaggtgtttgtgtgtgcgtaggtcttttaccattttgtattaaccagattagttcaaattaagtacttgttcttgggaaaggaaagaaacttttagcaagacgagcagtatagtgtcatatgtagtaggcttagagttagccaaacttgggttcgaatctgacctcccatttcctagttctgtcccacttaacccctctaagaatcaatttcctgagtcttgtggggctaa

SEQ ID NO: 4259 - DNA, 581 bp, Homo sapiens
  MAP TO AL133408.3; EXPRESSED IN FETAL LIVER, SIGNAL = 0.52; EXPRESSED IN BONE MARROW, SIGNAL = 0.51; NT HIT: gi15027629, EVALUE 2.20e+00; EST_HUMAN HIT: AU131282.1, EVALUE 2.10e-01
gcaagtgcttgtaaactgcctgtgaaatcttattttttcttgttttcttatttactttttgagattttgcctgtgtatatctttacttgccactgaaatttttcatgttgaagtgaggaagtatatatctcacagactgagatatatgaatagtaggtgctctgtatgctgatgagtagtcttaaaagcctattaaacttttaatagtaacccagtaccatttaatagtaaaataagtaacccaaaagggttacttactttaaaagcctcgtaactgcttaaggcctttattataatagtgtcacatgctttagagggactcagtgtagatgaagaaatagacgttacctcctctaaaataaaaaaagttattcatggatgcatcatctgttgattctaccaaatgtctgttctaatatttgctgtagtaaagtgacatctttgacatcatttttgaaatgtattaccatatttaactgaaaaaaacagagtaacagtcaaaattggtaataattttaaattttgtttaacattaccaaaagtcgtataattcagtttggctgatacaaaatatgaggctt

SEQ ID NO: 4260 - DNA, 577 bp, Homo sapiens
  MAP TO AC011980.3; EXPRESSED IN FETAL LIVER, SIGNAL = 0.48; EXPRESSED IN BONE MARROW, SIGNAL = 0.55; SWISSPROT HIT: P22211, EVALUE 3.70e-01; NT HIT: AF262018.1, EVALUE 1.00e-04; EST_HUMAN HIT: BE006101.1, EVALUE 1.00e-05
ggagtcgaagccagacagacttggatttcttggcacttagttgccatggagcatgaacacattctctccccgagcctcagttttctcttctggaagatagagataacaatagctaacattaggtgagtacttgctgtgtgtcatgcgtgttctgagcactttacatgaatcctcatggcaaccctatgactaatgtctctatatctcaagccaggaaaatgggcacaagaaaagctaagtaacttgggcagggccacagctaggaaatagtagagccaggattcaaacccaggccaccctcctaccatactgtattacgttcctcttaaacctatgtccgaggactcttgggaagatgaaatggaaagacagtggcctaaagatgctttgcagactaactagcagcccagcaagccttcaatattttgaggccatcattggtattattattacatttctgttgcctagggattgagctgggcactttggagaggacttcaggaagacaaaatttcttttatctgtttgtagtatgacttggcttatggacattgatggatggaatacctgcccaaga

SEQ ID NO: 4261 - DNA, 585 bp, Homo sapiens
  MAP TO AC020582.3; EXPRESSED IN LUNG, SIGNAL = 9.1; EXPRESSED IN ADULT LIVER, SIGNAL = 7.5; EXPRESSED IN BONE MARROW, SIGNAL =   5; EST_HUMAN HIT: AV742474.1, EVALUE 2.00e-04
gccaatagggctgttttcaggaaaaaggaacccccgcaactaattcacatggatatgtaaagtgctaagagtccagatttctggtcttggtttttaggtaatttatttgcactttaacagagatctgccagagacaccatccataatggtgtggttgagagatatgttattgaaatgtgcgtaataaacaacactctcctacatttttgcttacggccatccctccagctcacccccttcaaaccacaagatagaaattatttcccctgcctaggatttcagtggaataaagcagttgaatccctcatcattcatcccactaaggccatgacaagatggactgagaggtccccagcccaggaactcccagctagagaagtttctgtgcaccaccacgacacaggggtaaataacaacaacaacaacagcagcagcagcagcagcagcagcagcagcagcagcagcagcagcaaattatgtatttacagcttcctatataacaggcaaagtactttttaacacaacagtccaataggtcaagtactactatcatccccattttatagaagaggaaaccaaggctca

SEQ ID NO: 4262 - DNA, 581 bp, Homo sapiens
  MAP TO AC019325.3; EXPRESSED IN BONE MARROW, SIGNAL = 0.48; EXPRESSED IN PLACENTA, SIGNAL = 0.52; EXPRESSED IN LUNG, SIGNAL = 0.53; EXPRESSED IN ADULT LIVER, SIGNAL = 0.48; SWISSPROT HIT: Q58954, EVALUE 1.70e-01; EST_HUMAN HIT: AI393478.1, EVALUE 2.00e-20; NT HIT: gi7656876, EVALUE 4.00e-08
ccctttgtatgggagctctgttttcactctattaaatcttgcaactgcaaaaagaatatatatatatgtgtatatatatacacatatatatacatatatatatacacatatatatatacacatatatatatacacatatatatatacacatacatatttttgtgtgtgtgtagttggtaaaactcttacgtcacaaaatcctttagggagtcgctttcacaaacatagaggatctcttttggtttgcagtgaaacaagtccttaattttctccatgatctttatggctagggctgtcttcctgactcctggaaagcagtagatgaataattcacgtgtcttctgaagactctcagaaagcaactggctctgctccattatgagcaagttgaaaaattcacagcccatctggtcactcagaagagatctggaggacagggagaccaccaccagagcctgcagcaagtcttccatttcctcctcatcagcaagcctgtaggacctggggtaacgcagggggatctcaccaggtctactctgtgtgctgctcaggtgtatcagccttggaatgatgcacacttt

SEQ ID NO: 4263 - DNA, 592 bp, Homo sapiens
  MAP TO Z98044.13; EXPRESSED IN PLACENTA, SIGNAL = 1.9; EXPRESSED IN LUNG, SIGNAL = 2.1; EXPRESSED IN BONE MARROW, SIGNAL = 1.3; NT HIT: gi14726996, EVALUE 0.00e+00; EST_HUMAN HIT: AI741976.1, EVALUE 0.00e+00; SWISSPROT HIT: O95479, EVALUE 1.00e-105
agaagtggtcatggccaaagggtttctcaaggacaacccgcagccaggcgcccgggcctggccggcagctactgttgatgttgcgggcaatgtcttcataggcgaagggtggcactgagaagtagaagatcctgccagcctcccggaggcctgcgtgctggagctgtgcctcgatgtccttgttcagggcctgatagtcctcggccgtcttcagttggcggtactggctcagctgcaggaactgatccttgtgctctgcacagtgactgggtgccatgtccttggggcaggagagggattccagggccttggccatgagctcttgaccctgcttgggggctgtcagagcagctccatggaagctaaaactgtgacccctccccgcttcatccaggtacagctggaacagtccctgccataagtacttcttagccaggtccccagttgctcccagcaggattatggagacatgtccctggagctcctgggcttgcaggcagcccagaagggccaagcacatcgccactatgagcatattccacatgcctgggtgcctggggtgcaaagagagacagacgaggaacaaggaagg

SEQ ID NO: 4264 - DNA, 564 bp, Homo sapiens
  MAP TO CHR21_23.0; EXPRESSED IN LUNG, SIGNAL = 3.2; EXPRESSED IN ADULT LIVER, SIGNAL = 1.8; EXPRESSED IN BONE MARROW, SIGNAL = 1.6; SWISSPROT HIT: O15394, EVALUE 5.00e-26; NT HIT: gi16166015, EVALUE 2.00e-86; EST_HUMAN HIT: AL044830.1, EVALUE 4.00e-86
gccagatctgtgaggatgaacctcttttttcttctttaggaatggcaagctcattgaagaaaatgagaagtacatattgaaagggagcaatacagaactcactgtcaggaacataatcaatagtgatggtggtccttatgtctgcagggccacaaataaggcaggagaagatgaaaagcaagctttcctccaagtctttggtaagtattatagcatagtggctaaaactgttatgtctattggaagatcagagtgaaattctactctaatcatttgaactatttaaactttccatattaaatctgtttcctcttctctgtaatatgttttttaaatttcagctaccagatagaattttttgaagaataacgtaaaattacatatgcaaatttttgtaagtcattgatatgcttacagaagctggaaaaaaataatttaaattacacctagtggggtttgtcatctgtgtctgtaagggtggatctctgtaagtctctaaatgacacatgttaggatcagttttacttacaatatagttcaaaagggcacatttttaaggctaca

SEQ ID NO: 4265 - DNA, 517 bp, Homo sapiens
  MAP TO CHR22_11.0; EXPRESSED IN LUNG, SIGNAL = 0.78; EXPRESSED IN HEART, SIGNAL = 1.9; EXPRESSED IN PLACENTA, SIGNAL = 0.93; EXPRESSED IN BONE MARROW, SIGNAL = 2.1; EXPRESSED IN ADULT LIVER, SIGNAL = 0.73; NT HIT: gi14779031, EVALUE 1.00e-66; EST_HUMAN HIT: BG024058.1, EVALUE 0.00e+00; SWISSPROT HIT: Q01205, EVALUE 4.20e-01
tacatccttcagctctcggctgaaatgtcgcttcctcagagaaggctgacttggcctaagtccccatcagagtaccgtagtcttttaattcataggcttcaatgcacttagcaatgacacactgggtttgatattctttgatgcttctctccccactagggccgtagtccacgaggaccaggacggtggcgtgttctgtcaccttcgtatgtccagggccccgctccgcgcctggcacacagtaggtctagcaataccgggcgaacgcttcaagccctgcctcaagcgccacctcctctggggcgcaggtcccagcaccggaggcagcactttcagccccttcccgaacttacccagtgccgacttgggcacctttcccttggccgagttccgcagtttctgggcctgaattgccttcgtcttccggggccgtttcaccggagcccctctcggcttggcctgacctggagggtcccggggggctgtaggggaagagagaggaagagacccaggtcag

SEQ ID NO: 4266 - DNA, 597 bp, Homo sapiens
  MAP TO AC011802.4; EXPRESSED IN BONE MARROW, SIGNAL = 2.6; EXPRESSED IN PLACENTA, SIGNAL = 2.3; EXPRESSED IN LUNG, SIGNAL = 2.6; SWISSPROT HIT: P48681, EVALUE 7.60e+00
ctgggtatttctggctcagggtctctaatcaataaagctgtcagccagggaaatagtcatgggacggttcactgggagtggagaatctggtccaggctcttttgtatcgttattgccaagcctcctcattggctggagatctgagttccacaccacagggaccatggacctctccataggctgctcatgacctggcagcagagagagagagagagagagagaggagagaggagagagaaagagagagaaagaataggaaaaagagagacagcatgcgtgagagagggagaacccaaggtggaaaccagtctttttaaacttaaccttggaagtaacagctcattacttcggatattcaaggggagagaaattagctccatttcttaaggagaagagtatgaaacaaatttcggacatgctttttaagccaccacactatttgctgaaaatgtctcgtctcttaatattgtatcttaatattatccttgaacattttttatatcacaaaccaactacgttttcattttgttcttcccagaaaactacaattgctattcattgtggaatttgtaacgtaccttctcccaggctcttttt

SEQ ID NO: 4267 - DNA, 529 bp, Homo sapiens
  MAP TO AL035633.18; EXPRESSED IN BONE MARROW, SIGNAL = 0.41; EXPRESSED IN PLACENTA, SIGNAL = 0.5; EST_HUMAN HIT: BF744774.1, EVALUE 5.00e-08; SWISSPROT HIT: P46753, EVALUE 2.50e-01
tttgggaactcatggtttttcattgcaatttatcatgtcacattatatgttatgcattttaattattcatgccattgtgttaattcacatttccatgtctaactataaatttgctgatttctttcttttgtttccatcattatgtgcatttaattcattgaagaacaagaaaaatataactcttccacaaaaggtaaatattaacataactttttaaccatttaatattgttacttttaaaaatataatatacaagagttatataactgtatttattgaaataatgagcaaaattaacaggtagctattttcctcaaatgattttgtagtgtatttgatattaattatttcatattctatgttcacatcaaagaagagaagattactttaaaattaatgttttttaaaaattttatttaaaattaatgtttttttaaaaatttatttatctatactgacaactagaaaacaattctcctaggaaaatgacattttctttgtttctgtttgtttgcatttccctgctctc

SEQ ID NO: 4268 - DNA, 565 bp, Homo sapiens
  MAP TO AC018608.4; EXPRESSED IN LUNG, SIGNAL = 0.55; EXPRESSED IN ADULT LIVER, SIGNAL = 0.52; EXPRESSED IN BONE MARROW, SIGNAL = 0.48; EST_HUMAN HIT: U69191.1, EVALUE 0.00e+00; SWISSPROT HIT: Q92953, EVALUE 6.00e-18; NT HIT: AB032012.1, EVALUE 0.00e+00
gcaatggcaaattaaaaggcatcagtgaaatgtgaatacctgtggaatgtctgcccagctttagcatgcgcagagccctgagcagcctcaacacctggacaatgcgccccacgttctccagctcctgcgtggtctggctcccacttaggctctctaccagaagagtgatgtagaagggcaagatggcaaggaggtctatgatgtttggcacctttcttaggaagcgacacctgtcccgcacacacaggaagcggaggacaaactccccggtgaaccagctaatgcacacatactccaggatttccagcagctgcaggtccagccagcttaactcagctgacatcagggccatgttaatgatggacaccaccacgaagataatggagatgacgccaaagatacgggcagctgtggaagatccaggtttctccaggatattccagagcttctggcgaacagtgggacaaggtccttgggagaagtcctgttcactctcatgttgactttcctggtcttctgtgtccttcttgaagtctaaagtttcactcagctctttccttctgaa

SEQ ID NO: 4269 - DNA, 579 bp, Homo sapiens
  MAP TO CHR22_120.0; EXPRESSED IN BONE MARROW, SIGNAL = 0.68; EXPRESSED IN LUNG, SIGNAL = 0.64; EXPRESSED IN PLACENTA, SIGNAL = 0.6; SWISSPROT HIT: P19661, EVALUE 8.40e-01; NT HIT: AL163302.2, EVALUE 8.60e+00
cagtaaaggcctgctcttggaaggagatggggttcgtgaacttggagattgaaggaaatcaaatctaccctctcggaccattgccagagtaactgcaaaacacacccagggcagagattttgtttgcaggtgatgtgtatgttatggcccctttgtcgaacctttcctttttgcagaacacccagagcatgtggggggcaccaagcagaggaagtcctcgtggaggtagagaccctcggagctcttggtgcaggcctgagtagcccctaccagaatcacttgagcgacccgtcttcccagcacaatgaccacccccgcagccctgggacccggggcccttgtttggatcctcatggagcaaggcgtgggcccaggttctgccacaggaagtcagcgcatccgcggggccgactgaatctcctgctgtggcctggagcgctgttcaggcgtggaaaaatgacaccacgtgtctgcccacgttcagaacagaattgaagaggaaaccacaaagagagagtaacatcaaagtgtgagcgtgcccctcatctcagactgtacaccaggaagtgtttccaatgg

SEQ ID NO: 4270 - DNA, 562 bp, Homo sapiens
  MAP TO AL138832.2; EXPRESSED IN PLACENTA, SIGNAL = 0.49; EXPRESSED IN LUNG, SIGNAL = 0.71; EXPRESSED IN BONE MARROW, SIGNAL = 0.7; NT HIT: AF212148.1, EVALUE 1.40e-01; EST_HUMAN HIT: BF913039.1, EVALUE 1.00e-106; SWISSPROT HIT: Q9Y4I1, EVALUE 1.40e+00
tcagagtgctttttgcctccaccactccgctgaacagctgttgttagtagtcctaacaaaatctatttgcaaatgtttgccaaagtccaagagtgtaaacttaaagctgcatgctaaaatgtcagcgtaaagcaggtacacacacaagtacgcgtcaccgccaacctgttcctttacctggcaaaccttagaaggagcacgtgaacagtgtgccaactttcagctgtgggccagcggctggaaccctcacctgcatgttgagctgcttatcatgcagggctctctgcagctccagcaggctccccttgagccttctcagctttccagccagctgctcggcctcgtccttggtgtgagctttgccctccagcagcaggttctcattgtggactgacagttctgataaagccaccaccttctgctctatttccaccagcatattctgcagcaacagaaataagaatgaaactcacacatctccccagcctctgcaaagactgtttcccacagtgaaatacagccctttggagtcttttacgaaacggacaggctttcatgattt

SEQ ID NO: 4271 - DNA, 504 bp, Homo sapiens
  MAP TO CHR22_52.0; EXPRESSED IN LUNG, SIGNAL =  10; EXPRESSED IN PLACENTA, SIGNAL = 4.5; EXPRESSED IN BONE MARROW, SIGNAL = 7.6; NT HIT: gi14782916, EVALUE 0.00e+00; EST_HUMAN HIT: BI756096.1, EVALUE 0.00e+00; SWISSPROT HIT: P46783, EVALUE 3.00e-35
tgtatgatcattgcaacgggttcatttgcgacataatataatttttttctttttttttaagtctttttggctgtaagtttattcaatgcaaaataatcttctccaattttactgaggtggctgacggcgtccacgaccaaatctgcctctaaactggaattcggttgctgacccagccgcagcctcggctttcttgttggcaccagggggcatagcattccctctgtaggtatctctgtcggcttcccctctcgttgagtcttgcaggtcgctcaccctccagacctttagactgaggcctgccagtccatggacggctgcggcgtagggtggcaggcacaatctccaggggcagatgaaggtaatcacggagatactggatatcctcattggtaaggtaccagcagacatgactccaggcaaactgttccttcatgtagtagcctcgggacttgaaagactgcatggccttcatgacatgaaggttgggcacattcttccttt

SEQ ID NO: 4272 - DNA, 514 bp, Homo sapiens
  MAP TO AC021260.4; EXPRESSED IN LUNG, SIGNAL = 0.47; EXPRESSED IN BONE MARROW, SIGNAL = 0.61; NT HIT: U20894.1, EVALUE 2.00e-03; EST_HUMAN HIT: BE830069.1, EVALUE 2.00e-22; SWISSPROT HIT: P50532, EVALUE 8.30e-02
cagccaagacataaggattcgtctatcaaggacatattgattatatgtacagtatggcactcaagtgttttttcaaaggatagatgaatgaatggttgaatcacattgaaaaccgttccttaggaatgtggcttttatacctgattattcttgcctgtcagttcatcaacagtttcagattgtttctccaacgctcgttctaacttcttatgcttaagcttccactgcctaatggattcttgagctttcagtttcaggtcttccctcctcttctccgcctcctctttcagagcctctgactgctggagctcactgaggtaccgctcagcctgcttggttgcatcctccgcatggcgagtcagctctgagatctgaaggtcagcatgcttacgctcggcctcacatgtgtcaaagtgattctggatctccttaagtcgatccaacatctgcagttgctgtttttccccattctccagttcacgtgttaaattctacgaataaagcatgcaaaaca

SEQ ID NO: 4273 - DNA, 538 bp, Homo sapiens
  MAP TO CHR22_84.0; EXPRESSED IN BONE MARROW, SIGNAL = 0.6; NT HIT: Y07848.1, EVALUE 0.00e+00; SWISSPROT HIT: Q01844, EVALUE 5.10e-02; EST_HUMAN HIT: BI549616.1, EVALUE 1.00e-101
ttcacagcattcaagagggggcagaaggaaccctgttttctgtagcatgacatgccatttctgttaggtgtggttttagagcaaatgagacagttactttaccaaaaactaggtacattcagagaacttaggctttaaataccagtttgttgctactcttgcggaagggggaatatttaaagggattcaatatcctgatggtttaaagtaagtggtttacaaattgttctgataatgagtgtctaggcagatctctgaggggacctgaaatctgatgcagctctcctttgttctaggttatactactccaactgccccccaggcatacagccagcctgtccaggggtatggcactggtgcttatgataccaccactgctacagtcaccaccacccaggcctcctatgcagctcagtctgcatatggcactcagcctgcttatccagcctatgggcagcagccagcagccactgcacctacaaggtaaggccatggtgtccttaatgcgtcagtcttatgttggagggaaagaaagcaa

SEQ ID NO: 4274 - DNA, 596 bp, Homo sapiens
  MAP TO AL135932.1; EXPRESSED IN BONE MARROW, SIGNAL = 0.48; EXPRESSED IN PLACENTA, SIGNAL = 0.44; EXPRESSED IN ADULT LIVER, SIGNAL = 0.57; NT HIT: AB040926.1, EVALUE 8.00e-99; EST_HUMAN HIT: AA005095.1, EVALUE 3.00e-03
tgctggacaagttgcctattcagattcacatctatgtcagacagcattgaacttcaccttttcacacatataagttcattcaatcatgagatcaatcctatgaggaaagtactgttactattttgtggacaagaaaatgaggttcatagaagtaatttgcttgaccaaacaatctagaaatatcagagctgggattcaaactcaggcctatgaaacactcctttcacactagatttacctctgaaatagttttgccccaggcataagtgccatcttcaggtctgcctccatttagataaatccacactcgttttgtgttgggctgcttatacaggttgctcggcttgactgctatacgtttggttgcaattggaaaatttattttggattccatttcttggatttcagaaaggtgtgcctgtcaagaaaagcccagagaatgttgtgtttagagaactgtctggatagtgtttgtgaagaatgtgataaaatccagatatatcttgtaattaataaattatatggaaaaaattttaggaagtaactattaagtacattagcctctcttgtcactgactctggtaaattccccttgc

SEQ ID NO: 4275 - DNA, 577 bp, Homo sapiens
  MAP TO AL096868.6; EXPRESSED IN PLACENTA, SIGNAL = 0.63; EXPRESSED IN LUNG, SIGNAL = 1.3; EXPRESSED IN ADULT LIVER, SIGNAL = 0.69; EXPRESSED IN BONE MARROW, SIGNAL = 0.69; SWISSPROT HIT: O25551, EVALUE 1.10e+00; NT HIT: U63630.3, EVALUE 2.00e-59; EST_HUMAN HIT: AI934742.1, EVALUE 2.00e-75
acccatccctttattttggcccattcctttgtttcccataaggaatacttttagttaatctataatctatagaaacaatgctcatcactggcttgctgtcaataaatatatgggtaaatctctgttcgaggctctcagctctgaaagttatgagacccctgatttccccactccacactctatatttctgtgtgtgtctttaatttctctagcgccactgggttggggtctccatgaccgagctggtcttggcagaaacctgtaaaggagccaaaaggcaattagaaggagaaaagaactgcaccccaagaattctatatccaggtaagacatgatttgcctgtctggaaaaaggaagacgttagcagttaggcaaaaaattcagattaaaaatctatatattcccatctgagaaaattactccaaagaacaaatgaatgtgaacaagaaagagaaaatgaagaaaaggaaaaagtggtaggtgacaaatcttgcagtatataaatgccattaaatttaaattgaccccaattaaaattagatccaacaatttagatccaaccaaaacaagatccca

SEQ ID NO: 4276 - DNA, 527 bp, Homo sapiens
  MAP TO AL137067.3; EXPRESSED IN HEART, SIGNAL =   9; EXPRESSED IN LUNG, SIGNAL =  18; EXPRESSED IN BONE MARROW, SIGNAL = 2.1; NT HIT: gi4504918, EVALUE 0.00e+00; EST_HUMAN HIT: BI253474.1, EVALUE 0.00e+00; SWISSPROT HIT: P05787, EVALUE 4.00e-31
gagctggctgttaaggatgccaacgccaagctgtccgagctggaggccgccctgcagcgggccaagcaggacatgatggggcagctgcgtgagtaccaggagctgatgaacgtcgggcttaccctggacatcgagattgccacctacaggaagctgctggagggcgaggagagccggctggaatctgggatgcagaacgtgagtatccatacgaagaccaccagcagctatgcaggtgggctgagctcggcctatgggggcctcacaagccccggcatcatctaccgcctgggctccagctttggctctgccgcgggctccagctccttcagccgcaccagctccaccagggccgtggttgtgaggaagatcgagacccatgatggcaagctggagtccgagtcctctgacgtcctgtccaagtgaacagctgcggcagccccaccccgcctgcccctcctggctgacccagagcgggggagggaggccgctgtgagggaagcacagggaacaggagatccacctca

SEQ ID NO: 4277 - DNA, 519 bp, Homo sapiens
  MAP TO AC018432.4; EXPRESSED IN ADULT LIVER, SIGNAL = 0.58; EXPRESSED IN BONE MARROW, SIGNAL = 0.55; EXPRESSED IN PLACENTA, SIGNAL = 0.48; EXPRESSED IN LUNG, SIGNAL = 0.61; SWISSPROT HIT: P14922, EVALUE 1.60e+00; EST_HUMAN HIT: AA405058.1, EVALUE 1.80e-01
gatctagatgtggcaccttgccctcttgcccacttatttctttctagagatcaagttagacttctggaagaaaatgtgaggaatcaaattccttcaaaacccaaaactaagttagggagcagaactacttatcaatgctcaagatctcaagagtccttgaatcagaatcaaccttctgttggaatggttatttctgtccaagcacaggattcttttccaggacaaaatgcttttcagaatcaaggtctttatgaagtccaatttactagtcaagcccaatatataaatcataaccaagaatcaattaagagccagcctgagagcaaagccagcaactttgcccagcctgaagatgtgatgaagaagccattttctagcagcacacaagactccttccagtcccaagatctggataggaaccaacattttgttgaagttccatcaattgttgaggcaaaatattcagtaaagggcctggagtctgatgaacacttaggtgaggaccaacattgtgtttgg

SEQ ID NO: 4278 - DNA, 571 bp, Homo sapiens
  MAP TO AL139149.1; EXPRESSED IN LUNG, SIGNAL = 0.57; EXPRESSED IN BONE MARROW, SIGNAL = 0.4; EXPRESSED IN PLACENTA, SIGNAL = 0.55; NT HIT: AF213884.1, EVALUE 5.40e-01; SWISSPROT HIT: P08547, EVALUE 4.00e-11; EST_HUMAN HIT: AA464239.1, EVALUE 4.00e-12
tgcaattgctgggttgtatgctagttgtatgtttagttctgaagaaactgctgaactgttttttgaaagtggttgtaccattttacattcatatcagcaatgtatgagtgatccagtttttctacttccttgcccagcatttggtgtcatcaatgtttttcattttagctgttcttataggtgtacagcagtatcttactgcagttttaatttgcattttcctaaagagtagcagtgttgaacatctttttctgccttttttaaatttgaaggatgagttactatttttttgcttaataataaagctattgatgttctacactttctatgattttatagaatgactttatttttacatttttctaaatatactataatagtaattttcattctttccttgatcttatagtttgtttttgttgttgctttgtttaccagaactattaacactcatttttttaagaacgattttctttatagtcatattgtcaaacaggaattgaaaaatgtcatgttatgctattataaaactttgttaaaaaattgcatacacacccaaaatctgtcaaaa

SEQ ID NO: 4279 - DNA, 543 bp, Homo sapiens
  MAP TO CHR22_81.0; EXPRESSED IN PLACENTA, SIGNAL = 0.46; EXPRESSED IN BONE MARROW, SIGNAL = 0.49; EXPRESSED IN ADULT LIVER, SIGNAL = 0.86; SWISSPROT HIT: P46060, EVALUE 1.00e-06; EST_HUMAN HIT: BE392547.1, EVALUE 5.00e-33; NT HIT: gi14779148, EVALUE 8.00e-31
tcattacactgggaccattttcctttttttactcaatatcatgcaatcaaaaaaaaatgtttgtggctactgtgcttaaggagacaccccctaccccattgtgaaagtgcctcgggatttcacgttctcaggaccagggctctgattgtggcagatgatagaaactcaccccagtgttagggtccagaatcttccgtgagggcgtggctgacttctctccctgccctcgctgctgaggctcttcttcctcctcctcctcctcttcttcctcctcttcctcatcttcctcctcctcttcttctgcttcctcttcttcctcttctccttcctcctcctcctcctcgtcctcgtcatcactgcagaaagagctggctgaagcagatcctctctacccagcagcccaggttggctctaaggcctggctccatgagcccagagacctcacctcagccaggagggagagagcctggtggggtgggagcacctgctcccagggcaggggcaggtggatcaccagggaaatccatgctgtggacacaaaaa

SEQ ID NO: 4280 - DNA, 570 bp, Homo sapiens
  MAP TO AC016683.4; EXPRESSED IN PLACENTA, SIGNAL = 0.5; EXPRESSED IN LUNG, SIGNAL = 0.76; EXPRESSED IN BONE MARROW, SIGNAL = 0.49; EST_HUMAN HIT: BG540330.1, EVALUE 0.00e+00; NT HIT: AF315945.1, EVALUE 5.40e-01; SWISSPROT HIT: P02640, EVALUE 2.40e+00
ctgggcaagagggatacttggcatcctggctgctccatcttgaaggctgtatcccagcatccttcaggcctactgatcaggagcattctccagctgttcattttctcctaggacagcattcatgatgaggtctgggctcttttttccaggggcaggtctgaactggagagatgagtcacatggctagagcaagacacccaagtgctaggcccagactgtctgccacttccctctctgttccacacagccagcaacagagcaagctttttcctccctgcagagagccagtgtcaggcacggctgaggcaaggccgagcaaccctgggggcgatagaggggaacgggtttcggttggacaagcccaatagacctatttctcctaggaccatgaaaagcctgtcccccacatttggctgggagctgactgtaaaagttgcagctccttgaaagttaactccagagacagctgcactcctcaccttgtgtctacataattaaccagcagttgttcctgctttgtggaacatggaccaggcaaaccccgtgaggtcctgtggggacattctcagt

SEQ ID NO: 4281 - DNA, 584 bp, Homo sapiens
  MAP TO CHR21_51.0; EXPRESSED IN BONE MARROW, SIGNAL = 0.42; NT HIT: AJ229041.1, EVALUE 5.00e-29; SWISSPROT HIT: Q59240, EVALUE 4.30e+00; EST_HUMAN HIT: T03860.1, EVALUE 1.00e-39
gcattagctgtgcctcttccattctcattttctcttccctcattcccttttccaaactgagaacctggattccatgtccaggtgggcagagggaggaggaggaagacgtgggagatggctggaaagaagaacaagccaaattcttatgtacttctgggcatgcttgtgctcctgttttaattttttataccttgcaatttagtgaacttggagctccaaaacgtctgttgaatcttgcctcggtgctctggttctcagccttggtggcagcagaaacccttaaacaaaaggttgaaaactgcacgttcccagcgctttcctccccgcccctttcctgggttttctgtttactgggatgtggagaggaagtgcaaactctgtagtttctaaagttccacagggggctttggatgctttacctggggttgaggtactgacttggaggctcacttgttgtattagtctgtttttatgctgctgataaagacatacctgagactgggtaatttataaagaaaaagaggtttaatggactcacagtttcacatggcagaaggcaaaaggcacgtcttacatggtggcag

SEQ ID NO: 4282 - DNA, 511 bp, Homo sapiens
  MAP TO AC015523.3; EXPRESSED IN BONE MARROW, SIGNAL = 0.46; EXPRESSED IN PLACENTA, SIGNAL = 0.6; EXPRESSED IN LUNG, SIGNAL = 0.51; EXPRESSED IN ADULT LIVER, SIGNAL = 0.49; NT HIT: AF351814.1, EVALUE 5.00e-04; SWISSPROT HIT: P53925, EVALUE 2.80e+00; EST_HUMAN HIT: AU145741.1, EVALUE 8.00e-07
ctgcattctacctgccagtgctttgctaagtattttgcacacattattttattttgtctcataaaccctatgaggtaaggtattactcctcctcttggcaaatgcagaagccaacatttaaaaaagtttgttacttgcccaaggttacacagcaggtaagtggcagagccaatattgaaactcatatccagctctaaagcttggatgttaactgctgtgacatgttgaaagtagcaacttgttttactacacagttctgcataatcatgagtttctgttgtgtgtaggaaaggatttaagctttctggactgagaagcataaagtaattatcaaaaaatatgttattccagaatctaatcctaatttagaaaatgtttcaaaacaagacactggctcataatatctatagaaaaaggcaagaaaaacacagggaacaagggtgaattttaattggttatccttttcattcatctcatcatagtctgattctcatttttctcttggggatgg

SEQ ID NO: 4283 - DNA, 588 bp, Homo sapiens
  MAP TO CHR22_116.0; EXPRESSED IN PLACENTA, SIGNAL = 4.6; EXPRESSED IN LUNG, SIGNAL =  10; EXPRESSED IN ADULT LIVER, SIGNAL = 9.6; EXPRESSED IN BONE MARROW, SIGNAL = 7.1; NT HIT: gi13631175, EVALUE 8.00e-65; SWISSPROT HIT: Q9XSI3, EVALUE 3.00e-17; EST_HUMAN HIT: AV744952.1, EVALUE 2.00e-66
ctcccttccatttcttttgccattttactattccatatactataataatctaataaatggttgctgttactttgaacagttatttattgaatcaattaagaataaaaaataaaaattctattttaccttcatttatcccttctccaatgttctttctttctttatggagtctgaatttctggcctatattattttctgtctccatgtacttactggcacaaatagggcagcctccagggctccagaggagagctgctcatattcatctgacaccatgtggccacagagtagaaactcatccacttttgccttcttccaacccaggtcaaagaggcgaatcttggcattagggaaaccttggcagaagtaagaatgggtatggcttcttcttacaatactggtaacactgggtggggcggcggcccatggtgacaacaggatctttggtggtgcgtggaagggaaagagactagagttgggtctttaaaatgtcaatactttaatattggaaagatttcactccactgtccttccaagtctgctgaattcttattcctgctctcatataggggaggtgctatgcttttt

SEQ ID NO: 4284 - DNA, 569 bp, Homo sapiens
  MAP TO AC016672.4; EXPRESSED IN BONE MARROW, SIGNAL = 0.43; EXPRESSED IN LUNG, SIGNAL = 0.48; NT HIT: D87675.1, EVALUE 5.40e-01; EST_HUMAN HIT: BF172505.1, EVALUE 1.00e-70; SWISSPROT HIT: P26639, EVALUE 6.00e-16
acggagccttcaactcagtgtgtcctctgctcacagagctcctgagcttccgctccatgcagagcgtttgcttgtcccctgctgcagctcagtctcacttcctctgggcagcccctccgtgccgctctcctgtgcgcggcgctgccttttcacagtacggttccctcgcctactccttctccattccctgcacgtgcctagcactcaaacgaaggttcagctcaggattggataagcaaccaaaacaggatcatcaactgtactccattaaaaacatgctttatttctgtctgacatgaagaattgtattttttaaaacataaatgaatttgatgttctatttgaatgtttcatttgctttgatttcagattgaagaagaaataaaggggtgtttgcagtttttgcaatctgtttactcaacatttggcttctcctttcaattaaacctgtcaacaaggccggaaaacttcctaggagagattgagatgtggaatgaggctgagaaggtaagagacacaccttgtgcttcctcttcattttagtcgtatggaagacacctgagaggctg

SEQ ID NO: 4285 - DNA, 500 bp, Homo sapiens
  MAP TO AL137798.1; EXPRESSED IN PLACENTA, SIGNAL = 0.81; EXPRESSED IN LUNG, SIGNAL = 1.2; EXPRESSED IN BONE MARROW, SIGNAL = 0.8; SWISSPROT HIT: P13388, EVALUE 4.60e+00; NT HIT: gi16161792, EVALUE 0.00e+00; EST_HUMAN HIT: AI934127.1, EVALUE 1.00e-109
tggggagagttttgtccttgggatggacctggctcctgccctgtaggcaatgaccacagcagcatgtccagccttccactgaggcaggcgtgtctgtcttttctcagaatatgaagagtgcaaagacctcataaaatctatgctgaggaatgagcgacagttcaaggaggagaagcttgcagagcagctcaagcaagctgaggagctcaggtgaggggaccccatgggggcaggtgggggagcagctgtgtaaatctctgaagtacagcagctcggtggggagacgtaagagctaagctgggccaggggaagggcaggaattgccatggcaggctcgcaacacacaagtatttatcaagcagagaagaaggataataaaaatttatgggttgcagttgtttcttagagccttgttttctctttttcaaacaagtaattgttgatgtgaaatttacataacacaaaattaaccaaaggagtgtgaaccacacagcagcact

SEQ ID NO: 4286 - DNA, 576 bp, Homo sapiens
  MAP TO CHR22_151.0; EXPRESSED IN BONE MARROW, SIGNAL = 0.91; EXPRESSED IN LUNG, SIGNAL = 1.2; EXPRESSED IN ADULT LIVER, SIGNAL = 1.4; EST_HUMAN HIT: BI828277.1, EVALUE 1.00e-102; NT HIT: gi7705994, EVALUE 0.00e+00; SWISSPROT HIT: P26012, EVALUE 1.30e-01
aggtccccgacctcatagaccatccagtttgggaggtggcggcagactacgggctgaggccccagatctgcctggggtcaggctgcttctacaagtgcagggccaccctcagtagtgtggctgctagggcagcacagttacaatttcatcgaaggctcaggcaggagtggagaggagtgtaggtgccccacggggaatatactgacctgtcgtgtgtgccccaaagtcagctccgactgtggctggcccagggggaaggcagcatccagttatgaatctgatatttatgaggccgtggctgctgcaacatcagaatccactaccgtagagcctggcaagctggatgtgggagccacggagggccaagacctgcagcacatcagcaaccaaaagatgcccacaggtaaaaaagccacgggtgccgtttaccctctggcacacctctggccacccccacccccttcccttaccctcatccccagagacatcctcagcttccagctccctcctgtccatagccagctttcccaggtctgggcatgggggacaaaggctggctctgcctcttgccttaga

SEQ ID NO: 4287 - DNA, 585 bp, Homo sapiens
  MAP TO AC004846.2; EXPRESSED IN BONE MARROW, SIGNAL = 0.75; EXPRESSED IN LUNG, SIGNAL =   1; EXPRESSED IN PLACENTA, SIGNAL = 1.2; NT HIT: AF109907.1, EVALUE 0.00e+00; SWISSPROT HIT: Q10136, EVALUE 7.40e+00; EST_HUMAN HIT: BG911742.1, EVALUE 5.30e-02
atccctcttggagccctatgcccttttgttccaatgtaacttctagttccgttaacacagtgatttttcaactagggatagcacctcccttccggggagtgtttggaaataactaggatggaggagtttttgattattgcaaagccttaaagccattattggcatttagtgggtgaggggccagggatgttaaatatcttgcaatatgagggaaagtcccacaaagaactgtgccccccaaaataccagcagcattctcactgaggaagcctgcagttcatccagccttctcatttcaaagcccttgctcatgttgtccctctcttggaaagctcttcctccatccttcagcgggccgtcccctattaccacttcctcagggaagcaccccttgactttccaggatacgtaaaattcccctattataaactttcatagcaacttatacgtcttctttgtagtacctatcacaactgtatgaattatttatgtaataatttgttgaccatctatctctccaaatagactataagctccacaagggcaggggaaatcttgttcagtgctatatccccagggcctagc

SEQ ID NO: 4288 - DNA, 544 bp, Homo sapiens
  MAP TO AJ239319.2; EXPRESSED IN BONE MARROW, SIGNAL = 1.3; EXPRESSED IN PLACENTA, SIGNAL = 1.3; EXPRESSED IN LUNG, SIGNAL = 3.5; EXPRESSED IN ADULT LIVER, SIGNAL = 2.9; NT HIT: AF149773.1, EVALUE 0.00e+00; EST_HUMAN HIT: BE081532.1, EVALUE 1.00e-92; SWISSPROT HIT: P03356, EVALUE 2.00e-24
gctgacaacattcttttatgcactctttttagttatccccacctgcccagttcccttattaggtcgaggcattttaactaaattacctgcttccctgactattcccaggctacagccacacttcattgcagcccttttccccagttcaaagcctccttcgcatcctccccttgtatctcctcaccttaatccacaagtatggaacacctctactccctccttggtgacctatcatgcaccccttaccattccattaaaacctaatcacccttaccccactcaatgccaatatcccatcccacagcatgctttaaaaggattaaagcctgttatcattcgcctgctacagcatggccttctaaagcctataaactctccttacaattcccccattttacctgtccaaaaaccagacaagtcttacaggttagttcaggatctgcatcttatcaaccaaattgtcttgcctattcaccccgtggttctaaacccatatactctcctatcctcagtacttccctccacaactcctccacaacccatt

SEQ ID NO: 4289 - DNA, 539 bp, Homo sapiens
  MAP TO AL121976.2; EXPRESSED IN LUNG, SIGNAL = 0.48; EXPRESSED IN PLACENTA, SIGNAL = 0.49; EXPRESSED IN BONE MARROW, SIGNAL = 0.51; SWISSPROT HIT: Q03018, EVALUE 4.50e-01; NT HIT: gi13937343, EVALUE 2.00e+00
atggcaggtcaaccctactgtgggaaaggaacacaccaccctggaaaggggctgattccatgttaaaaagaaaaaaaaaagtggaacaaagggcaaaagcataaaatgccatttgctattggaatagcagaaaacctcttttctagacaaccagacatttctgatgcctgccatccacatacctgcagttctctgattcgaggtggcacagatacagaaaggacaagtaggcccctctcatcagaacaggattcctatcactggggtcagtgccatcttccaagcccagcagttgtagggtcattgcatagttgtacctttagcaggcaggagagatatcataaatcaatttcacctcaaagtgattccaaaatttcacatgcacaaaactaaagtcattttacttaatttaaaggtgtttcatgatagcttccctttataaatttctgaggggaaataattactctatatgtatacatgtaaagacaagtttctcttagcaattactctcattaaaaacacagtcgtagggtgaagca

SEQ ID NO: 4290 - DNA, 543 bp, Homo sapiens
  MAP TO AC011803.4; EXPRESSED IN PLACENTA, SIGNAL = 0.52; EXPRESSED IN ADULT LIVER, SIGNAL = 0.36; EXPRESSED IN BONE MARROW, SIGNAL = 0.43; SWISSPROT HIT: P12050, EVALUE 5.10e+00; NT HIT: gi13027403, EVALUE 5.20e-01; EST_HUMAN HIT: AI340083.1, EVALUE 7.60e-01
agtccccaagaagcagatcctccttcactaaggaacaaccctacaggtatcaatagtatgaacgtattagcacaagagagaactactgatatgtctacaactccaactctactctgaagaacattttatgagagctgcaacataccttgtgtgccccacaggaaagtcaagcaaagtctcttgagaaaatgggactctcagaaggaaaaatgagcaggaaactaacacttctgagggcctacatagtgctgggcaccactctaattaccttactaataatagtaatatttttctttccttctttccttttttccttctttcattcagtttctttccattgtctcataatagtctacatacattatgtcatttctgtgaaggatgaatttggagattaatggttacaacaaggagactaccagtgctagaatcagataaaacctgtttcttcaaactcccagatatatgtgctttataaaaagttctactatttttcagatagcagagcatttaaagatacacactgacatgaacatttgggtt

SEQ ID NO: 4291 - DNA, 595 bp, Homo sapiens
  MAP TO AC005629.2; EXPRESSED IN BONE MARROW, SIGNAL = 0.63; EXPRESSED IN PLACENTA, SIGNAL = 0.5; EXPRESSED IN ADULT LIVER, SIGNAL = 0.56; EXPRESSED IN LUNG, SIGNAL = 0.5; SWISSPROT HIT: P38604, EVALUE 6.70e-01; EST_HUMAN HIT: AL519106.1, EVALUE 0.00e+00
gctccaagaccaagagcaagtcagcactcatcacgttctacctgtatgtcatcaccctgatgaagcttatgggggctgcggggctggctggaatccggatttacaggacagatgagaagtcactggatgagtccaaaaatccgccccgcaaactggactcggacctcttggtgggcactgcctcaggctcctggcttatctcctggggctcaatcttggccatcctttgtgccgaggaccacccccactacacctggtacaacctgccctactccatcgtggtgatcgtggagaagtacatccagaacctcttcatctttgaatccattcaccgagagcctaaaaaactctctgaggacatccaaacccttcggatggtcacagtctgcaatggcaacaccatgccccttgcttcctcctgcctcaagagtggaggtgtggccggagacgtggctccctggggcagggacatgccaccagcagccaatggaaatgtgtgcctgagagaaagctgtgacaaggaggagaagcacgaggagagcagctggggagggaacccaagcccagtccaccttcctcgtttcttacagggcaa

SEQ ID NO: 4292 - DNA, 523 bp, Homo sapiens
  MAP TO AL159176.2; EXPRESSED IN LUNG, SIGNAL = 0.61; EXPRESSED IN BONE MARROW, SIGNAL = 0.53; EXPRESSED IN PLACENTA, SIGNAL = 0.59; EXPRESSED IN ADULT LIVER, SIGNAL = 0.65; SWISSPROT HIT: P34137, EVALUE 6.30e+00; NT HIT: gi14249577, EVALUE 3.00e-73; EST_HUMAN HIT: AI312778.1, EVALUE 5.00e-73
aagacatttctggtgatgccagagatgagatagctggctgtccattgcggggtggaggataaatttgggtaaaaatatttctgaaaatcgcttttatataaaatttaatacatattcattatgtttttctcagtttacaattctgatgtaattgataaacagagtgcttccatgacttctgataatgcagatgacaaagctgttattattctagttcctgttagacttggtggagaaagaaccaacaccgactacttagaatttgtgaaggtatgaaataagtgctgaacttttttagggcaatactagctaatatgaaaaatatagaaggtttgcaatttttttctgttaaatgagtagtgatgattttgtagttgtacgttgtacgttgtaaagtttgacattagagattttaaattttggtattataagaccaatgtgagttgaagagcacagtgttctataacaaaatgaaaagccttttaatctttgtagctaatcagggagacacagatgcagcaat

SEQ ID NO: 4293 - DNA, 556 bp, Homo sapiens
  MAP TO CHR22_171.0; EXPRESSED IN PLACENTA, SIGNAL = 1.2; EXPRESSED IN ADULT LIVER, SIGNAL = 1.1; EXPRESSED IN BONE MARROW, SIGNAL = 0.78; EXPRESSED IN LUNG, SIGNAL = 0.96; EXPRESSED IN HEART, SIGNAL = 1.4; SWISSPROT HIT: Q92523, EVALUE 4.00e-28; NT HIT: AB003286.1, EVALUE 0.00e+00; EST_HUMAN HIT: BG470677.1, EVALUE 0.00e+00
tacagaggggtgaatctggcaggtggaccctggtaccaccctgccctctcagcagcgggaggcggggctcctacccggaagtgagccagctgcagcgcgatctgcacaaaggcatcagggctggtccggcacttcttgatgaggcctttgccaaagggcaggaactggaagcagtacaactccacgtcgtctgccaacgccttggccacctggtaggaactctcgatgaccgcctggcactgccaagacatgggaagggtcagctgagggtagggctctccaagcaggactctgggtcatgtctaggaggcatgacgtttagctggtggagaaagggcacagccggccaagacatcttcaggaggagggtacgcaaaagacagtctgagggagaatcagcccccagaggccgggctcagctttgtgggtaagagggaagtgctgaaaatgctccaggggcctgtgagtgcctcctccatctcatggctgtctctaaacacagatggccccaggggcggtgggtggtctctgtcctccctgaagccagtttggactc

SEQ ID NO: 4294 - DNA, 552 bp, Homo sapiens
  MAP TO AC016687.2; EXPRESSED IN BONE MARROW, SIGNAL = 2.7; EXPRESSED IN LUNG, SIGNAL = 5.5; EXPRESSED IN ADULT LIVER, SIGNAL = 4.8; SWISSPROT HIT: P05084, EVALUE 7.90e-01; EST_HUMAN HIT: AA309524.1, EVALUE 9.00e-84; NT HIT: AL163227.2, EVALUE 4.00e-60
tgagaagaggtccaccatcctccagaccccagaatggtagatccaccaacagcttgcaccatgctcctggaaaagctgcaggcactcaaacaccaacctgtgaaagcagctgggagagggcccatgccctgcaaagccacagggttggtgtttcccaaggctgtgggagcccacttcttgcatcagcatgacgtggatgtgagacatgggttcaaaggagataatttggaactttaaggtttagtgactgctctattggattttggacttctacggggcctgtagccactttgttttggccaatttctcccatttggaatgagtgtatttacccaatgcctgtacccacattgtacctaggaagtaactaacttgcttgtgattttacaggctcataggccgaagtgacttgccttgtttcagatgagattttggacttggacttttgagttaatactggaatgagttaagactgtgggggattgttggaagggcattcttaggcttttaattgtgagaacatgagagttgggagggtcttggatggaatga

SEQ ID NO: 4295 - DNA, 588 bp, Homo sapiens
  MAP TO CHR21_43.0; EXPRESSED IN BONE MARROW, SIGNAL = 0.9; EXPRESSED IN PLACENTA, SIGNAL = 1.2; EXPRESSED IN LUNG, SIGNAL =   2; EXPRESSED IN ADULT LIVER, SIGNAL = 2.2; SWISSPROT HIT: P37328, EVALUE 1.50e+00; NT HIT: AB026898.1, EVALUE 0.00e+00; EST_HUMAN HIT: AW179178.1, EVALUE 3.00e-99
gggcttgcaacttagctcacacccgaccaatcagatagtaaagagagcacactaaaatgctaattaggcaaaaacaggaggtaaagaaatagccaatcatctattgcctgagagcaaagcgggagggacaatgatcgggatagaaacccaggcattcaagccggaatggctaccctctttgggtcccctccctttgtatgggagctctgttttcactctattcaatcttgcaactgcactcttctggtccgtgtttgttacagcttgagctgagctttcgctcgccttccaccactgctgtttgccgccatcgcagacctgccgtgctgacttccatccctctagatctggcagggtgtccgctgtgctcttgatccagcgaggcgcccattgccgctcccgattgggctaaaggcttgcaattgttcctgcacgctaagtgcctgggttcatcctcatcaagctgggttccacggttctcttcatgacccgcagcttctaacagagctataaaactctgtgcatggcccaagattccattccttggaatctgtgaggccaagaaccccaggtcagagaacaggaggc

SEQ ID NO: 4296 - DNA, 565 bp, Homo sapiens
  MAP TO AC020721.4; EXPRESSED IN BONE MARROW, SIGNAL = 0.52; EXPRESSED IN LUNG, SIGNAL = 0.46; EXPRESSED IN ADULT LIVER, SIGNAL = 0.53; SWISSPROT HIT: Q9V198, EVALUE 1.80e+00; NT HIT: X71133.1, EVALUE 5.40e-01; EST_HUMAN HIT: BE615544.1, EVALUE 1.30e-02
ttcctaagccattctgctggcagataactgaacatgtacatgcaataacttctcaaatttcaccttccatgcccattctgcacccccaccctttgggaaacaatgctgaaagtgatgatgacaaggacgatgttgatgacgacagtgactacgatgatgacaatgatgctttcttacatccctaattacagcaatttggcaatcttactgctcacaagacattttcataaacaaagacctctcatccacaaagagcgatcaatcttggtggttggaggatggtggctatactctcatcagcctccaagcaggaagaaccttaataaagcacccaagtcatactctaaccttcagttctatgaatatttggccaggagctgtgttctgaaactcctcccaactcattgccatatgactttgcccctttcagtctcaccctcttctggaataaaaacctttgcttcttctggaacttccctgttttggttctcaaatataaattattcactgagtacacgtcttctcattaagttctttattgcctcgaaagaattttgggctgctg

SEQ ID NO: 4297 - DNA, 595 bp, Homo sapiens
  MAP TO AC011799.5; EXPRESSED IN ADULT LIVER, SIGNAL = 0.37; EXPRESSED IN BONE MARROW, SIGNAL = 0.4; EST_HUMAN HIT: AA643776.1, EVALUE 4.00e-18; SWISSPROT HIT: P24880, EVALUE 3.40e+00
caggccacatctggttcatctaattactctgtttaaagcaacaaggcttatgaatgatcagcaaagagcaattttcaaaatcttgaatgctcagtgtttgttaattatgttatcacaaatgtattaaattggtaaatcaggtatttttagtgaaagttacttatctttttgtttctgctccccttatcagatgtcacccagacactcccggaaaaacgagttcttgtgttatcagttctacattgtcatcaaaaaagatgacaccactgcttgcctaaaagtctcaaaggtcatttgttacaaagtttcccgtgatttttaaaagaatatgtttttattaagccttctttttagaaatgtccataggtttgacagcttttcttatattattagagtttctattgggctctcattaatagggttaaaattcactcctttggctaagttatcttctctgatttactgagttttctacttcttttactgaagtacaaatgtgcttagtatgaaccttttgaaaagaatcagcctccttaatcctctgttacaagccaagaaaaagactcatcaattgtgggcaaatgatgcaatatca

SEQ ID NO: 4298 - DNA, 541 bp, Homo sapiens
  MAP TO AL160231.1; EXPRESSED IN BONE MARROW, SIGNAL = 4.6; EXPRESSED IN LUNG, SIGNAL =  17; EXPRESSED IN ADULT LIVER, SIGNAL =  16; NT HIT: gi14721867, EVALUE 0.00e+00; EST_HUMAN HIT: BI197886.1, EVALUE 0.00e+00; SWISSPROT HIT: P97351, EVALUE 3.00e-63
ttagaaaagcggcaaaaagggagccaagaagaaagtggttgatccattttctaagaaagattggtacgatgtgaaagcactggctatgttcaatatatgaaacattggaaagatgctggtcaccaggactcaaggaaccaaaattgcatctgatggcctcaagggtcatgtatttgaagtgagtcttgctgatctgcagaatgatgaaggtgcatttagaaaatgcaagctgattactgatgatgttcaggcaaaacctgcctgactgacttccgtggcatggatttcacctgtgacaaaatgtgttccatggtcaaaaaatgacagaccatgattgaagctcatgcttatgtcaagactactgatggttatttgcttcagttattctgtattggttatactaaaaaatgcaaccaatagatattcaccaccaacaggctcgccagatctaggagacgatggaaatcatgacccaagaggtgcagacaaatgacttgaaagaagtggtcaataaattgattccagacagcattgcaaaaga

SEQ ID NO: 4299 - DNA, 561 bp, Homo sapiens
  MAP TO AL121994.3; EXPRESSED IN BONE MARROW, SIGNAL = 5.9; NT HIT: gi11995467, EVALUE 0.00e+00; SWISSPROT HIT: Q01628, EVALUE 5.00e-58; EST_HUMAN HIT: BI824401.1, EVALUE 0.00e+00
atgcccaacccagtctacagttttcttattgtgttgtcttcaacaaaattataagccattaacaatttcaaaaatgtctttgagtaaccatgaaccacactgcccaaaccttcttcactcccgccaacaccggctgccccctagactatcagatgctcaagtaggagcatgaggtggctgtgctgggggcaccccacaactctgctcccccgaggtccaccgtgatccacatccacagcgagacctctgtgcccaaccatgttgtctggtccctgttcaacaccctcttcatgaactcctgctgcctgggcttcatagcagtcacctactccatgaagtctagggacaggaagatggttggcgacctaaccgggggccaggcctgtgcctccaccgccaagtgcctgaacgtctgggccctggttctgggcatcctcatgagcattctgctcatcttcatcccagtgttgatctttcaagtctatcaatagaacaggaggcagcatccaggccaggagctctgcccacgacctgtcgcacacacactccaccttccattcc

SEQ ID NO: 4300 - DNA, 589 bp, Homo sapiens
  MAP TO AC025745.1; EXPRESSED IN BONE MARROW, SIGNAL = 0.46; EXPRESSED IN ADULT LIVER, SIGNAL = 0.33; NT HIT: AL163284.2, EVALUE 3.60e-02; SWISSPROT HIT: P03332, EVALUE 5.00e-18; EST_HUMAN HIT: AU140866.1, EVALUE 2.00e-32
ccttctctctgccaatcctgctacagtaggggccgtggcagttccctgagaagagccttcgtgggaataccaaccgacaggtcccagggtgagcaccctgtaaccatatggtcacttgcctcattgcagtccttaacaaagctgcccataaagctgtaaattttgaaaaactcaaagagatttcccagggggcagatgaaaatcccactgaatttctctcccaccttgtagaggctctccaaaaatacacccatgtcgatcctgcttcctgagaaggcactatagatctttatacccattttatctcccaatcagctcccaacatctggcgaaaactcaaaaaggctgaagaaggccctcaaaccccacaacaagactttctcaacctggctttgaaagtctttaataatagggatgagcaggaaaaaataaataaggcccaaaaagatcatgccaaataccagctactagccacagctatttgccaacctggcaatagcacccaagggcacaaaagacccaaaagcagtcttcctcctggggtctgctttaagtgtggcaaagaaggccattggtcacaggtgtgtcc

SEQ ID NO: 4301 - DNA, 531 bp, Homo sapiens
  MAP TO AL137008.1; EXPRESSED IN PLACENTA, SIGNAL = 0.82; EXPRESSED IN BONE MARROW, SIGNAL = 0.59; NT HIT: gi14759704, EVALUE 1.00e-107; SWISSPROT HIT: O94833, EVALUE 8.00e-30; EST_HUMAN HIT: AL042709.2, EVALUE 1.00e-107
ggagaaggatcaaggcaatgttgctattagaatttccttcttcagactgtcctgattgagacacgagggcctcacaattttttactagaatagttcttgttgaggtttcaatacttttcccattacacccagctctcatttacatggtttttacctgacgcagggctgcttctaaccgtgtttgctttgatatagaaagtgcacacacggtctcccagcgtgtgcttaattcctgcatctggaccttgacccaggaggagtcatcccgactgccttctatgagttctcgggctgagcgcttcagggcctgcacactgctggtcctcttccccaactctttttggaaggcctaagaagaccatattttgaaaaattaattttaattacaaaaccaaaacagcaacacatactgtttgagatatatatgtgcacataacatcatgtaaagatatctaagacctacagtttaataaccatatttctggcagcatcttcagaagataaatgacacactgctcctatttgagcacc

SEQ ID NO: 4302 - DNA, 573 bp, Homo sapiens
  MAP TO AL136081.1; EXPRESSED IN PLACENTA, SIGNAL = 0.35; EXPRESSED IN ADULT LIVER, SIGNAL = 0.52; EXPRESSED IN BONE MARROW, SIGNAL = 0.45; EST_HUMAN HIT: BE536147.1, EVALUE 5.20e-02; NT HIT: AE006643.1, EVALUE 5.50e-01
tattggcaatttgtatgcggtcgtttgcagtaagaatggagaataacttggtggaaacttctgaaagctacagttccagagtaacaaaaggaaaaagaggaattcgtctagtaaaaggccgtatggcaaagtgtatgttaaaaaaaaaaaaagtggaaaaggcattattgacttgcagaatgttctaaaaatacctcattcaataagtacatcttgctagttgacacacaattatgttaatgtagtaagagttgaagagtaatttaaatataattagggcttaaaagatacatggcatagagcatggaacttgttttggcgcgtgcgtggagtatttttaatgaaaataaaaaataaaagtaatctgtaaattaaaacctttgtgtattttcaatttcatttgaggttattctcacatgactgataaagatgatgaaacaaatgagtttcatcatgaatttattctcatataaatgacacttttcaacatcctgttttggaaaaaagaatgaaaaacatttcttgattcttaataggacacctatttcatgaacattcatttccatgccaggt

SEQ ID NO: 4303 - DNA, 593 bp, Homo sapiens
  MAP TO AL137798.1; EXPRESSED IN BONE MARROW, SIGNAL = 1.1; EXPRESSED IN HEART, SIGNAL = 2.7; EXPRESSED IN ADULT LIVER, SIGNAL = 2.8; EST_HUMAN HIT: BI768576.1, EVALUE 0.00e+00; SWISSPROT HIT: P47813, EVALUE 8.00e-53; NT HIT: gi14743847, EVALUE 0.00e+00
cctccagcacctacttggtcccgcgcgctccctcgtgtcgcccctcggagcagcagccgccgcggtcgccgctacccggaaagaagtcagagacgccgcgaggtcgccgccaccgccatgcccaagaataaaggtaaaggaggtaaaaatagacgcaggggtaagaatgagaatgaatctgaaaaaagagaactggtattcaaagaggatggtcaggagtatgctcaggtaatcaaaatgttgggaaatggacggctagaagcaatgtgtttcgatggtgtaaagaggttatgtcacatcagaggaaaattgagaaaaaaggtttggataaatacctcggacattattttggttggtctccgagactaccaggataacaaagctgatgtaattttaaaatacaatgcagacgaagctagaagtctgcaggcatacggcgagcttccagagcatgctaaaatcaatgaaactgatacatttggtcctggagatgatgatgaaattcagtttgatgacattggagatgatgatgaagatattgatgacatctaaattgaactcaacattttacattccatcttttctgaagattg

SEQ ID NO: 4304 - DNA, 538 bp, Homo sapiens
  MAP TO AC012348.4; EXPRESSED IN ADULT LIVER, SIGNAL = 0.45; EXPRESSED IN BONE MARROW, SIGNAL = 0.47; SWISSPROT HIT: O43278, EVALUE 2.20e+00; NT HIT: gi14721074, EVALUE 9.00e-49; EST_HUMAN HIT: BI463320.1, EVALUE 1.00e-48
tccaaaactctacgggaaccatgatataattgcaacaggaaataaaatgatgaaataagcactaggttaataaataaataaatatatttgcagtatttgaatgtggttcataaatccttttgaaacagcagatttcaatattctcaatataacaaggcatttttctcttctcttgaaatgattttattttctgagatacattattgacatttcttattacagaaaattccttctgtaggaaaataagtaaaaaccaggggcacgtaccttggaatttttctggaggagcaaggcagcttctgtctggctaaggctgtaagcttcgggcgtgtcatgggcagtgggggcagggtggtcatttcggactacaaaaagaaataagtagaaattgtattttaaggaataaatctttcaaaggatcctttaagacattattagagatttacagtctgtcatcttagttgagaatgcctatgtgtagtgctacagctgtgttattcgggaatcatgctcagtgagtggattctgcaggttgctt

SEQ ID NO: 4305 - DNA, 542 bp, Homo sapiens
  MAP TO CHR22_166.0; EXPRESSED IN PLACENTA, SIGNAL = 0.62; EXPRESSED IN LUNG, SIGNAL = 0.45; EXPRESSED IN BONE MARROW, SIGNAL = 0.47; SWISSPROT HIT: P51111, EVALUE 5.10e+00; EST_HUMAN HIT: AA362951.1, EVALUE 2.00e-20; NT HIT: AL163218.2, EVALUE 4.00e-14
tatccttgcacgttttgtgcagattcatttgtctttcatgtccttcagttttagagacctagacaagctaagggagtgaatcaaaatcaacagataacaagggtgaggtttctcaaactgaagcatcctgtttacgtctggtaaaaccacctccacagaacatcatgcgtcgtcaggtataaggcctaacacctgtggtgtgtagtgatacagcattttatctcttccttgtagcccatgaaataaagagaaagtttgttcaagagatgatggtagttttcactgcactagagtgttacaagaaagtaagtgagaacaataaccccaggacagggaggctgctgctcactgctccagcatctgcagcattctcctgaggggacacattaaggcagcagagagacatttcccaaaataaacagcgagggaaataaaggtgtaggagtcacagtgaggaggctaaagtgactccatcttggaagctaatccaccatgttgacttctgattaaccccggttctgggaatgccgctaagatttcca

SEQ ID NO: 4306 - DNA, 585 bp, Homo sapiens
  MAP TO AC019325.3; EXPRESSED IN BONE MARROW, SIGNAL = 0.5; EXPRESSED IN ADULT LIVER, SIGNAL = 0.4; NT HIT: U91522.1, EVALUE 0.00e+00; SWISSPROT HIT: O00623, EVALUE 2.00e-17; EST_HUMAN HIT: BG762646.1, EVALUE 0.00e+00
tttgacaagttaccccctcgccacatactacttccacccacgtccgagttaactttgttcttaaccttcttgagactaccctcggcctccaggtctttttttcccagttcatttttgcccataagattgagtttcgagtttcagatatcatgcagaaagtttacctttaagactgagcacccatctgatactcttcctcccgaaaaagttcatgctcacgagagagtttgtgggaaaagtgaaagccagtacacgcaggaaactatggctgagcacggggctcacttcacagctgcttctgtggccgatgaccagccatccatctttgaggtggtagcacaggacagtttaatgacagcagtgagacccgctcttcagcatgtggtcaaggtaaggtattaattcttggaaaggttttagggacaactgggtaaaaaacaaacgaataatttgtgcttatttggtagcctagcgtttgaaatagccaatttgcaaataacttgtatcccatgacttaagagttactgagtctctgttatgtgtagagacctgtactgaatacccagcatttcagggtccaacagt

SEQ ID NO: 4307 - DNA, 504 bp, Homo sapiens
  MAP TO AC018586.3; EXPRESSED IN BONE MARROW, SIGNAL = 0.65; EXPRESSED IN PLACENTA, SIGNAL = 0.66; EXPRESSED IN LUNG, SIGNAL = 0.73; EXPRESSED IN ADULT LIVER, SIGNAL = 0.86; SWISSPROT HIT: P11374, EVALUE 3.50e+00; EST_HUMAN HIT: AW857917.1, EVALUE 1.00e-57; NT HIT: AB008681.1, EVALUE 3.00e-85
ctctggagatcccttccctccctcagggtatggccctctacttcatttttggggaataacatctttataggatgggggtaacgtcccagtattaacagaagaacacttaggactctaacaggttttcaagaatgcatcggtaagggccaaataaatccgatttttctcggtcctctttgtggtctaggaggacaggcaagggtgcaggttttctagaatgtgtcggtaagggccactaaatctgaccttccttggtcctccttgtggtctaggaggaaaattagcatttctgctgctacgttggtgagcacaactattccaatcagcagggtccagggacactgtgggttcttgggcagggggtgtttctgctaccgcgtcaatgagcacaactattctgatcagcagggtccagggactcttgcaggttcttgggcaggggtagaaacaaacaaacaaaaaccgtgggtggttttgtctttcagatgggaaacactcaggcat

SEQ ID NO: 4308 - DNA, 547 bp, Homo sapiens
  MAP TO AL139152.1; EXPRESSED IN LUNG, SIGNAL =  18; EXPRESSED IN BONE MARROW, SIGNAL = 6.4; SWISSPROT HIT: P75518, EVALUE 3.00e+00; EST_HUMAN HIT: BG546028.1, EVALUE 0.00e+00; NT HIT: gi16159764, EVALUE 0.00e+00
atagagccatgcccactgacccatcctatgtctgggcttccaaatggaactatagtttcattcaaatcttcaggtgcctataggtcctgcctgcaggaatgacacctctcggcttagtaagggctgcttattgtgggaatatgactcccatctggaagaccaggtggagacttgtcaccgtcaaagtaaaaaagctattgtccatgtcaagggcaaaggtgatgtgctgttcctcaaatgagtaaaacacacttctgtagtgctggaatgagtcaggtagttcaaagtacattgatggagtcgaataacatctatccagtgagtcctgcaagacttcaggctcttccacttccatcagcacgctgttgagcctggaaaaggagacaaaactaaagaagcagccagggaaagtcagacaccacagagcctcactagatttcagaagtaacataaggaagtggttacaaaagaaaaaggacagatccattaatgaggtaacaaattattgcctttatgttgggatagaacagggccaggtagaaaacaa

SEQ ID NO: 4309 - DNA, 571 bp, Homo sapiens
  MAP TO AL137071.3; EXPRESSED IN BONE MARROW, SIGNAL = 4.5; EXPRESSED IN HEART, SIGNAL = 2.6; EXPRESSED IN LUNG, SIGNAL = 7.9; EXPRESSED IN ADULT LIVER, SIGNAL = 6.6; EXPRESSED IN PLACENTA, SIGNAL =   4; EST_HUMAN HIT: BE420422.1, EVALUE 0.00e+00; NT HIT: AL163246.2, EVALUE 1.00e-117; SWISSPROT HIT: Q06453, EVALUE 1.10e+00
gcagcaaaaccttcaagaggtgactcgggcgctgttaaaggcattgagttttaaaagggtagcagagcatagaagttcagaaaatttgcagcttgacaatgtgatagaaaagaaaatctcattttctgaggagaaattcaagccggctgcagaaatttgcataagtaatgaagaactgaatgctaatcaccaagacaatggggaaaatgtctccagggcatgtcagaggtcttcattgcaggccctcccatcacaggcccagagggctaggaggaaaatatggttacataggctgggcccagggcccccatgctgtgtgcagcctcaggactttgtgccctgtgacccagctgctccagccatggctgaaaggggccaacatagagcttgggctgtggcttcagagggtgcaagccccaggccttggcagcttccatgtggtgttgagcctgcatgtacacagaagtcaagaattggggtttgggaacctctgcctagatttcaaaggatgtatggaaatgtctggatacccacgcagaagttgctgtaggggcagggtcctcatgtagaa

SEQ ID NO: 4310 - DNA, 572 bp, Homo sapiens
  MAP TO AL137861.1; EXPRESSED IN LUNG, SIGNAL = 0.8; EXPRESSED IN BONE MARROW, SIGNAL = 0.66; SWISSPROT HIT: P10266, EVALUE 1.00e-40; EST_HUMAN HIT: BG674607.1, EVALUE 0.00e+00; NT HIT: AF015998.1, EVALUE 1.00e-103
aatgggcacatagctccaacattttccccttggaattctccagttttcatagttaagaaaaaatcaggtaaatggagaatgttaactgacttaagagccatcaattcagttatacaacctatggaaacataacatccaggattgccttctcctactataattccaaaaaattggcctttgatagtcacagatttaaaagactgtttctttactacccttttagctgagcaagactgtgaagggtttgcatttacaattcctgcagtaaacaacctgcagcctgctaagcgttttcgttgtttcacagatgggtctagtaatggtaaagcttcttattctggatcaaaaggtaaagttttccagacaccctatacttcagctcaaaaagcggagcttgtatctgtaaatgaggtattgactgcttttgatatgcctgttaatgtgatttctgattcttcatacatggttcattccacacagtgaattgaaaatgctcagttacgatttcatacagatgaacaactgataataaaaacaaaaaagggggagaaacagggattatgggatagccc

SEQ ID NO: 4311 - DNA, 596 bp, Homo sapiens
  MAP TO AC018691.5; EXPRESSED IN PLACENTA, SIGNAL = 0.53; EXPRESSED IN BONE MARROW, SIGNAL = 0.47; SWISSPROT HIT: P98164, EVALUE 2.00e+00; NT HIT: gi16159362, EVALUE 5.70e-01
gcaaacccatctgttgtgtgttgatcacttttcgttttccttcaaggggcttatagacttacctcttcctacgtctgaaaccacccagtttgtaattctgatgcaggtggtgatggtgggtgagctgtgtccccaaggtcaggggctccagtgacattccagtgagcagtgacacacctgctggctccacagcgatctgcctgtattggaatcggctgtcacccacggggatggcccaccaggttatcaaggctgagagctcttgctgggcttccactatctgtaagtttgtcttcttcattaaaccgtgacttccttgaggacagaactatgtttatctgtttttgtaaccactctccctggtaccttcctgacacctggtcgagacttccaaataggctattccagaacacaggtcccttgaagagagggacctccttttttcatcattgtatccccagagcccagcacagcacccaactttgcaatagtaaatgtgaaacggatctgtcaccctggaatcagagccatcaccctaaaatcagaaattcaaatgcagtcggaaatctgcactggctcttttccctggcaattca

SEQ ID NO: 4312 - DNA, 521 bp, Homo sapiens
  MAP TO AC021619.3; EXPRESSED IN PLACENTA, SIGNAL =   6; EXPRESSED IN BONE MARROW, SIGNAL = 0.81; EST_HUMAN HIT: BE734284.1, EVALUE 0.00e+00; SWISSPROT HIT: P10269, EVALUE 4.00e-26; NT HIT: AF208161.1, EVALUE 0.00e+00
agatttcctcaggaggggtgccttcaatgtcattaacatgggagcatgcactagcaggctggtccaggggtccacagtagattttagtcatggattgtatctggggctccatttgaagagccatttgtagctttacagcttcaattctggaagagacaaacttaaaaaggaggttaaagatacagggtccaaagaggagtaacagtattatagtcgctagaggtcctaagaaggggagaatccagggcatccattggctgaggaggtcccagggtctggtgttttgaagctcctctgctctatgttgtattcgatcttgaatttctttaactttttcggtgacgattccagattgattaacgtaataacagcattcttccactaaaaataaacagattccccctctttcggcagttagcaagtctaaagctcttcgattttgaaggactactgctgctaaggagttaagttgatcttgcaaggtgaccagggagtcggtgacccattccatgtcaccattt

SEQ ID NO: 4313 - DNA, 512 bp, Homo sapiens
  MAP TO AC020588.4; EXPRESSED IN PLACENTA, SIGNAL = 0.99; EXPRESSED IN LUNG, SIGNAL = 1.2; EXPRESSED IN BONE MARROW, SIGNAL =   1; SWISSPROT HIT: P10272, EVALUE 9.00e-25; EST_HUMAN HIT: AW503208.1, EVALUE 0.00e+00; NT HIT: X57147.1, EVALUE 0.00e+00
ccctttcccagttctaaggctcaggtaagcgccactagttctgctaactgggccctggtccctggggcaagaggcttactttcaagtatggttacatcactaactatggtgtaacctgtcctttgtatcccattctccacaactgaacttccatcggtatataggttaaggtcaggaatagttaaggggacatctaagagatcatctcgggtggcataagtctggactataatttgttggcagtcatgctcgattggttccccatcctctgggagaaaagtggcagggttgagggccacgcacatgcgtatttgaagcaccagtccctcaaggagtagtgcctggtatctaagtaggcagttgtctgatagccataaacttcctttggcacctagtatgccatttacatcatgagtagtccagacagtgagatcctttccttgtattattttgctggcctctgacactaagacagccactgctgcaactacccttaaacagtgaggccagcc

SEQ ID NO: 4314 - DNA, 593 bp, Homo sapiens
  MAP TO AC021011.2; EXPRESSED IN LUNG, SIGNAL = 0.7; EXPRESSED IN ADULT LIVER, SIGNAL = 0.56; EXPRESSED IN BONE MARROW, SIGNAL = 0.71; EST_HUMAN HIT: BG993601.1, EVALUE 4.00e-58; SWISSPROT HIT: P70213, EVALUE 3.00e-16; NT HIT: AL163248.2, EVALUE 4.00e-82
cccctctccactgagaactgttctgtcacttaataaaattcttctccactctcctcccactacaattgtcagtgctacctcattcttcttggatgtgagacaagaatctaggacctgctgagcagcatgggccaaaggaactgtaagctctaaagttgtaaggtctaaagtgattaatccactccagcattccaatctccctaagcctttgaatcccttcttcttcattaaatgatcaggcatttccagctcgctcacagtgggccatcttttgatccatatttcagctaactaagcaaataaatgaatgacaagaaccttttttaactccccgagctgcaacactaaatgcaggattccttcttagtgggcacatatcaataaattcagcctggtccaactttatgttccttccaccattatcccacacccttaatatccattcccatgcctgttctccagatttctgcttatataaatgagaaaactcaagcagttcttttggagtgtagtgcacctcctcatgggtcacattcagaatctcacctctgggggcctgccgggatttcgttacaggtctagaagcaaaccgg

SEQ ID NO: 4315 - DNA, 535 bp, Homo sapiens
  MAP TO CHR22_175.0; EXPRESSED IN BONE MARROW, SIGNAL = 0.46; EXPRESSED IN ADULT LIVER, SIGNAL = 1.2; EST_HUMAN HIT: BI518449.1, EVALUE 4.00e-89; NT HIT: gi14779626, EVALUE 2.00e-89; SWISSPROT HIT: O00268, EVALUE 2.00e-01
tagaggcctaagcacaaggccagacgctgcccgtggccctgcccacctccccggcctctcacctgggacagggtcatcaaggcctccaagggaagcgccgtgagggaggcccttgcacgggacatgccccagagcctcactccaggccctgggtctcctccccatgtcctcaggagtgtctgtgggccagcggtggcaggatgtcctgcctgtggcccggaagcacagccgagaccacatcctgctgttcaatgacgcacacttcctgatggcatccctgggtgcacacgacccccagaccacacaggagctgctgaccaccctgcgggacgccagcgagtatgcagaggggccttctcggggtgggggtcctcaccctgccgagagggtgagggggtgctagggccatgctgagacctgttcagtgcctgccccgcctgtgagtgcagcaggggggatgcccatggaggcagctcccaggtgtgcacccctatagatgtgcatcccctggtgcagacccccaaggtgtgtacac

SEQ ID NO: 4316 - DNA, 587 bp, Homo sapiens
  MAP TO AC013718.3; EXPRESSED IN PLACENTA, SIGNAL = 1.3; EXPRESSED IN BONE MARROW, SIGNAL = 0.75; EXPRESSED IN ADULT LIVER, SIGNAL =   1; EXPRESSED IN LUNG, SIGNAL = 0.9; SWISSPROT HIT: Q09328, EVALUE 3.00e-17; EST_HUMAN HIT: AW062987.1, EVALUE 7.00e-60; NT HIT: gi15296146, EVALUE 5.00e-60
tttccaagtgggattcaaggtacagaaccatcactgttttgttatctgcttatggatggttttgatcatcaaggggaaggacacagtgtcttgttacctacacgattataactcagtaccataaaaagcatagcactccatctagcacaggttattttaaaaattgcttgtgagactgaggtgttcggttcttttccagctgacatcccagcatccttacgctgaagttttcatcgggcggccacatgtgtggactgttgacctcaacaatcaggaggaagtagaggatgcagtgaaagcaattttaaatcagaaggttggttcattttattccactttccctcctttctaatgtgacctgaaatgtgtataaaacacatcataggtccttgtttttagcaaacagatctttaccacatcagcttaactctggaattagaaaataaccaagctgcaggatttggcctgtggatttcatgaatgttctgtgaaatggaaacagagctggtatcccgatgtgggcatggattccatagaccgtttagacatgaccatggatcccaggcacaggagcaggaactggagtc

SEQ ID NO: 4317 - DNA, 557 bp, Homo sapiens
  MAP TO AC013341.3; EXPRESSED IN PLACENTA, SIGNAL = 0.45; EXPRESSED IN BONE MARROW, SIGNAL = 0.46; NT HIT: AL163278.2, EVALUE 1.00e-07; EST_HUMAN HIT: AL110321.1, EVALUE 3.00e-03; SWISSPROT HIT: P11260, EVALUE 2.40e+00
tcatgctcctttgtgctctgattttcttgcatatgtggtttggagtctgttattagttttggaaaattcctagttatttttacttcaaatatttcttctgttctattgtctctttcttgtccttctgttattccaactacaagtatcttataccttttgacatttcctgacagttcttggatattctggtctctttttctaattcccttttgtctttgcgtttcagtttgagaagtttctattgacttatcttcaatctcaattatttcctcatcgagatccagtctacagatgttcccatcaaaggcattcttcatttcttttacggtgtttacatttgcagcattttattttcattccattttagagtttccatctttctgtgtacactatccatctgttcttaaaaattatctccttttttatgacaccatattaattgtagttaatgtaaattccctttaagataatcctgaaattggcttcataattgaagttagctcccatgctagctttgtttctttaacatgtgtttgtgttgcttttagcatgccttg

SEQ ID NO: 4318 - DNA, 581 bp, Homo sapiens
  MAP TO AL136081.1; EXPRESSED IN LUNG, SIGNAL =  17; EXPRESSED IN BONE MARROW, SIGNAL = 9.7; SWISSPROT HIT: Q9UJU3, EVALUE 4.90e-01; NT HIT: AL163282.2, EVALUE 4.00e-54; EST_HUMAN HIT: BG696923.1, EVALUE 2.00e-51
tttccccatctccatctgagatcatctcagactgtatttcattgaccataccatcagcatttgggtcaaagccattcaataagtttctagggagttccaaattttcccacattttcctgtcttcttctgtgccctctaaactgttcaacctctccctcttacccagttccacagttgcttccacatttttggatatcttttcagcaatgccccaccctactggtaccaatttactttattagtccatttttatgctgctgataaagacatacctgagactgggaagaaaaagagatttaacagacttaacagttccacgtggctgggaggcctcataatcatggcagaaggcaaagaggagcaagtcaagttttacatggatggcagcaggcaaaaagagagcctgtgcagggaaactcccatttttaaagctatcagatctcactatcatgagaagagcatggcaaagacccacttccatggttcaattatctcccaccaggtccctgccacaacatatgggaattaaggaagtagaattcaaactgagatttgggtggggacacagagccaaaccctgt

SEQ ID NO: 4319 - DNA, 507 bp, Homo sapiens
  MAP TO CHR22_172.0; EXPRESSED IN BONE MARROW, SIGNAL = 0.54; EXPRESSED IN PLACENTA, SIGNAL = 0.55; EXPRESSED IN LUNG, SIGNAL = 0.59; SWISSPROT HIT: P53814, EVALUE 2.00e-03; EST_HUMAN HIT: BG251951.1, EVALUE 2.00e-78; NT HIT: AF115553.1, EVALUE 0.00e+00
gagaggcaggaatcgagttgtagaaaggagtgcctggcttggcacctggcacaagtgggcagtttctggctgtccactcacagttgtgtgctctgtgaaccacaatgcaaagtggactacccaagatccctgaaacagtgggctgggtctacccccgggaccctgcgtgggcaggcaggcacgtgaagagcttgggacacagggagtggacacaggccacacattgtgccctaggcagagccgtgggcagctggtgccagccctccgcccctggcagccaaaatgacctgcctctcgcacccactgcagctggaggtcacagcagatctggcagagcggcggcgcatccgctcagccatccgggaactgcagcggcaggagctggagcgcgaggaggaggccctggcatccaagcgtttccgtgccgagcggcaggacaacaaggagaactggctgcagtgagtagcggggggtggaacatgcgggtgagaaggtgagtgtgagccc

SEQ ID NO: 4320 - DNA, 517 bp, Homo sapiens
  MAP TO AL138843.2; EXPRESSED IN BONE MARROW, SIGNAL = 0.51; EXPRESSED IN PLACENTA, SIGNAL = 0.57; EST_HUMAN HIT: AU127537.1, EVALUE 4.00e-64; NT HIT: gi14733037, EVALUE 3.00e-64; SWISSPROT HIT: Q9QZ81, EVALUE 7.00e-10
tgctcgcttcattcttctctgtctagtgaaatgtatgtcatcttttggcaataatcaatctttttggtgtcttaagccaagattctaaaagcaaaatctttatcatatatgaatattttttagaattttgacagctttatacagtggcagaaattacttctgttaatatttttatatttcatcttacagaggattatgtgaatatattgtttcccttctttagggaggtggttgactcaatggttcagcattttaaagtaactatatttggagaccgtagaccagtttatgatggaaaaagaagtctttacaccgccaatccacttcctgtggcaactacaggggtaagatatgcattcctgtattggaaaggtatatttttgaagtgtctccttttacacgcatttattaccatttttattacagtccatatatatgtgaatatttatcactgattgtttttaactttttgttttgaaataatttcaaacttaaagaaaagttgcaggaatcatgc

SEQ ID NO: 4321 - DNA, 539 bp, Homo sapiens
  MAP TO AL138842.2; EXPRESSED IN PLACENTA, SIGNAL = 3.5; EXPRESSED IN LUNG, SIGNAL =  11; EXPRESSED IN ADULT LIVER, SIGNAL =  12; EXPRESSED IN BONE MARROW, SIGNAL = 3.4; NT HIT: gi16161421, EVALUE 0.00e+00; EST_HUMAN HIT: BF926160.1, EVALUE 0.00e+00; SWISSPROT HIT: P75870, EVALUE 3.90e+00
tcctttgaccccttcatcagtgtgtcacccggccaattcgctgagctcactttctcctctctctctctctccctctccctgtctttctctttcattcttttctacctggccctggtctatcccaacataaaggcaataattcattacctcattaatggatctgtcctttttctttttaaacagttccttatgttagccatgaaatctagctggggctgtgtggtttctgattccccctgacttattctttactttttcctacttttccaggctcagcagggagctgctggatgagaaagagcctgaagtcttgcaggactcactggatagatgttattcgactccttcaggttatcttgaactgcctgacttaggccagccctacagcagtgctgtttactcattggaggaacagtaccttggcttggctcttgacgtggacagtgagtaccttactgtgaaggtgataagcctccacctggtcttccagataggggtgatattccagttccaagtaccccttactgacccgagagacg

SEQ ID NO: 4322 - DNA, 550 bp, Homo sapiens
  MAP TO AL137006.2; EXPRESSED IN ADULT LIVER, SIGNAL = 0.59; EXPRESSED IN BONE MARROW, SIGNAL = 0.48; EST_HUMAN HIT: AI252215.1, EVALUE 9.00e-10; SWISSPROT HIT: Q94819, EVALUE 6.80e+00; NT HIT: gi14745585, EVALUE 2.00e-06
tgaatggtgcacaggatctctctgtactttctttgcaacttcctgtgaatccataattattttaaaattttaaagagtttttttaaagatagagacagtaagtttatttctgctatttgtcatgttggcaaaagtataggcttgttgaattttcttctcacaagatttgtaggttttaacctcctgagttttaaaattattgtcactgagaccaaaagtgaaaatgtaagtaaacatttacatagaacataggaaaaaaatacattttaagctcaatgaggaagggctaaattatctaataaatgatactgaaaaataggctatattaaaaagtaaaatatacataaaaagtaaatttgaaatgtatcaaattataacattatttggaggaatataagaaaatatttgatatagtgttggtgtggaaaattgctgggttttttttccttttagcagtacccacaagacaaacaacttcagacatttgatagacaaatttgaatatgaaaaaattagttgtccaaacagcaataaaccaactaatttgcca

SEQ ID NO: 4323 - DNA, 567 bp, Homo sapiens
  MAP TO AL137859.2; EXPRESSED IN LUNG, SIGNAL = 0.52; EXPRESSED IN ADULT LIVER, SIGNAL = 0.59; EXPRESSED IN BONE MARROW, SIGNAL = 0.58; NT HIT: AL163201.2, EVALUE 2.10e+00
gctggtcactttgttctctgcagaaaggagacttcagccaaaggccaatgagagaaaaggaaataaaggcttcaaggtctctggttggggttcacagctggaaatattatccaacagaagaactctggctggaaagaaggaacagcctctttgctcagatagcattgatgatgatactgttagtaatattatcaagctcctaatatgcatcaggtacagtgctagctactatatatgcatcatcttattatgtcatttaatcttttcaacaatgctatgagatagatttttttttaccatgccctttttatagactgattctgcaggagaccacagaagataaaagaaaagaaagaaagaaagaaaacttaaattcattcaatgctaattatacaccaagtcccatgttaggatttctcatatgtcataagataggtgagggagtggatatataggaaaaaaaaaactaacgcttgttaagaatggaattttatggcattttaatttgccgttctcattttcctctctcaagttctgtggtaaccgtgaaaactagcaccccagcag

SEQ ID NO: 4324 - DNA, 519 bp, Homo sapiens
  MAP TO AL109611.7; EXPRESSED IN BONE MARROW, SIGNAL = 0.47; EXPRESSED IN ADULT LIVER, SIGNAL = 0.44; SWISSPROT HIT: P70279, EVALUE 4.80e+00; NT HIT: gi6226515, EVALUE 7.70e+00; EST_HUMAN HIT: BG828343.1, EVALUE 4.70e-02
ttgccctagacagtggaaccagccaggtcaccagcttgttctccttcagtttatcctgtctctgctgcattctctgtataacttcttcttccctatttcccataactgttgcctaagagaagaaaacatcaagtatcccatcaagttctggccttccctccctgtggttgccatcaacctaaccctccttcaattcttccactaataataataaagtaattataatagcaatagcttaccagagatcaattatgtaaagaatttacatgtattatccatcttgtttaattttcaccacgtcatgaggaaacaaaattattattatccttatttttacaaagaatgaaattgatattcagaaaaaaaatatataacttgtctgaggtcctacagcaaggaagttgaagaggggaagatttgtgcccaggtctttgtgattccaaggcctttcctattcaaatgactttgctggcaatgaccaaagaatcaaccagcttctccaaaaagatgctgcatgaa

SEQ ID NO: 4325 - DNA, 578 bp, Homo sapiens
  MAP TO AL159176.2; EXPRESSED IN BONE MARROW, SIGNAL = 1.3; SWISSPROT HIT: P03355, EVALUE 8.00e-33; NT HIT: X57147.1, EVALUE 0.00e+00; EST_HUMAN HIT: BE168410.1, EVALUE 0.00e+00
accccgcaactgttttaatgtcttagggtgaggataagccagtataggctgtattcattccttgctgagggccctggtccctctggctaagattaggcctagatatttgacctgctataggcaaagctgggccttcgacctagacacttgtacccttgattagctagaaagttcaagaaatctagagtagcctgctggcatgaagcttccgaactggtagccaaaagtaaatcatccaaatactgaaggaccagagtgcctggacttcagaagtggcctagatcttgggccagtgcctgaccaaacaggtgagggctatccctaagcccttggggcaagactgtccacataagttgggacgtgtggtctgtgggatcctcaaaggcaaagagaaactgggagtcagagtgcaggggaatacagaagacatccttgaggtccagaacagtgaaccattctgcttcctctggtatttgagagagcagggtataggggttgagtacaactggatatagaggaattactgcctcattgatgagtctaagatcttgcactagtctccactgaccggtttttgt

SEQ ID NO: 4326 - DNA, 525 bp, Homo sapiens
  MAP TO AL136362.1; EXPRESSED IN BONE MARROW, SIGNAL = 0.45; NT HIT: AJ271735.1, EVALUE 1.00e-07; EST_HUMAN HIT: BF751555.1, EVALUE 5.00e-11
cagatgctggtggatttgtgaaattgcccagaatcaaaaaaaaaaaaaaaagaaaagaaaaagaaaaaacagaaatcaaaacagaaagatgagtggttcaagcaagatagcagaacagaagcccatgtcattcatcattcccattggaacactaattttaacaaagatctgcacacagaaaaccaccatcattagaatcaaaatccaggtgagcaatccaagtaatggttttaaactcatattcatattactgaaaaaagcattacaaaggggaggagagacagtcttgactgtccaatgccacccctcctccatccactggcagtagctgagctatacagagagagaatctgtgcactttgggaagaaagagtacagaaaatggggaagtttacactgaactcagtgctgccttgtcacagtggagaatatagttatactgcgctcaggcagcacacacacggtagccagtggggaatcacccatcccagtggtcagaatttgagtttctcagcaagcctcacc

SEQ ID NO: 4327 - DNA, 504 bp, Homo sapiens
  MAP TO AL133553.2; EXPRESSED IN BONE MARROW, SIGNAL = 0.46; NT HIT: gi14730471, EVALUE 0.00e+00; EST_HUMAN HIT: BF350634.1, EVALUE 8.00e-81; SWISSPROT HIT: P74853, EVALUE 2.70e+00
ttgggttggcttttccatagggctttacttaacaaaaaggcatagacaacacacatgaaaaacctgatatcatgttagatgtaggcctcaatgtccttattttgaatttttttaaccctttagactggatggcataaagatatggattttcttttatcaaattacctttggatattgaagcatgaattttaaaacccagtgtctcttctatctggttatagtcagattccacagaggatgcatgaagtgtttcaaccaagaaaggcattcttccctgtgcctgatcatagaaaacggtgtggttccatgtgtatgggatgctgatgccatcaatggtgaacagccgggttgagtaggcgtacagctgcccaggacctgtttgaatgtagtcctctgtgtaatcctaaggagaacaatgtggatttgaagatcaatatggctcatactaatttttttcccttaaggggactatgaaatgcagaatgagcggggaaaaaggattag

SEQ ID NO: 4328 - DNA, 527 bp, Homo sapiens
  MAP TO CHR19.1; EXPRESSED IN HEART, SIGNAL = 2.5; EXPRESSED IN BONE MARROW, SIGNAL = 1.9; EXPRESSED IN ADULT LIVER, SIGNAL = 0.96; EXPRESSED IN PLACENTA, SIGNAL =   5; EXPRESSED IN FETAL LIVER, SIGNAL = 1.4; EXPRESSED IN LUNG, SIGNAL =   6; NT HIT: AF186110.1, EVALUE 1.00e-69; SWISSPROT HIT: P02561, EVALUE 1.00e-06; EST_HUMAN HIT: BE930699.1, EVALUE 0.00e+00
tctctacccatggagtgatggtttacaaagtgctgtcatgcacttttttgtggacacatgcatgtccttgtgaccttgtttactttcacaccagctctgcgaggtcggcagcatgatccccattttctaaaagcaaacacggatgccaccagattcaaagcgtccttacctctcactctcatctgcagctttttctgcctcctccagcttctgcagggccgtggccagtcgttcctgagccctgtccaactcctcctcaacgagctggatgcgtcggttgagggcggccacatcaccttcagcctggggaggtcggaggtgcagccatgttaagaagtatcaggccagccaccagtgggagcctcccccatgtcctgccctctgttaacctgatcttccccgtcaaagcccacccaggagtccaggccatagggaatttacactcataccaaaatttcagtatgatcttcccggaaaatgtctgggaaaaacatctaccactccatagcaaaagatgagcatcgcca

SEQ ID NO: 4329 - DNA, 587 bp, Homo sapiens
  MAP TO CHR7.1; EXPRESSED IN PLACENTA, SIGNAL = 1.9; EXPRESSED IN LUNG, SIGNAL = 1.4; EXPRESSED IN BONE MARROW, SIGNAL = 0.84; EST_HUMAN HIT: BG986593.1, EVALUE 4.00e-89; SWISSPROT HIT: P07942, EVALUE 9.00e-37; NT HIT: M61926.1, EVALUE 1.00e-106
taaattccactcccagcgtcttcaactgcaattacaataacaatgctggctttactgctcatactatgagctctgagactactgactattcagtttggaaggcaatctgaagtaggtcccacacagtgagtgacatttctcaacatacgttcacagaaattaggatctcggatgtccctctctgggtgctggtagtaaaacggcttgcactgctcacagttgcgccccatggtgttgtgctgacagtcatcacacacgcctccgctgacgttccccgtggccaggtaaacagccatgtcaaagtgacaagagatggaatgttcattgcagttacattctgcgtgacaagagcaacgtcaagaaaagctttttaaatctatggaccaatggaggatgggggtggcaggaagatcctttaggaaaccagggactaagttcagacaaaatggcagtcaacaagcaggactcctggggaaaaaggacgcatccaccgatgacactgtttaaaccctaaagtagatgagaaatctcaaaaatgtgaactttataaaataaacagttatctgacctctgtggaagagaatggg

SEQ ID NO: 4330 - DNA, 529 bp, Homo sapiens
  MAP TO CHR5.1; EXPRESSED IN HEART, SIGNAL = 1.1; EXPRESSED IN BONE MARROW, SIGNAL = 3.6; EXPRESSED IN ADULT LIVER, SIGNAL = 1.8; EXPRESSED IN FETAL LIVER, SIGNAL = 4.2; EXPRESSED IN LUNG, SIGNAL = 4.5; EST_HUMAN HIT: BI553242.1, EVALUE 1.00e-85; SWISSPROT HIT: P06351, EVALUE 6.00e-38; NT HIT: M11354.1, EVALUE 9.00e-86
taagcacgttctccatgtgctagcatgtgtgcggcatgctagctggatgtcttttggcataattgttacacgtttggcatggatagcacacaggtgggtgtcttcaaaaaggccaaccagttaggccttaattgcctcctgtaaagcaccaatagctgcactctggaagcacagatctgttttaaaatcctgagcaatttctcacaccagacgctggaagggaagtttgcgaatcgtgcctcactacgaggcctgtaacaatgaagcttattcgcccgtccagtagagggcgcactcttgcaaaaggcttttgtagccagttgcttcccgggtgctttaccacccgtggatttgcgtgcagtccgctttgcaggcaccacggtatgaagacctccttgcttaacccccttcttcggctggagctcagccaagcgagaggcggcgctagcattagagggcgacggcggcccggcggcgtcatctgtagtgagtgtagaaagtgttatttacaaactctgaactgggcaca

SEQ ID NO: 4331 - DNA, 575 bp, Homo sapiens
  MAP TO CHR3.1; EXPRESSED IN BONE MARROW, SIGNAL =   9; EXPRESSED IN HEART, SIGNAL =   4; EXPRESSED IN ADULT LIVER, SIGNAL =  10; EXPRESSED IN PLACENTA, SIGNAL =  23; EXPRESSED IN FETAL LIVER, SIGNAL =  16; EXPRESSED IN LUNG, SIGNAL =  19; EST_HUMAN HIT: BG533230.1, EVALUE 0.00e+00; SWISSPROT HIT: P47914, EVALUE 1.00e-54; NT HIT: gi14725776, EVALUE 0.00e+00
accaagtgctgggagacaacatgctgataaataaactaattccaaccccaagtggccagcactattatagacgtgtgtgtgtgctaaatagtgagccaactcttccggttctaggtgcttcgggagccgcggcttaaggtgtagacatggcgaagtccaagaaccacaccacacacaaccagtcccgaaaatggcacagaaatggtatcaagaaaccccgatcacaaagatacgaatctcttaagggggtggaccccaagttcctgaggaacatgcactttgccaagaagcacaacaagaagggcctaaagaagatgcaggccaacaatgccaaggccatgagtgcacgtgccgaggctatcaaggccctcgtaaagcccaaggaggttaagcccaagatcccaaagggtgtcagccgcaagctcgatcgacttgcctacattgcccatcccaagcttgggaagcgtgctcgtgcccgtattgccaaggggctcaggctgtgccggccaaaggccaaggccaaggatcaaaccaaggcccaggctgcagctccaccttcagttccagctcaggct

SEQ ID NO: 4332 - DNA, 565 bp, Homo sapiens
  MAP TO CHR17.1; EXPRESSED IN HEART, SIGNAL = 0.98; EXPRESSED IN BONE MARROW, SIGNAL = 0.84; EXPRESSED IN ADULT LIVER, SIGNAL = 0.92; EXPRESSED IN FETAL LIVER, SIGNAL = 1.3; EXPRESSED IN LUNG, SIGNAL = 0.79; SWISSPROT HIT: O43791, EVALUE 3.00e-29; NT HIT: gi4507182, EVALUE 2.00e-96; EST_HUMAN HIT: BF727427.1, EVALUE 3.00e-96
tcatccatgccttgaaaatgatggcctaggtccactacagagaggaaaaacagaaatgtcattttagagagcagcttttttggttctgagcattgttaccggaatacaaagatatatttagctgcagtttgttttgtagttgagttcaaaaagttgaagttgttcaaaaggtgattatgcaatcacttgtttttccttatttcaccaaaactataaaattcctcatgaataaataccaacctgctaagatagccttgtgagcctggaattcctggccggcaacacacaagcagcagtctgtgaaccgggaattctcccacagtcctcctaactcatctgccagccggcactcaggaacctttaccatgttcatggtattctggccagaaatgttgacagaatcttgcacaacactcacctgtgaaagacaaggaaacacaagccaagcttttgttaccaggaatttttttgccagcagatagacgacttttacctaactgctgtagtacattcagatactaatattaatcatattatcttgaaaccacctccacaaatcaaggct

SEQ ID NO: 4333 - DNA, 509 bp, Homo sapiens
  MAP TO CHR16.1; EXPRESSED IN FETAL LIVER, SIGNAL = 1.6; EXPRESSED IN LUNG, SIGNAL = 0.84; EXPRESSED IN HEART, SIGNAL = 1.2; EXPRESSED IN BONE MARROW, SIGNAL = 0.93; EXPRESSED IN ADULT LIVER, SIGNAL = 1.3; NT HIT: AK024487.1, EVALUE 1.00e-121; EST_HUMAN HIT: BG394802.1, EVALUE 1.00e-121; SWISSPROT HIT: Q03112, EVALUE 2.40e-01
ggtctcatctcaggctccagagcagggcatggtcatgcggccccacctgggggcatccaggccaggtgcctgctcaccctcgttccggcgcgagtgccgtggcgcgtagctgaactgcaggtcgatgtggcggttctggcgtgcctcggcgcggctgcgactgtggcaggccgtcctgtgggccttgaggtcgatctcggtgcggaaggcgtgggtgaactgctccgtgctgcagcggccttcctcacacagaaagtgcttctcccggaagtgctcacgcaggtaggcatagtcgctggcaggagatggggtgtcggtaggagggctgcagcccggttagccccacgccctcggggagggagggtcatctgtctgtctgctgcccggcccacctgtagtagtcctgggccccgtccgagtcgcagaagtggcagaagtagtggtcgcggcgcaggtgcttaagcagctcatcattgtccaggtagcgctcgtcacagaacttgcagagc

SEQ ID NO: 4334 - DNA, 576 bp, Homo sapiens
  MAP TO CHR9.1; EXPRESSED IN BONE MARROW, SIGNAL = 1.2; EXPRESSED IN PLACENTA, SIGNAL = 1.2; EXPRESSED IN FETAL LIVER, SIGNAL = 1.4; EXPRESSED IN LUNG, SIGNAL = 1.1; EXPRESSED IN HEART, SIGNAL = 1.4; SWISSPROT HIT: Q60101, EVALUE 5.50e+00; NT HIT: gi14739857, EVALUE 7.00e-99; EST_HUMAN HIT: BF829264.1, EVALUE 0.00e+00
cctggcagagaaaaggtcagaggccaaggggaacaggtcagagacataaattggggcagaggcaagaataggtattacaaaagggggtacctggaagtcaaggacccaaactctgtccagaatcggggaagggagggataacggaagagggataggtatggaaggtgggactaagactagtcaaaggacaaaagagtggttcattatgcttctttcatgcccaccctagctctgtcacctggaaacccagcccgctcacctacctgctgagcattgagatggagagctgaggcttgggctaaagcagaggagtggggctgggagtcctcaccccctgagaatagctcagccatcacttccccgatattcccaaatgggatgggcaggcccagcagcagggccagcgtgggcacaaggctaacttgaggaatcacctctggctcctaaaggaaaatgacagtggtcaacagattcatcacaaagctgaagtcaatgtttgggatggcagacataggggcctaggtaagaaatgagagtggaggatacccaggatcatggatttgggggcctaaaata

SEQ ID NO: 4335 - DNA, 530 bp, Homo sapiens
  MAP TO CHR22.1; EXPRESSED IN BONE MARROW, SIGNAL = 1.1; EXPRESSED IN ADULT LIVER, SIGNAL = 1.5; EXPRESSED IN FETAL LIVER, SIGNAL = 1.9; EXPRESSED IN LUNG, SIGNAL = 1.7; EXPRESSED IN HEART, SIGNAL = 1.4; EST_HUMAN HIT: BI087813.1, EVALUE 2.00e-78; SWISSPROT HIT: Q14166, EVALUE 3.00e-51; NT HIT: gi14779412, EVALUE 4.00e-85
aagctaccaagcagacaggcctggtgggtggaggagggctgcacctggtagtgctcggcgggcggctcgggtgtgcaagagctgaggtccagcatgtcggtgggggcccagggcagcagcatgcacttccggatcagggggtccgtctctccgtaggcaaagtctcgggtcacctcctctgtgccaagacatgagtgcccatcagagggggtgacgggacactgggctgaggcccctcctccagggcgggcaggtgctggacttaccgccagtgtccaggtccctcaggggccacagcagcgtgtaggccacctgctgcggcatgtagaagaagggtgccgtggcgaagctgggcacgtccgcgtgctggatccgcgaaccgaactcgtccatgatataccacaccggcatcttctcctcagctgtctgcagacagagcacatatggcacctctcgctcacccatccacccaccggaactcccttccggaacccagacatcgaccaccagcccacagccatttctctgat

SEQ ID NO: 4336 - DNA, 588 bp, Homo sapiens
  MAP TO CHR5.1; EXPRESSED IN BONE MARROW, SIGNAL = 0.75; EXPRESSED IN FETAL LIVER, SIGNAL = 0.7; EXPRESSED IN LUNG, SIGNAL = 0.61; EXPRESSED IN HEART, SIGNAL = 0.86; NT HIT: gi14861872, EVALUE 0.00e+00; EST_HUMAN HIT: BG023736.1, EVALUE 4.00e-80; SWISSPROT HIT: Q9Y5H8, EVALUE 1.00e-107
gcagctcatacgaaagccacgcgttgtagcctgagtctgcatccactgcgcgcaccttcgctaccacgtggcccgcacccactgaccgcggcaccagctcgctcactgcgccaccgatgccacccacccgaggcatcagcagtgccggcgcgttgtcgttctcgtccagcacgaacacctgcagcgtcacgttgctgcccagaggcggcacgcccgcatcgcgcgcactcacctggaactgcagcagctctagctcctcgtggtccagcggctgcagcgcgtacaccttgccgctctccgcgtgtaccgacacgtagctcgacagcgcgcgctcccccacccgccgttccaccagcgagtaggacaccagggcgttctcctgcgcgtccgcgtcccgcgcagacaccgtgaagatgtggcagcccggcgggttgttctccttcacgaacaccgtgtactcggactgcgagaatgccggcgcattgtcgttcacgtcggccacctccacggacacgctggccgtggcccacagtgaaggcgagcccccgtcccgagcagtcaccaccagctcataggccgacacgctct

SEQ ID NO: 4337 - DNA, 585 bp, Homo sapiens
  MAP TO CHR5.1; EXPRESSED IN LUNG, SIGNAL = 0.66; EXPRESSED IN HEART, SIGNAL = 0.99; EXPRESSED IN BONE MARROW, SIGNAL = 0.65; EXPRESSED IN ADULT LIVER, SIGNAL = 0.75; EST_HUMAN HIT: BE677346.1, EVALUE 2.10e-01; SWISSPROT HIT: Q9UKP5, EVALUE 3.00e-03
tgtttctcacatggagccagaaagtttttcaattgctgaatttaacatattaggttactttatatggtgatgactgaaaaacatacagtctacgttcataatttggaacttacaacaaaattcaccatagttttagcttatcattatcaatgactatgcctttgaggtcaaaaattttgggtaattttttagaattaactaaccaaattttttgtcaatatgccatccaatatttagctgtttacaaatcagttattatgatttgagggagatgactaacatcattatgccaaaatcactcttgaaacacgaaatctgaaataaaaacattatctattaagggattaatgggatcaacagtgcagtgattgaattaggaatgccatttaattggcattggaaaatttaccttgttataagtatagctgcatccactgaagtcatgtcttccccccagtttgttgacatctctaaatgtatatcattctttttgccaaattcttcatgttgccacttacaaaaactctctagcattttttctccatgatgcccaatatatagttctggctgcaaaagaacagagct

SEQ ID NO: 4338 - DNA, 584 bp, Homo sapiens
  MAP TO CHR19.1; EXPRESSED IN BONE MARROW, SIGNAL = 1.1; EXPRESSED IN HEART, SIGNAL = 0.92; EXPRESSED IN PLACENTA, SIGNAL = 1.6; EXPRESSED IN FETAL LIVER, SIGNAL = 0.84; EXPRESSED IN LUNG, SIGNAL = 0.74; EST_HUMAN HIT: AL525835.1, EVALUE 0.00e+00; SWISSPROT HIT: O75298, EVALUE 5.00e-62; NT HIT: gi16163116, EVALUE 0.00e+00
caatctgttgggttcttggggttcttcgtcttccagcggggtggagctgctggtggaagagtcctccccggatcccgttccccgggccacccagcccagatggtccaaccgaagcctcaggtcttccagagggcgctcggatggaggcgcggtgtcaggatcaccccgtcgtccaggctccggggattggctcaggctggggatgctctccaagctgtcgcccaggctgggctgagggtgctggtctcgtggttccgagactgagcggccctgggggcgggggcggcgggcagttgaatccctgcggcccccggagcccactacaccatcaaaggcgatgtaggagaaggtcagctcccggggggtgccccagtcctgcgacgtggtctcctcctcgtcctcctctgagaattcccgggctgtgtgcagctctcgaaaatcagagtcgtcgttccctcctgcagtgggtgaaggagagccttgtttccctcagcaggtccctgagctgcccagccctgagccccttcacatgctccccaccacttaccttctgtggaatcaggagttgaggaggctgtagacgg

SEQ ID NO: 4339 - DNA, 588 bp, Homo sapiens
  MAP TO CHR11.1; EXPRESSED IN HEART, SIGNAL = 1.1; EXPRESSED IN BONE MARROW, SIGNAL = 0.56; EXPRESSED IN ADULT LIVER, SIGNAL = 1.3; EST_HUMAN HIT: BE794027.1, EVALUE 0.00e+00; SWISSPROT HIT: Q61245, EVALUE 2.80e-01; NT HIT: gi16164431, EVALUE 0.00e+00
gactctgacctcagcttgcccggtggtgctgaagtggaagcactgtccccgatggggctgcctggggaggaggattcaggtcctgatgagccgccctcacccccgtcaggcctcctcccagccacggtgcagccattccatctgagaggcatgagctccaccttctcccagcgcagccgtgacatctttgactgcctggagggggcggccagacgggctccatcctctgtggcccacaccagcatgagtgacaacggaggcttcaagcggcccctagcgccctcaggccggtctccagtggaaggcctgggcagggcccatcggagccctgcctcaccaagggtgcctccggtccccgactacgtggcacaccccgagcgctggaccaagtacagcctggaagatgtgaccgaggtcagcgagcagagcaatcaggccaccgccctggccttcctgggctcccagagcctggctgcccccactgactgcgtgtcctccttcaaccaggatccctccagctgtggggaggggagggtcatcttcaccaaaccagtccgaggggtcgaagccagacacgagaggaagagg

SEQ ID NO: 4340 - DNA, 589 bp, Homo sapiens
  MAP TO CHR12.1; EXPRESSED IN LUNG, SIGNAL = 0.74; EXPRESSED IN BONE MARROW, SIGNAL = 0.51; EXPRESSED IN FETAL LIVER, SIGNAL = 0.63; EST_HUMAN HIT: BF310620.1, EVALUE 1.00e-82; NT HIT: gi13652750, EVALUE 1.00e-82; SWISSPROT HIT: Q9Y2J0, EVALUE 3.00e-23
gcctgagactggtcctcaactttcacctttggctcctctttggaggctaagccatctgctgtccctggtactggctccctagagctggccaagcttcgcctgcccttcataggttcttccctaatgctcgccattcacatttcctggccccctcccctccaaggcccacactgccttttcccccaatgcagcaggtggagcgtgttggtgacatcgaggagcgtggcaagatcctggtctccctcatgtacagcacacagcagggaggcctcattgtgggcatcatacgctgcgtgcacctggctgccatggacgctaatggctactcagacccattcgtcaagctgtaagtcaatgccttggggctacaggtgggccctgaaggagtcctggagccttggaaaaggagaaccagacagtttcaccaagatcgttgtacactgagacccagagagggcaaggaacctgcccaaggtcacagtgaaacaaatgcctacaactggcaagaatgtgggtctggagtctcaggcagtcaaactggtgtgtcacttgcccacaggcaaagctctgtggctctgtcctcttgagg

SEQ ID NO: 4341 - DNA, 510 bp, Homo sapiens
  MAP TO CHR12.1; EXPRESSED IN BONE MARROW, SIGNAL = 1.9; EXPRESSED IN HEART, SIGNAL = 1.5; EXPRESSED IN ADULT LIVER, SIGNAL = 2.7; EXPRESSED IN PLACENTA, SIGNAL = 2.3; EXPRESSED IN FETAL LIVER, SIGNAL = 2.6; EXPRESSED IN LUNG, SIGNAL = 1.2; SWISSPROT HIT: Q10107, EVALUE 4.00e-14; EST_HUMAN HIT: BI755627.1, EVALUE 0.00e+00; NT HIT: gi16187903, EVALUE 1.00e-75
aaccatgtctcggtttctgctttgctcagagtttgctgatgctgatggatagtcccctgaaccgagctggcttgctacaggtttatatccatacacagaagaatgttctgattgaagtgaatccccagacccgaattcccagaacctttgaccgcttttgtggcctcatgggtaagaagccttagaacaaagttagaatgaacttgtcagtagggaagaagggaggaagaggaaaagggagaactaaatgtggatttttaagcgagaaaatgggagaacaacatgattaataccaggacaaggactgttattatttttctatgtttgtggaaactccactcctgttcttgcagtagcttcctggctgagtgaaagagggagtctgaacccatcactgtacagctagccatatgcttggcaactgtttgttcctaacatttcaggagtccagtctagatataaagcacacagggaactcatcttatccatggggttttccttgttcgatga

SEQ ID NO: 4342 - DNA, 500 bp, Homo sapiens
  MAP TO CHR12.1; EXPRESSED IN BONE MARROW, SIGNAL = 0.53; NT HIT: AB009693.1, EVALUE 1.90e+00; SWISSPROT HIT: P93329, EVALUE 2.10e-02; EST_HUMAN HIT: AI826073.1, EVALUE 7.00e-01
actcagtgccgacattttcctcatcagcctcctcccaacacaacctctggcagccctgtggccccagccctgttttaggaagaacacatggtcctaattaccccaggagcgcatggctaatccgcggcaattcccagccccatcctaacactaaagcaccttctgtcaccaaactgcttaatggaattaacccagttccaaccatgtgctccctggtgcggcttccttcgaatacctgctccataattgctttcaggccctctactggacccttccagagatgcccctttcctgtctcccaaaactcttcctctccttcagccctggcaggagttgggggacttgatggaattcactggcccggaatcttaaagagctctagttccacctggcaaaggaggaaaccgaactctcctagagagggacctcgtcctaggacccatgataagtcagtaaactcaggggtcctgaccccatgttccgcaatcagtctctccttc

SEQ ID NO: 4343 - DNA, 535 bp, Homo sapiens
  MAP TO CHR19.1; EXPRESSED IN BONE MARROW, SIGNAL = 0.5; EXPRESSED IN FETAL LIVER, SIGNAL = 0.4; EXPRESSED IN LUNG, SIGNAL = 0.56; EST_HUMAN HIT: BF982049.1, EVALUE 4.80e-02; SWISSPROT HIT: Q01040, EVALUE 8.60e+00
tgctctttctttccccttccaagactgtctaccagctggacttttaccatccaaaacagtccaatctgaaatacaaacccaggacacgtgaaaacaccaactgggacaagaaatcatatgcaaagacattaattttcacttttattgttccagctgttttactgttaattgatacaacctatttattcataaataaatgtattcacagcaaaaatgtggataatcaaacctgatataaccatctgcctaaagatttaaatttcttcaaccttagaaaattcttaaatgcaatgattattcagtggctggaaaggactcttcttaacttatagtactttctgcagtttggtgaagataagatttcttaatttggtaatttggggtagattagagtgttttcataatgtcaagctgaagggtcaaaaataattaaggatacaaagtattattcaattattatgctaatacatgtatctggtgaccactatgaagcaaaaaaaaaaaaaaattccatacatttgatggcatttgcaat

SEQ ID NO: 4344 - DNA, 581 bp, Homo sapiens
  MAP TO CHR7.1; EXPRESSED IN BONE MARROW, SIGNAL = 0.69; EXPRESSED IN FETAL LIVER, SIGNAL = 0.59; EXPRESSED IN LUNG, SIGNAL = 0.85; EST_HUMAN HIT: BE888763.1, EVALUE 1.00e-52; SWISSPROT HIT: P49058, EVALUE 1.10e+00; NT HIT: AY007255.1, EVALUE 1.40e-01
ttggctcccgaatacacttcttggcttcattgatctcactttcttcaaaatactttttgatcattacattgaagtggtcaatgaaggcagccttactggtgattttcacaccaacaatttctccatggggtttgtccttgactccaaaatggatggtgccattggtgcgtgaattcatacaagctgatgcaaatcggaagacttcattgctgaatttcatcttaatgtccacttccgtggctgtttctgtgtttgtgagagctttgaactcatgtattggatcaatgagattgagtgctcctgtttcaggttgtagagtataatgttctatgtagcgatggctgtcatggaactgatcaaaaggatatggcatacaagtcaattgttcaggttttagcttaccctttttcttgtgtttagcatttgctacttcatctaacacattttctttcataagaattgattcttcttgtttgatatctctgatctctctgggatcataatcaatattagatgacattgaattttcttcttcctttttggtgtgttttggatttttctggtgttctgttttggacggt

SEQ ID NO: 4345 - DNA, 500 bp, Homo sapiens
  MAP TO CHR17.1; EXPRESSED IN HEART, SIGNAL = 1.2; EXPRESSED IN BONE MARROW, SIGNAL = 0.64; EXPRESSED IN LUNG, SIGNAL = 1.2; EXPRESSED IN FETAL LIVER, SIGNAL = 1.2; SWISSPROT HIT: P49748, EVALUE 4.00e-19; NT HIT: L46590.1, EVALUE 0.00e+00; EST_HUMAN HIT: AA777457.1, EVALUE 0.00e+00
gtttcaaaggcatcctgctctttggcacaaaggcccagaaagaaaaatacctccccaagctggcatctggtgaggcaaccctaggagagccagggattggggggcacactgggcttggcacagattaggccagttggcacttagattatcagatggctgagcatttcagttgggggaaggttttggggaggcatcacagtgtgctggttgggacatgcaaaagaactggatactcccaggtgttaagggggaactgcctgctggagggatggggaagtgggccgaggggactttgaagctcatcagaacttggggtaaagtagctctctccccaacaggggagactgtggccgctttctgtctaaccgagccctcaagcgggtcagatgcagcctccatccgaacctctgctgtgcccagcccctgtggaaaatactataccctcaatggaagcaagctttggatcaggcaacctgcctcccatttctccccttctcctc

SEQ ID NO: 4346 - DNA, 584 bp, Homo sapiens
  MAP TO CHR22.1; EXPRESSED IN HEART, SIGNAL = 0.86; EXPRESSED IN BONE MARROW, SIGNAL = 0.55; EXPRESSED IN FETAL LIVER, SIGNAL = 0.8; EXPRESSED IN LUNG, SIGNAL = 0.74; NT HIT: AB051449.1, EVALUE 5.00e-72; SWISSPROT HIT: Q62910, EVALUE 4.40e-02
agttaaccagctcgtctcggcagttctgggaggagagaaagatgggaaccctggggctccatggtggggggcaccacagaatgggcaggggaggctgtagccaggggtgcccccatcctgccaaagggacctggggccaacactggaccctgtttgacaggcagacaagaggccagcagagggcaaggctgggagcccgctcaagggccgactggtgacctcatggcggatgcccggggaccggcccacgctgttcaatccgttcctgctgtctctgggggtcctcaggtggcgaagggtaggctggctccagtggggactggaggggtgagggtggatagagacggggatgggagggaggagggggctgttaagcaaaggagagagagtgggggctgaggaggaggcacctagggccgtcgcatgacaggagaggtgggagcagagctcttaagctcatcctggtctcagcaagcgagtgggtttcccacttccggggcaggcttgggggctgctttcagcttttggagtgaggggtgatggaataatctacacagctgaaagcttccaatcagcagcctctc

SEQ ID NO: 4347 - DNA, 598 bp, Homo sapiens
  MAP TO CHR9.1; EXPRESSED IN ADULT LIVER, SIGNAL = 0.71; EXPRESSED IN BONE MARROW, SIGNAL = 0.73; NT HIT: AF084377.1, EVALUE 0.00e+00; EST_HUMAN HIT: BG575022.1, EVALUE 1.00e-117; SWISSPROT HIT: Q9KNH3, EVALUE 5.80e+00
tggttagcagcacaaagcacctgacccacagtcatagtcaaccttgttttgtgcccctcggagaaaaaaagaatagccctgttatagagaaggtggctttgcctggggaatattccacatcttagaatgaagtttccttctgctgcataataatattttcagtttaactgtgccttaaattacattctaaaattaaaaaaaaaagaaatcttcctcccacttcagatacacaccccttgattatgctttgcttggtgagcgccatgaagtgatccagttcatgttggagcacggtgccctgtccatcgcagccatacaagacatcgccgccttcaaaatccaagctgtctacaaagggtacaaggtcagaaaagccttccgagacaggaaaaatctcctcatgaagcatgaacagttgagaaaagatgctgctgccaagtaagtatgagctacgcagattgcgttttcgccacccagaatcagggtggaagtgggggtgtggggggtgctggggtggccaggagagggaaacagatgagaatctgaattactgttggtccctgcaaccggtcatcttccctcttctcagcactccgtc

SEQ ID NO: 4348 - DNA, 513 bp, Homo sapiens
  MAP TO CHR15.1; EXPRESSED IN BONE MARROW, SIGNAL = 0.85; EXPRESSED IN FETAL LIVER, SIGNAL = 0.79; EXPRESSED IN HEART, SIGNAL = 0.97; SWISSPROT HIT: P23799, EVALUE 3.60e+00; NT HIT: gi13242704, EVALUE 1.20e-01; EST_HUMAN HIT: C05490.1, EVALUE 7.20e-01
gtatgagaaggcaagcggaggaaattgggtagagtaggctgaaaatgttttatagcaccattacccggagcccaagcccctttttcatttatcccttttttgtcccggcatggcaggagtcagagcgccttctgtttgtcttgattaaagtcagcctccaccttcccccgagcccagttgcccttctcaggacacaggctgcattcaccatgggtctctctgcccaagctctttgcagattttatgaaaggcgttttcacttggattaaacaggcgctgtgtttgtgtgtggtgtgtgtgaaggagaaaatgaatcacttcaactttgggcaaggattttaggtgtagtgtttgtcccatgcaattacataaacacaccagaactcattaaaaaaaaaaagtagaagaggggggcagagattcaagtgcttgcgatgatctaaacagtgcggcacattttccatacattagacctcagaaagggttgtgttctgccctctcacaacagactcc

SEQ ID NO: 4349 - DNA, 544 bp, Homo sapiens
  MAP TO CHR17.1; EXPRESSED IN HEART, SIGNAL = 0.6; EXPRESSED IN ADULT LIVER, SIGNAL = 0.47; EXPRESSED IN BONE MARROW, SIGNAL = 0.5; SWISSPROT HIT: P25045, EVALUE 2.30e+00
taactcccaggcaccatttctctctctgtagcttcacttgagccgcaaagaatccaggatccctcaagctctgagttccattcatggaaaatcctaaaacttccttcatcccttcagtcagaatcttttcctcttttggtttggaagaaacccagaggtgttaaaactgaacatcttgaccgaatttcctccgggcaagctttccccaagctcgcttactccaacacaccagcccctcctgccagacccagtcagagccagacttttgagtaacttggtccaagcagggctctgacagcgaacccagaaccccattcacagctggctccctgcctgtcaccaagaatagctccttaaatcaggtcttcgggtaacaaatgaggaacacatcaatttagcaggaaatcggcttcccttgaagcgtctctgaagtttgttgagacaaaaggaatctacagtgcttgagtaataggaaagaccacctgcaacttttacagaacttcttttggacttgaaaattctaagacgctagggggaagaaatc

SEQ ID NO: 4350 - DNA, 508 bp, Homo sapiens
  MAP TO CHR2.1; EXPRESSED IN HEART, SIGNAL = 1.3; EXPRESSED IN BONE MARROW, SIGNAL = 0.72; EXPRESSED IN FETAL LIVER, SIGNAL = 0.58; NT HIT: X92412.1, EVALUE 0.00e+00; SWISSPROT HIT: Q02173, EVALUE 1.00e-10; EST_HUMAN HIT: AA192188.1, EVALUE 2.00e-53
gcaggcgtaattagcaaagggtctgaatctacaggccctgtcacttgccgagatgaatacggtaggaaatagtcaacattctcctttttaaaattatctcaatttatgtgaaaataaactctcagatattcattcatatctgttttgcctactgacagctccacccaaagccgaactggatgcccgattacacggtgatctggttaccatcagagcaggttctgatcttgttctggatgctgcagttggtggcaaacctgaacccaaaattatctggaccaaaggagacaaggagctagatctctgtgaaaaagtctctttgcagtatactggcaaacgagcaactgctgtgatcaagttctgtgacagaagtgacagtggaaaatacactttaacagtgaaaaatgccagcgggaccaaggccgtgtctgtcatggtcaaagtgcttggtaagcatgtcaaatgttctcacatttatatagcattttccagtgtgggcagaaagaat

SEQ ID NO: 4351 - DNA, 596 bp, Homo sapiens
  MAP TO CHR8.1; EXPRESSED IN BONE MARROW, SIGNAL = 0.54; EXPRESSED IN ADULT LIVER, SIGNAL = 0.42; EXPRESSED IN LUNG, SIGNAL = 0.63; EXPRESSED IN FETAL LIVER, SIGNAL = 0.52; EXPRESSED IN HEART, SIGNAL = 0.64
gggatctacaaattgcctgcttaataaaggtgctgatgcatgtttctgaaaaatttatcaaggttaaaaaattggaaggaggtgtctgaaatctcactacattaatacataaaactaatcaaatctcacacttggctttcaatgttacaaaagactatgagaatgtaacaaaaaataatctgtgttttcttagtaataacttactaaatctcatatggtagaaatgaattagcataaaactccatagtaacaaacacaacaaaatctcaaacacgtttagatcatagtaacttacctcttagcagtaaaatttttttccagttcctcattgtgaaccagttttgtatccccaaactgccataacgactgcagatcacagtttacatcaagcctgcactggttaagagtatcatgtataaaactatactctctactattggtgtaacaaggtgacaagtaaactaaaggtagaaaaagagaaagcagttgtatttaaaatgacattattggacatctgtacaatgacaactgtatctctaagacacaaaataactaagtactggaattttcattaacaacataaggcaaccatttgt

SEQ ID NO: 4352 - DNA, 547 bp, Homo sapiens
  MAP TO CHR15.1; EXPRESSED IN LUNG, SIGNAL = 0.92; EXPRESSED IN PLACENTA, SIGNAL = 1.8; EXPRESSED IN HEART, SIGNAL = 1.5; EXPRESSED IN BONE MARROW, SIGNAL = 0.66; SWISSPROT HIT: P18914, EVALUE 3.50e-01; NT HIT: AF391352.1, EVALUE 8.10e+00; EST_HUMAN HIT: BF376219.1, EVALUE 3.00e-68
aatcttgaggtgggacgttgactctaagatgtccttgagcagtggagcctccggagggaaaggagtggatgcaaacccggttgagacatacgacagtggggatgaatgggacattggagtagggaatctcatcattgacctggacgccgatctggaaaaggaccagcagaaactggaaatgtcaggctcaaaggaggtggggataccggctcccaatgctgtggccacactaccagacaacatcaagtttgtgaccccagtgccaggtcctcaagggaaggaaggcaaatcaaaatccaaaaggagtaagagtggcaaagacactagcaaacccactccagggacttccctgttcactccaagtgagggggcagctagcaagaaagaggtgcaggggcgctcaggagatggtgccaatgctggaggcctggttgctgctattgctcccaagggctcagagaaggcggctaaggcatcccgcagtgtagccggttccaaaaaggagaaggagaacagctcatctaagagcaagaaggagagaagcgaa

SEQ ID NO: 4353 - DNA, 591 bp, Homo sapiens
  MAP TO CHRX.1; EXPRESSED IN BONE MARROW, SIGNAL = 0.56; EXPRESSED IN HEART, SIGNAL = 0.68; EST_HUMAN HIT: AA515996.1, EVALUE 4.00e-06; SWISSPROT HIT: O14627, EVALUE 3.00e-33; NT HIT: AF003530.2, EVALUE 0.00e+00
tgcaaggtacttgccctctctaagtctcaagctttttttctaacctgttaagtgggcatacttcacaaggtcattgtgaggctgaaatgaagtgatgcatatgaaagggctttgtaaatgctaaagtctctgtacaatatcagaaatcactaagttaactgcattcagtatgttgccccattgtgtttcaggtgaaaatctggtttcagaatcgcagagccaaggagagaaagatgatcaaaaagaaaatctcccagtttgagaatagtggaggctcggtgcaaagtgactctgactccatcagccctggggaactacctaacacttttttcaccacaccatctgctgttcgtggatttcaacctattgagatacagcaggttatagtctccgaatgaaagaaagcaaagagaaatttaaagtgccctttttttagtgatgtcttttgggtctctaagctatctacaggggagttggagcagggtgtaattccctgtaaggcagtatttggaacagatggatgcacaatgggttgaagataatttaggggactcttacttttagaaactatccccagaaaactcctgtcac

SEQ ID NO: 4354 - DNA, 568 bp, Homo sapiens
  MAP TO CHR5.1; EXPRESSED IN HEART, SIGNAL =   1; EXPRESSED IN BONE MARROW, SIGNAL = 0.67; EXPRESSED IN FETAL LIVER, SIGNAL = 0.8; EXPRESSED IN LUNG, SIGNAL = 1.3; NT HIT: gi9964314, EVALUE 8.50e+00
ctaccatgaaacctgctcccctgtgccttctcaattgttcacaaatttgataattgcatttacttctttttgacaattttctctagcttttcttttaatgattatatgttcacttaaattatttataaaatggatattttcacacaaacagtttactggattattttcttcctcagtactaaatacggcattaacttcttttctgtatttcctctttaaagtgacggttaacacttaacaataatcctgtcttgaaagagaaactacggttcagagacttgaaccaaatgaaatatcgattcaggttggagaatattttgatgttttagttttgttacagttcagttgttttagaaaatatgtaggtttggatttagttcagagtggttcactgggttttttgtttttaatggatttgatttatagttctgtaaaaagtttaatattgggtttaggtcagagaggacacattcagcaaaatagttgtttgtttccaattttggttcatggatcattacaaggccttggtgttgtagttctttccagagccacagcatgaagtttgcac

SEQ ID NO: 4355 - DNA, 511 bp, Homo sapiens
  MAP TO CHR5.1; EXPRESSED IN FETAL LIVER, SIGNAL = 1.3; EXPRESSED IN LUNG, SIGNAL = 1.3; EXPRESSED IN BONE MARROW, SIGNAL = 0.95; SWISSPROT HIT: O96008, EVALUE 5.00e-33; NT HIT: AF043250.1, EVALUE 1.00e-111; EST_HUMAN HIT: AL519994.1, EVALUE 1.00e-103
tgcccctggtactcagaatcccgaagcgccagctggttccataatccccttctcagccgctagggtggtggggtccctcctttctgctgtccgcctgaccccagaggaggaagggaagggagggggagggggccccaggtctcctctctgtggcaggaggagggtggaaatagaatctgaagtaggaagggcgtggaagggtcaggagggttcagctgatggtgaggccaaagccactccgtaacttgttcttgcggtgattcaggaaggccccaagggccagtgtcaaaggcaggggcgggagcttcttctccagcgtggcacccacaatccagttgctgtccacagagcctttgaagaggaggttggccttgggcaggtccagctggtacccaaaggagacattggtgtcctgcatccttgtactggcctcaaactccacatccacctgcagttggtcactgggtttgtggtgttatgtccaacccaacgttaccgttgccaaccagtt

SEQ ID NO: 4356 - DNA, 582 bp, Homo sapiens
  MAP TO CHR5.1; EXPRESSED IN BONE MARROW, SIGNAL = 0.4; EST_HUMAN HIT: AW340508.1, EVALUE 1.00e-36; NT HIT: AF078540.1, EVALUE 3.60e-02; SWISSPROT HIT: P08775, EVALUE 1.90e-02
ctccagaccctcattgcttcttccaggcccctccccacagccaggctgggtaggaagggccagagctctgtggagggtgctggagccttgcccacccatgctcgtctggtgagtgggcaggctcacacccccaaccctgaacctgactgccagggcccatggctgagtcactccaagctgaggagggcacacctggcctttcacccatgttccaggggttgagaagtggagaaatgagaatggcccactggaaaatgaatgaacttccccagaacagaggccctgccagtcagtgccataagtgctttctgatacatttcctgcaagaaattaacccctatccaatggctttctgataacagaaagggaatgtatctaaattttattcagaaataaatttcagtggctgctgctctttacatgtagcagctgaacagcattaaatatttggatggccttctgatcgtatttagaataatgatgaaagccatgagtcatagggtacaaagtctgacatgtttattatctgcaatctattttatagccctttcttttagagcttgcgttgctggacaggattat

SEQ ID NO: 4357 - DNA, 545 bp, Homo sapiens
  MAP TO CHR5.1; EXPRESSED IN FETAL LIVER, SIGNAL = 0.72; EXPRESSED IN HEART, SIGNAL = 0.69; EXPRESSED IN BONE MARROW, SIGNAL = 0.68; SWISSPROT HIT: Q9UN72, EVALUE 6.00e-81; NT HIT: gi14861872, EVALUE 0.00e+00; EST_HUMAN HIT: BF920578.1, EVALUE 0.00e+00
attccgcgatgaacagattcctttgtgtcgctgggaacaccggagggttgtcgttaatgtccttcacctccacgtccacatggaaaacctgcagcggcctttccacgatcacctccaggtggatgctgcactccgcgctccgcccgcacagctcctcgcggtcgatccgagaattcacaaacaaaatgccattctgcagatttacctccagaagatccccacggaatttgcacaccgcccggaacaggcgcggcaccagctccgccagctccagccccaggtcctgcgcgatgcggcccacgaagttgccatgtttagcctcctcggggaccgagtagtggagctggcctctccctgcctcccaagctgctagaattataataaacagcagtagatgtcggccccctgggtcgtatccattcgggcacaccatttcaaattattggcttgtttttctagtcagcaaaacttgccttcgaatttataggaatgtttttatcccttcatttcaatctcgatgtgtggccattgttgtgcatccaaag

SEQ ID NO: 4358 - DNA, 540 bp, Homo sapiens
  MAP TO CHR12.1; EXPRESSED IN FETAL LIVER, SIGNAL = 1.1; EXPRESSED IN LUNG, SIGNAL = 1.7; EXPRESSED IN BONE MARROW, SIGNAL =   1; SWISSPROT HIT: P36784, EVALUE 2.60e-01; NT HIT: X98264.1, EVALUE 1.00e-127; EST_HUMAN HIT: BF761810.1, EVALUE 1.00e-127
cctgcaggctttgcttttacacacgagcgatatagcatcattctgaattgtgcagcttaaaagatgaacgttgggctgcttgctctctttacatcatttttaacttaattctcacatccctagcgtccaatgcgaatttttgtgaatgatgaccgccatgtgatggcaaagcattcttccgtttatccaacacaagaggagctggaggcagtccagaacatggtgtcccacacggagcgggcgctcaaagctgtgtccgactggatagacgagcaggaaaagggtagcagcgagcaggcagagtccgataacatggatgtgcccccagaggacgacagtaaagaaggggctgggtaagtgaggttttccgttgtccttttcttttttgtagggtagccagggtagaggttggcacctgttttctaagaaactccagcctctctggggacctctgggttgtggtcagactgaattcctcactgagctgggtgttggtctgtccctcagggaacagaagacggagcacatgaccagaaccct

SEQ ID NO: 4359 - DNA, 583 bp, Homo sapiens
  MAP TO CHR12.1; EXPRESSED IN BONE MARROW, SIGNAL =  11; EXPRESSED IN FETAL LIVER, SIGNAL =  12; SWISSPROT HIT: P47914, EVALUE 2.00e-51; NT HIT: gi13648348, EVALUE 0.00e+00; EST_HUMAN HIT: BG533230.1, EVALUE 0.00e+00
gcaccagtccttctgtcctcacattggcagagatatctactctgaagcctttgtaggggcctgggcacctttgggagcctgagctggaactgaagctggagctgcagcctgggccttggtttgatccttggccttggcctttggccggcacagcctgagccctttggcaatatgggcacaagcacgcttcccaagcttggggtgggcaatgtaggcaagtcaatcgagcttgtggctgacaccctttgggatcttgggcttaacctccttgggctttacgagggccttgatagcctcggcacgtgcactcatggccttggcattgttggcctgcatcttctttaggcccttcttgttgtgcttcttggcaaagcgcatgttcctcaggaacttggggtccacccccttaagagattcgtatctttgtgatcggggtttcttgataccatttctgtgccattttcaggactggttgtgtgtggtgtggttcttggacttggccatgtctgcaccttaagctgacaacttccatacttcttactctagactttgtgaaggttgaagatgccaaaatgaaatcggt

SEQ ID NO: 4360 - DNA, 521 bp, Homo sapiens
  MAP TO AC023171.2; EXPRESSED IN ADULT LIVER, SIGNAL = 2.3; EXPRESSED IN PLACENTA, SIGNAL = 1.7; EXPRESSED IN FETAL LIVER, SIGNAL =   2; EXPRESSED IN LUNG, SIGNAL = 1.3; EXPRESSED IN BONE MARROW, SIGNAL =   2; EXPRESSED IN HEART, SIGNAL = 1.6; SWISSPROT HIT: Q60716, EVALUE 2.00e-19; NT HIT: gi12731110, EVALUE 3.00e-82; EST_HUMAN HIT: BI820239.1, EVALUE 0.00e+00
ttcatgccagtgcttgagaggagctaagtacatgggctaaggagtcactgtttattttctatttaagaccttttcccttacattgggggtcccagctgttatctagattaaggggctagaagtatctgtggggagttactgtattcatttttcattgcctcttgatgaaaagggccccagaacctggcaccagggaattctcactaggaaaattgtcacaggtcaagacctatgtgggtggacgcattagtcttccttttcctctggttccacagctgggccaacaaaatggaagccttgactagcaagtcagctgctgatgctgagggctacctggctcaccctgtgaatgcctacaaactggtgaagcggctaaacacagactggcctgcgctggaggaccttgtcctgcaggactcagctgcaggtgagggacggtgagcaggtgcttgagtgagcccatatgtttgtgtgctcatgcctgggttgttgtgtctgagcctgtcttgggtctgggtgtt

SEQ ID NO: 4361 - DNA, 595 bp, Homo sapiens
  MAP TO CHR17.1; EXPRESSED IN HEART, SIGNAL = 0.55; EXPRESSED IN BONE MARROW, SIGNAL = 0.39; SWISSPROT HIT: Q58980, EVALUE 9.90e+00; NT HIT: gi14773925, EVALUE 6.00e-72; EST_HUMAN HIT: AA769268.1, EVALUE 8.00e-72
acccaggtcattaggtgcagagcaaatggataatcacattaatcaagtgaccctgaacctctagcctgtttttcagtctccatgcctcaaacatgcatgtcttccagatgaggaggaggaggaggagaacctagatgatcaggatgagcaaggcaacttgaaaggctttatcaatgacgatgatgatgaagatgaaggggaggaggatgagggcagtgactctggtgattcagaagatgatgttggccacaagaagagaaaacgcagtgagtagtctgtcgttggctcaagtgaggcttgggtggaggttgcagtggaaaagggcaaccccatcaccatgggcaacactttgtttcttcagcctcttttgatgaccgcctggaggatgatgattttgacctcattgaggagaatttgggtgtcaaagtcaaaagaggagtaagtgtcattctttgtcttttgtccctgggggtaaaggaaaaagccctggaaatttcaatgtctgtgggtgaggaggcacacgcaggacagtttggagaacattagagcacggtgttcggtatcattgtactacggagcctagatttgcatccca

SEQ ID NO: 4362 - DNA, 502 bp, Homo sapiens
  MAP TO CHR5.1; EXPRESSED IN FETAL LIVER, SIGNAL = 0.79; EXPRESSED IN LUNG, SIGNAL = 0.62; EXPRESSED IN HEART, SIGNAL = 0.72; EXPRESSED IN BONE MARROW, SIGNAL = 0.95; EXPRESSED IN ADULT LIVER, SIGNAL =   1; SWISSPROT HIT: O35182, EVALUE 9.10e-01; EST_HUMAN HIT: BG256697.1, EVALUE 4.50e-02
aggaggagctgagatagccccctgggctgtctgatgcccacaccagccttccaacctggaaggatttgcactgaggccctgacactgcctccctctgctccccttctcccacacatggctcatggccaactggctgccagcctgagcagaaagaaggggtctctttctgtgaacccccatcttagacagaggccctgaccccctccacctcatcttggcagcctgagattggagagagtgtctgccgccctggccttggcagagcgcgtgctcagcccagcccctgcagctgccagaacaggagctgaatgcccagtgtgtctgccagagcttgctaacttctttcttctttctctgagctatgaaaacagaggctgctgaggaatgtgactgctaacctccccaccacccgcctccctcctcctggggcttgtgttcccccaaccccccaagctggagtcacatcagaaaaatgtaggggaggaaagaaatcccccaatgt

SEQ ID NO: 4363 - DNA, 514 bp, Homo sapiens
  MAP TO CHR7.1; EXPRESSED IN ADULT LIVER, SIGNAL = 0.93; EXPRESSED IN BONE MARROW, SIGNAL = 0.43; EXPRESSED IN HEART, SIGNAL = 0.92; EXPRESSED IN LUNG, SIGNAL = 0.62; EST_HUMAN HIT: BG960618.1, EVALUE 6.00e-94; SWISSPROT HIT: P07942, EVALUE 6.00e-53; NT HIT: M61916.1, EVALUE 2.00e-96
ctctacaatggcgaaaaggcttctctattaaaacatgtcatcctcaccaaccacccatcccacgtaatgaggatttacttaccaggcactggtcacaatgctgtcctgtcaccagacgcttgcagtagcagtgacctgtctcggaatcacaaggattccctccaggaattgttcccagaggattgcaagcacaagctgtattaaaacaaaatgaagtggagaaacacagaccacgtgagtttcaaataataatctggctttggaattacaaagtaaaatgggaatttcaaacacaagaaaactcccaaactttttagcaaacagacctacatttacaaccaaatggatcttcactgcttaaatcatagaagccttctttgcaaacatcacaatgttctccttccacatttaatttacaccgacactggccagcaatgagaccagtagaaaaatcagtatagctgtcacaaattccctcattttgagagccagctgggtcacacgtacatcctga

SEQ ID NO: 4364 - DNA, 539 bp, Homo sapiens
  MAP TO CHR19.1; EXPRESSED IN ADULT LIVER, SIGNAL = 1.1; EXPRESSED IN FETAL LIVER, SIGNAL = 2.1; EXPRESSED IN LUNG, SIGNAL = 3.3; EXPRESSED IN HEART, SIGNAL = 3.1; EXPRESSED IN BONE MARROW, SIGNAL = 1.3; SWISSPROT HIT: Q9Y6R0, EVALUE 5.00e-59; NT HIT: gi14787027, EVALUE 0.00e+00; EST_HUMAN HIT: AA675899.1, EVALUE 0.00e+00
gcacctgtgagatgatggagtgggtggggcggctcgggctacagttcaagtctcgaatgtcttttgcaggtcgccagaaaaggggttggagggtttctctacagtggctttgccttctaatgccgcccactgggcctcaaaggggtccaactctggagctggggcaggcgctggctcagggggccagggggccccattggggcgagggcgggcctggctcccaggggcactgggtatggcagggggcgggaaggccccagctttcccaagcagagtggcaggctgaggctggagctgggcggctgagcagaaggcgtttgccaccatctgtgagggtgtgatgcccaccacgggcacccggggcatcggtgggtagcccaagcccgggtaggcgggcacaaaagggggctgcatgtgtgggggtggcaggaacacggccacttgggcaggtgcagcgtcaaagggccccacgggggcggggaaaggctgcagggcaggaggacatggctgggcactgagggccactgaggctgcttgct

SEQ ID NO: 4365 - DNA, 596 bp, Homo sapiens
  MAP TO CHR5.1; EXPRESSED IN FETAL LIVER, SIGNAL = 1.9; EXPRESSED IN PLACENTA, SIGNAL = 1.4; EXPRESSED IN LUNG, SIGNAL = 1.3; EXPRESSED IN ADULT LIVER, SIGNAL = 2.6; EXPRESSED IN HEART, SIGNAL = 1.5; EXPRESSED IN BONE MARROW, SIGNAL = 1.5; SWISSPROT HIT: O95704, EVALUE 9.00e-35; NT HIT: AB024745.1, EVALUE 0.00e+00; EST_HUMAN HIT: AV660287.1, EVALUE 1.00e-106
ttacactgggagacacgctgggtatgttcccccaggcatggatgtgctgaacgaggccattggtaccctcaccgccaggggggaccggaatgcctgggtccccaccatgctcagtgtgtctgactctctcatgactgcacatcccattcaggtaccagaagagggtgaagttgggggctttggaggggtgagcagggatgctgaggggtcactgcttgctgtcggaaaagttaagtgggtctggcccgtgcttggccctctagtgactaggcctggtgtgggcaggcagaggccagtacagaggaggagccattgtggcagtgccctgtgcgccttgtgacatttattggtgttggccgcgacccacacacctttggcctcatcgctgacctgggccgtcagagcttccagtgcgcagccttctggtgccagccccatgcagggggactctctgaagctgtgcaggctgcctgtatggtgagtcatgggtgggaatgggttggtgggattgccctgcagctgctctccactgtttacttgggctccgggtcggcagcctcttcagagatcacaaacctgggctgattctggttcat

SEQ ID NO: 4366 - DNA, 579 bp, Homo sapiens
  MAP TO CHR2.1; EXPRESSED IN LUNG, SIGNAL = 0.98; EXPRESSED IN HEART, SIGNAL = 1.2; EXPRESSED IN BONE MARROW, SIGNAL =   1; SWISSPROT HIT: O15142, EVALUE 5.00e-12; NT HIT: gi14736140, EVALUE 5.00e-72; EST_HUMAN HIT: BG684547.1, EVALUE 8.00e-72
acgtttctgttttggcttccctactgtatttggaactcgctggctttggttttcctgatttgactttttatttaaatccccctggcttttatgcaggtttattgactggtgtagtggtagactctggagatggtgtgactcacatttgcccagtatatgaaggcttttctctccctcatcttaccaggagactggatattgctgggagggatataactagatatcttatcaaggtaagtgaaaggaaaatatcatggaaattaaattttgtaatttgtttaccaccttaacacagaattgaatctatcgttttaggattccagcaaatctgtaccactagagaaattatccaattacctcccttatttatataaaaattcatataagatttatacacatgaagaaaaaagaagatacattaaaaacaaggaaaaaagtgtacacacatgatctctgtatactaatgagagtacattatatcattacataattatatttgttattcctgaggagtgagtagacagatatttcaaggatagaagagacccctaatttgaaactttcttggacagctcaggc

SEQ ID NO: 4367 - DNA, 554 bp, Homo sapiens
  MAP TO CHR19.1; EXPRESSED IN FETAL LIVER, SIGNAL = 2.3; EXPRESSED IN LUNG, SIGNAL = 1.1; EXPRESSED IN HEART, SIGNAL = 1.3; EXPRESSED IN BONE MARROW, SIGNAL = 1.5; EXPRESSED IN ADULT LIVER, SIGNAL = 2.6; EXPRESSED IN PLACENTA, SIGNAL = 2.8; NT HIT: AF037338.1, EVALUE 0.00e+00; SWISSPROT HIT: P34314, EVALUE 3.10e+00; EST_HUMAN HIT: BI769723.1, EVALUE 0.00e+00
ttcactgtggagaagggacctgggaggttgtgaaactgtgggcagaggagcaccaggcgggaggtcccacagcccaggcctggcacacttcctcttggcctcttgcgcccaggaaggcaccgggaagtcccgcccacaccggccgcactcaccttcaccgagtcctgctcctcatctgactgctcgtacaactcatcacccaggaagttccagggcgacttggtgctctgggcagcatagagctgccagcgccaaagcgagagtgggcagaaggagacgcggagcggcaggctggccaggctctcgttgatggggtagtagtccttctgcaggttccagtagtcattgaagtagatgatgggatagtagtcaccgctcacggcgtcgaacttcacatctgcagcacgtggggcaggggcaccatttggcccgggcaggaggccagggtacccgcaggcctcagatgtctggagagacccaacagggcccctctacagagactggaggacaggggacatttctaggccacaccatgaggagctaaagggtgcctt

SEQ ID NO: 4368 - DNA, 600 bp, Homo sapiens
  MAP TO CHR17.1; EXPRESSED IN PLACENTA, SIGNAL = 3.5; EXPRESSED IN LUNG, SIGNAL = 1.5; EXPRESSED IN ADULT LIVER, SIGNAL = 9.1; EXPRESSED IN BONE MARROW, SIGNAL = 2.7; NT HIT: gi14774542, EVALUE 0.00e+00; SWISSPROT HIT: Q9Y252, EVALUE 1.00e-01; EST_HUMAN HIT: AA699996.1, EVALUE 0.00e+00
ggtgcttcaccttgttcctctctgcagcctaccacagccgctgcgtggacccctggctcactcagacccggaagacctgccccatttgcaagcagcctgttcatcggggtcctggggacgaagaccaagaggaagaaactcaagggcaagaggagggtgatgaaggggagccaagggaccaccctgcctcagaaaggaccccacttttgggttctagccccactcttcccacctcctttggttccttagccccagctccccttgtttttcctgggccttcaacagatcccccactgtcccctccctcttcccctgttatcctggtctaataaccccccacacatacacctctggtgacctatttgcacagaccgtcgtcttccctccagtcttctgagggataggggacattccatcccaagcttctcccttacccacacctatccttttgaggggctttggggtggagctggggcaagcagagggactgggtcttcacttcttgggctaataaaattgtttctttgtggactaaggaagggtaagatcattctcacacaggtgaacttaaccctttggtggaatcacccctttagccat

SEQ ID NO: 4369 - DNA, 564 bp, Homo sapiens
  MAP TO CHR6.1; EXPRESSED IN BONE MARROW, SIGNAL = 2.4; EXPRESSED IN HEART, SIGNAL = 2.2; EXPRESSED IN ADULT LIVER, SIGNAL = 2.2; EXPRESSED IN PLACENTA, SIGNAL = 2.8; EXPRESSED IN FETAL LIVER, SIGNAL = 2.6; EXPRESSED IN LUNG, SIGNAL = 3.3; NT HIT: X96438.1, EVALUE 0.00e+00; SWISSPROT HIT: P46695, EVALUE 6.00e-70; EST_HUMAN HIT: AL532672.1, EVALUE 0.00e+00
tggaggaaagtgctgaggtccagagcgtagtccgagggctccgaagtcagattaaagggctcgaggacgggggacacaggggtgggcgccagggatgcggcgttaggggcgtcctctggaggcaggggcgccggcacaccctcttcagccatcaggatctggcagaagacgatggtgagcagcagaaagagaagccttttggctgggttcggttcctcgactggcagctggcgccggacctaaggggagacaaaacaggagacaggtcaggtcgaggcctctggagtcgggtcgttccccagtgactccagggcagcgcaccccgcgaatgcccacttcggcgatactcaccactcgagggtagagaaccctgcggctgcgctttcggtgcccgcgagaggcgctggggcgcccggcaggggccgctgcgggctccgggagagggtcgaaggtgaagatctcaggaccggagccccgccggggtcccgggatggtggagggggccggggtcggggcctgcaggatggtcatggtcgggtggcagctgcgagagtgacacatggt

SEQ ID NO: 4370 - DNA, 584 bp, Homo sapiens
  MAP TO CHR17.1; EXPRESSED IN HEART, SIGNAL = 1.8; EXPRESSED IN BONE MARROW, SIGNAL = 1.6; EXPRESSED IN ADULT LIVER, SIGNAL = 2.1; EXPRESSED IN PLACENTA, SIGNAL = 1.7; EXPRESSED IN LUNG, SIGNAL = 1.6; EXPRESSED IN FETAL LIVER, SIGNAL = 1.3; SWISSPROT HIT: Q9WTY9, EVALUE 7.00e-03; EST_HUMAN HIT: BI009136.1, EVALUE 5.00e-05; NT HIT: gi13878214, EVALUE 1.00e-45
tataggaagggtccccaagggagatcaacttcaggagaaagtcccactccatgttatgcccacctttccaacatgtactccaggttggtcagcctcgcttcacctggggagatgatatggacagcataggagctgagggagcggtggataaacccctggaaatgcaggtatctcagggcatcagatatctggagcagcaggtgcacaatcacctccatgtgcagcactgggaactgggaccgctgcaagcaagagatgaaatgccacgaaaaaaaaaaggactggggccctgacactgtagagcattttgtgatttccagtctttccatatgatcctcatggttaccaaggatccccattttacagatggagaacctaaagctcagtgaggctaagtgaatggcctgacgtcccaatgactcaggccccctggatccaaacctggattcctttccctcagctgagctgcttcataccacaaaaaatgaaaagaaagttctcaaagtctggtatgtgcatccaggattggcttggggaaaactgacaggggaggtccccccataccaccagtaaacctgccctgt

SEQ ID NO: 4371 - DNA, 540 bp, Homo sapiens
  MAP TO CHR17.1; EXPRESSED IN FETAL LIVER, SIGNAL = 0.63; EXPRESSED IN LUNG, SIGNAL = 1.4; EXPRESSED IN BONE MARROW, SIGNAL = 0.7; EXPRESSED IN ADULT LIVER, SIGNAL = 1.2; NT HIT: gi13632178, EVALUE 0.00e+00; SWISSPROT HIT: Q9UKX3, EVALUE 2.00e-62; EST_HUMAN HIT: AA313839.1, EVALUE 6.00e-17
ttcatttcctccagctcctccagcaggaggccattcctgcgctccacgatggccagctgctccttgaggtcctcattgctcctcagggcgtcatcgagatgcagctgggagtcctgcaggggagacccagagtgaggccagagccgcctggcaggctggggcccgtccaggtacgcagaggcggccaccgtgctcaccttgagctggccctggaccgtgcgcagatgcttctgggtctctgccatctggcggttggagtggcccagctgaatctccatctcattaaggtctccctccatcttcttctttagcctcagggcgtcgttccggctgcggatttcagcatccagcacgctctgcagggcctctgctgcccgctggctgtttctttttagctgctcgatttcttcatccttctcaatgaccttgcggtctagctcggatttcacctggctcagctctagctgcacgcgcaagatcttgctctcctcgtgttccaaggaaccctgacgaaagcaaaggagtgattgagagtgccgt

SEQ ID NO: 4372 - DNA, 556 bp, Homo sapiens
  MAP TO CHR11.1; EXPRESSED IN HEART, SIGNAL = 0.66; EXPRESSED IN ADULT LIVER, SIGNAL = 0.67; EXPRESSED IN BONE MARROW, SIGNAL = 0.89; EXPRESSED IN FETAL LIVER, SIGNAL = 1.1; EST_HUMAN HIT: AU130245.1, EVALUE 4.00e-95; SWISSPROT HIT: Q99733, EVALUE 5.00e-21; NT HIT: gi5174612, EVALUE 8.00e-74
atcggaacctaacaccttcgtaagctgaaaactatctgtatattaaattaacagagctccctaccttgtcaaagagaggctggtatagcgctgcatactttctttccaagtcatgtacctcttcatagaacttggcttctatgtgagcacatctcacctgaagttgtttcaatgcattaattcttctttttactgctttaggtaaactaaaaaagggagtaagaaatacaacatcctcatgcctgcaaaataaagcagcatgcttttcaattttattaaaataaatttaggttaacatggaatcaacatccttactatgaacaagacctcttaaaaattaagaaaaggacaataccccaacaggaaaaaaaggatacaggaggaagcagaaaaaataattcacaaaagaaaaaacacaaattgtcaaacatgaagaaagattcaatttcataaaatatccaaaagaatgcaaacatttaagaacactcagcttttccttaccaaattggcaattaaaaaccaaaacaaaacacccaggttttacgaggctaagggc

SEQ ID NO: 4373 - DNA, 411 bp, Homo sapiens
  MAP TO CHR14.1; EXPRESSED IN HEART, SIGNAL = 0.87; EXPRESSED IN BONE MARROW, SIGNAL = 0.67; EXPRESSED IN FETAL LIVER, SIGNAL = 0.59; EXPRESSED IN LUNG, SIGNAL = 0.89; NT HIT: AF109907.1, EVALUE 0.00e+00; SWISSPROT HIT: P79802, EVALUE 7.00e-37; EST_HUMAN HIT: AL553513.1, EVALUE 1.00e-121
ttgggagccatcacattattctaaataatgttttggtgaaaattattgtacatcttttaaaatctgtgtaattttttttcagggaagtgtttaaaacctataacgttgctgtggactacattactgttgcactcctgatctggaattttggtgtggtgggaatgatttccattcactggaaaggtccacttcgactccagcaggcatatctcattatgattagtgccctcatggccctggtgtttatcaagtacctccctgaatggactgcgtggctcatcttggctgtgatttcagtatatggtaaaacccaagactgataatttgtttgtcacaggaatgccccactggagtgttttctttcctcatctctttatcttgatttagagaaaatggtaacgtgtacatccc

SEQ ID NO: 4374 - DNA, 504 bp, Homo sapiens
  MAP TO CHR22.1; EXPRESSED IN HEART, SIGNAL = 0.56; EXPRESSED IN ADULT LIVER, SIGNAL =   1; EXPRESSED IN BONE MARROW, SIGNAL = 0.77; EXPRESSED IN LUNG, SIGNAL = 0.61; EST_HUMAN HIT: AI004525.1, EVALUE 1.00e-127; NT HIT: AB049213.1, EVALUE 1.00e-106; SWISSPROT HIT: P27658, EVALUE 2.00e-03
atgaggggaagaattccagggtcttgggaagtcagaggggccctgggcttgggctgaggcctgcaccggagcaccttgactctggcccagctgctgggactcctgggcagcctgttcttcctgggccaggccctcatggccatgctggtgtacgtgtggagccgccgcagccctcgggtgagggtcaacttcttcggcctgctcactttccaggcaccgttcctgccttgggcgctcatgggcttctcgctgctgctgggcaactccatcctcgtggacctgctgggtgagcctcccggtacatctagtccgccccaggctggccactcccctcaggacacgctgcttatgccctggggcccctctcccatccttgctggagttctcctcacacctggctccatccccatcttcctgccctcccagctgctgtgctcttacagcccctcaagccagccggcccacataatttgcatcgtcaggacggatctactgatgcttgca

SEQ ID NO: 4375 - DNA, 546 bp, Homo sapiens
  MAP TO CHR14.1; EXPRESSED IN BONE MARROW, SIGNAL = 0.68; EXPRESSED IN LUNG, SIGNAL = 0.76; EXPRESSED IN FETAL LIVER, SIGNAL = 0.52; EXPRESSED IN HEART, SIGNAL = 0.76; NT HIT: Z46644.1, EVALUE 0.00e+00; EST_HUMAN HIT: AI765523.1, EVALUE 0.00e+00; SWISSPROT HIT: P04436, EVALUE 8.00e-26
aatgggaacaggcttgtgagtctgtttctgtctctcacatggtatcccagtgaagtcctttctctcctctttcccacagaatttagcatggctcagacagtcactcagtctcaaccagagatgtctgtgcaggaggcagagaccgtgaccctgagctgcacatatgacaccagtgagagtgattattatttattctggtacaagcagcctcccagcaggcagatgattctcgttattcgccaagaagcttataagcaacagaatgcaacagagaatcgtttctctgtgaacttccagaaagcagccaaatccttcagtctcaagatctcagactcacagctgggggatgccgcgatgtatttctgtgcttataggagcgcacagtgagacaagcaacagggagaggcttacagaaacctcagacctcagcatctgtgcaaaggtcagggggaagtgttcagggttataggaacataaagaggaaataattgtcttccctaaagaaaaaaaaatgtatctgactataggaaacacagaggggatgtc

SEQ ID NO: 4376 - DNA, 596 bp, Homo sapiens
  MAP TO CHR7.1; EXPRESSED IN BONE MARROW, SIGNAL = 0.46; EXPRESSED IN LUNG, SIGNAL = 0.57; EST_HUMAN HIT: BF748083.1, EVALUE 6.00e-05
ccaggcaaaaataaaaccccaaactttttaattggagatttaagtaatagagtctttattaaacctatattttaagtttatgtttatatatgaatttaaaacagtaaatctcttatctcaattcttgaacttcttgtgcattttccagatgtcctccagacatggagaggaaatgaaatcgcatcacctcttaactattcctttatcctctctgcactttctttttatcctccttaattttaggaatttatagtgctagcctgaactttcataaactgtaatattcctgtagaaagcgataacagccatgttagatgctgtgatttttttaataaaagcgatacagcatctttccttagcagaaatctcaaaccaaaaattaaaatatggttaagcattacagatcatgttgatatctgtgtcattactttgtgaagactaaatctgtttagaagaataatggtgggttctattttgctgtgacagagtgatctctggtgatactgtcaagtgaaactggtaacttgaaattaaataaagatttgtggctgtagttgtactgacttatgaaacaacaaaacctttcatgagcacct

SEQ ID NO: 4377 - DNA, 593 bp, Homo sapiens
  MAP TO CHR18.1; EXPRESSED IN HEART, SIGNAL = 1.6; EXPRESSED IN BONE MARROW, SIGNAL = 1.8; EXPRESSED IN ADULT LIVER, SIGNAL = 1.9; EXPRESSED IN FETAL LIVER, SIGNAL = 1.8; EXPRESSED IN LUNG, SIGNAL = 1.1; EST_HUMAN HIT: AI688084.1, EVALUE 1.00e-104; NT HIT: gi5902101, EVALUE 1.00e-105; SWISSPROT HIT: P13641, EVALUE 9.00e-30
ttggtggaatggggattatgaggaagttacaaagacagtgggagaaacatgaaagaaatacctgtcacatcagtagtgagcctaaagcccagtcagggttcttccatggcttgctgcattcacttctgtaagcaaaacattagtgtgctaggaaaaatctctaggaaggaaacactgctgacattcccccatttaccagttgcacatgtgctaaattgtgtcatagaaaacttgcactttgtagaagaacagtaatcttttgtagtccagtatttactgtggctcagtagattaattagttgccttaacttgtatcatactaataactgcacaattattttcctctttaggtgtggatgtcagcatgaatacacatcttaaagctgtgaaaatgaccctgaagaacagagaacctgtacagctggaaacgctgagtattcgaggaaataacattcggtattttattctaccagacagtttacctctggatacactacttgtggatgttgaacctaaggtgaaatctaagaaaagggaagctggtaagtttgaaggattataaacatttttgtgaatgctaatcctaatccaca

SEQ ID NO: 4378 - DNA, 510 bp, Homo sapiens
  MAP TO CHR12.1; EXPRESSED IN PLACENTA, SIGNAL = 1.8; EXPRESSED IN FETAL LIVER, SIGNAL = 1.5; EXPRESSED IN LUNG, SIGNAL = 0.89; EXPRESSED IN HEART, SIGNAL =   1; EXPRESSED IN ADULT LIVER, SIGNAL = 1.7; EXPRESSED IN BONE MARROW, SIGNAL = 1.7; SWISSPROT HIT: Q13635, EVALUE 2.80e+00; NT HIT: AF224263.1, EVALUE 5.00e-04; EST_HUMAN HIT: BE141353.1, EVALUE 3.00e-15
gaagtgcctgagaacaaggcaagagagaacccagggaagctatgaaaccagccggcaagggtaaaaagaatgagtgaaagaaagggggcaggaagaacagcaggagaaaaagaaggaaggaaggaaatgaaaaggaaaagacagaaaaaagaggaagaaaaagacaggagggaaatgaaaataagaaagacgagagagaaggatcgaaagataaaaagaggcgggagggaggcagaagcaagggtcggctgttgctctccctcgcccgggcgcctgcagcagtctgggtgggcgggggcgccatgacaaagtgaaggtcaagttagcatcgtaccttataaggaaggcgccggtcctccatttcagccttttctctgccaggacgcggccgtggcatttctggtcttgtaaacatcagactctttggggccttaaaaaaataaagacgcccctccttcctttaccgggggtgagccggccggggaaagcggcggacagggaaatcaacta

SEQ ID NO: 4379 - DNA, 561 bp, Homo sapiens
  MAP TO CHR1.1; EXPRESSED IN LUNG, SIGNAL = 9.3; EXPRESSED IN HEART, SIGNAL = 4.8; EXPRESSED IN BONE MARROW, SIGNAL = 3.5; EXPRESSED IN ADULT LIVER, SIGNAL = 1.8; NT HIT: gi13648348, EVALUE 0.00e+00; EST_HUMAN HIT: BG533230.1, EVALUE 0.00e+00; SWISSPROT HIT: P47914, EVALUE 3.00e-43
tgccatgcttcttgtacagcctgctgtgagccaggtaaacctctttctttaaaaattacccagcctcgggtgttcttttacagtaatgcaaacagaccaagatatccagttatatacaaaaggatactgagctttcacttccaggcgcttcaggagccacgggttacagtgcagacatggccaagtccaagaaccacaccacacacaactggtcccgaatatggcacagaaattgcctcaagaaaccccaatcacaaagatacgaatctcttaaggggtggaccccaagttcctgaggaacatgcgctttgccaagaagcacaacaagaagggcctaaagaagatgcaggccaacaatgccaaggccatgagtgcacgtgcaaaggctatcaaggccctggtaaagcccaaggaagttaagcccaagatcccaaagggtgtcagccacaagctccatcgacttgcccacattgcccactccaagcttgggaagcatgatcatgcccacattgccaaagggctcaggctgtgtgggccaaaggccaagaccaaggatcaaac

SEQ ID NO: 4380 - DNA, 519 bp, Homo sapiens
  MAP TO CHR17.1; EXPRESSED IN HEART, SIGNAL = 1.1; EXPRESSED IN BONE MARROW, SIGNAL = 1.5; SWISSPROT HIT: O51155, EVALUE 1.60e+00; NT HIT: AB033617.1, EVALUE 8.00e-03; EST_HUMAN HIT: BE073703.1, EVALUE 2.90e+00
ctgggattctgcatgttgtgcttatttgctctctgtgggagggtctgttagacaggtctctccaaggaaggggaagggagcaaggagtgggggagggtgtcagctcagaggggctagcaagtccagtagatgccagttctcccgaaagacaggtcccctgtgtgattcacatctggtactgaagtggctagagcagttggcacaccgcaaattgacactgaccttggccatgctgttggggtaattggactttcaggatggactctccgaacaatcttgccactgtggctggcacaaacaggcttttctttaacagcagacgttcatgtcttcttgctccaacttttttttcttgaacaaacatatgtattgtggccaatgcaaggaaaatcccactcaccattttgatctgagttgcttctgtcctggaacaatagtctagtgtaccaggggccctcgggatgctggtttccatgccctggtctagttttatgaatctccttggaagaccctaaaggc

SEQ ID NO: 4381 - DNA, 595 bp, Homo sapiens
  MAP TO CHR20.1; EXPRESSED IN LUNG, SIGNAL = 0.79; EXPRESSED IN HEART, SIGNAL = 0.53; EXPRESSED IN BONE MARROW, SIGNAL = 0.61; SWISSPROT HIT: P52741, EVALUE 4.00e-09; EST_HUMAN HIT: AW026199.1, EVALUE 0.00e+00; NT HIT: gi14766310, EVALUE 0.00e+00
gctgcggctatgaagaataagtgttgcctcagttgttatttgtaacccaaatcaaatgttttttcttgtgttcctcttagagaacgccagatcaagtgtcccaagtgtgataagctgttcttgagaacaaatcacttaaagaagcatctcaattctcatgaaggaaaacgggattatgtctgtgaaaaatgtacaaaggcttatctaaccaaataccatctcacccgccacctgaaaacctgcaaagggcccacctccagttcgtcagcaccagaggaggaagaagaggatgactcagaagaggaagatctagcagactctgtggggacagaagactgtaggattaacagtgctgtgtattcagcggatgagtctctttctgcacataaataaaaggaaaagaaacaagcaattttggatgaaaatgcaaatggaaaaatacacataaccagttatctactataatggtttttatataaaatggttcctgatttattttcagccagtaatcaaaacagactgggaatgaataaagcacttacagaagagtatcctaatgaaaacactttaaaacagattgggaaaactgagcatg

SEQ ID NO: 4382 - DNA, 547 bp, Homo sapiens
  MAP TO CHR5.1; EXPRESSED IN ADULT LIVER, SIGNAL = 1.4; EXPRESSED IN BONE MARROW, SIGNAL = 1.1; EXPRESSED IN FETAL LIVER, SIGNAL = 0.72; EXPRESSED IN HEART, SIGNAL = 0.57; SWISSPROT HIT: P54900, EVALUE 1.30e+00; EST_HUMAN HIT: BG536233.1, EVALUE 1.90e-01
tttccatccctgcttactggccgataatggcaaaaaaaaaaaaaaaaaaaagccacgttcaaaagaaagcgccacaccaagcagattcaaaaacgatttaatgggcactatttttctctatgcagaaaatgtgcttcaattcaaatttttcatcttagagagctatttttagttgcatgagacacaaagactatataatcatcataaagatgtcagctggccccagcctttcccaggcacctgctggaatgattcatttgactaatgacacagtatctgcatatggagaccgtcatgcatcttccctatgttataatgaaacatgagttatcagtgcagcaggaagtatttccttcggtacaaggcattgaccctgagagtgctaacagctaaagtacagagaagtaagaacttgtgtgaaatcagctcttgcttatctaagtacagcttcagtgttacagttaaagtcccagtggctgctggtggaatgccccctggatgcttcatccggttgtcccaggttgggagttctccagccctagaggct

SEQ ID NO: 4383 - DNA, 560 bp, Homo sapiens
  MAP TO CHR19.1; EXPRESSED IN HEART, SIGNAL = 2.1; EXPRESSED IN BONE MARROW, SIGNAL = 2.8; EXPRESSED IN ADULT LIVER, SIGNAL = 2.9; EST_HUMAN HIT: AW732958.1, EVALUE 1.00e-51; SWISSPROT HIT: P09278, EVALUE 2.70e-01
ctgggataagtaagcggcaggaggcaggggctgctggttccatgttctcaggaagtcaggccatggctggggctggctgggttggtttactgtgggggaggctggcatggccccccgatcggcccccttcactctctctcccctcccttcccagaactctatgtccagccatggaaagcagggggcccccaagaagcggaaggcgcctccacctcccgccagcattcccatgccggtgagagatgctctgggcacgggaggaggcatggggagcccccaggcacggggaggggctctggctgagacctgggatggggcaaccttaggccccatctaaaggccgtggtggggaggggaacaggatgatcgagatgcctatgaggagatcgtgaggctgcggcaggagaggggccgcctcctgcagaagatccggggcctggaacagcacaaggaacggaggcagcaggaggttaggaggcctcggagatttgggcgtgggccagcctgggtggggtcaatgcaggcatgaagatccccctacttttctcccaccttccctc

SEQ ID NO: 4384 - DNA, 553 bp, Homo sapiens
  MAP TO CHR8.1; EXPRESSED IN ADULT LIVER, SIGNAL = 1.2; EXPRESSED IN BONE MARROW, SIGNAL = 0.83; EXPRESSED IN FETAL LIVER, SIGNAL = 0.73; EXPRESSED IN LUNG, SIGNAL = 0.66; EXPRESSED IN HEART, SIGNAL = 0.88; EST_HUMAN HIT: AI452941.1, EVALUE 0.00e+00; SWISSPROT HIT: P29352, EVALUE 3.00e+00; NT HIT: Z99117.1, EVALUE 9.00e-03
ggacgtatttcagagctgcctggaagccagggtgagaggggaaatacgttgacgttgaggctggtcagatgtatctttcttgctgtgtgtggccggggctcctgcaggggctcagccaggacagcgccgggcagtcaggcgtatgcggctgtcctccgcagggctccagggccgggcgtagccggcgtggggcagcagcagctggtcctgtgtgccgtcggggctgacaagacgctggacagccatcaggtagtcccggtggggtgccagcatcgggcaggggcagtggcctggcgcccacacgtactcgcgtgcccgcagtggcgagcggttcttgtagacgagctggatgcgcacctcatagcgggtctcctgggcctggtggtggtggcccagcactcgggcctggaacactgttgaggggacgtgctaagctggctggctgctcaactctgcgcaaatctctacgccccctcccttgccagaagagggactgagggtcaggtgggacctcgggatctatagggactagagtcaggatcacgtcagggat

SEQ ID NO: 4385 - DNA, 595 bp, Homo sapiens
  MAP TO CHR2.1; EXPRESSED IN BONE MARROW, SIGNAL = 0.64; EXPRESSED IN FETAL LIVER, SIGNAL = 0.6; SWISSPROT HIT: P19447, EVALUE 2.00e-36; NT HIT: gi14728080, EVALUE 1.00e-114; EST_HUMAN HIT: AU121323.1, EVALUE 1.00e-114
gctggtaggctggtcttcacaggttcctgaggagatgtgagaaatggtgcctgaaggtcaattttgcctgctgattagatttcattttcaaagtgttgttagtctgggttgcttttctgtgctttatcccggttgttgactgagcaagatctaaaatcttgtagaagtttagatagaatgccacttttttgaccattggacctcttagaagatgtaatgtttttgagcacagtaacaagattttaaaaccccttttgtgccctctttccaggaaatgattgaggaactccagaaacgttgcatccacctggagtaccctctgttggcagaatatgacttccggaatgattctgtcaaccctgatatcaacattgacctaaagcccacagctgtcctcagaccctatcaggagaagagcttgcgaaagatgtttggaaacgggcgtgcacgttcgggggtcattgttcttccctgcggtaagtggtaccagagttaagaaggtggtcaggctgttgtgtctggatctgccagctgcctcccgctttctctctgcacatttccctaaatcacaccttgctgaaaagccaagatcagg

SEQ ID NO: 4386 - DNA, 503 bp, Homo sapiens
  MAP TO CHR1.1; EXPRESSED IN PLACENTA, SIGNAL = 3.1; EXPRESSED IN FETAL LIVER, SIGNAL = 0.87; EXPRESSED IN LUNG, SIGNAL = 1.4; EXPRESSED IN HEART, SIGNAL = 1.4; EXPRESSED IN BONE MARROW, SIGNAL = 0.89; EST_HUMAN HIT: BF981091.1, EVALUE 0.00e+00; SWISSPROT HIT: P15121, EVALUE 4.00e-63; NT HIT: gi14745075, EVALUE 0.00e+00
aggtacatggttctgggtgggggtctggagagtgcagcagccatggccagccacattgtgctcaacaatggcaccaagatgcccatcctggggctaggcacctggaattcccctccaggccaggtaactgaggctgtgaaggtggccattaatgttgggtactgccacatcgactgtgcccacgtgtaccagaatgagaatgacgtgggggtggccattcgggagaagctcagggagcaggtggtgaagtgtgaggagctcttcatcaccagcaagctgtggtgagcgtaccatgagaagggcctggtgaaaggagcctgccagaagatgctcattgacctgaagctggactacctggacctctaccttattcgctggccaaccagcttcaagcctgggaaggaatttttcccattggatgagccaggtaatggtaatgtggttcccagtaacagtaacattctggacacatgggcgggcatggaagagctggtggatgaagg

SEQ ID NO: 4387 - DNA, 557 bp, Homo sapiens
  MAP TO CHR15.1; EXPRESSED IN FETAL LIVER, SIGNAL = 1.5; EXPRESSED IN ADULT LIVER, SIGNAL = 1.6; EXPRESSED IN BONE MARROW, SIGNAL =   1; NT HIT: gi14752313, EVALUE 1.00e-115; EST_HUMAN HIT: AA432182.1, EVALUE 1.00e-101; SWISSPROT HIT: P51448, EVALUE 6.00e-26
tgtgggcagtgagctacaagaaaaggaaatcctccgactttagtaccctcctcctgttgtaaacagaggtcaatgatcaagaagtcaagacagaaaaagggtccatatctgtaggcataatggaaatcatatgcatgagaaaaacaagttcaacttttatttgttttcattgtttcccctcctttgcctgaccccgatcaccaaaagatgtgcagtgtgtggcgctccaggtctgtgcagggccatataaagtgtctcggttaatttttttgtttgtttttcatgtttgtacttcagacattctagaagtgcttaggtgataacatttacccatcaatttgcattgctggctcaaattctgaagtgaacaactccttgtataatggaggaaaatgaagtcgcacaatgtctgggtatattgctttaaatgccattagcttttctgtatgtcgtccacataaggctcttaaggtagacaccttgcatattaactgtaagtgaaagaaaggacacaccgtcaggcaagaacaggcataagcatcaaagatcagggaacc

SEQ ID NO: 4388 - DNA, 513 bp, Homo sapiens
  MAP TO CHR20.1; EXPRESSED IN BONE MARROW, SIGNAL = 0.63; EXPRESSED IN FETAL LIVER, SIGNAL = 0.69; EXPRESSED IN PLACENTA, SIGNAL = 3.7; NT HIT: AJ243896.1, EVALUE 0.00e+00; EST_HUMAN HIT: BI518382.1, EVALUE 0.00e+00; SWISSPROT HIT: P35713, EVALUE 5.00e-21
ccgagttcgaccagtacctcaactgcagccggactcggcccgacgcccccgggctcccgtaccacgtggcactggccaaactgggcccgcgcgccatgtcctgcccagaggagagcagcctgatctccgcgctgtcggacgccagcagcgcggtctattacagcgcgtgcatctccggctaggccgccggcgccgcccgggtccctgcagcgcttcctcccgcagcccccgcgaccgatccgaccgcgtcgctgccgctctgctctctcatacgcgtgtatgtttggttccatgtcacagccccctaggagccagtgatgctcggccttgcgcccgttccacctcccaggccacccttcctgggcttctgggccacctgccctcggggggcccctgcgagggtgcctggagttcccacgtgtcccggggcttttccaggaagcccgagcccaggacctgttggcagagttgccagggttacatttttgaagcacctgctccttttcttgcagt

SEQ ID NO: 4389 - DNA, 583 bp, Homo sapiens
  MAP TO CHR7.1; EXPRESSED IN HEART, SIGNAL = 4.9; EXPRESSED IN BONE MARROW, SIGNAL = 3.7; EXPRESSED IN ADULT LIVER, SIGNAL = 1.3; EXPRESSED IN FETAL LIVER, SIGNAL = 4.3; EXPRESSED IN LUNG, SIGNAL = 6.9; SWISSPROT HIT: P21333, EVALUE 3.00e-43; EST_HUMAN HIT: BI046866.1, EVALUE 1.00e-67; NT HIT: AF252549.1, EVALUE 0.00e+00
tggcacactcatcaggtagggcctgccaccagccagcggagagccacagctggaggaggacaaaccctgcaggggatcctggcccccaggccccagggtgtgcattctgacaaccacacgccttggcagccccagcttgtcccctctgtctttgggagctaagggctccatgctgtgctcactggcccactcaccgggggcgcagttgtccaccagggcgcccagagctttgccgtcctgccagtcacggttgaagttggtgatgggcagctggggcaccttgttctggatccagccaagcagccgctgcttgggcgtctgtttgcgggcatcctcatcatcttcatcctcccacatgggcatggagatggagtagtgcaggatcagcgtccagatcaggcccaggatcagcttcaggttcccatccacgatggccttgctgtctgcagaggggagggcacagacgggctcaggggcgccccaccctccactgccccagagcaccctccctcacctgcgcagctcctcgggccagagctctggggtcaggcctctagtctctgcctacctgaccctctccctc

SEQ ID NO: 4390 - DNA, 504 bp, Homo sapiens
  MAP TO CHR6.1; EXPRESSED IN PLACENTA, SIGNAL = 1.5; EXPRESSED IN FETAL LIVER, SIGNAL = 1.3; EXPRESSED IN LUNG, SIGNAL = 4.8; EXPRESSED IN BONE MARROW, SIGNAL = 0.69; EXPRESSED IN HEART, SIGNAL = 1.1; EST_HUMAN HIT: BG748958.1, EVALUE 1.00e-64; SWISSPROT HIT: Q15417, EVALUE 3.00e-13; NT HIT: gi13626339, EVALUE 7.00e-65
atgggtaccaacaaagtggcttcccagaaaagaatgggtgtgcacgggcttggggggcaagtatatggtcgcaaatactgtgctgctctgacagaaactatcattcacaacagaaacaaatggtttgaaaatcagtgatagtgattatcacacagaatacccagatgactaacatggcgagtaccaaggtgactgccctagagattaccaatatggcgaccaaggcattgatcactagattcacagaaaagaactcagtatttagtctactgttttcattcagtgagaaccaagctatctttaaataatttttatcttgtcttcctaaaacactattaagcttattgtaccttaaaaaaatgacttatatacattcctttctcctgtatctgcctcttccctaaatagttgccttttcttgttgtaatagttaaatcctacagcataaccaataactagcatttgaaataaaaaggaatactgtgaaaggggagaactcttgca

SEQ ID NO: 4391 - DNA, 562 bp, Homo sapiens
  MAP TO CHR14.1; EXPRESSED IN LUNG, SIGNAL = 1.1; EXPRESSED IN BONE MARROW, SIGNAL =   1; EXPRESSED IN HEART, SIGNAL = 1.1; EXPRESSED IN ADULT LIVER, SIGNAL = 1.6; EST_HUMAN HIT: AI668655.1, EVALUE 0.00e+00; NT HIT: gi16189326, EVALUE 0.00e+00; SWISSPROT HIT: Q57598, EVALUE 2.40e-02
cttcctgctgtcccactctggccacccaggaggcccccaagccccaccccaccgtctgtgtctggcaggcatcgctgaccatataaggtgcctctggcctccctgcccagcccttcagtgctcccagctccctggtgccctgggaggcggccccctagcctggggtcttggtggcgaaggtcaggtagccggtgtggcccacggcctccttcatgggcgtgccgctgcggaaggggctggtgtcggagccggcagggccatctgtgcctgtgcccaggtcgggcggtggcaggctgacagtgcgcacgttgtagacctgtggcagcacctccagggtgctcagctctgagaagccgcgcgctgccagcgcctggcatgtgcgttgcacctgctcgatgcacggtgagaaggagcagaagcgcccgcctgtgggaaacaggacccgagggtcagagggcaggggtggcagagcctggcccgtctggccctagcatccctggactcccaccctagggtctgaggccagcctaagacagccccaacacagactgcaagctctcca

SEQ ID NO: 4392 - DNA, 525 bp, Homo sapiens
  MAP TO CHR11.1; EXPRESSED IN PLACENTA, SIGNAL =  23; EXPRESSED IN LUNG, SIGNAL =  23; EXPRESSED IN BONE MARROW, SIGNAL = 5.6; EXPRESSED IN HEART, SIGNAL = 3.2; EST_HUMAN HIT: BG706335.1, EVALUE 0.00e+00; NT HIT: gi14783667, EVALUE 0.00e+00; SWISSPROT HIT: P46405, EVALUE 7.00e-46
agtgctggaatggtcctttgaatttatctattgtagtggtcttacctaggagtattcattagaattcttatggcactaaaaaaaaaaatacacagcctggtatcccccacctgggtttctgggttcactagatctgaggtgggaccttgatatatacaggtgtttctgaggtgtgtcccaggttgagaactgatgactttcttttttttttttttttttttttttgggagccaaagatttatttcttcatttcttgcatttgaaatactcttcgatgacatccttggcctgagactccttgccatagtccttaactactacacaactgtaaccaaccactttatggggtttcccctctctgtcaattttacagaggcctacccattctcctagtttcttgttggcatcaaccttaattaggttgatttggtgttcagcacaaagggcctccaccaacttgacatacataggctcatcacagttggatgcaagcacacaaagatgggcttggcgcttgtctaagac

SEQ ID NO: 4393 - DNA, 515 bp, Homo sapiens
  MAP TO CHR6.1; EXPRESSED IN HEART, SIGNAL = 1.5; EXPRESSED IN BONE MARROW, SIGNAL = 1.1; EXPRESSED IN ADULT LIVER, SIGNAL = 1.9; EXPRESSED IN PLACENTA, SIGNAL = 3.3; EXPRESSED IN FETAL LIVER, SIGNAL = 1.5; EXPRESSED IN LUNG, SIGNAL = 2.3; NT HIT: D28769.1, EVALUE 0.00e+00; SWISSPROT HIT: O35984, EVALUE 2.00e-48; EST_HUMAN HIT: AL576644.1, EVALUE 0.00e+00
actgagcactgggtattggggtctctgggtccctaagtccactcgcctgcatgctaggcctcagcattcggagctcccaggaggaggagccggtggacccacagctgatgcgcttggacaacatgcttctggcagagggtgtggctgggcccgagaaagggggcggctcagcagcagcagctgcagccgctgcagcctctggtggtggtgtgtcccctgacaactccatcgaacactcggactatcgcagcaaacttgcccagatccgtcacatataccactcggagctggagaagtatgagcaggtaaggagaggaggcttgggtgggtggagggaagggctcttgcaggggaatcccatggtcaaagggctcctcctcaccagcccactggcccccactacaggcatgtaatgagttcacgacccatgtcatgaacctgctgagggagcagagccgcaccaggcccgtggcccccaaagagatggaacgcatggtgagcatcatccatcgaaa

SEQ ID NO: 4394 - DNA, 516 bp, Homo sapiens
  MAP TO CHR17.1; EXPRESSED IN HEART, SIGNAL = 1.4; EXPRESSED IN BONE MARROW, SIGNAL = 0.73; EXPRESSED IN FETAL LIVER, SIGNAL = 1.2; EXPRESSED IN LUNG, SIGNAL = 0.96; EST_HUMAN HIT: BE790879.1, EVALUE 0.00e+00; NT HIT: gi11426182, EVALUE 0.00e+00; SWISSPROT HIT: Q92830, EVALUE 4.00e-32
gtgcctgaaggtccagaaagagctgcaggatcgggtccggaggacccttggctggagtgtctcaagctgagtcgggtccgtggggccagggcaccccctaaggatcagatcagaatccgaggtggagacattccaggtcagggctgcggcccaaagatgggcctacttgtcaatgaggcctccctccttgagcttgaagtagaagaacttctccagggcgctggcacagcggcagtactcgctgtccggggggttgtactcgcgacagttggcgatgacccgctgcaggtcggccacaaagagcttccgggtcacgtagtagcggcttcgcagccgctcagtcatggtcttcaggtctggggcagcaggagacggagcacagctttaagaggctgaagaccacggcagggctgtccaccagggtgggccccctggggctgcagggcgcagtgagggcaggagcaggtgtggggacagaagaggagggaaggggatggaatggaaggtcctcaccaa

SEQ ID NO: 4395 - DNA, 517 bp, Homo sapiens
  MAP TO CHR6.1; EXPRESSED IN FETAL LIVER, SIGNAL = 1.9; EXPRESSED IN LUNG, SIGNAL = 2.5; EXPRESSED IN BONE MARROW, SIGNAL = 1.4; EXPRESSED IN HEART, SIGNAL = 1.3; SWISSPROT HIT: O75955, EVALUE 1.00e-08; EST_HUMAN HIT: AW798231.1, EVALUE 0.00e+00; NT HIT: gi14761449, EVALUE 1.00e-100
actgcctcttaactcacccgcacagacgcggcttctgcctccgcctgcataattagttgggacctgtggacagaagggaagtggagggtggagcccagcagcccttactcccaggagaaaggcccagtgctgcagaggcagacgctcctgaaacctgaaatccataggagtccaggtggtgaaggcttcagcactccatcttggggtgcctaggtggcaagtgagctaggcagggtcagggaggggacatttacttctctgcctcggctaggcgctccagcttgtagcgctccgcttccgctggcttccgcacccgggcctccagctccttctcccgccgggcgatctcctgctcctgcactgccacctgctgggcccgctccaccacctgcacctgcacccgctgctcctcaatctgctgcttagtcttggccacctgggtaggagggtgaagtcaggttcacgctctgagtcagaggtgaagagcaagtgcccgggaaccagagctccagagtgg

SEQ ID NO: 4396 - DNA, 585 bp, Homo sapiens
  MAP TO CHR19.1; EXPRESSED IN ADULT LIVER, SIGNAL = 1.9; EXPRESSED IN BONE MARROW, SIGNAL = 1.2; EXPRESSED IN FETAL LIVER, SIGNAL = 1.9; EXPRESSED IN LUNG, SIGNAL = 1.1; NT HIT: gi16163175, EVALUE 1.00e-130; EST_HUMAN HIT: BI493124.1, EVALUE 0.00e+00
ctgcatattttggctgagggatattcttttaaacctgatatgctgaagattatttgcttttataatagagaacggagaccaacctgggctgaagaaagaagattaaatgctgaaacatttggaatcccacttcgtccaaaccgtggccgtgggggatacagaggcagaggaggtcttggtttccgtggtggcagagggcgtggtggtggcagaggtggtaccttcactgcccctcgaggatttcgcggtggattcagaggaggtcgtgggggccgggagtttgcggattttgaatatagggtaagtgttattgttaataaattctttggggttgacatgcattttacaagactcaaaacatttttacttgtttttgttttgggtgaattgttctgaggacattagaataacttccattttgacttttcagtagaggatatacgtgattcagatgtatatatgaagacattatacaaaaaaagacagtatagtatcacctttatttcatgttaacagaatatacttttaacacctaaagagtctatctaggaagcacatactcccagaatggaagggcaagcttta

SEQ ID NO: 4397 - DNA, 592 bp, Homo sapiens
  MAP TO CHR17.1; EXPRESSED IN LUNG, SIGNAL = 0.61; EXPRESSED IN HEART, SIGNAL = 0.76; EXPRESSED IN ADULT LIVER, SIGNAL = 0.71; EXPRESSED IN BONE MARROW, SIGNAL = 0.55; EXPRESSED IN FETAL LIVER, SIGNAL = 0.49; EST_HUMAN HIT: BE079546.1, EVALUE 0.00e+00; NT HIT: gi16164950, EVALUE 0.00e+00; SWISSPROT HIT: Q09415, EVALUE 8.00e-04
  unsure 79
ggcaaaaggttgaagacagcattataattattttcatacttcccattaatatcgcatccaggaattggggtctcaacgnatgttgccatttttctcactctcccctaggccataattaagtgtcttgacctgattgttgctttcacgtaaacagatgtccttgttactaatcttatcacaaagcttcgttatgattttgcgaacatcctcaaatcccaccaaaagagtcaacctcagggcaatgtggcaaaagacacccagtgtgagaagcagccctcccagaggacattctgtcctgtggtagagctcccaggcctgctgcaaacactcctggctgcaatacttggcataactgcatccgtcacacggaactgtggccaaagtgtgcttcaaacatcggtgacaatagaggtccccattggtgactctggtgtcccatttgctgtctaggccgtgatgcggtggtggcagttctcctgggttgagaacactcacaaaagcatcctcctgcaccaggagctctcctgggagaatatcttttgtggcaacgagacagcgaccttttaaaggatctacgcataagccgatggat

SEQ ID NO: 4398 - DNA, 511 bp, Homo sapiens
  MAP TO CHR10.1; EXPRESSED IN BONE MARROW, SIGNAL = 0.78; EXPRESSED IN ADULT LIVER, SIGNAL = 1.6; EXPRESSED IN FETAL LIVER, SIGNAL = 0.85; EXPRESSED IN LUNG, SIGNAL = 0.77; EST_HUMAN HIT: AW188300.1, EVALUE 0.00e+00; NT HIT: AF143314.1, EVALUE 0.00e+00; SWISSPROT HIT: O08586, EVALUE 7.00e-44
gggggaaaataatacctggcttccttaatgattatatttaagacttatcaagagactattttctatttaacaattagaaagttaagcaatacattatttttctctggaatccagtgtttcttttaaatacctgttaagtttgtatgcaacatttctaaagttacctacttgttaattaaaaattcaagagtttttttttcttattctgaggttatctttttaccacagttgcacaatatccttttgaagaccataacccaccacagctagaacttatcaaacccttttgtgaagatcttgaccaatggctaagtgaagatgacaatcatgttgcagcaattcactgtaaagctggaaagggacgaactggtgtaatgatatgtgcatatttattacatcggggcaaatttttaaaggcacaagaggccctagatttctatggggaagtaaggaccagagacaaaaaggtaagttattttttgatgtttttcctttcctcttcctggatctg

SEQ ID NO: 4399 - DNA, 575 bp, Homo sapiens
  MAP TO CHR19.1; EXPRESSED IN FETAL LIVER, SIGNAL = 2.1; EXPRESSED IN LUNG, SIGNAL = 0.67; EXPRESSED IN HEART, SIGNAL = 0.52; EXPRESSED IN BONE MARROW, SIGNAL = 1.2; EXPRESSED IN ADULT LIVER, SIGNAL = 0.91; EST_HUMAN HIT: BE743531.1, EVALUE 1.00e-129; NT HIT: AF289221.1, EVALUE 0.00e+00; SWISSPROT HIT: P17426, EVALUE 7.00e-47
gtggacagagtgtgactgcggcccctgtctggtgcctggggagggccactcccctccagcagcttggggtcctgggacgggtccatcctagggaggggcacctctcgagggggtttctgggagagggcagtggaacctggccccgctgacacccactcctgcacacagccccccagtgcagttctccctgctccactccaagttccatctgtgcagcgtggccacgcgggcgctgctgctgtccacctacatcaagttcatcaacctcttccccgagaccaaggccaccatccagggcgtcctgcgggccggctcccagctgcgcaatgctgacgtggagctgcagcagcgagccgtggagtacctcaccctcagctcagtggccagcaccgacgtcctggtcagagccctgtccccccaccccacccctcttgcacacccccttcccgccctcccctcctcctgacccgaactgaccttccccaccccgaccgcgccaggccacggtgctggaggagatgccgcccttccccgagcgcgagtcgtccatcctggccaagctgaaacgcaagaag

SEQ ID NO: 4400 - DNA, 524 bp, Homo sapiens
  MAP TO CHR16.1; EXPRESSED IN FETAL LIVER, SIGNAL = 0.51; EXPRESSED IN LUNG, SIGNAL = 0.88; EXPRESSED IN HEART, SIGNAL = 0.76; EXPRESSED IN BONE MARROW, SIGNAL = 0.41; EXPRESSED IN ADULT LIVER, SIGNAL = 0.63; EST_HUMAN HIT: BE078404.1, EVALUE 1.00e-88; NT HIT: AF026954.1, EVALUE 1.00e-41; SWISSPROT HIT: P23246, EVALUE 1.70e+00
aaatggaggctgagtaccccaaagaggataatctttccaaacttgagttggtgtcacttcctactgtgagacacttccttaggtaatgtcttccctgctaacctatcttaagaaaatgcaaaaacctgctcaccattttgggaggcagcacttgccagggcaagagccacgtcagcggaagacaccactgcatcctcaggaacatgcatggcccccaccaggtcgtgcacgttgaggagatggtgaagctcggccactttcttgggggagatgatctcagaagggatacctataacactgccacagaacacaagggacaatgacattcacaggctctttggcagaggccagtgtggtaaagtcaggacacgcttctagactcttacgtacttcagccctgcgttgatgcgcttcagggagatcagtcggtcctgagtttgggccagaaagattgagcctgtccttgtgtaacctgtaagaaaaatgagcccaaatgagacagatcagaccaaatgtaggacggg

SEQ ID NO: 4401 - DNA, 562 bp, Homo sapiens
  MAP TO CHR22.1; EXPRESSED IN PLACENTA, SIGNAL = 1.7; EXPRESSED IN FETAL LIVER, SIGNAL =   2; EXPRESSED IN LUNG, SIGNAL = 1.3; EXPRESSED IN HEART, SIGNAL = 1.9; EXPRESSED IN BONE MARROW, SIGNAL = 1.4; SWISSPROT HIT: O17583, EVALUE 8.10e-01; EST_HUMAN HIT: BG910693.1, EVALUE 0.00e+00; NT HIT: U66538.1, EVALUE 8.40e+00
gagctttccttcacgcagacttaatttcctggacttagtgctaacgtcaagaccaaacctgtaggaaaagagctttaactacacaaacacatactgacagattcagccaaactccgagagtcccagaccggagcctgtgtccctagcgcaggtgtgtctgtcgggcagccgacggtgcctgtgcaggcagtggctggacaccactactcccttctcttccctccctgcttgatcgcgctgtgggattcctgatgctgtgtgggtctctggctccccctgctgtagaaggggagtactgcccctgggacacagaactgcaaggccagtggcgccaggtacctcccacaggaagaagatttgaggacatttaaaggtacccactttaccccgtgcccaccttctaccccagctccctggcagccatccaaaatttgcctccaagagcatgtctcacagacaaaggtctgtgttttatggaactgtgctgacgggctctgcacacatctcactgggctactctccctggtcccagcctgcccagacagtcaggcgcaaagtaaca

SEQ ID NO: 4402 - DNA, 583 bp, Homo sapiens
  MAP TO CHRX.1; EXPRESSED IN FETAL LIVER, SIGNAL = 0.64; EXPRESSED IN BONE MARROW, SIGNAL = 0.95; EXPRESSED IN ADULT LIVER, SIGNAL =   1; EXPRESSED IN LUNG, SIGNAL = 0.6; SWISSPROT HIT: Q36428, EVALUE 9.60e+00
ttgaaggaaaaatggaagcgtccccaaatagaatttcatgtgatagcctctgggtacttctcctgggaggaagtctttatctgatccagttttatgcacttagatctgaatctcaacaaagagaaacatttgccattttactcatcaatacttcaatgtaatgggacaaagaaaaaaagtttcgaaaagaggttgatggagtactaatccctggcattgtatatgagtttgaattgactttgaaagatgcttttaaaacatgcatggatgatgtagttgaaacttaggttccatttattatttttactgcaactttctttaattctacagagaactgaaactaatgagtcatgtaatagatgaccaagtacttaagcagaatgtgaaatggtactaggtggggatataaaataaaatttgtgacaagctggatgcatttatttttttaagtagatacggaaggtgaaggagtgactggacaggatgaaattaatcagtgacttaatttggttctcttggacctcaccaagggttatatctctattctcatgtacatcttcaggcaaactgacgccagaactca

SEQ ID NO: 4403 - DNA, 562 bp, Homo sapiens
  MAP TO CHR14.1; EXPRESSED IN ADULT LIVER, SIGNAL = 1.4; EXPRESSED IN BONE MARROW, SIGNAL = 0.94; EXPRESSED IN LUNG, SIGNAL = 0.88; EXPRESSED IN FETAL LIVER, SIGNAL =   1; EXPRESSED IN HEART, SIGNAL = 0.67; EST_HUMAN HIT: BI438251.1, EVALUE 0.00e+00; NT HIT: gi14747074, EVALUE 0.00e+00; SWISSPROT HIT: Q9HFR4, EVALUE 4.00e-03
atttctgtcttcccaatgcgaaattttagtttacctacattttccacgcactagtgtcacaacaaaatactaagtcataattgcctctttcccttatagttagaattctgtcattaaaaataataatcctggtttatctaaaagcatggcatttttttttgtctggttacaaacataatgttacctgctttaaaagtgtgtactgcaggatagcttagagagttttccgaccagagtttgttcactgccctcctctctcctacctccctcctctacgcagggaatcacagacacggctcagaccatttatgaaactgcggctcgagaacacgagagcagaggggtgactggtgccgtgggcgaggttctgcgccagattcctccggcagtggtgaaacctctgattgttgccacagaagcaacgtcaaacgtgctgggtggcatgagaaaccaaattaggccagatgtccggcaagacgagtcacagaaatggcgccacggggatgactgatggcttggaactgacagtgtgaagataaggagagtggaaccaggagctcag

SEQ ID NO: 4404 - DNA, 527 bp, Homo sapiens
  MAP TO CHR7.1; EXPRESSED IN HEART, SIGNAL = 0.89; EXPRESSED IN BONE MARROW, SIGNAL = 0.91; EXPRESSED IN FETAL LIVER, SIGNAL = 1.2; EXPRESSED IN LUNG, SIGNAL = 0.84; EST_HUMAN HIT: AL041539.1, EVALUE 3.00e-80; NT HIT: AF156673.1, EVALUE 0.00e+00; SWISSPROT HIT: Q09455, EVALUE 9.00e-04
tcccctcatcccctagattcccccaatccctgcaacccctctctttaccgctgggcgctgggggtgagagccgctccgctttggggacaagcaggggcctggaaggggccaatgtggccgggcctggaggtggccggggcggtgtaggggccggggtcgggggaaggaatgtgcaggggaattcagggactgtctcctgctggggtggagaagggcggagagtcgggttgaaggccgtgggcacagccccaccgcccagtgcccgagatcttaccggggaccctggggaccggaggagggtgctggatacaagtggtggctccagggcttgctccggcttagctgtgcacgggcagaaccgtgaggctactggggctggcccacccccggcatctatcaagaccccatcctgcccctcccaagagtccacaccccttttaggtacaggccccacatccctcattccttgccactctgtcccttgaactggacctgccccttcaccttcatcttctgctcccaaaacc

SEQ ID NO: 4405 - DNA, 504 bp, Homo sapiens
  MAP TO CHR3.1; EXPRESSED IN BONE MARROW, SIGNAL = 0.98; EXPRESSED IN ADULT LIVER, SIGNAL = 1.1; EXPRESSED IN FETAL LIVER, SIGNAL = 0.98; EXPRESSED IN LUNG, SIGNAL = 1.3; EXPRESSED IN HEART, SIGNAL = 1.5; NT HIT: gi14733145, EVALUE 1.00e-112; SWISSPROT HIT: Q92685, EVALUE 1.00e-20; EST_HUMAN HIT: BI199020.1, EVALUE 1.00e-112
tctgagagccttccttgctctgcccagttatgacttggtgaatccacaccttaaagcattgttatgacctgcctcctgagcttctttggccccaggcactggcctgggccggggggtggggaacgtggttttcctgctatttctagtgggaattggggaacctatgaggcctacatccccgtcccacacccctcaatgagtagcatgaaggctggtcattgggaatgagccttggcagctctgctgacatcacaccaatcctcaggtggtgctggggctgcccttcctgctggagaaccccagcggctacctgtcccgctcctttgaccttggccgccagtttctgttccactggacagtgaactggcgcttcctcccagaggcgctcttcctgcatcgagccttccacctggccctgttgactgcccacctccccctgctcctgctgtttgccctctgcaggtggcacaggtgagaaaaggcagtagtgccatgggcagagtt

SEQ ID NO: 4406 - DNA, 502 bp, Homo sapiens
  MAP TO CHR5.1; EXPRESSED IN HEART, SIGNAL = 0.47; EXPRESSED IN BONE MARROW, SIGNAL = 1.2; EXPRESSED IN ADULT LIVER, SIGNAL = 0.92; SWISSPROT HIT: Q44261, EVALUE 9.10e-01; EST_HUMAN HIT: AI768917.1, EVALUE 4.50e-02
aggctttgatgaggtcgatggaatgaagccagctgtaaaggaaagggagtagtctgaaagccccaccctgttctgctcgggaacattactctccccatcctaggagactgggcgccgggctcgcctagccaacaggcacgtgatgatatccctgacaccaggaagacaaaagatacttccacacagggccccctgaagaaaccagagatgtacagtgcctctgggatgggactgggcaggaaggccaagcagctccttgagttaccaggtctttgtctacaagcctatccagtgtctgccaggtgccacagctgatgacagaagatgaaacgcctgcagctctcagacattttctttgcagcacagccctgccctcagcagctctagcttcaggcctcctaggcagggcccactggagcccctttgctccccgcctatggcatagaaggtggtaccttattaactctctttaagcattctaagcaggactgtgcagtgtcag

SEQ ID NO: 4407 - DNA, 562 bp, Homo sapiens
  MAP TO CHRX.1; EXPRESSED IN LUNG, SIGNAL = 3.3; EXPRESSED IN HEART, SIGNAL = 2.5; EXPRESSED IN BONE MARROW, SIGNAL = 1.7; NT HIT: L44140.1, EVALUE 0.00e+00; SWISSPROT HIT: P31150, EVALUE 2.00e-15; EST_HUMAN HIT: AL565619.1, EVALUE 0.00e+00
ttgagacaacctgcaacgacatcaaagacatctacaaacgcatggctggcacggcctttgactttgagaacatgaagcgcaaacagaacgacgtctttggagaagctgagcagtgattgtggccgcccccagcccctgctgccccagcctgtgtctgttctcctcgagggctccagcatcctctgcttcccccaccacgttcccatcacccacctcattgatccactgaccaaatccttaaccctagcgatggcttgggagatggggggttggatagcatcctctttcttggcccttccttatcctaggaaaagagggttcctctccttgtgtgtgtctcttccccccacccctaattcttctgctctgtttgggaagacgtggaggaaaaggtgacttctgcccccaccgctcttacccccactgtagtggcctttggagatgcccccacctcccccccaccaactctcgcgtgttggagagaaggggccctcccagcacaaagttgcattcctcccccctaatttattctaatttattaactttgacccaccctttctga

SEQ ID NO: 4408 - DNA, 595 bp, Homo sapiens
  MAP TO CHR7.1; EXPRESSED IN HEART, SIGNAL = 0.61; EXPRESSED IN BONE MARROW, SIGNAL = 0.51; EXPRESSED IN LUNG, SIGNAL = 0.63; NT HIT: AL163206.2, EVALUE 3.60e-02; EST_HUMAN HIT: AL600225.1, EVALUE 9.00e-81
tgtcgtatgtgcagggaatgcagaaataactcttctaaggccctgatgtattttagtctcttttttagcaaactgctatttcttttttactcttgattcttattgtttgatagggagtttttttttttttttttttttttaaattttccaagtttagacctatttgtgagtgctactgattgggaagtgctaacgacagaccagcccttcatatcaaaataggcatattgcgtagagtggccatttttccctttcacgtggtgctccttgtaagcagcctgccttgatttgagaggagggagttttttcctccacagtttggtgggtgggaagacatggtaacagttacttgttcttgctagtattcttgctcacatccctcttttttatagttgactagtcagtggttatttaacacctgttaattacttgacactgcaaggggaaaaaaggaaatagtgtatgccttcaagggtcttatttttgacaagcatttatattgcactacagtacagcatatacttaaatattaatattgagtgtaaaataccaagttagaggtgggtcttttaagtgagatttgccaggagcaaag

SEQ ID NO: 4409 - DNA, 559 bp, Homo sapiens
  MAP TO CHR11.1; EXPRESSED IN HEART, SIGNAL = 0.96; EXPRESSED IN BONE MARROW, SIGNAL = 0.73; SWISSPROT HIT: Q9QB84, EVALUE 1.40e+00; EST_HUMAN HIT: BI561514.1, EVALUE 0.00e+00; NT HIT: AF285600.1, EVALUE 1.00e-125
ttcaaggagtttccccttctctattcgagatatacattttctttaacaactcgagagctttcaaagcataaatgtcattctttcattataacaataataggtttaaattctcagcttatttcaagtatatattttatctgtgtaatgtgtttgcaatcactgtaaacctctgtcgcaggaactctcttttttgtattagaaagttttcaatagcattggcttctttgaagagttcatctatctcatcaatgtaagatgcatctactgctgctctctcactaataggaaaaaaagttgtatattaaactaagtagatataaacaacatcattatgttgttcttcattacacaatatttgttaactatttcatttaaatggctttatgtgccacagaacttcattaatttactaatactcttcagaaaaaaaaattagtcccacaaatatttttgactactcaaaaaggtctcctgacacaacaggaagtgtatcttatacattataacactaatattcaattacatacattatttttacagccacacaaaccactatcca

SEQ ID NO: 4410 - DNA, 553 bp, Homo sapiens
  MAP TO CHR19.1; EXPRESSED IN LUNG, SIGNAL = 0.84; EXPRESSED IN HEART, SIGNAL = 0.76; EXPRESSED IN BONE MARROW, SIGNAL = 0.38; SWISSPROT HIT: P16373, EVALUE 5.00e-52; EST_HUMAN HIT: AI700612.1, EVALUE 1.00e-88; NT HIT: gi4507974, EVALUE 1.00e-41
actcattccagtgcgaaaccctttgtatgtaaggagtgtaggaagacctttagatatcattaccagcttactgaacattaccgaattcatactggtgagaaaccctttgaatgtaaagaatgcggaaaggcctttggtcttctgacacagcttgctcaacatcagatcattcatactggtgagaagccatttaaatgtaaggagtgtgggaaggcctttaatcgtggctcaaaccttgttcaacctcagagtattcatactggtgagaaaccctatgaatgtaaggagtgtgggaaggcttttagacttcacctacaactttctctgcatcaaaaacttgtacaggtgagaaaccctttgaatgtaagaaatgtgggacagccttcagacatcagtagcaacttactgaacatcagaaaattcatacttgggtgaaaacctttgaatgtaaggaatgtgggaaggcctttcaatatcattaccaatttcatggacattatagatttcatattcgtgagaacccttatgaatgtcaaggatgtgggaaatgctt

SEQ ID NO: 4411 - DNA, 576 bp, Homo sapiens
  MAP TO CHRX.1; EXPRESSED IN FETAL LIVER, SIGNAL = 0.47; EXPRESSED IN BONE MARROW, SIGNAL = 0.47; EXPRESSED IN HEART, SIGNAL = 0.62; NT HIT: gi14758352, EVALUE 4.00e-76; SWISSPROT HIT: P17600, EVALUE 7.00e-32; EST_HUMAN HIT: AL529573.1, EVALUE 3.00e-71
aaacaggagacccatgatcgtgcctgcttgagcgccttggcatgtccacctaatttttgtgtactcgcctcacctgtgtgtcatgtatacatgctcccccaggcacccccactccccacagctgccctatcctgaccaggccctgatccttgcccgcacttccacaggtcaaggttgacaaccagcatgacttccaggacatcgcaagtgtcgtggcactgaccaagacgtatgccactgccgagcccttcatcgatgccaaatatgacgtgcgtgtccagaagattgggcagaactacaaggcctacatgtgagtggagagaccaaagccctggaaggggtcccctgccttgcctcatgcagctgaggcacccctgagcttctgtccccttgtcccccaggaggacgtcagtgtcagggaactggaagaccaatactggctctgcgatgctggagcaaattgccatgtctgacaggtgggcagcccgaactcagggtgtgaggggaagcgggggtgggagcacgacagctcaggtgagagactgacaggcttccccaccctttgtcttggcagat

SEQ ID NO: 4412 - DNA, 528 bp, Homo sapiens
  MAP TO CHR22.1; EXPRESSED IN BONE MARROW, SIGNAL = 0.58; EXPRESSED IN PLACENTA, SIGNAL = 1.3; EXPRESSED IN FETAL LIVER, SIGNAL = 0.68; EXPRESSED IN LUNG, SIGNAL =   1; EXPRESSED IN HEART, SIGNAL = 0.92; SWISSPROT HIT: P31327, EVALUE 7.40e-01; EST_HUMAN HIT: BI223855.1, EVALUE 3.00e-99; NT HIT: gi14779725, EVALUE 2.00e-99
agtccaactgtcccttgtgggcactgcgaccgtggccttgttcctgattagcctggtgggtagcgctgcagggctgggggatgggctgggggcagggcagccctgagaacctcccacctgtctccaggtgccgtactcctacgtggagcccgggacccacgggcgcctctggaccggggcccaccgcctgtttggtgccgtggagcacctacagctggccaactcctacggcctcttccgccgcatgactgggcttggtggacggcctgaggtggtgctggagggcagttacgacggccaccactggacggtgagccctcccagggcgggcagggtggtggggcccaggtcagcgggcccagctgacctcggcctgcctggcaggagatcgagttcatgtacaagcctgggaacctgagccggccgcccccggttgtggtgccccaccagccacgcctggactggcagatgtggtttgcagccctgggcccacacacgcacagcccgtggttcacaagcctggtcttg

SEQ ID NO: 4413 - DNA, 512 bp, Homo sapiens
  MAP TO CHRX.1; EXPRESSED IN BONE MARROW, SIGNAL = 4.2; EXPRESSED IN HEART, SIGNAL = 3.8; EXPRESSED IN FETAL LIVER, SIGNAL = 3.8; EXPRESSED IN PLACENTA, SIGNAL = 6.5; EXPRESSED IN LUNG, SIGNAL = 2.5; NT HIT: L44140.1, EVALUE 0.00e+00; EST_HUMAN HIT: BF893178.1, EVALUE 1.00e-79; SWISSPROT HIT: P21333, EVALUE 1.00e-24
tcctgtgtgagccttgactgggttttaggtccctgttactgagacctggttcatctccatttataataaagaccgctggatgctacctccccgaggaccccacgcagcaggcttctgtgactggaggaacctattagcattctcttgtcgttttcactagtcccaaaaacccactcttgtctgactcttgggtggcttgatcacctagccgccatgtaacccaagacccctggggaccgccacgtttagatgggacactgtcttatggggaagacgttggcacacgggtgcacccctggtggggctccctcacctggcccgtaggcacgggctttcttcgggttcagtttgggccgcaagggagcccctggcttcagcttggccttggggaactgggacaggtaggtcatgacagagtgctcgtccacgttggggtccacaatctcctcgggggtgatcacctgtcacaggcagaaaacaggagccatcgggcctccgagtctctcccaact

SEQ ID NO: 4414 - DNA, 528 bp, Homo sapiens
  MAP TO CHR7.1; EXPRESSED IN ADULT LIVER, SIGNAL = 0.52; EXPRESSED IN BONE MARROW, SIGNAL = 0.36; SWISSPROT HIT: P91620, EVALUE 4.90e+00; NT HIT: AL021127.2, EVALUE 3.20e-02; EST_HUMAN HIT: BE182897.1, EVALUE 8.00e-04
ttgcccttataacactccgctttctaccttgtgttatggtgatatgtacatgtggccaggggccggatacccagcaggcagtcagttagtgctcattggatgaatgaataagttgatgtcttatttcttctcctaactgattcctgtggttagattctgcatcttgcctttatatctgcacccatgtctagtgcactattttgtgccagttagggcgtaagctctgggtaaatatttgttggatgaataaatgaatacccaaaagggcttcttctggaggaaggccaggaaaacattcctttgatgaaaataatttgtaaagaggcagggagctactggaaggcaaatgtctggggaggagagacaggcctctaggttgaatagaagtagtggtggtgaggttgtctccaaagaaagcaggggaggaagtgtgtgaataataaaagaggaaattgtccaccaggaaagcatctccagctggctgtgataaatctgcattttgtaccagcaagtagggagagtgcctcg

SEQ ID NO: 4415 - DNA, 584 bp, Homo sapiens
  MAP TO CHR3.1; EXPRESSED IN FETAL LIVER, SIGNAL = 0.49; EXPRESSED IN HEART, SIGNAL = 0.46; EXPRESSED IN ADULT LIVER, SIGNAL = 0.85; EXPRESSED IN BONE MARROW, SIGNAL = 0.55; NT HIT: gi13649019, EVALUE 8.00e-34; EST_HUMAN HIT: AA059362.1, EVALUE 1.00e-95; SWISSPROT HIT: P27692, EVALUE 1.90e+00
ggtagcccagctgctcataggcacggatgcctgcaggagcagggtcaagaagtcaggagcttgtcccagtttacccaccagctcccgcccattccaggctggtgtgaggctcacccacgacccctgaggacttgagtagcaggtggatggagtagctggagagcaaggcgacagctgtcaacaggaacctggggacacatgggaagatggaagaaaaagaggccactggggggctaccgtggctggcagagggtgaggggctctgggaggcctgggggtggagggtctgtgacctgggtgtctggactcccaacaggtatggatgccagctcagcaggccccaggggtgatgaacaccaccccctttgatccagggtgcgacacaccccagaaggggccctctgggtcaagagtgtccctgtgactgccctctgagcacgtcctcctcttgagtccttgaaacaaacatgttttccattctggcttcagggcagagcccccagccaaaggacacgtgtgcccacacaaggcctggccgtggggcttggccatcacgtgtaaggtgccaaaaggacagtctctgg

SEQ ID NO: 4416 - DNA, 551 bp, Homo sapiens
  MAP TO CHR11.1; EXPRESSED IN BONE MARROW, SIGNAL = 0.51; EXPRESSED IN HEART, SIGNAL = 0.45; EXPRESSED IN FETAL LIVER, SIGNAL = 0.46; EXPRESSED IN LUNG, SIGNAL = 0.59; NT HIT: U48254.1, EVALUE 0.00e+00; EST_HUMAN HIT: BE939178.1, EVALUE 0.00e+00; SWISSPROT HIT: P03255, EVALUE 3.50e-01
ttcccacacattccttaggctagaaatctgacaggcctggtccagccctgccaaactgggattacaggaaggtaccattgggcaccaggtaaccacttttaatttcatgcggcctttaggaacctgctgactctacggagatggatgataaggcagcagtaggcgtctccaagcccctcccttccgtgcctcccagcattggcaaatcgaacgtggacagacgtcaggcagaaattggagaggggtcagtgcgccggcgaatctatgacaatccatacttcgagccccaatatggctttccccctgaggaagatgaggatgagcagggggaaagttacactccccgattcagccaacatgtcagtggcaatcggtgagagcctgggcatcccttctagatgggtgactgaaggacctcacctcagtggaccctgggcaagggttaatcagaaagtctgagaagtctgaatgctctcgtggtcctgccatccccagaggatggtgttctgatccaggggcttaggaattacgggaagggagtggcaactgta

SEQ ID NO: 4417 - DNA, 543 bp, Homo sapiens
  MAP TO CHR15.1; EXPRESSED IN FETAL LIVER, SIGNAL = 0.78; EXPRESSED IN HEART, SIGNAL = 0.83; EXPRESSED IN ADULT LIVER, SIGNAL = 1.1; EXPRESSED IN BONE MARROW, SIGNAL = 0.9; SWISSPROT HIT: Q9UPM8, EVALUE 1.00e-31; NT HIT: AF155156.2, EVALUE 1.00e-104; EST_HUMAN HIT: BE816687.1, EVALUE 1.00e-05
agcacccaacatagtgcctccatccagagaagaggtctaaaaaatagttggtgaattaacaacttgaattaacatttcacaaaacatttacctaatgaaatctaatagtgataagtttacagaaaattccagctgagcagaatgagtatccatcatatgataactaataaaaccagtaagatttccttctgtaaaaggtttttctatctgcacactatattgaaagcttttggtgctttctgcttccattacaggcaaacagcatccaggttgctcagtcacctgcaaatagaagtaataaaagtgttgaagaaggaagggatcaatacagactattacatgactaccaattttctatttaattgaagtggcacaaatcatactaatatgggaagttaataacaaactacattatgaagatgactggcaacttcacttgagaaaaattcactagaacagataatgaaataataattgtacacaggtcaaaattatgttaacaaatggcattacagttaaaactgtaaatgtcctggctggtcc

SEQ ID NO: 4418 - DNA, 524 bp, Homo sapiens
  MAP TO CHR5.1; EXPRESSED IN FETAL LIVER, SIGNAL = 0.64; EXPRESSED IN LUNG, SIGNAL = 0.71; EXPRESSED IN BONE MARROW, SIGNAL = 0.83; EXPRESSED IN ADULT LIVER, SIGNAL = 0.74; SWISSPROT HIT: Q13591, EVALUE 8.00e-36; NT HIT: gi16159220, EVALUE 1.00e-117; EST_HUMAN HIT: AA195334.1, EVALUE 1.00e-76
tggtttaagcagggtccaaggggaaaagtcaattggtgtgtctccatacaggtggtggagaatagaggccacatggctaagagacaagtatggacattgtggctcctgggacataagttctcccagccacctgaagtcgtaaggactaaagatgtttcttattctcacatagggagaaaattcagtttcaaaggaaaccaccacagcagagaaagggcatcaaaatactccctacaagtgttaaggaaaaccaggcacttagcagaaatattaaaattcacttaccttgatggcctccaccgagtcgtacttgtccagtttgttgatgtggttggttatgctggtattaaggggggcaggtgagacggggtggatgacagtcgcatcgtgggattgctgctggtaccgctggcagtaagtatagacgagcagggtgaggaggcagccgaggatggagctgctcagccccacggcgatcatgtggaacatgttgaactctagggagacatgagcaaagtgatgcc

SEQ ID NO: 4419 - DNA, 513 bp, Homo sapiens
  MAP TO CHRX.1; EXPRESSED IN ADULT LIVER, SIGNAL = 1.1; EXPRESSED IN FETAL LIVER, SIGNAL = 1.3; EXPRESSED IN LUNG, SIGNAL = 2.7; EXPRESSED IN HEART, SIGNAL = 0.74; EXPRESSED IN BONE MARROW, SIGNAL = 1.2; NT HIT: L44140.1, EVALUE 0.00e+00; EST_HUMAN HIT: AL537792.1, EVALUE 0.00e+00; SWISSPROT HIT: O97555, EVALUE 4.00e-28
ctatctgagcggcagggtagggccatgcattcaggaggggcagtagtgatggctccgaggaacgtcttgtctgccagagctgcctgcccttgctgtgagcgcagccccacgtctacctaagggagggatgtgacaggggcgaggacttctggtgccttctcaggtggcccgctgcaagcagctgatctgtgaccccagctacatcccggaccgtgtgcggaaggctggccaggttatccgcatcatctgtatccttagccaccccatcaagaacaccaacgacgccaactcctgccaaataatcatcccccagaaccaggtcaacaggaagtcaggtaggccgggcgctggtacagcttcctctagggtgttctctttggggttactctttttctccccatcagtgtgggagctccctgccttacctctctggaaaaaaatttgagccacattgtagccaccacaacttggagccctagggtttgggtggcctggactctttccctctgggag

SEQ ID NO: 4420 - DNA, 551 bp, Homo sapiens
  MAP TO CHR2.1; EXPRESSED IN BONE MARROW, SIGNAL = 0.45; EXPRESSED IN HEART, SIGNAL = 0.93; EXPRESSED IN FETAL LIVER, SIGNAL = 0.51; EXPRESSED IN LUNG, SIGNAL = 0.82; SWISSPROT HIT: Q05623, EVALUE 1.80e+00; NT HIT: AF285598.1, EVALUE 0.00e+00; EST_HUMAN HIT: BI825424.1, EVALUE 1.00e-129
ggttagctgcaactggaaggtcgcctcattgcattccatctcctgctgttccttgagttccgtcaggtttgaggccaagaccagcgcagctgatctgtgcagtttggcaaagccttgcagccactgcaccctgcggttttgtaactgcccctgcctgtgggcaaagcgcacacccaaggccaggctgccccaggtgcaggcctctttgacctcgctgggcacctcgctgtcctccaggatggccctgagcttgtcttccacctcctcccaggataaggatatattctcgaagtagaactcggggcctttcgtgtgcctggccattttctcgatgatgaaggccaccacgtttccgtgccggaacccactactggggtcctcaggtctcaaggccatgatcgcctaggggcttaacggtttcactagccctgtgtggatggagcagccaataggtttctttcctcctccttagcccctcccctcatctgtcttctccgccctcccacctctgacaagaccctcctaatgaccctctgaccggcttgtcctac

SEQ ID NO: 4421 - DNA, 555 bp, Homo sapiens
  MAP TO CHR14.1; EXPRESSED IN BONE MARROW, SIGNAL = 1.6; EXPRESSED IN HEART, SIGNAL = 2.3; EXPRESSED IN ADULT LIVER, SIGNAL = 2.6; EXPRESSED IN FETAL LIVER, SIGNAL =   2; EXPRESSED IN LUNG, SIGNAL = 1.7; EST_HUMAN HIT: BG675897.1, EVALUE 0.00e+00; SWISSPROT HIT: Q9ER30, EVALUE 1.00e-09; NT HIT: AF111170.3, EVALUE 0.00e+00
tcctctagggtcatggttggaattcggaccagatagagggctcgccccagaacatgcctcttgtttcgtggggtgattggcagcccctgcctcttgcactccgcctcggcccagttcaggacggcctcgaagaccaccgcctctttggtgttgagggcctcccgagtgacaatgatctccagcgtctgccggtctatctcacagaagccttcggaccgtagggccatctcggcctgtgcgtcaatgacctcccagcagcgctgcgtcagctcgggctcctcaaacagccggctctgggacagcaggacgcaggcgttcttggcttccaaacttgtctccagaaagttgacacaggcttttgccaatgctgggacgatgtacttcttagcagcatacagagtggccagcaccgtgtcggcttccagatcgatctcatcactgtacatgtacctaggcgaggcagggcccgcgtcaggggctggctcccaagcacccatcgcggggctgggcctgggagaggagtccatcagctcctgtgtgcttcccttcagaagc

SEQ ID NO: 4422 - DNA, 585 bp, Homo sapiens
  MAP TO CHR7.1; EXPRESSED IN HEART, SIGNAL = 0.56; EXPRESSED IN BONE MARROW, SIGNAL = 0.65; EXPRESSED IN FETAL LIVER, SIGNAL = 0.75; EXPRESSED IN LUNG, SIGNAL = 0.58; EST_HUMAN HIT: AA921311.1, EVALUE 5.30e-02; SWISSPROT HIT: Q9PL34, EVALUE 1.90e+00; NT HIT: AF148624.1, EVALUE 5.60e-01
ctgggctcctcactgtaagcagaggagtggacttagtgaccatctttcagctttaagactgaataacattttcccttccattgggaaacttatttatatcccagtagtcatccccacactaagtttttccgatatggcgtccagattttatttcccctaataattacaccccctgttttcaggctaggcattctccctcctttcttgtgtttacacctttcaaatatttgcagattgttatcctgtcaccctcttagtcaccgcttagctgagctgtacaaatttagcaccttttatcttccctttaaaggcaggtctccacgcccctgagtcattttcccctgctctctttaagtgtgctccagttttctgcatttccatgtggccacataactttcctagaattgaacataggtcatgagtgagaattgttttcctcctttggcatgtcagaagctaaacatttctgctatgctccagcctcaggtctctctgacatagctggtcagtgttgaccacttcaactctgtagttaaaccacgttctctaaatgtgccaatttaaagaccagtggggtaaaagggt

SEQ ID NO: 4423 - DNA, 600 bp, Homo sapiens
  MAP TO CHR3.1; EXPRESSED IN LUNG, SIGNAL = 2.2; EXPRESSED IN HEART, SIGNAL = 1.8; EXPRESSED IN ADULT LIVER, SIGNAL = 2.3; EXPRESSED IN BONE MARROW, SIGNAL = 2.8; NT HIT: AF065478.1, EVALUE 0.00e+00; EST_HUMAN HIT: BI458810.1, EVALUE 1.00e-95; SWISSPROT HIT: P46976, EVALUE 1.00e-28
gcctacaggtctccatcaccatatatatatatgtctttcttttctaccctcaaagccacactcaccagagtatctgcatccatgaatacacattttgaatactgtgtaagcgaccagcagtggagctttgtcagcgtgacacccaactctggcctcttcattaaggttagatgagcagaatcgccactgtccaagacatctaccatgatgacttcatcaaagactgtctctaaaacttttctgtcaaaataaaatccagaataccacacttagcatcttttcagaacaagtgacccatctgctgtaagactgatgctttattaccttctccatcaattactagaacaatgtattgctttggtagaatatgtacccttaaatctgttctaattttactccaggacaaactgtgtttatttgcatgtccagttaacgtcactaaagtagtaagaactgcttatggtgaggatgaaatgctcatcttaaaacgttattatagaagacattttctgggtttttgtattttattgtatcactgaatagcaggcaggttgtggaaatagcttgcaaaaatgtgtaagggctctgttcatcaggttg

SEQ ID NO: 4424 - DNA, 539 bp, Homo sapiens
  MAP TO CHR1.1; EXPRESSED IN HEART, SIGNAL = 1.3; EXPRESSED IN BONE MARROW, SIGNAL = 0.55; SWISSPROT HIT: P08001, EVALUE 7.70e-01; EST_HUMAN HIT: BG911880.1, EVALUE 0.00e+00; NT HIT: gi14726897, EVALUE 1.00e-107
gggaagatgagaaccccttcctgggaggtcatcataaggatagtacggactaacatatgcactcagctcagtgccccagcatatacaggtcctctgtgaatggcatggtgagcatttatctgggcatccaactgtacctccactggcatgtcttgcacacccttggaccaaagtccgagaagagtttttgactggcaagggcgggggacagtcctcactctcgccctgaggggtggctgctcccaggctggcgacagtctcataggtcttgttgctgatgtccagcctcccactggcccagtgagcctgggccgggagcttcagcaagcagcgctgccagagcaaaagattgaggatgaggacagcctggttcctccggtgtagccctgtccccccgcctcaccgcccccgccaacacacaccaggcccaatctggctctttccttctgccatccagaggcctgagggacagggctgggacccaccttctcttcctcatcctcctcactgtcagagccaggctctgtggaaattaccca

SEQ ID NO: 4425 - DNA, 545 bp, Homo sapiens
  MAP TO CHR17.1; EXPRESSED IN LUNG, SIGNAL = 1.6; EXPRESSED IN HEART, SIGNAL = 2.3; EXPRESSED IN ADULT LIVER, SIGNAL = 9.3; EXPRESSED IN BONE MARROW, SIGNAL =   3; EXPRESSED IN PLACENTA, SIGNAL = 4.4; EXPRESSED IN FETAL LIVER, SIGNAL = 4.9; NT HIT: gi13652907, EVALUE 0.00e+00; SWISSPROT HIT: Q9PR99, EVALUE 7.80e-01; EST_HUMAN HIT: AW664268.1, EVALUE 0.00e+00
tcaggactatccccctaccctttcacttgaccccaagggaatagggtcctgccctgggcccattccctgggtcttgctctcttgttgcctctctggccctgagcctgatcagtgtgagacagaactcagcattactgtccaccatgccctgcagcgaacagaccaggtgctgaagagtgatgcctatgggctctgacacccacaaatcctcgtggataacgggaagcccctcccaccccacaagtccctggagcctgagccagagtcagatcctgtactgcagccactcgaatcgccaaatcatttgcgcctgccaaagatggacttcttgccagggttcttgtcgcccacacttaaaccaatgaggagccgggctttctcctcctcttcctgctgttgcatgttcaggtccgatttagtttctagctttccccggacctcagagcctgttgcagacttcagccttagcttctctttgattacctggcagattggagaggagtaaaagaaaatgtaaatattagtgggcaggcagaataaatcaa

SEQ ID NO: 4426 - DNA, 576 bp, Homo sapiens
  MAP TO CHR19.1; EXPRESSED IN PLACENTA, SIGNAL =   2; EXPRESSED IN FETAL LIVER, SIGNAL = 1.3; EXPRESSED IN LUNG, SIGNAL = 0.86; EXPRESSED IN HEART, SIGNAL = 0.64; EXPRESSED IN BONE MARROW, SIGNAL = 2.1; SWISSPROT HIT: P90747, EVALUE 3.00e-14; NT HIT: gi9966896, EVALUE 3.00e-95; EST_HUMAN HIT: BF822061.1, EVALUE 1.00e-92
acacaggaggtgactcagggaggagctgacgggccaggcacatggtgaaggcagggggagcctgggcccgtacctgctggtgagtgaggtgtcccagctccttgtaccccagcgccaggacgcgggctccttcccgggagatctcggtgtggatgtggtggtagtcgggcgggcactgggagaactgcagggaatgcagggggatgtcacgggctgccccgcgcccccaccccttgccccaggctggggccagctcaccatggagtgcagagtttcgggggcccccttcacggccgcgatgtagcagaggtcggtggagcccagcttctcatacgaggcaagcacggacattcgcttcagggcactggcaaaatgaaagcgctggtgaattttcagcccctgagttttaatacttcgggggaatactttctcatctggaaacaaataagtacgagtcctgaggggctttgctccaaagaggcagccaagcccctacctctcaccccggcctcccccacctccctcctgcctcccccagggcctgatcggggctctgggctagagcaggtgttggtc

SEQ ID NO: 4427 - DNA, 568 bp, Homo sapiens
  MAP TO CHR6.1; EXPRESSED IN LUNG, SIGNAL = 1.9; EXPRESSED IN ADULT LIVER, SIGNAL =  13; EXPRESSED IN BONE MARROW, SIGNAL = 1.9; EST_HUMAN HIT: BI916324.1, EVALUE 0.00e+00; SWISSPROT HIT: P28161, EVALUE 6.00e-76; NT HIT: AB025799.1, EVALUE 0.00e+00
tggtttctctcaaggatgccatacgcgatgaaatccacaagtgtgatcttgtccccaagaaacaatagctgcttccccagaaactgtgagtagagcttcagcattgcagggagtgcctccaggtattctggcttcagtttcttaaaatctgggttgtagcagagtctggccagctgcacgtggttgtccacaagctggttctccaaaatgtcttcccaaatcttctccccttctgtctccccacacaggttgtgcttgtaggcaatgcagcccaggatggccttgctctgggtgatcttgtgagccccatcaatcaagtagggcagattgggaaagtccaggcccagcttgaatttttcattcagccactggcttctgtcatagtcaggagcgtcccccatcatgtacttcttttcctcatagcttaagtctgtgtattgcaggagcaggcagacggcgtgggccagccctcagatgtcccagtaccccagtgtcacgggcatggtgctggtcggtgtggattctgcagaaaggcccatttactctatcgatgtggtgtgttacgtca

SEQ ID NO: 4428 - DNA, 515 bp, Homo sapiens
  MAP TO CHR6.1; EXPRESSED IN PLACENTA, SIGNAL = 1.5; EXPRESSED IN FETAL LIVER, SIGNAL = 1.2; EXPRESSED IN LUNG, SIGNAL = 2.1; EXPRESSED IN HEART, SIGNAL = 3.2; EXPRESSED IN ADULT LIVER, SIGNAL = 3.5; EXPRESSED IN BONE MARROW, SIGNAL = 1.1; NT HIT: J00319.1, EVALUE 2.00e-96; EST_HUMAN HIT: AU138351.1, EVALUE 4.00e-70
cgccttgatcttggactttccagccccgacaactgtgaggaaatacatttctgttcttcttaaattacccagtcttgggtattttattatagcagcacaaatgggccacaatctgccatagtacctgtcatgtaggaagtattctgaaactatttatggagtgggtttcattaaaagttactctaatctttgaaatagaaaaatatcttacttttatgatcaatgttttgttacaaactgtctcaattatagaaacaggcttttgcatacttacctggcagtggagataccatgatcacgaaggtggttttcccagggcgaggcttatccatcgcactccggatatgctgacccctgcgattttcccaaatgtgggaaactcgactgcataatttgtggtagtgggggactgtgcttgcgctttcccctgaaaaaaaaaaaagcaagaaaagaaacaggcttttgctgaggatccactcctgcttcccctgttgggccattcctgttgtgttgtg

SEQ ID NO: 4429 - DNA, 597 bp, Homo sapiens
  MAP TO CHR19.1; EXPRESSED IN HEART, SIGNAL = 0.83; EXPRESSED IN BONE MARROW, SIGNAL = 0.46; EXPRESSED IN FETAL LIVER, SIGNAL = 0.47; EXPRESSED IN LUNG, SIGNAL = 0.68; EST_HUMAN HIT: AL520491.1, EVALUE 0.00e+00; NT HIT: gi14763279, EVALUE 0.00e+00; SWISSPROT HIT: Q14258, EVALUE 5.00e-05
gggtacctgaggggaatagctgggaacctgaggagtatctggggggtacagctaggaacctggggagtgtctctgcagggagcagctgtggtgtaaggagcaccttgggggctggccctttgtggaagggcatctgtggcccagttctatccagttcccctgcccacccctcctgccctgcgccacaggggacacgctgatcgacggcggggagcattactgggaggtgcgctacgagccggacagcaaggcgttcggcgtgggcgtggcctaccgcagcctgggccgcttcgagcaactgggcaagacggccgcctcctggtgcctgcacgtcaacaattggctgcaggtcagcttcacggccaagcacgccaacaaggtcaaggtgctggacgcccccgtgcccgactgcctgggtgtgcactgtgacttccaccaaggtgaccccaagccccagctgccgtctctggctgcccctgcctgagtcccctccgtctgcccccatcccacttctgaccggtcccactgtcactctgccccccgaccccaggcctcctgtccttctacaatgcccgcaccaaacaagtgctgcacact

SEQ ID NO: 4430 - DNA, 553 bp, Homo sapiens
  MAP TO CHR5.1; EXPRESSED IN HEART, SIGNAL =  18; EXPRESSED IN ADULT LIVER, SIGNAL =  68; EXPRESSED IN PLACENTA, SIGNAL =  47; EXPRESSED IN LUNG, SIGNAL =  19; EXPRESSED IN BONE MARROW, SIGNAL = 6.4; NT HIT: gi14732990, EVALUE 0.00e+00; SWISSPROT HIT: P45634, EVALUE 1.00e-103; EST_HUMAN HIT: BE277306.1, EVALUE 0.00e+00
cgtacccaaagtctcgcttctgccgaggtgtccctgatgccaagattcgcatttttgacctggggcggaaaaaggcaaaagtggatgagtttccactttgtggccacatggtgtcagatgaatatgagcagctgtcctctgaagccctggaggctgcccgaatttgtgccaataagtacatggtaaaaagttgtggcaaagatggcttccatatccgggtgcggctccactccttccacgtcatccgcatcaacaagatgttgtcctgtgctggggctgacaggctccaaacaggcatgcgaggtgcctttggaaagccccagggcactttggccagggttcacactggccaagttatcatgtccatccgcaccaagctgcagaacaaggagcatgtgattgaggccctgggcagggccaagttcaagtttcctggccgccagaagatccacatctcaaagaagtggggcttcaccaagttcaatgctgatgaatttgaagacatggtggctgaaaagcggctcatcccagatggctgtggggtcaagtacat

SEQ ID NO: 4431 - DNA, 580 bp, Homo sapiens
  MAP TO CHR14.1; EXPRESSED IN HEART, SIGNAL = 0.75; EXPRESSED IN BONE MARROW, SIGNAL = 0.82; NT HIT: AJ012199.2, EVALUE 1.40e-01; SWISSPROT HIT: P05512, EVALUE 3.20e+00; EST_HUMAN HIT: BG502226.1, EVALUE 0.00e+00
gcctttgtcttcactttggctcagtttttaatttaattttttatttcagagtttaacttttgccaatagttttcacttttgctaatagttgttgcattataaaatttttttacactaaattaatatggtagtggttaatttgaattgacttttaatgcattataccaaatggggagatagtgattatacatattgtaatgttgaatactgtgtaatttatgttcatttactttaatattttggcatatttttgatgttttgtgttttagcacaaggctttcactgaagtgtttctagatgattcacatagtcctgcaaattgtcggatatcagtacaagttgccacaccagcattaaacctttctgttcgcttcccaatacctgatcttcgatctgatcaagaaagaggaccatggtttaagaagtcacttcagaaggagatcctttatttagccttcacagatctagaatttaagactgaatttataggaggatcaaccccagaacaaattaaattggaacttacctttagagaactaattggtaagattgaatgtgcctgtaaaagaaccatcctaga

SEQ ID NO: 4432 - DNA, 596 bp, Homo sapiens
  MAP TO CHR12.1; EXPRESSED IN LUNG, SIGNAL = 1.2; EXPRESSED IN HEART, SIGNAL = 1.2; EXPRESSED IN BONE MARROW, SIGNAL = 0.8; NT HIT: AL163246.2, EVALUE 1.00e-114; SWISSPROT HIT: P23074, EVALUE 6.00e-14; EST_HUMAN HIT: AA984295.1, EVALUE 1.00e-76
tggcatgcaaatgtctcatcaagttgtgtgtgtttgctatttctcgctcactggatccaatcagcataatgtcatcaatgtaatggaccagtatgatatcttgtggaagggaaaaacgatcaagatctctgccaaccaaataatgacacaaagccagagagttgatatacccctgaggcaggacagtgaaggtatattgctggccttgccagctgaaggcaaattgcttctcgtgggccttatggacaggaatggagacaaaggcacttgccaaatcaatggctgcataccaggtaccaagagacgtgttaatttgttcaagcaatggaaccacatctggtacaggtacagcagctgtaactggagtcatcacttagttaagcttacagtaatccactgtcattctccaagatccatctgtcttctgcataggccaaataggagagttaaatggggatgtggtgggaatcaccacccccgcatctttcaagtccttgttggtggcactaatctctgcagtccctccagggatgcaatgttgtatttgatttaccatttttctaggtagaggcagctctaacgacttccatttggcc

SEQ ID NO: 4433 - DNA, 599 bp, Homo sapiens
  MAP TO CHR19.1; EXPRESSED IN BONE MARROW, SIGNAL = 1.1; EXPRESSED IN LUNG, SIGNAL = 0.67; EXPRESSED IN HEART, SIGNAL = 0.79; SWISSPROT HIT: P48634, EVALUE 2.30e-01; EST_HUMAN HIT: AA344402.1, EVALUE 1.00e-125; NT HIT: gi11427371, EVALUE 1.00e-125
ctttctcccattgctcgaagaccccatcgggtctcttcttgatttcagaccctggccggctcctgtgggaagtttgccccctttgaaattaaagagcacatggtcctggcccctcggcgtcggaccgctttccatccagacctctgcagtcagctggaccagctcctccagcagcagagcggcgagttctccttcttgaaagacctcaaaggccggcagcccctgaggtccggacccacgcacgtttccacccggaatgcagatatttttaacaggtcagagcctgaggaggtcggccttcacccactagtgatgctggaggccagcatcctgaaccctggggtccccggggtgggagctctgggtccttctgttgcttgcttcctagtgccctcgggccctgggcttcggtgctggctcaggcctctctccacctggccttcctgtaagctcctgaagtcttcctctccctgtcttcccagctcctcgtggaggaatcttatttccctgctggtctccagtgaaggataccccccaacaccccgctcttgcaaatctcattccacagaacctcccttgctaaaaatgctctggggctg

SEQ ID NO: 4434 - DNA, 593 bp, Homo sapiens
  MAP TO CHR19.1; EXPRESSED IN BONE MARROW, SIGNAL =   4; EXPRESSED IN HEART, SIGNAL = 3.9; SWISSPROT HIT: P17008, EVALUE 3.00e-30; NT HIT: gi14591912, EVALUE 1.00e-114; EST_HUMAN HIT: AW001940.1, EVALUE 0.00e+00
tgtagacatccgtgtccgtgtaaagggtggtggtcacgtggcccagatttatggtgagtcccaggaactgggcgcatggaggaggtggctctgggagggaggccttcacagcgctcctgtaccctttaattgtgtgtctttctcacagctatccgtcagtccatctccaaagccctggtggcctattaccagaaatgtgagtgagcatgggtccttcccatgaggtagatgggtgtgtggggatcaagtcaaggactctgtgtgattatctaaatcctcgtccctgctcttcttgccagatgtggatgaggcttccaagaaggagatcaaagacatcctcatccagtatgaccggaccctgctggtagctgaccctcgtcgctgcgagtccaaaaagtttggaggccctggtgcccgcgctcgctaccagaaatcctaccgataagcccatcgtgactcaaaactcacttgtataataaacagtttttgagggattttaaagtttcaagaactgtgtgtggccttatgtgttggtattggatgtttaaccagacagaaatcagtaaacatcctggacctattgccagtctgga

SEQ ID NO: 4435 - DNA, 563 bp, Homo sapiens
  MAP TO CHR16.1; EXPRESSED IN FETAL LIVER, SIGNAL = 0.41; EXPRESSED IN HEART, SIGNAL = 0.45; EXPRESSED IN ADULT LIVER, SIGNAL = 0.59; EXPRESSED IN BONE MARROW, SIGNAL = 0.54; EXPRESSED IN LUNG, SIGNAL = 0.63; NT HIT: gi14777067, EVALUE 4.00e-91; SWISSPROT HIT: P27859, EVALUE 4.70e-01; EST_HUMAN HIT: AL522818.1, EVALUE 6.00e-91
aagaaagggggcctgtaatgccccagggtcctcccagagagcggggcagccagaaatagggcgacgggccagcgtctctgtggacacggggcagggcgggcggcgcgggctcacctggaacaggatctgcagcaccccgtggatgatgcacgcccgccggccgaggaagaggaagaagggcaccaggagctcgatgaagtggttgctgagcgtctcgaagcgatggaaccaccagggtgagtggtgcaggtagtacgccacaggattgggcatcggctgggtctgcagggacaggaggggccgtgaggtgcctggccgatctcggggggcggggctagggagaggcttgtgggtccctggccccctgaccccggctcctactgcacacaggatccccccggcccgcctggccctgcacacgtggagcccacctgccacgctaagaggggccaagagacattcagggagcttttgaagcaaaagcaaagtgttcatttttgtcttaaaatctttaccatctaaaagcaaagaatacacaccccagctgaaggagagacgacacc

SEQ ID NO: 4436 - DNA, 555 bp, Homo sapiens
  MAP TO CHR13.1; EXPRESSED IN BONE MARROW, SIGNAL = 1.7; EXPRESSED IN PLACENTA, SIGNAL = 4.5; EXPRESSED IN LUNG, SIGNAL = 7.1; EST_HUMAN HIT: AL516188.1, EVALUE 2.00e-75; SWISSPROT HIT: P09651, EVALUE 2.00e-04; NT HIT: gi14763084, EVALUE 1.00e-75
atagccaccttggtttcgtggtttggcaaagtattggcctccaccaccacaggggccagagcttctgcctccaaaatttcctcccttcatgggtccaaaatttgaagactgattattgtaattgccaaaatcattgtagcttccactacctccaaaattgcttccactaaaaaatatggaacgcttcacgaatttgcatgtcatccttgcacaggggccatgctaatcttctctgtattgtttcagttttagtatatgtgctgccaaagctagcacaagtgtgaacattgactatgcttctcacatatctttacagccccactctaaggggactctgtcttggagaaccaactgttctagaattttctaacctgcctcctgcagcccctctccccatttcttctcctagggagtcttccagatggtgcagttcacctaggaactgcatgtctgcttgctgagggtgtggcaggagtcaagtcactaaacctttatgagtgaatactgtcaaccttatacagcccattcatttcttcaccaattccatccatgtca

SEQ ID NO: 4437 - DNA, 562 bp, Homo sapiens
  MAP TO CHR15.1; EXPRESSED IN HEART, SIGNAL = 0.66; EXPRESSED IN ADULT LIVER, SIGNAL = 0.92; EXPRESSED IN BONE MARROW, SIGNAL = 0.46; EST_HUMAN HIT: AL532048.1, EVALUE 0.00e+00; SWISSPROT HIT: P35398, EVALUE 1.00e-63; NT HIT: U04897.1, EVALUE 0.00e+00
agggcatgaatagagcatcccaggagaagcatgcatgccattacctaattctgccatggacacagttggggaagtctcgccgttggtgaacgaacagtagggaaagaagcctgatgctggtgtgtagtcacatattggttctggtttgattccattgatatcaagacctgactggtctggggaaggctgtatgtccaggtagaagctgctgacggcggagtctgccttactcccctcaggggtgtgcccgtcaatgtagttactgaggtcgtcgtgaagttccgtcagcccgttggccgagatgttgtaggtgggcgtcagcggctcagcctctccaggctgctgctggtggtcgcgctgctgctgctgcatccggtgtttctgtacttctgcatacaagctgtctctctgcttttttgacattcggccaaattttacagctggaagaaaaaagccaaaccatactacatacaatgcgcttttcttcaatattctctcctgcgagctttggggtttcctttgaagtctcacacaatctcaatccaaaactgcatgaccacaa

SEQ ID NO: 4438 - DNA, 575 bp, Homo sapiens
  MAP TO CHR6.1; EXPRESSED IN ADULT LIVER, SIGNAL = 1.9; EXPRESSED IN BONE MARROW, SIGNAL = 1.6; EXPRESSED IN HEART, SIGNAL = 1.4; EXPRESSED IN FETAL LIVER, SIGNAL = 1.7; EXPRESSED IN LUNG, SIGNAL = 1.1; EST_HUMAN HIT: BF675058.1, EVALUE 0.00e+00; SWISSPROT HIT: Q9ZRI7, EVALUE 2.00e-03; NT HIT: gi14749132, EVALUE 1.00e-111
aagggtcctgaaggaaaagcacagggtgctgtgactgcatatagaacaaagaacctcatccagctgagagagaagtagtcaaggaagtttccaaggcagcatatcttggaggggctggtggggggaacagagtctgttccaggcagagggaataacagatgcaaactactgaggcagaaggaaagaggtgaagaaggccaacagctacagctttttaatctcaggggaaagagatttctgattaacagttcatgcatttcagcctataagagaagtcacgataccttcaacagtgtgtggatgtcatttttactggagtgcccatctacttgagtgaccctgtattctaaccactgctgaacgattgctttttcttctgcagtactccccagcaaatattctttgttggcttgcttgactagatgagctgctatagtagtcaatcctgttagacttggaccattgtttgtctgaagaactggaatcttaaaaagaaaaaaaagttcacagaatttaaaaaacaaggaccacatcatgattataacttctaagtaaccacgaaatccctcaagtgt

SEQ ID NO: 4439 - DNA, 530 bp, Homo sapiens
  MAP TO AC055811.4; EXPRESSED IN FETAL LIVER, SIGNAL = 0.74; EXPRESSED IN LUNG, SIGNAL = 1.1; EXPRESSED IN HEART, SIGNAL = 0.88; EXPRESSED IN BONE MARROW, SIGNAL = 0.58; NT HIT: AP002995.2, EVALUE 1.30e-01; EST_HUMAN HIT: BE888672.1, EVALUE 0.00e+00; SWISSPROT HIT: P31048, EVALUE 2.20e-02
tcagccccattcttggttaggtttggctttcgctggaggtgccgcaagttctgtgccatgaaagcaatctccctccagctctggagacaggtggggcacagcttccgtgacttttctttggtgggaaaaaggtatactttgtagggttaaactgttcccagatgcgctcaaattcttccagaaaaagccgcacgtactcgtcgtcctccgtgatgagaacattctccctgttgttctggatggcttgcgtggtccagttgagcgagccagtgatgagcaccctcttgtccacgatggcaaacttgtgatgcatgtagcctgggtcttgatcgtgccggacctggatccctgcagaaaggacaaggtgatttcattccatgcaggagtcccgcccccagtgtggactgttcctgggggctactggctttactatatgtttccagtttggtgggccaggaaagcccgccatgctttcacagagtggtggcggctaagctcccaggagggacgctgagaaccacagaggggac

SEQ ID NO: 4440 - DNA, 570 bp, Homo sapiens
  MAP TO CHR19.1; EXPRESSED IN BONE MARROW, SIGNAL = 0.75; EXPRESSED IN HEART, SIGNAL = 0.9; EXPRESSED IN PLACENTA, SIGNAL = 1.4; EXPRESSED IN FETAL LIVER, SIGNAL = 0.76; SWISSPROT HIT: P20357, EVALUE 1.10e+00; NT HIT: gi14761375, EVALUE 3.00e-49; EST_HUMAN HIT: BG570475.1, EVALUE 4.00e-49
cctctccttcaagatggctgctgctggacacggagacccatgacctggtggctatccacacagacggcaatgaacagatctcagtggtcagcttctccccaggtaagcggcaggcctgggacacccaagcggcagggccaggggacagaggctcagagctcttggcagggggaggggtggagcctgcgaagcgaggcctaggagggatgcagtggggatggagctggggactgttgagggggctgagtctgggcgaggaggggatggagcctgggtgcctcctcatagcccccctccccctcccccagacggggcgtacctggccgtgggctcccacgacaacttggtgtacgtgtacacggtggaccagggcggccgcaaggtcagccgcctgggcaagtgctcggtgagtgggcagtggcccccagcccgcgccgccaccccgcccagggggtgcaaaattaaccaattttctacctcaagggagcgcagcttcaacactcaactgattctgccctgatcagagcaaggagtcttggccacgtccacacattcaccacctcgtgtgtt

SEQ ID NO: 4441 - DNA, 542 bp, Homo sapiens
  MAP TO CHR6.1; EXPRESSED IN PLACENTA, SIGNAL = 4.1; EXPRESSED IN FETAL LIVER, SIGNAL = 3.4; EXPRESSED IN LUNG, SIGNAL = 9.6; EXPRESSED IN HEART, SIGNAL =   4; EXPRESSED IN ADULT LIVER, SIGNAL = 3.9; EXPRESSED IN BONE MARROW, SIGNAL = 3.3; SWISSPROT HIT: Q02343, EVALUE 2.30e+00; NT HIT: gi14781579, EVALUE 0.00e+00; EST_HUMAN HIT: BI766238.1, EVALUE 0.00e+00
tgctctcttactggccaagggcgtaaaaagatagtcttcccattagctagagagcaaaccccagaaagcctattggctgcgccgtccgcgggccttggtccgctttgaaggcgggctgcggctgcgagaggagggcgggcgggaggctagctgttgtcgtggttgctcggaggcacgtgtgcagtcccggaagcggcgaggggaaactgctccgcgcgcgccgcgggaggaggaaccgcccggtcctttagggtccgggcccggccgggccatggattcaatgcctgagcccgcgtcccgctgtcttctgcttcttcccttgctgctgctgctgctgctgctgctgccggccccggagctgggcccgagccaggccggagctgaggagaacgactgggttcgcctgcccagcaaatgcgaaggtgaggaggcggggcccgtggggcgtatcctgccggaggggctggctccagcggtggtgcttgcggagcagcgtcgggggttgcaaggttccgagctctgcagggtgtcttccttccttg

SEQ ID NO: 4442 - DNA, 515 bp, Homo sapiens
  MAP TO CHR19.1; EXPRESSED IN ADULT LIVER, SIGNAL = 0.82; EXPRESSED IN BONE MARROW, SIGNAL = 0.95; EXPRESSED IN LUNG, SIGNAL = 1.2; NT HIT: gi9966896, EVALUE 1.00e-72; SWISSPROT HIT: P90747, EVALUE 7.00e-32; EST_HUMAN HIT: BE793372.1, EVALUE 2.00e-72
ttgtcaaagcagcacacctcgaccttgccagcaaaggggatccggaagggctctgtgcagtacatgtctaggggcgggagtgaggtcaggggtcctgcttggccccagcccactcggcaccccatcccatttgacacactcacagagcttggccagggcgatgagggaggtgttgacggccagggacagctcgatgggcagctcaggaggcacgaccgaggtgaggatcagggtgcactccagaaacagcttgtagcggttccggctggggtccttggtacctgtggagacagggcctgccaacctggagcctcggagggtgggcgcaggggaccacagaggccgtggcgcttaccttcaatccatacataggcagctgcagcgatggcaaacaccaggaggaagaggatgaagatgaaggtctccaggttgttcgcagtcaccctcttgaccccgaagaggatggtgcgcagcagcttgccctggaggaatggaggaacagcctttctgctgtc

SEQ ID NO: 4443 - DNA, 580 bp, Homo sapiens
  MAP TO CHR19.1; EXPRESSED IN HEART, SIGNAL =   1; EXPRESSED IN BONE MARROW, SIGNAL = 0.56; EXPRESSED IN ADULT LIVER, SIGNAL = 0.53; EXPRESSED IN LUNG, SIGNAL = 0.66; SWISSPROT HIT: P34340, EVALUE 8.40e-01; EST_HUMAN HIT: BI818233.1, EVALUE 0.00e+00; NT HIT: gi14764361, EVALUE 3.50e-02
aggctgggaccctctatgtccccccatgggtgcagatcctttaagaagtgggcttaaggcctagacgtgtggctgatgaacgtggcccacggtcagcagctcacaggcgggccatcaccccaagtagggccaggagccagccaaggggccgtccaggggccccagccatgcccagagtcccgttggtggtctcaggcactgaggtcgatctcgtgatgctggtagatctgtgtggggcccttaaagcaagcagcaaagaggaagcgtctgccggccatagtgatgtgggcaaaggcacggggggccaccagggccggaggccccagctcctgcagtggctccaggagccccttgtcaggctcaaggcggaggacctggctgaaggcgaagtcgctgcctaggatggccagctggtccctggcgatgagcagtggctggaagacgtgggcaccgcgcgagggaagttgctgcagcagacgaaacatggagccgtcccagcgcatgacctgtgggggtgtggccagtgagggcctggggtcccgggggtctctgggggccgtggaacagcttggaagcagaa

SEQ ID NO: 4444 - DNA, 518 bp, Homo sapiens
  MAP TO CHR12.1; EXPRESSED IN LUNG, SIGNAL = 0.78; EXPRESSED IN HEART, SIGNAL = 0.81; EXPRESSED IN BONE MARROW, SIGNAL = 0.78; NT HIT: gi14729043, EVALUE 4.90e-01; SWISSPROT HIT: P31367, EVALUE 2.00e-19; EST_HUMAN HIT: AI267749.1, EVALUE 1.00e-125
tgaaggcaggatagtcggtccaggcaccccctcaggtttgggcctccagctagggtttggctcttccccatcctcatgtggccttcggcccatcgccctcagaatgctttgtttgtgctcagctgggtctcagagacccagtgtttgcgctgtcaatgttgattttttattttttcttttctttttgaaatcttgtttgcttttgcaggtcttgactcaggaaaacttagccacagttctgacaggagttatggttccagcaggggcagttactcaacctcttcttatccccatcagtattgcaggtcaagtggctggtcagcaggggctggccgtgtggacaattcctacagcaactgtggctgccctcccaggactgaccgctgcttctcctacggggggagtgttcaagccacctttagccggtctccaaggtaacggcaactcttcccaggactgcaccaggccccccaccctctactacacccccgcacgtgtgcttgccatgtcggactcag

SEQ ID NO: 4445 - DNA, 591 bp, Homo sapiens
  MAP TO CHR9.1; EXPRESSED IN BONE MARROW, SIGNAL = 0.57; EXPRESSED IN ADULT LIVER, SIGNAL = 0.65; EXPRESSED IN HEART, SIGNAL = 0.51; EST_HUMAN HIT: BG163699.1, EVALUE 0.00e+00; NT HIT: gi15298421, EVALUE 0.00e+00; SWISSPROT HIT: P49548, EVALUE 4.40e+00
ggtgtttgggaattcgagaggtaagattcttcccttttcttggaaagagatttcttcagagcctcgtatctactgcgaagagcctgtaaattaaagtctgattctggagtagtctgtctccctcccacaacatcttctagaagagtgccaccatgcataggactatttggctccagtttaaaattggcctctgaactactggaactattaaaacttagatgaccaacttcttccgggagagtttcgtgtaatatgccaaaatcattatctttaaaactcttagaactaattccacttgatatctgaaaagaattccacaacatagttttatttgtggaaggtttgttacaagaaacttctaagtggtccaatattttcataaactcctcttcactgccacccatcacatctatcctattgccgacagcaggggagaatgtctccattcggctagtttctgaaagcttggtgaaggctaaacattccaaatcttgcttgcaaattactttcttatttaacaaatctgactgattttgtgttggtggttcatctatgtgactggtcagcacatgtttctgaggcacacactcg

SEQ ID NO: 4446 - DNA, 597 bp, Homo sapiens
  MAP TO CHR19.1; EXPRESSED IN LUNG, SIGNAL = 0.86; EXPRESSED IN HEART, SIGNAL = 1.1; EXPRESSED IN BONE MARROW, SIGNAL = 1.1; EXPRESSED IN PLACENTA, SIGNAL = 1.2; EXPRESSED IN FETAL LIVER, SIGNAL = 1.2; SWISSPROT HIT: P34995, EVALUE 9.00e-16; EST_HUMAN HIT: AI953039.1, EVALUE 0.00e+00; NT HIT: gi4506252, EVALUE 0.00e+00
cccttgcttttcctctttccgggacacctgagactcctctacggccggacccccacccactgaaggtgtttgtttctttgccccccttttttttccgcatccgtttctcatctggatccccatttaccctccctgcgacggctcgcccctcctcccaggcttttaccttccagccacgcccccaccatccctgcgcccccctgcgcccgcgcctgctctatagctcacaccggcttcccccgcaggtgttggtggcgctggccgtcggcggctggagctctacctccctgcagcggccactgttcctggccgtgcgccttgcctcctggaaccagatcctggacccttgggtgtacatcctactgcgccaggccgtgctgcgccaactgcttcgcctcttgcccccgagggccggagccaagggcggccccgcggggctgggcctaacaccgagcgcctgggaggccagctcgctgcgcagctcccggcacagcggcctcagccacttctaagcacaaccagaggcccaacgactaagccagcccaccctgggctgggcccaggtgcgcggcgcagagcctttgggaataaaaagcc

SEQ ID NO: 4447 - DNA, 597 bp, Homo sapiens
  MAP TO CHR7.1; EXPRESSED IN BONE MARROW, SIGNAL = 0.56; EXPRESSED IN FETAL LIVER, SIGNAL = 0.37; EST_HUMAN HIT: AA780858.1, EVALUE 5.40e-02; NT HIT: AB063285.1, EVALUE 8.90e+00; SWISSPROT HIT: P51521, EVALUE 2.60e+00
aaaacccgtgctacacatcccccttacagcctgctttccatcagctttgctgaaatcaagttgctggatcagtcccgtgtgttagcagggtaataactttcctcagctggacaaaatggtgcagagagagtgttgctttttctgcttcaaaggcttcagagattcctttaaccacaaacatgagaatagaacgtaatggatatacaagagtcccacgatggcaatctccctgctggaaatgctcatgaattacctgtaatttacctcaaaatgtaccacatgttggactgcaagatgcacttttccttttttacttaaatgggctgctattcagaatcttttttttttccttcgatgtgggactagatgttgagaatagtttgggggaaaatgccccatagaagcttcacaaattaaagtttgcacaggttatcatgtgagtgctttgttgaaaggaaagaaagtgaaattaggtgcaattttctccttaatacaccatcagccccatagggccaggatgggaagattaccaacactttgggaggggagaaagcatgagtcactaatttgccggttcccttcatgcattttctgcaa

SEQ ID NO: 4448 - DNA, 534 bp, Homo sapiens
  MAP TO CHR14.1; EXPRESSED IN LUNG, SIGNAL = 1.1; EXPRESSED IN HEART, SIGNAL = 1.2; EXPRESSED IN BONE MARROW, SIGNAL = 0.76; EXPRESSED IN ADULT LIVER, SIGNAL = 0.91; SWISSPROT HIT: P46825, EVALUE 4.00e-27; EST_HUMAN HIT: BE780862.1, EVALUE 1.00e-120; NT HIT: AF267521.1, EVALUE 0.00e+00
ggggcaagatggttaaaaacattgtctctaggtaaaattcagtaggtaaacaaaagtgactagcctgtacaccaaggccaggatgttgagcatggtggccacgtccgggtggtcgtgtcctgaagtcttctccaggtcctccagggcctgcttgcagaggggcacagctacctcgtagcgcccctgcgaggcgtactggatcaccaggttgtggagcgtccgcagccgcgcgggggatctcgtagccgccctgctgggcagccgcggctgcactgctgtgctgctgctggactgcaccgagaaagttcacttcagatgggtttttaaagacaattatccagatgagtcagtttctttaaaattatctttactaactttggttcaagttagtacttggcccccagtgctatttaaatcttttcctagtactgtctgggcaggcagggtaagagtagtgactacagtgtcagggatggcaacatggccactaagtgccatgagactcctcttggcgccatgaaacaagcaggataa

SEQ ID NO: 4449 - DNA, 592 bp, Homo sapiens
  MAP TO CHR7.1; EXPRESSED IN FETAL LIVER, SIGNAL = 0.36; EXPRESSED IN HEART, SIGNAL = 0.57; EXPRESSED IN BONE MARROW, SIGNAL = 0.53; SWISSPROT HIT: P30427, EVALUE 7.00e-03; EST_HUMAN HIT: AW953171.1, EVALUE 0.00e+00; NT HIT: gi14744071, EVALUE 0.00e+00
tttactgacccacttgatggctctcataccttgtaacccagagtaatctgagagacctaaactaccggatggttcagagctcttcatttccatttctgcacggagggaggcgatctccatctcataatctccccgaatgcgttccatgtcttcaagttcattctgcatccggcagagatcctcctgcagggatgctatgtcactctcatgttcagttgcggaatcctctgctgcttgccgcagactctggatctcagcctgggccaaatgcaattcctgttctatttccttaagttcgctttctttctcatgctctaacagggaaatctcctcccgtagagaacgcagctcacctgcaaagtccaaaggttgagatgatcaagagggcaggtgaactaacctaccatgttctagaggcacaaaattaaagggagacttatttcttgtctgcaaagtcctgaaaaccttgtctctaccccatcagagaagtgtagcatcatgccggacggaataaaaggagtacctaagaagggaaaagagagtgactctatgtagtaaggtccaatagaaaagtagattttgaggcctggca

SEQ ID NO: 4450 - DNA, 504 bp, Homo sapiens
  MAP TO CHR19.1; EXPRESSED IN HEART, SIGNAL = 0.87; EXPRESSED IN BONE MARROW, SIGNAL = 0.86; EXPRESSED IN ADULT LIVER, SIGNAL = 0.77; EXPRESSED IN FETAL LIVER, SIGNAL = 0.68; EXPRESSED IN LUNG, SIGNAL = 0.79; SWISSPROT HIT: P72001, EVALUE 8.00e+00; EST_HUMAN HIT: AW801779.1, EVALUE 7.00e-01
acgtggaaaacaatccaagccttgtaggagaggggagccattaaaatgtgccctgagcgatagactgcacccaatcttgcaaactcactcgccaggcagcagcagacgggaggctgctccctgggatggagggagcctggttgtagtgccacaattaaaatcagctcctctgccaaaaaataaaagggaggagggaagaaggagaacatcaaagacagattgaaatgtgtagttagtaataagagtggtctcctcttgaaccaaagcctgcagcgattcacggcccccttgttaatgagaaattttgacctctggtttgtaagttaaacttgtaatcccagctaatgaagtaaatcacttccaactcgagtctgttgttccctctctgctttgcacactgggtctgagagcggggatctgggtccaggcacacaaatcgaggggaagcagaattattctgtgactgtatggtttcttgcacggtgagagtttcttgctcacggc

SEQ ID NO: 4451 - DNA, 546 bp, Homo sapiens
  MAP TO CHR7.1; EXPRESSED IN HEART, SIGNAL = 0.72; EXPRESSED IN ADULT LIVER, SIGNAL = 1.2; EXPRESSED IN BONE MARROW, SIGNAL = 0.7; EST_HUMAN HIT: BG490449.1, EVALUE 2.00e-90; NT HIT: gi13346507, EVALUE 2.00e-90; SWISSPROT HIT: P21300, EVALUE 1.00e-21
caaggcagagatgaaaaggggtacatgtagaaaaggctgacagagttcttgctgccaacccgacccagatacttctgcctgccttgaagtgaaggcctcccaccaaatgcaccattgcaccttgctgacgatgaacaggtcctcccgcttcacagccttctcttggatcttctcttggatggcttcccccacttcatgttcattctgatagacataggcacagtcaatgtgccgatatcctgcatcaatggccaccttcactgcttctttcactttgccaagaggagactgaaaggcaaaagaaaagctcatcacatatgtgttttttttaagagatggggccctgccgtgttgcccaggctggcctcacactcccaggttcaagcaaccctcccacctcccgagtagctggaattacaccactcgtattaaccatcatattctcttatccccaggccaccttcaacaggctgccccacaaggcccagtttctccaaaccaaggctcactggggtctcctttgccaggggatctctgggaggatac

SEQ ID NO: 4452 - DNA, 546 bp, Homo sapiens
  MAP TO CHR17.1; EXPRESSED IN LUNG, SIGNAL = 1.5; EXPRESSED IN HEART, SIGNAL = 4.6; EXPRESSED IN BONE MARROW, SIGNAL = 1.7; EXPRESSED IN ADULT LIVER, SIGNAL = 4.5; EXPRESSED IN FETAL LIVER, SIGNAL = 2.4; EST_HUMAN HIT: BF672907.1, EVALUE 1.00e-122; NT HIT: X56832.1, EVALUE 0.00e+00; SWISSPROT HIT: P13929, EVALUE 4.00e-66
cttcttgagctctcatgccccggcccaggtccagacaccctctccccatctcaggccttcaatgtgatcaacgggggctcccatgctggaaacaagctggccatgcaggagttcatgattctgcctgtgggagccagctccttcaaggaagccatgcgcattggcgccgaggtctaccaccacctcaagggggtcatcaaggccaagtatgggaaggatgccaccaatgtgggtgatgaaggtggcttcgcacccaacatcctggagaacaatgagggtcagtgctgagcaccctggggggcagaccccctggatctccacatgggcaggggaggctgcagacaaggggcactggagtctcaggtcctttcttggtcctcccccagccctggagctgctgaagacggccatccaggcggctggttacccagacaaggtggtgatcggcatggatgtggcagcatctgagttctatcgcaatgggaagtacgatcttgacttcaagtcgcctgatgatcccgcacggcacatcactggggagaagct

SEQ ID NO: 4453 - DNA, 549 bp, Homo sapiens
  MAP TO CHR6.1; EXPRESSED IN LUNG, SIGNAL = 0.59; EXPRESSED IN HEART, SIGNAL = 0.54; EXPRESSED IN BONE MARROW, SIGNAL = 0.36; NT HIT: gi14757621, EVALUE 5.00e-41; SWISSPROT HIT: Q06430, EVALUE 1.00e-82; EST_HUMAN HIT: AL576150.1, EVALUE 0.00e+00
gcaaagtcccttgtgagagccacgtaggccgtgccaaagtaaatcaccatgtcatgaggaggaggagtttttaattttgttgttttaatcacgtaggaatttttgtggtttaacagttcttggtggacgtatttagtccgtccaacagcgtggtcaggaggcagcactccgggggtgatatttttccctttaaatcccttcagatactgaactatttccctgttggttttcaggggaaagtcttgcccgcaggtgttgatgacatacttccagggaacttcagaggccacaaggtcttccaggcagttcaggtcagcctggagcctggagatccccccatagacaaccgactccttcttggaagccagaaaagcatttgggaagcagctgagtaactgtttcactgcacctttaaaggcatccgtcgccttctgatccaggtgcacacagtagacattttggggcatataaatcgccctgaagagcctctcaaaagtgccgaagtctttgtggatggtcactgtgtaagctaaagggaacccagcctct

SEQ ID NO: 4454 - DNA, 552 bp, Homo sapiens
  MAP TO CHR6.1; EXPRESSED IN BONE MARROW, SIGNAL =   6; EXPRESSED IN PLACENTA, SIGNAL =  12; EST_HUMAN HIT: AV752612.1, EVALUE 0.00e+00; NT HIT: X17093.1, EVALUE 0.00e+00; SWISSPROT HIT: P30511, EVALUE 2.00e-52
tgaggctctgattccagtccctcggcctccacttaggtcagggccagaagtccctgctcccccctcagagactctaactttccaaggaataggagattttcccaggtgtctgtgtccaggctggtgtctgggttctgtgctcccttccccaccccaggtgtcctgtccattctcaggttggtcacatgggtgctgctggggtttcccatgaggagtgcaaagtgcctgaattttctgactcttctcagatcctccaaaggcacacgttgcccaccaccccatctctgaccatgaggccaccctgaggtgctgggccctgggcttctaccctgcggagatcacgctgacctggcagcgggatggggaggaacagacccaggacacagagcttgtggagaccaggcctgcaggggatggaaccttccagaagtgggccgctgtggtggtgcctcctggagaggaacagagatacacatgccatgtgcagcacgaggggctgccccagcccctcatcctgagatggggtaaggagggagatgggtaaagagggga

SEQ ID NO: 4455 - DNA, 593 bp, Homo sapiens
  MAP TO CHR19.1; EXPRESSED IN LUNG, SIGNAL = 0.61; EXPRESSED IN HEART, SIGNAL = 0.58; EXPRESSED IN BONE MARROW, SIGNAL = 0.69; EST_HUMAN HIT: BF985825.1, EVALUE 2.00e-60; NT HIT: gi14766687, EVALUE 3.00e-18; SWISSPROT HIT: P16374, EVALUE 2.00e-35
ccaactttgttggttttggctaataaaatcaataaaggttttattggtttgaattgatggtttcagttgacaaaaggactttgtatgcatgtgtgttatacgaaaataaaataggtttgctttcttcatttctttcagatttggagttaaaatatggacctgagaaagtatctccagaaaatgatacctctgaagtaaatttacccaaacaggttataaagcaaataagtacaactcttggcattgaggccttttattttagaaatgactcagaatatagacaatttgagggactacagggatatcaagaaggaaatatcaatcaaaagatgatcagctatgaaaaactgcctactcatactcctcatgcttctcttatttgcaatacacataaaccgtatgaatgtaaggaatgtgggaaatactttagtcgtagtgcaaatcttattcagcatcagagtattcatactggagagaaaccctttgaatgtaaggagtgtgggaaagcctttcgacttcacatacaatttactcgacatcagaaatttcatactggtgagaaaccttttgaatgtaacgaatgtggaaaggcc

SEQ ID NO: 4456 - DNA, 537 bp, Homo sapiens
  MAP TO CHR19.1; EXPRESSED IN HEART, SIGNAL = 3.3; EXPRESSED IN BONE MARROW, SIGNAL = 3.3; EXPRESSED IN ADULT LIVER, SIGNAL =   5; EXPRESSED IN LUNG, SIGNAL = 3.8; SWISSPROT HIT: P20908, EVALUE 4.00e-17; EST_HUMAN HIT: AI653710.1, EVALUE 0.00e+00; NT HIT: gi15302121, EVALUE 0.00e+00
cccagagaagacagagacggtgagttaccgggaaggtggccgacatcttgcctcccctctctagctggccactgccccaccctcttacccggcagccatcctgggggacgctgacagtggctgctgtcgtctggttgaaagacagctcctctccattggtgccaaggaagcgggcggagtggctgtagtcacccgtggcttcgtccagccaggcagctgcattctggcaggagtaggtgaagttctggcgagctgtggcactcagcagtttcaggaagttcagctgcacgacattcactggggacccgtcggcgtccacgtaggagaactggtgagaggagggcaaggcagaggatgaggggctccatgagcctctttctgcagaagccaccccctggaatctccatccactggcagacaagccaccccccccatgtcaccatctctgaggaggtcccaccagccacctagagatccctggcagaatcccaagagtcacctgaacatccactctgtccacctctccatccagtaggc

SEQ ID NO: 4457 - DNA, 575 bp, Homo sapiens
  MAP TO CHR19.1; EXPRESSED IN LUNG, SIGNAL = 5.8; EXPRESSED IN BONE MARROW, SIGNAL = 3.1; EST_HUMAN HIT: AW392975.1, EVALUE 0.00e+00; NT HIT: gi14760983, EVALUE 0.00e+00; SWISSPROT HIT: Q03923, EVALUE 2.00e-63
tggcaaaggttttaaatggccctcaacccttactatccataagataattcatactggagagaaaccatacaaatgtgaagaatgtggcaaagcttttaaccaatcctcaaaacttaccaaacataagaaaattcatactggagagaaaccctacacatgtgaagaatgtggcaaagcctttaaccagtcctcaaaccttactaaacataagagaattcatactggagaaaaaccttacaaatgtgaagaatgtgacaaagcttttaaatggtcctcagtccttactaaacataagataattcataccggagaaaaattacaaatatgaaaattatggcaaagctttaatcaatttacaagtcttactaaacataagaaaatttatactggagagaaactactaacctgaaagatgtgacaataattttgacaacacctcagacttataaaagtaatcatactggtgagaaattctaaaaatgtgaagactatggcaaagtctttaaatggttgtcacactttaggtaagataattcatattggaacaaactacaagtgcaaacaatgtggcaaaa

SEQ ID NO: 4458 - DNA, 589 bp, Homo sapiens
  MAP TO CHR11.1; EXPRESSED IN LUNG, SIGNAL = 1.2; EXPRESSED IN HEART, SIGNAL = 1.7; EXPRESSED IN BONE MARROW, SIGNAL =   2; EXPRESSED IN PLACENTA, SIGNAL = 3.5; EXPRESSED IN FETAL LIVER, SIGNAL = 2.3; EST_HUMAN HIT: BI918614.1, EVALUE 1.00e-107; NT HIT: AF134404.1, EVALUE 1.00e-108; SWISSPROT HIT: P06489, EVALUE 6.60e-01
tgtagggatgccctgagaagtccagggctccagatctggtttagccaggcactcgtttggatcccgaggcaagctccctccctgttgtcgcccagtgtccccatcaaaaggaggattttgatgaactgatttctctcctggctgtagcgtcttacccaccccataccttttgggagggagaggaggcttcaccaccagccagtgctccagctcacaccccgggctgggtactcttgtcacttcattcctctttgcccacaccccttgggcctggcgatgggaggagcggctggggctccaggagaatgggggtggggaggaatttcttccttggctgatcggcccctctgctatggcaggcgcagctggtcgaggacttccgagccctgcaccaggcagccgaggacatgaagctgtttgatgccagtcccaccttctttgctttcctactgggccacatcctggccatggaggtgctggcctggctccttatctacctcctgggtcctggctgggtgcccagtgccctggccgccttcatcctggccatctctcaggtgaccccagttctgtgttgcagccaccttaa

SEQ ID NO: 4459 - DNA, 557 bp, Homo sapiens
  MAP TO CHR5.1; EXPRESSED IN PLACENTA, SIGNAL = 1.1; EXPRESSED IN LUNG, SIGNAL = 1.3; EXPRESSED IN BONE MARROW, SIGNAL = 0.84; EST_HUMAN HIT: BI838816.1, EVALUE 7.00e-66; NT HIT: gi16158288, EVALUE 5.00e-66; SWISSPROT HIT: O88573, EVALUE 1.00e-09
ttggaggtcaaaagggaatctgtgattgaagtgttaagctgacaaaatctgtacagaatatttaatttttccttttatttctgtgatacaaagattgtgtttcttttcatagcaacatgaaccgtgaagaccggaatgtgctgcgtatgaaagaacgggaaaggcggaatcaggaaattcagcagggcgaagacgccttcccacctagctctcctctctttgcagagccatacaaagttgtaagttgcccttctgtgaatgtttttttcccattagcatgacatttttgcttttaaaatgtttcacacttgaatgtttatattagaaaagaattactatgaataccacttaacatttttttcctgtcctttacatagaagatattttttggggataaacttttctttggagtatattatgcttacagaaaaatacacaacataggtattatggcttgaagaattttcacagcatcaacagcttcatacaactcagatcaagaaatagagcattaccagcaccctaaaagtcgttttccaacccacctcctattgctg

SEQ ID NO: 4460 - DNA, 590 bp, Homo sapiens
  MAP TO CHR12.1; EXPRESSED IN BONE MARROW, SIGNAL = 0.55; EXPRESSED IN LUNG, SIGNAL = 2.3; NT HIT: Y13537.1, EVALUE 0.00e+00
ggctgcttcgtgtttctttcttggtctctctctctcttgcgctcactctctctttctctctcctgggtaatcatttctctgaagctcccccgaaaaagcccttgccccttgcctccgcagctctctcctccgtccttccacccaccttccacccacagtgcgctggctgccctggtttccttgatatttttgtcctttgggtccaccccaccccacactcagctgcacttcagcacttgtccttggccctccggctgcagcagatgcgcacatatgctcgcgcgcacgtgcacacacacatgcacacacacgcgcgcgcgcacacgcacacacacacacacacacacacacgcgcggcgcgcagaggactgccttgtcaagtcttccaggagatccggtctggaaacctctctgggcagccggctggggctcctacctctgccccaccccccacgttcctcagcccttggaggcttttctggtcccaggcatgagaacacactgccacccagtggtcactgcttgtcacaccccaacggaggtcactgggccggctgcggcaggcctgaggagttgagcagtgcagtgga

SEQ ID NO: 4461 - DNA, 531 bp, Homo sapiens
  MAP TO CHR16.1; EXPRESSED IN LUNG, SIGNAL = 0.67; EXPRESSED IN HEART, SIGNAL = 0.71; EXPRESSED IN BONE MARROW, SIGNAL = 0.67; EST_HUMAN HIT: AL522081.1, EVALUE 1.00e-104; NT HIT: gi16164751, EVALUE 1.00e-105; SWISSPROT HIT: P55194, EVALUE 2.20e+00
aggacactggaacgttttggattcagtggcctggtgtgggctgtgtagtttccatatttaaccagcattccaggaaacacctcatgatccaggtgtcatcaaatcacactctcagcaacatttttaaactttattttttggaaagaaaaaaaggctgcggtccagaatgtggcaactactgacctgagtgacgtttgtgaatatctgctcagacattctctcgcacagaacagccatcagctgcaggacaagcagcttccgctcttggccttccacaagaagagtctgatgttgctctaattccaagaggctcttgctggagaagggctcagtttttaactctgtttcattttccgaggccacatgagtcaactcctacaagcatggcaggaaagaaaaagtgaagataaagccagtacaactaaggccttctcaaacataagcagaaaactctgtttgaactgcatgtttaaataaatagtctgtgtttgttgcaacattatttataatagccaaaacttggagacaagc

SEQ ID NO: 4462 - DNA, 561 bp, Homo sapiens
  MAP TO CHR5.1; EXPRESSED IN BONE MARROW, SIGNAL = 0.45; EXPRESSED IN ADULT LIVER, SIGNAL = 0.51; EXPRESSED IN FETAL LIVER, SIGNAL = 0.32; EST_HUMAN HIT: AU139365.1, EVALUE 1.00e-100; NT HIT: AF057300.1, EVALUE 1.00e-100; SWISSPROT HIT: P12753, EVALUE 1.00e-13
tctggcttcctttcctgaactactttgttttacatatcttttcatctgtgaaccgttaaatagtttaagagttacactttttagcatgatgaagccatttctaacgggataggtgaagggcctttttttttattcttttaaagaagtacagtatgaattgattaagcaatagaatagatacactgaaggttattttacatatattcttgattttcattttctgtaggcatggtgaaaaggtcagtctgagctctaagtgtgcagaaattgaccgagaaatgatcagttctcttggggtttccaaggctgtgctaaataatgtcattttctgtcatcaagaagattctaattggcctttaagtgaaggaaaggctttgaagcaaaagtttgatgagattttttcagcaacaaggtttgtaacccttaaatagactttgtagtccattaagttattgaactgtgtttgcaatttggatgcttctttttaacagaaaaaatttaaaaagcagaaaggtcatcagttactacctctcatccagcagcaaccattgggcatatttt

SEQ ID NO: 4463 - DNA, 503 bp, Homo sapiens
  MAP TO CHR22.1; EXPRESSED IN LUNG, SIGNAL = 2.3; EXPRESSED IN BONE MARROW, SIGNAL = 3.1; EXPRESSED IN PLACENTA, SIGNAL = 4.6; SWISSPROT HIT: P18713, EVALUE 1.20e+00; EST_HUMAN HIT: BE897260.1, EVALUE 0.00e+00; NT HIT: Y07848.1, EVALUE 0.00e+00
gggaagggctgtcctcttactgtgcctggcggcccacagctgcttttcaccagcacttacttatccatttttccaggtcctccacgtcctcctcttcttcctcccatctgttccatcaaaggtccagggggccccccagggccacctcgtcttcctccaccaaagccacctcggtccatgccccggccaccacggaagccacctctgtctccaccacggccacctctgaacattccaccgggaccaccacgatccatgaggccacctcttcctccccgcatgccaccagggccacctctgccacgatcaccacctaaggtgagaatagcagggcgaaagcagtcagtgggtggctgcagaggccctgtggacactgtggaagctgctctgcttccttctctcacagcagaacaaaccagacacttcactcaatctcggcatcgggctgacaatttagaaatgaggacacgacaactcaaagttgttaagcagagggcaactgc

SEQ ID NO: 4464 - DNA, 512 bp, Homo sapiens
  MAP TO CHR20.1; EXPRESSED IN BONE MARROW, SIGNAL = 0.89; EXPRESSED IN LUNG, SIGNAL = 1.8; EXPRESSED IN HEART, SIGNAL = 1.5; NT HIT: X16914.1, EVALUE 0.00e+00; SWISSPROT HIT: P17858, EVALUE 3.00e-31; EST_HUMAN HIT: BI823657.1, EVALUE 1.00e-104
ctgacctccatctctgggagacatctgagctcgtgctggcagacaccactcctccccggccaacggccagacagcccctcctctgcctcggggcacccagggatccctcgtccctctgtcctgcccattcccacgcctggcagcagcggcaaaacaaaaccccagggcctacagtgcgccgggcacagacccaccttccgccaccagctcctccagcaggctgccccactcgctgcggaagatgttggcacctgtgaggctgccatccccgccgatgacgcacaggttggtgatgccgtgctggaccaggttgtaggccgctgcccggcgcccctccctggtggtaaaggccttgcagcgagcgctgccaatgatagtgccgccctgcacagaggagaccagaaacttcaggagagatggcaggcggcagacagcccctggggatcaccagagggaccccaggactgggcagcaaggggctggcagaccctgcagagtgagaggcagaagcc

SEQ ID NO: 4465 - DNA, 506 bp, Homo sapiens
  MAP TO CHR22.1; EXPRESSED IN LUNG, SIGNAL = 0.87; EXPRESSED IN ADULT LIVER, SIGNAL = 1.1; EXPRESSED IN BONE MARROW, SIGNAL = 0.72; EXPRESSED IN FETAL LIVER, SIGNAL = 0.85; NT HIT: gi14778494, EVALUE 0.00e+00; SWISSPROT HIT: Q10888, EVALUE 5.40e-01; EST_HUMAN HIT: BG470139.1, EVALUE 0.00e+00
tacacacccgggctagaatcaagaatgccagctcttggcatctggctgtgtttccaggaggcatttgcaaggggtgagggcaatcgggactttggacaacttcctccccaggctccagatgccctttacctcgcatttctccacgaccggctgctgcccacactcggagctgttgcctgccacgatgccagcccgaaggttctcgctgtctccagtgccctcctccatggagtaggtcttggagtggttgcctcggcgatgggatggggctcggccctgggccaggctgagctgcctgcggagggcgcggttctcctcctccacctcgcgcatgcgcacctccaggctctcgcgctcccgctggctggaggccgtgtacctggggctgtgtgcctgggactccagcggtgacagagacacgggctttccatctggggagcgaaacaccagggaagctttaatctggatgaaccatgcctcaagcccctccaagttccccagacatc

SEQ ID NO: 4466 - DNA, 565 bp, Homo sapiens
  MAP TO CHR22.1; EXPRESSED IN BONE MARROW, SIGNAL = 0.72; EXPRESSED IN HEART, SIGNAL = 0.84; EXPRESSED IN ADULT LIVER, SIGNAL = 0.81; EXPRESSED IN PLACENTA, SIGNAL = 1.7; SWISSPROT HIT: Q00587, EVALUE 1.00e-49; EST_HUMAN HIT: BI755963.1, EVALUE 0.00e+00; NT HIT: gi14778715, EVALUE 0.00e+00
tatagctgcttctgaggggctgggagccgggcccctgggagagacgagccatgaaccccccacagcctctgcatttggggacctcaccttaggagagtgccatttacagcttccgccagggcaaaggagctgagcagccatcccaagcccagcccacctccctcccccggcccctggtaggcatggactagcagctgtgagcagccagagctgatgcccggcccccaggggggcagaggcgccgccaccatgagcctgggcaagctctcgcctgtgggctgggtgtccagttcacagggaaagaggcggctgactgcagacatgatcagccacccactcggggacttccgccacaccatgcatgtgggccgtggcggggatgtcttcggggacacgtccttcctcagcaaccacggtggcagctccgggagcacccatcgctcaccccgcagcttcctggccaagaagctgcagctggtgcggagggtgggggcgcccccccggaggatggcatctccccctgcaccctccccggctccaccggccatctcccccatcatcaaga

SEQ ID NO: 4467 - DNA, 559 bp, Homo sapiens
  MAP TO CHR7.1; EXPRESSED IN LUNG, SIGNAL = 0.72; EXPRESSED IN ADULT LIVER, SIGNAL = 0.43; EXPRESSED IN BONE MARROW, SIGNAL = 1.3; NT HIT: gi15029529, EVALUE 0.00e+00; EST_HUMAN HIT: AI769814.1, EVALUE 0.00e+00; SWISSPROT HIT: O14924, EVALUE 1.40e+00
cttgtaccccacaacgttcccaagattcccccccaccccctttaaatagaacttacaagttagaaaatatttttgttttgactttttgtctttaaattttaatataatctgttttttttaaccagcccatagacttaatatataagcatatacaagaaaaagtctctccccactctgtacaaaagttgctgtctttgtgtgcattctattgcattttataagttttttgggggaggggagtcatatttgagtttcctgtaccttgtccttggtatgggtctgaattatataaggttcagagatagtggtgactgtggggtgcagagagttccccaggctgttttctgtccagtgggccccatgtgctggtttgtaggtgttgtagttaatatggtcatgaattgtgggcagcactactgccccctcacctgatacaccggacggagctgctgttgctgctgcggatgttgctgctgggatgtcttcgtccacctggattatctcaacagtccgggcggctgtgactgtactccgctgctggtgccgcttacgaagttta

SEQ ID NO: 4468 - DNA, 600 bp, Homo sapiens
  MAP TO CHR2.1; EXPRESSED IN LUNG, SIGNAL = 1.5; EXPRESSED IN BONE MARROW, SIGNAL = 0.65; EXPRESSED IN HEART, SIGNAL = 1.3; SWISSPROT HIT: P09933, EVALUE 5.00e-43; NT HIT: AF200348.1, EVALUE 0.00e+00; EST_HUMAN HIT: AU131275.1, EVALUE 0.00e+00
tcttgcttttctccacgtcccaggttaccactacaacgacctggtgtctccacagtacctgaacctcatcgcaaacctgtcgggctgtaccgcccaccggcgcgtgaacaactgctcggacatgtgcttccaccagaagtaccggacgcacgacggcacctgtaacaacctgcagcaccccatgtggggcgcctcgctgaccgccttcgagcgcctgctgaaatccgtgtacgagaatggcttcaacacccctcggggcatcaacccccaccgactgtacaacgggcacgcccttcccatgccgcgcctggtgtccaccaccctgatcgggacggagaccgtcacacccgacgagcagttcacccacatgctgatgcagtggggccagttcctggaccacgacctcgactccacggtggtggccctgagccaggcacgcttctccgacggacagcactgcagcaacgtgtgcagcaacgaccccccctgcttctctgtcatgatcccccccaatgactcccgggccaggagcggggcccgctgcatgttcttcgtgcgctccagccctgtgtgcggcagcggcatgacttcgctgctcat

SEQ ID NO: 4469 - DNA, 594 bp, Homo sapiens
  MAP TO CHR2.1; EXPRESSED IN FETAL LIVER, SIGNAL = 0.41; EXPRESSED IN BONE MARROW, SIGNAL = 0.5; EST_HUMAN HIT: AI276476.1, EVALUE 1.00e-101; SWISSPROT HIT: Q90688, EVALUE 6.00e-14; NT HIT: X92412.1, EVALUE 0.00e+00
gtgcctgttgaatcagagccaattgtagccagaaactcattcagtaagtattaacacttttaaataatttgacagttgaaatgtaatagaatcagggggagaagggagaagggcagtcttatcaatagtaattttgtgcaattctcatcatccttattttcataaacagctattccatcaccacccggcatacctgaagaagttgggactggcaaagagcatatcatcattcagtggacaaaacctgaatctgatggtggcaatgaaatcagcaactacctagtagacaaacgtgagaagaagagcctgcgctggacacgtgtcaacaaagactatgtggtgtatgataccaggctgaaggtgaccagcctgatggagggttgtgattaccagttccgggtgaccgcagtgaatgcagctggtaacagtgagcccagcgaagcttccaacttcatctcatgcagagaaccatcatgtgagctccaagaatcatacataaatacaatgctcctcaaaactatatgacagataattttccaacacacaatctctaagaatttttagaatttatgaatggtctagaaaagcacatgc

SEQ ID NO: 4470 - DNA, 415 bp, Homo sapiens
  MAP TO CHR5.1; EXPRESSED IN BONE MARROW, SIGNAL = 0.33; EXPRESSED IN FETAL LIVER, SIGNAL = 0.55; NT HIT: gi16171859, EVALUE 8.00e-95; EST_HUMAN HIT: BE817680.1, EVALUE 1.00e-94; SWISSPROT HIT: O95486, EVALUE 2.00e-27
ttttatagcccattttgacatttgaaatccagacaatatttgaacatttgaaatccaaaaaaaaacaaacaatttacctttgctggatgtatacaagagtgctgactgaaaagaaaccaactgagtgtcagtaagactctcttccactgacatctgtactgcatacccagcgtctgggttgacgttaggcaaagacagtaagtcggttgacctaacaaagaagtttccatggaaagtatgaatggaaagacctagaagagaaaaaggtaacaaaattatttttatatacctacatactgatatttacattttatcctagttacttatcagattggcaaaaagtaaagaaatctagataatacacagtacttagtgaggttaaggaataacagatggcttttgaaatgaaggtggg

SEQ ID NO: 4471 - DNA, 543 bp, Homo sapiens
  MAP TO CHR13.1; EXPRESSED IN FETAL LIVER, SIGNAL = 0.7; EXPRESSED IN LUNG, SIGNAL = 0.61; EXPRESSED IN HEART, SIGNAL = 0.75; EXPRESSED IN BONE MARROW, SIGNAL = 0.62; EXPRESSED IN ADULT LIVER, SIGNAL = 0.59; SWISSPROT HIT: P07271, EVALUE 3.90e+00; NT HIT: gi16188347, EVALUE 1.00e-44; EST_HUMAN HIT: AU136520.1, EVALUE 2.00e-44
tcacctgttttaggtccacagttaaatgaattttgacaaaatagtcatataagtatcatcacagtcaagatacagacctgagcaaatgcaaacaaatattttgcatacagttcttttcattaacttttgttgtttttcagatacatcctcaaagataattctcaaaagcatattgaagtttgggatccttctccagaagaaattatttcaaatgaagtacacaacttaaatcctgtgtctgcaaaatctctacctaatgagaattttcagtcactttataataaggaattgcctgtgcatatctgtaatgtaatatctcctgagaagatttatgttcagtggttgttaactgaaaacttacttaataggtataatatatatatataatatataaggaaaatattgcatatgattttatcctttattctgtttcaaagatctagaagtcataaatgtagattttactagcaaaattattttaactaagtagtctcagctagttagaagtatgaaaataggaaatctgttggctgttttcactgc

SEQ ID NO: 4472 - DNA, 590 bp, Homo sapiens
  MAP TO CHR7.1; EXPRESSED IN BONE MARROW, SIGNAL =  18; EXPRESSED IN PLACENTA, SIGNAL =  21; EXPRESSED IN LUNG, SIGNAL = 9.8; EST_HUMAN HIT: AV756378.1, EVALUE 0.00e+00; SWISSPROT HIT: Q02877, EVALUE 2.00e-60; NT HIT: gi4506620, EVALUE 0.00e+00
tcttccattttgcagctatcactgaagcagcaatcgccaaaatgaagttcaatccctttgcgacttccaaccgaaacaagaaccacaaaaggcatttcaatgcaccttcccacatttacaggaagactatgtcttcccctctttccaaagagctgagacagaagtacaacgtgtgatccatgcccatccaaaaggatgatgaagttcaggttgtacgaggacactataaaggttagccaattggcagagtagtccaggtttacaggaagaaatatgtcctctacatcgaacgggtgcagtgggaaaaggctaatggcacaactgtccatgtaggcattcaccccagcaaggtggttatcactaggctaaaactggacatagaccgcaaaaagattcttgaacagaaagccaaatctcgccaagtaggaaaagggcaaatacaaggaagaaacaattgagaagatgcaggaataaagtaatcttatatacaagctttaaaacttgaaatgaaaaacaaaaggaagatataaatctaatgttaaggatggactcatggagcctggacagatgcctggtccttcctgaatcct

SEQ ID NO: 4473 - DNA, 500 bp, Homo sapiens
  MAP TO CHR7.1; EXPRESSED IN BONE MARROW, SIGNAL =  12; EXPRESSED IN PLACENTA, SIGNAL =  24; EXPRESSED IN LUNG, SIGNAL = 9.3; EST_HUMAN HIT: BG613248.1, EVALUE 0.00e+00; SWISSPROT HIT: Q02878, EVALUE 2.00e-56; NT HIT: gi14744842, EVALUE 0.00e+00
tggacctctggtcctcaatcgagttcctctacgaagaacacaccagaaatttgtcattgccacctcaaccaaaatcgatatcagcaatgtaaaaatcccaaaacatcttactgatgcttacttcaagaagaagaagctgcggaagcccagacaccaggaaggtgagatcttcgacacagaaaaagagaaatatgagattacggagcagtgcaagattgagcagaaagctgtggactcacaaattttaccaaaaatcaaagctattcctcagctccagggctacctgtgatctgtggttgccctgacgaatggaatttatcctcacaaattggtgttctaaatgtcttaagaacttaattaaatagttgactacgttaaaaaaaaaaaaaagtatagcatagtgagtggtgaagtgcacaggctctggaaacagactaccatttattagttacctatcctgagataaatgaatctacttctctgtgccttattttccccat

SEQ ID NO: 4474 - DNA, 501 bp, Homo sapiens
  MAP TO CHR15.1; EXPRESSED IN PLACENTA, SIGNAL =  22; EXPRESSED IN LUNG, SIGNAL =  11; EXPRESSED IN BONE MARROW, SIGNAL =  21; EST_HUMAN HIT: BI603232.1, EVALUE 0.00e+00; SWISSPROT HIT: P12970, EVALUE 3.00e-65; NT HIT: gi13650616, EVALUE 0.00e+00
gaaaggaaagaaggccaagggaaagaaggtggctccggcccctgcagtcgtgaagaagcaggaggctaagaaagtggtgaatcccgtttgagcaaaggcctaagaattttggcattggacaggacatccagcccaaaagagacctcacccgctttgtgaaatggccccactatatcaggttgcagcggcagagagctatactctataagcggctgaaagtgcctcctgcgattaaccagttcacccaggccctggaccgccaaacagcgagctgcataagctggcccacaagtacagaccagagacaaagcaagagaagaagcagagactgttggcctgggccgagaagaaagctgctggcaaaggggatgtccccacgaagagaccacctgtccttcgagcaggagttgacaccgtcaccaccttggtggacaataagaaagctcagctggtgctgattgcacacgacgtggatcccatcgagctggttgtcttcttgcc

SEQ ID NO: 4475 - DNA, 591 bp, Homo sapiens
  MAP TO CHR7.1; EXPRESSED IN ADULT LIVER, SIGNAL =   1; EXPRESSED IN BONE MARROW, SIGNAL = 0.96; EXPRESSED IN FETAL LIVER, SIGNAL = 0.96; SWISSPROT HIT: Q99996, EVALUE 1.00e-22; NT HIT: AJ010770.1, EVALUE 0.00e+00; EST_HUMAN HIT: AA620569.1, EVALUE 2.00e-75
tgatttggaagcaccaatttctgtaagttaatagttttcaaatgtggaaaatactgattacaaagtgtaagaattatgccaatgtgttttgaattcttattttgaaaaagttacctgtaataatagtcaattaaaaaaaataaatctagcacttactattttctttcagttacaagaatttgaagctgccattaaacaaagagatggcattataacccagctcactgctaatttacaacaagcaagaagagaaaaggatgagacaatgagagaatttttagagttgacagaacagagtcaaaaattacagattcaatttcagcaagtaagtattactaatgcaacaaaattcattatttttttagtaatgaattttaaaaattcactttcaagaacaaatctaaatttgttaaaaaagccatttcgtattatatcatgtatgaaaaattagtgaatatgtgttgctatattaaccaggaatttaattcatacttcttaaatggttctctactaatattttcttttcatttcctccctgtctctattttgaaatcttacaaattgtgtaaggttgattgagggtatttctgc

SEQ ID NO: 4476 - DNA, 582 bp, Homo sapiens
  MAP TO CHR22.1; EXPRESSED IN HEART, SIGNAL = 0.55; EXPRESSED IN BONE MARROW, SIGNAL = 0.57; EST_HUMAN HIT: BF697707.1, EVALUE 2.00e-97; SWISSPROT HIT: Q9Y5X1, EVALUE 2.50e+00; NT HIT: gi16167002, EVALUE 2.00e-99
agtggcggatttagttgcaggtttggctgatgacagaacaaacagggtcctctggttgtacctattgcagataggactcagtgcacgtaaaggaagatgaaaccagactagaaattagaccaaaataacgtacttccatagggatgtacatcttgcatctccgtggctacagcagtcatggttttccatacagtgttattggcaatgaatagtaccaagactagtaccacaagccaaactctggcttagtatctttgggttttacgttctgactacatttctgattgctggcttttcacagctacagggaaaggttcgccagttaagcatacctttagaagatcgaagacatcgtctgcatccagccggtaatcacagagtcggtgcaggatctccacccgtgtgcgaagaggcaggtcctggaaactggcttccctcagagggttgggcttcccttcttcgagctcccagcggtagttgatgatgtcctctaggtagctgtggaatgtctgaggcctagaccagggccccaaacacaaaaatacattaatataaaatataggttggttgggagaaggagag

SEQ ID NO: 4477 - DNA, 593 bp, Homo sapiens
  MAP TO CHR7.1; EXPRESSED IN BONE MARROW, SIGNAL = 0.38; EXPRESSED IN HEART, SIGNAL = 0.57; EST_HUMAN HIT: AA700776.1, EVALUE 0.00e+00; SWISSPROT HIT: P45457, EVALUE 2.00e+00
ttggaaacttcacgcatttgacttgcagcttcttgacccgaggaatcaactgagctcccagtgctggctaccttgggcaaataaaatctgtggttgagagagttctctttgctgtgccacagtccctgtgatgtgccaaatggcaccagcatttgcagcaaagctcgttaaatctttttggaatgggcaaatattttttcaacttgagccctgctgagccaaaccaaatacttgctggcagaataaagttcaaactggcaactgttttggagaccaaagtaatgccatatatctttttttaaaaaaaaaaaaaaaaagaaagaaagaaagaaagaaaagaaagaaaagaaaaaatgaactgtgaaggtacttaagaaaaataaatgtaagttcttcatgtatatgaataaatactcagggtctgtgtctgagatgttactccctgtggtttactttggaatcttcttatctgcttcagggtctgtaccttttggagggaccttccagatagatattaggtagattctaaaacacaattccaaactgaatttctctgccagttgattttcactggattttatgccactgcttga

SEQ ID NO: 4478 - DNA, 595 bp, Homo sapiens
  MAP TO CHR5.1; EXPRESSED IN HEART, SIGNAL = 0.56; EXPRESSED IN BONE MARROW, SIGNAL = 0.36; EST_HUMAN HIT: BE546219.1, EVALUE 2.00e-72; SWISSPROT HIT: O76082, EVALUE 1.00e-35; NT HIT: AB016625.1, EVALUE 0.00e+00
ttctgcagttgctggatttgaggaggttcagcttaggatttttaaagctgaaaggcaggttggaatttttcttttcaatgaagtaaatctatctgaattatacaagcttttttgctgggacactgtctatatggaaggctctgagagcgcactggcgcagggtttacactgtaccacttgggctggggaaaattatcttttgatctatgaagtaagacgcagggttacagttactgctgccttactagtctctgcttaaagatggtttggaatttactgaaataattgcattgtaaaagttgtacaggttgggaaagatgtggatactgcttttccagctttcttctgcactctgtttcaggatgaccatatcagtgggctattttgggctttcgcttgatactcctaacttgcatggggacatctttgtgaactgcttcctttcagcgatggttgaagtcccagcatatgtgttggcctggctgctgctgcaatatttgccccggcgctattccatggccactgccctcttcctgggtggcagtgtccttctcttcatgcagctggtacccccaggtagggaccatgtgcatct

SEQ ID NO: 4479 - DNA, 597 bp, Homo sapiens
  MAP TO CHR10.1; EXPRESSED IN LUNG, SIGNAL = 0.87; EXPRESSED IN BONE MARROW, SIGNAL = 1.2; EXPRESSED IN HEART, SIGNAL = 1.1; EST_HUMAN HIT: AL515242.1, EVALUE 0.00e+00; SWISSPROT HIT: P13674, EVALUE 5.00e-33; NT HIT: U14611.1, EVALUE 0.00e+00
gggtaatttttgctcatccagaggattattgtgaacttcaaatagaagtgagacagcattttgaaagctgtgtagtcctaaataaatacacagtagtgttaagattcctaaagttctctgtattttcttttcataggagtgaaacacaaatcttttctaacggctgaggactgctttgagttgggcaaagtggcctatacagaagcagattattaccatacggaactgtggatggaacaagccctaaggcaactggatgaaggcgagatttctaccatagataaagtctctgttctagattatttgagctatgcggtatatcagcagggagacctggataaggcacttttgctcacaaagaagcttcttgaactaggtatgttatctgggcctaatttaaggttatagttatattgagggatatatattctctatttttctgtctttccctcatttatatatggtattttcttactttttagaagtcaggagctttacttgttaaatatacattattctcttctttattctcaaagtaaatgatggctgatttttctcacctaatagtgctataacagtggttgtgtttctttgctc

SEQ ID NO: 4480 - DNA, 597 bp, Homo sapiens
  MAP TO CHR7.1; EXPRESSED IN BONE MARROW, SIGNAL = 0.63; SWISSPROT HIT: Q64865, EVALUE 1.00e+01; EST_HUMAN HIT: BI791811.1, EVALUE 5.40e-02
caataaatatggcccggatggtaacagtgcattgtgaagtctgtttgaagtgtcctttaaaatattaaattcaaataaatgattgaatcagaacaaaggctatatcttaagacaaattcagccaagtctctttaacctttgagctttcaacatagattagaaagccagggcaacgcatgctttcatagcaaattgaaatgggatttttgaaacagttcctgcaaatacaggtaacccatacctaggtttgatctgcctttgccattttgggggagagattttgctgctcattgtttgataaaaatgtgattttttaaaaagcccttatgttcaaagaagcaaatccttgaaaacgctagctttgggtgctatgtttattccttgtcaatgtcttccatatgaaatctgttctgcttataatatctaccacagttggagccttgaaaaaaatctgtttcatatctgccctttgtacttagcttattttgttttatgcttcccccaagttatacgtctgtaagctgtctttcttctaagcaggcggtcctagaggaggaggaattgggggattgccctgcatttaggggagcctggact

SEQ ID NO: 4481 - DNA, 570 bp, Homo sapiens
  MAP TO CHR5.1; EXPRESSED IN FETAL LIVER, SIGNAL = 0.53; EXPRESSED IN BONE MARROW, SIGNAL = 0.44; EST_HUMAN HIT: BG819161.1, EVALUE 0.00e+00; SWISSPROT HIT: Q9UN67, EVALUE 1.00e-108; NT HIT: gi14861873, EVALUE 0.00e+00
atatcatgccttcatcaccgccactaatgttaatatggaaaaaagagttggggctgatcgtgtagttttggataccgttaagtcctccatctggatcctgtgctctttctagtctaaatgctgtcccttcagctgtattttctgatatttttaagactgtttctttgtcctgaaatactggcgcgtgatcatttatatccctgactctcagctcagcccggtaaatctgaaagggatcatccattaaaatttggaaatacagcatacagggctctttagggccacacagcttctctcggtccagtttctcatttgtgagcaaattcccggtatgtgaatccaggagcaggtattgtttgttatcatcggaaaccaccctggttccccttgcagccagctccccctctgctagtcccagatcctttgccagattgaccacaaaggatcctttctctgtttcctcagtcaccgaataacgtccaaacccagaacctgccaaggacactccccaaaaaagaaaaagaaacaggacttgcctttgtcttgggaagcacaactctctgacagcca

SEQ ID NO: 4482 - DNA, 599 bp, Homo sapiens
  MAP TO CHR22.1; EXPRESSED IN FETAL LIVER, SIGNAL = 0.43; EXPRESSED IN BONE MARROW, SIGNAL = 0.53; SWISSPROT HIT: Q28083, EVALUE 3.00e-01; NT HIT: M16409.1, EVALUE 8.90e+00
ggactccagagctccacatcttactttcagaaagcacaagtgttttgttggaaatggcctcaggaggagggagagcccagggctctatacacatgttcctcatttgccattggtggggcaggggctgcggcaggggactgtgctggggaggcaggcatgggaggggagagagcagctgcagctgctgccggaagtttggcttcagggaggaatggagggagagagtgcaagaagaaggggtgggacttggggacaggggcggtgtcacgggggaggagggtgcaggtggtgacttgtttatctgctcagctgttttgtttccaggagcctgagagagagacagaagcagctgggaggagaaaaatcaacgcggccaggggccctactggtccttctgccttagccacaggttctgaaaccaaagcaaaaccaccagagagtgattcatgtgggtatggccctccctccccctgcccagaaaggtttctcttgagcccatatgctagtttctgtcatgcaaacgccctggcaatgccttccttgccttggcgcaatggctctgattgggtaggcatctccgggggttaatactggcacaa

SEQ ID NO: 4483 - DNA, 585 bp, Homo sapiens
  MAP TO CHR13.1; EXPRESSED IN BONE MARROW, SIGNAL = 0.34; EST_HUMAN HIT: BG614511.1, EVALUE 0.00e+00; SWISSPROT HIT: P51587, EVALUE 1.00e-62; NT HIT: X95168.1, EVALUE 0.00e+00
tctagagtcacacttcctaaaatatgcatttttgttttcacttttagatatgatacggaaattgatagaagcagaagatcggctataaaaaagataatggaaagggatgacacagctgcaaaaacacttgttctctgtgtttctgacataatttcattgagcgcaaatatatctgaaacttctagcaataaaactagtagtgcagatacccaaaaagtggccattattgaacttacagatgggtggtatgctgttaaggcccagttagatcctcccctcttagctgtcttaaagaatggcagactgacagttggtcagaagattattcttcatggagcagaactggtgggctctcctgatgcctgtacacctcttgaagccccagaatctcttatgttaaaggtaaattaatttgcactcttggtaaaaatcagtcattgattcagttaaattctagaagttttacatttaaattttaaatgcttactaaggatgctcaatttcttagatgtactgataattttagtataaaaagcatattcttcagacagttaaagtttttgtgcagtttttgggaggtccaga

SEQ ID NO: 4484 - DNA, 591 bp, Homo sapiens
  MAP TO CHR7.1; EXPRESSED IN PLACENTA, SIGNAL = 1.6; EXPRESSED IN FETAL LIVER, SIGNAL = 1.9; EXPRESSED IN LUNG, SIGNAL = 0.59; EXPRESSED IN HEART, SIGNAL = 2.4; NT HIT: gi16162409, EVALUE 4.00e-85; SWISSPROT HIT: Q14563, EVALUE 2.00e-28; EST_HUMAN HIT: BF667677.1, EVALUE 4.00e-80
aaacaaaacgcaacaatcccctccatctgctcccaaatctttttattcattagaaaaagttgatgcacttatttgaagaaagctatttcaaacttggaatcagataggataactagcaaacatttcatttattttgaatatttttcctacctctttgcagtgggaaaatagcgagaacatgcagaaccatcccaagcacagtaagggtctcgggcgaggcaacactcagcacacgctttcccgtaaatatcacaccggtgtaaagggagctgggcaaccccagccgttgaaccaatatatagttgttgctgtggaaagagtttactgctgtgacaaaaactatcttgtcttttaaatctcttgttctcttaaaaaagagtttatttatatataacttctcagagataaattaagggtttaaaaaaatcatccctttattgctaatttctttaaaggccttctagacaagatggcagtttaaaatggagcaagagcaagttctaaatatttgactgaaacaagtgtcttttattaagtgtaaaacaaaggaaagatgaagacagtaatacaccaaccaatgtaatgttcaaa

SEQ ID NO: 4485 - DNA, 582 bp, Homo sapiens
  MAP TO CHR1.1; EXPRESSED IN FETAL LIVER, SIGNAL = 3.1; EXPRESSED IN LUNG, SIGNAL =  29; EXPRESSED IN ADULT LIVER, SIGNAL = 1.2; EXPRESSED IN PLACENTA, SIGNAL =  14; NT HIT: J02763.1, EVALUE 0.00e+00; SWISSPROT HIT: P06703, EVALUE 1.00e-10; EST_HUMAN HIT: BI907582.1, EVALUE 0.00e+00
cttggccctagtgtgctctctccttccccttcaagccctgggctgtctcctgatgcgattgtgtgtggcctgagactgggtggttccaaaggaggcggggctagtgcaggcagcattattggggtgtgtgggtgagaagtccttgctcccatggcactgactaggccctctgctgccagctccaagcccagccctcagccatggcatgccccctggatcaggccattggcctcctcgtggccatcttccacaagtactccggcagggagggtgacaagcacaccctgagcaagaaggagctgaaggagctgatccagaaggagctcaccattggctcggtgagtggcctcctccccaggaccccttttcccacccttgtcctttggaagcaggattaggggagagagaggtgccaggtgcatctgactcacatttacccacattctgaggccctggtccacatgtagaccctgagctgtagacccactctcccagcgggtaggggatgcttccagccggatatccatctctccaaatgaggaccagtaactgagaagtagctgaggagaagcaatgccaaag

SEQ ID NO: 4486 - DNA, 525 bp, Homo sapiens
  MAP TO CHR12.1; EXPRESSED IN ADULT LIVER, SIGNAL = 4.7; EXPRESSED IN PLACENTA, SIGNAL = 1.7; EXPRESSED IN FETAL LIVER, SIGNAL = 2.5; EXPRESSED IN LUNG, SIGNAL = 1.6; EXPRESSED IN HEART, SIGNAL = 1.8; EST_HUMAN HIT: BF969862.1, EVALUE 0.00e+00; NT HIT: gi14763473, EVALUE 0.00e+00; SWISSPROT HIT: P78560, EVALUE 4.00e-54
catggcgttgtacagagcagcccccaggaagaagacaagagccaattggctctgccatttggaagcattgccttcttctccccacgattctcatttctgcccccaaatgatgtgtttgttgccttgctcatttcaccggggtgtctttttcctcctcaggtgacagattgactgggatcccctcgcacatcctcaacagctccccatcagaccggcagattaaccagctggcccagaggctgggccctgagtgggagcccatggtgctgtctctgggactgtcccagacggatatctaccgctgtaaggccaaccacccccacaacgtgcagtcgcaggtggtggaggccttcatccgttggcggcagcgcttcgggaagcaggccaccttccagagcctgcacaacgggctgcgggctgtggaggtggacccctcgctgctcctgcacatgttggagtgatggtgcctccagcaaccgctggggagtgtgtccctgagtcatgtgggctgaatcctgactttca

SEQ ID NO: 4487 - DNA, 580 bp, Homo sapiens
  MAP TO CHR8.1; EXPRESSED IN HEART, SIGNAL = 4.9; EXPRESSED IN PLACENTA, SIGNAL =  31; EXPRESSED IN FETAL LIVER, SIGNAL =  20; EXPRESSED IN LUNG, SIGNAL =  14; NT HIT: gi14730903, EVALUE 0.00e+00; SWISSPROT HIT: P15880, EVALUE 2.00e-43; EST_HUMAN HIT: BF314207.1, EVALUE 0.00e+00
ttggctggatttcaatgtccaatggttttgttcatgaaaggcttacttctatatcttttacacactagattctaagtactactttccctctgtcttttcatatttgagaaagcttgcttgttgactttataactgaacagttttgttggactacacttttttttaacaggcttaattcgctttattttacttgtataaaaaccttatgttgtagccacagctggagcctgggtcctctgcacgtagactctggcgtgggtcttgacaaggtggtcagtgaattcctgatagggagacttggtgaatacagtctccttccagaggtcgggggtcaggtagctgtaggtcttggagatggcatcaaaggtggccttggcgaagttgcccagggtggcattgcagctcccagctgaggtgtggcagtcatggataccggccatcatcagcagcttcttagctactggggtcgaggcgatgccagcgccccgggtgcagggatgaggtgcaccagcacagagccgcagcggcctgtcaccttgcaagggaccgtgtggggcttgccgaacttgtttccccagta

SEQ ID NO: 4488 - DNA, 509 bp, Homo sapiens
  MAP TO CHR6.1; EXPRESSED IN HEART, SIGNAL = 8.7; EXPRESSED IN PLACENTA, SIGNAL =  48; EXPRESSED IN FETAL LIVER, SIGNAL =  11; EXPRESSED IN LUNG, SIGNAL =  57; EST_HUMAN HIT: BF871243.1, EVALUE 0.00e+00; NT HIT: AF055066.1, EVALUE 0.00e+00; SWISSPROT HIT: P30507, EVALUE 4.00e-45
ctcctcaccccttccttacctgagctcttcttcctccacattacagcagtgaccacagctccagtgaccacagctacaagtagaaccaggccagcaatgatgcccacgatggggatggtgggctgggaagatggctctgggaaaaggggggaaggtgagggaccctgaccctgctaaagctctccagagaggctccggctttccctaagggacatgacacccccatctccctccttaccccatctcagggtgaggggctcgggcagaccctcatgctgcacatggcaggtgtatctctgctcctctccagaaggcaccaccacagccgcccacttctggaaggttccatcccctgcaggcctggtctccacgagctccgtgtgtgggtctggtcctccccatcccgctgccaggtcagtgtgatctccgcagggtagaagcccagggcccagcacctcagggtggcctcatggtcagagatggggtagtgggtcatatgtgtcttgggg

SEQ ID NO: 4489 - DNA, 559 bp, Homo sapiens
  MAP TO CHR9.1; EXPRESSED IN PLACENTA, SIGNAL =   2; EXPRESSED IN LUNG, SIGNAL = 1.4; EXPRESSED IN ADULT LIVER, SIGNAL = 2.5; EXPRESSED IN HEART, SIGNAL = 1.8; NT HIT: gi14740809, EVALUE 0.00e+00; SWISSPROT HIT: Q64686, EVALUE 2.00e-25; EST_HUMAN HIT: BI837969.1, EVALUE 0.00e+00
atgggcataacaattcctgggtcctggaggcctggatgtatggagcacagggccagcacagagtggccgtgataatgttgactttccttatccaccagacactgccctctcggtgccaccagtgtgtgattgtcagcagctccagccacctgctgggcaccaagctgggccctgagatcgagcgggctgagtgtacaatccgcatgaatgatgcacccaccactggctactcagctgatgtgggcaacaagaccacctaccgcgtcgtggcccattccagtgtgttccgcgtgctgaggaggccccaggagtttgtcaaccggacccctgaaaccgtgttcatcttctgggggcccccgagcaagatgcagaagccccagggcagcctcgtgcgtgtgatccagcgagcgggcctggtgttccccaacatggaagcatatgccgtctctcccggccgcatgcggcaatttgacgacctcttccggggtgagacgggcaaggacaggtaccagcctcctgcctgccccctctggccagcactgtgctccttctcagcatg

SEQ ID NO: 4490 - DNA, 506 bp, Homo sapiens
  MAP TO CHR5.1; EXPRESSED IN HEART, SIGNAL = 0.75; EXPRESSED IN ADULT LIVER, SIGNAL =   1; EXPRESSED IN PLACENTA, SIGNAL = 1.3; EXPRESSED IN LUNG, SIGNAL = 1.5; NT HIT: AF182645.1, EVALUE 4.00e-88; SWISSPROT HIT: Q13123, EVALUE 2.00e-26; EST_HUMAN HIT: BE796974.1, EVALUE 5.00e-88
cacttggtgacatggtggacaagggacacggggcagaggccaggctgattcccaggcttgaggctcacatgataggctctcaggattccattcactcacctccatggtggggcaatcagccttgctgcggataagagtggtggggatatctgtgtcagcatactcatcatccaggtctaccacataggccatgcggcccggcaggaacaactcattccgctcatatgctttgctcttaaaaagcattcggtaaacattgcggcctacaataaggagaagagcagcaagtagccaggatctacaagaacagctgtcacttatgtgcttactctgtgctagccaccatgccaagtgctatgcaagctttgcgtcatttaatctttgcaacagccctatgaagtggatattattatcctttttactgataagaatactatggctgagatttaagtaatttacctaaagtcatgtatctactaagtaatggagcaaagaatggaaccagg

SEQ ID NO: 4491 - DNA, 536 bp, Homo sapiens
  MAP TO CHR8.1; EXPRESSED IN ADULT LIVER, SIGNAL =   2; EXPRESSED IN PLACENTA, SIGNAL = 2.7; EXPRESSED IN FETAL LIVER, SIGNAL = 1.2; EXPRESSED IN LUNG, SIGNAL = 1.1; NT HIT: gi15312244, EVALUE 0.00e+00; SWISSPROT HIT: P97432, EVALUE 1.00e-30; EST_HUMAN HIT: BE794197.1, EVALUE 0.00e+00
tcacctctgaagaacaccccagctgagggggctgtgagtggtacctgggcagtgacggtggaagctccactacctctgggattaggggcactgtttccagagtctgtgaggtcgtgaggatgtcacttatgctgtgctcctgtggctggttctcccctccagggagtctttcccagcctcagctggttcctgcccagcctcaaccccaggcttgccttcagcacctcgctccaggcctggctgtgagagcgcagagctgtacatagaatcccccagggggcggctggtatcaaagcactcaggcaggatgatgatgtaatcctctgaggaagcagaggactgactttgaacttcatctttgagctcatcctcctcctcctcatcctcctcatcctcctcctcctccatgacagcttcttcctcagcgatatggataatctcctccttctcatttccaagtggtccttcaggcaaggcaaatgtcactaaaggatgaaagcaaccaattttaaggtggaagctaaaagcaggcctaa

SEQ ID NO: 4492 - DNA, 570 bp, Homo sapiens
  MAP TO CHR22.1; EXPRESSED IN PLACENTA, SIGNAL =  16; EXPRESSED IN FETAL LIVER, SIGNAL =  21; EXPRESSED IN LUNG, SIGNAL =  14; EXPRESSED IN HEART, SIGNAL = 2.7; EST_HUMAN HIT: AA301462.1, EVALUE 1.00e-113; SWISSPROT HIT: P39023, EVALUE 1.00e-27; NT HIT: AJ238852.1, EVALUE 0.00e+00
aaatcatcaagatgggccagaactgaccatgagaagcaagccactgatgtccacgtgatgcataagctacagtcagtgaagcagcactgacaggcacagaaaccccactccccatcacgggggcctcttcccacccccagggagccactctcagaacctcaccttcttgttgatctcagtgcggtgatggtagcctttctgcccagcgcgtgccacagagaaggctacacgagcaggatgccatgccccaatacaggccaccttgcgcaggcctcggtgggtcttgcggggcagcttcttggtgtgccaacgactggtgacccctggaatggatacacattacttcacctcagcgcccagcacctcccactgaccccttcctgctactcagcaattaccaaccatggctgggtcatctgagggagtgataagattatttcatgtgcattacccacaggtctcccctgtcaagctggataggctctgggggtgtcaccctgaactcaattctgaatgggtgctttttaaggcatccattagtttaagctcccccattcacagggactgact

SEQ ID NO: 4493 - DNA, 507 bp, Homo sapiens
  MAP TO CHR19.1; EXPRESSED IN FETAL LIVER, SIGNAL = 3.5; EXPRESSED IN PLACENTA, SIGNAL = 3.7; EXPRESSED IN LUNG, SIGNAL = 2.3; EXPRESSED IN ADULT LIVER, SIGNAL = 4.4; EXPRESSED IN HEART, SIGNAL = 2.7; SWISSPROT HIT: Q09455, EVALUE 1.60e-02; EST_HUMAN HIT: BE276976.1, EVALUE 1.00e-101; NT HIT: gi14758207, EVALUE 1.00e-101
tgattagaaaagggggagggagggggaagaggtttcagcgtctcccacccctgcaggtgatgttctgcaccctgaacacccacaaagtggacatggacaagctcctggggggccagatcgggctggaggacttcatcttcgcccacgtgaaggggcagcgcaaggaggtggaggtgttcaagtcggaggatgcactcgggctcaccatcacggacaacggggctggctacgccttcatcaaggtgcctggggagacggggcaccccggaggcctgggagtgagggtgggccatgggaccccggaaaccagggcagagccccaagggctgatgactccccgcccccgcagcgcatcaaggagggcagcgtgatcgaccacatccacctcatcagcgtgggcgacatgatcgaggccattaacgggcagagcctgctgggctgccggcactacgaggtggcccggctgctcaaggagctgccccgaggccgtaccttcacgctgaagct

SEQ ID NO: 4494 - DNA, 505 bp, Homo sapiens
  MAP TO CHR5.1; EXPRESSED IN PLACENTA, SIGNAL =  10; EXPRESSED IN FETAL LIVER, SIGNAL = 4.4; EXPRESSED IN LUNG, SIGNAL =  11; SWISSPROT HIT: P39028, EVALUE 9.00e-27; EST_HUMAN HIT: BE514876.1, EVALUE 8.00e-84; NT HIT: gi15297223, EVALUE 3.00e-85
caattttaccccacaatgcccaaatgaatactactacacaaaaacctgcaattactttcaaaacaagaattcgtaagttcatgtctcgaattcctataataaactaaaacttgacgggagcaatggacttacactttttccagcacgattccttttgcatgagaagcacctccaaaagggttggcctttagggctgtgcccaaatgagctttcttatactgtttatcatgccacttctggtctcgtcggtgactacggagcttcctagcagtacgaagtccacgacacttgcctaaaaattaaatattttagttcttccgtaaaaacacgccatctacgtgtttcccatcttctaagacactcgcctcacctggaataaacccttaagccgattggctctcgtactatttattggcctgtgggccaaacatttggccttcaagttgccctgaaccgactaataaacgttcgaagagggctccggagaatgtgttctcccgaagga

SEQ ID NO: 4495 - DNA, 563 bp, Homo sapiens
  MAP TO CHR19.1; EXPRESSED IN PLACENTA, SIGNAL = 1.7; EXPRESSED IN FETAL LIVER, SIGNAL =   1; EXPRESSED IN LUNG, SIGNAL =   1; EXPRESSED IN HEART, SIGNAL = 1.8; EXPRESSED IN ADULT LIVER, SIGNAL =   1; NT HIT: gi15302121, EVALUE 1.00e-106; SWISSPROT HIT: P12107, EVALUE 4.00e-08
actcgcttcccttagcttcctggggatagattgaagcttgacatcttccttctttaatatcctctccagattcaggctgtagacaaaacatcccaccctctgcctcagtttcccccatcactgaactcctacctcgaaagtcttttccccaaggtcctgggtccccagcacagtgagtccagctatgctgatgaagcgggggccatggcccaaaacagggggctgagcttcacagtcagctaccagggtcaccatctcaccatctatgctgacggccacacggtgccacctgcaaggggacggcctcagtgcgggtgcttctcaccccaccccttatccacggacccccgcccactctccccatgctcacctgccatctgtgaggttgacctgctgggggagggggcggaaggggtcacctaggagacccagcgctggccccagtgccaggcccaactgccgggcacccctttcatcataaatggacagcaggacagactgattggctggctgtccccgcaaggtgatcagcaaggagaagttctcaggaaagtggccttctg

SEQ ID NO: 4496 - DNA, 531 bp, Homo sapiens
  MAP TO CHR6.1; EXPRESSED IN HEART, SIGNAL =  16; EXPRESSED IN PLACENTA, SIGNAL =  25; EXPRESSED IN LUNG, SIGNAL =  11; SWISSPROT HIT: P04406, EVALUE 4.00e-29; EST_HUMAN HIT: AV726496.1, EVALUE 0.00e+00; NT HIT: X01111.1, EVALUE 0.00e+00
ctcaaagcatcctgggctacactgggcaccaggtggtctcctccgacttcaacagtgacacccactcttccaccttcaatgctggggctggcactgccctcaacgaccactttgtcaagctcatttcctggtatgacaatgaatttggctacaacaacagggtggtggacctcatggcccacatggcctccaaggagtaagacccctggaccaccagcctcagcgagagcacaggaggaagaaagaggccctcactgttggggagtccctggcacactcattccccaccacactgaatcttccctcctcacacattccatgcacaccccttgaagagggaggggcctagggagccccatgttgtcgtgtaccatcaataaagtcccctgtgctcagccaaaaataataacaatcataatagtttaggcagaaaggataacataagtaaaaaaaaaaacttgtaaagcagccagaaataattgaattttaacattcacaggccacaaaaagaggagaaaccgacaaggatga

SEQ ID NO: 4497 - DNA, 514 bp, Homo sapiens
  MAP TO CHR2.1; EXPRESSED IN PLACENTA, SIGNAL =   5; EXPRESSED IN FETAL LIVER, SIGNAL = 5.8; EXPRESSED IN LUNG, SIGNAL = 2.8; EXPRESSED IN HEART, SIGNAL = 3.6; EXPRESSED IN ADULT LIVER, SIGNAL = 6.1; NT HIT: gi14724681, EVALUE 1.00e-103; SWISSPROT HIT: Q9Y7R3, EVALUE 7.20e-01; EST_HUMAN HIT: AA314405.1, EVALUE 1.00e-103
atcaagaccaagaggcgatggtttaccgttttagactccacgccgcagagaagacaaaagttagtgggttgcaaggcactcccaaaaggatacacaatttggcattccagaggaaacttctgggtaatttaagcaacataagagcatgatgggcttattgtaccccatggttatgtaaaaaaattccccaatgactgaaatgctctggtgaaaggcatcacttgtacttaccttttaaatctgtcatttctacacaacctaactctggcaactcgagaggttctcccgtggagagagtctggacatcagagggaaacagcagttcacttctgtagtcctggcagtggagagtggacagaaacacccctgctgtgctgcactcatcaaatgaggctgctgtcttctgaaacatgggatcaatctgaacacagagagagaagaaactgaagatttacggcatgtagccaagggaaagataaattctcatgcatttggccccactcattagcaggta

SEQ ID NO: 4498 - DNA, 540 bp, Homo sapiens
  MAP TO CHR10.1; EXPRESSED IN HEART, SIGNAL = 1.2; EXPRESSED IN ADULT LIVER, SIGNAL = 1.2; EXPRESSED IN FETAL LIVER, SIGNAL = 1.8; EXPRESSED IN PLACENTA, SIGNAL = 1.7; EXPRESSED IN LUNG, SIGNAL = 1.6; SWISSPROT HIT: Q06730, EVALUE 1.00e-105; EST_HUMAN HIT: AL539492.1, EVALUE 0.00e+00; NT HIT: gi15299300, EVALUE 0.00e+00
cattcatagggtttctcccctgtatgtgttctattatgttttgttaggtatgatttattgtaaaagatttttccacattcatgacattcatagggtttctcccccgtgtgtgttctataatgttgagagagggttgacttatggctaaagaatttcccacattcaggacatgcaaagggtttctcccctgtgtgcgttctctgatgtattgtgaggtctgacttcaagcagaaggttttcccacattcataacattcataaggtttcaaccctgtatgaattatctgatgcctggtgagtactgacttgtggtagaaagttttcccacatgcattacattcataaggtttatctcctatgtgagttctctgatgctgtgtaagatgtgacttttgacaaaaggatttcccacactcaagacattcaaaaggtttctcacctgtgtgagttctctggtgtactgtaaggtgtgaattcatacagaaggattttccacattcataacattcatagggtttctgccctgtgtgtgttctctga

SEQ ID NO: 4499 - DNA, 500 bp, Homo sapiens
  MAP TO CHR1.1; EXPRESSED IN PLACENTA, SIGNAL =  18; EXPRESSED IN HEART, SIGNAL = 2.8; NT HIT: gi14724560, EVALUE 0.00e+00; EST_HUMAN HIT: AI858765.1, EVALUE 0.00e+00; SWISSPROT HIT: P24049, EVALUE 6.00e-63
cagtgtgtaccattccgacgttacaatggtggagttggcaggtgtgcgcaggccaagcagtggggctggacacaaggtcggtggcccaaaaagagtgctgaatttttgctgcacatgcttaaaaacacagagagtaatgctgaacttaagggtttagatgtagattctctggtcattgagcatatccaagtgaacaaagcacctaagatgcgccgccggacctacagagctcatggtcggattaacccatacatgagctctccctgccacattgagatgatccttacggaaaaggaacagattgttcctaaaccagaagaggaggttgcccagaagaaaaagatatcccagaagaaactgaagaaacaaaaacttatggcacgggagtaaattcagcattaaaataaatgtaattaaaaggaaaaataaaaaataaaaataaataaataaataaatacatatttactatctggccctttacagaaaaagttgcccaacct

SEQ ID NO: 4500 - DNA, 588 bp, Homo sapiens
  MAP TO AJ132410.1; EXPRESSED IN ADULT LIVER, SIGNAL = 0.71; EXPRESSED IN PLACENTA, SIGNAL = 1.9; EXPRESSED IN LUNG, SIGNAL = 1.7; EXPRESSED IN BRAIN, SIGNAL = 0.89; SWISSPROT HIT: Q62523, EVALUE 4.00e-03; NT HIT: AJ297357.1, EVALUE 0.00e+00; EST_HUMAN HIT: BF841119.1, EVALUE 2.00e-29; EST_HUMAN HIT: BF841119.1, EVALUE 2.00e-29
ttccttgttgactggcttccccaacccagtacccttcttgtgctgatttgtccccataaccaggtcaaactcccttacttgatactaattcttagattagcagatgaggagaaaggcttgtcttttcttcattttttaaaataagtgtccatgtaggtctttctttcagtgttaactctgacattctagaaggaaggactcctatccctcctacttcccctctcatcagcttaaatgtattcttcttccaataagtactcctgatttaccttctcctcccaaggccacctacttgttacccccaaaaccctcttccctccccaccccacagtacatcaagcccgacagcccccctaacaggcctctcctatgtgttcttgcttttctctggtcccagggctcagatgagaccatccgtgtcgtgtccatggacagagactaccacgtggagtgttaccactgcgaggtagacccctccccacccagcccccaaagcccattgtagacatccaagagaaaagcatcctgcgttgactggggcaagaggcagtcaacaagattctggcaagggtcagccctctagagctt

SEQ ID NO: 4501 - DNA, 578 bp, Homo sapiens
  MAP TO AF235098.1; EXPRESSED IN LUNG, SIGNAL = 0.53; EXPRESSED IN FETAL LIVER, SIGNAL = 1.4; EXPRESSED IN HELA, SIGNAL = 0.82; EXPRESSED IN PLACENTA, SIGNAL = 0.73; EXPRESSED IN ADULT LIVER, SIGNAL = 1.2; SWISSPROT HIT: P39770, EVALUE 1.00e-25; NT HIT: AJ010104.1, EVALUE 0.00e+00; EST_HUMAN HIT: AU131453.1, EVALUE 7.00e-66; EST_HUMAN HIT: AU131453.1, EVALUE 7.00e-66
cgacatctctaggggcaaaggcgaaaagataaactgtcttgggagtcgtctgcagacttgggcatatcagggaatctgccctcaggacagtcttccattttttcactggagaagttgtctaggtcatcaaaatttttcccatagaaggagcctatgtcagactccatggactcagagtaactgctggggactggagtgttggagacctggcctcccatatgcattcgagtgtgctgctgcgggatgacagcatcgtctgtcaacttccagcagatggggcaggaatgctgggctctgagcaggggcacagcatgatggacactgtagtgggttttaagattcctttctgtgatgaaaacctggccacagatcttacacttaaaaggcctctccctaatgtgtgtccaatagtgcatttacaaggcactctgacagctgagaactgggtagcagatgatgcactcactggggccagtggccttttgtcaatgttttctaccagttgctgaagcttggatgtctctgatgcctgggctgagtccaagagccccccagaaggaaacttggccttgaactgc

SEQ ID NO: 4502 - DNA, 537 bp, Homo sapiens
  MAP TO AL121768.2; EXPRESSED IN ADULT LIVER, SIGNAL = 0.93; EXPRESSED IN BRAIN, SIGNAL = 1.1; EXPRESSED IN HELA, SIGNAL = 0.7; EXPRESSED IN BONE MARROW, SIGNAL = 1.1; EST_HUMAN HIT: BI712955.1, EVALUE 0.00e+00; SWISSPROT HIT: Q9VU68, EVALUE 2.90e+00; NT HIT: AF114156.1, EVALUE 8.00e+00; EST_HUMAN HIT: BI712955.1, EVALUE 0.00e+00
aaaaatccttttccccctctcattaacattcttttcactccctaatttctgaaagaactagatttttgaaagatgaaatatatgcttgaccagggcatgtaatgattagcagatcacagtatcatctcaacaacattcatgtggctgatgatctaaggcaagagaatgtaaagtagtcaaagtcacactatgtgcattttaagagacatactgcaccaaatgcaatagcgagcatggtctgcatccgggcatcttccagtgtgctcagtagcccttttttgctaagaagagctcttcctgccagggtccagaacttcacatgttttactcccactgagacaaactgggtatctgaatctggtcggaattctgccacaaaaatacgttgattgtgaccagctctgctggcaattttggcacctgacaagatacaacaaaattatctaggttattacaagaaccaagctaatcaacagcatcaaacaaatatgtaaaatacatagttcaaaaaacaaaggcttagaagagaggccaatg

SEQ ID NO: 4503 - DNA, 565 bp, Homo sapiens
  MAP TO AC007565.1; EXPRESSED IN PLACENTA, SIGNAL = 1.2; EXPRESSED IN ADULT LIVER, SIGNAL = 1.6; EST_HUMAN HIT: BI910523.1, EVALUE 1.00e-101; SWISSPROT HIT: P02457, EVALUE 3.10e+00; EST_HUMAN HIT: BI910523.1, EVALUE 1.00e-101
tgggtactagcattctgcccgttttgcagaaggggaaactgaggtatagaggggtgaagccacacaactgaggttacactgctataaagtgaaggaactggtgtttgaatccatgctctctggtccccagtttagcagagaggaaggcaggagaagggaagaccaggacaggtgggtgtgggtgggggcgggatgagaggagacctgctgggctggcagagtctcaggctcagaacatggagaaaccctagatcctgaaaccccaaatcacccacttctgtgtttcttcttacatggacaaagaaaacgatgccagaagaagacccggccaccttggatgatcactcaggcaccactgccacccccagcaactccaggacccggaagaggcccacttccacgtcctcctcgcctgagacccccgaattcagcactttccgggcctgccagtgaggctgaggactgggggacccctctgtctccaggcattcgggggcctgaggtccctccagctacttctgggggggctctgtcagccactttctcagggaattggacagaggaa

SEQ ID NO: 4504 - DNA, 550 bp, Homo sapiens
  MAP TO AC005614.1; EXPRESSED IN ADULT LIVER, SIGNAL = 1.2; EXPRESSED IN LUNG, SIGNAL = 1.7; EXPRESSED IN HELA, SIGNAL = 1.3; EXPRESSED IN FETAL LIVER, SIGNAL = 1.7; EXPRESSED IN BRAIN, SIGNAL = 1.8; EST_HUMAN HIT: AI700612.1, EVALUE 0.00e+00; EST_HUMAN HIT: AI700612.1, EVALUE 0.00e+00; SWISSPROT HIT: Q14585, EVALUE 5.00e-49; NT HIT: gi4507974, EVALUE 7.00e-28
gaagttgagcaaatcccaggccatgatgaaagttcttcacacattcttttatgttcacaagatttctcatcaatatgagctctctggtgttgagtaaatttttcgtacacagtgaaggcttgtccacactccttattgtcacaaaatttctaactattctgaattttctgatgttgagacagctgatcatccacagcaaatgctttcccatattccttacattatagcgtttctcaccagtatgaattttaacatgttgaacaatgtttgagctacaactaaaggtcttcccacattctgtacattcacagggtttcataccagtatgaattctttgatgtgcagtcaggaccaaactaaatctgaaagttttcccacactccttacattcatagagtttctcaccagtatgaatactctgatgttgaacaaggtttgagccactattgaaggccttcccacatttctcaaattcaaatggcttctcgccagtatgaatgacctgaagtccagcaagctgtgtcagaaaactgaaggcctttccacattc

SEQ ID NO: 4505 - DNA, 595 bp, Homo sapiens
  MAP TO AL023753.1; EXPRESSED IN HEART, SIGNAL = 1.8; EXPRESSED IN ADULT LIVER, SIGNAL = 1.4; EXPRESSED IN LUNG, SIGNAL = 1.6; EXPRESSED IN FETAL LIVER, SIGNAL = 2.4; EXPRESSED IN BRAIN, SIGNAL = 1.6; EXPRESSED IN PLACENTA, SIGNAL =   2; EXPRESSED IN BONE MARROW, SIGNAL = 1.7; EST_HUMAN HIT: AW182053.1, EVALUE 1.00e-15; EST_HUMAN HIT: AW182053.1, EVALUE 1.00e-15; SWISSPROT HIT: O95522, EVALUE 5.00e-37; NT HIT: gi13636190, EVALUE 2.00e-43
aggcctctctgagcttcctccccagccccatcagaagtctctgggccacccttgggcctcccactccttctgacccagctaaccctaccctggatgcctgagccctccccacctggttagctgggtcacctcacctggggcgaaccttctgggcaagcagtgcatcaagcccctccagcacagctcgaaagatctctagattacatgacttcatcagggaccctagaggaaggcaggtgaagggccaggcctgcaccatagttgtcagggtctcgcagcatctcctggtaaaggcctccatgaacagtgggggaaagagctccctgggcagctcctccagggtggggatggccaaggcccggtctctcagcagactctgctcagccagctccaggagtctaggtggggcctggaggctcatcctgatgaatctagagaaaaaaacatcattcttacggcaaatcacatcacttcatcatctcctagtgccaatgtcattgctctggtagaggtggaaaggtaattagttcaccccaattccactctgcactttctggacacaaatctgtaattctgcccttgctggtaccataaa

SEQ ID NO: 4506 - DNA, 563 bp, Homo sapiens
  MAP TO AF196972.1; EXPRESSED IN LUNG, SIGNAL = 1.3; EXPRESSED IN PLACENTA, SIGNAL = 0.87; EXPRESSED IN ADULT LIVER, SIGNAL = 0.78; EXPRESSED IN HEART, SIGNAL = 0.94; EST_HUMAN HIT: BG032886.1, EVALUE 3.00e-56; EST_HUMAN HIT: BG032886.1, EVALUE 3.00e-56; SWISSPROT HIT: P20908, EVALUE 8.00e-03; NT HIT: gi14759567, EVALUE 2.00e-56
ggggatttggttttgttgtgtgtttttcattctgtttgcaataagaagtacagacaacttcatacttgtctcccacccaactcccgttcattactataaagccctgactcaaagccctgccactcttcctcctctgcctggagactcgcacctcccccaacccaggatgccctcactgtgaacagtaccctcatcttggatgcctctgcataggaggctccctgaaccatctcttccctatctcagggggtaccctgggcatcctcagtcctggaacccactgtgccctgtgtgtcccctgggctcccccgtgcaggaggaggtgggacacagtgagtaggtccagttgccaagtatatccatctgtcccccacagggcctgggggtgcgagccttaaacttgctctttggagctctggccatcttccacctggcctacctgggctccctgtttgatgtcgatgtggatgacaccacagaggagcaggtgaggtggggccctgggctgtgtggttaaccaagggtggcgctatctggcggggggaaaccatgaggacaaaggc

SEQ ID NO: 4507 - DNA, 592 bp, Homo sapiens
  MAP TO AF036938.1; EXPRESSED IN ADULT LIVER, SIGNAL = 1.3; EXPRESSED IN HEART, SIGNAL = 0.99; EXPRESSED IN HELA, SIGNAL = 1.3; EXPRESSED IN FETAL LIVER, SIGNAL = 1.2; EXPRESSED IN BRAIN, SIGNAL = 0.96; NT HIT: AF165902.1, EVALUE 1.00e-126; EST_HUMAN HIT: BI546888.1, EVALUE 3.00e-62; EST_HUMAN HIT: BI546888.1, EVALUE 3.00e-62; SWISSPROT HIT: P34903, EVALUE 3.00e-17
tttcttttccttgcattgcctcaggctgtctcctaagcatgccccagatattcctgatgacagcactgacaacatcactatcttcaccagaatcttggatcgtcttctggacggctatgacaaccggctgcgacctgggcttggaggtcagtccttttaagatctttgaagtccttttcagatcttcttcttggccattgttatctaaaaacagttataaggtgccttcagtagtctattggccaatgagattagtgtaaagctgaatttcttccctatgagcactaaaaattagtcataatccttcatttcagtaggtgatttctctggtctggcttcagaagattctaggtttttgctaggtgcatatggagtaatacacagatgttccatgactcacaatggtttgacgtatgatttttgtctttatgatgggtttatgggacatagcccaatggatttagacttactatatttccaacttatgatgggtttattgggatggggtcttgtaagttgaggagcatctctccctcaaggttagacaatgcccatttctagtaacagaataccaatacctgcctgggtgact

SEQ ID NO: 4508 - DNA, 517 bp, Homo sapiens
  MAP TO AC012315.4; EXPRESSED IN ADULT LIVER, SIGNAL = 1.3; EXPRESSED IN HEART, SIGNAL = 1.2; EXPRESSED IN BRAIN, SIGNAL = 1.4; EXPRESSED IN FETAL LIVER, SIGNAL = 0.96; EXPRESSED IN LUNG, SIGNAL =   1; EXPRESSED IN HELA, SIGNAL = 1.4; EXPRESSED IN PLACENTA, SIGNAL = 1.3; SWISSPROT HIT: Q07342, EVALUE 1.40e-01; NT HIT: AL163247.2, EVALUE 5.00e-81; EST_HUMAN HIT: AU134191.1, EVALUE 9.00e-19; EST_HUMAN HIT: AU134191.1, EVALUE 9.00e-19
agcatgtaggggtgcttcaggccccatgtccttaggccccatggccttatcttgcattaggactgctggtctcaagacctcttgcaactctgctgctaagggacttgtactcagcgtactctgttgcttcaagtaggtgccccactttgctaaagtggatgtctgcactgtcccagtccggggggttgttatcaatgaacacatccatcctgctatcaggtaactcgtctacacgacaactgtagcctgtcctgccatgctctcatgagcccgaagggcagcatatgcagttactaactgcttctctatcagtgaatactggagctcagcttctttccatagttgggaccaaaagcctactggtgttctcaagcactccatgctctgccacaggccccagccaaaaccatctgtggtcacatgcacatccaactcaaatgagcacccttggtcaactacccatagggcttgtgcctgctgaatagcctatttagctgccaggaagtcagtctcagcc

SEQ ID NO: 4509 - DNA, 569 bp, Homo sapiens
  MAP TO AC006993.2; EXPRESSED IN ADULT LIVER, SIGNAL = 2.6; EXPRESSED IN HELA, SIGNAL = 2.4; EXPRESSED IN BRAIN, SIGNAL = 2.6; EXPRESSED IN FETAL LIVER, SIGNAL = 2.6; EXPRESSED IN BONE MARROW, SIGNAL = 1.3; EXPRESSED IN PLACENTA, SIGNAL = 3.3; SWISSPROT HIT: O14230, EVALUE 5.50e+00; NT HIT: AF109907.1, EVALUE 3.50e-02; EST_HUMAN HIT: T72710.1, EVALUE 8.00e-04; EST_HUMAN HIT: T72710.1, EVALUE 8.00e-04
agccgtataccaagtgccagagacaagaatgactggctctagtaaaaaagaacacatctagaagagtatctccaatcagaattgcaacctgattaaatttaaaacagagcattatggtttctaacgcctattctcctttgcgcaaggcaagtaggtgagtaaaatgagtatgtgctaaaaatctcttttaaaatttttaagtatttaatagcagcggtaatctctgacatttctctagtgaatttactgcttttgatttgctctcctggatgggagaacagttccagggctttccacttgtccccttctaccacaatatccttcattccatggttcagaaagccaatatggacattctgcaagctacagaggatatctagtcaaggtaagcattgaagaactggacaatgatcacaaggtagataaacaaactccctggaactacagtaagagtaattcaagttacaaagaaagaaaaaggaaaagaacatgagagaagggaaagaaagaaggaaggaaagaaggaaggaagaaaggcaggcaggcagggagggagggatcatttggtc

SEQ ID NO: 4510 - DNA, 558 bp, Homo sapiens
  MAP TO AC022149.3; EXPRESSED IN BRAIN, SIGNAL = 2.8; EXPRESSED IN BONE MARROW, SIGNAL = 2.3; EXPRESSED IN HEART, SIGNAL = 3.4; EXPRESSED IN ADULT LIVER, SIGNAL = 3.1; EST_HUMAN HIT: BG721636.1, EVALUE 1.30e-02; SWISSPROT HIT: P07390, EVALUE 6.90e+00; NT HIT: gi14768139, EVALUE 1.00e-100; EST_HUMAN HIT: BG721636.1, EVALUE 1.30e-02
ttccccagattttctcatgcctctgccacccctccctcctgcccctccctgtcactctagataagtttgcgttttctagaatttatataaatttttgtaatttacataaagggactcatgtggtgtattcaattttttttttctaattgcctaacccagatcccagctgctaaccagtccccagggtgtatcagtcctcattattgtcttacctacactatcgttttggattttcaggactttttgttctggatctttcaaggcagtttctagaactttcgattccacatcccggagaatagtggtagctgtggatgagatttcttgtctcccttctgttctccataaagtctgattggtgagaagtgactcaaatttgtccacaatcttttgcagctttgaagacataaagaattttcattttttaaaaatgtaatctggtaagtcccatatccaaaagaacagtagaaagcatgagaaagcaggctctggagctggaggaaccacgttcaaatcctggcacttcatcatgtcccagctttgtgaccttgggcaagt

SEQ ID NO: 4511 - DNA, 524 bp, Homo sapiens
  MAP TO AF241731.1; EXPRESSED IN PLACENTA, SIGNAL = 0.7; EXPRESSED IN ADULT LIVER, SIGNAL = 0.79; EXPRESSED IN HELA, SIGNAL = 0.45; EST_HUMAN HIT: AI500364.1, EVALUE 3.00e-03; NT HIT: U80017.1, EVALUE 2.00e-03; EST_HUMAN HIT: AI500364.1, EVALUE 3.00e-03
tttcccagagcaccaaaatcttatcacaagccaccctcctgttataggacggatcatgttatattgtgattatttccttttagttttgtatgtaaagatttttgtttcatttcaagagtccaaaagcaaaacaaagctactggcttaaaccaaaatgagaatttatgggtttgcggcactgaaaatttcaccttcagttgcagcttgattcagctgcccaacagcatctccaagatctatctgggtgagctccagtctcaggtttcctgtgttctctggctttgtatgttgctcctcaggagcttcaagtttaaataatctcggaactcctgccaagaagagaaaaagcctccttttccccgaaggtagacacaaatcttgatcctgattggcctggcttgcatcatgaacccatctctaaccaatcactgtgatctggaggatgaacttttctaattggcttcaaagaggtcacatgccccactcatagagtccagaagtggagctgaattgcctaagccttg

SEQ ID NO: 4512 - DNA, 596 bp, Homo sapiens
  MAP TO AC025432.3; EXPRESSED IN BRAIN, SIGNAL =   2; EXPRESSED IN HELA, SIGNAL = 3.1; EXPRESSED IN ADULT LIVER, SIGNAL = 1.8; EXPRESSED IN PLACENTA, SIGNAL = 1.9; EST_HUMAN HIT: AW959173.1, EVALUE 0.00e+00; EST_HUMAN HIT: AW959173.1, EVALUE 0.00e+00; SWISSPROT HIT: P75602, EVALUE 1.00e+01; NT HIT: AF145715.1, EVALUE 1.00e-108
ttctggctcccaaacacttccttgcatttcagcctttgctgcttacaagatcagcgacgggagactttttcctgttctgtttctccacttctacttgcattttggccattggtttggccatggcaagggccattttggcttcagcttgcaatttcttttgccttgtaaggaagtccatgtcatccaaggattcagactcctcttcagtagtgtctctatcagaataggaagaactctgtttgctctgcaaagggaaaaagagcagcctgagccttccatggcatgccagctagcatccacttagagatgggctacaacatcctctgagccttctctcagagcagctcagagttccctccctcaatgtgacttgctacttgagttgataaatctcaagtaacagaaaaagggtctagtttaaaatagattttagcataaacagagagagcagtatagttaataatgggaaatatatttacaacaaccttgaaatatgtctttgattcttggcctcaaaactttcctgaagtgaacagacataacaaaatattgactcgaagccaaggccctacgtaggttctttgcgtggacaggat

SEQ ID NO: 4513 - DNA, 575 bp, Homo sapiens
  MAP TO AC008282.2; EXPRESSED IN BONE MARROW, SIGNAL = 5.1; EXPRESSED IN PLACENTA, SIGNAL = 6.7; EXPRESSED IN ADULT LIVER, SIGNAL = 4.8; EXPRESSED IN HEART, SIGNAL = 6.4; EXPRESSED IN LUNG, SIGNAL = 4.3; EXPRESSED IN FETAL LIVER, SIGNAL = 5.8; EST_HUMAN HIT: BF082285.1, EVALUE 6.00e-91; EST_HUMAN HIT: BF082285.1, EVALUE 6.00e-91; SWISSPROT HIT: P31316, EVALUE 3.20e+00; NT HIT: gi7706239, EVALUE 4.00e-91
gttctccttcctgagagcccccagtctgcctccgagcactcttcctcaactaccagtctgtagaaataatagcaaaagcaagtaagcattgataaaatttttcttttcatcacactaaattctgatatataaaccgagccttacctaaatctctattactgtcctttgcaagtactccatgggaatatattacattctataaaagagattactccctatctgatgagaggcctacatttcttaagagattgttttaacaatctagagaagataaagatataacagtgaaaacaactgaaacattgctaatgaatttatataaaccatgcagttgattttaaaaagaaagatgcactgcttacctgaaggggtcgaaggtaagttaaagacttcttccaccactgcccatcactgacggcctgcagcaccgctttggtggtggttgtggtgttggaaaggactttcatggtggtagcagtggtccagcgcaataggtcagctgaattgctacctggaacacctacttcatcctgtattaaagaaacaaaatagcaagggcaaaaatgcattaccat

SEQ ID NO: 4514 - DNA, 527 bp, Homo sapiens
  MAP TO AC016620.5; EXPRESSED IN PLACENTA, SIGNAL = 2.9; EXPRESSED IN ADULT LIVER, SIGNAL = 3.7; EXPRESSED IN HEART, SIGNAL =  10; EXPRESSED IN FETAL LIVER, SIGNAL = 2.7; EST_HUMAN HIT: AV761797.1, EVALUE 0.00e+00; EST_HUMAN HIT: AV761797.1, EVALUE 0.00e+00; SWISSPROT HIT: P41719, EVALUE 1.30e+00; NT HIT: gi15295679, EVALUE 1.00e-118
aacttcatgtggctgctgtggggagtaaatgagaggagccaaacacataagattaggaaaatgttagttttagcatctgtcataacaaatcaatgatcaaaagtgttagatattatcaaaaagacgttgtactacgcttaaatcactatttcgttaagacatgcaagtatggagtagccagaagtgagaggacggccctctgttctgagggcacaaaactccacacatcatccctcttcggatctggcttgaaccctcctactcagcggacgcagcactccaattcgtcccggtactatgtctgcagctacctttcctcttcttggccagtgttgcctccacaggtaaaggtccaacccagcgctcttcgttctcctcatcgttctcctgggacaccgccactgctactgccagctctctttcgctgagttctgttttttccggttcctccgggtcccggcgccttctacgtctctgctgaaaatcgctaccactttccgccgccatgttgttcgcatcgtcagaaa

SEQ ID NO: 4515 - DNA, 588 bp, Homo sapiens
  MAP TO AF015722.1; EXPRESSED IN PLACENTA, SIGNAL = 1.3; EXPRESSED IN ADULT LIVER, SIGNAL = 1.2; EXPRESSED IN HEART, SIGNAL = 1.4; EXPRESSED IN BRAIN, SIGNAL = 1.3; EXPRESSED IN LUNG, SIGNAL = 1.8; NT HIT: AL163268.2, EVALUE 0.00e+00; EST_HUMAN HIT: BF945758.1, EVALUE 8.30e-01; EST_HUMAN HIT: BF945758.1, EVALUE 8.30e-01; SWISSPROT HIT: Q9V7N5, EVALUE 7.50e+00
tgcaggataacacatcaccagctaaatgataaggaacactggctaaaatggattaaaacatcattttattctgggctgtaaatttctcgattgaaaaaattattttcagtgacctaatttcctatgtatatatatcaaatgacatctgaatcaagttaaagccttaacctttttccatttcctgttgtaaaactgcctgaatctgacatctctttaagtggagttgaagttgttttcacttgtgatgtcagaattcggataatgcccaaattgatgcttagtgatatttatcttaaagacctcatttcctaagatgtcctcttttcttttaaggaagacttgaattctgtttttggatttccctagagtttagaatagtcacttattacaatattccccactgcttatttgagtctcacagtactggtgactaaatttcaaacaagaggcaactgcactgcaagccttcagcctgacaaggaatcttagctcaaaggctggagaagtcaaaggtaatgacagtgtccatgttccttcctacctgactctttcgttgagtacttaggcacccacctgtttctcaccatc

SEQ ID NO: 4516 - DNA, 525 bp, Homo sapiens
  MAP TO AC012331.9; EXPRESSED IN PLACENTA, SIGNAL = 1.3; EXPRESSED IN HEART, SIGNAL = 1.2; EXPRESSED IN ADULT LIVER, SIGNAL = 1.3; SWISSPROT HIT: P51531, EVALUE 2.20e-02; NT HIT: X71968.1, EVALUE 2.00e-99; EST_HUMAN HIT: BG703148.1, EVALUE 9.00e-19; EST_HUMAN HIT: BG703148.1, EVALUE 9.00e-19
gagcacaggagcacagagtgggggcatttcagcccaaccagcccctccccctgcagcagggtcacgagcatcctgcccaccacacacagggccctgctgagctcagactgatggccaggctgaacctggaggcctggggctgggcaggtgggtgagaccctgggggcagcacctgggcagtgagtcaggagaccaaggaaaagaggggccaggccatggctgaagtgcctccaatgctgcttctcaagtctgaggctgggcaggctcctcccaggtctctcttaaccccttgttggagagaacagcccgtgatgccaatcagcagagtcaggggctgctgctggaggagctttgtggtttccagaaggactcagccccaagggacccaaagaggttaggggtggccttgccctcccaccctttgcccacaggatctcctttatcaattgattccatattctctgcagacatctccacatcacactgtgctcagcctcattcctgggctcacttggtcacagcaga

SEQ ID NO: 4517 - DNA, 563 bp, Homo sapiens
  MAP TO AL121768.2; EXPRESSED IN HEART, SIGNAL = 2.7; EXPRESSED IN ADULT LIVER, SIGNAL = 1.7; EXPRESSED IN FETAL LIVER, SIGNAL =   2; EXPRESSED IN BRAIN, SIGNAL = 1.7; EXPRESSED IN BONE MARROW, SIGNAL = 1.7; EXPRESSED IN PLACENTA, SIGNAL = 1.7; SWISSPROT HIT: P23757, EVALUE 3.60e-01; NT HIT: U60822.1, EVALUE 2.00e-46; EST_HUMAN HIT: BG028830.1, EVALUE 1.00e-51; EST_HUMAN HIT: BG028830.1, EVALUE 1.00e-51
gctccgaagacaggaagatgtgggaaagtctgtaagttcctagagacttgttgaatggctttgtctaaaatgatgatagtgatatggacaataaggtccaccctgaggtggtctcagatggagaagagaaacttgttgggaactggagtaaagatcaatcttactatgcaaagagactggcagcattttgcccctgccctagagatctgtggaactttgaacttaagagagatgatttagggtatctggtggaagaaatttctaagcgacaaagaattcaagaggaagcagagcatgaaagtttggaaatttttcagcctgatgatgcagtagaaaagaaaaacccattttctggggagaaattcaagcctgctacagaaatctacataagaacgaggagccaaaggctaatcacaaagacaaagaggaaaacgtctccaggccatgtcagagacttttgcggcacccctcccatcacaggctcggaggcctcagaggaaaaactggtttcctgtgccaggtccaagacacctctgctacatacagcctagagacttggtgcc

SEQ ID NO: 4518 - DNA, 557 bp, Homo sapiens
  MAP TO AF006501.4; EXPRESSED IN PLACENTA, SIGNAL = 2.5; EXPRESSED IN ADULT LIVER, SIGNAL = 2.4; EXPRESSED IN FETAL LIVER, SIGNAL = 2.5; EXPRESSED IN HELA, SIGNAL = 2.8; EXPRESSED IN BRAIN, SIGNAL = 1.6; EST_HUMAN HIT: AI040117.1, EVALUE 7.00e-69; SWISSPROT HIT: O88828, EVALUE 1.00e-18; NT HIT: gi15318622, EVALUE 5.00e-69; EST_HUMAN HIT: AI040117.1, EVALUE 7.00e-69
agcagttatgtggtcccctggcatgcagtaagcattaacggtggctgtagcgagaattgtgattgttgtcattatcactctccctgtaacccaaaagtgccacctgagtctttccctcttttttgtcttggtgtccaggaaggccaggagaatgtcgagatcctcccctctggggagcgaccgcaggccaaccagaagcgaatcaccacaccatacatgaccaagtacgagcgagcccgcgtgctgggcacccgagcgctccagattgcgtgagtgattgccccttcactgtcttctccatctgtcaggccacagtaagctcttgtaccgctgatctttcccagcctggcacctgaaaacagactctctgctctcacattccaaaagtggtgccgtccctgcgtaccaggcattgagctagtcccctgccctcagggagcttgtgatctaataggagaactaggacatgaacatctgagaagtcaagtaacaatatgggagaaaaacgataaaaaaaaaaaacagaactagatggttgcgtgtcagattagtgcagc

SEQ ID NO: 4519 - DNA, 529 bp, Homo sapiens
  MAP TO AL121821.5; EXPRESSED IN ADULT LIVER, SIGNAL = 0.63; EXPRESSED IN BRAIN, SIGNAL = 0.51; EXPRESSED IN LUNG, SIGNAL = 1.7; EXPRESSED IN HELA, SIGNAL = 0.51; EXPRESSED IN BONE MARROW, SIGNAL = 0.84; EST_HUMAN HIT: AI670932.1, EVALUE 4.70e-02; EST_HUMAN HIT: AI670932.1, EVALUE 4.70e-02; SWISSPROT HIT: P20429, EVALUE 3.70e+00
gctcctagcagtttttcagcctctatatgaggttatctaattcctaaaagagggaaaaataatttgaatacagaagaaaatgacatgtaaacttacttgactaagtatcctggtagaatgagtcttttggttatcagcattatccatagtcttgaatgttgtctttaggcatcctgtttaaaaattattaaaagtattgcatttgatgtgaattcaaatagttgtcaagatcaacacaccacatctaggtatagttattttcttaatgactccttcaatatatatgttagtgattgcagaagacccttgggaccaatccaagatatgtttaaggcagtttataaatttgccccttcttttattctttctgtctcaactgtaaagtgtttcttcgattttctttgctcttatatagctaattgttgtcagtgtacttgctttctttttaaacttcctgataggaacttactaagaaaataataagattgctaggtatgttggtaaaagaaggacctgaggctgaatgaaa

SEQ ID NO: 4520 - DNA, 542 bp, Homo sapiens
  MAP TO AC026736.3; EXPRESSED IN FETAL LIVER, SIGNAL = 6.3; EXPRESSED IN PLACENTA, SIGNAL = 5.4; EXPRESSED IN BONE MARROW, SIGNAL = 2.2; EXPRESSED IN ADULT LIVER, SIGNAL = 4.4; EST_HUMAN HIT: AA628592.1, EVALUE 1.00e-30; EST_HUMAN HIT: AA628592.1, EVALUE 1.00e-30; SWISSPROT HIT: P40602, EVALUE 5.90e-01; NT HIT: AL163267.2, EVALUE 4.00e-26
gggaaggggtctgaactaggaggatggtaacagggagataagagattaaaggacctgaattagggcagcagccatggggacagacaggacgaggcacagctgagaaatgttggtatgaggcttctcaggattgatgatgacggagtggagggagagcaggaagtggctgaacgtgaatgaaggcgcatggggttgctgatgatgctggctgtggggctggcctgcactgtggaatgagtgagtcatccagtatggcttgatctccagagggacattaagtgtctgtaagacatgtaggcaaagacatccactaagtggctgtattagtccattttcagactgctataaagatactacctgactctggataatttataaacagaagaggattaattgactcacacttccccatggctggagaggccttgggaaacttacaatcatggcagaaggcaaaggggaagcacgcacctccttcacaaagcaaatcgcccccatgatccaatcacttcacaacaagtccctccctcaacatgtaggga

SEQ ID NO: 4521 - DNA, 501 bp, Homo sapiens
  MAP TO AC016396.5; EXPRESSED IN PLACENTA, SIGNAL = 0.54; EXPRESSED IN ADULT LIVER, SIGNAL = 0.75; EXPRESSED IN FETAL LIVER, SIGNAL = 0.61; EST_HUMAN HIT: BF691575.1, EVALUE 1.00e-113; EST_HUMAN HIT: BF691575.1, EVALUE 1.00e-113; NT HIT: gi8923929, EVALUE 1.00e-113; SWISSPROT HIT: O53307, EVALUE 2.10e+00
attgcttcaataagggccagggaaagtcataacaaaggactattataccagtgttttctgatcattttgttaacattaaaaaccttggactattaggatgcttaatactcaaaaactggattttctgacatgcatgtgatattattggtgtatattttggttttgataattatttgttttccttccctgctctagttgaatggatcgcagcagttaccattgctgctgggacagctgcaattggttatctagcttacaaaagattttatgttaaagatcatcgaaataaagctatgataaaccttcacatccagaaagacaaccccaagatagtacatgcttttgacatggaggatttgggagataaagctgtgtactgccgttgttggaggtccaaaaaggtgaggaaagcaattccttcatacagtaccatttttaatgttatatttctttttaaattattctgtcagacttgttcaccagatattgttatgatatccc

SEQ ID NO: 4522 - DNA, 545 bp, Homo sapiens
  MAP TO AC007075.3; EXPRESSED IN ADULT LIVER, SIGNAL = 2.1; EXPRESSED IN BRAIN, SIGNAL = 2.3; EXPRESSED IN LUNG, SIGNAL = 2.7; EXPRESSED IN FETAL LIVER, SIGNAL = 2.8; EXPRESSED IN PLACENTA, SIGNAL = 3.2; SWISSPROT HIT: O60241, EVALUE 3.00e+00; EST_HUMAN HIT: R01458.1, EVALUE 3.00e-06; EST_HUMAN HIT: R01458.1, EVALUE 3.00e-06; NT HIT: AJ271736.1, EVALUE 1.00e-04
gggttgtttcttcacatgcctgagccgatatacttgagaattttttatgaattctttactgaatactcaagggtgactctttgcagatccttggagttctttttctgtgcttcagtctcctgtctggcactttgctgcacagactccagctgacatagtctccccagattcccatttcatgctctcaactcaagggatgagctgggctcagcttgtgttcctccttcctgcatcacggcctggaaactctcaagacagtaagctgggtcagaaagggcttgtgtggtttgtttcctgtgtctcaggcatcattgttcttccacgatcagatgtccagtgtcttgaaaactgttgtttcattatctgtgtactttttggtttcttaattgtttcaagctggatgacacacctggtccctgttgttgccgcagcttcagaagtggaagtccagtgttatgttcttgaaaatcaaatacgatgttcatttattttcatttctgttaataatatttcctgaagttacttcagtcatcctgctgttggtg

SEQ ID NO: 4523 - DNA, 560 bp, Homo sapiens
  MAP TO AC035144.2; EXPRESSED IN BRAIN, SIGNAL = 1.1; EXPRESSED IN BONE MARROW, SIGNAL = 1.1; EXPRESSED IN PLACENTA, SIGNAL = 1.8; EXPRESSED IN ADULT LIVER, SIGNAL = 1.3; EXPRESSED IN HEART, SIGNAL = 1.2; EXPRESSED IN LUNG, SIGNAL = 1.3; EXPRESSED IN HELA, SIGNAL = 1.1; NT HIT: AJ278581.1, EVALUE 1.00e-109; SWISSPROT HIT: P10272, EVALUE 1.00e-34; EST_HUMAN HIT: AW503208.1, EVALUE 4.00e-86; EST_HUMAN HIT: AW503208.1, EVALUE 4.00e-86
cccagaggttaggaactccctttctttccatattgcagcatgggcatgtaggattagataagcatacttgctatctgtatacacatttattcttcttccctttcccagttctaaggcttgggtaagtgccactagttctgctaactgggctctggtccctgggggaagaggcttactttcaagtactgttactatggcgtaacctgtccttcgtatcccattctccacaaatgaactttcattgctgtataggttaaggtcaggaataactaaggggacttcttgggtggcataagtctggactataattagttggcagtcatgctcgattggttccccatcctctgggagaaaagtggcagggttgagggtcacacacaagcatatttgaagcactggtccctcaaggagtagcacctggtatctaaggaggcagttgtctgatagccataaacttcctttggcacccagtatgccatttacatcatgagtagtccagacagtgagatcctttccttgtattattttgatagcctctgacactaagatggccaccatca

SEQ ID NO: 4524 - DNA, 513 bp, Homo sapiens
  MAP TO AC005933.1; EXPRESSED IN ADULT LIVER, SIGNAL = 3.7; EXPRESSED IN HEART, SIGNAL = 3.2; EXPRESSED IN FETAL LIVER, SIGNAL = 2.4; EXPRESSED IN HELA, SIGNAL = 2.4; EXPRESSED IN BRAIN, SIGNAL = 3.1; EXPRESSED IN BONE MARROW, SIGNAL = 2.9; EXPRESSED IN PLACENTA, SIGNAL = 3.1; EST_HUMAN HIT: BF088553.1, EVALUE 1.00e-82; SWISSPROT HIT: P16960, EVALUE 4.00e-14; NT HIT: U48507.1, EVALUE 0.00e+00; EST_HUMAN HIT: BF088553.1, EVALUE 1.00e-82
gggctgtctcagtcgttaccatgtcttcagccctgcctatcccggggccttggctggtactcagtgaatgtcgaatgaatgagtgaccagtgtgctcccctccctcagtgttacctgtttcacatgtacgtgggtgtccgggctggcggaggcattggggacgagatcgaggaccccgcgggtgacgaatacgagctctacagggtggtcttcgacatcaccttcttcttcttcgtcatcgtcatcctgttggccatcatccagggtcagtgctgggagtgggcgctcagggcccggaggcaggctagctccatggctaagaatgcaggcccaggatccagtcggcctgcattcataccccatctctacctctcgctactgtgagaccttgggcaagtcacctctcggggcctccgtttctccatctgcaaaacgagggtgtcaatggtactaacctcataggttgtgatcaggattaagtcagttcataggcgctcggtgtctggctcatat

SEQ ID NO: 4525 - DNA, 532 bp, Homo sapiens
  MAP TO AF061032.1; EXPRESSED IN LUNG, SIGNAL = 1.6; EXPRESSED IN FETAL LIVER, SIGNAL = 1.8; EXPRESSED IN BRAIN, SIGNAL = 1.2; EXPRESSED IN HELA, SIGNAL = 1.4; EXPRESSED IN PLACENTA, SIGNAL =   2; EXPRESSED IN ADULT LIVER, SIGNAL = 1.5; EST_HUMAN HIT: AA442840.1, EVALUE 5.00e-05; EST_HUMAN HIT: AA442840.1, EVALUE 5.00e-05; SWISSPROT HIT: P07987, EVALUE 4.90e+00; NT HIT: AF258783.1, EVALUE 1.30e-01
aaggaatgccaagaatgcagccgtagatgctgaaaaaaccaggaaaatggattatactctagagcctcctgagggtgggcagcccagcatacaccttggtttggagccagtgaaactgatttggattctgacttccagaaacgtaagagaataaatatgtgtttttttaagccaccaagttgttagtaatctgttataacaactgtagggaacaaataaaacattcctgatgtgatcggcttcaaaaaggcactgcaatcagaggtatgcactcaggaacagggcatttggtgtccatttgctccttgctaaagacagtttccactggtctgactgagctgtgttatgtgcaatgccctgcctgctctggaacttgctggaatgttccatggaataataggaggcatgcagagggccacactgttcagtcctggcagaccagtttgcccagtatagaggatcctgctcccttagcctagagctgtgggcagagcttgcctctgcctgggcatctgaaagggcagaacatggt

SEQ ID NO: 4526 - DNA, 559 bp, Homo sapiens
  MAP TO AC008747.4; EXPRESSED IN HELA, SIGNAL = 0.8; EXPRESSED IN FETAL LIVER, SIGNAL = 0.35; EXPRESSED IN PLACENTA, SIGNAL = 0.73; EXPRESSED IN ADULT LIVER, SIGNAL = 0.66; EST_HUMAN HIT: AW956796.1, EVALUE 4.00e-58; EST_HUMAN HIT: AW956796.1, EVALUE 4.00e-58; SWISSPROT HIT: P48725, EVALUE 8.00e-01; NT HIT: gi14766692, EVALUE 7.00e-62
gggggcttcaattcttatccatttctcctaattccaccatagaagtttcttttcaaggagtaaaaaaaaagaaaaaaacagtactttgctttctttatatatttcaggttgggaatcaagatgggaaaacaaggaattatcaacaaagaaggatatttataaggaagattcactccaaacagtaacaatagaaaaagttttaaaacaaagttatgaattttcaaattctaccaagaatttggaacacatagaaaagttggaagggaagcctggaattcatgtagaacatttcagaccagcaactctcacctctagagaaagccccactggggacagttacaaatatgacacatttagaatcacctttcattcaaagtctactctttctgaaccataaaaaaattctgctaaagggaattcacacaaatacaatatattaaagaagaatttaccaaaaaagtcagttgtaaaaaatgagagactcaatggtggaaagaaactcttgaattctaataaaagtggagcagccgttaaccagagcacctctcctcaccacact

SEQ ID NO: 4527 - DNA, 514 bp, Homo sapiens
  MAP TO AF020801.1; EXPRESSED IN ADULT LIVER, SIGNAL = 0.9; EXPRESSED IN HEART, SIGNAL = 1.2; EXPRESSED IN BRAIN, SIGNAL = 0.79; EXPRESSED IN FETAL LIVER, SIGNAL = 0.84; SWISSPROT HIT: Q15722, EVALUE 2.10e+00; NT HIT: AJ229041.1, EVALUE 0.00e+00
aaatttccttgcttttgcccaaagtaatcactatcctggctattatattgataaatcctttgcatctttttgtattaattaaaaacacgtagctctaaatgctgtagtttttcccattaaaaaagcctatatgtgtgtgtgtaaaattttaatacataattttatatatgtctttctgtctgtctgctgtctcttagcttacaggttttcctccatctatttttcttacagtttatgtattgaagaacctgggccgtttgacccacggagtggttctcaatctggatttggctgattgggcactcatgttgcaggttaacatgctcctcggttttctgacctcctagaagttggcagctggatccagaagcttcaacagcctcaggttcagcctcctgggctggcggattgtaggtgagtctgtgttctttcacatgcctgttggctccttgtttttgatgttggcagatgtgatgcacattgcctagatccattctttcactgcagggtgcag

SEQ ID NO: 4528 - DNA, 580 bp, Homo sapiens
  MAP TO AC006272.1; EXPRESSED IN BRAIN, SIGNAL =   1; EXPRESSED IN PLACENTA, SIGNAL = 0.92; EXPRESSED IN BONE MARROW, SIGNAL = 0.68; EXPRESSED IN ADULT LIVER, SIGNAL = 0.85; EXPRESSED IN HEART, SIGNAL = 1.1; SWISSPROT HIT: O88319, EVALUE 2.50e+00
tcccgtgaatttactccctggaaggcaaagcttccatacgtcatttcctcttctgctcactgggctggatggccaggctttccagctattatacaaactcagtagcactttggaaggccaggatccatctacagacgcggatcccggtcccaccaggaatgatcgctcagcaatatggtcgcgcccaagccctgacatgctgttggaagccaccatcttggaagacgcagtacagactgcgagacagccattctaggcgaccggattccgctgaccaggccgaaaaggagtaaatctaactgatcctttctaatcttctaaagacctctcatcctgtacttccaccttctttcctgtcagcgtagggcatgcttagtaggatttcggcactttcaactagtcttccgacctgaccaatcagaacacaccgaaacagaaaatggctgcgcccacgctgcctcgttcttctaaaccacacgaaaggtgaggccgtattgaaaagcctgggtccctaggggaaagaagggagggagaattaggaagcttgtacagctaagacgcggaagacgctgggaatata

SEQ ID NO: 4529 - DNA, 587 bp, Homo sapiens
  MAP TO AC004211.1; EXPRESSED IN ADULT LIVER, SIGNAL = 2.6; EXPRESSED IN BRAIN, SIGNAL = 1.4; EXPRESSED IN LUNG, SIGNAL =  12; EXPRESSED IN FETAL LIVER, SIGNAL =   3; EXPRESSED IN BONE MARROW, SIGNAL = 4.5; SWISSPROT HIT: Q08345, EVALUE 3.00e-24; EST_HUMAN HIT: BF792714.1, EVALUE 4.00e-80; EST_HUMAN HIT: BF792714.1, EVALUE 4.00e-80; NT HIT: U48705.1, EVALUE 0.00e+00
gacccatcttccctctcctccactctgacctgccggccctggtcccggaagaactcccccgcgttctcgatgacctgctcgtcggtgagctgcccaaagggctgggccctacagagcatcagcacctcccacagggtcacaccaaaggcccacacgtcactcgcagtcgtgaacttcccctgggatgcagagaaggcagcaaaaacagacagggacatcaggcaacgtagaccctcctcccttcctattggaagccccagatccactctgggctccactcaggcctgatccctcctgacgccaggctctccactctcctccgctggccaccttttccaactcctctcccttgggctctgcctttcctctccatgctctggtcctctctccagggccctggcccacctcttccttctgctcctccttcctctccatccacccccactttctggtcctgaccttcggtctccctacccaaccccttctatctccagcttcctcgcccaacctcatctcttgagctctctgccaccctgtctccatccccagtacccactcttggctcctggattcttgcccatcacact

SEQ ID NO: 4530 - DNA, 530 bp, Homo sapiens
  MAP TO AC026796.2; EXPRESSED IN HEART, SIGNAL = 1.7; EXPRESSED IN BRAIN, SIGNAL = 1.1; EXPRESSED IN FETAL LIVER, SIGNAL = 1.9; EXPRESSED IN BONE MARROW, SIGNAL = 1.2; EXPRESSED IN PLACENTA, SIGNAL = 1.8; EXPRESSED IN ADULT LIVER, SIGNAL = 1.4; EST_HUMAN HIT: BG205585.1, EVALUE 1.90e-01; EST_HUMAN HIT: BG205585.1, EVALUE 1.90e-01
tagcatgaggcaaagtggtgatattaatccagcaacttacttttcctaccatggatttttagatgaactttgatcattctgatgcagatcaaagggtacctcctctgcgaagacttccctggtctgacaccaaaaatgctgatattggagttgtcagccgaaagaaagggaccagaatattctcaaggagcaatttttaaagcttcccctcccctactccttgctaccttccaactcatgttactgaatgtgcttccagaaagcatctctgaaggttttatgcatgaagagtttgtgctgggtcttttgccttttgaatgataggaattgctgaagctatatatccctgaaaatgtccagtttaggaatcatcagggataacacatcttagcacatttaggtaaagctattcatattcaaaaatgagtttggggggaattgggcttactcagtttacctctgaccaaatttaacaaataggaggagctgccacaaatttggcactgagctggctatggcttcactgagga

SEQ ID NO: 4531 - DNA, 538 bp, Homo sapiens
  MAP TO AC007013.1; EXPRESSED IN ADULT LIVER, SIGNAL = 4.7; EXPRESSED IN HEART, SIGNAL = 5.1; EXPRESSED IN LUNG, SIGNAL = 6.9; EXPRESSED IN BRAIN, SIGNAL = 4.7; EXPRESSED IN PLACENTA, SIGNAL = 3.8; EST_HUMAN HIT: BF108656.1, EVALUE 3.00e-37; EST_HUMAN HIT: BF108656.1, EVALUE 3.00e-37; NT HIT: AL163267.2, EVALUE 3.00e-30
tacagtgcatcccccttctctctctccctctctcctaccagcatgtaagacatgccttgcttctcctttgccttctgccatgattggaagtttcctgagacctccccagccatgcagaactgtgagtcaattaaatctcttttacttataagttacccagttgcaggtagttctttatagcaaagtgaaaacgaacgaatacaaagccccaacagactaagacacatacattatcagcaagagccaattttcttcctttgtgcagagagctcaggctgtgaccaaacttccaaatctgaaattcttgatttcatgtaccagctaagggagaagcaaattcttcacctttcgcatatgagctagtcattagcactgctcactaaaattttccattctcctggtacgatgtaggattgtacttcactccccccttgcagttaggggtacacaggtagcactcgtcagccaagggaatgtctatgatctcttctagatggaagttgtaagagctgacaccagctgatgtgtgtggctgatc

SEQ ID NO: 4532 - DNA, 581 bp, Homo sapiens
  MAP TO AF241733.1; EXPRESSED IN HEART, SIGNAL = 1.3; EXPRESSED IN ADULT LIVER, SIGNAL = 1.1; EXPRESSED IN LUNG, SIGNAL = 1.5; EXPRESSED IN BRAIN, SIGNAL = 1.6; EXPRESSED IN PLACENTA, SIGNAL = 1.3; NT HIT: U76377.1, EVALUE 3.60e-02; SWISSPROT HIT: P50830, EVALUE 1.50e+00
ctgtgcatgctctatgacccagcaattgctctaagtttataccttagagacaatataatttttctgcagaaaatcatacacatgtgtgaaatgaggctattttaatttgttgtactctaagagtgttggcagtatgtatgaaaaaaaaaaagtagtctccctggaagccagtgagggaggagggaagcaggatagacaaaggggagaagccaagcaagggttgatttcaggccacgtcctcacagcctcagctgatgcagaagtggagctctgggtttttcttcttttgtaccagtcagtcattgataagggcccccttggaagacataaattcccaggcacttctgactccccgtggcagcaagcaaagaagctccaggaacccctgggcaatctccagagtctttactgtgtgtcatcagaaacaagagcccatataagccaggaaggggctagtaaaaaagatcataggtctagagggagtaccgagagcacacaagatgggtacaaaaaatacactggaatgatatttaacaaatttgtgattttcattgagaggtaggagagggaacaggctttta

SEQ ID NO: 4533 - DNA, 506 bp, Homo sapiens
  MAP TO AC010280.5; EXPRESSED IN ADULT LIVER, SIGNAL = 2.1; EXPRESSED IN HEART, SIGNAL =   3; EXPRESSED IN LUNG, SIGNAL = 1.4; EXPRESSED IN BONE MARROW, SIGNAL = 2.4; EXPRESSED IN PLACENTA, SIGNAL = 2.3; NT HIT: M15967.1, EVALUE 1.20e-01; SWISSPROT HIT: P07598, EVALUE 6.10e+00; EST_HUMAN HIT: AV727995.1, EVALUE 4.50e-02; EST_HUMAN HIT: AV727995.1, EVALUE 4.50e-02
ggggtctgactgagatgtccaagtttttctaaaatggtactgcacagaaggagcagttttactgagacaataggagctttgggtacctgtgtgaatgtggtcacaccaagttactgcttcaaagaacaagaaacgaatgctgtgagaactgcagagaccacagcctatagtggtattccccaaatgggcctgatcagaagactcatttgggggcagttgtttaataatttagattcccaggtaccttctctggagattatgattactaggtctgtctaggggaggcctaggaatcagtatttttgacagtagtcccagtgattcttttgataagacaaatttgggaaacaactattgacattcataatgctaccattcattcattattttaattatttcacaattactgtggtatttttcaaatatgaacctagattccccacataaaatcacctgggctgtttgattaagatcctgggctgcagccccattccaaacctaccaga

SEQ ID NO: 4534 - DNA, 546 bp, Homo sapiens
  MAP TO AC000953.1; EXPRESSED IN ADULT LIVER, SIGNAL = 0.67; EXPRESSED IN BRAIN, SIGNAL = 0.88; EXPRESSED IN BONE MARROW, SIGNAL = 0.5; EXPRESSED IN PLACENTA, SIGNAL = 0.86; EST_HUMAN HIT: AL557809.1, EVALUE 3.00e-83; SWISSPROT HIT: Q9Z0E8, EVALUE 2.00e-19; NT HIT: gi14781269, EVALUE 2.00e-83; EST_HUMAN HIT: AL557809.1, EVALUE 3.00e-83
ctgagacctcaccaaggaggaagatgggaggatgtgacagagaaaaaagtctgccagagccctgaaaaaacactaagtctgcattgatgcctgactcagggcttgcaacacaccttggcaacctacacatctcatgttttgtgttatactgcattctctaggtttggcaggaagaacgttctcttcgcaaccatggctgtacagactggcttcagcttcctgcagattttctccatcagctgggagatgttcactgtgttatttgtcatcgtgggcatgggccagatctccaactatgtggtagccttcatactaggtaggaatggcttctgggacatggggtgcttccctctaaccctctgaaaggcccagaaagaggaaatcattgggccattgggctgtgcttccaaagcctttggatatatgtgtcttgggagggagccgtagccacagctcttggagcaagtcaggggcagggcaggcactcgcagggagccacctctgtgctgagccctgaaatgtggtggagaagaagagcaggagcca

SEQ ID NO: 4535 - DNA, 580 bp, Homo sapiens
  MAP TO AL021366.1; EXPRESSED IN LUNG, SIGNAL =  62; EXPRESSED IN FETAL LIVER, SIGNAL =  41; EXPRESSED IN HELA, SIGNAL =  76; EXPRESSED IN BRAIN, SIGNAL = 8.5; EXPRESSED IN ADULT LIVER, SIGNAL =  24; EST_HUMAN HIT: BG260722.1, EVALUE 0.00e+00; SWISSPROT HIT: P23358, EVALUE 3.00e-80; NT HIT: gi14782850, EVALUE 0.00e+00; EST_HUMAN HIT: BG260722.1, EVALUE 0.00e+00
ccagttgtcaaatgatcctttattgaaatattttcctttgtgcttaactagctgggcattccacagcaccactgttgatgtcatctatgatgtcatgagggtggtggccatcaacattacagcccatagactgggcagtccccggaatctctttaatggttccagagagttctctggctaaggatcggtgccgcatctgtcgagcaatgttgacgatctcatcaaaagtgatattcccattgtgtttaatgtttttctgtttctttctgtctcttggtggtttcttgagggctttgatgatcggggcagaggcagaaggcaccacctcaatctgggcctgtctgttctcaatggtcagtttcactgtaatcctcaggcccttccagtcacccgttgccttggcaatgtcatcaccaaccttttttggagacagacccagggggccgatcttgggggccagggcagaagtggcaccgacttcacctctggtgcacctcaggtatacgaccttgatctcgttggggtcgaacttcggtggcatggtggaggcagctggtgtcggatgaacccagattcagga

SEQ ID NO: 4536 - DNA, 512 bp, Homo sapiens
  MAP TO AC008554.6; EXPRESSED IN ADULT LIVER, SIGNAL = 5.9; EXPRESSED IN BRAIN, SIGNAL = 5.2; EXPRESSED IN PLACENTA, SIGNAL = 7.3; EST_HUMAN HIT: AW008180.1, EVALUE 5.00e-51; EST_HUMAN HIT: AW008180.1, EVALUE 5.00e-51; SWISSPROT HIT: Q03938, EVALUE 2.00e-05; NT HIT: AL163202.2, EVALUE 1.00e-07
tttgtccccacctgaaaatcgaattgccaccaccaatttttgattcagcagtaccaggtagtaaaattaagaaacccacaaattgaaagtattttctaaatatttagaaatttctgttataacttagtattttgctattaatttgctagaatattttatcacattctctctgctgagcacattactagcttgtaattggagaatatgagaaaaatttatgtatttatttttaataaaacaggtattgttgtctctaacccagacctgatcacctggctacagcaaggaaaagaaactttgaccatgaagagacaggtgatgattgccaaacacacaggtaggtgttttttttgctctcacaaaggggcatcttctgtcttatgcttttaaattctctaaggattctgcttttcttttggtgagcttccttcaagttcacagtgagagccaatgtcctcttcatggcatagaagagactgcacaatctgactgcttttccattattttgggga

SEQ ID NO: 4537 - DNA, 572 bp, Homo sapiens
  MAP TO AC016398.5; EXPRESSED IN FETAL LIVER, SIGNAL = 1.9; EXPRESSED IN BONE MARROW, SIGNAL = 0.76; EXPRESSED IN ADULT LIVER, SIGNAL = 1.4; EXPRESSED IN LUNG, SIGNAL = 1.2; EXPRESSED IN BRAIN, SIGNAL = 1.1; EST_HUMAN HIT: BG528330.1, EVALUE 3.00e-34; EST_HUMAN HIT: BG528330.1, EVALUE 3.00e-34; SWISSPROT HIT: P47955, EVALUE 2.00e-19; NT HIT: gi14749891, EVALUE 5.00e-32
cccatgtcctagtcaggctcctcagattcttctttttttgcttccacttccctctcctcagctgaggcagcagtggtggaagtggcaggacctcctgcttgtgcggtgcaggctgctggagccatctaccaacccctgcattgcaaaggaggctgccgatattgacactggccagggcttttgcaaagaagctaggccaaaagggctcgacagttacagcagctgctttaatgaggttattgaatttatcctccgtgatggtcacctcattgctttgcagaatgagggcccagtagatgcagacaatcttgggtgaaagtgggaccggagctgccggcccacagtactacttgtgagaagtagcaccatacccggcagctcgagactcacattcaccacattgtgggtggggggcctcactgcaatgtggccttagctttttcagaaggaccgagcaccttggcagcagctgagggaagggactcttcccgttttaatgtggtcttaaccaatgtttaacaactagttgtttaggggaaaggggaagaaaagcccccatttggctaccttat

SEQ ID NO: 4538 - DNA, 528 bp, Homo sapiens
  MAP TO AF022794.1; EXPRESSED IN BONE MARROW, SIGNAL = 2.9; EXPRESSED IN ADULT LIVER, SIGNAL = 1.7; EXPRESSED IN LUNG, SIGNAL = 2.7; EXPRESSED IN HELA, SIGNAL =   7; EXPRESSED IN FETAL LIVER, SIGNAL = 3.9; EXPRESSED IN BRAIN, SIGNAL = 2.4; EXPRESSED IN PLACENTA, SIGNAL = 2.6; SWISSPROT HIT: P98105, EVALUE 8.40e+00; NT HIT: AL163267.2, EVALUE 0.00e+00; EST_HUMAN HIT: BE671615.1, EVALUE 4.70e-02; EST_HUMAN HIT: BE671615.1, EVALUE 4.70e-02
gcataggagccaacctgaacaaactctccgtggccaaagctggagcaatttcagcaagaaaataaataacatagaattggactataacccaaagcatacatttccatgatccatactgatataaattatgagtctatattgatataaacaaataattgaataaacaaatacacaaatgggaaacggggaatctcccttacagaagagttgtgaatagatgtctctatttccaggaggtggagtcaaatcttctccctgcccctttgagtgtgggctgggcttagtgacttgcgtctaaaaagtcaatatggaaagatggagaaaagtcactgctgctctacctttaaagtggagaaacctggaaaaacttaccttggccaggtgatcaagattgacaacatcagtgataagccgtgttgataccatgtgccccagatatggtgtgatgagaagggcacttcctctctgtgacattctttcccaagacccataacccccagctagtcatgagaaaagcacgaggcaaag

SEQ ID NO: 4539 - DNA, 516 bp, Homo sapiens
  MAP TO AC007162.1; EXPRESSED IN BRAIN, SIGNAL = 6.7; EXPRESSED IN BONE MARROW, SIGNAL =   3; EXPRESSED IN PLACENTA, SIGNAL = 6.1; EXPRESSED IN ADULT LIVER, SIGNAL = 6.2; NT HIT: gi14776777, EVALUE 1.00e-108; SWISSPROT HIT: Q99758, EVALUE 7.00e-48; EST_HUMAN HIT: BI199000.1, EVALUE 1.00e-108; EST_HUMAN HIT: BI199000.1, EVALUE 1.00e-108
attatacacccggatgcctgtgcttcctgaggaccaagatgtagcggacgagaggacccgcatcctggcccccagcccggactccctgctccacacacctctgattatcaaggagctctccaaggtacccttgcaatttggggtggagtccttcctgccagctgactacctggctgtccccagggtccgaccccatccctggaagctttcggcgctgaggctcagactgctctgctttgcgtccaggcctccgcattccgtgttttctgttgggtgcctgcaggtgtacgagcagcgggtgcccctcctggccgtggacaggctctccctcgcggtgcagaaaggggagtgcttcggcctgctgggcttcaatggagccgggaagaccacgactttcaaaatgctgaccggggaggagagcctcacttctggggatgcctttgtcgggggtcacagaatcagctctgatgtcggaaaggtgggtgcagccagggaggctctgaaggggtgagacag

SEQ ID NO: 4540 - DNA, 574 bp, Homo sapiens
  MAP TO AL109802.6; EXPRESSED IN ADULT LIVER, SIGNAL = 0.81; EXPRESSED IN FETAL LIVER, SIGNAL = 0.67; EXPRESSED IN BONE MARROW, SIGNAL = 1.3; EXPRESSED IN PLACENTA, SIGNAL = 0.83; NT HIT: gi14778388, EVALUE 3.00e-86; SWISSPROT HIT: P38925, EVALUE 1.10e+00; EST_HUMAN HIT: BG769287.1, EVALUE 9.00e-47; EST_HUMAN HIT: BG769287.1, EVALUE 9.00e-47
gtgtgtgtgtggccttgaacccctgctctctgccagtagtggggttcagcttgtcttaaagatgtttccagctcatctaaccttaggggagtagcacttaagttatttctctgttgcagagatggctgagcgattccatcatgtcactgtgctccagatatacttctgtgactggcagcaggcctgggagcggagggagagcttgtacgctcaccatgcccaggtggagaaactggccaggaagatggccctgcggcgcgcctttactcactggaaacactgtatcctttcagatactcaggctgtccattgcctcagccaggacagcatgagctcagcagcatgtgaaacgaaagtcatgagatacatgggaaacaattgccaaacgattcaaaacagccttatctctgttgacagtcttaaaatttttgtttaattgggattgtgtataaaaagagtgcttatatatagtttaaaaataataaaatgaacaactatatatcttatcacccaactttcaaaatagaaccttcctagcacacctatttgctcctccctgactgcgttctttttc

SEQ ID NO: 4541 - DNA, 525 bp, Homo sapiens
  MAP TO AF260011.1; EXPRESSED IN ADULT LIVER, SIGNAL = 1.1; EXPRESSED IN FETAL LIVER, SIGNAL = 1.1; EXPRESSED IN PLACENTA, SIGNAL = 1.4; NT HIT: AL163248.2, EVALUE 0.00e+00; SWISSPROT HIT: O94822, EVALUE 5.00e-31; EST_HUMAN HIT: BI871013.1, EVALUE 1.00e-106; EST_HUMAN HIT: BI871013.1, EVALUE 1.00e-106
tcaatccctctcaaacaccagaaaataaattacagaaccttaacaattaaaacagaaaggcaggtttaatccatttaggcatatctctgtatttatccaaggaagtttaatatctacttttatcttaagcagaaaagatatattttatgtttaaatgcccttttaaatagatcatcttttccaagtttgtaaagccaaatgtgtaaacagaaacttacctgatgggtgaggtaagtgcttaactgcagcatccagttccgccactgctgaacagctactcctactcttttcccactttctactattattgaacccagtggataatttgaaggcagttgtattataagttcaataactatgtcctcaatagtataagtagccattacctctcgagtagtagctcgagctttaacctgcaatacaacaaaggatattttgtttgccaaatttctgtctttcaaccagaaaacattttgataggttgactattaaaagctaaagacttcattcaaggacagtgcaggt

SEQ ID NO: 4542 - DNA, 522 bp, Homo sapiens
  MAP TO AC008427.5; EXPRESSED IN ADULT LIVER, SIGNAL = 6.9; EXPRESSED IN HEART, SIGNAL = 8.4; EXPRESSED IN LUNG, SIGNAL = 5.6; EXPRESSED IN FETAL LIVER, SIGNAL = 8.6; EXPRESSED IN BRAIN, SIGNAL = 6.1; EXPRESSED IN BONE MARROW, SIGNAL = 6.4; EXPRESSED IN PLACENTA, SIGNAL = 8.1; EST_HUMAN HIT: BG288605.1, EVALUE 8.00e-07; SWISSPROT HIT: P16499, EVALUE 6.00e-24; NT HIT: U39148.1, EVALUE 1.00e-127; EST_HUMAN HIT: BG288605.1, EVALUE 8.00e-07
ccttctccaggcaaagtcagtcccccactcccatccctggaacccacactgctttgcacacctctcctccacagccctcagtggatttcatctcagactttcttcttctactggattttggaagcttccatgacagatgtcatctctgatttccctgcccctgttgaagaggaatagatggaagcacctttattcccttgtcaacaggggctttgggccgttccactgttcttgctcttcatttgcctgtccgtgcttatctctgccttcctttaggatgagcatttctgtgactttgtggacatcctcacagagtacaagaccaagaacatcttggcttcccccataatgaatgggaaggatgtggtggccataatcatggctgtgaataaagtggatggatcccacttcaccaagagagatgaagaggtaagaatgctttagagactaaggatagccatgctagcacattctcccagcctatgaagtcccctgaactttgctgtttgacctggcctcagt

SEQ ID NO: 4543 - DNA, 534 bp, Homo sapiens
  MAP TO AC005597.1; EXPRESSED IN ADULT LIVER, SIGNAL = 0.55; EXPRESSED IN HELA, SIGNAL = 0.63; EST_HUMAN HIT: BF373950.1, EVALUE 3.00e+00; SWISSPROT HIT: Q16512, EVALUE 1.70e+00; NT HIT: gi6678092, EVALUE 1.30e-01; EST_HUMAN HIT: BF373950.1, EVALUE 3.00e+00
ctagagcaggtgcacattggggtgggcagtccaatcccttggcttatagcttcaagtctctggagcaagaggaactccattaaactggggcggaagtgtctgatatgtgtgagaagcaaaacatttaatgacgataagtgcagtctttgctagtgcttagcactgcacgtttctacatctgcttgtcctccttccagacacacagtacgattgcacttcctaccccctggaagtgaagcacggccacccgacttgctttggccaaagaaggtaaacattatggcttctgagtggaagtatttagttactggcacaagacttcccaatgctctccctgccactgtcaccgtgatggtccagaaggtgacagctcctcatctcggaagccagagtaaggacaacaaaaagcagagccctcactgatctgagatcaacatgtcatctaaatgtttggttttggttgtttaggttgggggctggttgtcaccatggcccatcctgatggaactcagtagtcaaggggagaatgtacgc

SEQ ID NO: 4544 - DNA, 574 bp, Homo sapiens
  MAP TO AC068885.2; EXPRESSED IN BONE MARROW, SIGNAL = 3.2; EXPRESSED IN PLACENTA, SIGNAL = 5.2; EXPRESSED IN HEART, SIGNAL = 5.4; EXPRESSED IN ADULT LIVER, SIGNAL = 4.3; EXPRESSED IN BRAIN, SIGNAL = 5.2; EXPRESSED IN FETAL LIVER, SIGNAL = 6.8; EST_HUMAN HIT: BE935837.1, EVALUE 8.10e-01; EST_HUMAN HIT: BE935837.1, EVALUE 8.10e-01
gccaaaagcctcagagacagaaaattctagaagcagaatttaaatttagcttcctccctgcagctaagcctctgggaagccaatgatagaaggctggatttgagcaatcaccttgtggctacaagtcatggctgatacttggtagaccatgagataggccaggttttccctccactggcctctgtcttgcattcctaaggatgtgaagagggccacgcagtggtgaagtgcagatgtgtgcagccaagcactgccattgtccagttctttgaccctaatcaagtttttcaactcccaagttattccattttcccatttgtaaaacccttcaaggaggggagtgataattaacagagataagacacataaagtagctggcatgaggaacatcctctcttagctcctgggaaaatacatttcttcatctataggatggcaatatcaatagtcactcttcaggaactttgagatctgtgattgagacagcacgtggaagtgcctggcagacagcgttcatcaagatggcaaccatcgttgcttgtcggtctttccttcctccctcacttacactgcc

SEQ ID NO: 4545 - DNA, 572 bp, Homo sapiens
  MAP TO AC005952.1; EXPRESSED IN BONE MARROW, SIGNAL = 2.8; EXPRESSED IN PLACENTA, SIGNAL = 3.4; EXPRESSED IN ADULT LIVER, SIGNAL =   3; EXPRESSED IN HELA, SIGNAL = 3.4; EXPRESSED IN BRAIN, SIGNAL = 3.4; EXPRESSED IN FETAL LIVER, SIGNAL = 2.3; EST_HUMAN HIT: AW139813.1, EVALUE 5.10e-02; EST_HUMAN HIT: AW139813.1, EVALUE 5.10e-02; SWISSPROT HIT: P02462, EVALUE 1.60e-01; NT HIT: AL163282.2, EVALUE 1.40e-01
gctggtgtcaggaggaagaggtgtggcccccaggtcaggcagctgggcccccatatggcctaggtgagcagttgggtgtttgctcagtccagcctggacaccctccctcactctcacccctagggtgtggcatttcctggcaggtgctctgggtgtgggagaaccaaaagggggccttggtgcttctctgttccaggccagagttcaggaatccagacaagccaggtcagcccaggaggagcaagtaagggctcactgagtgacatttcctcctgccaccagcctctgaggcccagagcaagcaggaatttgctcactcccccaaccccatgagccagggaggatgcctattgtggaccctcttcctggtgggaatctggcttgccttgattgctcctcatgatggtgaggtcactaccaacgtggcaaactaaaggaaatctcatcagctgggagttaaagacaggaactaggctcccacccaacctttcttaggtggatttctaggcctctctgtgcctcaattttcctatccataaaaatggagctaatgcagccctacttctcagcac

SEQ ID NO: 4546 - DNA, 574 bp, Homo sapiens
  MAP TO AC010328.4; EXPRESSED IN FETAL LIVER, SIGNAL = 1.4; EXPRESSED IN BONE MARROW, SIGNAL = 0.72; EXPRESSED IN ADULT LIVER, SIGNAL = 0.51; EST_HUMAN HIT: AA324003.1, EVALUE 4.00e-64; EST_HUMAN HIT: AA324003.1, EVALUE 4.00e-64; SWISSPROT HIT: P03360, EVALUE 9.00e-22; NT HIT: gi14760973, EVALUE 0.00e+00
gttcgtgtgggataagcctccacctacctagagtaggtacacacgagaactagtaaatacttgttacttctacactttggcatttctgtgaagtccacctggagatcttcaaagggggctgcttcataagcttgtatgccgggcagaatggctgaaccctgcctcgcattgtgctgtcggcaggtaacacaccgctgtgccacggttttggcgagggctgacaattgtgagctgtagaagtaccagcctaacaactgttcaagtgactcctgacctagatgggtggtttcatgcacctccagtacaactgtggctcctagcagctgtggcacaggtactgtcctatttggtgaccggatccttccttcttccatcacctgtcttccctctgcctggagaaagtctttttcttctttagaataagtaggtacaaggtcaggtgcttgagggagcaagggggctgtgactgatgcccagtagggtgtggatgttgcttttcgagcttctgagtcagctctggagttccctaaggcaaccgaggtggaagctcgctggtgtcctctgcagtgcatga

SEQ ID NO: 4547 - DNA, 571 bp, Homo sapiens
  MAP TO AL031393.1; EXPRESSED IN BONE MARROW, SIGNAL = 0.74; EXPRESSED IN PLACENTA, SIGNAL = 1.4; EXPRESSED IN ADULT LIVER, SIGNAL = 1.2; EXPRESSED IN FETAL LIVER, SIGNAL = 1.3; SWISSPROT HIT: P51523, EVALUE 3.00e-62; NT HIT: gi15308173, EVALUE 7.00e-59; EST_HUMAN HIT: BE693383.1, EVALUE 1.00e-129; EST_HUMAN HIT: BE693383.1, EVALUE 1.00e-129
aggctttcccacatcttctgcattcataaggtttctctcctgtatgagttctatgatggacagagaggtgtgactttccactgaaagtcttcccacatatactacattcatagggtttctctcctgtatgaattctctgatgaacagagaggtgtgactttcctctgaagcttttcccacatttactacactcataaatgttctcttttgtatgagttctccaatgtttagtgggactgggcttctcatcagaggctttcccatgttcactgcactgaggtttctcacttgtgtgaattctttgatatataaggctggacgtagtacatttaatacctttataaaatgcttgtctaatgtgtgttttttcatgtctaataagatgatatgaactcttaaaggcttttggacatttgtcacatacaaatggtttctctcctgtatgagttcgttgatgtttaatcagagttgacttctggataaaggtttttccacattcactgcattcatagggcttctcccctgtgtgagttctctggtgtgctatgagggttgacttctggctgaaggc

SEQ ID NO: 4548 - DNA, 536 bp, Homo sapiens
  MAP TO AF172277.1; EXPRESSED IN HELA, SIGNAL = 1.6; EXPRESSED IN FETAL LIVER, SIGNAL = 1.5; EXPRESSED IN PLACENTA, SIGNAL = 1.5; EXPRESSED IN ADULT LIVER, SIGNAL = 1.1; NT HIT: gi4826863, EVALUE 1.00e-108; SWISSPROT HIT: P35331, EVALUE 4.00e-27; EST_HUMAN HIT: BE257386.1, EVALUE 1.00e-109; EST_HUMAN HIT: BE257386.1, EVALUE 1.00e-109
tgtacctgggagacctgctccctctattttcttagaaaaatgacaggcaatttgtgtgcatgatttctttattgagtcaaatttgggctagttctaaagaagacaggtaccttaaaatgtatagcctgcccttttttcccaggtcatgattcaatgaaacattttagatatgagggcttattgctctcttactgaatattaaaatctggtaattatttctagaaacccataaaactgctaggaatttgttaaggtaatcccatttttctggaccattaatacacttaacacttcgtgtgttgggcagcttttcctggacccgtaatgggactcattttgacatcgataaagaccctctggtcaccatgaagcctggcacaggaacgctcataattaacatcatgagcgaagggaaagctgagacctatgaaggagtctatcagtgtacagcaaggaacgaacgcggagctgcagtttctaataacattgttgtccgcccatccagtaagtggaaacttgtcaaccaacatgaccct

SEQ ID NO: 4549 - DNA, 512 bp, Homo sapiens
  MAP TO AC006293.1; EXPRESSED IN BRAIN, SIGNAL =   3; EXPRESSED IN FETAL LIVER, SIGNAL = 1.7; EXPRESSED IN BONE MARROW, SIGNAL = 3.6; EXPRESSED IN PLACENTA, SIGNAL = 2.4; EXPRESSED IN ADULT LIVER, SIGNAL = 2.9; EXPRESSED IN HEART, SIGNAL = 2.4; EST_HUMAN HIT: BI911888.1, EVALUE 2.00e-69; NT HIT: AF072409.1, EVALUE 0.00e+00; SWISSPROT HIT: P43632, EVALUE 6.00e-36; EST_HUMAN HIT: BI911888.1, EVALUE 2.00e-69
caacgaagaacctccctgaggaaaccacctcttctccttccaggtctatatgggaaaccttctctctcagcccagccgggccccacggttcaggcaggagagaatgtgaccttgtcctgcagctcccggagcttgtttgacatttaccatctatccagggaggcagaggccggtgaacttaggctcactgcggtgctgagggtcaatggaacattccaggccaacttccctctgggccctgtgacccacggagggaactacagatgcttcggctctttccgtgccctgccccacgcgtggtcagacccgagtgacccactgcccgtttctgtcacaggtgagaaaacaccatgcctgtcccatgtcttgtgatcctagagccatagctgaggagcttcctgctgatgatggagagaagcatggacagatgccgagacagaacacacagcatgggtgtaagggcggggtcagggggcaggatggcagacagggcacctccaaaccctcctgta

SEQ ID NO: 4550 - DNA, 542 bp, Homo sapiens
  MAP TO AC010649.5; EXPRESSED IN ADULT LIVER, SIGNAL = 0.92; EXPRESSED IN FETAL LIVER, SIGNAL = 1.1; EXPRESSED IN PLACENTA, SIGNAL = 0.68; EST_HUMAN HIT: BF683976.1, EVALUE 1.00e-14; SWISSPROT HIT: P08547, EVALUE 9.00e-12; NT HIT: AL163303.2, EVALUE 2.00e-03; EST_HUMAN HIT: BF683976.1, EVALUE 1.00e-14
ggaaggaaaggaaggaaaggaaaggaaaggaaagaaagaaagagagagaaggaaggaaggaaaggaaggaaaggaaaggaagaaaggaaagaaagaaatagaaggaaggaaggaaaggaagaaaggaaagaaagagaaagaagaaagagagaaaaagaaaggaaagaaagaggaagaaagaaggaaagaaaaagaaaagaaagagaaataagaaagaaagatgggctcacacactgcgtggcctttcgtgtctggcttctctcactgagcacgaggtcctcacagttcatccacgctgtggcctgggtcagaggctccttccttttcatggctaagtaatattccagtgtgtggatggaccatgctgtcctgatccatccttcagtagatacctgggttgcctccatgtcttggctattatgagcctgctgctctgagcttcatggacaggtccctgcatggatgtgtgtgtttttagttctcctgggtagacacttaggcgtggaattcctgggtcaaatggtggctccatgtttgacctt

SEQ ID NO: 4551 - DNA, 575 bp, Homo sapiens
  MAP TO AL118556.2; EXPRESSED IN LUNG, SIGNAL =  11; EXPRESSED IN HELA, SIGNAL = 8.1; EXPRESSED IN FETAL LIVER, SIGNAL =   9; EXPRESSED IN BONE MARROW, SIGNAL = 7.4; EXPRESSED IN ADULT LIVER, SIGNAL = 6.7; EXPRESSED IN HEART, SIGNAL = 9.8; EST_HUMAN HIT: BE420422.1, EVALUE 0.00e+00; EST_HUMAN HIT: BE420422.1, EVALUE 0.00e+00; SWISSPROT HIT: P22004, EVALUE 8.40e-01; NT HIT: AL163246.2, EVALUE 2.00e-83
gcattcaagaggtggctagggtgttgttaaaagcatttagtcttataagggaagcacagcataaaagtttggaaaatttgcagcctgacaatacaatggaaaagaaaatcccattttctgaggaaaaattcaagcaggctgcagaaatttgcataagtaacgaaaagctgaatattaattccaaagacaatggggaaaatgccttcagggcgtgtcagaggtcttcatggcagaccttcccatcacaggccaggagacctaggaggaaaaagtggtttcgttggctaggcccagggtccctgtgctgtgtgcagcctagagacttggtgccctgctttccagctgctccagctgcagctgaaaggggccaacatagagctggggccgtggcttcagagggtgcaagcctccagccttggcagcttccacgtggtgttgagccttctagtacacagaagtcaagaattgaggtttgggaatctttgcctagatttcagatgatgtatggaaatgcctggatgtccaggcagaagttttctgcaggggtagtgccctcacggagaacctctgctagg

SEQ ID NO: 4552 - DNA, 553 bp, Homo sapiens
  MAP TO AL121877.13; EXPRESSED IN FETAL LIVER, SIGNAL = 1.4; EXPRESSED IN BONE MARROW, SIGNAL = 1.2; EXPRESSED IN PLACENTA, SIGNAL = 1.1; EXPRESSED IN HEART, SIGNAL = 1.3; EXPRESSED IN ADULT LIVER, SIGNAL = 1.1; EST_HUMAN HIT: BF984548.1, EVALUE 0.00e+00; EST_HUMAN HIT: BF984548.1, EVALUE 0.00e+00; SWISSPROT HIT: O75317, EVALUE 2.00e-69; NT HIT: AF022789.1, EVALUE 0.00e+00
tgctttatcgtgtgcaaagcctgctactgccccctgagcttcctgcatttctcttttcttgaaaaatcagtgcttgatcctttccaaaataaccagaaaagaaatgaggcagaaagtatctcttcatcgcggttccccctcagtcccgagactgatagaaaaggatgtaaccagactcagagttctttgagtatctgatgtcaacccgtagaattcttcaatagcttgtgtatctattttttctacaatgtcgtcatcaaacaacaaccaaaaatcatgactcttaactatcgcaatataatggcctcgattgggaccacttccacagtgaaccacaacagcaacaaggtcgtacattctgtctggattggtggcatcacctgaagtgttaaatagacgaagttctaaaggaaaaaccacccggtaagagagttttgtatatcgatgaagttgatccatatatttaaatctcttcaagtgtacagctagaatcatgggcagtttttaaactttcatccgtttgtgtgcttcctgtttgctgcgacactcttca

SEQ ID NO: 4553 - DNA, 580 bp, Homo sapiens
  MAP TO AC010972.2; EXPRESSED IN ADULT LIVER, SIGNAL = 1.2; EXPRESSED IN HEART, SIGNAL = 2.4; EXPRESSED IN BRAIN, SIGNAL = 1.7; EXPRESSED IN FETAL LIVER, SIGNAL =   2; EXPRESSED IN PLACENTA, SIGNAL = 1.4; EST_HUMAN HIT: AV730925.1, EVALUE 1.00e-110; EST_HUMAN HIT: AV730925.1, EVALUE 1.00e-110; SWISSPROT HIT: P03341, EVALUE 3.00e-08; NT HIT: AB008681.1, EVALUE 0.00e+00
cggcctttctctgatctcacttttccttttggtcctgttcctcttggtccctattatagaacaccgaggttgccaggtttaataatgcctctagattttgttcatggtccaggactttcttttggagctttcttctgatatctgtggctgattgggtaataaacatatgttttagaatcaattgaccctccagtgattcgggtgacaggagagtatattttcttagggcctctcatagccgcttgaggaaggaagcattttcttcctttccctgagttatggtggacatcattgactaatttatgggctttttctaattctcctttgtccttctagaacataggtcaacagaagtttatgaatccagttcccatgatctgagttaaggtcccagtggggatccatactggggatggcttgctgactggtagggaatttgtccttttcttcagctgtcattctattatttccttgactaagataccaggtatctccaagctctcaggctgcaactaaagccacatttttttcattaaaggccaaggtttgatctaacagtagcatgacatctctccaagca

SEQ ID NO: 4554 - DNA, 592 bp, Homo sapiens
  MAP TO AC008427.5; EXPRESSED IN PLACENTA, SIGNAL = 6.5; EXPRESSED IN HEART, SIGNAL = 6.6; EXPRESSED IN LUNG, SIGNAL = 9.9; EXPRESSED IN ADULT LIVER, SIGNAL = 6.4; EXPRESSED IN BRAIN, SIGNAL = 6.3; EXPRESSED IN BONE MARROW, SIGNAL =   7; EST_HUMAN HIT: AW882393.1, EVALUE 3.00e-53; EST_HUMAN HIT: AW882393.1, EVALUE 3.00e-53; SWISSPROT HIT: P50443, EVALUE 3.00e-87; NT HIT: gi13643619, EVALUE 0.00e+00
gactcttccaccaagccaagcagtgaactctttggcttctgagtgcggaggatgacacaaaatatagaaaaacaaaccccaacaagtaggcctatttcagtacttagcagtgcagaggacagcatagtaacaaaccagataactgtatccattctactaatactccacattttgggaagatccctaaatttacgaagggctccccgtagatttacaattgtgatcacaccaaggacacttttttgaagggaatagaacaaaggagctattactaggaggaccaacaaaagaaccagggctgttaccacaccagaaagctgagtatggcagcctgttgattctttaaccaatgtctttgcaagagctgcactagtagtaaaacagtggaagaaggaagggatgatattacaaaagccaatggcatacatttcctggtttgctttgactgtgtaaccatgtttcttggcaaacatctcagaaagtgatacagtgatagcaaaaccaatgatggaaatagctattgcatctacagccacactaaggaattaaggttccattctggtactttgggtggcataaacccagtgggata

SEQ ID NO: 4555 - DNA, 558 bp, Homo sapiens
  MAP TO AC009265.5; EXPRESSED IN BONE MARROW, SIGNAL = 0.58; EXPRESSED IN PLACENTA, SIGNAL = 0.9; EXPRESSED IN ADULT LIVER, SIGNAL = 0.8; EXPRESSED IN HELA, SIGNAL = 0.68; EXPRESSED IN BRAIN, SIGNAL = 0.86; SWISSPROT HIT: Q64754, EVALUE 2.40e+00; NT HIT: AJ298105.1, EVALUE 6.00e-04; EST_HUMAN HIT: AI475991.1, EVALUE 1.00e-11; EST_HUMAN HIT: AI475991.1, EVALUE 1.00e-11
tcattttggcttgcactctgctggagtacattttgaactcctttgacacccaaactctgaagaaaaagtggctcattttctgttgcacaagggtgtggccttcttaccctctcaggaatgaacagacctggccagctaaagggaaccttaactttaatcttatccagcaattagatctcttctgtagatggaagagcaaatggtccaaggttctctatgtgcaggcttcctttgccctgtgagacaacccagacctttgcaagcattgcaaaaccaactcagccctcttagcaatcatatcagacaggtctgtggagactagttcccctaagtcagaagagcaagttttggaggaaccattagaggcagcttctaagtgccccagtccttccagtcccctttgtccagggccccctccagctgcaccatcagctcctccagctccaccatctccaaagctccccactgcccagacttcactcctacccctacaagaaatgccagatggaaggggcaccattaaggtacttattcccttctcattgcaggaccttaggc

SEQ ID NO: 4556 - DNA, 575 bp, Homo sapiens
  MAP TO AF031076.1; EXPRESSED IN ADULT LIVER, SIGNAL = 0.76; EXPRESSED IN FETAL LIVER, SIGNAL = 1.9; EXPRESSED IN PLACENTA, SIGNAL = 0.78; EXPRESSED IN BONE MARROW, SIGNAL = 0.7; EST_HUMAN HIT: AI678356.1, EVALUE 0.00e+00; EST_HUMAN HIT: AI678356.1, EVALUE 0.00e+00
agcttgggtgactggtatggctatcaactgtgacagaaaacagtggacatggcatttgtctatttggtcttctgatctaccttatcttgaaggagacaggggtggtagggcgcccagtgggttgagaagaatggaagggagaaagagggcagaaatctctcaaatgttttgcacagtaaaatctgactaaaatgcacacacgccccacaagcctttttctttttttttccccccaagaagcaaaacaagttttatttccatagtagttccttttagtgctctctgtcgccacctaatggatggcctggtggaagaggctcaagaggtagcagcctagcctattccacggcagaggaatcaaactcacccaggcagggagaacgggactgcacctgggtgggggaggaccaaaagaagcccagctgcttctggaagatcattgggagtctcttctggaagaccaggggctcttggagctaaaatagacgttcgttcattaataatacctacttcaacaacttaagatcatgttcagcggatgcacatcaaccttgacttgtctgtgctccccaaat

SEQ ID NO: 4557 - DNA, 529 bp, Homo sapiens
  MAP TO AL121915.8; EXPRESSED IN BRAIN, SIGNAL = 0.92; EXPRESSED IN BONE MARROW, SIGNAL = 1.4; EXPRESSED IN PLACENTA, SIGNAL =   1; EXPRESSED IN ADULT LIVER, SIGNAL = 1.2; SWISSPROT HIT: P36914, EVALUE 9.70e-01; NT HIT: gi14722331, EVALUE 7.90e+00; EST_HUMAN HIT: W52788.1, EVALUE 4.70e-02; EST_HUMAN HIT: W52788.1, EVALUE 4.70e-02
gcagctgaaaaatcctttgggatattaagctttatcagacagagtttgaatttctcgatgttttagtgtaacataacggcaattactttcactcaacacatgtttctttagctcccactcagtgcctggcactggaaaggcagcaacgaacaagacaaggtttccactctcatggagacaaccaacaagccaaccaatgaacagaccgtttcatgtcatggtgagcgcaaaggaaacgctaacacagggtaaggggctggagagtgattggcagctccttctatggtgggtgggggtgtcaaggaaagcacctgtgaggaactgggcatgcggcgagctgggcatgtggcaagctggcacgcgggctgaaccatcagcctgtgcaagggccctggggtcaggcaagtttgatgccttacttttccttctcaaagcatggagtacttttcagggttatattagtttccccgaaaactgctgctgctgtagcagatagtcacaaatagggtggctttgcaacaacaggaat

SEQ ID NO: 4558 - DNA, 560 bp, Homo sapiens
  MAP TO AC008784.5; EXPRESSED IN BONE MARROW, SIGNAL = 0.93; EXPRESSED IN ADULT LIVER, SIGNAL = 0.7; EXPRESSED IN FETAL LIVER, SIGNAL = 0.65; EST_HUMAN HIT: BF823210.1, EVALUE 2.00e-94; SWISSPROT HIT: P11227, EVALUE 9.00e-17; NT HIT: AJ278581.1, EVALUE 2.00e-93; EST_HUMAN HIT: BF823210.1, EVALUE 2.00e-94
tctctgtcgttaagcaccccgaggggagacaactatgcccccgtgaaagtccccattctgtttcagtcgggaatactggggcttaatctgttggagagggttgttctataccaagggtccttccgtaggtatttccgatgggaggttctgcctggcagcaattttggcctcagcatctgcccgatggtttccttctgccttttcttcttcacctttttgatggctttggcagtgtaagactgccagctccttgggtttttgcactgcatgcaacagcttcatgatttccttgtggtatttaacggaggttcccccagatgttaggaattccttttccatattgcagcatgggcacgtaggattagataagcatacttgctatctgtatacacatttatcctttttccctttcccagttctaaggctcaggtaagtgccactagttctgctaactaggcactggttcctcggggaagaggcttacttttgagtactgttacattactaactatggcataacatcactaactatggcataacctgccttccgtatccgatta

SEQ ID NO: 4559 - DNA, 586 bp, Homo sapiens
  MAP TO AC010219.4; EXPRESSED IN BONE MARROW, SIGNAL = 0.85; EXPRESSED IN PLACENTA, SIGNAL = 1.3; EXPRESSED IN HEART, SIGNAL = 1.3; EXPRESSED IN LUNG, SIGNAL = 1.2; EXPRESSED IN ADULT LIVER, SIGNAL = 1.1; EXPRESSED IN BRAIN, SIGNAL =   1; EXPRESSED IN HELA, SIGNAL = 0.85; EST_HUMAN HIT: AI114544.1, EVALUE 3.00e-03; NT HIT: AL163209.2, EVALUE 1.00e-04; SWISSPROT HIT: P81913, EVALUE 9.70e+00; EST_HUMAN HIT: AI114544.1, EVALUE 3.00e-03
tcaacagcgtgaaaatggactaatacagatggtatttgaattatatctcaataaagctgttaagaaaaatctcttcacctaccaaagataaaactgtgctcctagggacaaagttgctgatccagggtcacaaccagcaagtgacaaagctgccacccaagactagtcggcatggcctcaagggctgctttattcctctctcctgtgctacctccctcaaggacaagtgaggaggcagaagtttggcattgtccctctaaaatctaaggggtattagcaaatattttaacagtagtatctatgagtgatcagatttgctttcttctttgttctttctgtattgtttgagtattttaatatcgttttttattagaaaatgttttaaaaagaatacattattcaagaactgtaggtgacagtaagtttcatgggggtcggtagtaaacaattactcctgattgctctgctgaggtggcatgctttttaatgtggcaggcatgaaaccacctttgcaaaatgacgtcaatgagaaaattgtggcagtgggggagatctgatttagccaacctgacttgtgcctttagcc

SEQ ID NO: 4560 - DNA, 537 bp, Homo sapiens
  MAP TO AC025467.3; EXPRESSED IN BONE MARROW, SIGNAL =   1; EXPRESSED IN PLACENTA, SIGNAL = 1.1; EXPRESSED IN ADULT LIVER, SIGNAL = 1.1; EXPRESSED IN HEART, SIGNAL = 2.3; EXPRESSED IN LUNG, SIGNAL = 1.4; EXPRESSED IN FETAL LIVER, SIGNAL = 1.2; EXPRESSED IN BRAIN, SIGNAL = 1.3; EST_HUMAN HIT: BI117539.1, EVALUE 4.80e-02; NT HIT: AE005514.1, EVALUE 2.00e+00; SWISSPROT HIT: Q9UPV9, EVALUE 1.70e+00; EST_HUMAN HIT: BI117539.1, EVALUE 4.80e-02
ctcgatgtcccctctattgcctatcttacaataaatgacaataaatggatcaatgtaaggaaaccagtattacatgaggctgggaagtctaaaataactaagccagagagtttaaagggaggtttatcaagacaaaaggaagagatcatgtcacatgactttttaaaaataccaaggaaatgtctttactattaaggtactcttttactttactaatttaaaaaagaatcaacatgataaacccatcaatagcttcttgtgggcagacctgggaataccaactttattatgcccatgagggcaaagcctccagtagatctgaatcacctgattgtttcagtagctgctccaccagctgcaggcctgaggaagccacccggatacttcccactccagtttgcccatctgtaaaacgggcagacccgacagcccagccaggacaattgaggcgatatctcagaaacatgggcagagtcccacagagagttctgtccagggctttctgacaggaagcaaagggtggtcagtgaaggagaa

SEQ ID NO: 4561 - DNA, 502 bp, Homo sapiens
  MAP TO AL022325.1; EXPRESSED IN LUNG, SIGNAL = 3.3; EXPRESSED IN BONE MARROW, SIGNAL = 1.1; EXPRESSED IN PLACENTA, SIGNAL = 0.75; EXPRESSED IN ADULT LIVER, SIGNAL = 1.1; EST_HUMAN HIT: AW062258.1, EVALUE 0.00e+00; EST_HUMAN HIT: AW062258.1, EVALUE 0.00e+00; SWISSPROT HIT: O75648, EVALUE 6.00e-26; NT HIT: gi11418320, EVALUE 4.00e-60
tccatctattgctccaaggcccgcctttgatgttaggtcctggagaaggggaagtggtgcgggacccacaggtccagctgctccgtgccatgcagtcgggaaagggaaacaggcactaatcaaaggcaactgctcactcgtacctctttcttctgaagcacatgatgaagtctattctcagcagcgattttctttacaaactctttcgttaatccccccagagggaagatggttctcctcagggcatcctgggaaacctggctgagaaagaaggtctggtctttaaagctgtcagctgcctggaggagttttaccgctgccaagaataaagaacaaaagacgatgcaggaataaaaataatgatacttcactttcaacaatgtccttctgttcacttagacagactacccctagcctgtcagaggcagacatcaacactcaatagcaactactagggaaaagaccaccacgggttaatgtaagaaaaattcgcacctccaaa

SEQ ID NO: 4562 - DNA, 583 bp, Homo sapiens
  MAP TO AD000090.1; EXPRESSED IN HEART, SIGNAL = 4.3; EXPRESSED IN ADULT LIVER, SIGNAL = 3.3; EXPRESSED IN BRAIN, SIGNAL = 2.7; EXPRESSED IN BONE MARROW, SIGNAL = 2.4; EXPRESSED IN PLACENTA, SIGNAL = 3.3; EST_HUMAN HIT: BE156088.1, EVALUE 2.10e-01; EST_HUMAN HIT: BE156088.1, EVALUE 2.10e-01; SWISSPROT HIT: P02817, EVALUE 7.00e-03; NT HIT: AL163246.2, EVALUE 1.40e-01
catcggcaggaaagagaaagaagatctggggacaaagagagttggtagctgggtggtgcccatcctgagggagaacaccagagcggggattgccagcaggacgcagaagaaggatacgacagcgagcagtaaatagtctctttctggaggacacaagggcatcagggtgactggttgcattggggcgagcagctgcactgggatgaagggctgcatggggatgagtggctgcatcggggtgaccagggacttcaagtccctggggctcattgcagtagccataggccttggcctgaggaggagatgctgggtgagtggaatctgcagacaggggtcatggggtccgggaaggggacatctgagtccccaagcaactgagaccacccaaaccaacccctctggctagaaaggtactgaaagttgacactgtcccaagccaggggacagcgctccaagccagaacccaccacagccccgtgctcctgtagagtagccttgctggctctggaacacccacgccaccctcctctagcctctcacaaccccctccctgctcccctctggctgttgcactttcctcctc

SEQ ID NO: 4563 - DNA, 515 bp, Homo sapiens
  MAP TO AC009286.31; EXPRESSED IN LUNG, SIGNAL = 5.1; EXPRESSED IN FETAL LIVER, SIGNAL = 2.4; EXPRESSED IN BRAIN, SIGNAL = 4.6; EXPRESSED IN PLACENTA, SIGNAL = 2.8; EXPRESSED IN HEART, SIGNAL = 3.2; EXPRESSED IN ADULT LIVER, SIGNAL = 3.9; EST_HUMAN HIT: AL079752.1, EVALUE 8.00e-78; EST_HUMAN HIT: AL079752.1, EVALUE 8.00e-78; SWISSPROT HIT: P07566, EVALUE 5.50e-01; NT HIT: AL163246.2, EVALUE 1.00e-120
aggattgcagtagctcagggcccttgctcactagaagcaaggagccccctgaccccttctttaaaacagatccctttgtctttgtcttcatttctgtgttagtcccccttcattctgtcctgtagtaactgtcacggggactaggaagaagtatgattggaaaattgatgacaaagaaatttggggaaaagatatgtggatggacctctctgagtggtcaaaaactgtgaaagtatttgtatcccatgtgagcgctcaccaacgggtgacctcagcagaggaggattttaataatcaagaggagagtatgaccagttctgtgaacaccacgcatcctctttccccagccacccctgtcatcgcccaatgggcccatgagggaagtggccatgctggcaggaatggaggttacacatgggctcatcaacatggacttccactctccaaggctgacctagctacagccactgctgagtgcccaatttgccagcagcagagaccaacactgagccctc

SEQ ID NO: 4564 - DNA, 586 bp, Homo sapiens
  MAP TO AL031600.4; EXPRESSED IN PLACENTA, SIGNAL = 2.6; EXPRESSED IN ADULT LIVER, SIGNAL = 1.7; EXPRESSED IN HEART, SIGNAL = 2.1; EXPRESSED IN FETAL LIVER, SIGNAL = 2.6; EST_HUMAN HIT: BI031113.1, EVALUE 2.00e-23; EST_HUMAN HIT: BI031113.1, EVALUE 2.00e-23; SWISSPROT HIT: O70496, EVALUE 3.00e-04; NT HIT: AJ001910.1, EVALUE 0.00e+00
ctccacatcatcacaccctgagggctgggggagctgtttctcaaaggctctgccttccttccagggcaaaggtgtccagcagagcaataaatactggtgggagcaattctatctcttacaggaaatcccatccatccctgcagccctgtggtttttgccaacagagataaacaacgggaagccacagaagcgaagctttgggctccccactccccacgtgtactgcccatggaagaatctggaggcccccgggtggccctgggatgagggcaggctccagggagccacagcctccagtcctcgtctctatggccacgtcacagctgagccaggcccgcaggccgtccctgcggtgctgggagaagcccttacccaccacgcccatggcgatgaagaccgggatctcgtggatcgtgtaggccattttctgtgcagagagagggagaaggcagaggatgtgagggaaaaggcccacagctcctttctgctgaaactcaaggaccaccatcttaagagagctgtccccacagagagccttcccgcccttccacgcaggctgcggaagtccacaggggagaaacacact

SEQ ID NO: 4565 - DNA, 578 bp, Homo sapiens
  MAP TO AC005785.1; EXPRESSED IN ADULT LIVER, SIGNAL = 3.3; EXPRESSED IN HEART, SIGNAL = 2.9; EXPRESSED IN FETAL LIVER, SIGNAL = 2.1; SWISSPROT HIT: O43823, EVALUE 3.00e-41; NT HIT: gi14761764, EVALUE 0.00e+00; EST_HUMAN HIT: BE794581.1, EVALUE 0.00e+00; EST_HUMAN HIT: BE794581.1, EVALUE 0.00e+00
gagggcttgggtccataatcacctctcccggtcctgtatgccctccccaccgccgccgctcccgcccctgcctccttccttggacatcatgtccaaacgctggttgatcttggcaatgagggagtcggaattgtcggtgcatggctctgggccgtaagaggccatgtgcatggcaggggccccggccgccaggccgccatcattggccttggcggcctcccacgaggctgggccgtagctgtaggttgcgcctgtggtgacactggtgttctgggcgccatagtaattgtagttttcataacctgtcacagggggaggagccaagtcagacttcagcagccacgaggcctgtccatggtggacacaaccggggaggggcacccgctgccacggagaaggaaaacgggtgtgggacccagtgctgctggcatcacttcacactgcactgtgacctgccaagaggcagcaggaggtggccagagaaaggggcagcctcagtgccgagcggcgggttttccatgccagacgctaggacctgttccccattcaaagccgggtgactgagagcctgggaacag

SEQ ID NO: 4566 - DNA, 579 bp, Homo sapiens
  MAP TO AF181449.1; EXPRESSED IN HELA, SIGNAL = 1.2; EXPRESSED IN BRAIN, SIGNAL = 1.5; EXPRESSED IN FETAL LIVER, SIGNAL = 1.3; EXPRESSED IN BONE MARROW, SIGNAL = 1.6; EXPRESSED IN PLACENTA, SIGNAL = 1.2; EXPRESSED IN ADULT LIVER, SIGNAL = 1.4; SWISSPROT HIT: Q9JIB6, EVALUE 5.60e+00; NT HIT: AF223391.1, EVALUE 3.00e-33; EST_HUMAN HIT: BE162737.1, EVALUE 3.00e-77; EST_HUMAN HIT: BE162737.1, EVALUE 3.00e-77
aagatctgattgccacctgctccttcaactgatttctgattatccttctccttcattagttaaaataaagtaataaaagtaaagaaattgctattctctaaatgtttcatgcttttatttccttacataatttgtgcttgctcttcttttctactagaatgccatcctcttcctttatcaccaaattaaattcttctcatatttctgggtttgattcatgaagtacctttcctaggtacttttatgtcattcctaggttcaaagaaaattttaatgctgtgaaaaaaattaaggatggacagattaagatggcagacaggaggcaggactagcttgcagctgttgctcagatggacagagcagcgtgtggagactcacattgtgaacttttgctccaagaactactgcaggaacataccaggaaagctgagagaatccacagaccctttgaaggtactggatcactactgcaggctccctgagatgctgctgaaaaactgtgagtctgcttgctttctcaacagggaggctcgtggtctggggcaagttctcagccctggtcactggctgcttggaaat

SEQ ID NO: 4567 - DNA, 526 bp, Homo sapiens
  MAP TO AC006479.2; EXPRESSED IN BRAIN, SIGNAL = 5.3; EXPRESSED IN LUNG, SIGNAL =   8; EXPRESSED IN FETAL LIVER, SIGNAL = 7.1; EXPRESSED IN BONE MARROW, SIGNAL = 4.4; EXPRESSED IN PLACENTA, SIGNAL = 6.7; EXPRESSED IN ADULT LIVER, SIGNAL = 4.9; EXPRESSED IN HEART, SIGNAL = 7.7; EST_HUMAN HIT: AL557446.1, EVALUE 0.00e+00; SWISSPROT HIT: O73797, EVALUE 4.30e-01; NT HIT: gi11419972, EVALUE 0.00e+00; EST_HUMAN HIT: AL557446.1, EVALUE 0.00e+00
cgctctccatctttgagtccaaggtccagactcaagagctgtacaagaacatcggggactgctacctgctctctgccctcgggccccatgtgctgcttctggtgatccagctgggcgtttcactgctcaggacacagtggccatcaggaaggtgaaggaggtttttggggcagggtcatgagacatgtggtcatcctcttcacccacaaaggggacttagggagccaggccctggatgactatgtagcaaacatggacaacctcagcctgaaggacctggtgcaggaatgtgagagaaggtactgtgccttcaacaaccgggctgccggggaggagcagaggcagcagcaggcagagctcctggctgcgatcgagaggctggggagggagcgagagggctccttctacagcaataacctcttcctggatgcccagctgctccagagaggcagggctggggcctgccaagaagactacaggcagtacctggccaaggtggaacagtaggtggagaagcagaggtgag

SEQ ID NO: 4568 - DNA, 600 bp, Homo sapiens
  MAP TO AL109865.36; EXPRESSED IN BRAIN, SIGNAL = 4.6; EXPRESSED IN LUNG, SIGNAL = 6.4; EXPRESSED IN FETAL LIVER, SIGNAL =   5; EXPRESSED IN BONE MARROW, SIGNAL = 5.4; EXPRESSED IN PLACENTA, SIGNAL = 5.2; EXPRESSED IN ADULT LIVER, SIGNAL = 5.1; EXPRESSED IN HEART, SIGNAL = 3.7; EST_HUMAN HIT: BG184194.1, EVALUE 5.40e-02; SWISSPROT HIT: Q9P804, EVALUE 3.50e-02; NT HIT: gi13569898, EVALUE 0.00e+00; EST_HUMAN HIT: BG184194.1, EVALUE 5.40e-02
aggaaaagtcacatgcccaggcattttatttcaaatactagaaaattttcatactgcataccttaggccaatgtcaaaaaatggcattaatttaaataaataaacaacaaaaaactgtcttaatttttaactactcctcgtccccaaaatttcagataagtttagaaagtgacacggcaagtcttttctacttacatgaaatcaaaagatctcaaatgcatcagtacattggcatccattttggtcaccttaatattaccaagatttttctctccttcttcaagaatatcatcactcttttccttttccttactgtccaccaccactttcaatttgtttaaatggcagttttcctgaatcagtgtcacagaattttcattcaagtcattgattgtaactttgactgcatttccaagatgttttgcccactgtaatcccattatcccttaggaaaaatgggaagaaaatgagttttataattgtaataattttaaagaataaaaatggtataacaacattcagttttataaataacaaattatttcaaaatttaatgttttcatgaatcttattccttcttactacaaagcttctcaagaa

SEQ ID NO: 4569 - DNA, 599 bp, Homo sapiens
  MAP TO AC007934.7; EXPRESSED IN FETAL LIVER, SIGNAL = 2.9; EXPRESSED IN BRAIN, SIGNAL = 1.2; EXPRESSED IN PLACENTA, SIGNAL = 2.3; EXPRESSED IN ADULT LIVER, SIGNAL = 1.3; EST_HUMAN HIT: BE645555.1, EVALUE 5.00e-30; NT HIT: AL163248.2, EVALUE 3.00e-18; SWISSPROT HIT: P57564, EVALUE 4.50e+00; EST_HUMAN HIT: BE645555.1, EVALUE 5.00e-30
cccgtggataccaaaatctgtggatactcaagttccttatataaaagggtgtagtatttgcttgtaacctatgcacattctcttgtatactttaaatctctagattatttataatacctaatacaatgtaaatgctatggaaacagttgttatattttattgtttagagaataacgacaagaaaaaagtctatacatgttcagtaaagacaaaactatccagtttttccccgaatattttcagtctacagttgttgaatcaggagcctgtcataattctgacagacaaaattccagacagtgtaatcctgaatgttgaaattctgaaagatcaaaatcctgaaaatataattctggaaaaaataatttaaaattcttcaaaggacatttgtttacatttagaagtgggatttatttgagaaacatgtaaaaacatgacagaatacttcataggccagtttacacaataaaataggcaataatatatatttttgtaatcataaatattcaggtatagtaacaacagtcacatatgtatcacaattatgagcagacaaaccatattcataaagaaataggtcataaagatggggaccatgg

SEQ ID NO: 4570 - DNA, 550 bp, Homo sapiens
  MAP TO AL118558.2; EXPRESSED IN BRAIN, SIGNAL = 7.2; EXPRESSED IN BONE MARROW, SIGNAL = 9.1; EXPRESSED IN PLACENTA, SIGNAL = 6.4; EXPRESSED IN ADULT LIVER, SIGNAL = 7.9; EXPRESSED IN HEART, SIGNAL = 6.8; EXPRESSED IN LUNG, SIGNAL =  11; NT HIT: L39874.1, EVALUE 5.20e-01; SWISSPROT HIT: P30077, EVALUE 4.60e-01
cctcacctctccatagctgcgtgtggtcagcacgccggctggcgtgggagggcaagctctgtgcttagcttccttctctacccagtggcgtctgtgctcccttcgcactgacagaggtgcagacgccgtcactctgcagctgggggcacgtggacgaggctgagacccaggcagagtgtggccttcgcccaagggtccggtaactttgctggctgtttcgaagaaccgcacatgccccacttccacctaaaagtggactcgccagccagaagacttcacatcctgcaccgctactcacgtcgatgtttccgcagactagatgctcgcccgctgcggtccttatccctcatcttaaaattggaggaaacctggtgtttagtaacttcctacagcacgagagttcgagaggactcactcacagaggcatgctgcgatttcagcccagctgcatgctgctgctattttggggtagcaagaagcataaaggcaaaactgtactggcttcgtgtctccttccgtgagggttggcagcacccatcagcagtaatga

SEQ ID NO: 4571 - DNA, 595 bp, Homo sapiens
  MAP TO AC004189.1; EXPRESSED IN ADULT LIVER, SIGNAL = 0.9; EXPRESSED IN BRAIN, SIGNAL = 0.76; EXPRESSED IN PLACENTA, SIGNAL = 0.8; EST_HUMAN HIT: AI347004.1, EVALUE 0.00e+00; EST_HUMAN HIT: AI347004.1, EVALUE 0.00e+00; SWISSPROT HIT: P12675, EVALUE 3.40e+00; NT HIT: gi14761254, EVALUE 1.00e-60
agaatgactccccaaatcccaagctgtttacctgaatctatttccagatgatgcgccaagttttctgagggaagcagaaatagaaagagagatctgtgacttattacttcttataggcacccccaggggcaaggtgacttgagtacaatgtgaagatgaggacagaagactcggcttctgctgtggtctagtggaggagaagggtcctcaccctcctggactctcagtcctgcacctgtccttagggagtggaggagatgctctgggaatagtgcccctgaataaattgagatcactaagggaaggctctggggagggaagatgtctcgagccaggtttcaagggcagagaaggatggagatgggtggaagacaggagggcagctaatgggactggggaaaactgtggcgccttcccctttacctgagaacatcctcatcatctctgggagggtgagtattttcctgtggaaatcacggatcttcttgacaaggtcaggagaaatggcctcaggactcacaaaagtcttcatctcacacctgcagacaggtttggtaaccagttaggtccaaattccaaaaacaaatgttcgggt

SEQ ID NO: 4572 - DNA, 529 bp, Homo sapiens
  MAP TO AL109827.8; EXPRESSED IN ADULT LIVER, SIGNAL = 2.1; EXPRESSED IN PLACENTA, SIGNAL =   2; EXPRESSED IN HEART, SIGNAL =   1; EXPRESSED IN FETAL LIVER, SIGNAL = 2.3; EST_HUMAN HIT: BE045345.1, EVALUE 2.00e-97; EST_HUMAN HIT: BE045345.1, EVALUE 2.00e-97; SWISSPROT HIT: Q99829, EVALUE 4.00e-33; NT HIT: gi14772953, EVALUE 1.00e-97
cttcagcatcaaggggagagtcagtacctggctggacacaatctggggaaaagcagggaagggagtttcaggataacaggcagggttaggtcctgcttgccccctacctccaggcaggctaggttgtctcacagacctgcatctgaaggatcctaatccccagccctacatacctgtcctagggaacactcagcaccccctaggaagtcatcatccctcagctctggcgtcttgttgtctatgtcatagattccaaagcgtagcttctggactgtctcaaagcggtactcaagctgtagagtcttggagaactcagggcttgagcagttccgcacccgttcagtccggccaagctgtgggcagaggccagtaagcatcacagtcacagcctccaccccaaaacacaatcctagcctccctccacaaccttaacctccataatccgcctcacctcagcccagctgccccctcccacatcctgtaaaaggacgcagagtgggtcagacttggagccgatgtccttgtcaat

SEQ ID NO: 4573 - DNA, 543 bp, Homo sapiens
  MAP TO AC007795.1; EXPRESSED IN HEART, SIGNAL = 1.6; EXPRESSED IN ADULT LIVER, SIGNAL = 1.7; EXPRESSED IN LUNG, SIGNAL = 2.7; EXPRESSED IN BRAIN, SIGNAL = 1.7; EXPRESSED IN PLACENTA, SIGNAL =   1; EST_HUMAN HIT: AA460054.1, EVALUE 8.00e-04; EST_HUMAN HIT: AA460054.1, EVALUE 8.00e-04; SWISSPROT HIT: P15720, EVALUE 3.00e-02; NT HIT: AF223391.1, EVALUE 4.00e-08
gggcccctagatcttctcaggatggggctggtccccagataggccaaatgagttgaactctcagccccttgaagacctctgggaaggagtagggggcaggctggaaactaggctctgtaaaaactcttcagcaacaagatttgatgaacttctgggttgctgaacccttggaggtgctgagaggggggcacacccagaaagggcatggaggctccaccccaaaccttaccttgtgactctcctcctctggctgtccatctgtgtccatgatgacatcctttataataaaatggtaaacatgcttccgtgagttctgtgagccatcctagcaaattaagcaaacccaagggagtggtgggaatcccaacttacagctgatgggtcagacgcatagatggcaacttactacttgtaattggtatctgaagtgggggcagccttctgagactgagcccttagactgtgggatctgagtctaactccaggtagaaggagtcagcatagaattaaaatacaggacacccagttggtgtctgctggaga

SEQ ID NO: 4574 - DNA, 573 bp, Homo sapiens
  MAP TO AC010345.4; EXPRESSED IN PLACENTA, SIGNAL = 0.65; EXPRESSED IN ADULT LIVER, SIGNAL = 0.89; EXPRESSED IN BRAIN, SIGNAL = 0.82; EXPRESSED IN FETAL LIVER, SIGNAL = 0.54; SWISSPROT HIT: Q16587, EVALUE 5.50e+00; NT HIT: U47050.1, EVALUE 4.00e-05; EST_HUMAN HIT: AI625439.1, EVALUE 3.00e-06; EST_HUMAN HIT: AI625439.1, EVALUE 3.00e-06
tcagcccaatacacctttcctttaacagcccaatatacctttcattcaacgaacatttattgagcacctactatatacacaggaaaaccccacctggaactgacaggtgcttgactaaagcaaacaaagctaaaggaacaaagtcccccaggacctagaggagataaatctttgggcgatttgacctgggaaacttttgcctggaagatagagcaaattctgggagcaggggatgggagtgtggaggtagggctatgttacctctggctccagcagctggtgcgaggcagctgaatgagatgctgcaaaccctggcatatttccctgcctgctattaataagttcctagctgactgtgagtttcattactactgactgttctgcatccatgggcaccatcctcagggatgtcagcaccatcccagtggtatgcagtgggggtagactatctgccgcctttggcctggactcagtttcactaaaggaaagagtttgaggtggtccaagaaccctaggtgtttgcaggcacaaaagcagcaaggcctgcagagaagccagacagtgggtagagga

SEQ ID NO: 4575 - DNA, 597 bp, Homo sapiens
  MAP TO AC002096.1; EXPRESSED IN PLACENTA, SIGNAL = 1.2; EXPRESSED IN ADULT LIVER, SIGNAL = 0.78; EXPRESSED IN BRAIN, SIGNAL = 1.7; SWISSPROT HIT: Q92574, EVALUE 2.00e-81; NT HIT: gi16161012, EVALUE 0.00e+00; EST_HUMAN HIT: BE698735.1, EVALUE 0.00e+00; EST_HUMAN HIT: BE698735.1, EVALUE 0.00e+00
tcacacctcctgttctgtgccaacaatatgcaagttaacactgattgaccatcattccttagctgtgttcatgatgagtctcattgtagtccatgatatgtagctgtccaacactgtccggggtcgggggagacgggtgagggccatctaggttcaggggaatcttggcttccacacccaagtctttgcccagttctgtctttaggctctcagaaaggctactggtcatgccgtcctcatcacactggctctcgctcttattacgaaataactctcgagccttcatacccaggaagctttttgaactgggaagtgagcccacagtggtggggatgctggcagacgcttctcccatagtcgtctcccaccgactgctgaatgggcctgccctctggtgtgggggtttctctggggtagaaagctcgctgctgctgctgctgctgcctccaccacctctgcttccactactgccccgggcgctgctgggcctgggggtcttggtctcaccgttgtggccagatgcctcttcattgtgccctaccatggaatctgagcacccgtcattacaacagtcaagcctgtaagaaagccggggag

SEQ ID NO: 4576 - DNA, 537 bp, Homo sapiens
  MAP TO AC008600.4; EXPRESSED IN LUNG, SIGNAL = 6.8; EXPRESSED IN FETAL LIVER, SIGNAL = 2.6; EXPRESSED IN HELA, SIGNAL =   4; EXPRESSED IN HEART, SIGNAL = 5.2; EXPRESSED IN ADULT LIVER, SIGNAL = 5.2; EST_HUMAN HIT: BG761979.1, EVALUE 7.00e-29; SWISSPROT HIT: P10071, EVALUE 2.90e+00; NT HIT: AL163227.2, EVALUE 9.00e-43; EST_HUMAN HIT: BG761979.1, EVALUE 7.00e-29
agaagtttgctgttggggtggatacctcatggagaacctctgctagggcagtgcagaagggaaatgtggggtcagagcccccacacagagtccccactggggcacttgcctagtggagctatgagaagatggccatggtattccagaccctataatggtatatccacctacagcttgtagcatgtgcctggtaaagcagcaggcactcaatgccagcctgtcaaaggcagccagaagggcagctgtaccctgcaaagccacaggagaagagctacctaagtccatggaggtacctcttgcatcaatatgacctagaatgagaaatggcatcaaaggagattatttcagagctgtaagatttacttactgtctcactggatttcagacttgaagggagcctgtatcctctttgttttggtcaatttctcccatttggaatgggtgtatttacccaatgcctgaacctccactgcatctaggaagtaactaacttgcttttgattttacaggctcataggtggaatggacttgccttgt

SEQ ID NO: 4577 - DNA, 532 bp, Homo sapiens
  MAP TO AF270510.1; EXPRESSED IN LUNG, SIGNAL = 1.3; EXPRESSED IN BRAIN, SIGNAL = 0.95; EXPRESSED IN BONE MARROW, SIGNAL = 1.1; EXPRESSED IN ADULT LIVER, SIGNAL = 1.1; EST_HUMAN HIT: AA055882.1, EVALUE 1.90e-01; SWISSPROT HIT: P20825, EVALUE 1.70e+00; NT HIT: gi15668172, EVALUE 7.90e+00; EST_HUMAN HIT: AA055882.1, EVALUE 1.90e-01
ggtagagccattacaaggcgtgttaagtgttaagaatcgcaggcgttgagctctccttctctgcttttcctgtaacactttgcttctaccttcagtacttttcctcccttcaggaagcacaatggcttgaagaagaatttggtcatctttgcaaatttgccttgtaccagccttggtgtctgagatgaatccttcacaataaagtaatagtggttgatgatagtactaattataatattaacattaataaaatgtcagcagtcctttactgtggaaaccaaattggtgccagtctgtttaattgcattgaatgcattatcaaatttaatcttttcatataacaagcctataagtttggtaaaatgagaaaactgagatatgtataatggtttaattaattgcataaagtcataagtaagtggttgactcaagattcacagtcaagatggctggctgcagggtccattctgtcaggcccagaatattccactttccagtctgtctttctcttacccagagtggctaagcacat

SEQ ID NO: 4578 - DNA, 536 bp, Homo sapiens
  MAP TO AC011358.5; EXPRESSED IN BRAIN, SIGNAL =   1; EXPRESSED IN PLACENTA, SIGNAL = 0.85; EXPRESSED IN ADULT LIVER, SIGNAL = 0.94; EXPRESSED IN HEART, SIGNAL = 0.95; EST_HUMAN HIT: R09087.1, EVALUE 1.00e-05; EST_HUMAN HIT: R09087.1, EVALUE 1.00e-05; NT HIT: AF037338.1, EVALUE 8.00e+00; SWISSPROT HIT: P56690, EVALUE 3.80e+00
acgtttcacctctctgagcctcggctttctcatcttaaaatgggaattttaacacctaccttacaagataatgtctataaagcgcctggcacctgctttgacagagagggctttcctcctgggtgcacagctgggtcagccttcctggcctctcctgtgttggtatggcgatgtgagtgagtactctggccactggagagtggggacaagtgatgggtgtacttccaggggtcaccctgcaaggcctcccatgcgtaattccatatcctcttctccatctattggttgattagagaggatttaggactatggaagagggaggaacaacaagatggaaggagcctgggtcactgaatccctacttggaagtctgcttggccaagaaaccctgattagactatgtgataagatacaaacttctgttgggtgaagccactgatttggagattgtctattacaacagctaacaatacctaccctaagtaacagtgcccagtaattattctgcaatttgaccaacaaattcccgtattggg

SEQ ID NO: 4579 - DNA, 521 bp, Homo sapiens
  MAP TO AC008806.4; EXPRESSED IN PLACENTA, SIGNAL = 1.1; EXPRESSED IN HEART, SIGNAL =   1; EXPRESSED IN ADULT LIVER, SIGNAL = 0.83; EXPRESSED IN FETAL LIVER, SIGNAL = 1.4; EXPRESSED IN BRAIN, SIGNAL = 0.86; EST_HUMAN HIT: AW949650.1, EVALUE 1.00e-11; EST_HUMAN HIT: AW949650.1, EVALUE 1.00e-11; NT HIT: AB058732.1, EVALUE 0.00e+00; SWISSPROT HIT: P52742, EVALUE 4.00e-74
ccaaaggtcttcccacattcactacatttgaagggtttctctcctgtgtgaattctttgatgtagagtaagggctatgcgtctgctgaaggcttttccacactgattacattcatagggtttctctccagtgtgaatcctctgatgttgattaaggtgagcactctgtctgaaggctttattacattctttacattcatatggtttctcacctgtgtgaattctctgatgttcaacaaggaaggcataacggctaaaggccttcccacattcattgcacgcaaacggtttctctccagtgtggatcctctgatgttgagcaaggtgagcactctgtctgaaagctttgttacattccttacattcataaggtttctccccaatatgagttctttgatgttcactgagaaagaagtcgtggctaaaggcttttccacagtcattgcatgcatatggtttttctccactgtgaattctctgaggttgagtaaagaatgagtaacagctaaaggcatcaccaca

SEQ ID NO: 4580 - DNA, 555 bp, Homo sapiens
  MAP TO AC012082.6; EXPRESSED IN BRAIN, SIGNAL =   1; EXPRESSED IN BONE MARROW, SIGNAL =   1; EXPRESSED IN PLACENTA, SIGNAL = 1.2; EXPRESSED IN ADULT LIVER, SIGNAL = 1.3; EST_HUMAN HIT: BI025251.1, EVALUE 3.10e+00; EST_HUMAN HIT: BI025251.1, EVALUE 3.10e+00; SWISSPROT HIT: Q10573, EVALUE 4.00e+00; NT HIT: U58290.1, EVALUE 3.40e-02
ttggcatggcctctaaaaacctaaatgatctggacttgtttatccttacaattgcatctctcccccaatttcccatatttattttactcaagtcacacttgtctttatgctttgtgaacctagcctctttgaatatcaccccctacacttatgtggttcaaaatccgcacaaccacatgcagcaactgtgcttcatggcattgaaacttgctgtcctctgtttctggtactattccccctaattctggaatggcctgacttctcacctcaaatgtcatttaataatgatgaaaactgtgatgataataatgataatggtgatgataatgataatgaagctcagtgcctaatgtcctcctcaactcattcaccacccttctgtgtctttctctgtggctcaggatatcatcctccactgaatacatcttctagattcccttatcatgaattccgattggatgttctgatagtaagtaatgctagaagatgcaaaaatgggaagagataggttagggtatcaccctcccatggttctccctgacaagcaactcttcc

SEQ ID NO: 4581 - DNA, 570 bp, Homo sapiens
  MAP TO AC009429.3; EXPRESSED IN FETAL LIVER, SIGNAL = 6.7; EXPRESSED IN HELA, SIGNAL =   2; EXPRESSED IN HEART, SIGNAL = 3.4; EXPRESSED IN ADULT LIVER, SIGNAL = 0.5; SWISSPROT HIT: P09279, EVALUE 5.50e+00; NT HIT: AE007529.1, EVALUE 1.40e-01
ctgaggctaagcagctctcctaagagtacactatattgtactaaccatctgggaagaaaaatgtaactctagaactgtaaacattcagctctatccataattttggattttggttagtaaactctgtcattgaaaactgaggggctgcagatcagaagaggtttctcctgatttccagatatttgggctggaatgtaatcacctggaaagagtgtatcttttcatatctgtaggcatcagcggacaagactagccccttggagccttgggtgagagaaagcgagccagccattctagagggccctgtcttcaaggccagatgtgaaggggcttcacagctcctcactccaccctgacacttggctctgaggaagccctcaggctgctcagggtcccaggtgtgtgcctccacctggggctcaaccgctgagctctgtgactgcttcgctgtgccactgtgcatgctctctatctcttcattagtttaagtaattagtagtttttctaattgtgaaagcaatatattgtaaaagtattttaatgcagaaacaaatcacagtgtcaatccca

SEQ ID NO: 4582 - DNA, 526 bp, Homo sapiens
  MAP TO AC010345.4; EXPRESSED IN BONE MARROW, SIGNAL = 1.3; EXPRESSED IN PLACENTA, SIGNAL = 1.3; EXPRESSED IN HEART, SIGNAL = 1.1; EXPRESSED IN ADULT LIVER, SIGNAL = 2.1; EXPRESSED IN BRAIN, SIGNAL = 1.6; EXPRESSED IN FETAL LIVER, SIGNAL = 1.1; SWISSPROT HIT: P06734, EVALUE 2.80e+00; NT HIT: Z79226.1, EVALUE 3.20e-02; EST_HUMAN HIT: T03260.1, EVALUE 1.20e-02; EST_HUMAN HIT: T03260.1, EVALUE 1.20e-02
gtgcacatggaactcacaccttaccccaggccataagctaccccactgagaaagcaagcacatggctttcaggcctgcccctctccttctgcctacaatgctgggcggtcagctcttacaggcatatctgcagcacttcccacttgtcccccagattctgctcaagggagtttgtgcccactcaaaattatgtcataaaattcagttggaagcttctttcacctgcaacccctctctgagttcatggctgcctttcccacgaacccttgtgagatacagtcagggatggcttccctgggctcaagctggagactgggagggcttaccaggctcttcctgctgctccttctgcttttatatttcatgctgctccccaaatctgttctggctctaagtaaggttaaaaccttctcccgtgatctagatttttagatttccccagtggggatgtttgctcacaggtaggctgtccccctctcccactctgggaactcaaagttttttgcctgtctcatggagtttgcca

SEQ ID NO: 4583 - DNA, 538 bp, Homo sapiens
  MAP TO AL049849.1; EXPRESSED IN BONE MARROW, SIGNAL = 1.5; EXPRESSED IN PLACENTA, SIGNAL = 1.3; EXPRESSED IN ADULT LIVER, SIGNAL = 1.2; EXPRESSED IN LUNG, SIGNAL = 1.9; EXPRESSED IN HELA, SIGNAL = 1.7; EXPRESSED IN FETAL LIVER, SIGNAL = 1.5; SWISSPROT HIT: Q13072, EVALUE 4.00e-06; NT HIT: gi14763849, EVALUE 0.00e+00; EST_HUMAN HIT: BE890756.1, EVALUE 1.00e-64; EST_HUMAN HIT: BE890756.1, EVALUE 1.00e-64
tgcagtacagaaccagcagcttcttacccaccccaggccgggccgggccccaaagctctcctacttccccttcctggcccctagacttgctgctgctgccaccattgcgccgacaccaaaggaatcagcgctgctgtcaccttccatgcacctgcccaccctccaaggatcctaccacttggcctccatgggtaccctcctattgctcctgttgagctgccgtctccatcaccgtggctgccacaaccgcagaagatgaatcacagagctgtgccatcttcaggctccaacctccagctcaccacaggggactcctccttcatcagtctggcttggagcagctgggcagacaatgccagaaaaacctacaataggatgcagaaagtggcagtgttagagcctcaccctgtcatgctgcccactgggtgactggggccagtttcagcgaaggcacttacacccaccctccaaagtccagcctctcctcctagaccgagctggcctcctgacctggggtggggactggagacaccacagt

SEQ ID NO: 4584 - DNA, 568 bp, Homo sapiens
  MAP TO AC009087.4; EXPRESSED IN BRAIN, SIGNAL = 0.85; EXPRESSED IN BONE MARROW, SIGNAL = 0.5; EXPRESSED IN ADULT LIVER, SIGNAL = 0.99; EXPRESSED IN PLACENTA, SIGNAL = 0.77; SWISSPROT HIT: P51520, EVALUE 3.60e-01; NT HIT: M69197.1, EVALUE 0.00e+00; EST_HUMAN HIT: AL525142.1, EVALUE 5.00e-30; EST_HUMAN HIT: AL525142.1, EVALUE 5.00e-30
acaatggcaagggaagtgaggatagaggccataagtcctttccatttaccaaaccatcttttggttaaacctgtgaaggggtcatctattccagaattttcagccagctcatttgctagggtggtgaggccttgtagagccttggtagtggttccatcgggagctgtgttatttgggatcaaagtacaacattgggctctgatgattacacaaactctgccgttttctgctaatgtcatgtcaagagctatcctgttttcccaggccatttggctggtgggaccaaattgctcggctatccccaaatggtatctctggtataattaacaaatccttgttgattgtaatatatatagtttatccagtctacgtttttgtttatagtagaccaccaaaataagactgactcaaacctggcagctatttgatttcgagctttaaattcattggcggctactcgtggtactccaattgcctctatatagacatgggggtcaaaagacccttgaggagcttctctttcttcccaagagggtgactttttgtcggactgatgaaatgccagggt

SEQ ID NO: 4585 - DNA, 544 bp, Homo sapiens
  MAP TO AL096806.1; EXPRESSED IN ADULT LIVER, SIGNAL = 3.8; EXPRESSED IN HEART, SIGNAL = 3.9; EXPRESSED IN LUNG, SIGNAL =   7; EXPRESSED IN BONE MARROW, SIGNAL = 5.1; EXPRESSED IN BRAIN, SIGNAL = 4.4; EXPRESSED IN PLACENTA, SIGNAL = 3.3; EST_HUMAN HIT: BF356463.1, EVALUE 3.00e+00; SWISSPROT HIT: Q63474, EVALUE 3.40e-01; NT HIT: AL096806.1, EVALUE 0.00e+00; EST_HUMAN HIT: BF356463.1, EVALUE 3.00e+00
ggctggggtaggaggtaaagatgcagagtgaggggaccctggggtagctcggaaggctgccctgcatgcccttatgccccccacgccaggtttgctgcagtggctggcttcctacaggcgtccttagatggcccctctccacaggggccccagatctgtttctccagcttcagtgccagaaccagggagacctgggaggacccaacactcgctgtgatgtgcaacctaggcaggaggaggctagcaccccaacggcggcgtgaccagtgctgctcgctgctgcctccagtggacacatgtgagagccacgctgacccctccggacctcagggagctttgggcctgtgcgggtgcctgcagtgtgttcccggggactgtcagaaaccaacggatgacaaaaacaggtaggagggaaccctggcaacagagtgggagagaagaacttccaaccaggggctactgcaatgtggagactcgtagggtccatttagcatttactgagatgacgtttggaatggttgtatctgccattctctcctccaaa

SEQ ID NO: 4586 - DNA, 556 bp, Homo sapiens
  MAP TO AF192304.2; EXPRESSED IN FETAL LIVER, SIGNAL = 1.7; EXPRESSED IN PLACENTA, SIGNAL = 1.7; EXPRESSED IN HEART, SIGNAL = 1.7; EXPRESSED IN ADULT LIVER, SIGNAL = 1.1; EXPRESSED IN BRAIN, SIGNAL = 1.3; EST_HUMAN HIT: AA381642.1, EVALUE 0.00e+00; SWISSPROT HIT: P01125, EVALUE 7.90e-01; EST_HUMAN HIT: AA381642.1, EVALUE 0.00e+00
aacacaagctcacacgatgcttaccacgtataggcatagtgcaagcttcagcctcacagttagccctaacagaaggttggtgatgcagacgcacagacacacaggcacacgcatgcgcgtgaacacacatacacaccccacggtgcaggactctcggctgcctgctaaaagggaagaggggcagaggaaaaccttaagtcaaggagtttggcaggcatttgaacgcacagtacaattttgtaagaaaaaagacctccaaggcagaaagcacttcctggatcaaagcaggggatggaccagaggggttacctgtgctctaacacagggcaggtgcagaagtgtgggctgcaaaaccagactgaagcacagcccaggaagacttggaatgctgccactgactccctggggtgcaaggcttgggcaggtggtgctatctattaagcatgcctccaagagctgaatctagaaaccagaagtataagcatgtattcttctagatcagtagtcaagttagaaaaactaaatgcccatcaatccctggggtgaagcataaaaa

SEQ ID NO: 4587 - DNA, 588 bp, Homo sapiens
  MAP TO AC006522.5; EXPRESSED IN BRAIN, SIGNAL = 1.7; EXPRESSED IN FETAL LIVER, SIGNAL = 1.8; EXPRESSED IN BONE MARROW, SIGNAL = 1.8; EXPRESSED IN PLACENTA, SIGNAL = 2.3; EXPRESSED IN ADULT LIVER, SIGNAL = 1.3; EST_HUMAN HIT: W85907.1, EVALUE 5.30e-02; EST_HUMAN HIT: W85907.1, EVALUE 5.30e-02; NT HIT: AJ238093.1, EVALUE 8.80e+00; SWISSPROT HIT: P29018, EVALUE 4.30e+00
acatttccttggctcacctgcctaccccagtcccagaggataaaaacaaagaatggctagaacgtcttaaatgtatagatatttggtactaggcacagtcttctcgttcttggagctcaacacagcatcttatcccagtcacaattgtactcttagtttgtagttatttctaaaaataaaagctaggacttattaagtgccaagcactatgctgagtgttttatatccactagctaattgactatttacaacccagtgagatgtaggcactaccgttacccacattttacaaatgaagaactgggtttcatgacttgaagctaaatttttatagccagtaatgatggattcattacttgaacttatgtctggttgactccagtaagagaccccttaaccctggccctcctgcctacccatggactctccaatctcagagtccacctggacttgattgtcttgggaaatggcaccacctcctcagaggtagtggagcaaatacaagaatacaagagggagaaaacaatggaggacaggaatttggccagagatattctctgctcctgagtcccaaaacatcctctcaca

SEQ ID NO: 4588 - DNA, 577 bp, Homo sapiens
  MAP TO AC011311.11; EXPRESSED IN ADULT LIVER, SIGNAL = 0.69; EXPRESSED IN FETAL LIVER, SIGNAL = 0.99; EXPRESSED IN PLACENTA, SIGNAL = 0.88; EST_HUMAN HIT: BI460968.1, EVALUE 0.00e+00; EST_HUMAN HIT: BI460968.1, EVALUE 0.00e+00; NT HIT: X75524.1, EVALUE 4.00e-08; SWISSPROT HIT: P98160, EVALUE 6.40e-01
ggaagtccctgaagggagactccccatgctccccacccagtgcccagcacacactgcttcttcacacacaggccactacgcatgcagtgcacatgactggcatgacagagatgctgtgggccctctccgttctgaaggccttgtttgcagaacagcaggaggtcctccagcaaggtcaccttagtgctcattgccttcttccaccaaatctgaaggcggggggatgaggtctcggggattcatcctggctactaggcagacatcatagctgtcatgcatgaggacgttgatggctacaacattccactggttttcccatgggtccagttccaatatttctttggagataacctcatggcgatctgaaaaacagcaaagtgggaagacaaaaatctcatgtgggtattaaattcagaggccatcagcaccatactgagtaacttcctccaaaaggcaatgtcttagtccacttgctgttactgttaacagaatacccaggactgggtagtttatcaagaaaagacatttacttggctcacgattctggtggctggagagttcaagactggggatctgc

SEQ ID NO: 4589 - DNA, 544 bp, Homo sapiens
  MAP TO AL096853.12; EXPRESSED IN BONE MARROW, SIGNAL = 3.4; EXPRESSED IN PLACENTA, SIGNAL =   2; EXPRESSED IN ADULT LIVER, SIGNAL = 2.8; EXPRESSED IN LUNG, SIGNAL = 2.3; EXPRESSED IN FETAL LIVER, SIGNAL = 2.7; EXPRESSED IN BRAIN, SIGNAL = 2.7; EXPRESSED IN HELA, SIGNAL = 2.4; NT HIT: gi15616630, EVALUE 8.10e+00; SWISSPROT HIT: P43926, EVALUE 3.90e+00; EST_HUMAN HIT: AV751629.1, EVALUE 1.90e-01; EST_HUMAN HIT: AV751629.1, EVALUE 1.90e-01
taaatccttttggtggcaggggagtgcattcgacggcttgaacgtgctgtgcaaaagcctcttttgcaggttaatattgagaactttgcgtccagcggccgcggcacggtgtacccgggcctcgattccagaagcgctttcagaaccgctgtggcgtgcctgtctttgagcagctgctcggagggcagactgttgattgagtcaacggattcaacttccattgatttagttagctggctctttcggaaatgaggcgtcctcctgcaaacccatgtggcccgtaacaaggggcatgctcagctccgtgaaggcaattgatggtgtatgaatggttatggctccgcgcagtcatcattaattgatgctgtctttacaagattagcagccaatgcagagtgttcgtctatctgttagatggatcagtttattttttaagaaatggatagagaacttcttaggagacacagcacagttcccggccctaagactccatcaaaaatatttgctgaatgcgtacagccattctgtcccagaggcatagagc

SEQ ID NO: 4590 - DNA, 570 bp, Homo sapiens
  MAP TO AC007229.1; EXPRESSED IN BRAIN, SIGNAL = 1.6; EXPRESSED IN PLACENTA, SIGNAL = 2.3; EXPRESSED IN ADULT LIVER, SIGNAL =   2; EXPRESSED IN HEART, SIGNAL = 2.5; EXPRESSED IN FETAL LIVER, SIGNAL = 1.7; NT HIT: gi14759745, EVALUE 3.00e-89; SWISSPROT HIT: P39054, EVALUE 5.00e-26; EST_HUMAN HIT: BE940289.1, EVALUE 4.00e-89; EST_HUMAN HIT: BE940289.1, EVALUE 4.00e-89
aatcccatctactccagggcgctgaggtgggaggatcacttgagctctccctgggaggttgaggctgcggtgaactgtgtttgtgccactgcactgcagcctgggtgacatagcaagactgtgtcaaaaaaaaacaaaacaaaaaaacaacgttccaatgcccaggtgaggggatccaccccagcatcagccagggtcaccccattgtttgggcagctctggcccagggcaagcaggcctatctggtgccagtggggctgtcaggggccagcctgaggtcagttattggtgggacaatagggcagatggtttccagagaaccaggacttggcccaggccacagtcacccctcagcacctcccctcccgcttgcaggcagaaaacgaggatggggcccaggagaacaccttctccatggacccccaactggagcggcaggtggagaccattcgcaacctggtggactcatacgtggccatcatcaacaagtccatccgcgacctcatgccaaagaccatcatgcacctcatgatcaacaatgtgagtggagaactaaaaatgagaaggagg

SEQ ID NO: 4591 - DNA, 600 bp, Homo sapiens
  MAP TO AL109865.36; EXPRESSED IN PLACENTA, SIGNAL = 4.4; EXPRESSED IN ADULT LIVER, SIGNAL = 3.9; EXPRESSED IN LUNG, SIGNAL = 4.8; NT HIT: gi14730389, EVALUE 0.00e+00; SWISSPROT HIT: Q06587, EVALUE 4.50e-02; EST_HUMAN HIT: BF893015.1, EVALUE 0.00e+00; EST_HUMAN HIT: BF893015.1, EVALUE 0.00e+00
acctttcaggaacatgtgggaaacaatatcatccaactcagagtaaattcagttaccagtattttttggaattctaaagttcagtagcaaacatgcttcagatttgttgctttaaaggcctaaaagtaaattttatgcatccttttttcccccttgactagactgcagcgaggcaagaaacaacagattgaaaatggtagtggagcagaagataatggtgacagttcacactgcagtaatgcatccacacatagcaatcaggaagcaggccctagtaacaaacggaccaaaacatctgatgattctgggctagagcttgataataacaatgcagcaatggcaattgatccagtaatggatggtgctagtgaaattgaattagtattcaggcctcatcccacacttatggaaaaagatgacagtgcacagacgaggtaagtgtgtggattagtttcagattatctaaattcagaatgtttaatttggaggtaaaaggcagtcttgtataagaagtaggagcaatatttgtcatcccattgattgcaggggttcagttactagctgcctagattgttgttttcttccttcctccctcatgtg

SEQ ID NO: 4592 - DNA, 592 bp, Homo sapiens
  MAP TO AC005547.1; EXPRESSED IN BRAIN, SIGNAL = 1.4; EXPRESSED IN BONE MARROW, SIGNAL =   1; EXPRESSED IN HEART, SIGNAL = 2.9; EXPRESSED IN ADULT LIVER, SIGNAL = 1.2; EST_HUMAN HIT: AA568736.1, EVALUE 2.10e-01; NT HIT: AB003158.1, EVALUE 5.70e-01; EST_HUMAN HIT: AA568736.1, EVALUE 2.10e-01
tgtaacttcatgctgctgggattggaagccagagcttattgaaggcaagtgcacgtggacattcccagcagaggaggggcagagctcccagggaaccacaaaagcacccacgtggaggggctgaggatgtggcctgggaaggatgccatgtgaccacgtttcctctctgttttccaggccaccgtggctgaccacccaagcatccgagtcaataagtctttcactgagaaagacctgatgccccgcacaatctcgccccaactgggagggttggcacaggctttgtcttctccttgcacttactaaagtttatttaacagtttggaccttgcctgttgaatcttgaaaatatcacaactatgcatatactgtgttctgaagagcttacccgaacactatttattagtcactttgatctaattcatcacatgcaaaaatctcaaacaagcactaagtgtcctttcaaggggacgtgttaacgtagttaaagtatgcctaagcctctgtttcccacggctcgggcaacgggtgccatgggttcaaaaatgcaattaaaagaagactgtcaacttcatcattgtcaaaacgccac

SEQ ID NO: 4593 - DNA, 580 bp, Homo sapiens
  MAP TO AC002102.1; EXPRESSED IN BONE MARROW, SIGNAL = 0.52; EXPRESSED IN PLACENTA, SIGNAL = 0.58; EXPRESSED IN ADULT LIVER, SIGNAL = 0.52; EXPRESSED IN BRAIN, SIGNAL = 0.52; EST_HUMAN HIT: BF807250.1, EVALUE 0.00e+00; SWISSPROT HIT: P28797, EVALUE 4.30e-02; NT HIT: AF077056.1, EVALUE 2.00e-03; EST_HUMAN HIT: BF807250.1, EVALUE 0.00e+00
ccgaaaacaaaagaggcaagaggcagccatccccagatagctgtgtggcaggccccaggctgtacgggacacagtggacagacaggcccagccatgccctgcagagctctcggagattccagggcaggaagcagactgtcaataaacagaaagcaaggcaaagaacatgctgggtccagactgaaccctgcagtgaagcaggtgaagcacgcaggccgccaagggcacagaccctgtccgctcagccttcacagccccaaaggggcggccctgctgtgcctggcccgaacatgctgccgtcacagccagccgacatctgtacggggctggagagcatcccctacggttcatgtccttcctggaacctcagaatgccaccttctttggaaataggatcacagcggatgtcatgagtgacgatgaggtcaccctggagtaaggtgggcccttaatccactgtgaccagggccctcaaaagaagagaaaagacatagggagaaaggggaggccatgtgaagtcagatccccacccccgcgacctctggaaggagcgtggccctgccgacaacaccttgagttt

SEQ ID NO: 4594 - DNA, 583 bp, Homo sapiens
  MAP TO AF274858.1; EXPRESSED IN LUNG, SIGNAL = 2.5; EXPRESSED IN BRAIN, SIGNAL = 2.6; EXPRESSED IN BONE MARROW, SIGNAL = 1.9; EXPRESSED IN ADULT LIVER, SIGNAL = 1.7; EXPRESSED IN FETAL LIVER, SIGNAL = 1.5; EST_HUMAN HIT: BF933654.1, EVALUE 3.00e-25; EST_HUMAN HIT: BF933654.1, EVALUE 3.00e-25; SWISSPROT HIT: Q16720, EVALUE 1.00e-36; NT HIT: gi15314114, EVALUE 3.00e-95
gccactgactgtctccttccttccttcctaccttccttccacgtttcctttcctttcccttcctttcctccctccctgctcccacctcgcgccctgtccctccacctcccactccagatccgggtggtgaaagcgttccgtagctcgctctatgaaggcctggagaaaccagaatccaagacctccattcacaacttcatggccacgcccgagtttctgatcaatgactacacccacaacatcccgctcattgacgacacggacgtggacgagaacgaggagcgcctccgggcccccccgcccccgtcccccaaccagaacaacaacgccatagacagcggcatctacctgaccacgcatgtcaccaagtcagctacctcttcagtgttttcctccagtcccgggagcccgctccacagcgtggagacgtccctctaacaagaacttgtctcagcacatgcgcacacgcacactcggactcacacgaagtcacacgcacacatgcacgcacacacacatatggggacctgcacacctgcaaaacgagggaacaactaaggtggctgaagacctttctggcagg

SEQ ID NO: 4595 - DNA, 546 bp, Homo sapiens
  MAP TO AC004699.1; EXPRESSED IN FETAL LIVER, SIGNAL = 0.39; EXPRESSED IN LUNG, SIGNAL = 0.7; EXPRESSED IN ADULT LIVER, SIGNAL = 0.59; EST_HUMAN HIT: AW796661.1, EVALUE 0.00e+00; EST_HUMAN HIT: AW796661.1, EVALUE 0.00e+00; SWISSPROT HIT: P31944, EVALUE 2.00e-31; NT HIT: gi11426521, EVALUE 1.00e-125
ctccttgaacctctccatgctgatttctgtcttctcttggccccaggagaaatatgatatgtcaggtgcccgcctggccctaatactgtgtgtcaccaaagcccgggaaggttccgaagaagacctggatgctctggaacacatgtttcggcagctgagattcgaaagcaccatgaaaagagaccccactgccgaggtattggggtgcctactccaggcctgtttgggggaaaggtactaggttggaagtgtaggctatggggacccagctgagtctggttcttcctctcactccagcaattccaggaagagctggaaaaattccagcaggccatcgattcccgggaagatcccgtcagttgtgccttcgtggtactcatggctcacgggagggaaggcttcctcaagggagaagatggggagatggtcaagctggagaatctcttcgaggccctgaacaacaagaactgccaggccctgcgagctaagcccaaggtgtacatcatacaggcctgtcgaggaggtggggacagatccaagagcaca

SEQ ID NO: 4596 - DNA, 522 bp, Homo sapiens
  MAP TO AC011400.4; EXPRESSED IN BRAIN, SIGNAL = 0.69; EXPRESSED IN LUNG, SIGNAL = 0.61; EXPRESSED IN FETAL LIVER, SIGNAL = 0.45; EXPRESSED IN ADULT LIVER, SIGNAL = 0.66; EXPRESSED IN HEART, SIGNAL = 1.5; EST_HUMAN HIT: BE271316.1, EVALUE 0.00e+00; EST_HUMAN HIT: BE271316.1, EVALUE 0.00e+00; NT HIT: gi4503694, EVALUE 0.00e+00; SWISSPROT HIT: O76093, EVALUE 4.00e-33
tgcagttttctgggagtgtgagtgtggccagggcgacctgaggggccgcggcggggtggcctaggcagggtgtgtgggccggatccgacgggacctcttggtcaccgtcgtgtacttgaagggcttctgaagctccggctgccccttggggtagcgcttcatgaaatgcacgtcctgctggttctcccgggtcttggggcccttccgcggccgccccttcttggtgaagcccacgtaccagccggagtacttagccgacatcagggccgtgtagttgttctccagaaccttctcgatgaacacacactccttgctggtgccatcgggctgcaggggagagagggggagtgttcaagaaaaaaatgactcagttatgcttgccaaagcacagcgaggaaggttttattcaggaccattgcgattgttgtagggacaactgtaatgaagttttgcagtgggggagagagattgagcttaactctgaatatggcacaggcaggtgggggtttatagccaaggagc

SEQ ID NO: 4597 - DNA, 529 bp, Homo sapiens
  MAP TO AC010206.8; EXPRESSED IN LUNG, SIGNAL = 0.95; EXPRESSED IN BRAIN, SIGNAL = 0.96; EXPRESSED IN BONE MARROW, SIGNAL = 0.89; EXPRESSED IN ADULT LIVER, SIGNAL = 1.1; EXPRESSED IN HEART, SIGNAL = 1.1; EXPRESSED IN FETAL LIVER, SIGNAL = 0.85; SWISSPROT HIT: Q9PB63, EVALUE 4.90e+00; EST_HUMAN HIT: BE245540.1, EVALUE 5.00e-05; EST_HUMAN HIT: BE245540.1, EVALUE 5.00e-05; NT HIT: Y12853.1, EVALUE 1.00e-04
caggctagaagccaggtgtcctgagtcctcatccagcattctctctcccatacaaggactcctggcccttgattaatccatctggaggctggtgcgttgccaattcagttgttttgctgctgactgtgtagggagaggggtcagtttcaggagtctggacacgtggacaccagctggtcctctttggagacacaaggataggacaggcaggagacaaaactagctgatgaaggtggctattgtccctgccttgaaatacaagtcctggtcaactgccttgttctcaacttttccccaggccacttggttggagggacagtcaagccccctttcgttgtccttcttgttctgtctcagggagatattgctgatggaatggtggttaggagcccatgtgttggagtcaggcataatggagtcatcatacatgtctgtgtccttgggaaagttgcttaacctctctgaggctcagcttctttattgtcaagtgggactaatcatagcatctaccacacagggtgattgtcag

SEQ ID NO: 4598 - DNA, 503 bp, Homo sapiens
  MAP TO AC012152.12; EXPRESSED IN BRAIN, SIGNAL = 1.1; EXPRESSED IN HELA, SIGNAL =   1; EXPRESSED IN FETAL LIVER, SIGNAL = 1.1; EXPRESSED IN BONE MARROW, SIGNAL = 0.85; EXPRESSED IN PLACENTA, SIGNAL = 1.2; EXPRESSED IN ADULT LIVER, SIGNAL = 1.3; EXPRESSED IN LUNG, SIGNAL = 0.99; EST_HUMAN HIT: BG674930.1, EVALUE 7.00e-01; EST_HUMAN HIT: BG674930.1, EVALUE 7.00e-01
aacctcaagccagtcacctcatgagggaacaacatcataacctaccttcttctcaatattatcaggttacctgccctgtactcacctattgatgatctaactgcccagaatgagatctatcatagtcaggacatcttcacctttgtacaacctggagaaacaaagcgaggtggtgtttgagtctctccttccccctttatatcctcttccggtcctcagcatgcaaaagtgtaggaaagaagtgaataaatcagattcctagtacaaatattctgtttttcctcttgatttattgctaacataacttatgctaaaatgttttcacatcagaaaaatataagtaaccttgattagagctttgtaattcaagcctaagacatttctcctatcccaattcctcaccactagcaataaataaacagttaaaatgtatgaggaaggttggataatgtatgaggaaggttggatgatgtttgaggatagctcacaaggatattgccaaa

SEQ ID NO: 4599 - DNA, 556 bp, Homo sapiens
  MAP TO AL109940.18; EXPRESSED IN BONE MARROW, SIGNAL = 1.5; EXPRESSED IN PLACENTA, SIGNAL = 1.2; EXPRESSED IN ADULT LIVER, SIGNAL = 1.1; EXPRESSED IN HEART, SIGNAL = 1.1; EXPRESSED IN FETAL LIVER, SIGNAL =   1; SWISSPROT HIT: Q28107, EVALUE 1.80e+00; NT HIT: gi14753849, EVALUE 2.10e+00; EST_HUMAN HIT: C17897.1, EVALUE 2.00e-01; EST_HUMAN HIT: C17897.1, EVALUE 2.00e-01
atccggggttatcaggtaggacggcttaaaatggtgaaagaaatgcactcacatttcagaggctcagcaggtcggaagcgcagtgttttatcacgtgatggtcctgccccgggagagcgttgcccgtggagctgttttcccggtgatcacgcagggatctggatccctccaggccgtattttcacggatgacagtttcaggagggggtagatcatcagaaggaggcagaatctttctcctaaaagctccagcctagaatcgaaccaaccctgttccctccatctcactggagcaaacacagtcacgtaggcatgctccccggaacgggggctgggagtggagactcgctgtgtgcctgccataattccgtctgcgtcgaggaagggggcggcttgggaagcagctgggcacctgtgccacagccgccacagactcagcctctgctgccattttaggaaaaagcaggtattcatcgcgatctctctgcatggtgtggatcctgtgtttaactcacactgatcacttgttcacttttcattttatggcattcctgagc

SEQ ID NO: 4600 - DNA, 544 bp, Homo sapiens
  MAP TO AC010422.6; EXPRESSED IN ADULT LIVER, SIGNAL = 0.36; EXPRESSED IN FETAL LIVER, SIGNAL = 0.55; EXPRESSED IN BRAIN, SIGNAL = 0.73; EXPRESSED IN LUNG, SIGNAL = 0.65; EXPRESSED IN BONE MARROW, SIGNAL = 0.4; SWISSPROT HIT: P49366, EVALUE 8.00e-27; NT HIT: AJ001701.1, EVALUE 0.00e+00; EST_HUMAN HIT: AU122285.1, EVALUE 0.00e+00; EST_HUMAN HIT: AU122285.1, EVALUE 0.00e+00
gaacacacgcacaaaaatggcggcgacctggtttacaggggctaaaaatggtcacgtgataaaccaacttccggtctttcgcccaaagcacgttccctacttcctgtgctcttgcggagacgcgcgcgtcggggtttaacgcgtttctgggccgccgtaagcccggcctaggggcagctttgactcgagagccggctataggcgcatggaaggttccctggaacgggaggcgccagcgggggggcgctggccgccgtgctaaagcacagctcgacgttgccgcccgaaagcacccaggtccggggctacgacttcaaccgcggtgtgaattaccgcgcactgctggaggccttcggcaccaccggcttccaagcaaccaacttcgggcgcgctgtacagcaagtcaatgccatggtgaggaccgggcggaatttctagggacgcggaggggcgtggcttgtagaaccaacgcggtactagacgggggcagcgtttccagtggaggggatatgtcttttatttgagttgcccaatagttggagga

SEQ ID NO: 4601 - DNA, 530 bp, Homo sapiens
  MAP TO AC004144.1; EXPRESSED IN ADULT LIVER, SIGNAL = 0.64; EXPRESSED IN BRAIN, SIGNAL = 0.6; EST_HUMAN HIT: AW574718.1, EVALUE 0.00e+00; SWISSPROT HIT: O13772, EVALUE 2.50e-01; NT HIT: gi14767158, EVALUE 0.00e+00; EST_HUMAN HIT: AW574718.1, EVALUE 0.00e+00
acctttaccgtgtggtgagctaagccccagagttgggaaagggttgaggggtctcttgagaccgcccggccttggtggcccctgacaaggctggcatcccttgcagttggtctccagtggccaggtggacaccgggcagcagcaggcacggactgagctggtctccaccttcctgtggatccacagccagctggaggctgaatgcctggtggggactagtgtggccccagcccaggctctgcccagcccaggacccccgtccccaccgacgctgtaccccctggccagcccagacctgcaggccctgctggaacactactcggagctgctggtgcaggccgtgcggaggaaggcacgggggcactgagggcgcagcccctccaccgcagccctgctgcttctgaggacttaggtattttaagcgaataaactgacagctttgaggaatggttcctggtgtctgtttgggcctatccacaaagccctcttcaagtggaagtggggagggagggtagaaggtgatgcccaga

SEQ ID NO: 4602 - DNA, 512 bp, Homo sapiens
  MAP TO AC005903.3; EXPRESSED IN BRAIN, SIGNAL = 2.4; EXPRESSED IN HEART, SIGNAL = 2.2; EXPRESSED IN ADULT LIVER, SIGNAL = 2.2; EST_HUMAN HIT: BF870818.1, EVALUE 1.00e-61; SWISSPROT HIT: Q02388, EVALUE 2.00e-20; NT HIT: gi14736240, EVALUE 3.00e-64; EST_HUMAN HIT: BF870818.1, EVALUE 1.00e-61
acagctacaccccactccacggggcacaacccactgagccacttctgctcacctccttgcctggggggccctgttcgcctgagtcccccttggggcctcgacgccgttcgggcacaggcaggaagctaccagagctctcatcccaggtctccacgatctcccgcagggcagatgcctgagggacagcaagaggtcagaggagcggggtgcgtcgccgcagcccctatgcctgtgggcaccactagccccaagggcccccacttgtccctacccccagcccctaaacaacccaccttgatgccagcagtttccagcaaccgatccacattctggggacaaagtctgggtgaagggctgcccatgacagagaagctcctgccttctgccccgcacggcctcaggaaagcaccttcacacccttttccctaggcctcttgcccagagcaccctttagcacttggttgaggcatggctggagactcctgggagcccctttctggtgtgtccccact

SEQ ID NO: 4603 - DNA, 579 bp, Homo sapiens
  MAP TO AC016943.7; EXPRESSED IN BONE MARROW, SIGNAL =   1; EXPRESSED IN PLACENTA, SIGNAL = 0.74; EXPRESSED IN ADULT LIVER, SIGNAL = 0.95; EXPRESSED IN LUNG, SIGNAL = 0.86; EXPRESSED IN FETAL LIVER, SIGNAL = 0.76; EST_HUMAN HIT: BI553063.1, EVALUE 1.00e-106; EST_HUMAN HIT: BI553063.1, EVALUE 1.00e-106; SWISSPROT HIT: Q15032, EVALUE 2.00e-10; NT HIT: gi14728796, EVALUE 1.00e-128
ttctccttcaccgacagagggatcatgtaacatttctaggtttggtttttctgtttgtaacctatgtgttatatgtgatgtgtcatctgtctatacatcatcaaagtatttgtaacactgggaggcaactggtttaatgaaaagggttggcaggaagggtcttgtgtggatcaccttccaagaaaagccttgctctgtgcctaccaacaccatgcatgtaaggtaatcctgtccctgtgcatctttctggtggtcgtactccaggggcaacagagatggctcagggagaacatctgggagtcgacagagcagctcagaaaatgaactcaagtggtctgaccaccaaagggcctggagcagcacagactccgacagttccaaccgcaatctaaagcccgccatgaccaagacggcgagttttgggggcatcacggtgctgaccaggggtgacagcacttccagtactaggagtaccgggaagctgtccaaagcaggtagttagtactgaatgtgtttatgtcctgtggtattttttggattctacccaagccatatggtcaccattccctctgactttca

SEQ ID NO: 4604 - DNA, 584 bp, Homo sapiens
  MAP TO AC009123.6; EXPRESSED IN BONE MARROW, SIGNAL = 0.92; EXPRESSED IN ADULT LIVER, SIGNAL = 0.95; EXPRESSED IN HEART, SIGNAL = 0.92; EXPRESSED IN LUNG, SIGNAL = 1.9; EXPRESSED IN BRAIN, SIGNAL = 1.1; EXPRESSED IN FETAL LIVER, SIGNAL = 0.88; EST_HUMAN HIT: AL556642.1, EVALUE 1.00e-101; EST_HUMAN HIT: AL556642.1, EVALUE 1.00e-101; SWISSPROT HIT: O15040, EVALUE 1.90e+00; NT HIT: gi13627310, EVALUE 1.00e-102
ctatcctcccctctcccaaccctactatgctgtttcagcatccttctgctttcattccaagctctgatcacattttgtaaacaccttatccattggataaagttcacttgtttattctcgctcaactcagctctccgttccaggaagggaggggtcaaccgactgattcaggcagcattctcacggtctcataagggacccggcatagtgggggcatccgtctagggatggcagggtagcccatgtaccccagaggaggtggcagagcctgtgtctcagcagactcgtgtgaatgccaccactctgtggccttgtcaactgatgtgaatgtgagacgggggacccagggaagggatgtccctggagctgccagggccccctgcctgcatcctcacctctgagttctggggctgggcctctggcagagtcagtgcgtctcgccagctgcacatgaaagagaggtcagggacgtcgctcagaccaagggggccggtcagaaacaatgcagggcggagggagctggggaagtccatcctggaaacaaggaccaagcaccacactggccacctcgagagactggaagc

SEQ ID NO: 4605 - DNA, 552 bp, Homo sapiens
  MAP TO AL035402.7; EXPRESSED IN BRAIN, SIGNAL = 3.2; EXPRESSED IN HELA, SIGNAL = 4.1; EXPRESSED IN BONE MARROW, SIGNAL = 2.9; EXPRESSED IN HEART, SIGNAL = 2.6; EXPRESSED IN ADULT LIVER, SIGNAL = 3.7; EXPRESSED IN FETAL LIVER, SIGNAL = 3.8; EST_HUMAN HIT: BI668319.1, EVALUE 1.00e-114; EST_HUMAN HIT: BI668319.1, EVALUE 1.00e-114; SWISSPROT HIT: Q9NR31, EVALUE 4.00e-39; NT HIT: AY008268.1, EVALUE 1.00e-112
tgacatgcttgcttgtgtccaccaagatcaagagttgtaaaagtcattccagcaattaatagcttttctgatgtcggatgtagtgttggaacatgttgacccaatctgtcatctttgagcatgtgaagaagagtggttttgcctgcgttgtccaaaccgaaaaatacaagttttccaaatttcttgtagagtcctaggaactggagcacactgctgaagccattgtagatccactcaaagaggaaagacattattcatgcttattatggcctgaagggctcctccagcaaaggtgggtggcccaggccctccctcagagcacaccccaaatattttcaaatatgaaaacctacttactctttagaggtaaggaaggtactttaaaaaatttattttattttatttaagttctgggatacatgtgtgggatgtgcaggtttgttacataagtaaacgtgtgccatggtggtttgctgcatctatcaacccatcacgtatgtattaagcccagcatgcattagctatttttcctgatgttctccctcccctctc

SEQ ID NO: 4606 - DNA, 562 bp, Homo sapiens
  MAP TO AC000060.1; EXPRESSED IN LUNG, SIGNAL = 0.57; EXPRESSED IN BRAIN, SIGNAL = 0.44; EXPRESSED IN ADULT LIVER, SIGNAL = 0.59; EXPRESSED IN PLACENTA, SIGNAL = 0.63; EXPRESSED IN HEART, SIGNAL = 1.4; SWISSPROT HIT: P01875, EVALUE 1.10e+00
cacacacccatgaagctgaccctgcttagggggtctctgaagtttcacactattctcattttctgacttaataatgtttcttcttccattttcaaagcttcagggatgtggtaattgtgtgtgtgcgcactatttttaagcacttgagttgattttcaaaatggctctttaaaaactcaaacatttctaaaatccaattgatcctgtcattgtcacctttaggtataaactgaggaagagagaccaccgcccaaggccctgtactttagagggctttgctttggcttctttccagctcaacttgaatctgagcaggcaaggagacatgcctacccagacatacgctcaggtggcctagaccccagaattccttgcccagattgccctgatctgctccagggataggcagatatctttcctggattctgtcttccaagggtaggtctcactactagcatggccaccctggggcctaagagtaggccaagaaacagctgtttgggagtggagagagcagtcatcatgacagagcttggacatgtgggcttgtctgggatatcct

SEQ ID NO: 4607 - DNA, 525 bp, Homo sapiens
  MAP TO AC010300.5; EXPRESSED IN BRAIN, SIGNAL = 1.4; EXPRESSED IN BONE MARROW, SIGNAL = 1.3; EXPRESSED IN ADULT LIVER, SIGNAL = 1.3; EXPRESSED IN PLACENTA, SIGNAL = 1.2; EXPRESSED IN HEART, SIGNAL = 2.9; SWISSPROT HIT: Q00500, EVALUE 1.70e+00
catgtgtgtgtcctcggaagggacaccagctctgtgtgtctgcagctctagagcagggacctcggccgggagcctggcacctgtcccgtgggctctctgggacaagcgctatgcccacacaaagctttccctcttcttcctgcgtcagctcgcctgggaggggctgtgcacagaagagctggcctcggggctctgtctgctgcctcggcaactgcagctcaggactcctggctttggagaagtcgctgcatggatcggggaccagaggccagagggccgggctgggaagaggagctctccggctggcagcttctccggaaatgaaatcctctgcaccctggaaggcagactcgcacccctggtgcccctacctacctgctggccacacgtggacggccgcatctggcctctcagatgggctgggaggtgagcccagtgatgatgcctccaccctctctggctgtagtaaccagcctgtaggaagggagctgcccacgcctgggaactgccttactttgcctgtcc

SEQ ID NO: 4608 - DNA, 540 bp, Homo sapiens
  MAP TO AL096870.3; EXPRESSED IN ADULT LIVER, SIGNAL = 0.42; EXPRESSED IN FETAL LIVER, SIGNAL = 0.72; EXPRESSED IN BRAIN, SIGNAL = 0.42; EXPRESSED IN HELA, SIGNAL = 2.2; NT HIT: gi13385891, EVALUE 6.00e-47; SWISSPROT HIT: O15488, EVALUE 5.80e-01; EST_HUMAN HIT: AA379943.1, EVALUE 1.00e-127; EST_HUMAN HIT: AA379943.1, EVALUE 1.00e-127
ctaaatggatgatggtggggaatcaaggcaaaagccagaaatctaacctttaggttctgcagcacacggcggcgcagcttgcgcgtcacagaggggctggtcaggatggcatcgagcacatgagagccagcgggactttgggcaagggacagaagctgtggtcccgtcaaggcacccagacttcgaagtacaagaccaggagtggagaagtgcagcagatgctggagcagtagagacccaaggactgtcacatcccccaaggctctggctgcggccattgccacctggcagcgcagagataagaaattaggaggcaccaacaagccaggtggatgagcccatccccagaacactgccacctccacctggatgaagtcaccactctcacctcagaagtcagacgcttgctaaaccctgggaggcctgactcccaattagtcactggcttggcctctcccctacctcacctggtgctctgcaggcactgccccctcctcctccgtcagtccatagtacacctcataagccatcaaagtggca

SEQ ID NO: 4609 - DNA, 578 bp, Homo sapiens
  MAP TO AC010398.6; EXPRESSED IN HEART, SIGNAL = 1.2; EXPRESSED IN ADULT LIVER, SIGNAL = 1.7; EXPRESSED IN BRAIN, SIGNAL = 1.8; EXPRESSED IN HELA, SIGNAL = 1.5; EXPRESSED IN FETAL LIVER, SIGNAL = 1.4; EXPRESSED IN PLACENTA, SIGNAL = 1.3; NT HIT: U54556.2, EVALUE 1.40e-01; SWISSPROT HIT: P57257, EVALUE 4.90e-01; EST_HUMAN HIT: BF131792.1, EVALUE 8.10e-01; EST_HUMAN HIT: BF131792.1, EVALUE 8.10e-01
gcaggaagctttacccactggttttcattctccattatttaaaagtcactttccagtgttaacccccctgtgtctctaggctgtgcagagagaatctagagctttgagcttgaggtgggtgccaatggcctgcagggagctgtccatgggtccgatgggccaaaggattatggcgtgggaagtcagcctgatgcagactgaagaagaatcaccggaaacaataaaagttaatgatacaggtgccttggctgcatctcaggcttagagactcagaatctttgtaaaggtgacttaggaatccacatttttaaaaagcaaacctccagtgtgttttatcatattcactaaagtttgagaaatgtcctgatgtcctttatctgcagtacacagaatttaaaattgaagtatttcttctcaattttagcttgcctcaaaatattgctatagtgatagccttggggaaaaataccatattactatttattttgaccaaaagaaaaaaataagaagagcttttatgacttcaggacctgagttccagtaagaatttctaattatgctccttccccaccttaatc

SEQ ID NO: 4610 - DNA, 511 bp, Homo sapiens
  MAP TO AC008546.5; EXPRESSED IN LUNG, SIGNAL = 0.69; EXPRESSED IN BONE MARROW, SIGNAL = 0.43; EXPRESSED IN ADULT LIVER, SIGNAL = 1.1; EXPRESSED IN FETAL LIVER, SIGNAL = 1.2; EST_HUMAN HIT: AI863358.1, EVALUE 2.00e-22; NT HIT: AF210835.1, EVALUE 6.00e-22; SWISSPROT HIT: O75955, EVALUE 4.70e+00; EST_HUMAN HIT: AI863358.1, EVALUE 2.00e-22
tctcaacacaagaggggacccaaagtaggtggccctttgtgtgagagggggccagaaagcaggtagctgtgaggctgagtcagggttttttatgggctcagaatgggggagttcatgctaattggtctatgagtgggactggaaaaggcacaatttgattggctaaaaggactcgaagttcttactctggtcttggactccacctggaaatggcagcttggttttcacgcttcaggctgtcgttggcttgaaggtcaggtttcaccggggacccatcactgtttgccttggaatttgtctgtctcccgctgctatcaaaaacaactttggtgcctgcagttagaggcctgatgatctcaatgttagtctgtggggagttgatacccacaattacagtctggaaatatacaaagtgtgagtctttaccactttggacctacccctacaatgtctttttcttttgttctgggtgaaatcttacccaataaaatgggtcatcttttctggcaga

SEQ ID NO: 4611 - DNA, 586 bp, Homo sapiens
  MAP TO AL096870.3; EXPRESSED IN ADULT LIVER, SIGNAL = 3.2; EXPRESSED IN HEART, SIGNAL = 2.3; EXPRESSED IN FETAL LIVER, SIGNAL = 3.2; EXPRESSED IN BONE MARROW, SIGNAL = 4.2; EXPRESSED IN PLACENTA, SIGNAL = 3.2; EST_HUMAN HIT: BI518795.1, EVALUE 0.00e+00; NT HIT: U94831.1, EVALUE 0.00e+00; SWISSPROT HIT: O15321, EVALUE 8.00e-67; EST_HUMAN HIT: BI518795.1, EVALUE 0.00e+00
ctcagttcgaggcacctgacctggggtttctgtaacctccctggtttctataacctcaggattcccccaaacaggttccactgccttaaggatgacagtcgtagggaaccctcgaagttggagctgccagtggttgccaatcctgatactgttgctgggcacaggccatgggccaggggtggaaggcgtgacacactacaaggccggcgaccctgttattctgtatgtcaacaaagtgggaccctaccataaccctcaggaaacttaccactactatcagcttccagtctgctgccctgagaagatacgtcacaaaagccttagcctgggtgaagtgctggatggggaccgaatggctgagtctttgtatgagatccgctttcgggaaaacgtggagaagagaattctgtgccacatgcagctcagttctgcacaggtcagcctctccacattggctatcacgtagccctccttcccagagactaacagtgccttacatttatggttcagggtacctttatggaaattgtctgatttgattctaactacaatacaacccagtgtggcaggcaggttaggtgatgct

SEQ ID NO: 4612 - DNA, 517 bp, Homo sapiens
  MAP TO AC004206.1; EXPRESSED IN HELA, SIGNAL = 0.82; EXPRESSED IN BONE MARROW, SIGNAL = 0.51; EXPRESSED IN PLACENTA, SIGNAL = 0.49; EXPRESSED IN ADULT LIVER, SIGNAL = 0.7; EXPRESSED IN BRAIN, SIGNAL = 0.59; EXPRESSED IN LUNG, SIGNAL = 0.82; EST_HUMAN HIT: BG429320.1, EVALUE 2.00e-23; EST_HUMAN HIT: BG429320.1, EVALUE 2.00e-23; NT HIT: AJ271735.1, EVALUE 4.00e-23; SWISSPROT HIT: P10272, EVALUE 3.00e-08
ctggccttgtaccgtctatgtgttgaaaagtcttgtagttattattttttattggttcaccttttatgctttctacttaagacacgagtagtttacacaccacaaatacagcattataatattctgtgtttttctgtggcacttggttcttgactgaagaaattacaaagtgccaatctgggtctaaatgtaatccattttctgaagttaagtgtcccaaatatttcttctgagttttcactagctgcaatttttcgtcagagacttcatggtctttagcagtcagttgctttaacagttgtacaccatttttttcataggctatctgtgaagcagagcaaagaaggcggccatctatatattgtagtaaggtggaaccttaaggagaaactatctcctccaagtgttcctttaatatttgaaaaacacaggaagggttttcagtaaaagcaagaggcattactgtccaggtgaattgttggccttccaaggtaaaggcaaaaagatactggctggc

SEQ ID NO: 4613 - DNA, 600 bp, Homo sapiens
  MAP TO AC010423.5; EXPRESSED IN ADULT LIVER, SIGNAL = 1.5; EXPRESSED IN HEART, SIGNAL = 1.4; EXPRESSED IN FETAL LIVER, SIGNAL = 1.3; EXPRESSED IN BRAIN, SIGNAL = 1.6; EXPRESSED IN PLACENTA, SIGNAL = 1.1; SWISSPROT HIT: Q99884, EVALUE 4.50e+00; EST_HUMAN HIT: BF239362.1, EVALUE 3.00e-03; EST_HUMAN HIT: BF239362.1, EVALUE 3.00e-03; NT HIT: AJ277546.2, EVALUE 1.50e-01
tctcttgatacccacctcggccccaggttcaggtccctgccttacacccagcctttgccgatcaattattctcctctgctactgtttgacacttctcacctgacacatccaacactgcctcctccttctttcttcccactggcccaaattcagtctcagccatgaaacaaagtatttctatccataaatgcaggtaagtttgctgcatggtgtcaatttaggaaccataaaacctaacctggctaccccattggaaagtaatgctgcttttctctattagcagaataaaaattggcacttattgatgagagataaagaagcacagtgaatgaaaaagcaaattcatcaactattgaaaagtataccatttccatacaattagacactctggttggtccatttccctcaaatgttttctgccctttttccatctgttttctacttcagaatacttttctctaacccttctacaacattaacttgagtgacctgaaggttaaagcctgcaggtattagaagaagaattgccagtcatgcaagctgccaaaagccagctcatccagatactctggagaatttagcactggaaacaaagcaaca

SEQ ID NO: 4614 - DNA, 597 bp, Homo sapiens
  MAP TO AC009509.7; EXPRESSED IN HELA, SIGNAL = 2.9; EXPRESSED IN BONE MARROW, SIGNAL = 1.1; EXPRESSED IN BRAIN, SIGNAL = 1.4; EXPRESSED IN PLACENTA, SIGNAL = 1.4; EXPRESSED IN ADULT LIVER, SIGNAL = 1.4; SWISSPROT HIT: Q05050, EVALUE 5.90e-02; EST_HUMAN HIT: BG213139.1, EVALUE 0.00e+00; EST_HUMAN HIT: BG213139.1, EVALUE 0.00e+00; NT HIT: gi14764120, EVALUE 0.00e+00
cattttgcaaacttctcttcccttaaaaaggaaggaaaaaaaaaaagaagaaagaaaggaagaaacaaacaaacatttgatatttctcagaattcagaactcatttttttttgttttgttttgtttcagaatactgaagaatgggaaaaaagtaagactgaagcagacatggaagagtatatatgggaaaatagctcatcagaaagaaatatcctggaaacgcttctccagatgaaagctgctgagaaaaatatggaaataaataaagaagagctccttggtactaaagaaattgaagagtacaaaaagtctgttgttagtcttaaaaatgaggaggaaaatgaaaattccatttctcagtacaaagaatccgtgaagagactattaaatgtgacatgaattatggagtagaaaaatctgcttgatttattaattttatgatatatgtgatcagtatctaatttgatataaaattgaaaatgttaaaaaatcattttttttcctcagagttaaaattatttccctcatactaatgcttaatggcaatgattactccagagttttttaatttttacactggggcaatagactaggagg

SEQ ID NO: 4615 - DNA, 503 bp, Homo sapiens
  MAP TO AC009145.4; EXPRESSED IN BONE MARROW, SIGNAL = 0.44; EXPRESSED IN ADULT LIVER, SIGNAL = 0.76; EXPRESSED IN HEART, SIGNAL = 1.1; EXPRESSED IN LUNG, SIGNAL = 0.89; EXPRESSED IN BRAIN, SIGNAL = 0.64; NT HIT: AB025262.1, EVALUE 7.50e+00; SWISSPROT HIT: Q10831, EVALUE 1.90e-01; EST_HUMAN HIT: AV727590.1, EVALUE 1.80e-01; EST_HUMAN HIT: AV727590.1, EVALUE 1.80e-01
ctagcatcaccctgctcctcctcatgttttcttaagaaagatggcacaaggaacaatggacaggagttactttccgaggtgccgggtcaagaagcctacggtaggaaggcaaaaccctcgccagtgctggcatctggcaacagtgacaatggacacctcgaccatggacacagtcatgggcaaaaggattctgcttgggacccaactgtttctaatcagcctttacgatgggcaaatgcgtcgcctctggttctgcacagctgtgcccaggaggaagctgctcctcctgttccagggcttggctgttctgtgacttcctatgggggaagggggtcgttttcggcctggtcccacttagtcctcaatgaaactcccttacagatgaggtgacttggcttctgctggcaggagaggaggcaatccaagggcgcagagaggttaatggcttatgcaccaagacagtcattcctgcaaagtcagatcggtattctgcaacccctgaa

SEQ ID NO: 4616 - DNA, 590 bp, Homo sapiens
  MAP TO AC008580.5; EXPRESSED IN BRAIN, SIGNAL = 1.9; EXPRESSED IN PLACENTA, SIGNAL = 2.4; EXPRESSED IN BONE MARROW, SIGNAL = 1.3; EXPRESSED IN ADULT LIVER, SIGNAL = 1.8; EXPRESSED IN HELA, SIGNAL = 2.4; SWISSPROT HIT: Q10358, EVALUE 4.40e+00; EST_HUMAN HIT: AL524755.1, EVALUE 0.00e+00; EST_HUMAN HIT: AL524755.1, EVALUE 0.00e+00; NT HIT: AJ007973.1, EVALUE 0.00e+00
acttgttgaatgggaatggctttgcctaaaatactgatagcaatatggacaataaggtccagggtcaggtggtctcagatgaagaagatgaggaacttgttgggaactggagcaaaggtggttctttttatgttttagcaaagagactggcagcatttttcccctgccctaaagatttgtggaactttgaactggagagaaatgatttagggtatctggtagaagaaatttctaagcagcaaagcattcaaaaggtgacttgggtgctgttaaaagcattctgtttcaaaagggaaacaaagcataaaagttcagaaaagttgcagcctgatgatatagtagaaaagaaaaacccattttttgaaaagaaattcaagctggctgcagaaatttacataagtagcaaggaacctaatgtcaatccccaagaccatagggaaaatgtctccaggccatgtcagagagcttcatgacagcccctcccatcacaggcccagaggcccaggaggaaaaaatgtttcatgggctgggcccagggtccccatgctgtgtgcagcctagggatttagtgtcctgtgtcccagctcttc

SEQ ID NO: 4617 - DNA, 530 bp, Homo sapiens
  MAP TO AF107045.1; EXPRESSED IN FETAL LIVER, SIGNAL = 2.2; EXPRESSED IN BRAIN, SIGNAL =   1; EXPRESSED IN PLACENTA, SIGNAL = 1.5; EXPRESSED IN BONE MARROW, SIGNAL = 1.9; EXPRESSED IN ADULT LIVER, SIGNAL = 1.4; NT HIT: AF107045.1, EVALUE 0.00e+00; SWISSPROT HIT: P07742, EVALUE 2.00e-31; EST_HUMAN HIT: AI114625.1, EVALUE 0.00e+00; EST_HUMAN HIT: AI114625.1, EVALUE 0.00e+00
ttggttagatgggggttttgttcaactttctaaatagtcttggtaaacttgataaggatcatatcatatgatactgaatggtaaggtcagatctggcaggaagtaaaatgaagatcaaagcttgtgtcactattctattaatcatacactgctttctttaactggagtaaagtaaacattggttttccttctttagagcataccagaaattcctgatgacctgaagcaactttataaaactgtgtgggaaatctctcagaaaactgttctcaagatggcagctgagagaggtgctttcattgatcaaagccaatctttgaacatccacattgctgagcctaactatggcaaactcactagtatgcacttctacggctggaagcaggttggtagagaatatcaaggagtacttaattgccagcttgagatattttggcattggaatgattttatgttttagccacctattaaatattatcacctagaagttctttaagttcaaatccagaacgttaaaaccaacccatggt

SEQ ID NO: 4618 - DNA, 584 bp, Homo sapiens
  MAP TO AJ251973.1; EXPRESSED IN PLACENTA, SIGNAL = 2.7; EXPRESSED IN ADULT LIVER, SIGNAL = 2.1; EXPRESSED IN HEART, SIGNAL = 3.6; NT HIT: AJ251973.1, EVALUE 0.00e+00; SWISSPROT HIT: P48382, EVALUE 3.80e-01
taatccccattcagagccaggagccagccaggccggcgctggggatactgagccccaccccctctgctaacaagtcccagccagtagacctcagcttcccctgcttcctgccaaggctctgcccactctgcccatgcccactctgatggggcaccaccactggctgcccatccttgtctttctcttgacacagactggggtgattgcattctctgccaaggaccaggcccagctgaatggcccccagctggtttgctgaagcctgaagccagggtctacaggcaagagcttggggaaggaggatgggctcaaatccttttactatgcgctccccaccacgacatctcagctcttcctccatttctgtcctgagaggttggcagagattagaggctggacaagaaggataaacatttagtaaatgactattgcagtcctgtccccagccctgggacctcctcgcaatgcccagtctggaaacactgcggccttatgcggagagggggctgtgtggtgtgggggaagataactggagtgggggagtcaccccaggctctcctgttgctcagtggtgtgacttggga

SEQ ID NO: 4619 - DNA, 551 bp, Homo sapiens
  MAP TO AC004173.1; EXPRESSED IN BRAIN, SIGNAL = 0.56; EXPRESSED IN ADULT LIVER, SIGNAL = 0.79; EXPRESSED IN PLACENTA, SIGNAL = 0.59; EST_HUMAN HIT: AA700304.1, EVALUE 2.00e-93; NT HIT: AF055066.1, EVALUE 0.00e+00; SWISSPROT HIT: O60312, EVALUE 1.80e+00; EST_HUMAN HIT: AA700304.1, EVALUE 2.00e-93
aggcctcactaggcttcctcagggacagattgctggattacacggagacaataggcagcctcaacaccaccccgcctccttcagctttgtaatggtggtgtgacccccacaatacttgcagtgtccttcacaagacccatgctgggacacactatgatttttgatttggccaggatgggggcagtttcagaggtttccctttggcctttggcatcaagagatcccttataccacagactggggacccagtgtgggggtgactccacttaccagagcatcagtgtcaattatgcactcagggaattggaagataatcagggttgggtctatgcatccagtggtcccattgcgggccataatgtgtccaggtttactccctggcctccgtaagccccactgtgatggagaagatgattgtgctgtgggcatctgggcatcaatatcagcttacatgcagtgaaaatgatcccccctagttctgcctatttcccttccccaatgtacagtctcctgagtaaatggctataggttcccttgctgaaagactgagg

SEQ ID NO: 4620 - DNA, 559 bp, Homo sapiens
  MAP TO AL031730.1; EXPRESSED IN ADULT LIVER, SIGNAL = 0.58; EXPRESSED IN BRAIN, SIGNAL = 0.52; EXPRESSED IN BONE MARROW, SIGNAL = 0.91; EXPRESSED IN PLACENTA, SIGNAL = 0.52; SWISSPROT HIT: Q9Y697, EVALUE 9.10e+00; EST_HUMAN HIT: AV701722.1, EVALUE 2.00e-87; EST_HUMAN HIT: AV701722.1, EVALUE 2.00e-87
tcagaggggtggcataactcagccaaggtcgcatggctggccagcagcatctgatttgaccacgatgtccagtctgaatggctctcactgtgtccttcaaggcctggctggcagtggcagggtttctccttaattctgaagaaaacaagaaagataatgattttatggggtcatccaggccattactaggaaagtgtctgtagacctctcagtgataagctctctctatctgtcagcacaaaaaaaagtgatttaaaaacagaaggtggtggtgaggataaggacagaaaacaccctcttatgggagataagatgacagagagtaagaccgatttatggatctatgagatgggcaatgcgggcgtcttgctcttcaggaggtatctctggcttcagcctgggatttggcccaaatctgcatgtggtttcagcctttgtctttgggcagctcaggttcgcttctgccttttcagcatgaccgtgactacgacggtgtgggttgctgtcatatctaatcagcaggcagtcagtgatgacaacaaggctgtcattcggattt

SEQ ID NO: 4621 - DNA, 599 bp, Homo sapiens
  MAP TO AC008456.4; EXPRESSED IN PLACENTA, SIGNAL = 2.1; EXPRESSED IN HEART, SIGNAL = 2.1; EXPRESSED IN ADULT LIVER, SIGNAL = 1.7; EXPRESSED IN BRAIN, SIGNAL = 1.8; EXPRESSED IN HELA, SIGNAL = 1.8; SWISSPROT HIT: O94823, EVALUE 2.00e-56; EST_HUMAN HIT: BF366883.1, EVALUE 0.00e+00; EST_HUMAN HIT: BF366883.1, EVALUE 0.00e+00; NT HIT: AB018258.1, EVALUE 0.00e+00
tcccattcacaagcagtgtcttctattttggctgttaatttggttccaaattaatattcctttgatattatgtcaaatattgcagagaaatataaaaattggagaatagcttgtaaataatctctatggtagtagagttttatgactatcttactaaagaataaactgaaattgttaacatgcatttccaaggttgcttacaaatactgtattattatgcttctttataggagacctgtgaatccatcctcaattgtgcattggaagagctaaagcaatttcgtgaactacagaagccagaccgcaagctctttggattccgcttaccttccaagacaccatccatcacctcagaagctgtggttccagaagctggattggtcatcgatgggaagacattgaatgccatcttccagggaaagctagagaagaagtttctggaattgacccagtattgtcggtccgtcctgtgctgccgctccacgccactccagaagagtatgatagtcaagctggtgcgagacaagttgcgcgtcatgaccctttccataggtacccatcatactgagatgcgggtggcactttggcagggatgatct

SEQ ID NO: 4622 - DNA, 545 bp, Homo sapiens
  MAP TO AF241733.1; EXPRESSED IN BONE MARROW, SIGNAL = 0.9; EXPRESSED IN ADULT LIVER, SIGNAL = 0.72; EXPRESSED IN PLACENTA, SIGNAL = 0.67; EXPRESSED IN BRAIN, SIGNAL = 0.58; SWISSPROT HIT: P25779, EVALUE 6.70e+00; EST_HUMAN HIT: BE560781.1, EVALUE 1.90e-01; EST_HUMAN HIT: BE560781.1, EVALUE 1.90e-01; NT HIT: AE008624.1, EVALUE 1.30e-01
aagccagcagttctgtagggtggtgaagcagcacttgcagccccacagcgccccctaacaaagctccgggcaagtgcaggctgtccggggagcaggccttttctgaccctccaaacgtgcagtttccccccaaatcccctctctgcccccacctggctccaatccatcaggggttatcagaaactttccatttaaggttgtgtgactgtggtcctgcagtcaggttcttgctgggtcttatctgtgtctgtctgtcctgggtgtctctccccaagtcctgctgtttttctcttatcatgacagaaatgcttgtcctgataaaataattacccaccagagcacagtggttatcatcaccagctgccatttctacgtagagatcaattagaggcatctttttgctggggaagtggtcaggccaacttactaaaaatcccattcggattctttctgcaaaatgcattgtgttttggtcttccaatgcagttgttactagaaaaaataaaaattgagtcaagaagaggtggaaatatggcttgccaatg

SEQ ID NO: 4623 - DNA, 537 bp, Homo sapiens
  MAP TO AL117259.3; EXPRESSED IN ADULT LIVER, SIGNAL = 0.52; EXPRESSED IN HEART, SIGNAL = 1.6; EXPRESSED IN BRAIN, SIGNAL = 1.6; EXPRESSED IN BONE MARROW, SIGNAL = 0.56; EXPRESSED IN PLACENTA, SIGNAL = 0.8; SWISSPROT HIT: Q9SEH4, EVALUE 7.00e-06; EST_HUMAN HIT: BF038259.1, EVALUE 1.90e-01; EST_HUMAN HIT: BF038259.1, EVALUE 1.90e-01; NT HIT: AL163301.2, EVALUE 5.10e-01
tctgtgctcagcagaattgggcaagatgccctgagcaaccctcctggctcagcttctgtgctcagcagaattgggcaagttgaacccagagcagcacagctgtaattttggagaggtagccattcatggtcagtgtgatttcagaggggtggccattcacgggttgtgtgatttcagaggggtggccattcacagatggtgtgatttcagaggagcagccattcctggatggtttgagttcagaggcatggccgttcatggatggtgtgatttcagaggggtgaccatttacagatggtgcgattgcagaggggtggcccttcatggagggcttcagcaagatgctccctccagtactgggggtgacccctgagagaccagcaagtcattctcaaatgagacccagatgcagcagcatttgacctgggaaccaggcaaggatgtctggggcaggtgcagccctgcctttaagagaacaacccagcctcctggtcagcaggaagcaggtctcactcacctgaagtcactagccagggc

SEQ ID NO: 4624 - DNA, 547 bp, Homo sapiens
  MAP TO AC008563.4; EXPRESSED IN PLACENTA, SIGNAL =   1; EXPRESSED IN ADULT LIVER, SIGNAL = 0.82; EXPRESSED IN HELA, SIGNAL = 0.84; EXPRESSED IN FETAL LIVER, SIGNAL = 0.8; EXPRESSED IN BRAIN, SIGNAL = 0.94; NT HIT: gi8923908, EVALUE 0.00e+00; SWISSPROT HIT: P32900, EVALUE 1.20e-01; EST_HUMAN HIT: AL138373.1, EVALUE 0.00e+00; EST_HUMAN HIT: AL138373.1, EVALUE 0.00e+00
gaggggagagatcttcagtgcttttggaaatacctaagtcaacagaacaatcactgtcatgtggttcagtcctattaggagactgggaagtttcctcagaatgtccatttaccttatttacggattccaaattaggatacttgtttccattttccaagtgctcagtttcctctttagaattaatgcttaaaaagcttgttccaagcacaatatcctgtgtttttgatctttccatgatctctggttgaaatgtatcattagttataagtttattaagattcatattgatatgatctaatttgtgagtgtcatcagctgtggctgttgagtcaacacttttctcaattagaactaatcgctcttcaacattcaaatcatattcaggtaagttaaaatcttttttatcatgagctttgaacttttcctctgttgaactgtttaaaatatctccattttgtaaaaggctgttaaaattttcatcttcttgcctaaaataaagataattttatgaaaaacataataaagccgagttttcttagtaacaggg

SEQ ID NO: 4625 - DNA, 560 bp, Homo sapiens
  MAP TO AL035444.9; EXPRESSED IN LUNG, SIGNAL = 2.4; EXPRESSED IN BONE MARROW, SIGNAL = 2.5; EXPRESSED IN PLACENTA, SIGNAL = 2.8; EXPRESSED IN ADULT LIVER, SIGNAL = 2.6; EXPRESSED IN HEART, SIGNAL = 2.5; EXPRESSED IN BRAIN, SIGNAL = 2.7; EXPRESSED IN FETAL LIVER, SIGNAL = 2.9; NT HIT: D13624.1, EVALUE 5.30e-01; SWISSPROT HIT: Q15648, EVALUE 4.70e-01; EST_HUMAN HIT: BE536242.1, EVALUE 0.00e+00; EST_HUMAN HIT: BE536242.1, EVALUE 0.00e+00
catatacaacagggtggggggaaaataggaggtaggaaaaactatgaaacagtaagaaatggggtgagtgatgacttcatccctgtaccccaaactccactcatggggtccatgactcagttggatggagatggtagaaccgctttcttcccttcccccaggcccagcagggtgctcattccaccacatagaaatgacagtgactcacagtgaaattagaaacatgtgttttccttcttctctccatatgctctctcgatacaggaaaaatagttactgtacactggagaaacatgacaaacaccatccttaaccaaatgatgaaggttaacatcaccagtgacatcatgcaggcatcgtatactcccagatatgatgcgacaagaagggcaccggaactagtggtattccttctcaaaatctgtaaccacagtcaaatcacaagagaagcaacagactgagcctgtactcctcaagactgtcagggttatgaaagtcgtctggcagttcctcagatgaataaacagagatttaccatatgacccagaaatcccaatcct

SEQ ID NO: 4626 - DNA, 541 bp, Homo sapiens
  MAP TO AC008979.6; EXPRESSED IN FETAL LIVER, SIGNAL = 0.44; EXPRESSED IN BONE MARROW, SIGNAL = 0.53; EXPRESSED IN ADULT LIVER, SIGNAL = 0.78; EXPRESSED IN PLACENTA, SIGNAL = 0.82; EST_HUMAN HIT: AW992958.1, EVALUE 1.00e-115; NT HIT: AL163202.2, EVALUE 0.00e+00; SWISSPROT HIT: P18735, EVALUE 5.10e+00; EST_HUMAN HIT: AW992958.1, EVALUE 1.00e-115
cgtaggcctcaaagcacttgaagtatccacttgcagattctacaaaaagagtgtttcaaaactgctcaatcaaaagaaaggttcaactctgtcagttgaatgcacacatcacaaagaagtttctcagaatgcttctgtctggttttgatgtgaggatattaccttttccactataggccacaaagcgctccgaatatccagttgcagaatctacaaaggagtgtttcaaaactgctcaatcaaaagaaagtttcaactctgtgagatgaatacacacatcacaaagaagtttctcagaatgcttctgtgtagtttttatgtgaagatatttccttttccactatagtctccaaagcgctccaaatatccatttgcagatacaagagaaagactatttccaaactgctcaatcaaaacaaatgttaaactctgtgagttgaatgcacacatcacaaagaagtttctcagaatgcttctgtctagtttttatgtgaagatatttccttttccacaataggactcaaagggctccaaatatcca

SEQ ID NO: 4627 - DNA, 539 bp, Homo sapiens
  MAP TO AC011513.2; EXPRESSED IN PLACENTA, SIGNAL = 0.63; EXPRESSED IN ADULT LIVER, SIGNAL = 0.6; EXPRESSED IN BRAIN, SIGNAL = 0.93; EST_HUMAN HIT: AW377421.1, EVALUE 1.00e-122; NT HIT: gi14756175, EVALUE 2.00e-59; SWISSPROT HIT: P40199, EVALUE 2.00e-05; EST_HUMAN HIT: AW377421.1, EVALUE 1.00e-122
gacagctagttcttggggaccccactgtagaataacatcaccttcattccttctctcttcttcccacaaggaagtgctcctgtcctctcagctgtggccaccgtcggcatcacgattggagtgctggccagggtggctctgatatagcagccctggtgtattttcgatatttcaggaagactggcaggtatgatcgcctttcctcttgccatgtttcctgcagggctgaccaccatgcttgggaaaggaaaaaaacttcttcacctgtatctgggactggatctccttctaccgctaaactcctgcttctcagcactaattcctgcaggtctcttcttccctggtcttcatgctccctgtaccccactgtctcctagatataattatccccagcctctgctcatttgtttcctagagtcaatacattgtcaaagcctcttcgtcctttttcaacatctctcacttttgtcagtctctccattcccatcaacctcaataattgttcaacatcctgcttgaccccttgttgtaaggttgga

SEQ ID NO: 4628 - DNA, 578 bp, Homo sapiens
  MAP TO AL096870.3; EXPRESSED IN ADULT LIVER, SIGNAL = 0.38; EXPRESSED IN FETAL LIVER, SIGNAL = 0.36; EXPRESSED IN BONE MARROW, SIGNAL = 0.46; EXPRESSED IN PLACENTA, SIGNAL = 0.41; SWISSPROT HIT: P22735, EVALUE 3.00e-19; EST_HUMAN HIT: BG675728.1, EVALUE 0.00e+00; EST_HUMAN HIT: BG675728.1, EVALUE 0.00e+00; NT HIT: M83227.1, EVALUE 0.00e+00
gtgggattgtttcggtcatcgggtgggactgaatcagctgtctggatggagggtttctgggtcaactggctgggactacctgggttaaggagccaccctgcctcttcctaacaggcatgatggatgggccacgttccgatgtgggccgttggggtggcaaccccttgcagccccctaccacgccatctccagagccagagccagagccagacggacgctctcgcagaggaggaggccgttccttctgggctcgctgctgtggctgctgttcatgccgaaatgcggcagatgacgactggggacctgaaccctctgactccaggggtcgagggtccagctctggcactcgaagacctggctcccggggctcagactcccgccggcctgtatcccggggcagcggtgtcaatgcagctggagatggcaccatccgaggtgaggccggtctgtcctcctcagctgagagctaaaaggctttaatgggaccagagactcagcctggcatttctgggggggataggaagctaatgataagggcctgggctcctcatggggcttcactgacacggagctgtgtc

SEQ ID NO: 4629 - DNA, 578 bp, Homo sapiens
  MAP TO AC010168.6; EXPRESSED IN ADULT LIVER, SIGNAL = 5.7; EXPRESSED IN HEART, SIGNAL =   3; EXPRESSED IN LUNG, SIGNAL = 6.5; EXPRESSED IN FETAL LIVER, SIGNAL = 3.1; EXPRESSED IN BONE MARROW, SIGNAL = 6.5; EXPRESSED IN PLACENTA, SIGNAL = 4.6; SWISSPROT HIT: P25092, EVALUE 3.00e-29; EST_HUMAN HIT: AW578382.1, EVALUE 0.00e+00; EST_HUMAN HIT: AW578382.1, EVALUE 0.00e+00; NT HIT: U20230.1, EVALUE 0.00e+00
agttgggcatgaccagagagaagcgtggggaagagtgggctgagggactccactagaggctgtccatctggattccctgcctccctaggagcccaacagagcaaagcaagtgggcacaaggagtatggttctaacgtgattggggtcatgaagacgttgctgttggacttggctttgtggtcactgctcttccagcccgggtggctgtcctttagttcccaggtgagtcagaactgccacaatggcagctatgaaatcagcgtcctgatgatgggcaactcagcctttgcagagcccctgaaaaacttggaagatgcggtgaatgaggggctggaaatagtgagaggacgtctgcaaaatgctggtaagaaaatgttaatagaatcttcctccactctgttactacctctggggacaaaatgttgctaagcaaagaccttgtgttctttgatcacacaactttctctaaggactgtccctaaacccctttctatttcatgacagtagctccttagagagaagaatttgaaccctattatgctgtgctcactcacacttcaccttgctctgggactagc

SEQ ID NO: 4630 - DNA, 598 bp, Homo sapiens
  MAP TO AL031721.1; EXPRESSED IN LUNG, SIGNAL = 4.4; EXPRESSED IN BRAIN, SIGNAL = 3.5; EXPRESSED IN BONE MARROW, SIGNAL = 5.4; EXPRESSED IN PLACENTA, SIGNAL =   4; EXPRESSED IN ADULT LIVER, SIGNAL = 3.2; SWISSPROT HIT: Q9YEK4, EVALUE 1.60e+00; EST_HUMAN HIT: AU125529.1, EVALUE 1.00e-111; EST_HUMAN HIT: AU125529.1, EVALUE 1.00e-111; NT HIT: gi14776630, EVALUE 0.00e+00
cagatagggcacaaggttccgtgtgaggcccctcagtcaggacggcatctgggagggagccccacggaggcttcacggcaacgccagcatggagggagccggcactcacctagggggctgtaggatgaggctgcagagcccagtgtgcccggctctgaacgcaggggtggcggctgctggggaggcgtcatggctgaggagcccaccggccctgggaggggctgggacagcgaaccgagcggcgaggtggacgcagaggatggcgagtgtagcgatggtgctctgggcagggagccggggatggcgacaggtgcagagccggccagcgacctgggacctggcgggggcggaccagtcagcgaagggagtaccgccaggcctctgcccaaacatctgccatgggcggcagccgtggaagacggaccctgcaggtggtggtggtggggatatggggggtgggaatataggggccaggccagccaccaccatctatgtgtttggagccacagcgcccccggtggccatgtccaacacagctgggcaagccatgggctcaaagggattccaaccagaggtggggagacgggggtttaacatg

SEQ ID NO: 4631 - DNA, 594 bp, Homo sapiens
  MAP TO AC005788.1; EXPRESSED IN ADULT LIVER, SIGNAL =  12; EXPRESSED IN FETAL LIVER, SIGNAL = 8.6; EXPRESSED IN BRAIN, SIGNAL = 4.2; EXPRESSED IN LUNG, SIGNAL = 2.2; EXPRESSED IN BONE MARROW, SIGNAL = 2.8; SWISSPROT HIT: P23468, EVALUE 3.00e-14; EST_HUMAN HIT: BF926552.1, EVALUE 1.00e-129; EST_HUMAN HIT: BF926552.1, EVALUE 1.00e-129; NT HIT: gi4506326, EVALUE 0.00e+00
caggcatatggggtatcaggaaatgctagaagagcagacacaggacacatttagtgacaatgacccatgagaagcattgaatcttggatgaccccatgaactagggctgatagggtctgtgtttcataggcaaggaaattgaggcacagagagggcacgtggcttgccccagccatatagtaggctgatgggggtgacaaggaacccggagcatgggggtgagcatactggacaggcacggggctctggccgtcaggaagatacaccatgatgaagccgtcagcatcaggcttgggggcgacgctgggcttgccgttgagcaggttgaaggcagtccaggcggtgaccgtctgctggaggccgcccaggctgctgccgcgattggtcagcacaaagttgtagaaggtgtggggcttgaggtgcgtgatgagcttcttggtggtacggccatccacatccagtgtgagcccattgtactggatctgcggaccagggctagctcagcagggcctggtgggctcatgcccatggactgagccccagctccaggatgagtcccccaccctgactgagccctgatcccactgaatcctg

SEQ ID NO: 4632 - DNA, 508 bp, Homo sapiens
  MAP TO AC008599.5; EXPRESSED IN ADULT LIVER, SIGNAL = 0.63; EXPRESSED IN HEART, SIGNAL = 1.3; EXPRESSED IN FETAL LIVER, SIGNAL = 1.7; NT HIT: gi14781268, EVALUE 4.00e-94; SWISSPROT HIT: O76082, EVALUE 2.00e-18; EST_HUMAN HIT: R75696.1, EVALUE 4.00e-92; EST_HUMAN HIT: R75696.1, EVALUE 4.00e-92
agtcttggatcacgtcccaccttcctctaccctgaccatgcctgctctgggccatgaggcaaatgcctttccccttttctaagtggtgatagtttgaactctaactgccacataatgatataaaaagcaaatattaaagtgagttaatatgctaatactcctcccttgttttgaacaggaacagaaattcttggcaagtcagttcgtattatattctctacattaggagtgtgcacattttttgcagttggctatatgctgctgccactgtttgcttacttcatcagagactggcggatgctgctgctggcgctgacggtgccgggagtgctgtgtgtcccgctgtggtggtgagtgtgactcgtccccagacaggccctctgctgcgggtcagcacacctggaacacacctggagcctgatgctgacctagcctgggcttgcatgacctccacggaactcgcggaggccagcttccaagccgggagagtttttgcctcattgtgggt

SEQ ID NO: 4633 - DNA, 543 bp, Homo sapiens
  MAP TO AC016620.5; EXPRESSED IN BRAIN, SIGNAL = 2.1; EXPRESSED IN BONE MARROW, SIGNAL = 1.9; EXPRESSED IN PLACENTA, SIGNAL = 1.5; EXPRESSED IN HEART, SIGNAL = 1.9; EXPRESSED IN ADULT LIVER, SIGNAL = 1.9; NT HIT: AJ271735.1, EVALUE 2.00e-31; SWISSPROT HIT: P57510, EVALUE 1.70e+00; EST_HUMAN HIT: BF819858.1, EVALUE 1.00e-73; EST_HUMAN HIT: BF819858.1, EVALUE 1.00e-73
ccacaacaaagccctagctcttttcaattctacaaaggctgagagagatgaggaagctgcagaagaaaagtgtgaagctagcagaggttggttcatgaggtttaaggaaagaagccatctccataacataaaaatgcaaggggaagcagcaagtactgaggcagaagcgtcaacaagttatccagaagatctagctaagatacttgaaggtggctatgataaacagcaaattttcaatgtagacagaacagccctctattggaagaagatgccatctaggactcttatagttagagagaagttgatgcctggctccaaagcttcaaaaggacaggttgactctcttgataaggactagtgcagctggtgactctgagttaaaaccaacactcatttatcattccagcaatcctagggcccttaagaattataccaaatctactctgcctgtgcattgtaaatggaacagtaaagcctggatgacagtacacctgtttatagcatggtttactgaatagtttaagcccactgttgagacctacc

SEQ ID NO: 4634 - DNA, 596 bp, Homo sapiens
  MAP TO AC016553.4; EXPRESSED IN BONE MARROW, SIGNAL = 1.8; EXPRESSED IN PLACENTA, SIGNAL = 2.5; EXPRESSED IN ADULT LIVER, SIGNAL = 1.9; EXPRESSED IN BRAIN, SIGNAL = 2.1; EXPRESSED IN LUNG, SIGNAL = 2.8; EXPRESSED IN HELA, SIGNAL = 2.5; EST_HUMAN HIT: BE222256.1, EVALUE 2.00e-66; NT HIT: AL163246.2, EVALUE 0.00e+00; SWISSPROT HIT: P70213, EVALUE 7.00e-28; EST_HUMAN HIT: BE222256.1, EVALUE 2.00e-66
atcaggcatttccagctcactcacagtgggccaccttttaatccgtatttcagataaccaagcaaataagctattggaactttttctaacttcccgagctgcaacattaaatgcagagtccatacttagtgggcccaaatcaataaattcgacctgatccaactctatgttccttccaccattatcccatacccttaatatccattcccgtgcctgttctccagatttctgtttatataaattagagaagtcaagcagttcttttctagtgtagcccacctcctcatgggtcacactcacaacttcacctctagggacctgccggaacgttagtctagttttaggtctagaagccaacaggggtgttgggggtggctcctgaggagaatcaacattattttgcctggcagctgcttcagaagaggtcatcactgttgcctcaggcagcacagggtttatctcttcagacaaacgcagaatagttaatggcagcatgggtggaggaggggatgttgccactactgaggatggggaagctgttccttctggcaaaaaagattcatcagggcttgcaaactcagtgtccccagcttcat

SEQ ID NO: 4635 - DNA, 579 bp, Homo sapiens
  MAP TO AC012055.8; EXPRESSED IN BRAIN, SIGNAL = 1.9; EXPRESSED IN LUNG, SIGNAL =   2; EXPRESSED IN BONE MARROW, SIGNAL = 1.9; EXPRESSED IN ADULT LIVER, SIGNAL = 1.6; EXPRESSED IN PLACENTA, SIGNAL = 1.6; EXPRESSED IN HEART, SIGNAL = 2.6; EST_HUMAN HIT: AI547259.1, EVALUE 2.00e-75; NT HIT: AF181897.1, EVALUE 2.00e-71; SWISSPROT HIT: Q49460, EVALUE 1.40e+00; EST_HUMAN HIT: AI547259.1, EVALUE 2.00e-75
aggcctctcttccctgagacacaaagatattgaaattaggccatttaataaccctacaatgacttttgcgtgttcatgtgaaaggaagagtcacatgtctttcactttaaattaaaagctacaaataattaagcttgtgaggaagacatgtccaaacttgaaataggctgaaagctaggccaaacagtcagccaatcataaatgtaaaggaaaagttcttgaaggaaattaaaagtgctactcccgtgaacacacaaatgatatgaaagcaaaacagccttattgctgatatggaggaaattgagtggtctggatagaagatcaatccagtcacaatattctcttaagccaaatcctataccagagcaaagccctaactctcttcaattctgtgaaggctgagaaaggtgaggaggctgcagaagaaaagttggaagctagaagaagttggtttatgaggtttaacgaaagaagacgtctccataacctaaaagggcaaggtgaagcagcaagtgctgatggagaagttgtagcaggtaatccagaagatctaactaaggtaattgatgaaggtggctg

SEQ ID NO: 4636 - DNA, 590 bp, Homo sapiens
  MAP TO AC010327.5; EXPRESSED IN BRAIN, SIGNAL = 1.1; EXPRESSED IN PLACENTA, SIGNAL = 1.2; EXPRESSED IN ADULT LIVER, SIGNAL = 1.2; EXPRESSED IN HEART, SIGNAL = 1.5; EST_HUMAN HIT: BF802275.1, EVALUE 1.00e-86; NT HIT: AF275139.1, EVALUE 0.00e+00; SWISSPROT HIT: Q61772, EVALUE 4.00e-03; EST_HUMAN HIT: BF802275.1, EVALUE 1.00e-86
ccccttaggcctctgttctcacttctcagctcccaatgaggtcacagatctccagaatgaaactcagactaagaactcagtcatgctgtggtggaaggcccctggagacccccactctcagttgtacgtatactgggtccagtgggccagcaagggacatccccggagggggcaagatccccaagcgaattgggtcaaccagaccagcaggaccaatgagacgtggtacaaagtggaggccctggaacccgggacgttgtacaatttcaccgtgtgggcagagaggaatgacgtagccagttccacgcagagcctctgtgcgtccacatgtgagaatccccttcctgccttcaagtggtgaactgggcttagctcacagtccttgcgagctgagagatgaatggaatacaaattccatcaggccacaggccatgacttcatgagctgcagtgatggaggagcccaaggcctcatgggagttgtagtttaaaaggacttatttgtgtccattcggggaggacagaaaaggagggaagatgaggtagtttggatttggcgaggaagggatgggctcgtctcagaaaactggg

SEQ ID NO: 4637 - DNA, 594 bp, Homo sapiens
  MAP TO AC009757.8; EXPRESSED IN ADULT LIVER, SIGNAL = 0.42; SWISSPROT HIT: P31561, EVALUE 9.90e+00; EST_HUMAN HIT: BG008183.1, EVALUE 1.40e-02; EST_HUMAN HIT: BG008183.1, EVALUE 1.40e-02; NT HIT: gi13812105, EVALUE 2.20e+00
ccctcatgcatcatagaaagctatgtctactcatcacctaccatttctcccagagataatgtgacataattttagttctttttggattgagcttgggccttttgccaagtttcttcttcttcattaatattatcacaatccctctcctcagaaaagaacaatgtgcaatttctactggaaatttgaattatgccattcctaatcacttgtctgtctccatctctcctggggttaatcaatagaatatatatatatatatacacacacacatatgtgtgtgtgtgtatatcttataactttagcttttctttttatctcttgaaaatatttttgaaaaacttagacttgaaaaaaatgttttactgttatgagttaccataaaaaactaaatttccaaatttctgagtacacttttcccctttcatcaatgtagattttaaaaatgttactttttgtgtaccacatatgtcattttgtaacgtcatatttggagactatttactattgcctcatacaaaattatatcaatgtaatgatttttagtcttttacattttattttatcatcatgaaaacatctgcattggcagaacat

SEQ ID NO: 4638 - DNA, 575 bp, Homo sapiens
  MAP TO AC008822.5; EXPRESSED IN HELA, SIGNAL = 1.6; EXPRESSED IN PLACENTA, SIGNAL = 1.6; EXPRESSED IN HEART, SIGNAL =   2; EXPRESSED IN ADULT LIVER, SIGNAL = 1.2; EXPRESSED IN BRAIN, SIGNAL = 1.3; SWISSPROT HIT: P23741, EVALUE 3.20e+00
aacctgatccactcactgcctatcaggagacttctgtctttgaaactaatcaggaagaatttactggctgttaaactctatggcaagaactcttgtgaaggaatgaaacaaaaggaagggaaactaagatgaaagtgagggatttgggacacaaaataacgcagagtcacttcaagcatctatgtattgttccctatagcttaaaaatgattatttcttgctcaaaatgtgcttataatacagaaagcaaaatctgcatttaaaattcttaagtaaaggtatattgttattatgtaaaccaaaactgactttaagtgaaataatttaggttgactatagaggaaaatttcctgactgtatgattgctaaattctaaaacttttattcagggaatatccagaatttcttctgaacgtcttcaaaaatagctctatacctttgccagccttcaggaaccaagcttacctgcatgcaggcaagaagggccagtggtatgtgaatccctagcaatttggttgtatatacagattgtacatacacatggcctcacaattagctccaaagaaccagtccac

SEQ ID NO: 4639 - DNA, 587 bp, Homo sapiens
  MAP TO AC008983.6; EXPRESSED IN FETAL LIVER, SIGNAL = 0.6; EXPRESSED IN PLACENTA, SIGNAL = 0.7; EXPRESSED IN ADULT LIVER, SIGNAL = 0.53; NT HIT: X91656.1, EVALUE 3.60e-02; SWISSPROT HIT: P22185, EVALUE 1.10e+00; EST_HUMAN HIT: BG674444.1, EVALUE 6.00e-91; EST_HUMAN HIT: BG674444.1, EVALUE 6.00e-91
tgcagtcagaggaaatgcaggcaggataggatacaagttcctggacagaacacaaggacagcagggccctctggccacgtgttccacgcagcactcactcaccagaatccctggccacccatgggttgcggtggcccagagtaggcactggtatcaccaccctctgaatctgcatagcggccttcagtccctggacagagtgacaggggtcacagattagagtcaagaagctgagggggccactcacacctgctcaccccaaatgaacgtgcatatttgatcctgctttggggaacatattaataaaagaagagagagacccatttaccttgtcaggatttacccaatccttaaatacaaagctaatcactgtgatccaaaatggcctggagagagggcacccaggcaggggctggggaaggtggcaccctccaaggaggctccagaagtcagggaaaagctgggaaaaaagtggggagtggatggccaggaggttgaggggtggagggaagatggagtttggaggtggacctgcgtgaatgcggagcaggcagtcagtgagtttttctgggaggaagacctctcct

SEQ ID NO: 4640 - DNA, 584 bp, Homo sapiens
  MAP TO AC008784.5; EXPRESSED IN ADULT LIVER, SIGNAL = 0.5; EST_HUMAN HIT: AW809130.1, EVALUE 0.00e+00; NT HIT: gi14861871, EVALUE 2.00e-03; SWISSPROT HIT: Q94818, EVALUE 4.30e+00; EST_HUMAN HIT: AW809130.1, EVALUE 0.00e+00
gctgctagccctcacttcacaaagcactacataaataacaagtgcacgtgataattagtaaccaatcacataacttctttcaaagtctgtcaatgactggtcactgtgtatgtttttcactgtacagtctgcaaagcagatagttgtgttaactccttgtctcccagtgataaactgacatgatattttacaaaaaatggatacttgaatggggaattgtcaaacaaagtgctacaatgaaacaaaacaataatgcaagaagtgaaatttgaattgaactctatatagagagttataaaagaaatagccaactgtggaaatgttgacactgctgccatacaagagactccagatatgcagctagagaaacttaaggaaggtgagcttatcaacgtgcattcagaaagtggttatgattacaagaatgaagatatcccagaggaattgacattgtcagaaaacttcacattaatcgaattctcagagatgtctcacaacattgaaagcacaaaagatgaaatgttagaagctggtgcacagtaaggataaaggagtatggcagttcaccaaggcatggaaaagat

SEQ ID NO: 4641 - DNA, 508 bp, Homo sapiens
  MAP TO AF131215.1; EXPRESSED IN BONE MARROW, SIGNAL = 1.4; EXPRESSED IN ADULT LIVER, SIGNAL = 1.1; EXPRESSED IN BRAIN, SIGNAL = 1.2; EST_HUMAN HIT: AW409371.1, EVALUE 2.00e-38; NT HIT: gi14738661, EVALUE 1.20e-01; SWISSPROT HIT: Q9NG98, EVALUE 1.20e+00; EST_HUMAN HIT: AW409371.1, EVALUE 2.00e-38
ttagccagtgaggcagtcagtgaaggccacggcagaaagaacacctgcaagtggtttgtgagggactgaactgggacacgggaaatttacaaaacgagaaagggccgcaaagccaagcttgcgtcttgtgtaaatataaatcacttacacactggcctggctaccaaaaacatcgtttccccagaataggtatccaggtggctttaactgattttctggaggtgagagttaacaccaaacgctcgcgcccatcacattttatcccatttttacctgtcgctaagaaaaggacacgtctaatccagcaaaccaaaaaaaaaaaaagtcttttttccttctgggaaagcagtggtttggagtcattcacaggggctgggagtgcaggagggggaaggggcgtggaatccaggagtgctcggaggcggcagcaagggtttttccacagggccccacgcaggccactgcagagggagaacgggggaagaggggaggatgtctcacctgggaa

SEQ ID NO: 4642 - DNA, 543 bp, Homo sapiens
  MAP TO AC012331.9; EXPRESSED IN HEART, SIGNAL = 1.7; EXPRESSED IN ADULT LIVER, SIGNAL = 1.7; EXPRESSED IN LUNG, SIGNAL = 2.8; EXPRESSED IN BRAIN, SIGNAL = 2.2; EXPRESSED IN BONE MARROW, SIGNAL = 1.7; SWISSPROT HIT: P11274, EVALUE 3.00e-18; EST_HUMAN HIT: AL045446.1, EVALUE 0.00e+00; EST_HUMAN HIT: AL045446.1, EVALUE 0.00e+00; NT HIT: U07000.1, EVALUE 0.00e+00
atcctcatacagggcagtggacagaccgcactgagtcctgggcttccacctcctgtccacccccaaggcaggaaggccaagtccccacagaagcccctggtccactccaccaagtggcatgagtgggtacgatggtgtaaaaactggcttctatagaagctgtttgtacaactcttgttttctctttttttaaaataataaaacagtaaatgaagaaaagacacagagaaggatgtgacatgcctgggccatggagcactctgagatctcatcgcggacaccactgcccacacctccatcccgtcctgcgcaggccgacactcactgacgttgaagcctgccttcagtgcctggatgtccgtggccaccccagacatgcggtagatgcccacctcctccatgcctcggcgctcgatctcctccacacactggcgcacgatgtagggcaccttggacctctctctcctgcgggaggagggaatgttctcagtgtcctaacagccctgcttgggccataacacaggagacctgctccctatgtgc

SEQ ID NO: 4643 - DNA, 576 bp, Homo sapiens
  MAP TO AL109754.13; EXPRESSED IN BONE MARROW, SIGNAL = 2.6; EXPRESSED IN PLACENTA, SIGNAL = 3.3; EXPRESSED IN ADULT LIVER, SIGNAL =   3; SWISSPROT HIT: P37890, EVALUE 2.80e-01; EST_HUMAN HIT: AL602279.1, EVALUE 1.00e-100; EST_HUMAN HIT: AL602279.1, EVALUE 1.00e-100; NT HIT: AL163227.2, EVALUE 2.00e-87
ttggtcaaaacaaaggagccacagtccccatgcaagttcaaaatccagcagagcagtcaatgttaaagctccaaatgatctcctttgactccatgtctcacatccaggtcatgctgatgcaagaagtgggcttccatggtcttgggcagctccactcctttagcttcgcaggatagaggctccctcccagctgccttcacaggctggcattgagtgtctgcagcttttccaggtgcacagtgcaagctgtcggtggatctaccattccagggtctgtaggatggtggcccttttctcacagctccactaggcagagcccccataaggactctatgttggggatctgaccccacatttcccttctgcatttccctagcagaggttctccatgagggcactgcccctgcagcaaacttctgcctgggcatccaggcatttccatacatcctctgaaatccaggcagaggttcccaaaccccaattcttgacttctgtgcacttgcaggctcaataccacatggaagctcccaaggcttggggcttgcaccctctgaaaccacagcccaacctctacat

SEQ ID NO: 4644 - DNA, 515 bp, Homo sapiens
  MAP TO AC008282.2; EXPRESSED IN LUNG, SIGNAL = 3.4; EXPRESSED IN FETAL LIVER, SIGNAL = 2.1; EXPRESSED IN BRAIN, SIGNAL = 2.3; EXPRESSED IN BONE MARROW, SIGNAL = 2.6; EXPRESSED IN HEART, SIGNAL = 3.2; EXPRESSED IN ADULT LIVER, SIGNAL = 2.3; SWISSPROT HIT: P75452, EVALUE 4.80e-02; EST_HUMAN HIT: AW373492.1, EVALUE 1.00e-122; EST_HUMAN HIT: AW373492.1, EVALUE 1.00e-122; NT HIT: gi15295525, EVALUE 1.00e-122
tccatttccacccttctcacccacttcctctatttccccatatcaacggtgccaagtggcttaacatcattttgaaagaagtggaaactgaattgtcaatcaagtgatcatgaagaggttaaccaataaaggcttgcggacaattttcaaggatatctgcaagcctgaaaaccctgtcaaaacgactaatgtaactttcaaggaaaaaagaaagaatatactgatacagagtgagcatatagaagttcccatttctttacctgctcactattcttcagagaaaggatgaagctgtggctcagggtttccaggtgggcaagtgatttctccagatgattcaaagtatctgcataggtaactttagaatccttagcttcttgagcttcgtcttctgagtttcttttccttggcttctcaataaaatgtttgactgtcttaatagcctttctagtcatctctttacgggcttccacagacagcttaaaaaaaagaatagtgagaccaaagaaccctgc

SEQ ID NO: 4645 - DNA, 568 bp, Homo sapiens
  MAP TO AC010328.4; EXPRESSED IN HEART, SIGNAL = 1.7; EXPRESSED IN BRAIN, SIGNAL = 2.1; EXPRESSED IN HELA, SIGNAL = 1.6; EXPRESSED IN BONE MARROW, SIGNAL = 2.4; EXPRESSED IN PLACENTA, SIGNAL = 1.5; EXPRESSED IN ADULT LIVER, SIGNAL = 1.9; SWISSPROT HIT: P45623, EVALUE 1.20e-01; EST_HUMAN HIT: AL534796.1, EVALUE 2.00e-72; EST_HUMAN HIT: AL534796.1, EVALUE 2.00e-72
ctctgacctcatctcctgcctgtgtcctcctcgctccctctgctccagccaagcatgcgtccttcctgttcctgggccgagcttgctcctgcctcaaggccttcacgtgggctgtgcctctgctggaactcgctggcccctcagctgcaggtgcaaacacccctccttccccaggtctcggttccaatatcaccttctcagcggggacttctgtgacccacttcccatttcacactccagctacaccctcacccccacctctggtccatattacctcctctgcatgcttctcttgattctttctgcttccactgtctggatcctgatgacaccaaggtctcaaggggagaatagagtcagaaggtgggggctatgctgggctgaccacatgtgagtagagctaccccctggcttcatatgaaagtgctggggtactttgcagatatacctcttgtgcccccatccctgtcccagagattcccattcacacaggttgggacccaccctcgataatacagtgcccaacatgattctaatctatatccagccctgaacaccaaggctctgt

SEQ ID NO: 4646 - DNA, 529 bp, Homo sapiens
  MAP TO AC005493.1; EXPRESSED IN BONE MARROW, SIGNAL = 0.77; EXPRESSED IN PLACENTA, SIGNAL = 1.2; EXPRESSED IN HEART, SIGNAL = 1.3; EXPRESSED IN ADULT LIVER, SIGNAL =   1; EXPRESSED IN FETAL LIVER, SIGNAL = 1.1; EXPRESSED IN BRAIN, SIGNAL = 0.91; SWISSPROT HIT: Q00275, EVALUE 2.20e+00; EST_HUMAN HIT: AI380277.1, EVALUE 2.90e+00; EST_HUMAN HIT: AI380277.1, EVALUE 2.90e+00
atggccacagtctccttgtcatacccatataggctctacctcaagttgtgggcaaacttctttacccacctgtcatgaaactgtgctttttctatgctatctctagggccccaagactgtatggatagctgcagaccaccacattcaggaagaggggccagatccattagggagtatatttggcattgagctgatagagaataaaggagaaaaacttcctgagtagctccagtcttaccaacccagcttctgtttcaaagtgagttcatgatcaacggtggtctcgcctggagtcattagtccagagaacatcccaacaaagaaggtgtaggaagttttcctaaacctaatttttaggtcaaaaaaacaagacagagagagaacaagattaggaaataaatgggaagttggaggagcccggatcaagcagaagtaagcccaagaatgcaagggaaaggtctgaggtataatggtataggtctgagacaggaagagctacggaataagcagagcaagaaagtgcagaggg

SEQ ID NO: 4647 - DNA, 595 bp, Homo sapiens
  MAP TO AL049198.2; EXPRESSED IN BONE MARROW, SIGNAL = 1.7; EXPRESSED IN PLACENTA, SIGNAL = 1.4; EXPRESSED IN ADULT LIVER, SIGNAL = 1.4; EXPRESSED IN HEART, SIGNAL = 0.95; EXPRESSED IN FETAL LIVER, SIGNAL = 1.1; SWISSPROT HIT: P17955, EVALUE 2.00e+00; EST_HUMAN HIT: BF213168.1, EVALUE 1.40e-02; EST_HUMAN HIT: BF213168.1, EVALUE 1.40e-02; NT HIT: AF181720.1, EVALUE 2.20e+00
tatgggagagttctgtggggaatcattaggactccttaggagataacagacgattccaagcagcagatgaggtgaagtcgaactccactggacctgtggtgggtgtggccagcgtcatccatccagagtgaaccccaacaggagccactccggggctggggcaggcggatgatctgcagacaaggcttttaatgggctatgtttgggaaaaatatattttatatataatagattatatttgtaaagacttgtagtttcaggatttcatacaaattagctttccagtattgagccactgcagttagggcccggtctctgtccagcaggctgggtgccaagttcagtgtcacagcgttcagcaggtgagacactcttaataggcagacacggtgcctctgaacgcacaacgtgcagtaaaggaaatgcaggcaatccctgtaaggaggaagtggttaagggatcgaaagcagcttgagacttgtgcaatgcagtcattgtcaccgaaaactccaaatgcgttttcattttcaaatgctgaattacacacaggattgcacaaggaaagtctcagaagacttccaaccagagagccttg

SEQ ID NO: 4648 - DNA, 585 bp, Homo sapiens
  MAP TO AC008620.5; EXPRESSED IN BRAIN, SIGNAL = 0.91; EXPRESSED IN BONE MARROW, SIGNAL =   1; EXPRESSED IN PLACENTA, SIGNAL = 0.96; EXPRESSED IN ADULT LIVER, SIGNAL = 0.92; NT HIT: AF095784.1, EVALUE 1.40e-01; SWISSPROT HIT: P21917, EVALUE 6.50e-01
agatgacagttgggctccagcttgtgtggggttcacccttccaaaaccagcctcgggcccaacaaagacccagccaatgccagtgctgcccagctcacctgctgcttccctgtttcccagttccagggctcccccagggcccctgctgaccagctcttttccaaggctacactccacgggaggactggagaacatctcagggaggcagccacagccgccactgcgtggggccccagcaatgacatggttttggacctttgtctacaaaatcttcgcattgttactgggaacagaggtgagaggtcctcagcctgatgtggactgtggcagccggtactcaggggtccgctggctagaggaggagccccctaagtctcatcagtgtggaggatcccctgagccttggcccctgatggactgaattctgggccttggaagcagcacagttcccagacactgcacttcctggagccagggtagacaaagatcctgggaaggaaaaagaaaggaagtggagttgttgggaggcctggcccgggcctacagattccaaaccagaggctcccatcctggagttagggtgga

SEQ ID NO: 4649 - DNA, 540 bp, Homo sapiens
  MAP TO AC004004.1; EXPRESSED IN ADULT LIVER, SIGNAL = 1.2; EXPRESSED IN BRAIN, SIGNAL = 1.1; EXPRESSED IN HELA, SIGNAL = 0.79; NT HIT: S70572.1, EVALUE 6.00e-53; SWISSPROT HIT: P03359, EVALUE 9.00e-04; EST_HUMAN HIT: AI218081.1, EVALUE 9.00e-53; EST_HUMAN HIT: AI218081.1, EVALUE 9.00e-53
aacacggcaatcaacaacactaagacagcaataaaacttaaaatttctatccacatttacttatctgatgacaactccttaagctttggctgagtgtagactactcagcttccagtgtgactagagcggggcttgctattttctcaagcttccgccatgtgtagactggtcagcttccgaagtgaccagagcagggctgttgtcatctccactgacaatgcgatctcgtcgcaggatcagccaggttggatggtctgggtcctgttggctggtccactggtcctgggctgctggttttagccaactgtggtggatttaaggcatgataacctgcaactttaacagcagtgggagtggacaaaattacagtatggggcccttcctatataggtcccagagtagttggattccacttcttaacctaaacaaagtcctcaggtttgaaaaagtgtgctgggtctgccacatttataggcattttttttttcttgcacctaacaatgaatcttttgcatagccagccctaagtcttgcatctgc

SEQ ID NO: 4650 - DNA, 580 bp, Homo sapiens
  MAP TO AF129108.1; EXPRESSED IN FETAL LIVER, SIGNAL = 0.35; EXPRESSED IN BONE MARROW, SIGNAL = 0.9; EXPRESSED IN PLACENTA, SIGNAL = 0.74; EXPRESSED IN ADULT LIVER, SIGNAL = 0.73; EXPRESSED IN HEART, SIGNAL = 0.98; EST_HUMAN HIT: AI589560.1, EVALUE 3.00e-28; NT HIT: AL163267.2, EVALUE 0.00e+00; EST_HUMAN HIT: AI589560.1, EVALUE 3.00e-28
agggtatcttggggaccatcttagaattctggccccacattctactagggccaagatccctcagcgcaaatgctctttaatagttctttctgtgcttaatttctaccaaggtgtttctagtgttctgctttttaagactgtgcaggttggttaccaagacagagaatgtaagttctcacctttaattaacatgaacttgattaagtcctttcactttctcaattatttaatccatgtctgtacatatggaattctcagtgaagactaaatctgtgtggagcgatgggcaatcatgtgttcactcaacagtcactgagcatttatcaaatgccaagtcctaggctgggtgccagggggctgggacttcttccagttgcagatgtatgtttaagagatcctctttttcattgtcttagtccattttctgttgcttataacagaatacctgaaacagtttataaagaaaaggaatttattttttgcagttatagaggttgagaagtccaaggtcaaggggccacatctggtgagggccttcttgctggtggggactctatgtagagtcctgatgtggcacaga

SEQ ID NO: 4651 - DNA, 592 bp, Homo sapiens
  MAP TO AC007207.22; EXPRESSED IN HEART, SIGNAL =  29; EXPRESSED IN ADULT LIVER, SIGNAL = 2.8; EXPRESSED IN BRAIN, SIGNAL =   6; EST_HUMAN HIT: AL535287.1, EVALUE 0.00e+00; EST_HUMAN HIT: AL535287.1, EVALUE 0.00e+00; NT HIT: gi14765201, EVALUE 0.00e+00; SWISSPROT HIT: P19120, EVALUE 2.00e-89
ggtattgatccctgcaccagctagtcttgtgtgggtgttttccagcgtggaaaagtagagttaattgccagtgatcagggaaactgaaccactctcagctatgtcgcctctacggacactgaacgaatgactggtgatgccgcaaagaatcaagttgcaatgaaccccaccaacatggtttttgatgccaaacgtctgattgcacacagatttgatgatgctgttgtccagtctgagatgaagcattggcccttcatggtggtgaatgatgctggcaggcccaaggtccaagtggaatacaagggagagagcaaaagcttctatccagagaaggtatcctctatggttctgacaaatatgaaggaaattgcagaagcctaccttgggaagactgttacccatgctgtggtcgcagtgccagcttactttaatgactctcagcgtcaggctaccaaagatgctggaactattgttggtctcaatgtacttagaattattaatgagccaactgctgctgcttatggcttagacaaaaggttggaacagaaagaaatgtactgatctttgacctgggaggtggcacttttgatgt

SEQ ID NO: 4652 - DNA, 556 bp, Homo sapiens
  MAP TO AC008448.5; EXPRESSED IN PLACENTA, SIGNAL =   7; EXPRESSED IN ADULT LIVER, SIGNAL =   2; EXPRESSED IN FETAL LIVER, SIGNAL =   4; EXPRESSED IN LUNG, SIGNAL = 4.3; SWISSPROT HIT: Q14934, EVALUE 1.40e+00; EST_HUMAN HIT: AA094779.1, EVALUE 2.00e-01; NT HIT: Z70730.1, EVALUE 2.00e-03; EST_HUMAN HIT: AA094779.1, EVALUE 2.00e-01
caggaagcagagcctgaaacaaaaacttcagtctgaatattttattagagtgcaaacccaggcaaatacaagtgagagagagaggagtgagccagagaggaacagaagaactaataattggatgttttacagagctggtatcaaatgcaactcactttatcaagtgaaaaagatcccacatgttcactaccaaagtggtaattctctctaggtctaggaaaggggaaaaatttacccacttgatctagcctccattggtcatagatttgttcttcagagcggaaatttctagctcccagtcttctgttcctcctctccctgcatctggacttccggattgtactcacataaatgctcagcagctcctttggggtcttatatgtcagtatcagcaaggaagcccccgggcagtaagtgggcatggtcagattgtctttgtgaaatatgttggagctcaaacagaactggccacgtcagctgctctgggacaggacaaggtaacagagacatgtaagaactacagatcccagatatgtctgattcatccacccactcc

SEQ ID NO: 4653 - DNA, 539 bp, Homo sapiens
  MAP TO AC011524.4; EXPRESSED IN BONE MARROW, SIGNAL = 0.51; EXPRESSED IN ADULT LIVER, SIGNAL = 0.66; EXPRESSED IN LUNG, SIGNAL = 0.55; SWISSPROT HIT: P49591, EVALUE 3.00e+00; NT HIT: AY056804.1, EVALUE 8.00e+00
aaaaacgtgtccagccaatcggttcttcagatgcgttcatgaagtcacacctgctgtgtatgaacctgattgcatgtcctgctttctgcctaagaaaagcacgcctaagtacacatgggcgtgcagcttgtttgaagaatctgttgctatagaaagataaaagggaagaaaaagataaaatatgtataaaaggaaaaagcctctattgatttatctatctatccattatatatatatgcacttctggtccttaatcctgggcagggtgtctgctgtcagagatgggcaaggatgggtgtcagccattggagagctgttccagggagggagcccgaccactctctggccttagccagcccagtcagcactggagaaagacctcatccaacgctgaaatagatggtgctagtgtatgcattacaatagcaggtgagtaaaactgtctgttgtacaacatgctgatgtaggagctttgtgattatctagcctaatgtgtagataaggaaatcagggccctggcaggtcgctaggcatgactt

SEQ ID NO: 4654 - DNA, 522 bp, Homo sapiens
  MAP TO AC005202.1; EXPRESSED IN LUNG, SIGNAL = 3.8; EXPRESSED IN FETAL LIVER, SIGNAL = 1.7; EXPRESSED IN HELA, SIGNAL = 1.5; EXPRESSED IN BRAIN, SIGNAL = 1.7; EXPRESSED IN BONE MARROW, SIGNAL = 2.7; EXPRESSED IN PLACENTA, SIGNAL =   1; EXPRESSED IN HEART, SIGNAL = 1.6; EXPRESSED IN ADULT LIVER, SIGNAL = 1.9; EST_HUMAN HIT: AW814694.1, EVALUE 1.00e-120; SWISSPROT HIT: P33611, EVALUE 2.10e+00; EST_HUMAN HIT: AW814694.1, EVALUE 1.00e-120; NT HIT: AJ317960.1, EVALUE 2.00e+00
ccagtctccatctctcagggagtggagagaccgaacaccttctggagctaatgggttctgagagaaccctgagtggttattctcacagatgtgacacggggaaaaactgaggtgaagctgcttccctccacacgcacaagtaggcagcggaggggcccaagaaagagccaacaggcggccctctctccctgacagccaccatagcccagcctggcccccacctccgataactgcagggtacgctgctacaaatgacgtctgcgtttgacaaggatgagcagaaccggagcgtgtgcgtcaattcaaatctgtgacactggcgcaaaatgtgagaatgggctggggtgccaggcggccagtcacggctagggcacagttccaagaagggccacaggggcccgcagggacacttaccccaagccctccagaaacagctgctgcaggtcagcaccagcaccagggccaggcacacagtctcatcggcacgtctgccactggctgtctgcaaagtgcttccctttc

SEQ ID NO: 4655 - DNA, 564 bp, Homo sapiens
  MAP TO AC008408.5; EXPRESSED IN FETAL LIVER, SIGNAL = 2.3; EXPRESSED IN BRAIN, SIGNAL = 3.2; EXPRESSED IN BONE MARROW, SIGNAL = 1.7; EXPRESSED IN PLACENTA, SIGNAL = 2.4; EXPRESSED IN HEART, SIGNAL = 2.6; EXPRESSED IN ADULT LIVER, SIGNAL = 2.5; EXPRESSED IN LUNG, SIGNAL = 2.2; EST_HUMAN HIT: BG719489.1, EVALUE 0.00e+00; SWISSPROT HIT: Q16566, EVALUE 1.00e-57; EST_HUMAN HIT: BG719489.1, EVALUE 0.00e+00; NT HIT: L17000.1, EVALUE 0.00e+00
cataaaatgccggtgtttggcttccagatctgaaggaagctgtttagtactctggcaggatcacatcttgctgtggaacttcaaaacccacagcagagcttccttgcccttctctgggagctgctgcctcctccacagtcttcagcttctcctctgctaggccctcctctagttccaggtcagccacctttatcccatcctccactgccttgggcaccattttgggggcctcttcagcatttatatctgcacctttaactttctctaaggcttgcaccttcatcagctcagcctgtgcccccttaactgcggcttgggccccatcgccttgaattttctctccttctggaatagctttcatgtcctcgttgccatcttggattggagaagggtctcggctagccttgtggctctcctggatgctgccatggctgctgctggcacttcccaggcgggaagaggccaccacagccttcaccgctgcctgattggaaacagaagagtgtcaagtgttacctctgctttaacaccccacatcagagctcaaccccagctttgctttta

SEQ ID NO: 4656 - DNA, 523 bp, Homo sapiens
  MAP TO AC005515.1; EXPRESSED IN HEART, SIGNAL =   8; EXPRESSED IN ADULT LIVER, SIGNAL = 4.8; EXPRESSED IN LUNG, SIGNAL =   6; EXPRESSED IN BRAIN, SIGNAL = 5.5; EXPRESSED IN HELA, SIGNAL = 5.3; EXPRESSED IN BONE MARROW, SIGNAL = 4.7; EXPRESSED IN PLACENTA, SIGNAL = 6.2; NT HIT: U67985.1, EVALUE 4.00e-85; EST_HUMAN HIT: AV715923.1, EVALUE 1.00e-24; SWISSPROT HIT: P97400, EVALUE 2.00e-32; EST_HUMAN HIT: AV715923.1, EVALUE 1.00e-24
ggagctcttaagggcaggaggggctgaagcagccccacagggacaagactggcagtatcaccaggaaggcctgtgtctgctctggggaaaggggggaagggatttgtgtgtgtccagtgtgtgccccacaagggagagacctgcccaacacaccgtgtgctttaccctcagcatggacccacagctgcaggtggatttccataccgagatgaaggaagactcagacatcgccttccatttccgagtgtactttggtcattgggtggtcatgaacagccgcgtgaatggggcttggcagtatgaggtgacatgccacaatatgccctttcaggatggtaaaccatttaacctgtgcatctccgtgctggccgatgagtaccaggtgagccccccaggagctcccagcacccaccctccatgggctcccagaacaggaggcagctcttcctgagctgaccccaccagttcctcggagccgatctcccataactactcctgccccaggcttttcctcacagagcac

SEQ ID NO: 4657 - DNA, 567 bp, Homo sapiens
  MAP TO AC000367.1; EXPRESSED IN ADULT LIVER, SIGNAL = 0.36; NT HIT: gi4504148, EVALUE 8.00e-71; SWISSPROT HIT: O00222, EVALUE 3.00e-24
tgacaattctgccaccaaagctaaaatttgtatcaagtcatcagtaatgagtgcatttcctcatattatgatactccagttttgcctttgagttcagatccaactggaataaaacaaattctctatggtgcattcttaccatcaattgatgctcgtttgggcaaaattgtcacagccccttctgcaatctcctcttgctgatagacaggtgctattttggatccccaactatctgagccaatccagagaaaatgcccactttggtttagtttttttgctgcttccaatatcctcctacaggaataaaaataaataatgcatatcacatgtattaaaaataccacaattatgaatattacaagaccagatttaggaagttgtatacactcagtaggtcactgtttaacaattaagacgatcattctaactgcccgagtcttatcatctcctaaaaacaatatagcagagactaactccaacatatgttaattagccttatccttaacctcattcacatcattctgtctatcacctttgtttgtcttatctcatttggtccccaagttt

SEQ ID NO: 4658 - DNA, 584 bp, Homo sapiens
  MAP TO AC008747.4; EXPRESSED IN ADULT LIVER, SIGNAL = 0.68; EXPRESSED IN LUNG, SIGNAL = 1.5; NT HIT: gi14766745, EVALUE 2.00e-90; EST_HUMAN HIT: BF762973.1, EVALUE 3.00e-90; EST_HUMAN HIT: BF762973.1, EVALUE 3.00e-90
caaatcaggccaatgagatgttttctccaaatgattttatgacttctatgaatacatctactctacacaagaaacatttcactttaatatattcacgttatttttctagtcaacataattataaaccctgaacacatcactagaatcccaaatgaagttttatgatattgcttgaattcatgtacagaaaattcagctccatacagcaattagagctgaaaatatccaagccaaatcaatatatttcctcaaaatctagtaaatattcaaaaaatgactagcttctattacatctcaagaactaaaacacacttttgacatgtaagtacttgccacacattgtcaaaacgaaccttatcccatatgagctcagctccatcccccttttctgctaaatgaactctcaaagtctcgatgctctttgaaaaaagacgtgcatagctctttacatctagaacctgctggtctttcaggcctaactggggttcattctgttgatctgatgcattcgtttcttctcctaaagaaaaaaatatatatattagaaatttcactaattaacatcattcctctactgtgctctg

SEQ ID NO: 4659 - DNA, 502 bp, Homo sapiens
  MAP TO AL031300.1; EXPRESSED IN BRAIN, SIGNAL = 1.4; EXPRESSED IN FETAL LIVER, SIGNAL = 1.3; EXPRESSED IN BONE MARROW, SIGNAL =   2; EXPRESSED IN PLACENTA, SIGNAL = 1.3; EXPRESSED IN ADULT LIVER, SIGNAL = 1.3; EXPRESSED IN HEART, SIGNAL = 1.2; EST_HUMAN HIT: BF374032.1, EVALUE 1.80e-01; SWISSPROT HIT: O88799, EVALUE 6.00e+00; EST_HUMAN HIT: BF374032.1, EVALUE 1.80e-01
gagaactctgatccctcccctctgaagtttaaattattaaaatacaccttatggactggggtagcctcaactggagcccaattgctgaaaggacaggacagaccctgggaggaagtttgccctgggatggatagctgggaattaaggggcatgatgataggagcctggacaagtaaccaggaatcaaccctgagaattctgtcctcagagaattctgatccatcataacccattcatggtccagccacctggcactgtggtcatgccttggagacaagatatggtgtccatcctcaaggaactcatcactgaagagctcctgggacacttggggaccatgtttgtcatgtgatcatgtgcttgccaggtgactcccctgactaagcataagcaaagagctgaggaaggtgaagctgtgctcacaggaggtgggcagctctgctggagccatatcactgcagatattctgaaaatcacaaggtcatcagggaagggttcttca

SEQ ID NO: 4660 - DNA, 528 bp, Homo sapiens
  MAP TO AF027207.1; EXPRESSED IN BONE MARROW, SIGNAL = 2.4; EXPRESSED IN ADULT LIVER, SIGNAL = 1.8; EXPRESSED IN BRAIN, SIGNAL =   2; EXPRESSED IN HELA, SIGNAL = 3.7; EXPRESSED IN PLACENTA, SIGNAL = 2.4; EXPRESSED IN HEART, SIGNAL = 2.9; EXPRESSED IN FETAL LIVER, SIGNAL = 3.3; EXPRESSED IN LUNG, SIGNAL = 2.3; EST_HUMAN HIT: BE671615.1, EVALUE 4.70e-02; NT HIT: AL163267.2, EVALUE 0.00e+00; EST_HUMAN HIT: BE671615.1, EVALUE 4.70e-02; SWISSPROT HIT: P98105, EVALUE 8.40e+00
gcataggagccaacctgaacaaactctccgtggccaaagctggagcaatttcagcaagaaaataaataacatagaattggactataacccaaagcatacatttccatgatccatactgatataaattatgagtctatattgatataaacaaataattgaataaacaaatacacaaatgggaaacggggaatctcccttacagaagagttgtgaatagatgtctctatttccaggaggtggagtcagatcttctccctgcccctttgagtgtgggctgggcttagtgacttgcgtctaaaaagtcaatatggaaagatggagaaaagtcactgctgctctacctttaaagtggagaaacctggaaaaacttaccttggccaggtgatcaagattgacaacatcagtgataagccgtgttgataccatgtgccccagatatggtgtgatgagaagggcacttcctctctgtgacattctttcccaagacccataacccccagctagtcatgagaaaagcacgaggcaaag

SEQ ID NO: 4661 - DNA, 536 bp, Homo sapiens
  MAP TO AC020553.4; EXPRESSED IN PLACENTA, SIGNAL = 3.4; EXPRESSED IN ADULT LIVER, SIGNAL =   3; EXPRESSED IN FETAL LIVER, SIGNAL = 3.7; EXPRESSED IN BRAIN, SIGNAL = 2.9; EXPRESSED IN HELA, SIGNAL = 2.6; SWISSPROT HIT: P13180, EVALUE 5.00e+00; EST_HUMAN HIT: BG181188.1, EVALUE 5.00e-82; NT HIT: U66061.1, EVALUE 2.00e-87; EST_HUMAN HIT: BG181188.1, EVALUE 5.00e-82
gtcgtggtcactgtttggtggtctgctgccagtctgatccactacagttttctgaaccctggtaaaaccgtgatctcagataattatgctcagcaaatggatgagatgcactgaaaacttcaatgcctgcctccaacattggtcaacagaaagggctcaattcttctccacagcaacgcaggaccgcacatgacacaaccaatgcgtcaaaaattgaacgaattgggttggaaggtttgcctcatctgccgtatttacctgacctcttgccagccgactaccactttttctagcatcttgacaattttttgcagggaaaatgcttccacaaccagcaggatgcagaaaatgctttccaagagtttgtcgaatcccgaagcatggatttttacactacaggaataaacaaacatttctccttgacaaaaatgtgttgattgtaatggctcctacttcgatcaataaagatgtgtttgagcctagttacaatgatttaaaattcactatctgaaaccacaattacttttgcaccagcc

SEQ ID NO: 4662 - DNA, 540 bp, Homo sapiens
  MAP TO AC011904.3; EXPRESSED IN ADULT LIVER, SIGNAL = 1.1; EXPRESSED IN BRAIN, SIGNAL = 1.3; EXPRESSED IN HELA, SIGNAL = 0.79; EXPRESSED IN FETAL LIVER, SIGNAL = 0.89; EXPRESSED IN BONE MARROW, SIGNAL =   2; EXPRESSED IN PLACENTA, SIGNAL =   1; EST_HUMAN HIT: AA142938.1, EVALUE 3.00e-43; SWISSPROT HIT: O43520, EVALUE 1.30e+00; EST_HUMAN HIT: AA142938.1, EVALUE 3.00e-43; NT HIT: gi13937343, EVALUE 0.00e+00
gctactccctttgcaacacccccaccttttctgtgcagcagatgggaaattgcctgtccccaacaaatcaggctgtttgcagatgagtcttcctttgcaacttcgtaacttcttcctagcctctgattggttgctttctgcaaagcatgaactggccaaagggaaacttctagtgggtactgggacccaagaagattgtgtatccgtgcccttgaaccgctgctcggattgctcccacactgtggcgtgtactttggttttcaataaatccctgctttcgttcttttgttgcttcatcctttctttgctttgctaggagttttgtccaattccttgttcaaaacgccaagaacctggacaacttgcagtcactatcctctaccagtgacaaaagtatacaattaaatagcctttagtatattcagagttgtatatccatcaacactaccaatttaataacattttcatcaacttaaaaaaaccctaccccctcatgttactctcaaactcttattagcacccaaaacatgcaaccatcat

SEQ ID NO: 4663 - DNA, 508 bp, Homo sapiens
  MAP TO AC008427.5; EXPRESSED IN BONE MARROW, SIGNAL = 0.99; EXPRESSED IN PLACENTA, SIGNAL = 3.4; EXPRESSED IN HEART, SIGNAL = 3.7; EXPRESSED IN ADULT LIVER, SIGNAL = 2.4; EXPRESSED IN LUNG, SIGNAL = 1.1; EXPRESSED IN FETAL LIVER, SIGNAL = 3.6; EST_HUMAN HIT: AW236547.1, EVALUE 8.00e-81; SWISSPROT HIT: P44246, EVALUE 4.70e+00; EST_HUMAN HIT: AW236547.1, EVALUE 8.00e-81; NT HIT: gi13540478, EVALUE 4.80e-01
cgctttagctctgggttttgttcaaggaaggcactgcttcccaagctttgagtcttactagactgtggctgggtttcaggggcttaccgtagtcagtgtatctgggccagcagaagtgccggagccctccgtagctcagctggaaggagggctcgttgcgcttcctcagggcagcgccctttgtcaaagagagggccgcgtgctcagaacaccggtaggtgatgaagccgtacttctcgcctctgcggggagggagcaaggagagtatgttattgggctggctgggtggacactgtgagaccacccattactagatgaggaaccgactgccacagtgattcgatacccacatcacgtggccccctagatagagatgatgatgaccactgggctgacttctgcaatgtggtaataatgaaagcagctaatatgttgaatgtctgccaggtgttggccatcacatcttgcctcagacactcctcagatgagcctgtgaggtgggtactgt

SEQ ID NO: 4664 - DNA, 512 bp, Homo sapiens
  MAP TO AC002056.1; EXPRESSED IN LUNG, SIGNAL = 3.2; EXPRESSED IN BRAIN, SIGNAL = 1.7; EXPRESSED IN FETAL LIVER, SIGNAL = 2.8; EXPRESSED IN BONE MARROW, SIGNAL = 2.5; EXPRESSED IN ADULT LIVER, SIGNAL = 1.6; EST_HUMAN HIT: BE738305.1, EVALUE 0.00e+00; SWISSPROT HIT: P09661, EVALUE 1.00e-45; EST_HUMAN HIT: BE738305.1, EVALUE 0.00e+00; NT HIT: gi14779798, EVALUE 0.00e+00
aagacttgttccaagacggcctattattatacatctgcctcactgctcaggacccgtttgtgactgtgtcttcttccatctcttcttcaccatcatcagtgggccccaatctgcgttctctgccagggatctgaccagactgcagcaaccccttcagcctctccacttcagccagagttgaagcatttgctatagcattcttgattgcttctacatcccctggagatggcccacctttctttttgtcagttggcaaaccagcacctggattaaaagttttgcttctcctggcaatatcctttgcaagctgtgcaccccgtttgcccttgaacattttctctgcttcctgacgctctttagtttcactttctggaaatccagtactctgatttgcggaactttataaatcacatacaatctgtaatgcttcttattggttactggatttcttaggatacttaggtaagtcagcgatttgagagatgccagagggtccagatcacccagttcca

SEQ ID NO: 4665 - DNA, 571 bp, Homo sapiens
  MAP TO AC016603.5; EXPRESSED IN LUNG, SIGNAL = 1.1; EXPRESSED IN BRAIN, SIGNAL = 1.1; EXPRESSED IN BONE MARROW, SIGNAL = 0.6; EXPRESSED IN ADULT LIVER, SIGNAL = 0.62; EXPRESSED IN PLACENTA, SIGNAL = 0.73; NT HIT: AF276423.1, EVALUE 1.00e-108; EST_HUMAN HIT: BE067089.1, EVALUE 1.00e-108; SWISSPROT HIT: P22792, EVALUE 3.70e-01; EST_HUMAN HIT: BE067089.1, EVALUE 1.00e-108
tgaattgtacggcatactctacgatacaattaaaccaaaaaattcaaccacacaaatatattggcaactttatagcaatattaggaatatcatatttctagatataaaaataaccaaagataattcttgaaagaaagtattagcatacctttggaagctcttcaatctgattagcatctaaatagagttcctccaaggttttttcaaaagtaaaaatctctttcggaacttgttctaagctgcaatgagaataatcaagagtagtgacagtctcctcttcccctcgtagacagcgacatggtaccaaccgcacaaacaaacttcgttttgtagtcatttttagacactgcaatattcgaataaaaagaaatttaaaacatacatattacaacggtttttcagaacaaatcattccaatctatcacaattcatatgtcacagataaacacttctcctgccactatacaagcacaatggaacccatttaacattgctttaatacccacatttataactactggatttcaaattaaactcaagctctttagtacttcacaaagcaatccatgaa

SEQ ID NO: 4666 - DNA, 558 bp, Homo sapiens
  MAP TO AC008509.5; EXPRESSED IN HEART, SIGNAL =   1; EXPRESSED IN ADULT LIVER, SIGNAL = 0.5; EXPRESSED IN FETAL LIVER, SIGNAL = 0.48; EXPRESSED IN BRAIN, SIGNAL = 0.58; NT HIT: gi14734568, EVALUE 2.00e-65; EST_HUMAN HIT: BE543219.1, EVALUE 7.00e-63; SWISSPROT HIT: P75555, EVALUE 2.40e+00; EST_HUMAN HIT: BE543219.1, EVALUE 7.00e-63
aagcaactgcctacaaacggcattaaggaacatacatgcaacagcatttaaggaagaaaatatcttacatatgggccatatttcactgcagaagagagcacagagaaaaaaatgaatcttaagtctgtttaaagaaataaacttaacatttgttttattcattcatatgtgtcatagacagccgaagagaagaaccatctttacttttggttctaaaatggggaggtgaattaactcctgcaggcagggtccaggctgaagaacttggaagagccttcaggtgtatgtatcctggaggtcaaggtaaatcttagagttttctttaatttgactaatttcataaattgtattttgaaatcctcatttgtgatgttattaaacatttatagaaatacaatgaaatgaaaatatagctgaagtgatttgaggatttattttcaggagattatgcaggatttcctggttgtggtttacttagattacatagcacctacagacatgacctcaaaatatatgcctctgatgaaggacgagtccagatgactgcagctgcttttg

SEQ ID NO: 4667 - DNA, 533 bp, Homo sapiens
  MAP TO AC020663.1; EXPRESSED IN PLACENTA, SIGNAL = 1.6; EXPRESSED IN ADULT LIVER, SIGNAL = 1.1; EXPRESSED IN LUNG, SIGNAL = 1.4; EXPRESSED IN FETAL LIVER, SIGNAL = 1.7; EXPRESSED IN BRAIN, SIGNAL = 2.1; EXPRESSED IN HELA, SIGNAL = 1.9; NT HIT: gi14779656, EVALUE 0.00e+00; EST_HUMAN HIT: BG479965.1, EVALUE 0.00e+00; SWISSPROT HIT: O95125, EVALUE 5.00e-36; EST_HUMAN HIT: BG479965.1, EVALUE 0.00e+00
cacccaatgaccaaggaatctgcagctgcagaccccagcagcagggccccatttcctcacctgagggtcaaaatgcccccactcacccgctgcctgtgtttcctgggcttccgctgcagcccttccacaaggaccacggcctcctcaccgctctccggctgctgctcgcgtacccgagcctggatctcccccggcagcacagtcaggaactgctccagcaccagcagctccaggatctgctccttggtgcgcagctccggccgcagccagcggcagcacagctcccagaggcggctcagggcctcccggggcccagccacctcctggtagcagaagagccggaagagctggcggaaagtctcagggctggggtcctccgtctccacggagggctcctcttccaagcagaagtcctcctccaccttcacaatcaggatctcttcctgttccaggtcctgctccaaggttggcaggggctggaggccagggacagtggccattgcttccggtgggccttgttccttttcaggcct

SEQ ID NO: 4668 - DNA, 564 bp, Homo sapiens
  MAP TO AC007570.23; EXPRESSED IN HELA, SIGNAL = 1.2; EXPRESSED IN PLACENTA, SIGNAL = 1.5; EXPRESSED IN BONE MARROW, SIGNAL = 0.61; EXPRESSED IN HEART, SIGNAL = 1.4; EXPRESSED IN ADULT LIVER, SIGNAL = 0.9; EST_HUMAN HIT: BF851591.1, EVALUE 1.00e-52; EST_HUMAN HIT: BF851591.1, EVALUE 1.00e-52; SWISSPROT HIT: P04258, EVALUE 1.00e-04
aatccggagggcagtatctccccatcctctaccaaatacaactgagtgcctcctggggacagcgcagtggtcaggacacatggtttggagctacagtgctcagggattaaatcctagctgggctgctgccaagccaggggccctcagctgtctcacctgtcagtggggggcagcaccagcctctcagttaagaggatggaacgtgcacagtaccagcacccccaagctctcagggcagccatggcattggcaggggccagaggagcacagaggataagctctcccccaaaggcagagttggggagcttccgggaggaaaagccagctaagtgaggcctaaaggagccagccaggcactggtacgaggccccaggcatactccagggatggagggcacggaagcaatggaagctatgtccaatgaggatgcagggccaggtcagggagggcccgtaagccttgctgcaggctggattctgtccagagggctctgagcagggaagggacagagctgcacttttatgtggggaatgggctggcgagaggaagacaggaggcagacac

SEQ ID NO: 4669 - DNA, 549 bp, Homo sapiens
  MAP TO AC005222.1; EXPRESSED IN BRAIN, SIGNAL = 4.8; EXPRESSED IN BONE MARROW, SIGNAL = 6.6; EXPRESSED IN PLACENTA, SIGNAL = 3.1; EXPRESSED IN HEART, SIGNAL = 4.9; EXPRESSED IN ADULT LIVER, SIGNAL = 3.8; EXPRESSED IN FETAL LIVER, SIGNAL = 3.7; EST_HUMAN HIT: N39489.1, EVALUE 0.00e+00; NT HIT: gi13648926, EVALUE 1.00e-94; SWISSPROT HIT: P57737, EVALUE 9.00e-30; EST_HUMAN HIT: N39489.1, EVALUE 0.00e+00
tgtgcctcttctccctcatctgtaaaatggggataaaagtggcaggccccatggcaggtggctgggaggatcacaggacaggcgggcaggagcctgacacaaggtttgtgctccctgtgttgtgtgggtagctaaggccctccgcgtctttgccacaggcagggaactgaggggcagccctggtggggtggggccctcacctcaagcacagccacctgtcccccgctgctgagcagcggcacggccacacgcagcttgttggcacagaagccgtcactctcaccaggtgtggtgaggttgagccccttgaggttggtgatgtggctgtctcggtgcaggacagtgccctgagcatggcggaacttggaactggggcctggcaggtggcagggacatggaaccacgtgtgaggatgccgtccccgcccgccctgcactctttgagtcccggctgcccactcccctcaccccaggtggatgtacagcatggacctaggcccaggcctttgctaatccagtggatgcaactcgcccaggaataatgtctgga

SEQ ID NO: 4670 - DNA, 543 bp, Homo sapiens
  MAP TO AC010972.2; EXPRESSED IN FETAL LIVER, SIGNAL = 1.1; EXPRESSED IN PLACENTA, SIGNAL = 0.95; EXPRESSED IN ADULT LIVER, SIGNAL = 1.2; SWISSPROT HIT: P10272, EVALUE 3.00e-28; EST_HUMAN HIT: BE295714.1, EVALUE 1.00e-104; EST_HUMAN HIT: BE295714.1, EVALUE 1.00e-104; NT HIT: X57147.1, EVALUE 1.00e-102
ggtttttccctacctctgccagctgctaatgttgctgttctcccctctccttcccatttgcatggcttttgcagtataagactcccacctcctagggtttttgtatggcatgcaataactccataatttccttggggtatttaatgggggttcccccagaggctaggaactccctctctttccatattgcagcatgggcatgtaggattagatgagcatacttgcaatctgtatacacatttattctttttttcttttccagttctaagtctcgggtaggtgccactagttctcttaactgggcactggttcctgggggaagaggcttactttcaagtatggttacatcactaactatggtgtaacctgcccctcatatcccattttccacagatgaacttccatcggtatataggttaagctcaggattagttaaggggacttctaagagatcatcttgggcagcataagtctggactacaatttgttggcagtcatgctcgattggcttcccatcctctgggagaaaagtggcagggatga

SEQ ID NO: 4671 - DNA, 594 bp, Homo sapiens
  MAP TO AL049779.5; EXPRESSED IN ADULT LIVER, SIGNAL = 0.76; EXPRESSED IN BRAIN, SIGNAL = 0.46; EXPRESSED IN BONE MARROW, SIGNAL = 0.56; EST_HUMAN HIT: AV722479.1, EVALUE 1.00e-100; SWISSPROT HIT: P43130, EVALUE 2.60e+00; EST_HUMAN HIT: AV722479.1, EVALUE 1.00e-100; NT HIT: gi14784238, EVALUE 1.00e-100
cacaaatggatgtggctctgttcactccacaaagccaccatgggaggacaattccgcagataacaggcttcaaagttcatctgctggcccaccctgacctcctctagaattgcaggaagaagctcaactccatagacacatccaggtgcaaacaaatttacacaatgggatgttgagggtcaccttctgggtatagatgtcatctccataaattttctttacagggaagggtcaattatggtgaggccattattgcagaggggttcagaatgataaaaggatcttgtagagtttcaggcacattatggaaaacagaacaataaagatggggatgtgaagacactgaaattgatggaggagccaagaggtacgggagggagtgtacctggggcggaattctcttgaacgcttccaggcagttgaggaggatggtgtccccgtcacttttggctgccatgcctgactcactgacacatttgagcagttgctggatctcactgtacttctctttctccaccaactggcgggcagctctgcagtaggtcatggcagcatccagctggaagtcctagaacagaacacaacatgatgggc

SEQ ID NO: 4672 - DNA, 593 bp, Homo sapiens
  MAP TO AL031600.4; EXPRESSED IN BONE MARROW, SIGNAL = 0.59; EXPRESSED IN PLACENTA, SIGNAL = 1.3; EXPRESSED IN ADULT LIVER, SIGNAL = 1.1; EXPRESSED IN HEART, SIGNAL = 1.3; SWISSPROT HIT: P01076, EVALUE 5.10e-01
cggctgaggaattgagttttacattgtctacaactatagctgatttcagtggacacagatacatggtgaacggccgctgtatcggatggcacaggccgagagggttagggtctcctcctcggccctctgggcggcccccctgaagcctgggcctggtggtacctgcattctggccacctccaggtccaccctccggctgctgtcctcttggttcttctgcagggcgccgcaggccacctcccggccctgctcctcctgctgcagcaagtcggtcagcttggccagtctagagaagtcggctgtggtcacaccagcccagctggccggagggcccagcagggtgaggctgacccacaggctggccaggcaggaggtgtacgacccccgccccctgccccaccagaaaacagaggaatgggaaacacagcaccggtggcagggaagggctgctgcgagtctcttccccacagagggtccgcagcgggcccaggcttcccagcacgcttggcaccgagggcggtgccccgccgggttactggggacacacggcagggggacccgtgtcttggctcagccagggactctcaaatgac

SEQ ID NO: 4673 - DNA, 532 bp, Homo sapiens
  MAP TO AF187320.1; EXPRESSED IN PLACENTA, SIGNAL = 2.9; EXPRESSED IN HEART, SIGNAL = 1.7; EXPRESSED IN ADULT LIVER, SIGNAL = 1.1; EXPRESSED IN BRAIN, SIGNAL = 1.7; EST_HUMAN HIT: AV706933.1, EVALUE 0.00e+00; SWISSPROT HIT: P02786, EVALUE 2.00e-22; EST_HUMAN HIT: AV706933.1, EVALUE 0.00e+00; NT HIT: AF187320.1, EVALUE 0.00e+00
gggcgttagcagtaagcaagaagatagattacattgactttgaggctttattatttgttgctaaaagtactttgtcaatagtgccttgaatttgagaatttccatatgccatgaaaacaggagtcacattgtagagccactcagatttttgaggcttcaagttggtaaactaaggttgggctgcagccttataccaaacctgaatcttacagagaagttttgaggaagtatgtgatggagtgaattgctcttttgttttcctaggctcatctggggacaggtgacccttacacacctggattcccttccttcaatcacactcagtttccaccatctcggtcatcaggattgcctaatatacctgtccagacaatctccagagctgctgcagaaaagctgtttgggtaagtttttatttgaaagcggtcttgcatagtgaggttttatgattagggaagaacggtaatatgttgattaaaatgttaaacatgatgataattttccacatttgggaatttggaggatggttagc

SEQ ID NO: 4674 - DNA, 504 bp, Homo sapiens
  MAP TO AC012055.8; EXPRESSED IN HEART, SIGNAL = 3.2; EXPRESSED IN ADULT LIVER, SIGNAL = 2.2; EXPRESSED IN BRAIN, SIGNAL = 2.5; EXPRESSED IN LUNG, SIGNAL = 2.4; EXPRESSED IN FETAL LIVER, SIGNAL = 4.4; EXPRESSED IN BONE MARROW, SIGNAL = 3.8; EXPRESSED IN PLACENTA, SIGNAL = 2.8; EST_HUMAN HIT: BF794491.1, EVALUE 1.00e-05; EST_HUMAN HIT: BF794491.1, EVALUE 1.00e-05; NT HIT: AL163227.2, EVALUE 2.00e-21
tactggggcactccctattgaagctgtgagaagggggccactgccatccatacccaagaatgatagattcactggcagcttgcaccttgtgccttaaaaaagcactgcactcactgcagcccatgagagtagtcacggggcttgcaccctgaaaagccacagagatggagctgcccaattccttgacagtccacccccttgcaccagtgttacctggatgcaggatatggagtcaaagaatattattttggactttcacaatttaatgactgccctgctgggtttcaaacttgcatgggacctgtagcctctttcttttggctgatttctcccatttgaaaaaggagtatttacctaatgcctatattcccattgtatcttgagagtgactaatttggtttgattttccaggctcatagattttccttatctcagatctgactttggacttttgagttagtgctggactgagttaagactttgggggaattattgggaaggcat

SEQ ID NO: 4675 - DNA, 519 bp, Homo sapiens
  MAP TO AL109839.11; EXPRESSED IN FETAL LIVER, SIGNAL = 0.85; EXPRESSED IN BONE MARROW, SIGNAL = 0.74; EXPRESSED IN ADULT LIVER, SIGNAL =   1; EXPRESSED IN BRAIN, SIGNAL = 0.92; NT HIT: gi14771037, EVALUE 2.00e-92; EST_HUMAN HIT: BF348218.1, EVALUE 1.00e-121; EST_HUMAN HIT: BF348218.1, EVALUE 1.00e-121
ttcttgacccagctggaaacctccctgcaatcctgccttcttttccagaatgaccagagctctcatggactcgcttgggcctgagtggcgcctgaagctgccctcaatccccttggtgcctgtttcagctcagaagaggtggaattccttgccttcggagaaccacaaagagatggctaaaagcaaatccaaagaaaccacagctacaaagaacagaggtgagctgtgactccctgcccagagtcttgcaatctcccactatccattttctttagagtagtcctgcaaaaattggcattgtttagctgagttataaaaataatcttaggaacaaagtataaaacaaaatacaagtcttcacctcttagagactgttttctcagctgtatagtgagggtgatgataaagtcttcctcacaaccatgaggactgaatgacataagacatgtaaaactcccagcctggcacataggcatgcagtgtgagttcccttctctttcctctggtagcacttgggat

SEQ ID NO: 4676 - DNA, 570 bp, Homo sapiens
  MAP TO AC012313.5; EXPRESSED IN BONE MARROW, SIGNAL = 3.6; EXPRESSED IN ADULT LIVER, SIGNAL = 3.6; EXPRESSED IN HEART, SIGNAL = 2.9; EXPRESSED IN BRAIN, SIGNAL = 3.4; EXPRESSED IN LUNG, SIGNAL = 4.7; NT HIT: gi14766390, EVALUE 2.10e+00; SWISSPROT HIT: P54259, EVALUE 9.50e-02; EST_HUMAN HIT: AI811355.1, EVALUE 1.30e-02; EST_HUMAN HIT: AI811355.1, EVALUE 1.30e-02
cagcaggttacctacgcctcatctgcccctcctgctgagaatgatctcaaggtgtgtgtttgttaagtgcagaggttctccttcagatcacctgaccagtgctgctgccagcactcatccccctctactacaccatcctgctcagagggcaggtttggcagcatcacagggacctgagtgactttatcgaggaatgaactccctgattgggggtcagccctccttgctgcctgagtcccatcatctggggctttgctgggttgggaaaaataatcctgagggacaagctgtggcaagtccaggggcaggaaggcggcagctgtgaggagccacagctagagatggtgctggctggaggtgaggacactgggaagtgcagcctacccaccctgcctcactttctgactgtgccatggggctgtggagggagcctggaaggacttcttagcctcgaaacacatctcaaccagcaatgttgctgctgaagctccccagtggagttgttagaggagccgggagaggaaaagaccttgctacccacacttgggaaccaagcgatccaggtagaag

SEQ ID NO: 4677 - DNA, 591 bp, Homo sapiens
  MAP TO AC006479.2; EXPRESSED IN BONE MARROW, SIGNAL = 9.4; EXPRESSED IN PLACENTA, SIGNAL =  10; EXPRESSED IN ADULT LIVER, SIGNAL =  11; EXPRESSED IN BRAIN, SIGNAL =  11; EXPRESSED IN LUNG, SIGNAL = 7.3; EST_HUMAN HIT: AA953373.1, EVALUE 0.00e+00; NT HIT: AF334780.1, EVALUE 3.60e-02; SWISSPROT HIT: P15265, EVALUE 1.90e+00; EST_HUMAN HIT: AA953373.1, EVALUE 0.00e+00
aacccatgtgttctgccttcaggtagaaaatgtcagaatcatagggaagactaagctgaaaaaagaatttggagttccaaaggaattctgtgccacctgccgtccggcaattccctttgccaggtaatggcatgacagtaaagacgcactctgttctgaataagcagagaaccggcttggcctaggacttacgttgaggtgggtaatgttcgaaaagacccatttgctagggcatctcagggaaggcacagaagcctttgcaggcgaggctgcagagagaagaaaacgcacgggagacagtcctgattccaaggggttacaattggttggggaggcaaggcagccacaaagaaagcacagcatgtttgggccaggtgggtgcttccttaggacagcactgcctgtttgggaaacagttgtagaaacagatgggacaatccttgtccatcgagatggggtcagagtgactgcacgaaaatatggctaccccgagttaccatggctaccaacacttgccctccttccatgcctaccaggcagggtggaggagcttgttctttctgcagcctgacccaggagaggaggtaaagc

SEQ ID NO: 4678 - DNA, 598 bp, Homo sapiens
  MAP TO AC008149.14; EXPRESSED IN HEART, SIGNAL = 6.7; EXPRESSED IN ADULT LIVER, SIGNAL = 2.3; EXPRESSED IN LUNG, SIGNAL = 1.5; EXPRESSED IN FETAL LIVER, SIGNAL = 3.7; EXPRESSED IN BRAIN, SIGNAL = 2.8; EXPRESSED IN BONE MARROW, SIGNAL = 2.1; EXPRESSED IN PLACENTA, SIGNAL = 2.5; EST_HUMAN HIT: BI055084.1, EVALUE 0.00e+00; SWISSPROT HIT: P23893, EVALUE 4.40e+00; EST_HUMAN HIT: BI055084.1, EVALUE 0.00e+00
tcagaaactctgggagtggggccctgcaatctttattttaactcaccctctaggagattattttgcatgctaactttgagaaccattggtctacagtagtgactgaggactgaagaaacgagcggatgcacgtatcccaactcccagagatcctgataacgtgtcgaatcactgtagacatgaaccatcatttcctgttgggagtgttgggctggaaaaggtatctaagacaaggaatcccaaagaacccccagccaatagtgctccattgctttcctaggaggttgccaaggcctgcaccaatcaggtggcagaattcccagtaaggagagaaatgagaggccacttattattcacaaatacctactgaactctacagaagctctgtgttagattctaggattagagtagtataacaatccctactgccatggagtttactgtaaccaaacaatttctttctattctattaattttagaattctgctgctctaatcttaagactttcaggaaatgaggtgtttttatctctccaccaaaagattagtattcctaattttaaactttcctaatacaacatttgctcattgctttttgc

SEQ ID NO: 4679 - DNA, 581 bp, Homo sapiens
  MAP TO AC016613.5; EXPRESSED IN BRAIN, SIGNAL = 0.8; EXPRESSED IN BONE MARROW, SIGNAL = 0.69; EXPRESSED IN ADULT LIVER, SIGNAL = 0.59; SWISSPROT HIT: Q09457, EVALUE 2.50e+00; EST_HUMAN HIT: AW854371.1, EVALUE 7.00e-60; EST_HUMAN HIT: AW854371.1, EVALUE 7.00e-60; NT HIT: AF240786.1, EVALUE 4.00e-57
agatgcctgccatatcaagggctgctgagatacattcacatcttaacaggcagctgctgctggttctgctactgatgtgccatccacagtgccggtttccaaggaaaatggagcgtaggaagaagtgccgtgcctacctgcacctcggtctccattgccagcagacagtgcatatttgatttacttaattgagtggcagagctatacagagagaagtcagtgtagcaggatgagaataagctgcagcaggctgggtgcagaaaaccagaatcttcccaggcatgcagctggctttccgctcaccggctcagcaccatcttgcctgcttgcgcaacctccactctccactcttgaagtaatgaggaccggaattttagctccagatcgactgcaagaacaaaccagcaatcccaagaggccccacagaccctctgaaggaagcggacttctcctgcaggaccggaagagacaccccaaatactgtgagtgccccagctgcggaagtgggaaagggagaccctcctctcccaagcacacacctccactggagaagctgaaggtctgtttgcgggagaagtttc

SEQ ID NO: 4680 - DNA, 563 bp, Homo sapiens
  MAP TO AC004107.1; EXPRESSED IN ADULT LIVER, SIGNAL = 0.53; EXPRESSED IN BRAIN, SIGNAL = 0.41; SWISSPROT HIT: P08547, EVALUE 3.00e-06; EST_HUMAN HIT: N50906.1, EVALUE 2.00e-07; NT HIT: AF044083.1, EVALUE 4.00e-05; EST_HUMAN HIT: N50906.1, EVALUE 2.00e-07
ggaacctccgtagtgttttcgatagcagctgtactaatttaccttctcaacaacagtgtgcaaggattttttattctccacattctctccaacacctttgtctttctgatagtaaccatttttaactggtatgaggtggcatctcattgtggatttaatttgcattatcttgatatttagtgaggttgagctttttatattttttcacattcccgttggccatttgtatatcttcttttgatatatgtctatgcaggtcatttgcctatttttaaatcatttaggaaggaaaataaactctaatataaacacctcttttctgataagtcacacatttttattttacttaaacaaacaatataagcatcactttattaattaaaaaatgaaaggaaagagtcttagccctgagagaagttatgcaaagaaaaatgtaagaagaagttatgcaaagaaaaatgtaactttcagttaggaattcaaatttttgaggtcaaacctgatggctcatggccacttggttttgcatttggacatttgtggccccagaagtgtaagggtga

SEQ ID NO: 4681 - DNA, 507 bp, Homo sapiens
  MAP TO AC012000.3; EXPRESSED IN HELA, SIGNAL =  11; EXPRESSED IN FETAL LIVER, SIGNAL =  11; EXPRESSED IN BONE MARROW, SIGNAL = 6.6; EXPRESSED IN ADULT LIVER, SIGNAL = 6.2; EXPRESSED IN LUNG, SIGNAL =  11; EST_HUMAN HIT: BI488505.1, EVALUE 0.00e+00; NT HIT: AL163282.2, EVALUE 2.00e-92; SWISSPROT HIT: Q15427, EVALUE 4.10e-01; EST_HUMAN HIT: BI488505.1, EVALUE 0.00e+00
taccattctggggtctggaggatagtggctttcttctcacagctccactaggcagtgccccactagggactctgtgtggggactccaaccccacagttccattctgcactgctctagcagaggttctccatgagggccccgcccctgcagcaaacttctgcctgggcatccagtcatttccatacaacttctgaaatctaggcagaggtttccaaacctcaattcttgacttctgtgcacccgcaggctcaacaccaggtggaagttgccaaggtttggggcttccaccctctgaaggcacagcctgagctgtacattggctcctttcagccatgactggagtggctgggacacagggcactaagtccctaagctgcacacagcacagggatcctgggcccagcccacgaaacctcttttttctcctgggcctctggccctgtgatgggaggggctgacatgaaaagtctctgacatggcctggagacattttccccatggtctcag

SEQ ID NO: 4682 - DNA, 523 bp, Homo sapiens
  MAP TO AC009509.7; EXPRESSED IN FETAL LIVER, SIGNAL = 1.4; EXPRESSED IN HELA, SIGNAL = 1.8; EXPRESSED IN BRAIN, SIGNAL = 1.4; EXPRESSED IN BONE MARROW, SIGNAL = 0.58; EXPRESSED IN PLACENTA, SIGNAL = 1.6; EXPRESSED IN ADULT LIVER, SIGNAL = 2.1; EST_HUMAN HIT: BE671905.1, EVALUE 1.00e-113; NT HIT: gi14764108, EVALUE 1.00e-113; SWISSPROT HIT: P16519, EVALUE 6.30e+00; EST_HUMAN HIT: BE671905.1, EVALUE 1.00e-113
atcatcttcatgaggccagcacacctcacaccaaagcccaccaggctctttttctttctataccccatgattggcctcctagttacgaactggaccatggatatttaccactaactacatggttttaatttttgcaccatgtaactctgacttggagagatttatgtgattgaattctcttttttctgtttcttttgattgttccttactgtgactagactggtttaccgccttcggctttggtatttttatctaacataaatcccattgctctctctgtgattttgtttaacttaggttctaaggctctggaatattccaatgggatttttgattgccaatctcccacctctccattcatgggaagtttgcgagctctgcaccttgtggaagacctgcgtggattgttagagatgatggaaacagatgagaaagaaggcttgagatgccagatcccagattcaacagcagaaacgcttgttgaatggcttcagagtcaaatggtagggtctgcctgttccaa

SEQ ID NO: 4683 - DNA, 598 bp, Homo sapiens
  MAP TO AL049824.4; EXPRESSED IN ADULT LIVER, SIGNAL = 1.3; EXPRESSED IN BONE MARROW, SIGNAL = 1.7; SWISSPROT HIT: Q9UNP9, EVALUE 4.00e-07; EST_HUMAN HIT: BG756744.1, EVALUE 1.00e-52; EST_HUMAN HIT: BG756744.1, EVALUE 1.00e-52; NT HIT: gi16168526, EVALUE 3.00e-52
cctgagctcatctttcccagttttcttgatattccattcctggggtctccatcaagggctgaaatcagcaaaggctacacctttgctttcggcatagctattttccttagccctactgagagctggacttcagggcctacattctggatgggaactttccttacccctgggagttctcagtggggaattgtctggcatacaggccacatagcatcttccactttgctgaccaaagcagctacttttcagttcaagctgacagcttgaatgaacatttgtttgattctttcctttcagtttggtcagatgatgactggttgaagaagttttctgggaagacgcttgaagagaataaagaggaagaagggtcagagcctcccaaagcagagacccaggaggtgagaatgaagctcctgcttccagagcacaggccggcgctgtccacaggagacttttttttttaagttttaatggaaatttgccaatatgtatatcaaagtggagggaatgaataatgaattcttagtactttggtaaagtcaatattgagttcttagtactttggtaaagtcaatatcgagtgaattcaagggcgaaa

SEQ ID NO: 4684 - DNA, 521 bp, Homo sapiens
  MAP TO AC010345.4; EXPRESSED IN PLACENTA, SIGNAL =  12; EXPRESSED IN ADULT LIVER, SIGNAL =  14; EXPRESSED IN HEART, SIGNAL =  11; EXPRESSED IN FETAL LIVER, SIGNAL = 8.7; SWISSPROT HIT: P39188, EVALUE 4.00e-04; EST_HUMAN HIT: AA831912.1, EVALUE 2.00e-13; EST_HUMAN HIT: AA831912.1, EVALUE 2.00e-13; NT HIT: AF036405.1, EVALUE 2.00e-09
gaaacactacccgtatccccttaagttcataatatgtgctgcttgcagacctggccagtagcagaaagttggagacctcctatgatggtcaaaaatcaccttagcatacaccctgaatggcctttaataactcagccacatccagtagctctactgagttacttttgaggctgtacttattgtcctctagatggaatctttcttcttcatctctgcagagtttctaaaagagtgtcatgtggtgtggctgtcccagatggctggctttgcaacctagaaggctttccaggaagaggcggaagatcatatggatcgtatgggggatctgggctctatggagatggcctaccttgtctgtgcctgggatagcccctgggctgcacccctagcttgggactttctatttcccattttaaaatatgaaaactggctgggtgcagtggttcatgcctataatcccaacactttgggaggcaaaagcaggaggatcatgtgcgtaaaggagtttgagatcagcctgg

SEQ ID NO: 4685 - DNA, 523 bp, Homo sapiens
  MAP TO AC002096.1; EXPRESSED IN HEART, SIGNAL = 1.1; EXPRESSED IN ADULT LIVER, SIGNAL =   1; EXPRESSED IN LUNG, SIGNAL = 0.42; EXPRESSED IN FETAL LIVER, SIGNAL = 0.8; SWISSPROT HIT: P57783, EVALUE 1.40e-01; EST_HUMAN HIT: AI201286.1, EVALUE 0.00e+00; EST_HUMAN HIT: AI201286.1, EVALUE 0.00e+00; NT HIT: gi16161010, EVALUE 0.00e+00
gtgactctgctgtgcctgaggtgtggcagctgcttgccacggcatggcaagtcccgggagcatgggttcacctggccccctgccgtcctgcagataccctcatgatgtggtgaaccacctcagctgtgacgaggcccggaaccactacggcggcgtggtcagcctcatccccctcatcctagacttaatgaaagaatggatcgcccactccgagaagttgccgcgcaaggtgctgcagcacgtgagtgagccccaggcgcaccaggagagcaccaggggagccgctcgtcctgcccaggccatagggacccagcccagggccactaaacacaagtgtagacagctcacaaaagccagcctcaaacccaggggatgttcaaaaccaccctggaggcctcctggtgggaaattgtaactcagagccaggagctccgtcggcggagagctttgctgtttaatttggattttactggttggtccttttttcactggtacccgtggaccctgccacttactaacccca

SEQ ID NO: 4686 - DNA, 546 bp, Homo sapiens
  MAP TO AC016572.4; EXPRESSED IN LUNG, SIGNAL = 1.8; EXPRESSED IN FETAL LIVER, SIGNAL =   1; EXPRESSED IN ADULT LIVER, SIGNAL = 0.93; SWISSPROT HIT: P27763, EVALUE 6.70e+00; EST_HUMAN HIT: H15262.1, EVALUE 0.00e+00; EST_HUMAN HIT: H15262.1, EVALUE 0.00e+00
gcaaattgaaagtcgttccgggctagttgcagtctgttaataggaaggggttttcggccagagcaggccacggctcctctcttatgagttgtctcggctcttgaaaagtggctcctgagtctcggaggcagagacagcaagaatgtagggccggttcttaactgtttgcattcacttttctaggccttggcgataaagcatgaacaagaagcacggaagagtgcccagaggttgttggtcgtatgtagtttggaaggagtgggtggcgttctatgtttgacgcttttgactgatgtaaccaggctattagactcatgctgcgtgttgaaaactggttagaaagggcttgtccattcagcctttagaacttttaagaaattcaggagtttctgggtctttatatggaagagttgtgttttgggggtaattccttacttgtgtcatcagggacacatgacttagctaccaaatcagtcttgattggattatagtgacttactcctggaactccaggactcagttctgtcttgcctcaatccattctcc

SEQ ID NO: 4687 - DNA, 589 bp, Homo sapiens
  MAP TO AC008990.5; EXPRESSED IN ADULT LIVER, SIGNAL = 0.65; EXPRESSED IN LUNG, SIGNAL = 1.1; EXPRESSED IN BRAIN, SIGNAL = 0.5; EXPRESSED IN PLACENTA, SIGNAL = 0.67; SWISSPROT HIT: P10272, EVALUE 5.00e-11; EST_HUMAN HIT: AA883982.1, EVALUE 4.00e-06; NT HIT: K02918.1, EVALUE 3.60e-02; EST_HUMAN HIT: AA883982.1, EVALUE 4.00e-06
caagaagttaggtgggcagcaatgagcaaggttttacctgaagaaataactctagcaatgcctctctttatagagccccctttgccagaggtacccaattactcttcaattgaaaaagcttggtttggccaggaaacaggaaaatatattaaaggtggatggtggctgttctctgacgggaggctagctgtcccagagacaatagccccaaggtttgtgaagcagatccatcaaggaacacatgctggaagcacggccctagagactttgataggtcaacacttctatgtgccacggctctctgccatcacccgtgctgtttgcgaacaatgtctatcctgcgaacaatatctaatccaaaacaaggacctactcgacccccagaaattcaggaaatgggagctgtgccttgtgagaacctgcttgtagaccttaccgagttgccttgagcaggaggttactggtatatgctagtgtttgtttcaccttctcggggtgagttgaggccttccccaccagaactgaaaaggcacaagaggtgacaaaggtgctactaaaagacatcatatcaaggtttgggttgccttta

SEQ ID NO: 4688 - DNA, 593 bp, Homo sapiens
  MAP TO AC011311.11; EXPRESSED IN LUNG, SIGNAL = 0.69; EXPRESSED IN FETAL LIVER, SIGNAL = 0.57; EXPRESSED IN PLACENTA, SIGNAL = 0.76; EXPRESSED IN ADULT LIVER, SIGNAL = 0.77; EXPRESSED IN HEART, SIGNAL = 1.1; SWISSPROT HIT: P09759, EVALUE 2.60e+00
atgttacagccctgggagtgatggctcttcttcagccaaaagaaatgcccctgccccatgctgctccgcccctgttccaagacggaactccagaagcttccacagctgcatcagactcttccctcatagtgcctaccagatgactgtgtctctctcaggctcccacctcccctccacctccaggtctcctgggagggcctctgatgacagaggcaagtcacaggtctgcaccctgactttgggatggtccaggaaatctagcttaagcatttctttgatctgtgtcagcttctctagttggagggttggaaggtgtattgccccttgccccctcctcctgaggttcgtgacctgtgagaagctaaaccactaccactggagaaggctaaaggtgagtggcatcctaaagagagctggggtggccacgtgggggacggtccagaaagcacagaggagaggctcaggaggaaaggaagagtggagaacaggactaaaaacagcacgtaaaaagcactagatggtgatgacgtggtagagagcagaggccagaggacttggagcctgaacttgagtgctgacttccaagaacaggc

SEQ ID NO: 4689 - DNA, 565 bp, Homo sapiens
  MAP TO AJ007973.1; EXPRESSED IN ADULT LIVER, SIGNAL = 0.66; EXPRESSED IN LUNG, SIGNAL = 1.2; EXPRESSED IN HELA, SIGNAL = 0.53; EXPRESSED IN BRAIN, SIGNAL = 0.69; EXPRESSED IN BONE MARROW, SIGNAL = 0.86; EST_HUMAN HIT: AA782547.1, EVALUE 7.90e-01; EST_HUMAN HIT: AA782547.1, EVALUE 7.90e-01; SWISSPROT HIT: Q85435, EVALUE 3.10e+00; NT HIT: AJ007973.1, EVALUE 0.00e+00
atgtctggggttttgtctggtctacatgtaggcatgagtaattttatgttatttatgtgtttattcatgtgtgcatgagtaaatagtccatttcctaaatctcaggacatgaaagaattagaggaacctttgtaccgtgattccagtactacagatgtagagctatggggtagcagtactggagatcaaactgatgacactggcaatatcaacaagaacattaatcatggtaaactttacaggttacagcatatctttgtagatatctactctgagccttacagtaaccccagtgttgggttgttatgttactatcttgatgatgatgatttgtactaagagggaaattactttcagcacagtctaggatgtctatctctgggttgacataggcatgaagggctacttaaaattataaacaataatagaccacatttttttttaagagttgggcatatagttctgcatagtgacccaaggtttaacgttataaccttggtgacaaatggatttgaccagaaatttttctctttgatccaactggtcatcctggggagagaaaaca

SEQ ID NO: 4690 - DNA, 525 bp, Homo sapiens
  MAP TO AC010203.13; EXPRESSED IN BRAIN, SIGNAL = 0.89; EXPRESSED IN PLACENTA, SIGNAL = 0.91; EXPRESSED IN HEART, SIGNAL = 1.3; EXPRESSED IN ADULT LIVER, SIGNAL = 1.1; EXPRESSED IN FETAL LIVER, SIGNAL = 0.81; EXPRESSED IN LUNG, SIGNAL = 1.3; NT HIT: gi11968056, EVALUE 2.00e-55; EST_HUMAN HIT: AW070869.1, EVALUE 0.00e+00; EST_HUMAN HIT: AW070869.1, EVALUE 0.00e+00; SWISSPROT HIT: P45890, EVALUE 1.00e-02
tcctcccacatttatcctgcaaggggagaactcaaatttaattatcgcacatatcattctgtttaatctttagaaacaacatgaaaattaaatacaactcaccgaataattgcttcttttttctttttacttctacaataaggaactatatgtgtaaaggaatatccactatcaacaatgatacagcataattcggaaggattatctcggaaatacctatgtgcactgagagccccagctatttaaaaaaagataaaaaagtgaacaaaaatataacactaatttaaagcaattaaaaaggtaggaaacaaagacaagcaccaagacaaaaatgttccctttattacaagaaaaatgttaatttataatactattcataactgtcaaaagatctttattgtgtttatactttaaaacaccacacttacatggtaaacataataaaaatttggtatccgtttttaaaggtaaatattcactccatagtttaaaagaattactacaacagcagctcatttttactga

SEQ ID NO: 4691 - DNA, 527 bp, Homo sapiens
  MAP TO AC023905.4; EXPRESSED IN BONE MARROW, SIGNAL = 1.2; EXPRESSED IN PLACENTA, SIGNAL = 1.1; EXPRESSED IN ADULT LIVER, SIGNAL = 1.1; EXPRESSED IN BRAIN, SIGNAL = 1.1; SWISSPROT HIT: O13730, EVALUE 6.40e+00
tgggaaattttgtcagagggatatagtggatatttgaaacatatgtttacatctgtctttgaaaccagccaacctggatttgggtccatctttgcctcttggctaatggccccatgaacagaagcaggcagaactctgcaggtttgtcatgaggatttgttgtggaagcatatgtgcatagcagcacatagtaggtagtttgtaactactaggacttcccttcttcctgttttcttcctcaccttctcctttgggtgttctcttccttcttcctttcttgcatcctaggagcccagagcctgtcagttccacactcaccactctgcattttaggggtccagctatgtggagagagaaatccctctctttttctgtgacagccccctgaacagtcatctctgataacgccatggtttcattcagtcaaaatggacatatccccttgataagggatactacccataaggccactgatggagatattttggacgagttttattattccctgagtcacatcaaaaggggga

SEQ ID NO: 4692 - DNA, 538 bp, Homo sapiens
  MAP TO AC006138.1; EXPRESSED IN BRAIN, SIGNAL = 0.82; EXPRESSED IN PLACENTA, SIGNAL = 0.64; EXPRESSED IN ADULT LIVER, SIGNAL = 0.93; EXPRESSED IN FETAL LIVER, SIGNAL = 0.41; NT HIT: gi14752388, EVALUE 1.00e-107; EST_HUMAN HIT: BI115573.1, EVALUE 1.00e-107; EST_HUMAN HIT: BI115573.1, EVALUE 1.00e-107
taccccctaaactcatccccctagatgaggtaagtcaatgttctgtgatgatggaagttgtgatggtcattgaattcggtgcatctttcatatgagaatgtctctgttctgtcaatcctgattttttttgttcttctttcaggagtgttccatggatgagactccgtatgttgagactctggaacctggggggtcaggtggctcacctgatggggcaggaggctccaagttgcctccagttctggccaatcttatgggaagcatgggtgctggaaagggcccccaaggccctggaggaggaggcattaatgtccaagagatcctcacctccatcatggtacgcaccctccttccccttttccaccttctgtggagcctccttaagctcgctctcctcactgtctcccattcgccttaccccagttctccacatctacccacttacccctaatctttggcgctatctttcgccatggttgttaccctttctgtctgttgactttgccttcttacatcctcacagggtagcccaaacagt

SEQ ID NO: 4693 - DNA, 537 bp, Homo sapiens
  MAP TO AD001502.1; EXPRESSED IN BRAIN, SIGNAL = 6.8; EXPRESSED IN BONE MARROW, SIGNAL = 7.7; EXPRESSED IN PLACENTA, SIGNAL = 9.1; EXPRESSED IN ADULT LIVER, SIGNAL =   6; EST_HUMAN HIT: BG695960.1, EVALUE 0.00e+00; SWISSPROT HIT: Q05858, EVALUE 1.70e+00; NT HIT: gi14767332, EVALUE 6.00e-19; EST_HUMAN HIT: BG695960.1, EVALUE 0.00e+00
ctactcctcctcctgccctcaagacctctgccaactcttcaagtgttacttgggaggtgagggtaggagaccaagaaaagaagtgccaggacgtaacccagcgggtccatggtagatgtctcaccttggaagttacagctgccacctcctgccatcctgcacccggctgagaaagccattgaatggaggagtgaaagagaatttcagattgcccagacccgggagcaaggccaagggggaccaagggccctgcagggtaacttgaggacagagactcacctgatcgtctctgcctgcacgtttctgcagtgatgacgcgtccgcaccctgaaaggaagaaggggccacagttcgtgcctccgcagtcgtgcgggcattgccgggctttcagagccccagtttctccctcaccccacccctttccacgtgctacctatagagaaggcagtgagcctggaggagctgatggcccagatagatagaagacagatatccacactcagcattgggagccagggagagaaccaggtttggcaa

SEQ ID NO: 4694 - DNA, 567 bp, Homo sapiens
  MAP TO AC008625.4; EXPRESSED IN LUNG, SIGNAL = 1.1; EXPRESSED IN BONE MARROW, SIGNAL =   1; EXPRESSED IN ADULT LIVER, SIGNAL = 0.74; EST_HUMAN HIT: BF846539.1, EVALUE 1.00e-125; SWISSPROT HIT: P33174, EVALUE 1.10e-02; NT HIT: gi13646431, EVALUE 2.00e-49; EST_HUMAN HIT: BF846539.1, EVALUE 1.00e-125
tgagatcccaggctcaattctgctatcaacttgctgtgtgattttaagcaaatcctttcctctttctgtgccatggtttcttttctggaactgaggcctttgcaggtctaaagctgtggggttctaaattgccaaagaggaatacagagttgcttccagaactctggaggaaattacaattagcagacacacaaggtaagggagaatcagggtaaccatcagaagcagcacaatgctggctctctttagagggcaattttgtctacctacttctgctaactgggccttattgaagcctggtctggtctgcaacttgtagtgtcgtttataacgtcgtagggtgttcacctgcagctggaacagatcaacctagggagaagaggagaaaaatgttatccatcacctgaccacccaggactcaccaagagcccactatgtgcctagcactacactaaggtaggggtgaggatggggagggcttcaaaagaggtcttagaaatggtctattgaggactagtaactggctaggagggcaaaaataacagtagaaaaacagttctggctggg

SEQ ID NO: 4695 - DNA, 553 bp, Homo sapiens
  MAP TO AC008719.5; EXPRESSED IN PLACENTA, SIGNAL = 0.7; EXPRESSED IN ADULT LIVER, SIGNAL = 0.71; EXPRESSED IN FETAL LIVER, SIGNAL = 0.51; SWISSPROT HIT: Q9Y2W7, EVALUE 6.00e-11; EST_HUMAN HIT: AI884645.1, EVALUE 3.00e-65; NT HIT: gi7657246, EVALUE 2.00e-65; EST_HUMAN HIT: AI884645.1, EVALUE 3.00e-65
acatgtttctctccaacgccgaagccccctccctgtgtggtgtttgacgcagaggctgacagggcagggaagtggggttcaagataggaaggccattggcagtgtgaccccagcccacagtcctagatcccaggtcgtgacaccactcttttgacagcccagattgttacctaacaagaatgactcccaagctcaaccattccaatgccatctcctctggttccagataagattgaagatgagctggagatgaccatggtttgccatcggcccgagggactggagcagctcgaggcccagaccaacttcaccaagagggagctgcaggtcctttatcgaggcttcaaaaatgtaagacccgtgcacgctctgaaggcctggggggggttcccacgtgaggctacactctccccaatgccaagggagctcataaggcgtttcccatatgtgaggctgtacaaggaaggccagctctataaagggggcatgagagggagatcacctggctagaaaggaaggctccaggcgaggatggagcaacctcaggagacag

SEQ ID NO: 4696 - DNA, 524 bp, Homo sapiens
  MAP TO AC008536.5; EXPRESSED IN PLACENTA, SIGNAL = 0.78; EXPRESSED IN HEART, SIGNAL = 1.3; EXPRESSED IN ADULT LIVER, SIGNAL = 0.7; EXPRESSED IN FETAL LIVER, SIGNAL = 0.6; EXPRESSED IN LUNG, SIGNAL = 0.44; SWISSPROT HIT: P29390, EVALUE 3.70e+00; EST_HUMAN HIT: BF102826.1, EVALUE 2.00e-81; NT HIT: gi8923935, EVALUE 1.00e-81; EST_HUMAN HIT: BF102826.1, EVALUE 2.00e-81
tggattttctgaaggggatgctgcaagccgagaagctggtgagaaggggtgccctgccccctcagcccccatcaccgctcactttggtccccaggacctgcccctccagtgacttatcttcccacatttctgcagacctcctcctcagagaaagcactggccaaccagttcctggcccctggccgtgtgccaaccacagccagagagcgagtgcccgccacaaagacggtgcatctgcagtcacgggcgcggtacaccagcgagatgcggagtgagctactaggcacggtagggctccttccctggtccctgggaatcccttggacaggaataggggttctatgcttgtaggcagccagaaccacaatactgtcagatacaggaaccctaagggggtccagcaatctcttccctgggtcatcacacaaggctgcccaacagaggggcattgtggctaaggctttgctagatgaataggaatttggtacaaggcaaaaatggaatgtgtctggttaagccccaga

SEQ ID NO: 4697 - DNA, 600 bp, Homo sapiens
  MAP TO AC000051.2; EXPRESSED IN ADULT LIVER, SIGNAL = 2.6; EXPRESSED IN LUNG, SIGNAL = 2.6; EXPRESSED IN BRAIN, SIGNAL = 0.6; EXPRESSED IN FETAL LIVER, SIGNAL = 2.5; EXPRESSED IN BONE MARROW, SIGNAL = 0.74; SWISSPROT HIT: P19440, EVALUE 2.00e-21; EST_HUMAN HIT: AI138829.1, EVALUE 0.00e+00; NT HIT: L20493.1, EVALUE 0.00e+00; EST_HUMAN HIT: AI138829.1, EVALUE 0.00e+00
tcctctctctagtgcctgggccatctggagcccctgtgccatgagggccaagccccctgctccagtgagacccagcaggccccaacctgctcttcctgatgacctggcccgaaatggcaccacctgggctgaggcctgtgaccacacaggtgtggttcaggtggcatctggagccctgctcaggcttcccctctcctcccacccccaggcagtgactgcagccctggagacccggcaccatcacacccagatcgcgtccaccttcatcgctgtggtgcaagccatcgtccgcacggctggtggctgggcagctgcctcggactccaggaaaggcggggagcctgccggctactgagtgctccaggaggacaaggctgacaagcaatccagggacaagatactcaccaggaccaggaaggggactctgggggactggcttcccctgtgagcagcagagcagcacaataaatgaggccactgtgccaggctccaggtggcctccctgccctgtctccccactctctgggcctcagtgtattgtgtgtgaaatggagccatctgactggggaggaacagagaggtgggattcggagatcttca

SEQ ID NO: 4698 - DNA, 549 bp, Homo sapiens
  MAP TO AC005793.1; EXPRESSED IN HEART, SIGNAL = 1.1; EXPRESSED IN ADULT LIVER, SIGNAL = 1.2; EXPRESSED IN FETAL LIVER, SIGNAL = 0.75; EXPRESSED IN BRAIN, SIGNAL = 1.1; EXPRESSED IN LUNG, SIGNAL = 2.2; EXPRESSED IN BONE MARROW, SIGNAL = 1.6; NT HIT: gi14766196, EVALUE 1.00e-116; EST_HUMAN HIT: BG984517.1, EVALUE 2.00e-90; SWISSPROT HIT: P48022, EVALUE 1.30e+00; EST_HUMAN HIT: BG984517.1, EVALUE 2.00e-90
aatcacgtgtaccgggagaggttccccaaggtgggcagcgcctggcggctggaccagcccctgcacttctttccacattgctgtccctccatggaactctgtcttcctggctatgtcccctttgccagtctgttcatttctgtctttccttccccttccgttgaaagatgtcgttcctcctgcaccagccctcccacccgatcgccccattgccccatctcctctctccccaaccatgcctctcctgccccattctgcgtgtgtcactccagccccgccctctgaccaggtcgccccgtctcgccccacccaggccacagcacagatggagggccgtctgcaggagttcctgacggcctacgcgcccggcgcccggctggcgctggctgatggcgtcttgggcttcatccaccaccagatcgtcgagctggcccgagactgcttggccaagtctggcgagaacctcgtcacctcccgctacttcctagagatgcaggagaagctggagcggcttctgcaggatgtgcgtggtttttcgcatgttgaggt

SEQ ID NO: 4699 - DNA, 580 bp, Homo sapiens
  MAP TO AC012384.16; EXPRESSED IN ADULT LIVER, SIGNAL = 1.4; EXPRESSED IN LUNG, SIGNAL = 2.3; EXPRESSED IN BRAIN, SIGNAL = 1.3; EXPRESSED IN BONE MARROW, SIGNAL = 1.4; SWISSPROT HIT: P06922, EVALUE 1.30e-01
tggtaagtgctgcattctcgacccttgaccattcgtggggtgtggtggacagctcttatttttgcctgcttggtatctctgcccctttctcccaacagagtcctttggggaaccctcttccccagctctctgcctataccgtccagggctccaactccacccctcaccttcaggggcaggcctggtaagagcctggccaatcagaatagtcttcatttctagccatgggattggttcagagacaggcacatgaccgaaagtgggccaatcagagctgatcaatgtcaacttgggccatttactagagcttatccccagagtattggctcgcttctctgcagcaaccctgagctgataaaatgacagcctggatctgagggcagccatcttgctgccatgcacttgagaaagaaatggatgcctaagaaagcagagcagagattgagaaggagttgccagacattgtctgaaaccctagatctagtcccgggacctacagtaacagacatggacagattccttttagtgacttaggctggtgtaagttgggtctctgtcacgggcagccataaacgtctta

SEQ ID NO: 4700 - DNA, 509 bp, Homo sapiens
  MAP TO AC007774.1; EXPRESSED IN PLACENTA, SIGNAL = 1.8; EXPRESSED IN HEART, SIGNAL = 1.2; EXPRESSED IN ADULT LIVER, SIGNAL = 1.8; EXPRESSED IN FETAL LIVER, SIGNAL = 1.1; EXPRESSED IN BRAIN, SIGNAL = 1.7; EXPRESSED IN HELA, SIGNAL = 1.3; EXPRESSED IN BONE MARROW, SIGNAL = 1.5; NT HIT: gi14736676, EVALUE 1.20e-01; EST_HUMAN HIT: BE894740.1, EVALUE 1.00e-119; EST_HUMAN HIT: BE894740.1, EVALUE 1.00e-119; SWISSPROT HIT: P40602, EVALUE 2.10e+00
attctgacaggtggacaggggttgaacaaagaggcctgtgattgaggatctgggcattcccataccaggccaggcatagctttgacactgacaaggatgtttcccacctgaaccctattctggtgacaggcaggtgactcccaggcccctctgacacctgaacctctgctcccccagaaagccagactcggaccccgaagcctcgccgctctctggccctgaacaagcctgagaagctggtggccccatccccagaccagaaaggaagtggcacaggggggaccactacccctccaaggtgccctgactcctgcggtcacccgaggcctgcatcatcctcacctccaggtgacagaaaaggaggacagtcccagctgacgctgttggatctggccgaggacaccatccactgtgacatctcaagtgggtctctttcctcactctgaacttagtctttcagtaagatgccactctgggggcacctgctgtgtcccagacacagtacccgt

SEQ ID NO: 4701 - DNA, 596 bp, Homo sapiens
  MAP TO AC005258.1; EXPRESSED IN ADULT LIVER, SIGNAL = 1.4; EXPRESSED IN LUNG, SIGNAL = 2.3; EXPRESSED IN FETAL LIVER, SIGNAL = 1.4; EXPRESSED IN BRAIN, SIGNAL = 1.6; EXPRESSED IN BONE MARROW, SIGNAL = 1.6; SWISSPROT HIT: P25152, EVALUE 1.30e-01; NT HIT: AB040965.1, EVALUE 2.00e-99; EST_HUMAN HIT: BE251262.1, EVALUE 3.00e-99; EST_HUMAN HIT: BE251262.1, EVALUE 3.00e-99
gctcaggtatcaggggacagccatgtctgtgaggactccggccccgctcagatgaggcagcccagcccgtcgcccagggtccggctgtgggagctgcagtagggatggctctgcctaggtgggccgaggccgtgcggggctttaggtgagggctgggatctaactcagcgcaggcttcaggtgggagaacgggcagctgggccctcctggtgactcacatcacgtgagacaacactgtgccctggcctttccagtctttcctgcagctgcgcaactggacggcctccctgctctgctccgcagccgacctccccgcccgtggcttcagcaaccagatcccgctggtggcgcgggggaactgcaccttctatgagaaagtgaggctggcccagggcagcggagcacgcgggctgctcatcgtcagcagggagaggctggtacggccctgtgcgtcccccgctgggccagctctcaggggcaggaggggggtgcaggaggcagagatggcagcagctggggctggtcttccgacttctcgctaaaggcagatccatctgtggggaggatctgggccgagtgtgaacatggggaggatc

SEQ ID NO: 4702 - DNA, 569 bp, Homo sapiens
  MAP TO AC024124.1; EXPRESSED IN BONE MARROW, SIGNAL = 2.6; EXPRESSED IN PLACENTA, SIGNAL = 4.2; EXPRESSED IN HEART, SIGNAL =   4; EXPRESSED IN ADULT LIVER, SIGNAL = 3.1; EXPRESSED IN FETAL LIVER, SIGNAL = 4.7; EXPRESSED IN LUNG, SIGNAL = 3.2; SWISSPROT HIT: P09815, EVALUE 2.50e-02; EST_HUMAN HIT: AW296325.1, EVALUE 8.00e-04; NT HIT: AF283320.1, EVALUE 0.00e+00; EST_HUMAN HIT: AW296325.1, EVALUE 8.00e-04
cagagagggcttgcagtacctcacagaactgagtgcccgtgaacgtgtgtgttcctccagatttgtgacagctttgccaggctggagtcaggctgaacgcctctgccctcatggggtttatattctaggaagaccaacaaaaacaagaagacggaaaattaaaacaacaaaagccccattgacaggccatgaagaatgccatgagaaatgaagggcgttgtgctgcagtgtttggggaaactggcttagggaaggaaggacacttgagctgctaccaaggagcagccgtccggtgggagggcagttcaggaagagcagacatccacggaggaggcgctggggcagagggcagcctggtcgctggattcgggggaggaaccacatcaggccatgagctggagctggtggtagaaggtacaggagaggccagccagggccagcacatgtcagacctcaggcggggaagaggaatcgagaatgcaccccacgagcaatgggaagccaggctaggatttaagcagcaaaaatattttcccttcttccaccctgcatccagctctaccagcaca

SEQ ID NO: 4703 - DNA, 594 bp, Homo sapiens
  MAP TO AC020914.6; EXPRESSED IN LUNG, SIGNAL = 1.3; EXPRESSED IN FETAL LIVER, SIGNAL = 1.9; EXPRESSED IN BRAIN, SIGNAL = 1.3; EXPRESSED IN BONE MARROW, SIGNAL = 0.97; EXPRESSED IN HEART, SIGNAL = 1.2; EXPRESSED IN ADULT LIVER, SIGNAL = 0.97; SWISSPROT HIT: P20138, EVALUE 3.00e-36; EST_HUMAN HIT: AU138048.1, EVALUE 6.00e-17; NT HIT: AF277806.1, EVALUE 0.00e+00; EST_HUMAN HIT: AU138048.1, EVALUE 6.00e-17
cctctggctggtcctagagccagagatttacctgtcacatgcacagagagcttgtcatatatgtagttccatttcctgcttcctctctccacctggaagtagtacttccctgaatcccccttcctggcatctctgatgctcagggagcagttgttggtctgtgggtccccaaggaggaggaatcgaccgtgggtatcctcttgcacttttccacttggggtgtttgtggccactggaatatcccatggtatatcggccccttccttgaaccaggatccataaacagggctagaggcagtccagttgtaatgggggtaaaggacactgcagggcacagagacacacagaccctcctgcacagtcaccgactctggcacctccagcctgtatcttgacagtaggtcctgggacgctgtggagaaacgagggtcagcccagcccccactgtccctctcttcatttgcccatagcaggggcagcagcatctctgaggcagaggcttcctgggctccctgtgtgagcagagaagggggagggagaggaggggcagggctgtgggacccacagggggctggagaggagctggagacctca

SEQ ID NO: 4704 - DNA, 591 bp, Homo sapiens
  MAP TO AC018427.3; EXPRESSED IN ADULT LIVER, SIGNAL = 0.95; EXPRESSED IN LUNG, SIGNAL = 1.4; EXPRESSED IN FETAL LIVER, SIGNAL = 0.96; EXPRESSED IN BONE MARROW, SIGNAL = 1.1; EXPRESSED IN PLACENTA, SIGNAL = 1.2; SWISSPROT HIT: P08519, EVALUE 3.30e+00; NT HIT: gi7525012, EVALUE 8.80e+00
aatgcttgtggtcaatcacgtatattttccttccaatcagagagtcttcatcttgaaatcccagtgcctactagcttaatgggatcctttacagcatgctcccactggggtgttccaggaagagacatggctgggaacctgtcccatgctctgatggccaggctgcttgaagctgagctcccatatccatggccaaatgccctacagcagtcctggaggccagactctgaagtcctgtggaagtccttcctccagcaggaggcttagggcccagatgggagatgcccttgtcccctgcagtcaagtggctactggtcccgatctgtgaagagaaaagaagttgtaatcccagggccacaggcaatgggcatcagcatcttattggataagcaggtttaacagcaggcggctaacatctcatcaagtaatcttggcctgtgtccagtatccactgtgaattaggaaggattttaaacagtattttcagaaaaaggcaatgtaacatttatacagaaatgtaggaaaaaaaattcggaagtttccagggaaaagtatctaaagtgcatgtggtgcgtttgctgatcttaaggc

SEQ ID NO: 4705 - DNA, 563 bp, Homo sapiens
  MAP TO AC002101.1; EXPRESSED IN HEART, SIGNAL = 1.7; EXPRESSED IN ADULT LIVER, SIGNAL = 0.81; EXPRESSED IN FETAL LIVER, SIGNAL = 0.57; EXPRESSED IN LUNG, SIGNAL = 0.62; EXPRESSED IN PLACENTA, SIGNAL =   1; SWISSPROT HIT: P41271, EVALUE 1.20e-01; EST_HUMAN HIT: BE745683.1, EVALUE 5.10e-02; EST_HUMAN HIT: BE745683.1, EVALUE 5.10e-02; NT HIT: X63418.1, EVALUE 0.00e+00
cacactgaatgtcccttccccaggtagcctacccgacttgcagggatctggacgtggccattgggggacatccctctgtctgtcacaccacacgccagaagctcagagagattccagggagggaggcggattctcatgttctccgagaccctcctgggccagagccctgcctgttggaccctgtgatgtcagtgggtgcagcagcccccgagatggatgcgggtgagggcagcccggggctgtctcgctagccctcactgcatcggccccattctgggtcaatggtaggtcaacctggtggatctctgaggtgaccaagcttactgacagatgaactacagcctcaggaagagggtcatggctggcaggagccagcggggggcaagaccagcagccctgagtgctggtgcaggccacgcagggcccagcctctgtagccagaagtcagcgccagtgccggtcctgagcaagatggccatttcacagatgaggaaagaaggctcagggctgtggggactgtccgggtgggtcacatggccggcaggtttcagggcctctctttc

SEQ ID NO: 4706 - DNA, 509 bp, Homo sapiens
  MAP TO AC008999.5; EXPRESSED IN HEART, SIGNAL = 1.1; EXPRESSED IN ADULT LIVER, SIGNAL = 0.85; EXPRESSED IN LUNG, SIGNAL = 2.6; EXPRESSED IN FETAL LIVER, SIGNAL = 1.3; NT HIT: X62151.1, EVALUE 0.00e+00; SWISSPROT HIT: P06731, EVALUE 3.00e-67; EST_HUMAN HIT: AL602396.1, EVALUE 0.00e+00; EST_HUMAN HIT: AL602396.1, EVALUE 0.00e+00
ggtcccaatattgaccgatgctctctgctctctcctagcctcacttctaaccttctggaacccgcccaccactgccaagctcactattgaatccacgccgttcaatgtcgcagaggggaaggaggtgcttctacttgtccacaatctgccccagcatctttttggctacagctggtacaaaggtgaaagagtggatggcaaccgtcaaattataggatatgtaataggaactcaacaagctaccccagggcccgcatacagtggtcgagagataatataccccaatgcatccctgctgatccagaacatcatccagaatgacacaggattctacaccctacacgtcataaagtcagatcttgtgaatgaagaagcaactggccagttccgggtataccgtgagtgattcccccatgacctctgggtgttgggggtcagttctacttcccacacacaggattatcaggcctgggctgtgcctgtggccccctctgcattacgcaccatgt

SEQ ID NO: 4707 - DNA, 564 bp, Homo sapiens
  MAP TO AC005265.1; EXPRESSED IN BONE MARROW, SIGNAL =   3; EXPRESSED IN PLACENTA, SIGNAL = 3.4; EXPRESSED IN HEART, SIGNAL = 4.5; EXPRESSED IN ADULT LIVER, SIGNAL = 2.8; EXPRESSED IN BRAIN, SIGNAL = 3.1; EST_HUMAN HIT: R73448.1, EVALUE 2.00e-01; NT HIT: AL139794.3, EVALUE 1.40e-01; EST_HUMAN HIT: R73448.1, EVALUE 2.00e-01; SWISSPROT HIT: Q03505, EVALUE 8.10e-01
ctttcctctttggaggaccctccttgacttggaggaagcctcagcagaaaaattgccaagagtgaagcttttcactcagctcaagttttcaagagcggccactcaccccacattcaggagatgtagcagagagagtggcactgaccgaagtctcactcagctaagtggggcctcaagggggccaagagacacttacattctggaaaggcacagaccaaagggccaggctgggccagccagacatgtgacatgcaattctctgaggacagatggcaaatctccactcatgcagggcccaggtgtggggtcattcccccttgctcccacccagagtctccctacagtatcatctggacactgggtcctccccaagggccacatcacacgtctgcattgccaggacaggagaagcagcagcagcttctgtttccaagtaaagatgacaagtgtggatgaggagggcgggtaggccggtgggcggggaagagaaaggaaggaggagaaagtcagacagtgacagggaaacaaataaagctaaagccttggttcctgcccttaaggatc

SEQ ID NO: 4708 - DNA, 530 bp, Homo sapiens
  MAP TO AC008959.4; EXPRESSED IN ADULT LIVER, SIGNAL = 0.55; NT HIT: AL163303.2, EVALUE 3.00e-05; EST_HUMAN HIT: BF677113.1, EVALUE 1.20e-02; EST_HUMAN HIT: BF677113.1, EVALUE 1.20e-02; SWISSPROT HIT: P08547, EVALUE 1.00e-09
aatgatggcacactctccaactaattttatgaggccagtattattttagtaccaaaatcagataaagatatcacaagaaaaatacagatcaatatcctttatgaatatagaaaaaaaatatgccagactgaatccagcaacatgtgaaaagatgacacaccatgaccaaatgggattcattataggaatgcaaggttagtttaacatcagaaaaatgaatataatttactgtgtcaatagaattgtcctttgttacaggacaaaagcaacctgattatctccataaatgtggaagaagattttgccaaaatccaaaatgtcttcgtgataatatttaacaaactaagaatagaagggaaatttttcagcctgataaagggcatctacaaaaaactcacagctaatatcatacttaaagtgaaagattgaatgctttcccctaatactaaaagcaaaagaaagatgtctactcttaccacttatattgaacattgtactggaagttctacccagggcaattaggcaagaaa

SEQ ID NO: 4709 - DNA, 543 bp, Homo sapiens
  MAP TO AF196970.1; EXPRESSED IN ADULT LIVER, SIGNAL = 1.3; EXPRESSED IN BRAIN, SIGNAL = 1.3; EXPRESSED IN LUNG, SIGNAL = 1.3; EXPRESSED IN PLACENTA, SIGNAL = 1.5; SWISSPROT HIT: Q60806, EVALUE 4.00e-02; NT HIT: AF196779.1, EVALUE 0.00e+00; EST_HUMAN HIT: BF688268.1, EVALUE 0.00e+00; EST_HUMAN HIT: BF688268.1, EVALUE 0.00e+00
tagaccggcctgtgataaggagtacaattaatctaactttggtatactatatccagagaccacagggggctcgctctgcgatttatggtgcgaggaggaccagacaccccctgtgcccgtcctactcctgcagatcaaactcacagccacacttttcggaatgagaaactggacagtaaatgaacgcaagaaccatggtgcccaggcagagaaccccgctgggtttgctacgaaggttgcggtggaggcgcccagtgcaccaggcgccaaggcccggtatgtgacctcactaacctccgccagcgcgcaccctgtcctgccccttctcgggccaacaaccccacacgacgcagcggtgtgagaaccagcaaccggaaccgcaaaagcacggctttcccggagcccgggctctggactggcacccactgcgcatgctccagagcggcgaccaatgggagcccggcgcgcagggacggaggcgggcccgggccgctaccgagaagcacagggacccgacttcagtcatcgaccaatcagagctca

SEQ ID NO: 4710 - DNA, 517 bp, Homo sapiens
  MAP TO AL109944.19; EXPRESSED IN PLACENTA, SIGNAL = 1.4; EXPRESSED IN ADULT LIVER, SIGNAL = 1.5; EXPRESSED IN BRAIN, SIGNAL = 1.6; EXPRESSED IN HELA, SIGNAL = 1.9; EXPRESSED IN FETAL LIVER, SIGNAL = 1.6; EXPRESSED IN LUNG, SIGNAL = 0.64; SWISSPROT HIT: P49421, EVALUE 3.60e+00
gccccactcaggatagacaggcaaagtcagagagagctcatgcacagtatatgaaaagcttggatatgtgtgtgacgtagacggggaaaggggcccaaacagcccatcagctcggagccccttcagtccaattcccaatagactgtgcaaatgtcaagggagaaagagggacgatcacagtatggaaaaagttcatcttgggaagagctctctttgcagccaagcctgccatcaaccagaaacagcatgatggtactctgttaggtcatctccaaggagaagaattttaggtgagcgcttcaatgtccctaaaatagggcccaactccacttcgttgttggttggcattgctgcttccagcctgctgccagttcttgaactggactctttgtgccaagaccccgggtcttcttcctctttaccaaggtgcttcataaagacagtcactctccctggcgggtgaaagaaaatgatccctatttcctgtaaagtaataggcaaaagtcctccctgacag

SEQ ID NO: 4711 - DNA, 569 bp, Homo sapiens
  MAP TO AC006930.1; EXPRESSED IN ADULT LIVER, SIGNAL = 5.8; EXPRESSED IN BRAIN, SIGNAL = 4.9; EXPRESSED IN LUNG, SIGNAL = 2.9; EXPRESSED IN BONE MARROW, SIGNAL = 3.7; EXPRESSED IN PLACENTA, SIGNAL = 3.1; EST_HUMAN HIT: AL560696.1, EVALUE 5.00e-67; SWISSPROT HIT: P53686, EVALUE 1.00e-01; NT HIT: gi14763353, EVALUE 3.00e-67; EST_HUMAN HIT: AL560696.1, EVALUE 5.00e-67
gacacatccaggaggaaagcagatggatgtgttctcattcccagatgtgtgtggctcgcagggaagcctctggcagcctggtaggccttgcctcgacttcccctgcacaatcacagacctgaagtcggggatgccagaggcagtgctgatgccggcacccgtgtggaacaccacactggaagactgccagaccagcctcgccagttcccacaccttccgctccagctcctccggggggtcgaagatctgtggggggagagagcagacggaggggtcaaaacagttcccccaagtggcaaggccacgcacgagccacagactgagctgtccctgtcttgcctgagggaggaaaatggattggaaaaggcagcttgtcctcatgcccctcctcttcctacaaccttccatgcctcccacctgccttgtcaaagccctagcccttcccacggcccaccaggccctgcactacctcccttgccccctccctgccctcttctcctccctctccctgcctcactctgctccagccacacaggtctcctccttgttcctctatcacaccaggcaca

SEQ ID NO: 4712 - DNA, 525 bp, Homo sapiens
  MAP TO AC011400.4; EXPRESSED IN BONE MARROW, SIGNAL = 8.9; EXPRESSED IN PLACENTA, SIGNAL = 7.7; EXPRESSED IN ADULT LIVER, SIGNAL = 8.4; EXPRESSED IN HEART, SIGNAL = 8.8; EST_HUMAN HIT: AA180541.1, EVALUE 6.00e-57; SWISSPROT HIT: P23962, EVALUE 8.00e-05; NT HIT: AJ400877.1, EVALUE 1.00e-50; EST_HUMAN HIT: AA180541.1, EVALUE 6.00e-57
gggaggggtagcattaggagaaatacctaatgtagatgacgggttgatgggtgcagcaaaccaccgtggcatgtatatacctatgtaacaaacctgcatgttctgcacatgtaccccagaacttaaagtataataaatatttaaaaagaagaaagaagaagaaaaagaaggggagaaggaggaagaggaagaggaggaggaggaagaggaagaggaggaagaggaagaagaagaagaaggagaaggagaaggagaaggagaagaagaaggagaagaagaagaagaaggcggcacttaggctgggttaggtgactcaggatgctaaggaaagtggccattgcagtgaccacatagcccccagatatgatgggacctcccaacactttgggaggctaagacgggaggattgcttgaggctaaagttcgagaacagcctgggcaacacagtaagaccctatctctacaaaaaacatttttaattagccaggtgtggtggcgtgtgcctgtgattccagctactccgga

SEQ ID NO: 4713 - DNA, 595 bp, Homo sapiens
  MAP TO AC012152.12; EXPRESSED IN ADULT LIVER, SIGNAL = 1.3; EXPRESSED IN PLACENTA, SIGNAL = 1.3; EXPRESSED IN HEART, SIGNAL = 1.6; EXPRESSED IN LUNG, SIGNAL = 1.4; EXPRESSED IN BRAIN, SIGNAL = 1.4; EST_HUMAN HIT: BG771955.1, EVALUE 5.40e-02; SWISSPROT HIT: P15385, EVALUE 2.00e+00; EST_HUMAN HIT: BG771955.1, EVALUE 5.40e-02
tcaattttgcacaggtggtctaattcctttacaaatctctaagtaactcaagaaaaaacattcacatgtctatgaagaaaaatgctaataaatctgaaggtcttagcacatattagccatgtttcagtggaagaaaagtatttctaggttccagtatggaatgctaggacaacacctccctctctatattgccataatcaagatgggcaagggaggtcatctcttttctctctctctcactgatggcaataggaacgtttccaagacctccagcttccttgaggtgatgctttccgaccagagcagatagctcaagaatcagggcggagaatctggaatagtatgagagaataagaggtaggactcattcctgagattttaagaggaaggagaccagagaggtaggccagagactcagcatgaaacaatggcggggtggagctaacctttcttgaaccttcatttccttgatactcactactgctcagtgagccttgtgtgtggctgggagcacctctagaagtaggtagagagggagaaacagcagtcctagcagctctctgagaaggaaaacaggtttctcttgccctttcct

SEQ ID NO: 4714 - DNA, 582 bp, Homo sapiens
  MAP TO AC006163.1; EXPRESSED IN BONE MARROW, SIGNAL =   1; EXPRESSED IN PLACENTA, SIGNAL = 2.9; EXPRESSED IN ADULT LIVER, SIGNAL = 2.4; EXPRESSED IN FETAL LIVER, SIGNAL = 2.3; EXPRESSED IN BRAIN, SIGNAL = 1.9; SWISSPROT HIT: P24639, EVALUE 5.00e-03; NT HIT: gi7662666, EVALUE 0.00e+00
gaaaggggtaaaggcaggagggtacacatttaggtccctgagggaaaaggaagaataggcataggggaagcaaagggaactggggactcggggactggagaccactggttgctttatcttccctttccctcaggcctctttgcccggagcatcggtgttgtggaggagaaagtttcccaaaacttggggaccaacttgcctcagctcggacaaccttcctccactggcccctctaactctgaacatccgcagcccgctctggaccctaggtctaatgacttggcaagggttcctctgaagctcagcgtgcctccatcagatggcttcccacctgcaggaggttctgcagtgcagaggtggcctccatcgtgggggctgcctgccatggattcctggccccctgaggatccttggcagatgatggctgctgcggctgaggaccgcctgggggaagcgctgcctgaagaactctcttacctctccagtgctgcggccctcgctccgggcagtggccctttgcctggggagtcttctcccgatgccacaggcctctcacccgaggcttcactcctccaccaggac

SEQ ID NO: 4715 - DNA, 548 bp, Homo sapiens
  MAP TO AF002993.1; EXPRESSED IN PLACENTA, SIGNAL = 1.5; EXPRESSED IN ADULT LIVER, SIGNAL = 1.5; EXPRESSED IN BRAIN, SIGNAL = 1.2; EXPRESSED IN LUNG, SIGNAL = 1.7; EST_HUMAN HIT: T79080.1, EVALUE 1.00e-111; SWISSPROT HIT: Q60436, EVALUE 3.00e-15; NT HIT: AF312032.1, EVALUE 0.00e+00; EST_HUMAN HIT: T79080.1, EVALUE 1.00e-111
  unsure 393
tgtgtcctctcagtggcaagaaattcaaggtgtgggatgttggagaatggccgtgctacggtggtgggaggtggggttgagacaggaagccccctgggcaggggtgggggaactgcttactgcactggcaggcgggagctgggaatccttccagctcgggcctgggagcgaggcaacccttatgtggctgtcctgacccctctcctctctccacccagggtcctgagtttgtgcgcaaacatatcttcaacaagcatgcagagaaaattgaggaagtgaaaaaggaagtcgcgttttttaacaacttcctcactgatgctaagcgcccagctctgcctgagatcaagccagcccagccacctggccccgcccagagtaagatacgatccatgnaaggtcgcatgtgccctcttccttgactacccagggactcctgtttctctttaacgtgtcaccccgagaagtttctgccccatcctcaggccatagccctagaagtcaattgtacccgtatccccctccccgcccccgcagtaattcatgtccct

SEQ ID NO: 4716 - DNA, 597 bp, Homo sapiens
  MAP TO AC000109.1; EXPRESSED IN HELA, SIGNAL = 2.1; EXPRESSED IN BRAIN, SIGNAL = 0.6; EXPRESSED IN ADULT LIVER, SIGNAL = 0.56; EST_HUMAN HIT: BI870502.1, EVALUE 0.00e+00; SWISSPROT HIT: P35200, EVALUE 1.00e-13; NT HIT: gi7705609, EVALUE 0.00e+00; EST_HUMAN HIT: BI870502.1, EVALUE 0.00e+00
gtctctgtgcctcgttctccctagcaccacccggacatcgctcaggctgccggcaccgtgaagatctggacttcagagcatgtctttgaccactcatgggaaactgttacaacagctgcaatgcagaaatacccaaaccctatgaaccaactgtggttggagttgatgtgttggacagacatgtagatccctctggaaagttgcacagccacagacttctcagcacagagtggggactaccttccattgtgaagtctcttattggtgcagcaagaatgaaaacatatgtgcaagaacattctgtagttgatcctgtagagaaaacaatgaaacttaaatctactaatatttcatttacagatatggtttcagcagatgagagacttatatacaaaccacgtcctcgggacccagaaaaaactattttgactcaagaagccataatcaccatgaaaggagttagcctcagcagttactttgaagaactgatggcaagtatgatatcctcaaacactagtaaaggctgagaagcaatagaatgggtaatacataaattaaatgctgagattgaagaactgacagcctcagcaagaggaa

SEQ ID NO: 4717 - DNA, 535 bp, Homo sapiens
  MAP TO AC010407.4; EXPRESSED IN ADULT LIVER, SIGNAL = 1.1; EXPRESSED IN HEART, SIGNAL = 1.3; EXPRESSED IN BRAIN, SIGNAL = 1.1; EXPRESSED IN PLACENTA, SIGNAL =   1; EST_HUMAN HIT: BE144748.1, EVALUE 5.00e-39; SWISSPROT HIT: P17277, EVALUE 9.90e-01; NT HIT: AL163227.2, EVALUE 4.00e-63; EST_HUMAN HIT: BE144748.1, EVALUE 5.00e-39
gcctgcaggtagacagaaggcaagagttgaggtttgggaacctccacctaaatttcagaggatatacggaaacacctggatgtccagtcagaagtttgctgcaggggcagagccctcatggaaaacctctactggggcagtgcagaaggaaaatgtggggttggagcccctacagagtccccaatagggcactgcctagtggacctgtgaaaagagggccaccaccttccagacccaagaatggtagatccaccaacagcttgtaccatgtgcctggaaaagctgcaggcactcaatgccagcctgtgaaagcagctgggaggggcactgtaccctgcaaagtcatagaggcagagctgcacaaggttgtgagagcccacatcttgcatcggtgtgacctagatgtaagacacagagtcaaaggagatcattttggaactttaaagtttaatgattgccttgttggattttggacatgaatggggcctgtagtcccttttctttggccaatttctcccatttggagcaggtgtat

SEQ ID NO: 4718 - DNA, 552 bp, Homo sapiens
  MAP TO AL031714.8; EXPRESSED IN BONE MARROW, SIGNAL = 1.3; EXPRESSED IN ADULT LIVER, SIGNAL =   1; EXPRESSED IN HEART, SIGNAL = 2.8; EXPRESSED IN BRAIN, SIGNAL = 1.2; SWISSPROT HIT: Q16204, EVALUE 3.50e-01; NT HIT: AB015440.1, EVALUE 5.30e-01; EST_HUMAN HIT: AU122024.1, EVALUE 0.00e+00; EST_HUMAN HIT: AU122024.1, EVALUE 0.00e+00
gtcggtaggagcgagtgttcggggaagctgtaggtgttcgtggcgcgttggctttctggtaattcctccggctgcactagacatgccgcactgtgtgtccttccgtagcattgagagagaagagggaggatgcccaggtaaaagatgggaaatagcctagaatatcaactgtgatggtccctggtggggctaatggtggcaaacttttctgcttttttgtaaagaaataacacagggtcctaaaagcccgtatatcctggaagcagagggtctgcgtcggaacagccgactctggaagggcgttggctatgtccctggacgtctcctgcagctcctcccatctcccctgagtctggcccagctggaaaggatgtgggggccacaggttaagtggccaccctggggcctgtgttcccagactgcctggctgtgctgggagttctgtcctgggagagacacagcttcgtctcggctgcggccgtgtccccaaggctctgttccctgtgtgcaaaggtggatatgtcttcctttagtctcctcatggccacaatt

SEQ ID NO: 4719 - DNA, 585 bp, Homo sapiens
  MAP TO AC008537.4; EXPRESSED IN PLACENTA, SIGNAL = 0.68; EXPRESSED IN HEART, SIGNAL =   1; EXPRESSED IN ADULT LIVER, SIGNAL = 1.2; EXPRESSED IN FETAL LIVER, SIGNAL = 0.7; EXPRESSED IN BRAIN, SIGNAL = 0.91; EXPRESSED IN HELA, SIGNAL = 0.6; SWISSPROT HIT: P20813, EVALUE 7.00e-15; NT HIT: gi14277708, EVALUE 0.00e+00; EST_HUMAN HIT: AA574228.1, EVALUE 0.00e+00; EST_HUMAN HIT: AA574228.1, EVALUE 0.00e+00
ctcaacctctctgtctgcccatctataatttggagctaataatcaaattgcatctgcctcacattgttgtagtgagagttcagtggaattacacgtgacgtgctggtacataattagctgttatggttattctcatgtttaccattactgagtgatggcagacaatcacacagagataggtgacagcctgatgttccccaggcccttcagtctgtgtccttgacctgctgcttcttcctaggagccctcgtggaccccaccttcctcttccattccattaccgccaacatcatctgctccatcatctttggaaaacgcttccactaccaagatcaagagttcctgaagacgctgaacttgttctgccagagtttcttactcatcagctctatatccagccaggtccaggagagggagaaggagagggagggtgggggtgaggtgaacatccaggacacacgagaaaaggatgacctgacttgggggctcagaaatgcagcttatccctggaagaaatgcagagaccacgtggagtcagggacatggagacctggagggaggggaggcggtgagacagggatagag

SEQ ID NO: 4720 - DNA, 554 bp, Homo sapiens
  MAP TO AC008599.5; EXPRESSED IN BRAIN, SIGNAL = 0.69; EXPRESSED IN HELA, SIGNAL = 0.79; EXPRESSED IN BONE MARROW, SIGNAL = 0.8; EXPRESSED IN ADULT LIVER, SIGNAL =   1; EST_HUMAN HIT: AL557808.1, EVALUE 1.00e-113; EST_HUMAN HIT: AL557808.1, EVALUE 1.00e-113; SWISSPROT HIT: O76082, EVALUE 5.00e-24; NT HIT: gi14781269, EVALUE 1.00e-118
tagccaatgagggtagtggctacttataagacagcaagatatagagaatttcttgaccatcataaaattttagagcgattcacaccatccctttgtcatttttaccttcttctttcaggatgctgacctcagtgggttactttgctctgtctctggatgctcctaatttacatggagatgcctacctgaactgtttcctctctgccttgattgaaattccagcttacattacagcctggctgctattgcgaaccctgcccaggcgttatatcatagctgcagtactgttctggggaggaggtgtgcttctcttcattcaactggtacctgtgggtaagaagttaaccaagatgaacagcttaccagaaaagacccacatattgactaggctgcttctgagtcactgctccatgtttattcagcctttacatcataagccattcataagtcaattagacaggtgattgctcactacgtatgttgtttcctgtgttcaaaacaactaccccaaacagaagagacagtctcagagaagcagaaagcaccaaagagga

SEQ ID NO: 4721 - DNA, 600 bp, Homo sapiens
  MAP TO AF196971.1; EXPRESSED IN ADULT LIVER, SIGNAL = 1.7; EXPRESSED IN LUNG, SIGNAL = 2.6; EXPRESSED IN BRAIN, SIGNAL = 1.6; EXPRESSED IN FETAL LIVER, SIGNAL = 2.4; EXPRESSED IN BONE MARROW, SIGNAL = 2.3; EST_HUMAN HIT: BE267402.1, EVALUE 3.00e-56; EST_HUMAN HIT: BE267402.1, EVALUE 3.00e-56; SWISSPROT HIT: O60830, EVALUE 2.00e-43; NT HIT: AF207550.1, EVALUE 0.00e+00
ctgctgatagctggggtagcctggggccggggtgccatccttagggggcagctggctggggtcctccaggaatgggggcgctggagaagggagacttgggtaaggatgagtggaagaggccaggtggagtatttcccactcccccgaccaccagttactcaccatttcggaactgctgggctgtgtagcgagtgaggaggatgccaacgccctcaatgagggccaacaggatgccccccatcattgctgagcccaccatggccagtgggccacctgggggagttggaggcagagaaacagaggtgagagcaggcagaacagggtggaaggggctggggccagggccaggggtcactcactgcgggcagccagcacagccccggtcaatgctccactggtgatagagttccagggatcctccttgccccgaagccgcaccaggccacagtcaatggtggagaacaggcccccccacactgcgaagctacctgtagtggaaccgaggcctaattagttcctgggaaatcctgagaattcacatctcaggggacttccaaggcctgaatgctttggccaagaacagggagaaaaacccagaca

SEQ ID NO: 4722 - DNA, 574 bp, Homo sapiens
  MAP TO AC006980.3; EXPRESSED IN HEART, SIGNAL = 2.1; EXPRESSED IN BRAIN, SIGNAL =   2; EXPRESSED IN HELA, SIGNAL = 1.3; EXPRESSED IN BONE MARROW, SIGNAL = 1.7; EXPRESSED IN PLACENTA, SIGNAL = 1.3; EXPRESSED IN ADULT LIVER, SIGNAL =   2; EXPRESSED IN FETAL LIVER, SIGNAL = 0.86; EXPRESSED IN LUNG, SIGNAL = 1.7; EST_HUMAN HIT: BF827606.1, EVALUE 8.00e-04; EST_HUMAN HIT: BF827606.1, EVALUE 8.00e-04; NT HIT: Z14020.1, EVALUE 1.40e-01
tttgttcacactgctgggagcagcaccacggctgggatgcaggccgttgtgacttctgctttgaggttctttctattctctgctcacacacctagacttgatgaggtagaaatgaaactctggcttcttaatcaattcataagcattacctactcctcttaccttttttaaaatggcatttgcctcctctttattttgttcaagtttcttcttcttctcctcttccatgtaatatgtgtgcatggaagcaaagtatatcatatgccaaagaacttaagttaaatattatcatttcccctgaccactcactaaaggcaatcttctctaaattgttttttgtttggttttgtttttgtttttggaagttactgctaaactcaataacatgcttctgtctttgtttctttatttgttagctgttgtaacatctcttaagtctctgccttgaaagatgcagattcagctcagttgtcctgtgcctcctctacctctgccttctctcattactttattccattattgctttcgctattggctgtacacttaaaccttccctttgtggcccatcaacttt

SEQ ID NO: 4723 - DNA, 573 bp, Homo sapiens
  MAP TO AL022332.2; EXPRESSED IN BONE MARROW, SIGNAL = 0.77; EXPRESSED IN PLACENTA, SIGNAL = 0.83; EXPRESSED IN ADULT LIVER, SIGNAL = 0.74; EXPRESSED IN BRAIN, SIGNAL = 0.81; EXPRESSED IN HELA, SIGNAL = 0.54; NT HIT: AL445821.1, EVALUE 1.40e-01; EST_HUMAN HIT: AA992366.1, EVALUE 3.00e-93; SWISSPROT HIT: P03953, EVALUE 1.40e+00; EST_HUMAN HIT: AA992366.1, EVALUE 3.00e-93
gctccatttcaacagaaggcccagaaaaatcaaggcaccgtggccagcgttctctgctgcacctggaaggtactagacaccctgaggcatccttgctaggcctaagctgtggccactacagaggtccagatacttccaggaaggtctgattgtcagtgaggcagtctctgtgtgcagccaggaatctccgagtgcaaaggacagaggaatagaaatctagcagaacaggcttggctctaagcccacatctcagggccagagagcagaagagattctgagtggagtgagatgaccatctctggtctcttacttaggcccagtacatgggcttatgtctggggccccagaggagtgagggcagcaaagaacagacaatgggctccacgcagacctctgcaacacactggagcctgagcccactgctgcaggacccatcaacaacaagaaggagggagaaggtgtatgacccccctccctgcaactctcccatgatctccatggacacccaaagatatacactgcagcacccagcaaagacgtggtacttggtaaggacagtggtacccgcttgtt

SEQ ID NO: 4724 - DNA, 559 bp, Homo sapiens
  MAP TO AC018514.6; EXPRESSED IN FETAL LIVER, SIGNAL = 5.5; EXPRESSED IN PLACENTA, SIGNAL = 3.6; EXPRESSED IN ADULT LIVER, SIGNAL = 2.1; EST_HUMAN HIT: AI340299.1, EVALUE 5.00e-02; NT HIT: gi15300755, EVALUE 3.40e-02; EST_HUMAN HIT: AI340299.1, EVALUE 5.00e-02; SWISSPROT HIT: P71366, EVALUE 6.90e+00
acccatgcaaaaccttcatccacacagcttagactgtcattcagccctctctttctgcaaataaatctaatatatgtctatagtcagcccacttttcttctatgcagatttcattaatgaaagtagtaattcttgtcagtgtgattgcaagcacaaactcaaagataacattacatggcagtccttggttggcaattgaatggtcagtattcagttgaaaggtcatcaaccagaaatatggttagccattttttagaagaaaacaaattagaaaaaagtatggataacaactttggacaccaaagaatatttctataatatttcctgctcagtctgtagtggaaggcagtagagaatagaacttacaaacatagccttggagtgagaaagatctggaaactatttatgatagttctacttactagatgcatctcttggaacaagattcttcgcttctctgtaacttggtttcctcgtgtgtatgatggagatgattattatctatttcataggccaggaataggtatgatatgcaagaagcacctgtggccctatctta

SEQ ID NO: 4725 - DNA, 560 bp, Homo sapiens
  MAP TO AL035666.7; EXPRESSED IN BRAIN, SIGNAL =  14; EXPRESSED IN BONE MARROW, SIGNAL =  15; EXPRESSED IN PLACENTA, SIGNAL =  12; EXPRESSED IN HEART, SIGNAL =  16; EXPRESSED IN ADULT LIVER, SIGNAL = 9.6; EXPRESSED IN HELA, SIGNAL =  17; EST_HUMAN HIT: BG167478.1, EVALUE 2.00e-01; NT HIT: AY027496.1, EVALUE 2.10e+00; EST_HUMAN HIT: BG167478.1, EVALUE 2.00e-01
accactcagacacccactcctatttcacctccctgaagaaaccttccctgtctgccctctcagtcactctctaataccttgtctgactttgccttcttaatagatgtgttaggtgctgacccaggcatggaggttctgactgtgatgtcatgtagcttacttattgccatttagactgagctggcgagctcatttatctaatctgttaaaaccagatttggtggaaagtgaggacctcaatatttccacatttgctgacaaccttaaactctcatcgaagagtgggaagttgttgcttggaatcacattaagattaataatgacaatagagataatgacaactgcaaatatagcaactctcccactcacaatggcagtcccgattgcacaaagaatccagtaccaggaagggacacattttaagctatcttggaactgtttcctaatctgtgggataaagatagatcaaacaccactttgcattttttaaaccttgaataaataggtaaatagcccctttgttaagtaggagaaaatattgggaggagacgagtttaggc

SEQ ID NO: 4726 - DNA, 564 bp, Homo sapiens
  MAP TO AC008971.5; EXPRESSED IN PLACENTA, SIGNAL = 0.78; EXPRESSED IN ADULT LIVER, SIGNAL = 0.76; EXPRESSED IN LUNG, SIGNAL = 0.67; EXPRESSED IN BONE MARROW, SIGNAL = 0.6; SWISSPROT HIT: Q28247, EVALUE 7.00e+00; NT HIT: gi14725891, EVALUE 0.00e+00; EST_HUMAN HIT: N32718.1, EVALUE 0.00e+00; EST_HUMAN HIT: N32718.1, EVALUE 0.00e+00
tgatagctacgggggatttgggaattcagttagaccccatgaaactcttctcgtcaaacagacaaaacaaacaattaaaaaaacaacaacaacaaagagcaagaatattttcccttgtaaagaaaaaatgttgcatctttacctgttcagcatgatttttgttttttgctccctgcattgccagctctggatttacgtaaccatttttaactttcttgatagaaccatactcgtacattccatctgatgacaatggagggtcctgaggggtttgctgtgggggaatgccctttgcaacctctgtaagtggggcttcagagatactgcacagatgaacagtaaaacacaaagtgagcaccaatgcagagaagaagaacatgacctggaattctgtacccaacagtcttcccagctccagatgggcccagtctatagcacccaaaaggtaacccagggcacctccaaaacctggaaagcaagaaaagctatgttagcatatttagcaaattatcgtttcattttcctcatgcatgacactccccttcagtgggaaaactccctgaa

SEQ ID NO: 4727 - DNA, 521 bp, Homo sapiens
  MAP TO AB022537.1; EXPRESSED IN ADULT LIVER, SIGNAL = 0.71; EXPRESSED IN BRAIN, SIGNAL = 1.1; EXPRESSED IN FETAL LIVER, SIGNAL = 3.5; EST_HUMAN HIT: BG680371.1, EVALUE 0.00e+00; SWISSPROT HIT: Q61187, EVALUE 9.60e-01; NT HIT: gi14782799, EVALUE 0.00e+00; EST_HUMAN HIT: BG680371.1, EVALUE 0.00e+00
cggtttgatccctcaatgactttctttgaccagggagcgctgacccagctgatccagctctatcatcgcttccaccgggtgctgtcccagccgcagctccgagccctccctgcccgggctgagctcatcaacattcaccaccttatggtggagctcaagaagcataagcccaacttctgatgtgccagaaaccgccctgagatctgccggtcatctccatggacttctgcaccccattccatacccttcttcacctggggtaccccttccagttttccccttgcttcccaggcccttgacatggcttacctgccttcactcccagcaccttgcccaacaggataagctggatccccttggccttctgaatatcccagtgtcttcaggtttcccaagaccacttccctgtgggcttccaaaatggcctttatcatttctccagtctgtcaccctcctttcctgctcccatacacccaaggcttgtttcttcccctgtaaaaaccactgcctcaatctctggt

SEQ ID NO: 4728 - DNA, 567 bp, Homo sapiens
  MAP TO AC011471.5; EXPRESSED IN PLACENTA, SIGNAL = 1.3; EXPRESSED IN ADULT LIVER, SIGNAL =   1; EXPRESSED IN BRAIN, SIGNAL = 0.98; EXPRESSED IN LUNG, SIGNAL = 0.68; EST_HUMAN HIT: BI520890.1, EVALUE 1.00e-111; SWISSPROT HIT: O08550, EVALUE 9.40e-02; NT HIT: gi14767583, EVALUE 0.00e+00; EST_HUMAN HIT: BI520890.1, EVALUE 1.00e-111
atccccatcatcagtaacgccatgttagtaggagataaactgaagtttctgagcatgttgctgacgctgaaggtaacatgggtttgctgtcattgggggaagtctctgcagccggtcttgggttccctggccccaccccagggtcaagaggatgcatctgtgggttcaagacccacttcttggtctgtgggcctggggaggggtgctggtcaaggagcatgggtggtgacagaggtgtctgggggcagtgtgagatgaatcagatgagcggagaacctctggacaagctgaacttcgaggccatcaacttctgtcggggtctgggcagccaggcatccaccgtgactgagattgtgaagcagcaagaccccctggtctacaaggccatccagcaaggcatcaatgctgtgaaccaggaagccatgaacaatgcacagaggattgaaaagtgggtcatcttggagaaggacttttccatctatggtggagagctaggtgagtggccatgacatttggaggctggtcccttgttagcatctgggactgtgtgggctctgaagagacagg

SEQ ID NO: 4729 - DNA, 502 bp, Homo sapiens
  MAP TO AC000036.5; EXPRESSED IN ADULT LIVER, SIGNAL = 0.96; EXPRESSED IN LUNG, SIGNAL = 3.9; EXPRESSED IN HELA, SIGNAL = 0.74; EST_HUMAN HIT: AI198827.1, EVALUE 0.00e+00; EST_HUMAN HIT: AI198827.1, EVALUE 0.00e+00; SWISSPROT HIT: Q64355, EVALUE 8.00e-02
tctgtacaggaccagacccctgaggctggggtctcctgacccacacctgaccagcccccatcttccctctctgcttctccctccgctcttctctgcctcttggtcttgatgaaaatcaaagccattttaaaaagtgcatagcacagtgcctggcctggttcgggccctcaataaacatttcttaaatggatgaaagaacaaagcaaaatgcaaatgctgtgttttgtgatttgagatctagggaggtggcttaggacaaaaacccacagaaggacttactcagcgttcagactcatcaggtgtcgatcccccatggtcgggctcaggtgggcccaggtctcgtcattggctctgtcctctcctgtgaggcagctgcagcagttgcagggcagggtcaggggattcctcagccggaacctctggcacttccccttctctgagttcatcctcccacggtgctctttagcattctgtcttgatcagggtacggttctcttagccc

SEQ ID NO: 4730 - DNA, 590 bp, Homo sapiens
  MAP TO AC010423.5; EXPRESSED IN BRAIN, SIGNAL = 0.87; EXPRESSED IN PLACENTA, SIGNAL = 0.76; EXPRESSED IN ADULT LIVER, SIGNAL =   1; EST_HUMAN HIT: AL570655.1, EVALUE 3.30e+00; EST_HUMAN HIT: AL570655.1, EVALUE 3.30e+00; SWISSPROT HIT: Q94131, EVALUE 3.30e+00; NT HIT: gi14149648, EVALUE 1.40e-01
gagaagcaaggccaaagatggcagtaagcacaaaagtggatgtctttgaaaggaaaaagtgtgcttgggaggtaattccaggctacacagaatttcctctttacgagaaataagaatgattttcttcatagtggaagagagaagaaaagtaatatctttctcactcagcactatttgtcagactgctctgaacactattgcccccctctttcatgccccgtgtaggttagggggcatgattacaattccaggcattcctatatgcaagatttcaggctctggcctcttcccatgttcctgtcactgcagcccaaagctgtccaaaatatcagttggaaaactaaagagaaacaaggccaggaggaggagggaaagtccatcaaagcccagcaatgctgcccctatcacataatgggtatttctttcctggagagaagactacacatcagccatccaggacctttcctgcaaggatgccgtaaaatcacttgcttcacccatcgttcactacctgtgtcacacgtttctctgtcagcacctgcggcccacctgggcttcctatggaggtatctgaccccagcagacatttt

SEQ ID NO: 4731 - DNA, 557 bp, Homo sapiens
  MAP TO AL031730.1; EXPRESSED IN BONE MARROW, SIGNAL = 1.2; EXPRESSED IN PLACENTA, SIGNAL = 1.4; EXPRESSED IN ADULT LIVER, SIGNAL = 1.2; EXPRESSED IN BRAIN, SIGNAL = 1.5; EST_HUMAN HIT: AL547489.1, EVALUE 3.00e-68; EST_HUMAN HIT: AL547489.1, EVALUE 3.00e-68; SWISSPROT HIT: P43564, EVALUE 4.00e-04; NT HIT: AL049846.1, EVALUE 5.00e-72
tatgaagcaaagtgggagggtacagggtgtggagacgaattggggccatctcacacgtgacaagggcttgagcagaagggattgagtccatatatcagaaattcatgagtttcggatttctttgttctttagcagtttgattggcaaacttgcaggtccaagttggagactgcatgcatttatttgagcatctgttagccagtcacttccctagtaggaccctaggacaggggccattcccttcatcactatctcacctccccaggcattgtggctgccctgacctggccagcctcactcctcagtgtcgccaatgtcatcgacaacccctggggggtgtgtctccatcgatcagcagaggttggcaagcacctggcccacatcctgctctcccggcagcaggtacctgggaatggctgtgtgggcgtggcattgagcaagaggggaagtcaggtgctgacttgttcacagatatcagccttagaggcaaggctacttggagataactcaatggttttgggggtgtgggcagtccttgctgcctctccagttcaagt

SEQ ID NO: 4732 - DNA, 596 bp, Homo sapiens
  MAP TO AC016605.4; EXPRESSED IN BRAIN, SIGNAL =  16; EXPRESSED IN LUNG, SIGNAL =  31; EXPRESSED IN BONE MARROW, SIGNAL =  12; EXPRESSED IN PLACENTA, SIGNAL =  11; EXPRESSED IN ADULT LIVER, SIGNAL =  17; EXPRESSED IN HEART, SIGNAL =   8; NT HIT: gi14730811, EVALUE 5.00e-63; SWISSPROT HIT: Q63120, EVALUE 2.00e+00; EST_HUMAN HIT: BG676608.1, EVALUE 4.00e-58; EST_HUMAN HIT: BG676608.1, EVALUE 4.00e-58
gcctcctcctcttgtttcagatggaccagcttttgggaaatatgattgaaatgtgggttgatcgaatggacaacattacccagcctgaaagaagaaaactttcagctttggctttgctctctcttctgccatctgataataggtgaggaaatgttttcttaaaatttgtttctttcaagcatcaaaatgtaaacactatttttggccatcagtattgctgtgtgttgctgggcagtggtacttttatatatatggatgtgaattttgttagctgataatgatgtggtaaatgttggtctggatccagaaagcagtgagtgggataggtactgttggattgtgggggctgtagtttattttggttgtattcattttacaaatttatttcattcttgtctgaatttccattttttataattacgttttattagactaatcttcagtcctctgtttacatagatatattaaatatctaacatttcaaagtcaatagcacttcataaagtatgttataaagtgtgttaattcaacagtattattagttttgttttctttttattttggattatttctaaggacgtttgcaagttgttttt

SEQ ID NO: 4733 - DNA, 552 bp, Homo sapiens
  MAP TO AC005888.1; EXPRESSED IN LUNG, SIGNAL = 2.1; EXPRESSED IN BRAIN, SIGNAL =   2; EXPRESSED IN BONE MARROW, SIGNAL = 1.9; EXPRESSED IN PLACENTA, SIGNAL = 3.6; EXPRESSED IN ADULT LIVER, SIGNAL = 2.4; NT HIT: AF040759.1, EVALUE 2.10e+00; SWISSPROT HIT: Q37603, EVALUE 6.80e+00; EST_HUMAN HIT: AW340687.1, EVALUE 9.00e-90; EST_HUMAN HIT: AW340687.1, EVALUE 9.00e-90
gagctaaaatgcaaggcaccaacgtagaaaagcccacctggtctctcttcttagggtggctcctctctgtctctctgcctctgcctcttgtcctagcccagcatggccgcaggtcccaggttctgtgacatcacagtgcagtgcccacagctcactgttggttcctgccattgagattatctgattggccactggccagccaatggtggatcagactttggagcaggtgatccttggacgcccacagtacatcaccttcatgagcgcatcagtgaacaccagtctaaggaagacatctctgaacgtaattttggagattttgatgagttccattgaaacaaggaggaatgtgatgtccagtatcagttctgcagacccaaggacaaagaaaattctgtgataaactcatccagtgtgactgtaatgtgggtatctatttgatacctccaagtaactgtttattcttgtgccagttgagtagatggtacgggccagttggtgttgattagtgaaccacggacaaagggcatatgtcacatgagttgctcctgg

SEQ ID NO: 4734 - DNA, 578 bp, Homo sapiens
  MAP TO AC005276.1; EXPRESSED IN ADULT LIVER, SIGNAL = 0.88; EXPRESSED IN HELA, SIGNAL = 0.94; EXPRESSED IN BRAIN, SIGNAL = 1.5; EXPRESSED IN FETAL LIVER, SIGNAL =   2; EXPRESSED IN BONE MARROW, SIGNAL = 1.1; EXPRESSED IN PLACENTA, SIGNAL = 1.1; EST_HUMAN HIT: BE150340.1, EVALUE 0.00e+00; EST_HUMAN HIT: BE150340.1, EVALUE 0.00e+00; NT HIT: gi9635487, EVALUE 0.00e+00; SWISSPROT HIT: P10272, EVALUE 1.00e-30
cttccctgtttctcaccctgatcacacttggtttattgatggcagttccaccaggcctaatcgccactcaccagcaaaggcaggctatgcaatagtatcttccacatctgttattgaggctaccactctgcccccctccactacctctcagcaagccgaactagttgccttaactcaagccctcactcttgcgaaaggacaatgcgtcaatatttatactgactctaaatatgccttccatattctgcaccaccatgtggtcgtataggctgaaagaagtttcctcactacacaagggtcctccatcattaatgcctctttaataaaaagtctgctcaaggccgctttacttccaaaggaagctggggtcattcactgcaaaaggcatcaaaaggcatcagatcccattgctctaggcaatgcttttgatgataaggtggctagacaagcagctagctttccaacttctgtctctcacagcaaggcttatgctgataaggtggctagacaagaagctagctctccaacttctgtccctcacggccagtttttctccttcacatcggttactcccacct

SEQ ID NO: 4735 - DNA, 562 bp, Homo sapiens
  MAP TO AC010524.5; EXPRESSED IN HELA, SIGNAL = 1.9; EXPRESSED IN BONE MARROW, SIGNAL = 0.86; EXPRESSED IN BRAIN, SIGNAL = 0.85; EXPRESSED IN ADULT LIVER, SIGNAL = 0.92; SWISSPROT HIT: Q15562, EVALUE 5.00e-32; EST_HUMAN HIT: AL522254.1, EVALUE 5.00e-79; EST_HUMAN HIT: AL522254.1, EVALUE 5.00e-79; NT HIT: gi14757575, EVALUE 4.00e-79
acactccaagccatgaggactgactggtaagtcccaggctgacctggtagggcccgcgacagattctctcagggccagaggcctttgctgggacaccacaggatttgtgagcacttttgattttgctgtgagaactcacccagaacttgaccaggaagaaggcatggggggggccacgatcatatagctctcggaggccaccctttttctcagggaatttgtcgtagatctgccggacgtccacactctcgagcggcggcgctccggggctggggcagtgctggctgatgtgcacgaacaggtgcctctggtactgaggagggttggccgtgggtgagaagtcggaggtgagctggatctccagcctgtgctgcctgagcccaccaaatgccgtcaccatccccacagctctggccagctgttccacacagtccacccagcactgggcctgactgccacccatcgtccccactcctgcttctgcacccagtcccctgcagccctgcagtcctacagtccccaactccctgccacaactcccccaactccatcctcactgcct

SEQ ID NO: 4736 - DNA, 549 bp, Homo sapiens
  MAP TO AC026736.3; EXPRESSED IN BRAIN, SIGNAL = 3.3; EXPRESSED IN PLACENTA, SIGNAL = 4.4; EXPRESSED IN HEART, SIGNAL = 4.2; EXPRESSED IN ADULT LIVER, SIGNAL = 5.5; EXPRESSED IN FETAL LIVER, SIGNAL = 5.9; NT HIT: AF249924.1, EVALUE 1.30e-01; SWISSPROT HIT: Q9ZCK0, EVALUE 1.80e+00
gactcagacagcaaggagggaggaaggttagcctgcggttgcacccagctgcgaggagctgcaggaggtggagggaccaaggcaggagctgacgataaggaatttccaagcctatgagtatgacagcgccaagtgtcgggtctgtttcagttcagttgttttggtcccgttgaggggtgagggaccacgctggactgagattgccacagctgctgagcgtgatgatgactgagaagccatctaggtcaagcaccagggtctggttgctgactctctgccagtgtgctccagttcagacccaagcaattcaccttgcatttgcctgagtgaagtaaacaggatttctagaaagttaacggcagcagagcacgcatacctaagggcagtagttggcctactttattccatttcaatgtgtctaagctttttgttacaccatataaatatggaactgaagcttcttgtgtttaaattacccaatacctcttttcttcttgttttttcagacataaggtctttctttactgctgtctttgggttccgtctcaa

SEQ ID NO: 4737 - DNA, 546 bp, Homo sapiens
  MAP TO AF015726.1; EXPRESSED IN HEART, SIGNAL = 1.2; EXPRESSED IN ADULT LIVER, SIGNAL = 1.3; EXPRESSED IN FETAL LIVER, SIGNAL = 1.3; EXPRESSED IN PLACENTA, SIGNAL = 1.1; NT HIT: AL163268.2, EVALUE 0.00e+00; EST_HUMAN HIT: AA812988.1, EVALUE 2.00e-10; SWISSPROT HIT: O15534, EVALUE 5.90e-01; EST_HUMAN HIT: AA812988.1, EVALUE 2.00e-10
taccttgcatggcaatagggacttgggattttgcagatgtgattaagctaaggatcttgagaaggagaaattatcctggattatcggggcgggccctgaatgcaatcctaaaggtccttgcaagggggaggcaaaggaagacttgactccaagagaggagaaggccgtgtgaccatggaggcagagattggagccatgtggccaggagctcaggactgcctgctgccctcagttgctggcagaagcaaggaacgaattctcccctggatctttcagaaagaggcagctctgctgacatctcaatgtgagctacctgagacttacattgggcttctgatctctaggactgtaagggaattaatctctgggatgtttatgttctgggtttttttttttttttttttttgccactaaatttgtggtcatttgttacagctgcaattggaagggaatactgctattttccatatcccaatggcaatagcatggttagccagagtacccttcaagcacggtatacagtattctctcttttggggcagtctg

SEQ ID NO: 4738 - DNA, 585 bp, Homo sapiens
  MAP TO AC012313.5; EXPRESSED IN BONE MARROW, SIGNAL = 1.3; EXPRESSED IN PLACENTA, SIGNAL = 1.2; EXPRESSED IN ADULT LIVER, SIGNAL = 1.3; EXPRESSED IN HEART, SIGNAL = 1.8; EXPRESSED IN LUNG, SIGNAL = 2.5; EXPRESSED IN BRAIN, SIGNAL = 1.4; NT HIT: gi14755571, EVALUE 2.00e-31; EST_HUMAN HIT: BG820551.1, EVALUE 0.00e+00; EST_HUMAN HIT: BG820551.1, EVALUE 0.00e+00; SWISSPROT HIT: P28698, EVALUE 6.00e-15
aggctcacctttgtgtttccagctgcagagaaagtaccctgggccatgcagctgcactcccctcccaggaaaggggcaggatggctgcccagatgagtgaggcatcagccctggccccccaggtcttcccgagtccactggaactgatggtgggtgagcccagctccaagagccctggccagtgcttctgggggttctgctatgagaaggcagcagggccccgaggggccctggctcagctgcgtgagctgtgttgccagtggctgatgcctgaggcctgctccaaggagcagatgctggagctcttggtgctggagcagttattgggcacactgctcccagagatccaggcctacacgcaggagcagtggctaggcagccctgaggaggccactgccctggcagagcggctacagcaggagtcagctgggccaggactccagatgagtgggggctggtctgggggctgggtgtgcttcccctgctcacgaccccagctgagccagcactggggccagtcgtgggttggtggctgagagggcctgggggctgtgggaaagtgatggtgacaggtgggagtttggt

SEQ ID NO: 4739 - DNA, 593 bp, Homo sapiens
  MAP TO AC010169.7; EXPRESSED IN ADULT LIVER, SIGNAL = 0.61; EXPRESSED IN FETAL LIVER, SIGNAL = 0.5; SWISSPROT HIT: P32241, EVALUE 2.00e-20; NT HIT: U11083.1, EVALUE 0.00e+00; EST_HUMAN HIT: BI819409.1, EVALUE 8.00e-72; EST_HUMAN HIT: BI819409.1, EVALUE 8.00e-72
tatccttggattgaggggtggggtgggagggaagagggaggagggagagggagaagcagggggagaagaggagattacagtggttaaagataacggcgagactgagggaggtgggccagggccaggatcctcaccgagccctcggagcactggtccgactccccgctgtcgaagagggccaagtctttgatgaagacagcggcagccctcaggatgaaggatatgaagaggtgcatgtggatgtagttccgcgtgcagtggagcttcctgtgtggggtgggcagatctgggaggccaaaggggccttggatccccaccccagccaatgctgtcctatgtgctgagcaagggtggggcaggggagcatgtgtcctccagagggcaggccccgcctcaaaggggatcccatcctgaaatacgagccccacccccaggtaccccatccacctgtgcaactgggctcccaagggcctcaacctcgtgtgtggccccagaagcctcattcctgtgtgcaggccccactctctggtgccctgtccccaggtgcagggccatcctaggggagactaggctgcaacacatggaagagctca

SEQ ID NO: 4740 - DNA, 515 bp, Homo sapiens
  MAP TO AC000358.1; EXPRESSED IN PLACENTA, SIGNAL = 0.8; EXPRESSED IN ADULT LIVER, SIGNAL = 0.5; SWISSPROT HIT: Q90610, EVALUE 1.60e+00
atgctgaaacagatccccacaaattgcagcatcccatttgctttcagccattggctttcagccaccattctcaggggcagcttgaagccctgcctgggtaacctggttagtaggaggcatttctgaaatctcacactctgaatcaagccaaagtactttacacttgtaaaaatgtctatctgacttttctcagcccatcccagaggaaatgttttacgttaccacaagaaaataaattgctggaaaacaatgatgacaccatttctttcagcaaaacaaaacatgctaggattcaggtcgaattccgcgatgatccgcctgctgcaagcccaggttcttacaggaacgctgaccgggctgtctgctggtcgcgtggtgtgctgtttgttttagtctcacctgggggtctgaaggtgggggagaaggttggggtgagccaagctggagtttggatttcttagggactctccattagtttcctaggcagggtttgcagcgtctgtcaccactgaaga

SEQ ID NO: 4741 - DNA, 540 bp, Homo sapiens
  MAP TO AC010483.4; EXPRESSED IN LUNG, SIGNAL = 3.5; EXPRESSED IN PLACENTA, SIGNAL = 2.5; EXPRESSED IN ADULT LIVER, SIGNAL =   3; EXPRESSED IN HEART, SIGNAL = 2.6; EST_HUMAN HIT: BE243895.1, EVALUE 0.00e+00; SWISSPROT HIT: Q92628, EVALUE 3.90e+00; NT HIT: L78810.1, EVALUE 1.00e-116; EST_HUMAN HIT: BE243895.1, EVALUE 0.00e+00
ccccatctgctgagagctacctccactcaataaaaacttgcacttattctccaagcccaggtgtgatccgattcttccggtacaccaaagcaagaacctgagatacaaaaagctctctgtccttgcaacaaggtagagggtccaactgagctggttaaggtaagctgcctatcaatggaaaaactaaaagagcacagagcagtgtgtccgggattggtgggttcttggtctcactgacttcaagaatgaagctgaggccctggcggtgagtgttacagctcttaaggtggcgtgtctggagtttgttccttctgatgctcagatgtgttcggagtttcttccttctggtgggttcatggtctcgctgcctcaggagtgaagctgcagaccttcgctgtgagtgttacagctcttaaggcagcacgtctggagttgttcgttcctcctggtgggctcgtggtctcactggcttcaggagagaagctgcagatcttcgcggtgagtgttacagctcataaaagcagtgtggacccaaagagt

SEQ ID NO: 4742 - DNA, 561 bp, Homo sapiens
  MAP TO AC025182.2; EXPRESSED IN FETAL LIVER, SIGNAL = 1.9; EXPRESSED IN ADULT LIVER, SIGNAL = 1.3; EST_HUMAN HIT: BE463763.1, EVALUE 0.00e+00; EST_HUMAN HIT: BE463763.1, EVALUE 0.00e+00; SWISSPROT HIT: P31630, EVALUE 3.60e-01; NT HIT: AF224669.1, EVALUE 0.00e+00
tggccccttctacaatcaagaaagaggcacaatgcctagtgggcctgtttggattttggaggcaacatatttgtcatttgggtgtgttattctggcccatttatcaagtgactcaaaggctgccagttttgagtggggtccagaacaggagaaggctctgcaacaggtccaggctgctgtgcaagctgctctgccacttgggccatttgacccggcagatccaatgatgcctgaggtgtcagtggcagataaagatgctgtttggagcctctggcaggcccccataggtgaatcacagcagaggcctctaggattttggagcaaggccctgccatcttctgcaaataactactctccttttgagacaaagctcttggcctgttactgggctttgatggaaactgaatatttgactacaggtcatcaagtcaccatgcatcctgaacttcctattatgaactgtgtggtttctgacccatcttgccatgaagtagggcatgcacagcagcatttcatcataaaatggaagtggtgtatatgtgattgggtttgaggaggtcc

SEQ ID NO: 4743 - DNA, 557 bp, Homo sapiens
  MAP TO AL031007.1; EXPRESSED IN ADULT LIVER, SIGNAL = 1.2; EXPRESSED IN BRAIN, SIGNAL = 1.2; EXPRESSED IN LUNG, SIGNAL = 1.4; EXPRESSED IN BONE MARROW, SIGNAL = 1.5; EXPRESSED IN PLACENTA, SIGNAL = 1.1; EST_HUMAN HIT: AW367998.1, EVALUE 0.00e+00; EST_HUMAN HIT: AW367998.1, EVALUE 0.00e+00; SWISSPROT HIT: Q07960, EVALUE 3.10e+00; NT HIT: gi15308614, EVALUE 0.00e+00
atcacaatgccaccaatgacagttacatctaacttcaataaagtagaagaaaaagtagttaattattatcttaccactagttcctgggggttgtaatacatctcctgtcaggcgacaccacccagctgggaaaatatctcgagaatcatacttgcaccagtaatcaaaagctccactccagccatcaaatgtgatatgaacttcatcccctttaacatctccaatggtcgcaggacagatgagatacgggttctttttgtcaatagcttccagtttcatccccactttaaaattatttagtgggggctttggtggttcctatcaaaacattaaaaaaaaaaaagatttcattgttaagatgtattaagactcatgtgctcgaagtgaaaagttgcgtattctctcacaacccttagcaaccaaaaattaagctccatgtttaattatcaattaatacaggaagacaacagttctcacagatctgaaactctgctctccaacatctcatattttctctggagcagagtcaagaacctggaaagaaacaaaaccagccg

SEQ ID NO: 4744 - DNA, 558 bp, Homo sapiens
  MAP TO AC016619.5; EXPRESSED IN LUNG, SIGNAL = 2.9; EXPRESSED IN BRAIN, SIGNAL = 2.7; EXPRESSED IN BONE MARROW, SIGNAL = 2.1; EXPRESSED IN ADULT LIVER, SIGNAL = 2.1; EXPRESSED IN PLACENTA, SIGNAL = 2.4; EST_HUMAN HIT: AI793157.1, EVALUE 0.00e+00; SWISSPROT HIT: P17301, EVALUE 5.40e-02; NT HIT: gi6006008, EVALUE 2.00e-59; EST_HUMAN HIT: AI793157.1, EVALUE 0.00e+00
taagcaaattcaaggctggccttcaggagccctgtattttaaaatataaagcttttcttaccttccataaaattgcaaccagagctaacagcaaaaggattccagcaattatacttcctattataactcctgttggtacttcggctttctcatcaggtttcattatcatcaggggaatctggaaatgtcagttcacagttgagttattttaataccacaaaaaaggggggagatggtctagtccaattctctaattctgtaagtgaaggtctacagctctagaaaggtgacaagacttgctcatgatggcgtatctcaaacattgtcagaataattttagagaaaatcttcctgcaaagtccaaccagctaaaaaatacaacttttctagtttctccgctttaactacatcagtgtcttgtggctacatcatgcctgacaatctcagatgcttatcttacttatgaaatagaaacttccatttctggcatacattcaaatcaagtgaaagcatcatcaagtgaaagcaaacagctttggggaagggagtcgaagaaac

SEQ ID NO: 4745 - DNA, 577 bp, Homo sapiens
  MAP TO AC008795.5; EXPRESSED IN ADULT LIVER, SIGNAL = 0.87; EXPRESSED IN FETAL LIVER, SIGNAL = 0.93; NT HIT: gi11416983, EVALUE 1.00e-102; EST_HUMAN HIT: BI259579.1, EVALUE 0.00e+00; EST_HUMAN HIT: BI259579.1, EVALUE 0.00e+00; SWISSPROT HIT: P35307, EVALUE 5.50e+00
cagcaaagtccctgaagaggagcgaggcggctccgaggaaccgcggaggaagtgaagccagtcccgccactcttcagaccggccctccacctcggccaccgtcaccacagagctgaaggaggcctagagagccgcgcgtgccgcgccaccgagaccggaaggaggcggcacagacctggaggacgaccgcggagctgagcgcttagagccgccgaaccatagagatcggaaataggagcgagcggcagcgccggaaaggaggccaagagcgcgggcggcgaggcaagatggcggcaaccaagaggaaacggcgtggaggctttgcagttcaggcgaagaagccaaaaagaaacgaaatagatgcggagccgccagctaagcggcacgccacagcagaggaggtggaggaagaagagagggaccggatcccaggccccgtttgcaaggtaggaggggatgtccccgggctacacctgcggcggcggctctgtgcgccttttcttgggttacttacttgactacagccttgcttaatttcagagtagcccgggtgttaacggtaggtcggttttagcaa

SEQ ID NO: 4746 - DNA, 539 bp, Homo sapiens
  MAP TO AC005903.3; EXPRESSED IN BRAIN, SIGNAL = 5.7; EXPRESSED IN LUNG, SIGNAL = 3.3; EXPRESSED IN PLACENTA, SIGNAL = 6.2; EXPRESSED IN ADULT LIVER, SIGNAL = 6.5; NT HIT: gi14736240, EVALUE 5.00e-38; SWISSPROT HIT: Q02388, EVALUE 3.90e-02
ctctctgccaagactcacccgaaggccacgctcgcctgcttttccaggcaaacccgggtcaccctggtgatagagagaaaagtcatactgcacagggcagtcaggatctaactcactcagggagaggggacagagaagggtctgagcagcagctggacaggaggcagggagtggatggatgaactggtggagcaccagcctactgggatcctagttcaagggtaaaggatcagaaaccacagtgggaaggagtctcaccggaggaccctcgtcacctttctctccaacttcaccctgtgaaacatgagagtcagccctggttccaagaacccccatgatgctggcaacagccctactcccttacccgccatgactcccccgactccagcctcttacatctcgtcctcgggggccaacaggtcctggggggccaggccgcccagggtctcccttctctccaggaggccctgagtcaccctgtggaggaggcaagagggaggtgatgcaggacgctcgaagcaagcagttctcaaggggag

SEQ ID NO: 4747 - DNA, 586 bp, Homo sapiens
  MAP TO AF131216.1; EXPRESSED IN BRAIN, SIGNAL = 1.4; EXPRESSED IN HELA, SIGNAL = 1.2; EXPRESSED IN PLACENTA, SIGNAL = 1.9; EXPRESSED IN ADULT LIVER, SIGNAL = 1.4; EST_HUMAN HIT: AL522457.1, EVALUE 0.00e+00; NT HIT: AJ011500.1, EVALUE 2.20e+00; EST_HUMAN HIT: AL522457.1, EVALUE 0.00e+00; SWISSPROT HIT: Q29442, EVALUE 7.50e-02
ccagccacatacaaatgacgcctgccttcaactcacgggaagattacagatgtgcacttgggggttagagagaggggaagaaatacatggtgggggtggggagacagacagagagagacagaaaaagacacagagagacggtggcatctcctcttttctggggattcttgggggcagccactcaccagttccttcctgagccaggctatagcttcatcgatgctctgaaagccttccagcttgccagtggacaggggtctggcaccttggctggcactcctggcagaaggggggtgctgcccagcctctctcagggggagcaagggctcctgccccccacgctccccctcctccaagctcgcctgtggctccgcagccggcctcgggaagggccaggtatgctcctccagcctggcctgccattccaggtaggagggcctgcgggtctccagcctcagtttctcggtgagggccttcaggctccggaggtggtcatcgggtggtgcggctgctcccgccccctcttctgcacccacttcttccacgtggatctggggcacagacattctacagtctgccctggcag

SEQ ID NO: 4748 - DNA, 536 bp, Homo sapiens
  MAP TO AC011522.6; EXPRESSED IN PLACENTA, SIGNAL = 0.85; EXPRESSED IN ADULT LIVER, SIGNAL = 0.94; EXPRESSED IN LUNG, SIGNAL =   1; SWISSPROT HIT: Q03252, EVALUE 3.00e-10; EST_HUMAN HIT: BF795446.1, EVALUE 0.00e+00; NT HIT: gi14763476, EVALUE 0.00e+00; EST_HUMAN HIT: BF795446.1, EVALUE 0.00e+00
taccagtcccaccttccttgccttccccacaggctgaagctgtcccccagcccatcctcgcgcgtcaccgtctcacgagccacctcgagcagcagcggcagcttgtccgccaccgggcgcctgggccgcagtaagcggaagcggctggaggtggaggagcccttgggcagcggcccaagcgtcctgggcacgggcacgggtggcagcggtggcttccacctggcccagcaggcctcggcctcgggtagcgtcagcatcgaggagatcgacctggagggcaagtttgtgcagctcaagaacaactcggacaaggtgaccggaaagaccggggcatgggggtaacggggtgacccagctgatgggggtgaccagggtcagggtgacggggctgccggccaatgcgaggcaggggacaaggtgaccggaatgaccggggcatgggggtaacggggtgacccagctgatgggggtgatcagggtcagggtgacggggccgccggccaatacgaggcaggggacaaggtgaccggaatgac

SEQ ID NO: 4749 - DNA, 600 bp, Homo sapiens
  MAP TO AC000075.2; EXPRESSED IN BONE MARROW, SIGNAL = 1.5; EXPRESSED IN PLACENTA, SIGNAL = 0.72; EXPRESSED IN ADULT LIVER, SIGNAL = 0.5; SWISSPROT HIT: P54797, EVALUE 1.00e-09; EST_HUMAN HIT: BI028475.1, EVALUE 7.00e-91; NT HIT: X74504.1, EVALUE 2.00e-06; EST_HUMAN HIT: BI028475.1, EVALUE 7.00e-91
cactccccagagccagttaggccaccaggtgggctggggctagacccggctgcgggcgggccacagagggactaatggccaccacttctctccatcctgcaggcagctgccagacccggccatcgaggaccagggtggggagtacgtgcagcccatgctgagcaagtacgcggctgtgtgcgtgcgctgccctggctacggcaccaggtattgcagcaccgtgggtgcgccacctcctatcccatgtcccacctcccacgctagagggccggcaaagaagccaagtgcccatagccagagccaggcttcttcctcgcctgagtggattccagagcttctgccctgtccagacgcagctgcagggtgagcagataccacaggctcccggggccccacaggctgggcttaaggagccagtacacagccacacagggccaggatggcttcagggctgcctgcacattggtggatccctgcgggcaaacgccccggcaccatggcactaggcctgcaggctgtacccttgggtggtggctgctggccagcctttcctgcctggggctggctggcccattggcaggtgcagggtgtcatttcctt

SEQ ID NO: 4750 - DNA, 551 bp, Homo sapiens
  MAP TO AC012082.6; EXPRESSED IN BRAIN, SIGNAL = 2.9; EXPRESSED IN FETAL LIVER, SIGNAL = 2.5; EXPRESSED IN BONE MARROW, SIGNAL = 3.8; EXPRESSED IN PLACENTA, SIGNAL = 2.2; EXPRESSED IN ADULT LIVER, SIGNAL = 2.6; SWISSPROT HIT: P30304, EVALUE 3.00e+00; EST_HUMAN HIT: BE549957.1, EVALUE 0.00e+00; NT HIT: D89593.1, EVALUE 1.30e-01; EST_HUMAN HIT: BE549957.1, EVALUE 0.00e+00
attatacctccagcaccccccacccccaccccaatgggattggaaaagggttgagtttacagaagagagagagcagagaagggtgggtggaaggtggggaaggcgaaggagaggcagggaataggaagttctcggcaatccccgggattaaggtaaacgccggagctcggcggacgcaggaagctcccttacctttctctctaagccccgtttgcacctgatctgcaaccataaatacttcgtggtgcttagtgtgcagccaaacgatggccaaatgttaaacaattcttcacgctccctcccccttttaaaaaacaggctcaaaagaatgttaatagtgttcttgttatccatcggctccaaaacattccgcttcgtggggaggagagacgaaaaccaggcccttgggcacgcgtatatgtatttatatattatgcggtcggtatataaacatatatacgtttcctgcatgtaaatccaaaatgaaaagcaccacagatgcttctgtaagcgggaggggacagcgaagagcaaaacttggcaagccaaat

SEQ ID NO: 4751 - DNA, 530 bp, Homo sapiens
  MAP TO AC010203.13; EXPRESSED IN ADULT LIVER, SIGNAL = 2.1; EXPRESSED IN BRAIN, SIGNAL = 2.2; EXPRESSED IN HELA, SIGNAL = 3.6; EXPRESSED IN PLACENTA, SIGNAL = 1.9; EST_HUMAN HIT: BG741794.1, EVALUE 0.00e+00; SWISSPROT HIT: Q62839, EVALUE 2.00e-15; NT HIT: gi14745306, EVALUE 8.00e-74; EST_HUMAN HIT: BG741794.1, EVALUE 0.00e+00
cgagaggcccttactgtctgcttcccttcttacctgaacccctgcccctggaactcccagcagggccctccaaggtggagcagcagctacaagcagaggctgaccacctgcagaaggagctggagagtctggcagctccgagcccaggagcaagacactgagggcttcagtcacccgaaccaggagtaggaggagaggctgctggagctggagcaggtggccgagctcttgcgggagcaggcagagtcacgcaggcaaatcctggagaccatgcagaacaaatgcaccaccatcagccacgtgctcacccagaaccacaagctcaaagagcagctgtctccgctgcagaacggattcataaagctggtgcgtgaccccatctggaaagcctgctctcctccctagcactcccggcctttgttttcccacccataaaatgaggcagtgtacccctaatgtgagatggtaattctgaaggtacctgtgaaccagagccctgctctgatggctgtggggaagagggaatgatt

SEQ ID NO: 4752 - DNA, 585 bp, Homo sapiens
  MAP TO AC019209.3; EXPRESSED IN LUNG, SIGNAL =   2; EXPRESSED IN BRAIN, SIGNAL = 1.5; EXPRESSED IN ADULT LIVER, SIGNAL = 1.5; EST_HUMAN HIT: AA306938.1, EVALUE 0.00e+00; SWISSPROT HIT: Q13569, EVALUE 2.00e-32; NT HIT: gi13650432, EVALUE 0.00e+00; EST_HUMAN HIT: AA306938.1, EVALUE 0.00e+00
tgtttacttggctgtggctgttcttcctatttattttgtattatggtgagcagttttgacccatcatgtaggataaaaagtcaacaggtgaggtctctggggttgtcttaccgcagtgagtaccacgcggtactacagagaccggctgcccgtgtgcctggcaggtggagctgcccgcatcagcggcctcggggaatggaagcggagaacgcgggcagctactcccttcagcaagctcaagctttttatacgtttccatttcaacaactgatggctgaagctcctaatatggcagttgtgaatgaacagcaaatgccagaagaagttccagccccagctcctgctcaggaaccagtgcaagaggctccaaaaggaagaaaaagaaaacccagaacaacagaaccaaaacaaccagtggaacccaaaaaacctgttgagtcaaaaaaatctagcaagtctgcaaaatcaaaagaaaagcaagaaaaattacagacacatttaaagtcaaaagaaaagtagaccgttttaatggtgtttcagaagctgaacttctgaccaagactctccccgatattttgaccttca

SEQ ID NO: 4753 - DNA, 522 bp, Homo sapiens
  MAP TO AC026774.4; EXPRESSED IN BONE MARROW, SIGNAL = 0.94; EXPRESSED IN PLACENTA, SIGNAL = 2.5; EXPRESSED IN HEART, SIGNAL = 2.1; EXPRESSED IN ADULT LIVER, SIGNAL = 2.8; EXPRESSED IN FETAL LIVER, SIGNAL = 2.5; EST_HUMAN HIT: AW903250.1, EVALUE 7.30e-01; SWISSPROT HIT: P35275, EVALUE 1.60e+00; NT HIT: AF162137.2, EVALUE 5.00e-01; EST_HUMAN HIT: AW903250.1, EVALUE 7.30e-01
gatcatcatttggtccctggcttctgactctcattacagccagtgtcagtgggcatgttgcctgctcatcacagccagctacacacctgatgccagtgctttccacatgatatgcactcagagggtctgtatcccagaccctgccaataatggcatccactgcccatatcaccaatccctctgactgggctgtcacacggcaatgctggctgtcgctggagcagtaggcaagacctacacaccccttcttgctgctgttaccttgatccactcggtacctgccaggggctgctcccaggcccagttacctgactctgcagttgggcagcatcatcaagtggcttgtaggttcagtaactaagaaattgcacttcctgatggaggtgcttaaccctctcaaaccctctattgatcaaatagcaattacattaaggattatcttgcccataaaagactgcctgagaccttaatatattcaatatctttattattacctaggtcacaatgtaacaggaggcccat

SEQ ID NO: 4754 - DNA, 555 bp, Homo sapiens
  MAP TO AF022794.1; EXPRESSED IN ADULT LIVER, SIGNAL = 1.1; EXPRESSED IN FETAL LIVER, SIGNAL = 0.97; EXPRESSED IN LUNG, SIGNAL = 0.7; EXPRESSED IN BONE MARROW, SIGNAL = 0.66; EXPRESSED IN PLACENTA, SIGNAL = 0.93; NT HIT: AJ229042.1, EVALUE 0.00e+00; EST_HUMAN HIT: BG745825.1, EVALUE 2.00e-01; EST_HUMAN HIT: BG745825.1, EVALUE 2.00e-01; SWISSPROT HIT: P32386, EVALUE 3.10e+00
tcctttgccatctggtatccagttgttttaactgggtttccagtatttgcatcagtcatttacaagaacctttttaacctttacaaaataaaataattgaaatctatcctttcaacttcacatttgtttcagaaaggctttgaaatcaaggcacagaggggatgaaagacaggaggatgtgaaaagaaaagggcttggcttttctccctctgagatgatcagaaagggtgccttggaggtgcagagtcctgcgctggagagggttattgcctccattatgggctcgtctctgtggaaaatctctcccctgccatggtgagtggagaggcagaagagctggggaaagacgtgctcttccttgaccctgggtcctgggtctgcaaatcttctctgtgtataaactgcatccctccacacctgccccacactgcccatgattcttcatttctcactttgtttctttctcttgcttaaaccatgagttcctgccttgctcagatggagaggaaaggaagagaaatccacacgtgtgtatggtgctgattcttttcagcc

SEQ ID NO: 4755 - DNA, 529 bp, Homo sapiens
  MAP TO AC005952.1; EXPRESSED IN ADULT LIVER, SIGNAL = 3.9; EXPRESSED IN HEART, SIGNAL = 3.9; EXPRESSED IN LUNG, SIGNAL = 5.5; EXPRESSED IN BRAIN, SIGNAL = 4.5; EXPRESSED IN BONE MARROW, SIGNAL = 5.6; EXPRESSED IN PLACENTA, SIGNAL =   3; EST_HUMAN HIT: BE746499.1, EVALUE 1.00e-110; NT HIT: AB006628.1, EVALUE 1.00e-110; EST_HUMAN HIT: BE746499.1, EVALUE 1.00e-110; SWISSPROT HIT: P39188, EVALUE 6.00e-07
gttgaatagcgcatggtgtggcaagacaggatggcccaagctgtgtcctctctctcattctcattcttcctagttctcccgcccgggtccccagtctgtgcctctgcagctcagtgcccactggcagtgtggagccaccctcacccaggtctcagtggagtacggctaccggcccggtgccacggctgtgcccacaccactcacgaacgtccagatcctgctgcctgtgggggagcctgtgaccaacgtccgcttgcagccggctgccacctggtgagggcttgcgggaggccaaggaaaactcagcagtttcccccataaccccagaccttctccctgatgcattgattaaagggtgcaccctcggcctgaccgttaactgtgagcccaccctgcttagcactaagggtgatattatgagtgccaggtgcagtggctcatgcctgtaattgcagtgctttgggaggctgaggtgggaggatcacttaaggccaggagtttgagaccagcctgggcaatatggtgagat

SEQ ID NO: 4756 - DNA, 577 bp, Homo sapiens
  MAP TO AL031600.4; EXPRESSED IN PLACENTA, SIGNAL =   4; EXPRESSED IN ADULT LIVER, SIGNAL = 2.7; EXPRESSED IN HEART, SIGNAL = 3.1; EXPRESSED IN FETAL LIVER, SIGNAL = 3.7; EXPRESSED IN BONE MARROW, SIGNAL = 2.7; EXPRESSED IN BRAIN, SIGNAL = 2.8; EST_HUMAN HIT: BE243069.1, EVALUE 0.00e+00; NT HIT: gi14774660, EVALUE 1.00e-91; EST_HUMAN HIT: BE243069.1, EVALUE 0.00e+00; SWISSPROT HIT: P51798, EVALUE 1.00e-24
gacacttttgtcctgccctgggacttctgctccggcccgcgatgccgcaagacctggctcagctgcagggccccacagcctcccctccggccccactcaccgccgcccccgtgaggtaggacagggagatcccaaagagccggccccaggcagccccgatgagcagggacgggatgaagaccccggcagacaccgtgagcccgtaggtccagcaggccaggaagaagtagaccagcgtgaacaggccgagggtcagggggttgtaggagcctaggagagaagaggggctgacggggcctccacgactcccgcctccgcaggactgccctgccccgctgcccagtctcgggcctcacagtcaccttccaggagcccagcaacctgagctcccgagcccagcggtccccagaaggctccctgttctcagcctccctgggaagcagaaaggctaaaaggatcccatggggaggccacaggggaagaggctctgcggggccctgatgccagcagaagcaggagccgcgtccagcggggcggcccagctgggtctagcagcgccaggtctacactccatggg

SEQ ID NO: 4757 - DNA, 596 bp, Homo sapiens
  MAP TO AC005307.1; EXPRESSED IN ADULT LIVER, SIGNAL = 1.5; EXPRESSED IN BONE MARROW, SIGNAL = 1.3; SWISSPROT HIT: P34217, EVALUE 4.40e+00; EST_HUMAN HIT: AW850765.1, EVALUE 0.00e+00; NT HIT: AJ133269.1, EVALUE 0.00e+00; EST_HUMAN HIT: AW850765.1, EVALUE 0.00e+00
ggccttttgaccttttagggtctagggctgtaaagcatttcagggttgctgccaaacgagccatgaactgggctggatttttatatttgatgaaaaagagcctaaacgctgtctgatttgggataaagaaaaaggagcattaaccttgactatgcttttagctccatccacctttttaagagtaaattgctgggcaggtgggggagggctagtcaaggaacgaaactgtaagccggactgggtgtgaggaggcgaggtgataaaaggattacagggtggaggagcggaagctgaggaggaattgggacctagctcagcctggagaggaggggagaggtcagatgggtctgtagaaaaggaagattagaaagactcagcgacacttggggttgggactgaggggacaggtgggagggaaagaaggaagatttgggacgagttgcattgggaacagagactagggagggaccaatgtgtaaaagaatgcctggacgtcagcacctcagactgtttgcctattttacgacaagaattatttagatcttgtaggatggaaaaattgaaagtgctgttttccggctattcggaactactgc

SEQ ID NO: 4758 - DNA, 595 bp, Homo sapiens
  MAP TO AF274857.1; EXPRESSED IN BRAIN, SIGNAL = 1.1; EXPRESSED IN BONE MARROW, SIGNAL = 1.5; EXPRESSED IN PLACENTA, SIGNAL = 1.8; EXPRESSED IN ADULT LIVER, SIGNAL = 1.1; EXPRESSED IN HEART, SIGNAL = 1.2; SWISSPROT HIT: P73177, EVALUE 3.40e+00; EST_HUMAN HIT: BG461002.1, EVALUE 8.40e-01; NT HIT: AF273228.1, EVALUE 3.60e-02; EST_HUMAN HIT: BG461002.1, EVALUE 8.40e-01
gtcctctatgcacctttgccacctacatttgaaataatcattcatgtattgagatgttttgatcttgtactatatccatctatgaggtctccacttatgattattttctcataagatgtctcttggctctaagtgagccctggctaattttccatggttgtatgaatgtgcttatgccctttagctatggtcttctgctcattcatcatgatttgtgaaaatgcaccatcgttgtctacattgtactaaaaatggaattttctgtaccatgaatataattttgtgtaccatgattttttgtcatacagtgtgtttgcctccttcttcgtcctcagtatctactcctatatattggatgtcagcttctgttgcagaacctgagtgtgcatcgtggtcaaatgctcagactcctgtggtggctgctcatgcaccacggatgtttgagcatgtgctacggtgtctacttttgctacattgccgtctgcttctggaccaaagccatttgttcctgtgctctgtgtttctaatcttgtatcacatccatatgaggaagcatggcaccatcagtgtatgtgcacaatgctcactgcttgga

SEQ ID NO: 4759 - DNA, 561 bp, Homo sapiens
  MAP TO AC012331.9; EXPRESSED IN ADULT LIVER, SIGNAL = 2.4; EXPRESSED IN LUNG, SIGNAL = 7.9; EXPRESSED IN BRAIN, SIGNAL = 3.1; EXPRESSED IN HELA, SIGNAL = 3.3; EXPRESSED IN FETAL LIVER, SIGNAL = 6.9; EXPRESSED IN BONE MARROW, SIGNAL = 5.2; SWISSPROT HIT: Q9Y2N3, EVALUE 7.00e-04; EST_HUMAN HIT: AL041957.1, EVALUE 0.00e+00; NT HIT: gi7657020, EVALUE 0.00e+00; EST_HUMAN HIT: AL041957.1, EVALUE 0.00e+00
cccagaggtcagaaccagagatcccagacctcccggaccagctcgtgccccaaatgaaatgccatctcgagcccctacagctctacgggaggcctcccggaacgaaagtggaagaggggccagcctcatcccactgccagctgaccctcagttcctcaaacacagtgagtgaggacggacctcaggctgtctcttcgggtcacacccagtgtgaaaagacggcagatacagcaccagggcagacactcgctcccaggggtggctcccccatatcccaggcctctaggccccgtagatgcaagtttcccctgctgccacgcaggcgaggggagcctttgatgctgccacctcccttagagctggggtaccgggtcactgctgaagacctggactgggagaaggaggcggcattccagtgcatcaacagtgcactgcaggttgaggaccaggccatctcggactgcagaccctcacggccttcccacactttgtcctcacttgcaacaggggcttctggtctgcctgccgtttctaaagcacccagtatggatgcacagcagg

SEQ ID NO: 4760 - DNA, 542 bp, Homo sapiens
  MAP TO AC000363.1; EXPRESSED IN ADULT LIVER, SIGNAL = 0.42; EST_HUMAN HIT: BG722120.1, EVALUE 1.00e-118; SWISSPROT HIT: O00222, EVALUE 2.00e-36; EST_HUMAN HIT: BG722120.1, EVALUE 1.00e-118; NT HIT: gi14753087, EVALUE 1.00e-121
tcaggcatcagcaatctgtcacctccaaatacaatcatctgataaatatatgcttaccaatctccctcgagatctgggtgaaggcctccacaccgctctcaccatagttcccctcagaagccagtgtcgaaacataattccatcccagtgctgtcacgatgtccaccatggcttgggcttggtaggagtcaggcggaaccactcgagagaaaaagtcatacctggtgttatcacttagctctggggctgtggatgcatagctgatttgaggtatctgcaaaacaaatgatgggtcatttcaacccatgacgaatcttgaagaatgatggattgtcatatgagctaaacagccaaggctataccagaaacctagacatatcaacctgaagccaaaatacagttttatgactaccaatttaattggaaagtatttttgaatggcccataggcttactttctctcaatgcacaatatttctaaacagtgagaaagaatttcattttgctttagtttccattgtttctggagccaaagcaaaacat

SEQ ID NO: 4761 - DNA, 526 bp, Homo sapiens
  MAP TO AC006022.1; EXPRESSED IN ADULT LIVER, SIGNAL = 1.1; EXPRESSED IN HEART, SIGNAL =   2; EXPRESSED IN BONE MARROW, SIGNAL = 1.3; EXPRESSED IN BRAIN, SIGNAL = 1.3; EXPRESSED IN PLACENTA, SIGNAL = 0.69; EST_HUMAN HIT: BG749253.1, EVALUE 2.90e+00; SWISSPROT HIT: P40936, EVALUE 6.00e-18; NT HIT: gi6678280, EVALUE 2.00e-12; EST_HUMAN HIT: BG749253.1, EVALUE 2.90e+00
acttgtgaccttgggaccaggtaacaggaatgaagaggtagggctgagacctgacctgcttttagggggagctgtggggcaagactgtagatgctctggtcatgacttcccctctcggtcaggccctcttctgccaggctggcctcagacactggggcccttgcaggcagccacaaagcagatgccgtcgttgatggagcatgtctcagagcagctgatggggcacacctctgcacctggcagccagcctcctgcatggccttctccaccgtctccttctctgggtggagcccaaagaacttcttggagcctaccatatagtgggagtgcagggcagccatggtgaccaggttcccatctgctttcagcaggctggccagcctctgcagggctgcccagtacatgtccacatcaggacaggcactcttcaggggacacctggattgaccccagtggatgcagcttggtcatatcgcacttcagcaaccacgtgactgtccagcaaagctggttctccttctcatgc

SEQ ID NO: 4762 - DNA, 508 bp, Homo sapiens
  MAP TO AC016628.5; EXPRESSED IN BRAIN, SIGNAL = 3.2; EXPRESSED IN BONE MARROW, SIGNAL = 2.7; EXPRESSED IN ADULT LIVER, SIGNAL = 2.4; EXPRESSED IN LUNG, SIGNAL =   4; EXPRESSED IN HELA, SIGNAL = 3.1; EXPRESSED IN FETAL LIVER, SIGNAL = 5.4; EST_HUMAN HIT: AV755078.1, EVALUE 0.00e+00; SWISSPROT HIT: Q05481, EVALUE 1.00e-103; NT HIT: gi14755315, EVALUE 0.00e+00; EST_HUMAN HIT: AV755078.1, EVALUE 0.00e+00
tgctttgccacattcttcacatttgtagggtttctctctagtatgaattctcttatgtccatttagggttgaggatgatataaatgctttgccacattcttcacacttgtaaggtttctctccagtatgaattatcttatgtgtagtaagctttgaggatcgattaaaagctttgccacattcttcacatttgtatggtttctctccagtgtgcatcctcgtatgtctagttagggttgaggattggctaaatgctttgccacattcttcacatttgtagggtttctctccagtatgaattatcttatgttcagtaagagttgaagatttcctaaaagctttgccacattcttcacatttgtagggtttctctccagtatgaattatcttatgtgtagtaagggttgaggattggctaaaagctttgccacattcttcacatttgtagggtttctctccagtgtgcatcctcttatgtgtagtaaggtgtgaaggctggctaaatgct

SEQ ID NO: 4763 - DNA, 561 bp, Homo sapiens
  MAP TO AF260011.1; EXPRESSED IN BRAIN, SIGNAL = 1.2; EXPRESSED IN FETAL LIVER, SIGNAL =   1; EXPRESSED IN BONE MARROW, SIGNAL = 1.3; EXPRESSED IN ADULT LIVER, SIGNAL = 0.95; EXPRESSED IN HELA, SIGNAL = 1.2; NT HIT: AL163248.2, EVALUE 0.00e+00; EST_HUMAN HIT: AL520475.1, EVALUE 5.00e-67; EST_HUMAN HIT: AL520475.1, EVALUE 5.00e-67; SWISSPROT HIT: Q9Y5N5, EVALUE 9.00e-09
aaagatacgcctttgcatggtaagcagtcagggagctcatgagacagagcagccccctggcaaaggagatgcgtccccggcacactcattacttgtagctacaggaaaattctcaattacggcgtcctggctgtcaatcatctgcaaatggaccccgcctgctccggctcagggcggtgatagtcaccgttccggccctcctccaccgcacttcttcagaaagccgcaaccctttcccgtcagagcccctcccctcctcgcaccctgccagttcggcagccgctgcctcgagcgcgtccaaaagcagaaacgtgtcctccgcgggctcgtacacgtcgctgaaggcgccgcggcccacgtgcccgtggaacggcgtagcgaagttctcccctgccatagtccttcgctgcgttccatgcgcgtgcgcagggcgtgcgcatgcgcatgcgcatgccctcgccctcatgcgcaggcctaggagtggggctggcgtcccgggcgaccagtgtgttgttgttgggtcttaattctaaatttgtcagtggctctccttgaaattgc

SEQ ID NO: 4764 - DNA, 563 bp, Homo sapiens
  MAP TO AC004004.1; EXPRESSED IN ADULT LIVER, SIGNAL = 0.85; EXPRESSED IN HELA, SIGNAL = 0.92; EXPRESSED IN PLACENTA, SIGNAL = 0.76; SWISSPROT HIT: Q03923, EVALUE 1.00e-71; EST_HUMAN HIT: BI560594.1, EVALUE 1.00e-128; NT HIT: gi13650821, EVALUE 1.00e-117; EST_HUMAN HIT: BI560594.1, EVALUE 1.00e-128
cccaagactttttgccagagaagaacatagaagagtctttgcacaaagtaacactgagaagatatgaaaaatgtggacattaagaaatttctgttaaaagaaggctataaaagtgtggatgagtgtaaggtgcacaaagaaggttataatgaacttaaccaatgtttcccaactacccagagcaaaatatttcaatgtgataaatatgtgaaagtctttcataaattttcacatttaaaagcatataagataagacatgctgataagaaacctttcaaatgtaaagaatgtggcaaatcattttgcatgctgttacacctaattcaacataaaagaattcatgctacagtgaagttttacaaatgtaaagaatgtggaaaagtctataacagatcctcaacctttactacacataagagaattcatactggagagaaaccttacaaatgtgaagaatgtggcaaagcttttaaccagtctacaaaccttactagacataagagaattcatactgcagagaaaccctacaaatgtgaagaatgtggcaaagcttttaaccatcc

SEQ ID NO: 4765 - DNA, 529 bp, Homo sapiens
  MAP TO AC012085.4; EXPRESSED IN BRAIN, SIGNAL = 1.9; EXPRESSED IN HELA, SIGNAL = 1.2; EXPRESSED IN BONE MARROW, SIGNAL =   2; EXPRESSED IN PLACENTA, SIGNAL = 1.6; EXPRESSED IN ADULT LIVER, SIGNAL = 1.8; SWISSPROT HIT: P35335, EVALUE 1.30e+00; EST_HUMAN HIT: BE152228.1, EVALUE 1.20e-02; NT HIT: AF100956.1, EVALUE 8.00e-03; EST_HUMAN HIT: BE152228.1, EVALUE 1.20e-02
tcagcccgagatactggaagcgacttgaccttgatttacatatacaaggaacggaaatgaattagcccggctagatatttctaggaactagttaagggagaatgaacaagatgggagcgaggagaaagcgtgtgtgcgttcgtgtgtggctgtctgtctgtctgtctgcggcaagaggaatctcagagtttcggttatttctccttgaagaattttcaaacggagttcctgcaggggctggctctagcgtctacgatgtgcacacactgtctctcaagagggaagtgatcctggcgccacggggtgatgcagcagaagttctttttgtctgtggccagggtagagtgcggagccccacggagctgtggcgtggcggctcctcccagacgcgtccggggcgccgctcgggtctcccaggaccttatgtaacccagcgtcggcagcaaggagccggtcacaggctgaccaacgtcaaggcgtttcactttggaagcgcaccagatgagtgtggtattgagagcagacggct

SEQ ID NO: 4766 - DNA, 539 bp, Homo sapiens
  MAP TO AC010205.5; EXPRESSED IN ADULT LIVER, SIGNAL = 1.6; EXPRESSED IN BRAIN, SIGNAL = 1.1; EXPRESSED IN BONE MARROW, SIGNAL = 0.61; EXPRESSED IN PLACENTA, SIGNAL = 1.7; SWISSPROT HIT: P08548, EVALUE 3.00e-18; EST_HUMAN HIT: BE064775.1, EVALUE 5.00e-05; NT HIT: AE008683.1, EVALUE 5.00e-04; EST_HUMAN HIT: BE064775.1, EVALUE 5.00e-05
tcatgtcatcggtgaacaaagacagttttttttttcttctattcaaaccaagatagttttatttcatccttctcaatctgtttaccttttatttcctttttttgtcttactgcatcagctaggacttcaggtacaattttgaataagaatggtgatgggaggaggagtccacacttgtcttgttcctggttttaggaggaaagcatgtagtttctcatcactaagtatgatattaggtgaaactgtttttgtggatgctctatcaaactgaggaagttctcctgtattcctagtttgctgaacatttttatcataaattaatgttggattgtcaaatgctttttctgcatctattggtatcgtcatacaatttttcttctttagcttgttgatgtgaaggattttatgaattgatttttggttgttaaaccaggcttgtatacctgggatgaatcccagttggttgtggtaaataattctttttatatattgttggatttgatttgataatattttactgagggttttcgcatctgtgt

SEQ ID NO: 4767 - DNA, 590 bp, Homo sapiens
  MAP TO AC016601.5; EXPRESSED IN PLACENTA, SIGNAL = 0.72; EXPRESSED IN ADULT LIVER, SIGNAL = 0.75; EXPRESSED IN FETAL LIVER, SIGNAL = 0.8; EXPRESSED IN LUNG, SIGNAL = 0.54; EXPRESSED IN HELA, SIGNAL = 0.64; EXPRESSED IN BONE MARROW, SIGNAL = 0.61; SWISSPROT HIT: Q9UPN3, EVALUE 2.90e-01; EST_HUMAN HIT: BG122957.1, EVALUE 1.00e-12; NT HIT: gi14741379, EVALUE 7.00e-13; EST_HUMAN HIT: BG122957.1, EVALUE 1.00e-12
aaatttccctgaggaccaaaggcactaaacttacagataaagactttaagtcagttgtcttacatatgcccacagtactaaaggaaaccatagatgcactaaaggacatcaggagaatgatacatgaacaaatagagaatatcaataaagagacagaaattataaaaaggaaccaaatagaaaatctggagctgacatatgaacaaatagagaccatcaataaagagatagaaattacagaaaggaaccaaacagaaaatctggagctgaaaactacaatgactcaaataaaaagctcactagagggttttaatagcagatgtgggcaagcagaaaaaataaccagtgaacatgaagataggtccactgcaattatccaatctgaggagcagaaagaaaaaaggatgaagaaaaatgatcagagcctaaaagaccagctggacaccataacagtataccaacttacacataatgggaagcccagaagagaagagaaagaaaaaaaatgatttgaagaaataatggctaaaaactccccaaatgtaaaaaaaagacacaaatctatacagtcaagaagctcggtgaactcc

SEQ ID NO: 4768 - DNA, 525 bp, Homo sapiens
  MAP TO AC005783.1; EXPRESSED IN BRAIN, SIGNAL = 5.7; EXPRESSED IN BONE MARROW, SIGNAL = 6.3; EXPRESSED IN PLACENTA, SIGNAL =   6; EXPRESSED IN ADULT LIVER, SIGNAL =   6; EST_HUMAN HIT: BG108176.1, EVALUE 1.00e-91; SWISSPROT HIT: Q03391, EVALUE 5.60e-01; EST_HUMAN HIT: BG108176.1, EVALUE 1.00e-91
gaaaactacagagcggcagggacgccaggacctcccgggagacatggtaggctacagaaggtatgcacgggagggtggcttgtgaggggtgtgtgcaggaagaccctggctgtgggggcaatggggcctttctggaagctggccaggtggctatggtggccgtgcacaggaggggctggccccaccttggtggcagaaggtcagccgccgctcctcgcctgtctcgatgttggccacccacaggtcgctgttattgatgaaggagaagaaggcagggtcggcagggcagattttggggtccatccggggccctgagcactgggtcttgatttccagcggtttcataggggacacctgaggacagagacgcccagctcagggggaggggccctccacgccacccccgcacacagccagggccagggctcaccatgaagccgttcttgccgccgtcgcggcagtggaagaggctgttgctggcctggaagaggaagaggccactctcgctgtggaagtcgtaggagg

SEQ ID NO: 4769 - DNA, 537 bp, Homo sapiens
  MAP TO AC009003.7; EXPRESSED IN BONE MARROW, SIGNAL = 1.4; EXPRESSED IN PLACENTA, SIGNAL = 1.2; EXPRESSED IN ADULT LIVER, SIGNAL = 1.2; EXPRESSED IN BRAIN, SIGNAL = 1.4; EST_HUMAN HIT: AW408612.1, EVALUE 9.00e-87; SWISSPROT HIT: P02462, EVALUE 7.60e-01; NT HIT: gi14757758, EVALUE 6.00e-87; EST_HUMAN HIT: AW408612.1, EVALUE 9.00e-87
tcctggcactgcacaactacctgggtctgaccaatgagctcttcagccacgtgagtgggtggcggggagcgagcacaggggggatgggggcgaggtctccctcccaggacaggccacaagctgttctctgcccccaggagatccagcccctgcgtctgttccccagccccggcctcccaactcgcaccagccctgtgcggggctccaagagaatggtcagcacctcagctacagacgagcccagggagaccccagggcggccacccgatcccaccggggccccgctgcctggacctacaggtacccagggacccgaggccagccgagcccaatctcccaggaagccccgtctcagccgccagcccctttttcagttctgcatagagtcaacctgaccttgtccagccccacagggactccatagcggggtacccaggtctgactcctatctggtaccgaggaagctctggcctcgtccccaagggcccattggaattgctttaactagttaatcagtcgccagcatctccttatctc

SEQ ID NO: 4770 - DNA, 542 bp, Homo sapiens
  MAP TO AC010617.5; EXPRESSED IN ADULT LIVER, SIGNAL = 0.92; EXPRESSED IN BRAIN, SIGNAL = 0.77; EXPRESSED IN HELA, SIGNAL = 0.51; EXPRESSED IN PLACENTA, SIGNAL = 0.44; EST_HUMAN HIT: BF032374.1, EVALUE 3.00e+00; SWISSPROT HIT: O02755, EVALUE 2.00e-01; NT HIT: Z28605.1, EVALUE 1.30e-01; EST_HUMAN HIT: BF032374.1, EVALUE 3.00e+00
ccatgctgtgggtctcaacatttgatattcttgtttctattgcagtttgtaagtagttttcagaagacagagttagaggcaagctgcgtgggttgctcggtactgaattataggtgagttggagcttccattgggtgaaggaaacttggtggacatctgggagtttctggaggagtccagaaaagtttggaagattctagaagattccagaagattccagcagggcggagcccctccctctccaagggcctctcctccatacctgtagggatgggaactccagtgtcctcgtacatttccagctgcactttctgctgcgacccctccagacgctgagcctgggcctggaggaggagctattgcagcgagggatccgggcaaggctgcgggagcacggcatctccctggctgcctatggcacaattgtgtcggctgagctcacaggtgagtgggcagccgagaccgaaaccccatcacgaggaggctggagtggggcaggagctgcaagatacattttgataaccaccccttcccataaaaag

SEQ ID NO: 4771 - DNA, 504 bp, Homo sapiens
  MAP TO AC008536.5; EXPRESSED IN BRAIN, SIGNAL =   3; EXPRESSED IN BONE MARROW, SIGNAL = 1.4; EXPRESSED IN PLACENTA, SIGNAL = 2.3; EXPRESSED IN ADULT LIVER, SIGNAL = 2.8; EXPRESSED IN HEART, SIGNAL = 2.3; EXPRESSED IN FETAL LIVER, SIGNAL =   3; EXPRESSED IN HELA, SIGNAL = 6.9; EST_HUMAN HIT: BG720562.1, EVALUE 2.00e-38; EST_HUMAN HIT: BG720562.1, EVALUE 2.00e-38; SWISSPROT HIT: Q27746, EVALUE 9.20e-01
gggggtcttccttcagaatcggggaatgagacacagggaggagggggtgcacggcgtggaaaagtcacagaggcagaaaaaacaatgggagagggaggcggcggcggcggcaaaacgctaagacccaggctccggcgaagcggctacgcctgcgggaaagcaaaatagttgagtaacttaaaaaatgaggaaattccgggtgttctgcggggaaggacggagggccttgagaaacagggaggctgcggcggaaagaggggcggtgtcgtcggagagcagggtcgacgatggaaagcgagcagcggcgggagcggaaagcgaggacatggacgtgggcggggaagaagacccagaggcctctgggggtccgcgaaactgagaaaacccgacgggggcgaaagggggtcgggtagcgcggtacctgcagaaatcgtccaggacgctgccgggaatctccacccgtttggtctccatgatgaggacccacagcaggaacagtgcatc

SEQ ID NO: 4772 - DNA, 550 bp, Homo sapiens
  MAP TO AC005584.1; EXPRESSED IN BONE MARROW, SIGNAL = 1.4; EXPRESSED IN PLACENTA, SIGNAL = 0.93; EXPRESSED IN ADULT LIVER, SIGNAL = 1.2; EXPRESSED IN BRAIN, SIGNAL = 1.6; EST_HUMAN HIT: BE783486.1, EVALUE 3.00e-62; EST_HUMAN HIT: BE783486.1, EVALUE 3.00e-62; SWISSPROT HIT: P87137, EVALUE 3.00e+00; NT HIT: AL163227.2, EVALUE 5.00e-78
aatgctcctgaggcatgttccccattgtctggttattaacattcagcttctctttacttatgctaatttctgcagccagcggcttgaatttctccccagaaaatgcgtttttctttcctatgacatggtcaggctgcaaattttccaaacttttatgctctgcttcccttttaaacttaagttccaactccagactatctatttgtggatacatatgactgtacactgttaggaacagccaggtcacttcttgaacacttgctgcttaggaatttcttctgccagatactgtaactcatctctctcaagttcaaagttccacagatctccagggcaggggcaaaatgctgccagtctctttgctaaagcataagaagggtgatctttactccagttcccaataagtttctcatctccatctgagaacacctcatcctggacttcattgtccatatcactatcagcattttagtcaaaaccattcaacaagtctctaggagattccaaactttcccatgtcttcttgtcttcttctgagccctccaaactg

SEQ ID NO: 4773 - DNA, 512 bp, Homo sapiens
  MAP TO AC016951.9; EXPRESSED IN HEART, SIGNAL = 1.5; EXPRESSED IN BRAIN, SIGNAL = 0.85; EXPRESSED IN FETAL LIVER, SIGNAL = 1.3; EXPRESSED IN LUNG, SIGNAL = 0.4; EXPRESSED IN ADULT LIVER, SIGNAL = 0.78; SWISSPROT HIT: P54762, EVALUE 4.00e-73; NT HIT: gi14725127, EVALUE 0.00e+00; EST_HUMAN HIT: BF509424.1, EVALUE 1.00e-107; EST_HUMAN HIT: BF509424.1, EVALUE 1.00e-107
agtaagaggcccaaagctcctgacttctgtgtttaccttcatcagccttcccccaaagtccacctgggagaagctctcatctgcagcaatggtgtctactttgaggtagggggcctcagaccagaaggctgacttcttggtggcaatgacagagtcagtctcatagtaatacaagttgaaggtctccttgcaggatcctgggacattagggaggctgctgcagtctctcacagtgaagcgcatctctgtgtagatgcgatgggccccccgccggttgatgaaggtggtgagcagccaattgttctggttgggctcgaagacattgcacacctggtaggtgcggatggtgttcaggttttcatcgtagccactgacttcttcccactgtacatagcaggccacaggcacacacatgcaaaaacacaaaatagagagtgagaatacaaaaataggcatagcagaggagaatcctggggctaaggggccttaagagctcaccagtccagcagatt

SEQ ID NO: 4774 - DNA, 562 bp, Homo sapiens
  MAP TO AC010642.4; EXPRESSED IN ADULT LIVER, SIGNAL = 0.64; EXPRESSED IN FETAL LIVER, SIGNAL = 0.53; EXPRESSED IN HELA, SIGNAL = 0.46; EST_HUMAN HIT: BF772758.1, EVALUE 3.00e-09; SWISSPROT HIT: P52742, EVALUE 5.00e-57; NT HIT: gi16163870, EVALUE 2.00e-09; EST_HUMAN HIT: BF772758.1, EVALUE 3.00e-09
tgggtgagaaacttgctgtggctgaaagtcttcccacattttccacatgcataaggatgctcgcctgtgtgcacccgctggtgtaggaccagggctgaggagtcaccgaatggcttcctttactcaccacgtatgtacggcttctcaccgctgtggatcttgaggtgctgggtcaggtaggacccctggctgaaggcctttccacattctgcacacacatagggccactcacctgtgtgtacctgctggtgcttgctgagggatgagctgtggctgaaagctttcccacattcctgacacgcatacagcttctctcccgtgtggcagcgtatgtgctcagccagggacaagctggggctgaatgccttgcagcatacccggcactcgtagggcctctcacccgtgtaggttccgtggcatgcaaggagggccgagaagtcagcaaaggctttgctgctcttggcaggcaaatggcttttccccggtgtggaatcaccagtgctgtacaaggtgtgtgctctcgctgaaggtgcgtccacactcaccacacacgtatggcttc

SEQ ID NO: 4775 - DNA, 532 bp, Homo sapiens
  MAP TO AC034103.5; EXPRESSED IN HEART, SIGNAL = 1.1; EXPRESSED IN ADULT LIVER, SIGNAL = 1.1; EXPRESSED IN FETAL LIVER, SIGNAL = 1.3; EXPRESSED IN PLACENTA, SIGNAL = 1.2; EST_HUMAN HIT: BE074998.1, EVALUE 8.00e-04; SWISSPROT HIT: Q13451, EVALUE 6.50e+00; NT HIT: AF180135.1, EVALUE 2.00e-03; EST_HUMAN HIT: BE074998.1, EVALUE 8.00e-04
ttaatgcctggggtctcaaggagcttacaaggtgtaaggaacttggtaaaacataattagactagagatgccttttagcacttactgaaggatattcagaagccagctgttccacgtctttctccaccactgtaagcacctcttcctcttggggctgactgctgtatgaaaaaaaggtctgagcacactgaatatgatgacagaatttactccttcgctaattcattcaacaaatatttatttgctgagcacttgttatgagctgtaaattttactaggaactggagatacattaattactaagatgcagaccccaccctcaaagaacttagaagtttttaggggaatcagagcaattaaagagataaggtttgtgagagaaaaacaacaaggacactcctaaatgtgaagatatccttcagatgaaagttttaattgttataacttatcctgcaacaattcagaaataaactcaaacctcacctcttgttgtataaatagaggtaaaaagggaaatgtaatttggctgacg

SEQ ID NO: 4776 - DNA, 574 bp, Homo sapiens
  MAP TO AC008537.4; EXPRESSED IN ADULT LIVER, SIGNAL = 0.78; EXPRESSED IN HELA, SIGNAL = 0.72; EST_HUMAN HIT: BG028389.1, EVALUE 2.00e-01; SWISSPROT HIT: P24461, EVALUE 1.00e-14; NT HIT: gi14277708, EVALUE 0.00e+00; EST_HUMAN HIT: BG028389.1, EVALUE 2.00e-01
agaacctgttgacctggcaccatggagctgggaggggctgtcaccatctttctggcactccgcttgtcttgcctgctcatcctcattgcctggaaacgaatggataaggcaggaaagctgcccccaggtcctacaccaattcttttcctggggcacctgctgcaagttcgaactgatgctacgtttcagtctttcatgaaggtgagtctgtctgtctcctttaatagggctaaaagcaactaatcctatagccagattcacatagaaacttatgacttctaaaagatagactctcagaaacacagactttgcaaatcttagaattctgaaattccagaatcctaaaatgttggaaacacacattctcagtgcattgaaataagattttcatgatctcaggactttggaatcacagtacattatatttttaaacacaggattctttgactcagcttgtcttagcactttgagacttggtatcatgaagtcttaagattctagaaatttaacatttcagagagagaagtatgaatcttggaatttatcgaatccaggtcccttattttggagatgc

SEQ ID NO: 4777 - DNA, 571 bp, Homo sapiens
  MAP TO AC019209.3; EXPRESSED IN PLACENTA, SIGNAL = 0.97; EXPRESSED IN ADULT LIVER, SIGNAL = 1.1; EXPRESSED IN BRAIN, SIGNAL = 1.3; EXPRESSED IN LUNG, SIGNAL = 0.88; NT HIT: AL163303.2, EVALUE 8.00e-28; EST_HUMAN HIT: AA370351.1, EVALUE 2.00e-23; EST_HUMAN HIT: AA370351.1, EVALUE 2.00e-23; SWISSPROT HIT: O20118, EVALUE 4.20e+00
tatcccatggttggtcttccatttgacttcttcaaaccccattaaaaatgctcatctctttctgatattctgttagtgcttctagaatgacatggtcattaatgataaggataaaagcagagaaaaatataaagcctcatgccaggaattagtcttacaaaacacctggaggccgttgtattgctctgacttcactgctcctggcactgggaatttctgttttctgtggccaggagagaacagtgaagtcatgaatgttttgatgggaaagaaaagaagatggctttgtgggccctaaggagattgacaacttactatatttgatgtgaaatgcacaatccttttattttctttgtccaaatgcccatgactctctgttagaaatagataatcggtgccacgaagaaaagtcagcacggagacaaaggacctctcagcaaggcaatctttgctttctgcagaaagggtgctccatgcatttggaacaatggcaaggccacacctgaacaaagaaaaaacagacatatttatcccttatgcatttgggtcatccttactgctgtgtcctgca

SEQ ID NO: 4778 - DNA, 570 bp, Homo sapiens
  MAP TO AC007766.1; EXPRESSED IN FETAL LIVER, SIGNAL = 0.63; EXPRESSED IN HELA, SIGNAL = 0.59; EXPRESSED IN BRAIN, SIGNAL = 1.8; EXPRESSED IN LUNG, SIGNAL = 2.1; EXPRESSED IN BONE MARROW, SIGNAL = 0.39; EXPRESSED IN ADULT LIVER, SIGNAL = 1.3; SWISSPROT HIT: Q04725, EVALUE 1.00e-13; NT HIT: gi14764152, EVALUE 5.00e-63; EST_HUMAN HIT: AW302369.1, EVALUE 0.00e+00; EST_HUMAN HIT: AW302369.1, EVALUE 0.00e+00
tcggggactacttgttacgcaacagcatcttaacgatcctgcccagcgcaactcctgtgtctcagagtggctctcacataccaggcagacacctctgaatatcctgcagaaagaattctcgttacgtatgaccccatccccaggacatggttgcctcccagtaaccgtgcccaagaggaacaatgatcaccggttccccagcccgagagagaagtgcggatgtgatagatacattttatttccaccgaggtcccctgcccatcggcccccacatgcagcaggggaaggtgtgaagccgttggccagagagcagatgggatgtacggttcctaggcagggctgggaggcggctgctaggatgtctgtcctggctgctgattcccctgggagtctggacttcgggtacaggaaggggggtcatgtctcagtagaccacctcatacacggtggccttcttgtcccccgagcctgtcacgatgtatttgttatttctggagatgtcacaactcaggactgaggacgactccttggactgccaagggaagggagagagaaaagggcacagtgagg

SEQ ID NO: 4779 - DNA, 538 bp, Homo sapiens
  MAP TO AC022469.4; EXPRESSED IN HEART, SIGNAL = 1.4; EXPRESSED IN ADULT LIVER, SIGNAL = 1.2; EXPRESSED IN BRAIN, SIGNAL = 1.6; EXPRESSED IN LUNG, SIGNAL =   1; EXPRESSED IN FETAL LIVER, SIGNAL = 1.2; SWISSPROT HIT: P58107, EVALUE 6.60e+00; NT HIT: AL161585.2, EVALUE 5.10e-01; EST_HUMAN HIT: AW197864.1, EVALUE 3.00e-43; EST_HUMAN HIT: AW197864.1, EVALUE 3.00e-43
ttgttttggacattctttgggtatttacagtccccaccattgcctatcatcccactaacaccaaagccaactgccagttctagtaataacaaccaaatatgaaaatgcttgagcaccagaatttgtaaacccagcccatgaatttgcattacctgcttgacctctggggtcgttggttttgcaaaccatactgtaaaggaaagaaaaaggaaaaaccaagttagatgtgttacataatactatttcattatattatctcttttttctcccttctacacttttcatttaccaccactccccaccccctgctacctaaatatctttatcccaatggaagatgcgttaccaaagattcacagtttatggaccagaagaaaaatgtggcttctaagtaagtcctgcagtcttatttctcacttctgtcattgacagccactaaatcaagaagaggttaagtgaaaattagcaaaatatgcattgccatactaacaggcagtaatagaacaatctgttcatgtccccacttcacaagtccact

SEQ ID NO: 4780 - DNA, 538 bp, Homo sapiens
  MAP TO AC002321.1; EXPRESSED IN BONE MARROW, SIGNAL = 0.44; EXPRESSED IN ADULT LIVER, SIGNAL = 0.48; EXPRESSED IN HELA, SIGNAL = 0.46; SWISSPROT HIT: P54726, EVALUE 6.60e+00; NT HIT: gi14767782, EVALUE 2.00e+00; EST_HUMAN HIT: BF365944.1, EVALUE 9.00e-56; EST_HUMAN HIT: BF365944.1, EVALUE 9.00e-56
cccattgtctcaggaccttcaaggccaggatcccgggggcgggcccaggtcacacgtcggtgctgatgctgcggctcctggcgaaggcctcccgcatggctgagaggcggttggggttgagcgcctgcaggcccccgaaagccccccggggcagctccacgtcctcctggctcacgctcttgtagagcacgcgctccccgccgttcagcacgtcctcttcctcctccggcggctcctgcaggaagaaggtggggggctcgcagtgggagcagctgcggcagagggcgcgggcctgcggggacttctggctgaaggaggtggaggcggtggggtagagcgccggcccgttggtcagcaccaggttgcggttggagtgcagcgggggcaggtgcgagtgaacggcgaagtctggttcctcctcgtcctcctccgactcgtccttcttgcagcagtagtactgcgggcagagggacggtgaccatgcggccgcccgctcccaccccagaaccgacatgtgggaaaggctacccctgactgg

SEQ ID NO: 4781 - DNA, 568 bp, Homo sapiens
  MAP TO AC004078.1; EXPRESSED IN ADULT LIVER, SIGNAL = 1.4; EXPRESSED IN BRAIN, SIGNAL = 1.5; EXPRESSED IN FETAL LIVER, SIGNAL = 1.1; EXPRESSED IN LUNG, SIGNAL = 1.5; EXPRESSED IN PLACENTA, SIGNAL = 1.8; EST_HUMAN HIT: AA584789.1, EVALUE 1.00e-05; SWISSPROT HIT: P23852, EVALUE 5.40e+00; EST_HUMAN HIT: AA584789.1, EVALUE 1.00e-05
gcagcaaaaacatatgggtgaatttaaaacaatatttctcatgaagtggttaagaagaagtcataaacttctgaattagactgatgaacttgattaatgtacgaatgtgaggtgaagaagtagaaaaatgatgggagaaactgtgttcaaggaatgggaccctgaagatgaagacataaagaaggtagtagctgactactcacatagagacaaatgtggcagccctgagaatgcaactagtgtacctcctactaccaggagcacaagtgacaaagacccccagcagctgatctttaaaattcattgcagcatctgcatcaaggccacaccttctacagggttatctcaccaataactaagtgtggcagggatggatctcaagtagaccatttctggcctacagaggttgacattggctcaagcactccttgatgactttgtcaaacttttttgtaagtgactttattgaggaataattgatatacacattttcttaaactgcacatattaaatgttcacatttttgtgagtttggacgtatgcataaacctgtgaaaccatcaccaca

SEQ ID NO: 4782 - DNA, 556 bp, Homo sapiens
  MAP TO AC008033.8; EXPRESSED IN HEART, SIGNAL = 7.4; EXPRESSED IN ADULT LIVER, SIGNAL = 2.7; EXPRESSED IN BRAIN, SIGNAL = 4.5; EXPRESSED IN HELA, SIGNAL = 3.3; EXPRESSED IN BONE MARROW, SIGNAL = 3.1; EXPRESSED IN PLACENTA, SIGNAL = 2.5; EST_HUMAN HIT: AA310711.1, EVALUE 2.00e-01; SWISSPROT HIT: P29070, EVALUE 4.00e+00; NT HIT: U72342.1, EVALUE 2.10e+00; EST_HUMAN HIT: AA310711.1, EVALUE 2.00e-01
ctctgggtcagtgggttctcaaggtagcattagctctcttattatctgctctaatctttgtgttccagttcctcagtactcatgtttctgccttgttttgcagaacattccctgcagatataaccatctttgcaaagactgctttttatccttaatactagtttccctctgactcctttttttgaggcaaggttgatcaagttgtgtaagttctgacctgcacaggggtcattattcatatatggactgtttgcttagactatcacatgttacattgctttctattgtttacctacctcaccactgcttgaatactcaccctggcatttggactttctttgactccagtacatggatggctcttccatcctgcttatcctcttagttttggatctacctttggaatcaagattctgtattatttttgcttcagtgactgacatctggcctttgtccgtgatctgattgcaaggctgcctggcttcctggctttggcccagccaaccacaactcaaatccaaatgctgataaacagcaacatgagaaaatgagctga

SEQ ID NO: 4783 - DNA, 509 bp, Homo sapiens
  MAP TO AC010247.6; EXPRESSED IN BRAIN, SIGNAL = 1.6; EXPRESSED IN FETAL LIVER, SIGNAL = 1.1; EXPRESSED IN PLACENTA, SIGNAL = 1.4; EXPRESSED IN ADULT LIVER, SIGNAL = 1.3; EST_HUMAN HIT: AU147295.1, EVALUE 3.00e-06; SWISSPROT HIT: O14628, EVALUE 2.40e-01; NT HIT: AF255613.1, EVALUE 8.00e-09; EST_HUMAN HIT: AU147295.1, EVALUE 3.00e-06
  unsure 130
  unsure 132
  unsure 145
  unsure 176
  unsure 177
  unsure 194
  unsure 226
  unsure 233
  unsure 235
  unsure 236
  unsure 242
  unsure 261
  unsure 297
  unsure 305
  unsure 307
  unsure 316
  unsure 337
cggcttaagcgatctactggccttgatctcccaaagtgccaagattacaggcatgagccaccgctctgggccaagactggggatttctaattggcctcctgtctgccccacagaaaggtctccttcctgncncagcccttcccantgaacttcgactccctgactccttttccacnnatgagggactgtctacntacgtccatctacggaacgacagccctcctgnctcctgngnnacctantccgcacgcaaaccgctgncaccaacagtactcgcgaagaaggtttagtaggaangccccagnantgaatcccnataccaacccctggacttcancatgtgtgccccactagccacccctgagtaggcttgacagtgcattgcatgactaaggacgaagggacacctccaagtcaggcccagcatgcccttccaggaggccagtccaaaggcactcccactactgccccccaagacacacccttgtccctgacagtctcctccttgc

SEQ ID NO: 4784 - DNA, 514 bp, Homo sapiens
  MAP TO AC004209.1; EXPRESSED IN HELA, SIGNAL = 0.7; EXPRESSED IN PLACENTA, SIGNAL = 1.1; EXPRESSED IN ADULT LIVER, SIGNAL = 0.93; EST_HUMAN HIT: BE902727.1, EVALUE 0.00e+00; EST_HUMAN HIT: BE902727.1, EVALUE 0.00e+00; SWISSPROT HIT: Q60780, EVALUE 2.80e+00; NT HIT: gi15304499, EVALUE 0.00e+00
tcactctgggagtaatgggcataacaaaatggacctcaccttccataacctgggggtcatccttgggcgggcaggtattcttgataagagaccagcttttgagccttcgagggtttctctgttccttgtgaaagcttcccctggtgggacccccatggcctggccccggaaaaggaggttctgcattgactccccaccaaccacgaccatatgggctagacctggggccaagccctctccgaattgggcctctaccccaaggaggaggtgggagactcagcagtggtggaatcagtggtccccttgatcctggaggacctctgtgaagagctggagagagagagagagagagacacagaaaggtgtctaatgggcagctgaatcctgataaaccgtgattaaaaaaattttttttattgaagaacagcatacataaagacacaccagttttaagtgcacaacccagttctcacaaagtagacacacttgagtttccaccaccaggtgaagagat

SEQ ID NO: 4785 - DNA, 554 bp, Homo sapiens
  MAP TO AC016577.4; EXPRESSED IN PLACENTA, SIGNAL = 0.72; EXPRESSED IN ADULT LIVER, SIGNAL = 0.6; EXPRESSED IN LUNG, SIGNAL = 1.3; EXPRESSED IN HELA, SIGNAL = 1.3; SWISSPROT HIT: P10265, EVALUE 5.00e-91; NT HIT: M14123.1, EVALUE 0.00e+00; EST_HUMAN HIT: AI964001.1, EVALUE 1.00e-118; EST_HUMAN HIT: AI964001.1, EVALUE 1.00e-118
gctccagtgtctaccaacccttcaaactgttttccttgaataatggccttacacacaggtctgttctctgagacctgacttgcccaatatgcagcctttcctgttggatcagtgcttacaagccctcctattctttttatttcactatttccacccttaatatatggcaggagtaataattgagcaatcctgtctcttggactggcactccaaggaattgaagagctaataaccaattgaatttcgcctttatagtctgaatcaaccacactagtatgaatttgaactccttttagatttagacttgatcttcccaagattagtcctacagtcccctcaggcagtgggccatatacccctgtagggattttttgtgggggctcccctggaagcagagagactgcttgtatagtacataaatctactgctgcactgccgcttgtggtgagggacaattgttgtattgtggtaactggcttattccctgaaacacttgggacagtaggggttgttgtccctgaaaaccctgaggaacaaatggctgaattgggaat

SEQ ID NO: 4786 - DNA, 576 bp, Homo sapiens
  MAP TO AC005789.1; EXPRESSED IN PLACENTA, SIGNAL = 5.1; EXPRESSED IN ADULT LIVER, SIGNAL = 5.2; EXPRESSED IN BRAIN, SIGNAL = 4.2; SWISSPROT HIT: P28477, EVALUE 3.20e+00; NT HIT: AB026546.1, EVALUE 2.20e+00; EST_HUMAN HIT: AA426091.1, EVALUE 0.00e+00; EST_HUMAN HIT: AA426091.1, EVALUE 0.00e+00
catcatggtgagtggctgtccgggagctgccctactgggtgggcaggggcccacgcctccatacctatgcttgttataccttcgctcattcattcctttattcactcatctagccatgctgactgaacgcctgccatgccacaggctgtctactcattcatttcctcctgctgtcatgcctccatctgtcaatttccctgtcactgtggatgcagattgtggactgtgtaccttatcatgtgccaactccttactcattctttgctccctgcaggtgtcagctagcgtgtttgtgggcctggtgatcttctacatcgccttctgcctcctgtggcccctcgtggtgaagggctgcacgatgatccggtggaagataaacaacctcattgcctcagaatcctactacacctacgcctccatttccggaatctcgagcatgccgtctctgagacattccaggatgggctccatgttcagctccaggatgacagaggacagggctgaacccaaggaagccgtggagagacagttgatgacctgagtgtcccacctgccccagcccccagttactgtcac

SEQ ID NO: 4787 - DNA, 572 bp, Homo sapiens
  MAP TO AC006147.2; EXPRESSED IN LUNG, SIGNAL = 0.57; EXPRESSED IN BRAIN, SIGNAL = 0.81; EXPRESSED IN PLACENTA, SIGNAL =   1; EXPRESSED IN ADULT LIVER, SIGNAL = 0.88; SWISSPROT HIT: O35137, EVALUE 3.30e-02; EST_HUMAN HIT: BG474941.1, EVALUE 1.30e-02; EST_HUMAN HIT: BG474941.1, EVALUE 1.30e-02
ttgtgcagctttcagtttgcggcccctaacctcctccagcccataaactcaggcctccagtgttctgatctttctctttgcctttccgcctttccagatgcgattcctcccgtgatctcagtgattgtatcaggcgaaaacgaggagggcaaaataccgtccagatgtaaactaggagcagccgcaccagcagcaccagcagaatgccgtggtagtgcggcaggccctggccccatggacaaagagaaactcgtcagtggcagtggccacgaactcagaaagcctgaggacagtcagcagctcctctggctcttcactttcacactggtgcaactacaggagctgaagaacatttttcaactcgttccatacccggacgtgttaggtaagtggcatgcttaggcggcaccgacttttcacggagcaggggctgggctcagggcttattctctttccccaggccccttccaaacctttctgagccaaaagctacctaggggtttcaaggctgctggggcctgtttgcccttgggcttcagggtggaggcaatgcctcctggacaccaaggtaa

SEQ ID NO: 4788 - DNA, 567 bp, Homo sapiens
  MAP TO AC008565.5; EXPRESSED IN PLACENTA, SIGNAL = 0.66; EXPRESSED IN ADULT LIVER, SIGNAL = 0.65; EXPRESSED IN BRAIN, SIGNAL = 0.57; EXPRESSED IN HELA, SIGNAL = 0.73; EXPRESSED IN LUNG, SIGNAL = 0.75; EST_HUMAN HIT: AW090359.1, EVALUE 1.00e-45; NT HIT: AL163209.2, EVALUE 8.00e-37; SWISSPROT HIT: P47810, EVALUE 1.80e+00; EST_HUMAN HIT: AW090359.1, EVALUE 1.00e-45
ttttggggtttcaggagttggctgctgaatatgattagacctcaaaatgctaaggactctacttctaatagtatggagaacactgatagtcctccatatgaactctttagagagttatgcaaaataagtgtatttgacactcctaattcactgctcctgagaggcaagtttagtgactctgggcagccttatgtcaactgatgagcagaaccacacaagtcatctctggattatgcctggatccagcatcacttctgcatcgttcaatagtctcttcttaccagtaccagtgagcttgtcttcagatgagatacaagagaagtagtctgaggaagaagaagaagcttcctcagctttgtggtcctgagttgggcacagcaccttgtatctatgttgcggagcatctttttgtaaattcagctttcctgagaaattaaataagatatgtggtccagtttcatgtttctatgattgtatccatccttaaacattcaataggagtctaccatgtgatttgttcagtgaacactcatggcttccgtccttacggataggagaagccacaaa

SEQ ID NO: 4789 - DNA, 580 bp, Homo sapiens
  MAP TO AC006950.1; EXPRESSED IN ADULT LIVER, SIGNAL = 5.4; EXPRESSED IN HEART, SIGNAL = 6.5; EXPRESSED IN LUNG, SIGNAL = 4.1; EXPRESSED IN BONE MARROW, SIGNAL = 3.4; EXPRESSED IN BRAIN, SIGNAL =   5; EXPRESSED IN PLACENTA, SIGNAL = 5.4; EST_HUMAN HIT: BF344145.1, EVALUE 0.00e+00; NT HIT: gi13651412, EVALUE 0.00e+00; SWISSPROT HIT: P57999, EVALUE 9.00e-03; EST_HUMAN HIT: BF344145.1, EVALUE 0.00e+00
ccgcagagacctggataaagaaaacagatcgcaagacagaaaggaagccaggaatgtggggacactgtaatcagaagagcaaaagcccagggagacattccctaccccctactcacaaacttacccacacacccttgtttggagtcaacgtcaccatcccatcctggaagaagatgtggacctggcccacagcctccgttttgccatggcagatctggacttcggcaactacacggtaccaggggatggtattctgtagtcctgggcagcgggaagagagctcatagacaccaggagaggtggtggcaccacgggccccatcaaaggtggtgaggttggcacccacagacaggacacagagaccacgggtggcccagcagttccgggcttcagccttgacctcacatacacggcctggtgggcagccagctgcctggcatgtcaggccagagcttgaggaacaggaacagcgctcgctgcagtctgaggtcagcagggaggagtttacctgtgcacagaaaggggccaggttatggtggtgggatggatcgcaaaaatggccacactgcttgaaccctct

SEQ ID NO: 4790 - DNA, 533 bp, Homo sapiens
  MAP TO AC006138.1; EXPRESSED IN BONE MARROW, SIGNAL =   2; EXPRESSED IN PLACENTA, SIGNAL =   2; EXPRESSED IN ADULT LIVER, SIGNAL = 1.9; EXPRESSED IN FETAL LIVER, SIGNAL = 2.1; EXPRESSED IN BRAIN, SIGNAL = 2.2; EST_HUMAN HIT: BG723087.1, EVALUE 4.00e-58; NT HIT: gi14761357, EVALUE 3.00e-58; SWISSPROT HIT: P79084, EVALUE 5.00e+00; EST_HUMAN HIT: BG723087.1, EVALUE 4.00e-58
gattccaggtacccattccccctcaggtcatttaccttcatcctcctcatcactggttggcactgagagcttcttaagacgctccatgagctctttctcttctccatcatcatccacatccttcttccgcctgccttttcgggtatctcgcttttttttttgctgctgagagcaaaagaacagtgagaaaatgaagcccaggcccctgctgtatttctgcctcacagagggttccccatcagctgaatggagcaacatgggctggaaaggggttggtggaacccagatgcctcccaggattggtgggccctgtggcacttgtacctgctgttgctgttgctgctgctgctgctccttctccttgagcactttctcttcttccccagcctgtttatcttctactgccagctcttcaaagaactataaagggagttaagctacaggtaaacatgtttccaagagcaatccaagcaggctgtgctctgccacacattggcccactggccctccactccaccctcaccttacctcct

SEQ ID NO: 4791 - DNA, 582 bp, Homo sapiens
  MAP TO AC004202.1; EXPRESSED IN ADULT LIVER, SIGNAL = 0.61; EST_HUMAN HIT: AL573465.1, EVALUE 1.00e-116; EST_HUMAN HIT: AL573465.1, EVALUE 1.00e-116; NT HIT: Y07829.2, EVALUE 0.00e+00; SWISSPROT HIT: Q02084, EVALUE 5.00e-13
caagggtccaaaacaggatgaagcagaagaaacaaagagagatgtccattgttgagctactctgaggtgccaggcatgatgaacatgtaggatgcagcacctcagcgaggtggaggcagggcctggctgcggtgacccaggcttaccttgtagtggctgagggcattttcaatggtcagttcatgatgagacatgtgttcaggggacaccaggcattccacacatagaagaagtctgctctcctcacagaacctgcacaccctcttctggtggttggggcagatatagcctgtccctagcacctcctcagaacagggcttccggcagagggggcagcagaagaccccagaggctgaggccttctccacatgctgtgtcaggcacactcgacagaagagatgtccgcagttggtgctcacggcctccttcaggctctcctggcagatggggcagacaccctcctcctggttgtccttctgcaaagggatcatggcctcgttcctaccctgtcagcctcctgtttgcagggcctccttcttcactggtcttcggaaggcctgttgccctcaacagtcccagata

SEQ ID NO: 4792 - DNA, 539 bp, Homo sapiens
  MAP TO AC000060.1; EXPRESSED IN PLACENTA, SIGNAL = 0.79; EXPRESSED IN ADULT LIVER, SIGNAL = 0.78; SWISSPROT HIT: P08547, EVALUE 3.00e-34; EST_HUMAN HIT: R16220.1, EVALUE 6.00e-17; EST_HUMAN HIT: R16220.1, EVALUE 6.00e-17; NT HIT: X64878.1, EVALUE 5.00e-04
tggggagtattgccattttaacaatattaagtcttctattctgtgaacatgtgatgtttttccatttatttaggtttccttcattccttttagcagtgttttagagttctcagagtgtaaattttgtacttcttttgttgaatttattcctaaatattttattctttgtgatgttactataaattaggttactttcttaattttatttttagatttttcattgcaagtaaacaaaaatggaactgatttttgtatgttaatcttgtattctgaaaccttgatgaactcacttatgagttctaatagtatttttagtggattccttaggattttctctctatataagatcatgtcatctgcaaatagagatacttttacttcttgcttttcaatctggttgccctttatttcatttacttgcccaaatgccctggctagaacctttggtacaatgttgaaaaaaagtgagaacagacattcttatcttgttctggatctaaggcattctttaagcttgatgaagtcccagctctgtgtcc

SEQ ID NO: 4793 - DNA, 554 bp, Homo sapiens
  MAP TO AC000960.1; EXPRESSED IN BONE MARROW, SIGNAL = 0.86; EXPRESSED IN PLACENTA, SIGNAL = 2.1; EXPRESSED IN ADULT LIVER, SIGNAL = 1.4; NT HIT: gi12731110, EVALUE 1.00e-47; SWISSPROT HIT: Q60716, EVALUE 7.00e-10; EST_HUMAN HIT: BI820239.1, EVALUE 0.00e+00; EST_HUMAN HIT: BI820239.1, EVALUE 0.00e+00
agactaatgcgtccacccacataggtcttgacctgtgacaattttcctagtgagaattccctggtgccaggttctggggcccttttcatcaagaggcaatgaaaaatgaatacagtaactccccacagatacttctagccccttaatctagataacagctgggacccccaatgtaagggaaaaggtcttaaataaaaaataaacagtgactccttagcccatgtacttagctcctctcaagcactggcatgaagtaaccaggccagccccacatcaccctctcaaaggtttcctcttataggcaccctggatggcttccttgttccttgaggggcagaagggaaggaaggccaactaaggatggttggggacttaggacacctcttaatcttggaaagcttggcttcctccacaaggatgtactctttcagagactgcaccagctctttctctgcataaatcaggtcagtcatgtgccctgcaagggagagaagaaagacaccagtgagaaacagatgagggatgtccagcctccttccttggggcacagaata

SEQ ID NO: 4794 - DNA, 561 bp, Homo sapiens
  MAP TO AC018452.11; EXPRESSED IN PLACENTA, SIGNAL = 2.5; EXPRESSED IN ADULT LIVER, SIGNAL = 2.4; EXPRESSED IN HEART, SIGNAL = 1.8; EXPRESSED IN BRAIN, SIGNAL = 2.5; EXPRESSED IN LUNG, SIGNAL = 3.9; NT HIT: gi14730562, EVALUE 3.00e-52; SWISSPROT HIT: Q12774, EVALUE 7.10e-02; EST_HUMAN HIT: AW136396.1, EVALUE 1.00e-100; EST_HUMAN HIT: AW136396.1, EVALUE 1.00e-100
ctgagctgggaaaggagatgctttgggtaaaggatagcaggaagaatgctatttttgaaaggacgaatatttagagataagaactgggtcactgagggactggggaaaaaagaaaacgtcatggtttagccttagagatgagaagacagtacatatatgtgatctcaaacattaacatgtcaagatttggaatatgggcaatgatgacaaaatgacactcctcgggtctatagcactctgcatcctggaccacgagtgtcccataagaacgctcccactcaccatcgctgacacgttgatagatgaggacgacgtcagccacctgcagggagagttcatctggctgcttagcagtaaatgacctaacgatttccacctgggtcagtgctgaggccaaaagaggacatactaagtttccagtagcagagaaaaaacatgtgcaatccaataatgtacacttacttatttttctctgcaattcagggccagcattgagagaaacaagttgggcttctaataaaaagcagaacatcttttctagcaactcccttgcttggctat

SEQ ID NO: 4795 - DNA, 597 bp, Homo sapiens
  MAP TO AF107045.1; EXPRESSED IN PLACENTA, SIGNAL = 1.6; EXPRESSED IN ADULT LIVER, SIGNAL = 1.4; EXPRESSED IN FETAL LIVER, SIGNAL =   2; EXPRESSED IN BRAIN, SIGNAL = 1.3; EXPRESSED IN LUNG, SIGNAL = 1.8; EST_HUMAN HIT: BI225664.1, EVALUE 1.00e-122; NT HIT: AF107045.1, EVALUE 0.00e+00; SWISSPROT HIT: P23921, EVALUE 5.00e-38; EST_HUMAN HIT: BI225664.1, EVALUE 1.00e-122
ttgtaatttggcttccctggccctgaatatgtatgtcacatcagaacacacatacgactttaagaagttggctgaagtcactaaagtcgttgtccgaaacttgaataaaattattgatataaactactatcctgtaccagaggtagccaatagacctctttgtattattcctaatcccgaaatcctaactgaaaggaatcaatcatgatcttcaagtcatcatttaaatggtttatcaataaaatggtttgagaaaaagaggtagtctgtctcatttggtacagaatgttgcttttcctgttcagtaatgttttctccttttctttaaaatctgttgacacaaaggcatgcctatcaaataaacgccatcgccccattggaattggggtacaaggtctggcagatgcttttatcctgatgagatacccttttgagagtgcagaagcccagttactgaataagcagatctttgaaactatttattatggtgctctggaagccagctgtgaccttgccaaggagcagggcccatacgaaacctatgagggctctccagttagcaaaggagtaagtatatggatggaattgtttttgcct

SEQ ID NO: 4796 - DNA, 568 bp, Homo sapiens
  MAP TO AC004211.1; EXPRESSED IN LUNG, SIGNAL = 1.2; EXPRESSED IN PLACENTA, SIGNAL = 0.83; EXPRESSED IN ADULT LIVER, SIGNAL = 0.71; EST_HUMAN HIT: BE272593.1, EVALUE 6.00e-82; NT HIT: gi16174654, EVALUE 4.00e-82; SWISSPROT HIT: P49696, EVALUE 6.00e-08; EST_HUMAN HIT: BE272593.1, EVALUE 6.00e-82
gggccaaactcagcaactacagggactgaaaaaattcccctctgccttctgacaccgacttgtcagacatttctagaagtctccctcctcctcctctccccaggtgacaggcaggcaacagtgcctgggctgcactgccaaaaccagtcccaggaagaggggaactgagactccctcgtctcctctcctctcctaactgaggggacaattgggaacttattaactccagagctctctgccttggaaatttccagaggaattagaagcaggcatgggaataccaagcctcccccagcctcactcaccaggtagacgtcacagaggttgtgaagccagaagtggtgcagggcatgagtgacgagcgagagctctcgggtgaggaagccccgctcacactcctgggcagccagggcaaggcggctcaggatccaggcatccatcggggaggagggagacagctgcaggcagagggggcaggatggcctgactccccctcccctgcctcctttccttccagatgccaccttggccctctgacacctgactaccctactcccaagcacctctg

SEQ ID NO: 4797 - DNA, 503 bp, Homo sapiens
  MAP TO AL118559.4; EXPRESSED IN BONE MARROW, SIGNAL = 4.1; EXPRESSED IN PLACENTA, SIGNAL = 6.9; EXPRESSED IN HEART, SIGNAL = 3.8; EXPRESSED IN ADULT LIVER, SIGNAL = 5.4; EXPRESSED IN BRAIN, SIGNAL =   6; EST_HUMAN HIT: BG913464.1, EVALUE 7.00e-38; SWISSPROT HIT: O43896, EVALUE 7.00e-01; EST_HUMAN HIT: BG913464.1, EVALUE 7.00e-38
ctttgtgctcagacaccagcaactattccctgctggcggctgctgggcaggagacacaggcagaggcgccctgccagggagtgtgtgctctgaaatggagactcagcctcacagaccagcaacccccactgtggagctccccaagagttggccacagtggctcagccacagttctgtccgcagggtctccaggtcccccaggtccaagcctcgtgcgggaagctcaaggaagcagacagtgtggtcatggggtctgcagcttagagggcagggatgaaaagtgagggcagagatgcccagtggccagaaaaaactcacaagaacaacttatttagaaaaacagagctgccttgttcacactccagtcatttttcaggaggggaaaagtcctctcttcttccattgaaagaggactgcgcgtctgtcctgaatggacttgggaaattctgtgtagagaattctggagtgacagcaaagaaggctctgttgtttgggacattccc

SEQ ID NO: 4798 - DNA, 561 bp, Homo sapiens
  MAP TO AL117187.3; EXPRESSED IN BONE MARROW, SIGNAL = 1.1; EXPRESSED IN ADULT LIVER, SIGNAL = 0.78; EXPRESSED IN BRAIN, SIGNAL = 0.78; SWISSPROT HIT: O75381, EVALUE 1.80e+00; NT HIT: AF373409.1, EVALUE 5.30e-01
ggtccccaaaagacttcctgaaaaagtaccttctagtcccttgtttatgctcccagcacagaggctccccactttattgccagagccctggtcaccagctgctgtgtccttggtgggcctccacggggagtctttgattctggagcccagccaagaacaggcctccacttccccatgagcgtggcctggcacttcacacctggtggagctgacccactggtttgccttgtaatgccatcttcccccaacctggaggagcgtcagtgtgcttcagttcagggtgagttggctgtgatggtattcctggtatgtagagctaaccttgtcagagttttagcttctgcagacgtctctttctttctctttctctctctttctctctttcgacctgggataactgtccacaaaactcttggctagaaaacagaaacatctgccgccactggggaggacctcggctggatgatttagcagctgagccgtgatgctgacagctagtgctccctgtcctaacaaaagcagccgcttagcgaagggaacacgtaatggagggtctcagga

SEQ ID NO: 4799 - DNA, 517 bp, Homo sapiens
  MAP TO AC000069.2; EXPRESSED IN BRAIN, SIGNAL = 1.6; EXPRESSED IN ADULT LIVER, SIGNAL = 1.2; EXPRESSED IN BONE MARROW, SIGNAL =   1; EXPRESSED IN PLACENTA, SIGNAL = 1.4; EST_HUMAN HIT: BF317417.1, EVALUE 1.00e-73; SWISSPROT HIT: P36582, EVALUE 3.20e-01; EST_HUMAN HIT: BF317417.1, EVALUE 1.00e-73; NT HIT: gi14776961, EVALUE 8.00e-74
gtccagccagtgtcagtgtgacagttgtggtcattttgataacagcaagggttcaagaaagccctgggagtgatgtctgattaaatgaactgtccccccagttcttgctgtcgacatctttgacaagttcaacttcacgggagccagagtcccatggttcgacgccattcatgaagcattccccagggagctggagtcctccatctccttcccagccaacttcttcaaaccacctgaagaaaaaggtagaaccgcttagaaacctgctacttcccttcgagtccccagcgttcagggaggggagggctccccctgcgggcatcccaggaggatgaccacgccatactccctgcgcactgaagatccggggccggagtgttccgagtgttcgctggcaccaagtcctattggtgacagcgggttgttttgtccaagtgcttaggtagaggttgagcatcctaatcctgaaatctgaaatgctccagaatctgaaccttcttgagcaccaacctgacac

SEQ ID NO: 4800 - DNA, 548 bp, Homo sapiens
  MAP TO AC018557.5; EXPRESSED IN BONE MARROW, SIGNAL =   2; EXPRESSED IN PLACENTA, SIGNAL = 1.2; EXPRESSED IN ADULT LIVER, SIGNAL = 1.4; EXPRESSED IN FETAL LIVER, SIGNAL = 1.3; EST_HUMAN HIT: AA778552.1, EVALUE 0.00e+00; SWISSPROT HIT: P55860, EVALUE 4.60e-01; EST_HUMAN HIT: AA778552.1, EVALUE 0.00e+00; NT HIT: Z38127.1, EVALUE 5.20e-01
gtagcctgggagcacttcaggagccttggctcccaggccctgccctggcctcgccctctgcaccctgacagtcagtaacttttgctgaatgaacaaaataatgcttacatcaactttaggcttttagaatccattaatccattcttttccaagcaaaggtggtaatgaaaatggaaaagaaaaccattccagaaagaagacaaggaagagagtggaaacatattgctgtaaaatacactgccgtttcagacaccaggagcctcctccaagtcatttctttccctttgctggccctggtggcttgccaggttctggtggcttggcgggttctggtcccttgccctgctggggtcctttttcctttcctggaggaggaaccagcatatgctttttggccttcttgcctctgaagtggtttctttgaagacacacatcgataaaagcaaaaactccagccgcaccaataaggatctggaaaacaaaacggtcctcatgacttttgcttttcattccaaaggtggtgagtttccctcctggtttctcattca

SEQ ID NO: 4801 - DNA, 517 bp, Homo sapiens
  MAP TO AC005903.3; EXPRESSED IN HEART, SIGNAL = 4.3; EXPRESSED IN ADULT LIVER, SIGNAL = 5.2; EXPRESSED IN FETAL LIVER, SIGNAL = 8.9; EXPRESSED IN BRAIN, SIGNAL = 3.7; EST_HUMAN HIT: BE408167.1, EVALUE 1.00e-67; NT HIT: D49818.1, EVALUE 7.00e-68; EST_HUMAN HIT: BE408167.1, EVALUE 1.00e-67; SWISSPROT HIT: Q16877, EVALUE 4.00e-18
tggtggggtagtaggtggaggaatgggctcctaacacaattttcaaggaattcggagaaaatcatggaactgtgcagagatccaaggtcatggctacccatggtcaatgtgcaggaagcttccttaccatatgccacaggagtcagcttcaggactgtgtgcagcggacacttgaggtagggcagctgttctgtagacacagagggggatggctagcacaccagaaatgcctggtgacagtgcctaccttctcacacaaccttcccacctcccccggggcacagcccacacctgctgccttgtcgaggaagtaggccagcaggcagcgcatcacagcctggtggcagatgaccagcacattctcttgcctctccagctccatgatgacaggctccagtctctggaccaggtcctcgtaggactgcaagggcaagcagagaggggtccctcaggcctggctccgggggagggacagacacatcctggacactgggccaccttccactcctgcagctac

SEQ ID NO: 4802 - DNA, 547 bp, Homo sapiens
  MAP TO AF015722.1; EXPRESSED IN PLACENTA, SIGNAL = 1.4; EXPRESSED IN HEART, SIGNAL = 1.3; EXPRESSED IN ADULT LIVER, SIGNAL = 1.3; EXPRESSED IN FETAL LIVER, SIGNAL = 1.3; EXPRESSED IN BRAIN, SIGNAL =   2; EXPRESSED IN HELA, SIGNAL = 1.2; EXPRESSED IN BONE MARROW, SIGNAL =   2; SWISSPROT HIT: O15534, EVALUE 5.90e-01; EST_HUMAN HIT: AA812988.1, EVALUE 2.00e-10; NT HIT: AL163268.2, EVALUE 0.00e+00; EST_HUMAN HIT: AA812988.1, EVALUE 2.00e-10
taccttgcatggcaatagggacttgggattttgcagatgtgattaagctaaggatcttgagaaggagaaattatcctggattatcggggcgggccctgaatgcaatcctaaaggtccttgcaagggggaggcaaaggaagacttgactccaagagaggagaaggccgtgtgaccatggaggcagagattggagccatgtggccaggagctcaggactgcctgctgccctcagttgctggcagaagcaaggaacgaattctcccctggatctttcagaaagaggcagctctgctgacatctcaatgtgagctacctgagacttacattgggcttctgatctctaggactgtaagggaattaatctctgggatgtttatgttctgggttttttttttttttttttttttgccactaaatttgtggtcatttgttacagctgcaattggaagggaatactgctattttccatatcccaatggcaatagcatggttagccagagtacccttcaagcacggtatacagtattctctcttttggggcagtctg

SEQ ID NO: 4803 - DNA, 586 bp, Homo sapiens
  MAP TO AF131215.1; EXPRESSED IN PLACENTA, SIGNAL = 0.99; EXPRESSED IN ADULT LIVER, SIGNAL = 1.3; EXPRESSED IN BRAIN, SIGNAL = 0.75; EXPRESSED IN HELA, SIGNAL = 0.64; EXPRESSED IN FETAL LIVER, SIGNAL = 1.1; SWISSPROT HIT: P11704, EVALUE 5.70e+00; EST_HUMAN HIT: BF842324.1, EVALUE 2.00e-38; NT HIT: AL161517.2, EVALUE 1.40e-01; EST_HUMAN HIT: BF842324.1, EVALUE 2.00e-38
acacgtggagattccaaacccttcctctcaagcagtaagtcactcactcctctctcttccagatggcaagcgacactgcaacaaaacccacgtatttaaaacaagtgcagaagtgtttattgtacctccctttccaaaacagctgctcaacagaatgtacttgtgcagcaagaaggaaatcagagtgtatgtccagctaatgaaatctttacgagccgagcaccgcatcgactccaacactgggagctgccagctgctgcctaaatactattttccagcatcttctgaaggctagtagttactcaaacagatttttaaaagaaaatgaatacaaaatattgtaattattagaagattattataattagacattctgttctttcctgtgaggcaaggaacaaagcggctgcgactgttacaaagagcaccaagtgtcttcctctggttacttaccaaccacccagaggtcacgctcagttacaggacagatgccctgcccttcgcactttccaagtctagctctcacctggagtctcgggagcacatactagagggcttctcattatctcatccacagcaccagaga

SEQ ID NO: 4804 - DNA, 551 bp, Homo sapiens
  MAP TO AC026743.3; EXPRESSED IN FETAL LIVER, SIGNAL = 1.2; EXPRESSED IN HELA, SIGNAL = 0.63; EXPRESSED IN PLACENTA, SIGNAL = 1.2; EXPRESSED IN ADULT LIVER, SIGNAL = 0.77; EST_HUMAN HIT: N90288.1, EVALUE 5.00e-08; SWISSPROT HIT: Q62170, EVALUE 3.00e+00; EST_HUMAN HIT: N90288.1, EVALUE 5.00e-08; NT HIT: AF195953.1, EVALUE 2.00e-13
tgcttgtctgctgtggaatcagctccttatgttttgcttaatgagatcaaggtgaagggatgagaaaggctgggggcagtgagcgggatcagtcacattgccttctctggctcgcaggctggtacctgagcaaggtcacgcttaagactccaataggagtggaattggaagagaaagggggccatgaacattgagtcttgcattccatgagcccgtgttatcttttctttctctatcatagtgttcgagtaccccaaaatgtggaattcgtggtaatctgacttggttgccatgaagatcacttttgaactacatgtgaagacaattcaggataagatgattgccaggataatttcattggctgaggaacagatgttcctggcagagcaggtgatggtgaattttatgtgtcaactagactggatcatggggtgcccagatttttggctaaatattatttctgcatgtgtctgtgagagggtttccagatgagattagcatttgaatgggtagactgggtaaagcagatggcacttccccatatgagtggg

SEQ ID NO: 4805 - DNA, 577 bp, Homo sapiens
  MAP TO AC010300.5; EXPRESSED IN BONE MARROW, SIGNAL = 1.4; EXPRESSED IN PLACENTA, SIGNAL = 1.5; EXPRESSED IN ADULT LIVER, SIGNAL = 1.5; EXPRESSED IN BRAIN, SIGNAL = 1.3; EST_HUMAN HIT: H73974.1, EVALUE 5.00e-42; SWISSPROT HIT: P32511, EVALUE 1.40e+00; EST_HUMAN HIT: H73974.1, EVALUE 5.00e-42; NT HIT: K02402.1, EVALUE 1.00e-32
accaaaaaccttcagcatgggcatcatagccatcacaagcatgtcacagtgctgcagagattttgtttatggccagttttggggcctgtttatggccagatttgggagcctgttcccaacagtctttaatattgtttgttattatttcttagttattgttaaatatttactgttgtttttttttgtatatttattttgtgacatatgtcggctgcgagtgttggacttagtcgccagctcaccatgtctaaggtcaaactgatggctcttgctggtgtcaaggttgaccacatggctctcattggcagcactattgttcaggcccagcagagggatacaatcatgattcaatgcagcaacgatcttcgtggtctcatccggaaggttttcccatctcagcctcccatttacctgggactacacagtccatcttcctactttttttttctaccccactttcattttgcttccacagtatttagggggagttgctgtggtctttattctttgttctttgctctgtttctttttttcttttattttttgctaccttctttcctccacactgacatggatg

SEQ ID NO: 4806 - DNA, 597 bp, Homo sapiens
  MAP TO AC000366.1; EXPRESSED IN BRAIN, SIGNAL = 1.3; EXPRESSED IN HELA, SIGNAL = 1.2; EXPRESSED IN HEART, SIGNAL = 3.3; EXPRESSED IN ADULT LIVER, SIGNAL = 1.1; NT HIT: Y13069.1, EVALUE 5.70e-01; EST_HUMAN HIT: T80655.1, EVALUE 8.40e-01; SWISSPROT HIT: Q10023, EVALUE 7.60e+00; EST_HUMAN HIT: T80655.1, EVALUE 8.40e-01
aagacaggtagcaggcatggctatccttgctttcaacagacagcatgtccctaaagaagagaagatgagaggacccagttaggaaaggaaggatagcagtgggcggctagtccgtgcctgctgctctttcctctagtctctgttggatttccttcactccagcctcaatgtgccattcatcatcaatgacgccatcccctggggaagcgctgtagacactcgggattctcagatgggccagcccaaggaccacagcctactgccactcatggctggctcagtgcgtaaatgctgtcctgaacccaagagaagcatgaacttgggggaaccccagagacccacagtaagattcaaccacagatgagtgtggttgagtgacactaaggtagtaaatattctaacagatataggttaaatttcaacaggtggtttactaacttggtaactgtgtgacttcaacaaggttatttcacttctccaagtctgaaggtcctcacctatcaaatggagataacactaacacctaccttgtatcctggatttattgaaagaaattatgcaattaattatatttcatctgtgcattcctggaacatg

SEQ ID NO: 4807 - DNA, 595 bp, Homo sapiens
  MAP TO AL050302.2; EXPRESSED IN BRAIN, SIGNAL = 0.94; EXPRESSED IN BONE MARROW, SIGNAL = 0.82; EXPRESSED IN PLACENTA, SIGNAL = 1.2; EXPRESSED IN ADULT LIVER, SIGNAL = 1.3; NT HIT: AL163203.2, EVALUE 0.00e+00; EST_HUMAN HIT: AW804008.1, EVALUE 2.00e-63; EST_HUMAN HIT: AW804008.1, EVALUE 2.00e-63
ccctttggatcagtgtcaggtttagaacttcttacatgtgaatagggtgctgtagtgttaagtaattttaaaaccacatgttacaaaagatcatgtatgcctttattaagccacaataaggtagtgatgattttgttttttaatcttaaaatttaatgacatttatctgctttttgcctctcccagggaaagctttacaaaaacccacagaggtacctgtaccatatgagaagatgctacaagaccagtcagctttgatagtacaggggcttccggaaggtgttgcctttaaacaccctgagaactatgatcttgcaaccctgaaatggattttggagaacacagctgggatttcatttattattaataggtgaggtgctttctccctccatgcccatcaatggtttattcatacaaatttgaatattcagcttatgttaatatagtttaaacattcttggttaagacaattcatttaaatttatgctgtcattaattttgtgtattcacgtgtagttttattagttttgttttattgcagatctttcttagagccaaagaagcctctagattagggattgctttgcttccttga

SEQ ID NO: 4808 - DNA, 600 bp, Homo sapiens
  MAP TO AF263284.2; EXPRESSED IN BRAIN, SIGNAL = 0.96; EXPRESSED IN HELA, SIGNAL = 0.78; EXPRESSED IN BONE MARROW, SIGNAL = 0.72; EXPRESSED IN PLACENTA, SIGNAL = 0.58; EXPRESSED IN ADULT LIVER, SIGNAL = 0.56; EST_HUMAN HIT: T94476.1, EVALUE 3.00e-16; NT HIT: AB015045.1, EVALUE 1.50e-01; EST_HUMAN HIT: T94476.1, EVALUE 3.00e-16
agaactaccgcacttggaccaagaaattgaatgcacaagaaattgagtgctctcgatagtagtacagaatgtacagtattgagtacgctctaaaagcatttccaaaggcctaggaaatggagtttggaccttgagtctttacgtattcagaaaagaattggtatagaaaggaattttgttcttattttgcttttggtttttgttctttaggatttttcttacaaataatttttatttttccactaaaatgctcgtagtctatgtccatccattcaggatacttcaaggttaaacagaatcacttttccttattttgtaccttttaaaatatgggaatcttaatgaatgaacacaattgatgtctgacttttcagaggcctgcattaatttgatttcagtgacccactggaaaccagtgtcagcataacaacagttacgagagctaaacctacaaaataggtaaggcatataaactgactaagtgctagagattttaattaagcctagtgactcagaagctggactccctcttaaaagatgttgagaattcaacttaattctgaaaaagtacatctaaattcgggtctttttaccaaccaa

SEQ ID NO: 4809 - DNA, 540 bp, Homo sapiens
  MAP TO AL117191.4; EXPRESSED IN ADULT LIVER, SIGNAL =  19; EXPRESSED IN BRAIN, SIGNAL =  19; EXPRESSED IN BONE MARROW, SIGNAL =  19; EXPRESSED IN PLACENTA, SIGNAL =  22; EST_HUMAN HIT: BE155041.1, EVALUE 7.60e-01; NT HIT: AJ298054.1, EVALUE 5.10e-01; SWISSPROT HIT: P09277, EVALUE 1.70e+00; EST_HUMAN HIT: BE155041.1, EVALUE 7.60e-01
cccttattgagattggcagccactagggaaagggaaattttggtagttacgattgggaagatgaaggatagagaggtatattttgagaaagaaagtatagatggggtagcagtttggattattgtggtgtcacatgaggactcttatcccgggggttggataaagcaggtagcggtaaatgctttttgattacttttgcatacctgtctttggttctgttggttgttttgccatgaaagtaatttaaaattctagtttaacgatgcctaagtttgagtattaggtctgatttgaagggatcaaactttattatcagtgcttacttagcagtttagctttatccagcccaggacttccttaatgtttctctgctttcctttcttccttcagagccatggagaagaggagacagagtgtgcaagggaatgaagaaaaggaacaagactattttcaaatcacccatggcactactagaaatgtatttcagcaaaaggactggctgattttatgattcctgtgtccaccacagccctctaattt

SEQ ID NO: 4810 - DNA, 529 bp, Homo sapiens
  MAP TO AC025172.2; EXPRESSED IN HEART, SIGNAL = 2.3; EXPRESSED IN ADULT LIVER, SIGNAL = 1.2; EXPRESSED IN HELA, SIGNAL = 1.6; EXPRESSED IN FETAL LIVER, SIGNAL = 1.4; EXPRESSED IN BONE MARROW, SIGNAL = 1.3; EXPRESSED IN BRAIN, SIGNAL = 1.6; EXPRESSED IN PLACENTA, SIGNAL = 1.6; EST_HUMAN HIT: AW291219.1, EVALUE 2.00e-66; NT HIT: U53930.1, EVALUE 2.00e-03; SWISSPROT HIT: P46133, EVALUE 3.70e+00; EST_HUMAN HIT: AW291219.1, EVALUE 2.00e-66
tcccattatgttcacgtttccattaactgcttaaccatgtttttaacaggtttactagaaattcccaactgttccaaagtggtggtacccgcaggcccgactgctagttgtgtatgaccacgtctgccggtccatgttttcagcacccattgcctgaagtgttagcaccttcactccggtgggtgtggggtagtggagggagtggggtggtggagggcgcggggtggcggagggcgcggggtggtggaacgtgtggggtagacctctttctggtttcattggcttctccttgttcagcaccttctcatgtgtctgcggctcattgggatttcctgtttgtaaagtacctattcaagtattttccctacttttctattggatggtctgtctcatttatttgcaggtgttatttatgattctgggtagtagtgctttgtgaattacatttgcaaatagcttttcttgtctttttacttcaatggtgtcttttaagagaaattttaaactttaatatggcccaatgtatcaa

SEQ ID NO: 4811 - DNA, 557 bp, Homo sapiens
  MAP TO AC020944.3; EXPRESSED IN BONE MARROW, SIGNAL = 2.5; EXPRESSED IN PLACENTA, SIGNAL =   2; EXPRESSED IN ADULT LIVER, SIGNAL = 1.8; EXPRESSED IN BRAIN, SIGNAL =   2; EXPRESSED IN FETAL LIVER, SIGNAL = 1.7; SWISSPROT HIT: Q28992, EVALUE 4.70e-01; EST_HUMAN HIT: AL603245.1, EVALUE 1.00e-125; EST_HUMAN HIT: AL603245.1, EVALUE 1.00e-125; NT HIT: AJ298105.1, EVALUE 1.00e-127
agctgaactggggttcaatgaagcccacgttctgacatctttacttggcagtccctctgtgtctgacattggttcctcccagtgggttattggtcttgctgacttcaagaatgaagctgcggacccttgcagtgagtgttacagttcttaaagatggtgtgtccggagttcattccttcagatgttcagatgtatctggagtttcttccatctggtgggtctgtggtctcgctgacttcaggagtgaagctgcagacgttcgcagtgagtgttacagctcttaaacatggcagtctggagttgtttgttcctcccggtgggtttgtggtctcactgacttcaggaatgaagctgcataccctcgcggtgagtgttatagctcataaagctagtgcgaacccaaagagtgagcagcagcaagatttattgtgaagaccaaaagaacaaagcttccacagcgtggaaggggaccccagtgcgttgcctctgctggcttgggtgcccagtgtttattcccttacttggccccacccacctcctgctgattggtccatttt

SEQ ID NO: 4812 - DNA, 561 bp, Homo sapiens
  MAP TO AC004237.1; EXPRESSED IN BONE MARROW, SIGNAL = 1.2; EXPRESSED IN ADULT LIVER, SIGNAL =   1; EXPRESSED IN PLACENTA, SIGNAL = 1.6; EXPRESSED IN HEART, SIGNAL = 2.1; EXPRESSED IN HELA, SIGNAL = 1.5; EXPRESSED IN BRAIN, SIGNAL = 1.3; SWISSPROT HIT: Q9Y496, EVALUE 2.00e-30; EST_HUMAN HIT: BG186738.1, EVALUE 1.00e-107; EST_HUMAN HIT: BG186738.1, EVALUE 1.00e-107; NT HIT: gi14781205, EVALUE 1.00e-107
ctcccccacttcttcctttcctatattattttgaagtgaattcaggcatcatatcaggttttttactgttacattactttttaataaaaccttgggaagaatattctatttttaaaaaaattttagctttactttcatctctgtttattgctagggttcagaaagacaggcaaaaactggagctactggacagcgcctaaaggaagctacaaaaatcaatctttcactttccacccttggtaatgtaatttctgccttggttgatggaaaaagcactcatgtgccttatcgtaactctaaactgactcgtcttcttcaggattccttaggaggaaattcaaaaaccatgatggtaagacttaattggtgatatagttaacatcaggcaaatttaagattgtaatttatgccaataattgatacgtatcacattttttaaacttgattattttactttttttgacttgtggttgtcctttttgtggtacactcgtgtattagcccataatagtgtcctttggaaactcatgtggttgacactctcattttcgagaaggccaa

SEQ ID NO: 4813 - DNA, 599 bp, Homo sapiens
  MAP TO AC004195.1; EXPRESSED IN BRAIN, SIGNAL = 2.3; EXPRESSED IN FETAL LIVER, SIGNAL = 2.7; EXPRESSED IN BONE MARROW, SIGNAL = 4.4; EXPRESSED IN PLACENTA, SIGNAL = 2.7; EXPRESSED IN ADULT LIVER, SIGNAL = 3.8; EXPRESSED IN HEART, SIGNAL = 4.7; NT HIT: AB029343.1, EVALUE 0.00e+00; EST_HUMAN HIT: BG998530.1, EVALUE 0.00e+00; EST_HUMAN HIT: BG998530.1, EVALUE 0.00e+00
cccaccacttccttctcttgggtttgtaccttagggactaatttagctttaaaaattatgaaaaatttcaaacttgcacggaattaaactagttataatgacctaccacccaggttcaatccatcgcgggtgccccctacctccaggagaacagaaagatgcactgtggacagggtttgactttggtaccaggtgatcacagaaatggtctgtgtaatgatgcatttgccgaaagtcctccaggcttaaagcagtccaaactctgattgttgctgggtttattagattgtctctaggtaattggagactttaataagagctgtggtaggtgttggaagcatctactggaacaatttccagatcaaagtgaactttgctgtgctgctggggatgcagctgcaagccttcatcatcatgtgtttttctgtgggtgcagacctggactctcctgaggaaaccccagcccggccccagacactccttggcctcctcctggggcctgtttaagctgctcagttttcatgagccaggttggtcctacttctggcacagccagctggtaaagcatgtggacctgcccgtcactggtgctagatcga

SEQ ID NO: 4814 - DNA, 538 bp, Homo sapiens
  MAP TO AF020801.1; EXPRESSED IN ADULT LIVER, SIGNAL = 1.2; EXPRESSED IN FETAL LIVER, SIGNAL = 1.8; EXPRESSED IN HELA, SIGNAL = 1.2; EXPRESSED IN BRAIN, SIGNAL = 1.6; EXPRESSED IN BONE MARROW, SIGNAL = 1.1; EXPRESSED IN PLACENTA, SIGNAL = 1.7; NT HIT: AJ229041.1, EVALUE 0.00e+00; SWISSPROT HIT: P11845, EVALUE 4.00e-06; EST_HUMAN HIT: BI459936.1, EVALUE 0.00e+00; EST_HUMAN HIT: BI459936.1, EVALUE 0.00e+00
tctgctggatgatatgtcgccaggatgttcatttcatctcacttctggaatttttttgctcagctcctcgtccacactcccgtggagctgttaggccgacaccgccgtagaggaagtcatagaggaagttgttcttgaggttctccttgattggccggtgcgaggctgtccaggccgccaatgccgggacttccggctcttggctcagggtggctgctcggcgtggagtccgcgaagagaggggtcggacactagctgagacccgcaggcagccgcagagcacgctcagggctaaagtagccgcacccgctgtctaggaaacggttacctgagcggttgtcaggacacaacgacccagacgccagagccaacgccaaacgggtagaggcctctcgagcccccttaaccaccggcatttgactcgcagcccgcggcgagacttcggcctggagcccccgcgcggagcgacgccgacgccgaacacatttattcttatttcgaatgagccattttttccccactggaaaacctcccttca

SEQ ID NO: 4815 - DNA, 592 bp, Homo sapiens
  MAP TO AC022336.12; EXPRESSED IN FETAL LIVER, SIGNAL = 2.7; EXPRESSED IN BONE MARROW, SIGNAL = 1.3; EXPRESSED IN ADULT LIVER, SIGNAL = 1.7; EXPRESSED IN BRAIN, SIGNAL = 1.4; NT HIT: gi16159505, EVALUE 0.00e+00; SWISSPROT HIT: P18084, EVALUE 2.00e-35; EST_HUMAN HIT: AU134256.1, EVALUE 0.00e+00; EST_HUMAN HIT: AU134256.1, EVALUE 0.00e+00
aatgtgagcaaatggtgctgtgcatggcaggcaggaaaatcaaggggttgtgatcattttatctttacaaccttgtgacagttcactcacttcttcacacgtcaggaaaggagagaatgtatgcttatcattaatcaaattaaacgcctaagcctggccacccctcctaaccatgccttccttaattctttctttgagctaaattttcctgcttctccattctcccacccttaagtacccaacagaagggcaactggtcacttacccaatgcacggattggtctggtacctcggtgccgtgtaggagaaaggagagatgtccttatcaacaaaagacccaaatcccaaccggaagttgctggtgagcttcctcatctcctccgcgagtttggtgcccaggctccggatattgtccaagtcatccttcatggacagggagaggtccatcaggtagtacaggtccacaggatagtcctccacctggcgaacctgtagctggaaggtggtcttgtcacctgcaccaacagagaggccacgtgtgttagaggttgtgcaacctgctgagggctgagggatgggatttgctttcaaa

SEQ ID NO: 4816 - DNA, 583 bp, Homo sapiens
  MAP TO AF025422.1; EXPRESSED IN ADULT LIVER, SIGNAL = 1.8; EXPRESSED IN FETAL LIVER, SIGNAL = 1.8; EXPRESSED IN BRAIN, SIGNAL = 4.3; EXPRESSED IN PLACENTA, SIGNAL = 1.9; NT HIT: AF056184.1, EVALUE 5.00e-23; SWISSPROT HIT: P28279, EVALUE 5.70e-02; EST_HUMAN HIT: BF373869.1, EVALUE 4.00e-21; EST_HUMAN HIT: BF373869.1, EVALUE 4.00e-21
tcaccagattcttccccaacgacctccatctacacagcagtggctcccacatactcccctggggccccgcacccatcttcttttacactcagagcctcgcagggtctcacagtcactccccgttatcatcattcagctcgaagtccttgccatcctcctagccaacgtgatgcagttacctggccatttatccacattcctgctgaggactccacactcagccacagaagagcccttcccgcattccggcctcacacaaagacctgtccttttacttgctactgtcacacatttgctggcaggagaggcccctctgatggccgacatcaccacctgggctatcatcacccctcagctgtgcagtgggaccctcctgcctgctgacgtggctgctggcgcccgtgccagcgtgaaccccaaacctgtccgtgtttctgcgggcgacgccaccggggacatccctagcttgaccccctttcctggcagtgacactgtcggtatgatcccgcgttctcagatctctgatgtatacgtatgactgttttccctgcgctcggtttcttccattcacaggccttctcat

SEQ ID NO: 4817 - DNA, 589 bp, Homo sapiens
  MAP TO AC009286.31; EXPRESSED IN BRAIN, SIGNAL = 0.72; EXPRESSED IN FETAL LIVER, SIGNAL = 0.77; EXPRESSED IN BONE MARROW, SIGNAL = 2.8; EXPRESSED IN ADULT LIVER, SIGNAL = 0.84; EXPRESSED IN PLACENTA, SIGNAL = 0.56; EST_HUMAN HIT: AW405449.1, EVALUE 0.00e+00; NT HIT: U03901.1, EVALUE 0.00e+00; SWISSPROT HIT: P06316, EVALUE 1.00e-32; EST_HUMAN HIT: AW405449.1, EVALUE 0.00e+00
ttttctggacaccctgttcctgactctgaggactcaggggaggaggagcctccactctcaggcagggccctggatatccctggacccatgggggaagctgcagcagcagaagccacaggccaggcctgagcagcagcagccggggctcaccctcctggcagaaaaggaagggggttcttgtctctgttccccctgggcctggagcactgtgggaccattcaggctgtcatcccatgctgcacagtaataatcagcctcatcctcagactggagcccactgatggccagggaggctgaggtgccagacttggagccagagaatcggtcagagacccctgagggcagcagatcatcataatagatgaggagtttgggagcctttcctgggagctgctggtaccagtttacagcattatttccgatgttggagctgcttccagaacaggagatggtgaccctctgcctgggggcttcagacaccgagggtggctgagtcagcacagactgggcccaggaccctggaagtgagagagacacagacatggtgattgacaagagacaaaaggagacaagaggagaaagcagggtc

SEQ ID NO: 4818 - DNA, 510 bp, Homo sapiens
  MAP TO AC016943.7; EXPRESSED IN ADULT LIVER, SIGNAL = 0.55; EXPRESSED IN HELA, SIGNAL = 0.47; EXPRESSED IN PLACENTA, SIGNAL = 0.67; EST_HUMAN HIT: BG391751.1, EVALUE 2.00e-62; NT HIT: gi14728796, EVALUE 5.00e-69; SWISSPROT HIT: P16058, EVALUE 2.10e+00; EST_HUMAN HIT: BG391751.1, EVALUE 2.00e-62
tggattttgcctctttacgggagaagtagcatgcacatacacataggcatgggagaagtttgcggtggccatcttcacaacctaccacaattataagacgaaagcatattttaagtttaaaaatttacattatctacattttcattctctgctttcttcctcctttcttccacagatgcctgtatattattacccatctggtcagtaccctacctcaaccacgcaacagtaccggcccatggccccggttcagtacaacgctcagaggagtcaacagatgccacaggcagcacagcaagcaggtacttggaatctgtttcccatttgcttctcaacccagttatttttgctggtgaatcttgtactctttggatgagtgtccaagcttggcaatttaaaccagcacattttctctacccagagaagataacaaagcatttgattgactctgtgtggaaaagtagtaggtacaagaaggtgaagcatatgtcagactagcatccctggcat

SEQ ID NO: 4819 - DNA, 533 bp, Homo sapiens
  MAP TO AL117259.3; EXPRESSED IN ADULT LIVER, SIGNAL = 2.4; EXPRESSED IN BRAIN, SIGNAL = 2.9; EXPRESSED IN LUNG, SIGNAL = 2.5; EXPRESSED IN BONE MARROW, SIGNAL =   3; EST_HUMAN HIT: BI561986.1, EVALUE 5.00e-76; EST_HUMAN HIT: BI561986.1, EVALUE 5.00e-76; NT HIT: AB046842.1, EVALUE 1.00e-78; SWISSPROT HIT: P36059, EVALUE 8.60e+00
tcattccactgctcaactcctaggcagcatggccttactcagttatcctcatcaggctaacagtatttatataatatcatggccatacacaaaaaaacaataaacaagtatataattaagcatgccaggcccctgacctgtgtccctgtgctccagatgcaggagaatgacttggaggaatgagtgggtatatgcatgaattgacactgattcgtcctgcagaatggtcagaaatgacatcgcagccgttaactgcatttccactcctgcaacatgcagggcttcctgtataatcagaaagagtttgctatttacatagatgagagatcacaaattataatttttaaaaatccaaggttgtagaaactaaatagtcatattccacaaaattaagacatatgacctttaaggatatgtacttatttcagagaactatattaatctgctcctgatcatttaactcattacactacataaaatttaagtgtcttaggattttataagataaagtaacttgccaccgctttattgaa

SEQ ID NO: 4820 - DNA, 564 bp, Homo sapiens
  MAP TO AC025436.2; EXPRESSED IN BRAIN, SIGNAL = 1.8; EXPRESSED IN HELA, SIGNAL = 1.3; EXPRESSED IN FETAL LIVER, SIGNAL = 2.2; EXPRESSED IN PLACENTA, SIGNAL = 2.1; EXPRESSED IN ADULT LIVER, SIGNAL = 1.6; SWISSPROT HIT: P34878, EVALUE 2.80e-01; EST_HUMAN HIT: AI863161.1, EVALUE 2.00e-04; EST_HUMAN HIT: AI863161.1, EVALUE 2.00e-04; NT HIT: gi14861873, EVALUE 0.00e+00
tttatgcagggccttgtaggccatattaaggaatctagattttactctcaatgcaatgggaagacattgaattgttttaagcatgggtgcaacataatctgtcttatgtcttttaaacaaactatcacatgtactccataaatacatacaatttgcatcagtaaaattttttagtatatttttattgcaatataccatacttaatatgcacaaatcatagtgtgcagtttaatagatttttgcagtgaatacactcatgtcaagaaatagaatattaccaaatcctgaagtctccctcattccccattccagtctttatctccatcgaggcaaccactatcctcactttaatcatcttagggtagtttatacaattattgagctttaaattaatagaatcatagaaaaatttgtttctgatttttttcctgctaaacattgcattatgtctgtgaggctgatacatattgttgcatgtagtagtttttaaaaaattgtcattgctgtgtatgttactgtatatggcaacaacaacatctttatccatttggattgcttccaggt

SEQ ID NO: 4821 - DNA, 568 bp, Homo sapiens
  MAP TO AL121919.19; EXPRESSED IN BONE MARROW, SIGNAL = 0.71; EXPRESSED IN ADULT LIVER, SIGNAL = 0.57; EXPRESSED IN BRAIN, SIGNAL = 0.64; EXPRESSED IN FETAL LIVER, SIGNAL = 0.86; NT HIT: AJ307670.1, EVALUE 2.10e+00; SWISSPROT HIT: P35365, EVALUE 1.10e+00; EST_HUMAN HIT: AW858903.1, EVALUE 2.00e-01; EST_HUMAN HIT: AW858903.1, EVALUE 2.00e-01
taaatgtgcctctccccttgcaggtctgaatctgcaagaggagccatcttgtgccacctcagaatcacctccttgttgtgggaaggaagagaagaaggaaggtgactgcagacaaaccttaggaaccctctctcttggtacaagttcaagaattgtcagggaaatggacaaacgaactgtgaaggtgggcatgatgattttgagctgcctctacctattcctggtctagatgtatagccctgcttgttcttgctgctcttgttcagtgtggcagaacttgctcggatcaccttatgaagattcgtggcacagaaagcccattaagacaaacaaataactcaaaacattctgtatcgaatgagtagctttggtagtgcaaacattgggatgatttctgatggtttctttaaaaaaaaccccaagtatgttattactgcacacctgaatagagagatggctgacagatgccactgcaacatgaagcccccccagacagactgtggggctgcgtgttgaaaaccactaaaatatgtatccagaccacatttggaaaaacactcatccggaa

SEQ ID NO: 4822 - DNA, 556 bp, Homo sapiens
  MAP TO AC005925.1; EXPRESSED IN BONE MARROW, SIGNAL = 1.4; EXPRESSED IN PLACENTA, SIGNAL = 3.2; EXPRESSED IN ADULT LIVER, SIGNAL = 3.1; EXPRESSED IN BRAIN, SIGNAL =   3; NT HIT: gi14766696, EVALUE 2.00e-68; SWISSPROT HIT: P14648, EVALUE 2.70e-01; EST_HUMAN HIT: AW058129.1, EVALUE 2.00e-01; EST_HUMAN HIT: AW058129.1, EVALUE 2.00e-01
ttagcgtctcaggcacactgccaggggttctggacatggaggggcagctgccaagagccgtcctcacctccggagccggctctcttacagaggctggcctgtgctaaggccctgggctctactcacctccacacttgggggcccctcagactacccccaggcctcgggcagggaccattcccttgagaagtactcgcaaaggggcactgagggagtttctgacgcctctggccacgccttgaggaagggtgagggcacctacggggtcagaaggggtcacttggttagagctgcatccaaggaggccgactccagccagggtgcaggtcccaggagaaccagccctttcctgggctgccaggtccctggccttcaggctgcactgtctgtggggtgtgattccctcctcttcttctccccctctggccatgtcatcatctgatctgcaagaggcgaccatgttgagtgatgaggagcatgcgacccggagccaggcctggatttatgcctggccactgcccttcctaactgcgcctcagtgtcctcccgagagaag

SEQ ID NO: 4823 - DNA, 556 bp, Homo sapiens
  MAP TO AC008524.5; EXPRESSED IN BRAIN, SIGNAL = 2.3; EXPRESSED IN HELA, SIGNAL = 1.6; EXPRESSED IN PLACENTA, SIGNAL =   3; EXPRESSED IN ADULT LIVER, SIGNAL = 2.6; NT HIT: gi13643762, EVALUE 7.00e-62; SWISSPROT HIT: O35464, EVALUE 5.00e-16; EST_HUMAN HIT: BG479750.1, EVALUE 1.00e-61; EST_HUMAN HIT: BG479750.1, EVALUE 1.00e-61
atgtgtattcccctcccctccgaccctccttcttttaattgtttgttcacctttcaaccattttgaatcgtgcttgacggtccgcagggtagggctttctccaagactccggtaaatgactgcgtcaatggcaaggaagtcagtcactgtggctgagtatagttttccatcttagaagaaaaagaaaagaggtgaacagggtgggagcaagtcagtgggggtggaggaataataaagacatcccctagattgctttccaacatcaggcaaatgagatagcacaactgggaaaaatccaagagtcgctgggaaaactcttggcccacattcctaaccattttaaattgggatcatgagagatgaaacatttttcattttaaaattgcatggcaattttttttaagcggcagcagcagcagcagctcagggaacagggtagatgaaagatgtctgcttcacttgattagctggaccttgactgaaacctcaaggccaaggatccttggacactactactgccaccacaccatggtaaactggattaggtgagagccca

SEQ ID NO: 4824 - DNA, 514 bp, Homo sapiens
  MAP TO AC020949.3; EXPRESSED IN PLACENTA, SIGNAL = 0.87; EXPRESSED IN HEART, SIGNAL = 0.97; EXPRESSED IN ADULT LIVER, SIGNAL = 0.56; EXPRESSED IN BRAIN, SIGNAL = 0.55; EXPRESSED IN FETAL LIVER, SIGNAL = 2.1; NT HIT: AL163202.2, EVALUE 1.00e-111; SWISSPROT HIT: O95198, EVALUE 3.20e-01; EST_HUMAN HIT: AW992958.1, EVALUE 3.00e-43; EST_HUMAN HIT: AW992958.1, EVALUE 3.00e-43
tcgttggaaacgggaatatcttcacacaaaaactagacagaagcattcacagaaacttctttttgatgtgtgcattcaacagacagagttgaaactttcttttgatagagcagttttgaatcactctctttgtagaatctgcaagtggacacatgtagcactttgactggaatggtggaaaatgaaatatcttcacataaaaattagacagaagcattctcagaaacttctttgtgatgtttgcattcacctcacagagttgaacctttcttttcatagaacagttttgaaacacactttttgtagaatctgcaagtggatatttgcactgctttgaggacttcgttggaaacgtgaatatcttcacataaaactggacagaagatagtcagatgcttctttgtcatgtatgcattcaactcactgagtttaaacttctctttgatagagcagtttagaaacactctttttgtagaatctgcaaatgtatatttggagcactttgtggcctatg

SEQ ID NO: 4825 - DNA, 524 bp, Homo sapiens
  MAP TO AC025447.3; EXPRESSED IN BRAIN, SIGNAL = 1.5; EXPRESSED IN HELA, SIGNAL = 1.7; EXPRESSED IN FETAL LIVER, SIGNAL = 2.3; EXPRESSED IN PLACENTA, SIGNAL = 2.4; EXPRESSED IN HEART, SIGNAL = 3.7; EXPRESSED IN ADULT LIVER, SIGNAL = 1.2; NT HIT: AL163249.2, EVALUE 1.00e-29; SWISSPROT HIT: P48028, EVALUE 8.40e+00; EST_HUMAN HIT: BF832016.1, EVALUE 3.00e-34; EST_HUMAN HIT: BF832016.1, EVALUE 3.00e-34
gtcttggtgctgtcctctccatgatgagttgtcactccattagttccttctagagctggctgttgaaaacagcctggcacctaccaacccctgatctcttgctttctctctctctctctctccctcatcagtgacctctgcatatgccagcgcctcttccccttccaccacgaacagaagcagtctgaggccctcatcagatgcagatgctggtgtcatgcttcctgtatggtctgcagaaccatgagccaaataaacctcttttcttgataaattgcccagcctcaggtattcctttacagcaacacaaatggactaaaaaaacctgtttcattgtttccacaatatggcttgcacatatttccatgtcaaatatatatctatgccattatagtggggatatgccacaagctagcttgctttgtatgaacggtcatctgggagggggattctggtgttttactaagacaaagttgtgatgaacatctttgttcatatgactttgagcacacagaggttgggtt

SEQ ID NO: 4826 - DNA, 584 bp, Homo sapiens
  MAP TO AC022336.12; EXPRESSED IN BONE MARROW, SIGNAL = 1.4; EXPRESSED IN PLACENTA, SIGNAL = 2.9; EXPRESSED IN ADULT LIVER, SIGNAL = 1.8; EXPRESSED IN HEART, SIGNAL = 3.1; EXPRESSED IN BRAIN, SIGNAL = 1.8; EXPRESSED IN FETAL LIVER, SIGNAL = 2.5; EST_HUMAN HIT: BG470267.1, EVALUE 0.00e+00; NT HIT: gi4504772, EVALUE 0.00e+00; SWISSPROT HIT: P18084, EVALUE 7.00e-89; EST_HUMAN HIT: BG470267.1, EVALUE 0.00e+00
ctaaagtgcttgctggggacacttacctgagcagaggactcccttgttcctggcacaggagaagttgtcgcactcacagaaaggcccatagatcttgccaaactcgctctcgaagcaggagcactggttgcagctgcagtccccacgcccgctgcacagtggcttgccctctgcctcccggcacaggttctggtacacgctctggttctccccatcctggcactcgcacctggtgcccaggtagccggggctgcactcacacaggccgcagacataggtcccgctcccgttgcacctggcgctgttgggttccagccccacgctgcagccgcacgtgcagttgtaggtgacccccacctccaggctgtcccggaatcccaccggccgcagggcaaacacatgctccgtgtgtctgctgggacagcttcgggcctccaatgatacttcaaaagatgcctgggcagaaggaagagaagggatatcatggctgcggcaagccagggtctcccattcacccaggggcagggcccttgatgaagagcagctgcgaactccagccctctccacgcactcaggtagaacca

SEQ ID NO: 4827 - DNA, 510 bp, Homo sapiens
  MAP TO AC002248.1; EXPRESSED IN PLACENTA, SIGNAL = 0.76; EXPRESSED IN ADULT LIVER, SIGNAL = 0.64; EXPRESSED IN BRAIN, SIGNAL = 1.2; EST_HUMAN HIT: AI928347.1, EVALUE 7.10e-01; NT HIT: M34300.1, EVALUE 7.60e+00; SWISSPROT HIT: P37496, EVALUE 1.20e+00; EST_HUMAN HIT: AI928347.1, EVALUE 7.10e-01
cacctcagccaggctcttactgggcaaaatgctgtgtcccagaggaaatgtaattcataggactaccacttgcagactctaaatgacagaatacaggatctggcagagaaggttcactggaaaaaggtattatccagcacagcaacacagggccagtggctttgagcatgtttaccaatatgttcagtggcctcttggagcagcaggagttccttgagcttgctgccagcatcccagagacactgagagagaatgtatgtgttgttggggatgttatccctgggggtgggcttcatattccagatcactgcttaaggtaggaagtttacagatgggtcctggggtagagagatcagtgaggtccaaacctcctacctacctactctaggactctctggaaatgagactgcctcagagaagtgaatgacagaaccaatgggcaagtgaacacatgtgaaatctctccccgagactcgaccccagaatgagagtgaggcttggtgggaacta

SEQ ID NO: 4828 - DNA, 594 bp, Homo sapiens
  MAP TO AC022469.4; EXPRESSED IN PLACENTA, SIGNAL = 0.79; EXPRESSED IN ADULT LIVER, SIGNAL = 0.8; EXPRESSED IN BRAIN, SIGNAL = 0.85; EST_HUMAN HIT: AW864080.1, EVALUE 8.40e-01; EST_HUMAN HIT: AW864080.1, EVALUE 8.40e-01; NT HIT: gi11467432, EVALUE 1.40e-01; SWISSPROT HIT: Q9KRD8, EVALUE 9.90e+00
ttccctggggaaggaagtaggattgagcagagagaagttgagctgcgatgcaggcccaacaatgggctcagctaaccccacgaggagctctgacactaacatgacctttcagtttgtcctgagttgggccaagatggcaaagtctttctaccccatcatcaacaggtcattgaatgcgggtcactctgggaagagcatgatcttaggcaagatggtgctctgtgtctgaggccaaccctgaaggcgctggcagctgaaggctgtctatggacagcactctttgcagctcaggtcaggcagtaagtctttagttgcagggtgagctgggcagcacattacagtgtctactatactaacattttttgttaaagatttcccatgaagatattgattattgtcgttttcagtttttaatcagatgcattggctaataccagtttgtagctgaagctaagtctatcctcttaggccatggtgtgaattgtgtgtttccctttcttccttcatctctggcttagctcctttcattaccttcatggcccctctagaagtttatgttaggtttttaaggccagaccagactgacttgagccc

SEQ ID NO: 4829 - DNA, 597 bp, Homo sapiens
  MAP TO AC018766.2; EXPRESSED IN HEART, SIGNAL = 1.3; EXPRESSED IN ADULT LIVER, SIGNAL = 0.95; EXPRESSED IN LUNG, SIGNAL = 1.6; EXPRESSED IN FETAL LIVER, SIGNAL = 1.5; EXPRESSED IN PLACENTA, SIGNAL = 1.4; SWISSPROT HIT: P02465, EVALUE 3.00e-01; EST_HUMAN HIT: BE244265.1, EVALUE 4.00e-43; EST_HUMAN HIT: BE244265.1, EVALUE 4.00e-43; NT HIT: gi14786907, EVALUE 4.00e-51
gtgtgatgggtgttgtgagctaagctatcccagctggtgcctcatggggccatgggtggtgtgacctcgtgggataccaggactggggggccatggtcctcaccagtcccttcccttcttcccttctacccacaggttcccgggaacctgagtgcagctcaggtggccgcgcagaatgcagtggaggctgccaagaaccagaaggctgggctgggccctcgctgtgagtcctggagtgaggatgaagggcgggcaggggccaggcaggcctctctccacacacttgttccccacttcttcccttggtctctcccacagtctcgcccatcacccctctccaacaagctgctcccggagtgggtccccccttcagccaggccccagctccccaactacccccaggaccccctggcgcccccaagccaccacctgcttcccagcccagtctggtctccactgtggcccctggctccggcctggctcccacggcacagcccggggcaccgtccatggtaggtgcctgcacgcctcctgcccctgctccttcctcctgctgtccacagctaggacagttagaggatgagtcatttgccttcc

SEQ ID NO: 4830 - DNA, 542 bp, Homo sapiens
  MAP TO AC020663.1; EXPRESSED IN HEART, SIGNAL = 1.1; EXPRESSED IN BRAIN, SIGNAL = 1.1; EXPRESSED IN LUNG, SIGNAL = 1.3; EXPRESSED IN ADULT LIVER, SIGNAL = 0.98; EST_HUMAN HIT: BI768301.1, EVALUE 0.00e+00; SWISSPROT HIT: P98167, EVALUE 3.00e-02; EST_HUMAN HIT: BI768301.1, EVALUE 0.00e+00
gccttttgaaagctctggtgaggtcagcgctcttcttgggatggccgaggagccccccaggtggctggaaggcgaccttggaagcctgtctttcaacaccaaaggatcccagggtcctccctgggacccacaggccgaagccactctctcctgccatgaaggagacccaaaggcagagcccctcagcactgcctcacaagaatctgtgaaccgccgggccctccgacaggagagaaggaagatgatagagacggacatcctccagaaagtcacccgggatgcctgcggcccgaccagcagtgacaaaggtggggtgaaggaggcgccctgccacgctgcggagtcagctcccagatccaaaatgcccctcgtggagcctccggagggaccaccagtgctctcgctccaggtaggcgcctccccgtgcctggctgtttctcaggcctgttacctgtggcatggctgctgttcccatgcactggagctagaagcagcttgagggctggcccactaggaccttaggcccattatccaccattctg

SEQ ID NO: 4831 - DNA, 595 bp, Homo sapiens
  MAP TO AL117380.28; EXPRESSED IN ADULT LIVER, SIGNAL = 0.54; EXPRESSED IN FETAL LIVER, SIGNAL = 0.66; EXPRESSED IN BRAIN, SIGNAL = 0.48; EXPRESSED IN BONE MARROW, SIGNAL = 0.66; EXPRESSED IN PLACENTA, SIGNAL = 0.6; NT HIT: AJ314911.1, EVALUE 8.90e+00; SWISSPROT HIT: P16144, EVALUE 3.40e+00
gagcctgagaaatagcacgcacctgatcaatgtgcattatgatgatgatgatgttattattattaccatcaatattattgcagtggttataggaggaatagtcttgattttttcccagtagtcttcccatcagaacaccataacagtaggcgagaatgatccatttgtcaggtatttctgatgagccagcttatagacaccacatcagggagaagagcagctagggaggaagaataaaaagagaacaattttctttactgaaaatgacaacctagaagagaaatggtgaaaaacaaatatctccaagtcgcaggatcatcctggctttgaatggcacagggctgtcctgttaccatttccccattccagcattgacatattttattgttaattgctttttcaaacctcatcaatgatcttttgcactttccgcaaagaaatgttgaaagcttttaatgaagaaattaattatgtatagtcttgaatgcaaattagactaattaattgtagcattgataccctctcctagcacaaaatatgagaactggcgttatacatatttataaggcacagtacattttgacagatgcctgca

SEQ ID NO: 4832 - DNA, 535 bp, Homo sapiens
  MAP TO AL079302.4; EXPRESSED IN BONE MARROW, SIGNAL = 1.4; EXPRESSED IN PLACENTA, SIGNAL = 1.5; EXPRESSED IN ADULT LIVER, SIGNAL = 1.3; EXPRESSED IN BRAIN, SIGNAL = 1.6; NT HIT: gi14748415, EVALUE 1.00e-106; EST_HUMAN HIT: BF223906.1, EVALUE 1.00e-106; SWISSPROT HIT: P21292, EVALUE 5.10e-02; EST_HUMAN HIT: BF223906.1, EVALUE 1.00e-106
acgtgagaatccaaacccaggtagtcatggtggggagacccaactgccgctcccaaacatgcctctggactagtgtacaaactgcaaagtcttgctaaccctgggttacttagcttaggcagaatctcagactgattttctaactcaacctgagaatctacaaatgaaaatgcacgtgagggcttcacgcgaagggagggagcggagggagaatgcagagggagggctggggcttgcttggcctccctagctgagggccgggcgggcgcagttttacagtgtggtggaactggtagagaaggatggctcagtgtccagcctgctgaaggtgttcaacgaccagagtgcctcggaccacatcgtgcagttcctgcgcctgctcacgtcggccttcatcaggaaccgagcagacttcttccggcacttcattgatgaggagatggacatcaaagacttctgcactcacgtaggtgcttggggtctcagccccagccctgggctctgctcctgtggccctgtcctgcagacttcagca

SEQ ID NO: 4833 - DNA, 591 bp, Homo sapiens
  MAP TO AC006275.1; EXPRESSED IN BRAIN, SIGNAL = 1.1; EXPRESSED IN BONE MARROW, SIGNAL = 0.99; EXPRESSED IN PLACENTA, SIGNAL = 0.86; EXPRESSED IN ADULT LIVER, SIGNAL = 0.98; EST_HUMAN HIT: AW007677.1, EVALUE 0.00e+00; SWISSPROT HIT: P29169, EVALUE 2.00e+00; EST_HUMAN HIT: AW007677.1, EVALUE 0.00e+00
ggccagtctgcaagtacctcccatgtaggctcagcctggcacttgaaccccgtgccctccgccccccgcccctcccagtggcgtctccgcttctcacttcagaggcagagctgtcatcgtgggcactgggaagtagcctgcagtgtcagcacagaccggcgctcaccaacgacacggcacggaggctttctagggagcagtccccccaggacagcaatacgttcaggcgacagcgacacagggcagcaacagcggttccctcctggcaggcagccagacgcacacacgcacgcagaccacaccatccagaaagttcacctgcgacctgagacgcagctctttgagggagatcagaagatcagatggtatttgagaaaaaaaaaaaaaaaaaggttaagccaagtcagtgggaaggtggaggaaaaaaaaaataaataaaggttaggctgaggtcgccgccctgccactcatgacacagagcgtggcacgtcggtttcacacctaaaagtcagaacgattcacaggtggcgaagcgtgggtggaggaaaagagcggggatgtctgaggagcagaaagaccgaaacgcaagag

SEQ ID NO: 4834 - DNA, 572 bp, Homo sapiens
  MAP TO AC020633.3; EXPRESSED IN BRAIN, SIGNAL = 2.7; EXPRESSED IN FETAL LIVER, SIGNAL =   5; EXPRESSED IN BONE MARROW, SIGNAL = 2.9; EXPRESSED IN PLACENTA, SIGNAL = 3.5; EXPRESSED IN ADULT LIVER, SIGNAL = 2.3; NT HIT: U77841.1, EVALUE 0.00e+00; EST_HUMAN HIT: AA236334.1, EVALUE 1.00e-116; SWISSPROT HIT: Q9K085, EVALUE 1.90e+00; EST_HUMAN HIT: AA236334.1, EVALUE 1.00e-116
ttatgcccaatttctgcctccaaagaaagaagaagtaaaaactaaaaggcagaaatgaaatccacaggcagagagcccagtgtcacgccctgggcctggtagttaaagatcaacccctgacctaaccggttatgttatctatagattccagacattgtatggaagagcattgtaaaagtccctgtcctgttctgtttcattctggttactggtgcatgcagcccccagtcacgtaacccctgcttgctcaattgatcacgaccctctcatgtggacccccttagagttgtgagcccttaaaagggacaggaattgctcacttggggagcttggctcttgaggcaggagtcttgctgatgctcccagccaaataaacctcttccttctttaactcggtgtctgaggagttttgtctgcagctcgtcctgctacatttcttggttctctgaccgggaagcgaggtgattggcggatggtcgaggcagctccttaggcagcttaagcctgccctgtggaacatcgctatgggggactccgatcagcccgagtgatgcagatcctgagagcactcc

SEQ ID NO: 4835 - DNA, 594 bp, Homo sapiens
  MAP TO AC016955.12; EXPRESSED IN ADULT LIVER, SIGNAL = 2.8; EXPRESSED IN PLACENTA, SIGNAL = 2.8; EXPRESSED IN HEART, SIGNAL = 3.7; EXPRESSED IN FETAL LIVER, SIGNAL = 3.2; EXPRESSED IN BRAIN, SIGNAL = 2.8; EXPRESSED IN BONE MARROW, SIGNAL = 2.2; EST_HUMAN HIT: AL528595.1, EVALUE 4.00e-98; NT HIT: gi5730038, EVALUE 2.00e-96; EST_HUMAN HIT: AL528595.1, EVALUE 4.00e-98; SWISSPROT HIT: P41997, EVALUE 4.50e-02
catgaggaacacagtggctggccattaaaagttgacaatgaccaattgggagcaatcatcaaagctgatccttttacgactacatgagaagatgtcgaagaactcaacattgaacattctatgggtcattcggcatttgaagcaaattggagggatgaaaaggctagaaaagtgggtgcctcatgagctgagcaaaaatcaaaataattgtcattttgaagtgtcatcttctcttattctgtgcaaaaacaatgaaccatttctctatcagatagtgatgtgtgatgacgaggattttatacgagaactggcgatgaccaactcagtggttggaacaagaagaagctgcaaagcacctcccaaagccaaatttgtatcagaaaaatgtcacagacactggtggtctgctgcctgtttgacctgctacagctttctgaattctggtgaaaccattacatctgaaaactatgatcagcaattcaatgagatgcaccaaaaactgcaacgtctgcagccgacactggtcaacagaaagggcccaattcttttccacgactatgcttgaccacatgtcacacaaccaatgcttcaaaa

SEQ ID NO: 4836 - DNA, 594 bp, Homo sapiens
  MAP TO AC011400.4; EXPRESSED IN BRAIN, SIGNAL = 1.1; EXPRESSED IN BONE MARROW, SIGNAL = 0.85; EXPRESSED IN ADULT LIVER, SIGNAL = 0.93; SWISSPROT HIT: O60806, EVALUE 9.90e+00; EST_HUMAN HIT: AW936351.1, EVALUE 4.00e-06; NT HIT: Y15994.1, EVALUE 2.00e-06; EST_HUMAN HIT: AW936351.1, EVALUE 4.00e-06
tcgtgtctgcatctctcagctcttccctcctccaagtagtagtaatgctggcagcagccgcggcctcagcctcacatccacccaggttgcagtccagcaagaaagatcaaaaatcttctccagaaaccctacccagaccacatgggctgagaattagagaaagatagaaccccaaattaaatggggaggaaggattagaagatgggaaggcaagcgccaaatacctgctacacatcctacatgcaggcactggggatccccagctgaacgggaaagctctgtgtagcatctaggggctgacatccaaggggaggcagcaaacacacaaaccaacaaatgtagaaataaaatcaccttggatggtttggacgataataactgctggagtgacaaacagagcagtgtagttatagcgactggagtaaagctcttttaaagaaatagtcagggaatctgacattgaagtcagatctgaataagtcgtcatctgggtcaagaactgagagagaaacatttctggcagaaggaacagcaggtgcaaaggccctgtggtgggaatgtgttatgcaagttccagggacagtaaaaggctgg

SEQ ID NO: 4837 - DNA, 600 bp, Homo sapiens
  MAP TO AC007619.22; EXPRESSED IN ADULT LIVER, SIGNAL = 1.2; EXPRESSED IN BRAIN, SIGNAL = 1.1; EXPRESSED IN HELA, SIGNAL = 0.52; SWISSPROT HIT: P45443, EVALUE 8.80e-01; EST_HUMAN HIT: AL540987.1, EVALUE 0.00e+00; NT HIT: AY037865.1, EVALUE 0.00e+00; EST_HUMAN HIT: AL540987.1, EVALUE 0.00e+00
tttccacatccagaattcccctcatatagggagatagaaatctcaggatctcaacaaggtacaaataacgcacattcccagaacatagagccagggacagtcccctctcagttctcttctaaaggtggttctggcacaacagttgataaagctgtgtccctgaagggctttttagccctgggtgcttcctgtaaaacttgtcagcttccactggatctgcgggactgtgtccctcacaggctggacacccggccctgcggagaggacttgattaaacaaggtataatgtacttctctttcccatccacagatggatctgtctgtagaaactctgttcagcttcatgcaggagcgccagaaaagatacgccaagtatgccgagcagatccagaaagtgaacgagatgtccgccatcctccgccgcatacagatgggcatcgaccagactgtgcccctgctggacaggctcaacagcatgctgcccgagggcgagcggctggagcccttcagcatgaagcccgaccgcgagctcaggctgtagctgctgcccggcctgcctggggctgggagccccagacaccgacaccctgaggacgtgtg

SEQ ID NO: 4838 - DNA, 566 bp, Homo sapiens
  MAP TO AC022336.12; EXPRESSED IN BONE MARROW, SIGNAL = 2.2; EXPRESSED IN PLACENTA, SIGNAL =   2; EXPRESSED IN HEART, SIGNAL =   2; EXPRESSED IN ADULT LIVER, SIGNAL = 1.8; EXPRESSED IN BRAIN, SIGNAL = 1.7; EXPRESSED IN LUNG, SIGNAL = 1.9; EST_HUMAN HIT: AI597621.1, EVALUE 3.00e-96; SWISSPROT HIT: P11172, EVALUE 8.00e-27; EST_HUMAN HIT: AI597621.1, EVALUE 3.00e-96; NT HIT: AB041357.1, EVALUE 0.00e+00
ggtcatgagcttcagccttcaaggaaaaagagtcctgttagtgttccagataagccaagtgcagaccttgaaagttttttctcattgtgatctctcacccagctacttacctgaataacagatacagttttcacagatggaaccatgggtctgctgataatcactaaagttcctgaagagttttgattctctcattaacatgttactgggagattatttcatattgtagttggttggttggacaagacgttagaggttttgtttgaaaatcagcaaatatcttttttcccccttcttcttaggaggtatctttaaaatagcttcctgggcagatctagtaaatgctcacgtggtgccaggctcaggagttgtgaaaggcctgcaagaagtgggcctgcctttgcatcgggggtgcctccttattgcggaaatgagctccaccggctccctggccactggggactacactagagcagcggtaagtggtggggggactgggtgagagggggcaggggctgctatgctgcatgctgcaagaagatatctcctaatctggcgtttctgga

SEQ ID NO: 4839 - DNA, 571 bp, Homo sapiens
  MAP TO AJ007973.1; EXPRESSED IN ADULT LIVER, SIGNAL = 1.1; EXPRESSED IN HELA, SIGNAL = 1.1; EXPRESSED IN BRAIN, SIGNAL = 1.2; EXPRESSED IN LUNG, SIGNAL = 2.2; EXPRESSED IN BONE MARROW, SIGNAL = 1.6; EST_HUMAN HIT: BI052975.1, EVALUE 1.00e-67; EST_HUMAN HIT: BI052975.1, EVALUE 1.00e-67; NT HIT: AJ007973.1, EVALUE 0.00e+00
ccatgtgtggcaggtctatgacacacagctggagaatgtggaggcctttgagggcctgtctgacttttgtaacaccttcaagctgtaccggggcaagacgcaggaggagacagaagatccatctgtgattggtgaatttaaggtaaatcctcgaagacgtccctaacccaggtgggcctaagactgtggtgttggagcaataagtgaaggggaggggtcgtacctacactggtgaccctggtgctgatgttggtgaccacatgggtaatggaggtggtgatggtgatgccgctgacgcagaatctgactggtgatgggatggtgttgggcttggtgatctcagtggtggtgactctggtagagatgagagtggtggtcatgatggtgattgtgtcagtgacaattgtatttgtttttagtctgttttcatgctgctgataaagacacattcaagactgggaagaaaaagaggtttaattgaacttagagttccacatggctggcaaggcctcagaatcatggcgggaggggaaaggcagttcttatatggtggcagcaagagaaaatgagg

SEQ ID NO: 4840 - DNA, 594 bp, Homo sapiens
  MAP TO AL096768.7; EXPRESSED IN BONE MARROW, SIGNAL = 3.8; EXPRESSED IN ADULT LIVER, SIGNAL = 3.2; EXPRESSED IN BRAIN, SIGNAL = 4.8; EXPRESSED IN LUNG, SIGNAL = 5.2; NT HIT: gi14778395, EVALUE 0.00e+00; EST_HUMAN HIT: BE465558.1, EVALUE 0.00e+00; SWISSPROT HIT: P27465, EVALUE 2.00e-35; EST_HUMAN HIT: BE465558.1, EVALUE 0.00e+00
tgtctgcacctctggaacaggtggtagccgaatcattcaagtcctacctggtcagactcccaaccacgctgaggcaggcccttacctggatggcctcatgggcctccctcttgaaaagaccctcactctgtttggaaaagatcccttagcagccataatcaggaaagagactctagagcgagcccagggcttccccaaagcggattttctgtcctgttttcagctggaaattgaagtccttgggggcctcgaagatgagcacgatggtggagcccaggttgaactcgcccaggtgctcgcccttacgcatggggacgccctctctattggtgtgcgtcacgaagctgaagtcattgtaggagcccttgctgtgccttgggctgtttgtgtgcaggtcctgtggtgataggctgggggtcagtggggcccaggccaccaagtgcacagtgtcacccccacatgtgtttggagtcccactccctctgttgcttgtccccaccaccacccaacccagctccaaaagggaggtggggatggcatctcagggccaggtgggcctgctctagccagatctcacacacagccttgacacct

SEQ ID NO: 4841 - DNA, 509 bp, Homo sapiens
  MAP TO AC000095.3; EXPRESSED IN HELA, SIGNAL = 0.98; EXPRESSED IN PLACENTA, SIGNAL = 0.73; EXPRESSED IN ADULT LIVER, SIGNAL = 0.53; EST_HUMAN HIT: AL041214.1, EVALUE 0.00e+00; NT HIT: X91348.1, EVALUE 1.00e-81; EST_HUMAN HIT: AL041214.1, EVALUE 0.00e+00; SWISSPROT HIT: Q00900, EVALUE 3.60e+00
ggtgtgctgcttactacccgtcagaaagttttggtaatagggctcttgaactcagtataaaagtcatgagctttgttgagtctcaaaatatctaatcttgcttgatctactaaattcgttttcattttctgttgcttctagaccaagagcagtgatgaccttttagctggaatggccagaggggtaacggtgactaatggtgttaaagggaaggaaagctcctgcccatctgcagcaccttcggcatctgcccctgccatgaccactgtggagaacaaatccaagattagcacaggtatgggtgacattcagtctgagacttcaactgcttttttgtttgaataggcaggatgcattggtgtttacagtgttccatctcattataggaaattgtagacatacaaaagtagatggattgatatttcagcccaatacgctcatcacgctcatcaccattatcagctcacagccagttgtaactctgtgatacccaccctcccctcttatta

SEQ ID NO: 4842 - DNA, 593 bp, Homo sapiens
  MAP TO AC018452.11; EXPRESSED IN BRAIN, SIGNAL = 2.3; EXPRESSED IN HELA, SIGNAL = 5.1; EXPRESSED IN FETAL LIVER, SIGNAL = 3.2; EXPRESSED IN BONE MARROW, SIGNAL = 2.1; EXPRESSED IN HEART, SIGNAL =   5; EXPRESSED IN ADULT LIVER, SIGNAL = 1.9; EST_HUMAN HIT: BF061233.1, EVALUE 1.00e-08; NT HIT: AB042297.1, EVALUE 1.00e-04; EST_HUMAN HIT: BF061233.1, EVALUE 1.00e-08; SWISSPROT HIT: P39188, EVALUE 1.30e-01
tgtttaagcccaggagttcgagactagcctgggcaatgtaggaaaacctcatctcataaaaagatatatatatgtatttttttaaaaggtaaaaagaatctaccaaaatctgcttctaaaaacgtctctggccgcattaccctttttctctgaaacatcagacccggcttttcaaaccgaatttctaactactggcttctaaccatacaacaccgtctacgtaaagcacacagaggcacgcctcatcttggttcttcccaaccaaatctcagccactttatgcctctcagccagcctaaatgcctggacccatctacatcctgtgaagcagcgtcattgcgaactctcctttcattgcttgtgaaggatgctgacactgatcaccaggactatgtcactcaccaggacccagagcagctgatttgtaagtaatcacaccttctgggagtttgtcattttctagtgttacctcttttttttaattgcctcttaataattacagtgaaaactaccaaaaaaaagtttatcttaactttggcccatatacatatacccttgcattttgtcacttccctaccaaagattggctccca

SEQ ID NO: 4843 - DNA, 527 bp, Homo sapiens
  MAP TO AC017019.3; EXPRESSED IN BRAIN, SIGNAL = 4.9; EXPRESSED IN BONE MARROW, SIGNAL = 3.1; EXPRESSED IN PLACENTA, SIGNAL = 3.1; EXPRESSED IN ADULT LIVER, SIGNAL = 3.5; EXPRESSED IN HEART, SIGNAL = 3.1; SWISSPROT HIT: P40068, EVALUE 2.90e+00; EST_HUMAN HIT: AW593215.1, EVALUE 5.00e-11; EST_HUMAN HIT: AW593215.1, EVALUE 5.00e-11; NT HIT: gi14720001, EVALUE 6.00e-10
tttcgtttcatctgcacgtcttttcatattgtcacgggtctctttcaatgggctgttgctggatgggactccctctcactgcaggtcttttgactgcaaggaatttcagacagcaaagaagacttcagagagactggctgagctccaggttgtgggtcatggttgcattgttgggggtgaagatttttgcagtttgcaggaggattttgagtcctctgacaagaatcattgaacattgctttgactccagcattttgcagcttgttctctcaggtaagcattgatttttcttggctttcctagggattccacattgcccatcaactgaactactggacaccattttcaggtttgcaattgccacagatggcctctgagacactgtcacaacttcatctgcctataggcaaggccagttcgaggtgagagaacactgctccaccttgaaattgcctttgtagtggttcttgcctttcccagagagcccctgcaaggcccaggatgaagggaggcagtgaggtcaagag

SEQ ID NO: 4844 - DNA, 521 bp, Homo sapiens
  MAP TO AC004211.1; EXPRESSED IN HEART, SIGNAL = 1.2; EXPRESSED IN FETAL LIVER, SIGNAL = 0.61; EXPRESSED IN BONE MARROW, SIGNAL = 0.85; EXPRESSED IN ADULT LIVER, SIGNAL = 0.88; EXPRESSED IN PLACENTA, SIGNAL = 1.2; SWISSPROT HIT: Q04462, EVALUE 9.00e-04; EST_HUMAN HIT: BG910473.1, EVALUE 9.00e-53; EST_HUMAN HIT: BG910473.1, EVALUE 9.00e-53; NT HIT: gi15304389, EVALUE 6.00e-53
ccttcctacactgcagcctcaccttggcagctcgggcccccatttcctggcagcggacaaaccactggttcttcagcaggtattctatcacatccccagaacggctgaaagagagacagggtgagtccactgctcttccggccctgtgacttctcccaggggcacaagaccccatgccatgccaggcccttggtactgaggatacaatagcgaataaaaccgacacggagctcgtattctaacggaggggtgcagagcccatcctattgtcacccttaagctccatacattcccttttggggtagcccttagtaaaggagttaaaatgaggttacctgcagatgggcagtaccatggggtggttctggaggccccggaacaggccccattcactcagcacagacattatcttttcccgggccacaaaccggtgaagaccctggagaaaaagcggcaagagtaaagactgaaggcctctagagaaataagaaactaggaggaggattagggggacagagagc

SEQ ID NO: 4845 - DNA, 589 bp, Homo sapiens
  MAP TO AF196968.1; EXPRESSED IN HEART, SIGNAL = 1.3; EXPRESSED IN BRAIN, SIGNAL = 1.1; EXPRESSED IN LUNG, SIGNAL = 0.89; EXPRESSED IN BONE MARROW, SIGNAL = 1.2; EXPRESSED IN PLACENTA, SIGNAL = 1.8; EXPRESSED IN ADULT LIVER, SIGNAL = 1.4; EST_HUMAN HIT: BI040761.1, EVALUE 8.30e-01; SWISSPROT HIT: Q10301, EVALUE 7.50e+00; EST_HUMAN HIT: BI040761.1, EVALUE 8.30e-01
cacaagcacatccaatgaggaaagaccttcagagaacagttggagggttttcattttgaaatcaatcattgtgacgtcaaaccaaaggcaacgcatgtgggatctgctcaataggccttgcttctagggaacagtcctgaatccaggccagcacagttacaacaatggcgctaagtggggattctcactgtttgcatgaataatttgctctatttattagccttcagtcactggagggactgagctcctgaggagcagtcactgtgcacatggaagtccaggcgcttgcttacacgccaggtgggtccccattgtccctggcctttgagcaaggacttggctgccggtgcatataattatgtcattacacgtgtgtgtgtccttctttcagggcttggctcccatgatgaggcttgggaattgcccaagctgtgaagtgaccattctaattcaaattgtagaagtgatacgaaggaaggcaggcaaacgtgccatgaaatggagccctgtgccgattccaggtctgtggtgaggagaaccacgtgcgcaggacaggaagggcttgggaggcctgacttctgactctgcc

SEQ ID NO: 4846 - DNA, 524 bp, Homo sapiens
  MAP TO AC003076.1; EXPRESSED IN PLACENTA, SIGNAL = 0.85; EXPRESSED IN ADULT LIVER, SIGNAL = 0.45; EXPRESSED IN BRAIN, SIGNAL = 0.59; NT HIT: gi14730720, EVALUE 8.00e-03; EST_HUMAN HIT: AW341273.1, EVALUE 1.20e-02; SWISSPROT HIT: O62653, EVALUE 8.40e+00; EST_HUMAN HIT: AW341273.1, EVALUE 1.20e-02
gacttcccccttcatcttcccttgcctgcaccagttgcacatcaaaaaagtattatgtctggtacaaagatggcaaaagcaaccaaaagttcattcactggacccagcacctgggtcatgaaaggcttgagggcaaggtggagcccagtggctggcaactaaaccaccaaaagcaaggtgttttcagaaagaacaaagaaaaaggaaagaagaaaatgcaatgatattggaagcatagaagaaaatccagtgaattggaagcattttatgtttacgtaaaggaaaaggagagaaagagagaaaaaaaattggtctatcccttttcttagcactcactctaccaataaaaaagaatccaaagtattgaatgtttctccctatacccacctaaagtcttcatctttctaagatgtaaatattaaaaacctgtctgtttcctccatatttttaatcttcacaaagattttagctgtcataatatgaaataaaaatgaagccagagtggcttcacacgcacaagctaa

SEQ ID NO: 4847 - DNA, 532 bp, Homo sapiens
  MAP TO AC026402.2; EXPRESSED IN BRAIN, SIGNAL = 1.9; EXPRESSED IN PLACENTA, SIGNAL = 1.9; EXPRESSED IN ADULT LIVER, SIGNAL = 2.1; EXPRESSED IN HEART, SIGNAL = 2.9; EXPRESSED IN LUNG, SIGNAL = 2.7; EST_HUMAN HIT: AV718498.1, EVALUE 1.90e-01; NT HIT: AY032750.1, EVALUE 1.30e-01; EST_HUMAN HIT: AV718498.1, EVALUE 1.90e-01; SWISSPROT HIT: P77315, EVALUE 6.50e+00
tgtgtccatgaccacagtcctctgtgatcttccttcattagttatcccctttctcatttttctcttggatattttcactctattctctctgctgactctccctcttcaacctataaacatgttcaagtctcttccattctatgaatataccctgcccccaccactatctctctagttaccaatctaatctctctcctctctttttcattcaaaattcttgaaaggagatatccacaataaatctcaactattattttgacttcagttctctacgatctagtttttgcccttactgctccttcaatgaaactgctctcagtgctcaatgaagtcactgatgaccagaatctgcaagtagatgtcaatctgagtaggctacgatgcctgtatctcatgtgcttttataagcttctgcaggtgaatgtccctcctttggttgtaacttgtctctaattcctaaaggtctacttctgctgaagcactttccctgagaatcatagaaactgctaagtggggttctgaggtgagatga

SEQ ID NO: 4848 - DNA, 578 bp, Homo sapiens
  MAP TO AC018427.3; EXPRESSED IN PLACENTA, SIGNAL = 0.71; EXPRESSED IN ADULT LIVER, SIGNAL = 0.78; EST_HUMAN HIT: AA234692.1, EVALUE 5.20e-02; NT HIT: M74142.1, EVALUE 2.20e+00; EST_HUMAN HIT: AA234692.1, EVALUE 5.20e-02; SWISSPROT HIT: Q01988, EVALUE 3.70e-01
ttgtcagggacagaaaacccacttagatcagctcaaaaccagaggatgtgtaagctggtataaatgaaagtggaaggagagacacagagttttactccccctctctattagacctaatttccatgtccagtttctggcagcctccagttcctcccaggccccagtgcagacatctccatgcagcgcccctgctgcctgctctctggggatctgacggccgggctcagcatggactcaagccaccagccctgatccccctggagatcagggagaggccctggcagctccacctctccagggctccacggacctgggaccagccacccaggggtaagtgccacagcctggaggtgctggaaggagggcccctggggcaaatactgggccatctgggccgtcttggaagccagcggataaatttccctcccttctaacctctgcaaccacctggggctgttctcagcaggtggtttcacacgccctgcccagagctgagcccctgacttccctggtgcggctgggccagatcagaagtgctcaaccttgaacctgtgcctcgccttcctcactgcttgttt

SEQ ID NO: 4849 - DNA, 566 bp, Homo sapiens
  MAP TO AC020894.3; EXPRESSED IN BRAIN, SIGNAL = 2.7; EXPRESSED IN PLACENTA, SIGNAL = 2.8; EXPRESSED IN ADULT LIVER, SIGNAL = 2.2; EXPRESSED IN HEART, SIGNAL =   2; EST_HUMAN HIT: BF751916.1, EVALUE 0.00e+00; NT HIT: AF324890.1, EVALUE 3.50e-02; EST_HUMAN HIT: BF751916.1, EVALUE 0.00e+00; SWISSPROT HIT: P08547, EVALUE 1.00e-11
tcaatgaaaaatgggcaaaagattttgtctttataaaagaagatatatatgaaaggccaataaggatctgaaaagatgctcaatgtcatcagtaatcaaggagacacaaattaaaagcacagacagaccatatgacacacaggtaagaatggccacaatttaaaagacggacaataccaattgttgacatggattcagagcaagtggaactctcagacactgctggagtgaatgtaaaatggaacctcttggaaactgttttccattttcttacagagttaccatacaatccagcaatttcactatttatcccagataaaaacataggtccacccaaagacttgcatgtaaatgtacaagcgaatggataaacaaattgtagtatattcatccaatggactattaatgagcagtaaaaaggaatgaagtactgataacaatatagattaacctcaaaaccattatgctgagaggaagcagacccaagagtacacaacacagcaaatctatagggacagaaagtagacagtagctctatgaagtctagggctgggagagaaagagag

SEQ ID NO: 4850 - DNA, 543 bp, Homo sapiens
  MAP TO AC011471.5; EXPRESSED IN BRAIN, SIGNAL = 1.3; EXPRESSED IN LUNG, SIGNAL = 1.6; EXPRESSED IN BONE MARROW, SIGNAL =   1; EXPRESSED IN ADULT LIVER, SIGNAL = 1.3; EXPRESSED IN PLACENTA, SIGNAL =   1; EST_HUMAN HIT: BI463101.1, EVALUE 1.00e-127; SWISSPROT HIT: P28876, EVALUE 3.90e+00; EST_HUMAN HIT: BI463101.1, EVALUE 1.00e-127; NT HIT: gi14767579, EVALUE 1.00e-127
ttgtcttgccagtgttgaccacataacttcaccctagaaggggattaattcaactctcagcaccttaggtccaaaaagacaccaaccgccccccgtccaaagttattaaataaataaaaacatttgccacccaactctggtgactatttgcagttactcccaggctgtggaccacctgtcgagatggagaagtccttctgaggctatccaaacacggaccaggccatgagaccccgatgaccatccctgaattttttcgagagtcagtcaaccgatttggaacttatccagccctcgcatccaagaatggcaaaaagtgggaaattctgaatttcaaccagtactatgaggcttgtcggaaggctgcaaaatccttgatcaaggtaagattcattcattcattctcctttgttcaaccattcattctgaataggtaacagacatacatacatgtggtacaaaattcacaaggcaccaaaagatacaaaggttaattggcgaaaatttccctctgattcatgagcctcagccactcagttcctc

SEQ ID NO: 4851 - DNA, 520 bp, Homo sapiens
  MAP TO AL118557.2; EXPRESSED IN PLACENTA, SIGNAL =  14; EXPRESSED IN ADULT LIVER, SIGNAL =  11; EXPRESSED IN HEART, SIGNAL =  13; EXPRESSED IN LUNG, SIGNAL = 8.2; EXPRESSED IN FETAL LIVER, SIGNAL =  16; NT HIT: gi6679055, EVALUE 1.00e-125; SWISSPROT HIT: Q14112, EVALUE 3.00e-45; EST_HUMAN HIT: BI196227.1, EVALUE 1.00e-122; EST_HUMAN HIT: BI196227.1, EVALUE 1.00e-122
aaaaaccagacaccaaacgcaaattgggatcttgtgtggaccagattataaatcaacatagcacatagtgacttctttcattagacctggtgaccccacatgtccccccacttcaccacagcaggcaccatccctagcaaaggccttagatacagctgaggggagcgggggcggccaggtgcttacacgcaggggtggtgcctggctgggagcgggtgccctgcacctctctgccatctttgtccacacaccagcagaagtcgctctttccgtggcactgcagggggatgaagtggcccaggtcatcgcactggggcacgtactggtcatctcggggggtgccaccgtagtgctccagcaggttttccctccagcgctcacagatggtcgggggcctctgggtgggctctgagcagatggggaagagggaagaagaaaaacctttgattgtgagtcaaggacagaatgcaaaatgtagctcaagaccccatgcctggcctcctggccttccttctcctac

SEQ ID NO: 4852 - DNA, 568 bp, Homo sapiens
  MAP TO AC000124.1; EXPRESSED IN HELA, SIGNAL = 0.44; EXPRESSED IN ADULT LIVER, SIGNAL = 0.57; EST_HUMAN HIT: AW817888.1, EVALUE 2.00e-01; NT HIT: AL139794.3, EVALUE 1.40e-01; EST_HUMAN HIT: AW817888.1, EVALUE 2.00e-01; SWISSPROT HIT: P54861, EVALUE 1.10e+00
ttcccactgttccattaggctttatttagcaggagtaaagtttccctgagcctggatgaaaaacaatcttgattcagaaattagattgtccaattctgtataacaattataactctgggcttgacttacagtaaaactcctcctcccccagcttggttctgcttcaggctgaaagcctacaatgagaaagagtggctgattagtttcttcctttatttactgccttgtgcttcccttctcccccttccccttccctctcccagctgttttcatgtcctcaaagtcaaagcaggaagatggtagacaggaaaatgataaaatattctgtgaactgatatcttcatgccctgagggtcatgagctcttcaaaggttcctatcactgtactcctttctcctgcaacatctagccccaggtaggtgcatttctagcctgaatgatcctgcatgattcctctcttcatttttgtacatcagcgttacgtaaccagcttctatcttcagaaatcactttcttccaggtggcaggctctaagagaacccatgctggctctcagcacccacatgta

SEQ ID NO: 4853 - DNA, 555 bp, Homo sapiens
  MAP TO AC018427.3; EXPRESSED IN HEART, SIGNAL = 2.3; EXPRESSED IN FETAL LIVER, SIGNAL = 2.4; EXPRESSED IN PLACENTA, SIGNAL = 1.9; EXPRESSED IN ADULT LIVER, SIGNAL = 1.8; SWISSPROT HIT: P10323, EVALUE 6.00e-03
attgcagatcgtcttggaggtggaggcctgttgagccacagcttcaggaagagtatggaggcaccaggctttgagttctaaagtagccttttggaatgtatggcaggagcaatcactgtgaaagataaggctttgtaaatggtttgagcattgcgagttcctctcacctgggagtgaggctcggtacctttctgttctcacccacagacatggggaaaaggaggaggaggagccagtttgcttctccctggactagaagggagaagctgagctggtggggtgctggcaggagcctgagcatttgcacaggtggactgtggagggtaagggatggaggatctgaaagattaggaaaggtgagcctctggacaatggccaactggaggtgagaggataagagctctgtctatgccacaagagagagggtgggcaagggggccatgggagcatgccctcttcccgcttttcctgcagcctttgtgggtcaggagagcgcccagtgtttctgtgttctccaagagggacacaggcattggcagaaagaaccagccaatc

SEQ ID NO: 4854 - DNA, 508 bp, Homo sapiens
  MAP TO AC004215.1; EXPRESSED IN FETAL LIVER, SIGNAL = 1.1; EXPRESSED IN BRAIN, SIGNAL = 1.1; EXPRESSED IN ADULT LIVER, SIGNAL = 1.4; EXPRESSED IN PLACENTA, SIGNAL = 1.5; EST_HUMAN HIT: BF983020.1, EVALUE 2.00e-97; NT HIT: AL163284.2, EVALUE 0.00e+00; EST_HUMAN HIT: BF983020.1, EVALUE 2.00e-97; SWISSPROT HIT: P03360, EVALUE 3.00e-05
tcgtcacctagttggcattgttattgtgacttcaaaaggtcattacaccattctatcaatccagctgcttcaggatggagaacatggtaagaccagtgaattccatgagcatgagcccactgctgcacttctttagccatgaagtgagtgccttggttagaggcaatgctgtgtggaataccataagggtggacaaggtattctgtgactccatgatggtagtcttggcagaagcattgcatgcaggataggcaaacccatatccggagtaagtgtctattccagtgaagacaaacttctgccctttccataatggaagaggtccaataatcaacctgtcaccaggtagctggctgatcgcccaaggaatggtgtcatattgagagctcagtgttggtctctgctgctggcaaattgggcactcagaagtggccatagccaggtcagccttggtgagtgaaagtctatgttgctaagcctatgtataccctccatccctactgccata

SEQ ID NO: 4855 - DNA, 517 bp, Homo sapiens
  MAP TO AC026432.2; EXPRESSED IN PLACENTA, SIGNAL = 1.1; EXPRESSED IN ADULT LIVER, SIGNAL = 0.92; EXPRESSED IN HEART, SIGNAL = 1.2; EXPRESSED IN BRAIN, SIGNAL = 0.89; EXPRESSED IN LUNG, SIGNAL = 0.7; EXPRESSED IN HELA, SIGNAL =   1; SWISSPROT HIT: O54898, EVALUE 1.90e-01
gaaggaaaagcaattgccagtagaagcatttaattgcatacagattggcctttcattttgcttcaatcttttccattcaagtgccagggaaggggaagtattacctccactgcttacaccggaggtctgcttccacttagctgctgaagcaagcctctccttctttccagagatgccccccgtgaaaacccactgtgagaggagttgggcttgagtggctccaaatacacagcagtaatattctgaagcctgtcctgttcctaatcctgcacggcagctcttggcactgctggacagttccccaggcttctttccaattcttcctgtggagcagggaaagaaaaccaggtggggtggccaggccatctctcatgatcggtagagcatagctgagtatagagtatgcaggataatgcagctacatgaagatgaatggtcagaagtcaggaaggattatggggccacagcccccagtgtcttacccctctggagagcatcactcaaacccaagaggagg

SEQ ID NO: 4856 - DNA, 558 bp, Homo sapiens
  MAP TO AC022116.3; EXPRESSED IN LUNG, SIGNAL = 1.2; EXPRESSED IN BRAIN, SIGNAL = 0.69; EXPRESSED IN FETAL LIVER, SIGNAL = 0.99; EXPRESSED IN ADULT LIVER, SIGNAL = 0.63; SWISSPROT HIT: Q19532, EVALUE 9.10e+00; EST_HUMAN HIT: BF368761.1, EVALUE 2.00e-78; NT HIT: AY044655.1, EVALUE 2.00e-53; EST_HUMAN HIT: BF368761.1, EVALUE 2.00e-78
cagcaaagtccttcatccaagtaaaattttgttgtattaattgatttttgtaactaaatttctttactttcatttttattcatttattaggcttttaatttttcaggaaaaaggatttcaatctgaaatatcaacaataatacctaccaaaacagaaaaccattattctgaaaactgaacagtcaagatacctaaataaagaattgtttgacaaaattgcagtgtaattatattttcctctattttttattgcagatagcagtagttcactttcttttattggccttttttccccaaataatatcactataattaacagacatctctgttttttttttttctttttcttttcctattctgtctttatagcttaagaaatgtataaaaactccagaaatcccttctaaacatgttaggaactgggtccccaaagtcttggaacagcgacgacaaggcttggaaacatacttacaggtaagatatgtttagatcctcattttatataacataaataatcatatgtcttaccactttttctcaggacatgtgagtgcaatg

SEQ ID NO: 4857 - DNA, 586 bp, Homo sapiens
  MAP TO AF196972.1; EXPRESSED IN BRAIN, SIGNAL = 1.6; EXPRESSED IN LUNG, SIGNAL = 2.1; EXPRESSED IN PLACENTA, SIGNAL = 2.1; EXPRESSED IN ADULT LIVER, SIGNAL =   2; EXPRESSED IN HEART, SIGNAL = 4.4; EST_HUMAN HIT: BG677578.1, EVALUE 0.00e+00; SWISSPROT HIT: O14529, EVALUE 3.30e+00; EST_HUMAN HIT: BG677578.1, EVALUE 0.00e+00; NT HIT: gi14759625, EVALUE 4.00e-76
gagtgctccctgtcttcctggaccctgctggtgctctgtctcctctgccccttcctagacaatcaccttcattcttccagaccattctttcagatgctctcccagccccctcctatgcatgtccctttcacctccagccatcctggagtgagcactccctccttggagtgctccctctctccctagctctgccctggaatgcttacctggatcttgggccaggataagaaaggctccacctcagagggtacaatgcggaggtagaagatgctggggaggatgaagatgaggctgggggctgaggtggaccctggagaacaagaagaagggacaggagtcaacctgacttggggacaaggcccatattagatggggtatgggactggggtgaggtttactgaccgataactccaaagatatcccggatggttggcacacagatgacaaggacattgaccaaaacaagcaggatcagagctatggccacatgtcgtggccagctgaaggccttgcctgggaaaagcagctgctgcagggcccggcggatctgtggccagagtagggtgggacagaagtcaggacccaa

SEQ ID NO: 4858 - DNA, 534 bp, Homo sapiens
  MAP TO AC019106.3; EXPRESSED IN ADULT LIVER, SIGNAL =   2; EXPRESSED IN PLACENTA, SIGNAL = 1.9; EXPRESSED IN HEART, SIGNAL = 1.5; EXPRESSED IN FETAL LIVER, SIGNAL = 2.5; EXPRESSED IN BONE MARROW, SIGNAL = 2.3; EST_HUMAN HIT: AW168135.1, EVALUE 3.00e-83; SWISSPROT HIT: P77328, EVALUE 3.80e+00; EST_HUMAN HIT: AW168135.1, EVALUE 3.00e-83; NT HIT: AL163249.2, EVALUE 1.00e-60
actctttgggtccacactgcctttatgagctgtaacactcaccgcaaaggtctgcagcttcactcctgagccagcaaggccacgaacacactggaaggaagaaactccgaacacatctgaacatcagaaggaacaaactccagacacgctgcctttaagagctgtaacactcaccgcgagggtccgtggcctcattcttgaagtcagtgagaccaagaacccaccaattccagacacattatgacttgctttttcactcaagattagtttgggagcatcagccacactgctacatgtagaatattcagtaaaggctccagtatgtttgctattacactcagggatgccaggaatgttcttgtccatctgttctggtatacatacgcagggtgtcttgagactgctccaaggagtgcaacacctaggtcacagattgtgtgcattttcaaacccactaggaaaactattttttttcctgaaaaggtttaccatcaacaatacataagagtttatactggttccttctttgcttgc

SEQ ID NO: 4859 - DNA, 510 bp, Homo sapiens
  MAP TO AC010267.5; EXPRESSED IN ADULT LIVER, SIGNAL = 1.3; EXPRESSED IN BONE MARROW, SIGNAL = 1.3; EXPRESSED IN PLACENTA, SIGNAL = 1.1; EXPRESSED IN HEART, SIGNAL = 1.8; SWISSPROT HIT: P47767, EVALUE 1.60e+00; EST_HUMAN HIT: BE276179.1, EVALUE 6.00e-66; NT HIT: AL163210.2, EVALUE 7.00e-68; EST_HUMAN HIT: BE276179.1, EVALUE 6.00e-66
gcttgcactcattctccctcctgctgccctgtgaggagatgccattcaccatgattgtaagcttcctgaggccttccaagccatgaggaacaataagtcaattaaaccttttctttataaattacccagtctttggtatttccttataacaatgtgagaacgaactaatacagtaaattggtaccaaggtagtggggtattgctataagatacctgagaatgtggaagcaactttggaaccaggtaatgggcagaggttggaacagtttggtagggcttagaagaacacaagaaaatgtgggaaagtttggaattatcttgggacttattgaatggcttggaccaaaatgttgatcatgatatagataataaagttcaggctgaggtggtctcagatggagatgaggaactttttgggaactggagtaaaggtgactcttgctatgctttagcaaagatactggaagcattttgcccctgccctagagatctgcggaactttgaacatga

SEQ ID NO: 4860 - DNA, 532 bp, Homo sapiens
  MAP TO AL031730.1; EXPRESSED IN BONE MARROW, SIGNAL = 2.3; EXPRESSED IN PLACENTA, SIGNAL = 1.1; EXPRESSED IN ADULT LIVER, SIGNAL = 1.2; EXPRESSED IN BRAIN, SIGNAL = 1.1; EXPRESSED IN LUNG, SIGNAL = 1.6; EXPRESSED IN FETAL LIVER, SIGNAL = 0.83; SWISSPROT HIT: Q9RDE9, EVALUE 3.80e+00; EST_HUMAN HIT: BG567525.1, EVALUE 4.80e-02; EST_HUMAN HIT: BG567525.1, EVALUE 4.80e-02
agtctggtgtggactctgccatcatccccccaaatgctctgggctccccacctctgtgtctcagctcaaaggcttccttctcccctagagcggccccatcccatcctcccctggggactcctgtaggactgcactcagatgcccactatggacagagactggcggtggcagtgcacgtggagggcactcttcccttcacttcttccacatttgcagcagccagcgttttccagaaagcacgtccttggcagcatccaggagagcagatggccttctctgggaagccttttctggtggctgccgtcacttctgcaggtggatccggggctccctctgtgggctgcactgaactgatctccacctctgtcctagggtaccacacggctctagagtcacttggttacttgagcatccaccctgctgtgagcttcctcagataccaggtttttcacctttattcgtcgcccctggcacagcccaggcccaaggcatgcaaccagtcaccatccattgctgtcattgctgtggctta

SEQ ID NO: 4861 - DNA, 510 bp, Homo sapiens
  MAP TO AC016749.4; EXPRESSED IN LUNG, SIGNAL = 0.67; EXPRESSED IN HELA, SIGNAL = 0.66; EXPRESSED IN FETAL LIVER, SIGNAL = 1.1; EXPRESSED IN BRAIN, SIGNAL = 0.87; EXPRESSED IN BONE MARROW, SIGNAL = 0.74; EXPRESSED IN PLACENTA, SIGNAL = 1.1; EXPRESSED IN ADULT LIVER, SIGNAL = 0.62; EST_HUMAN HIT: AA780058.1, EVALUE 3.00e-83; SWISSPROT HIT: P14077, EVALUE 2.00e-07; EST_HUMAN HIT: AA780058.1, EVALUE 3.00e-83; NT HIT: X57147.1, EVALUE 1.00e-114
tacaggctgtcccaggattcctcgaatggtaatggacattgaggacaggagactaacacctgcccaggtgttaatctgtccaggacaggagattaacaccaagaaagccaagccagtgtccaggaggaagtcaatttcctgacccttaatggttaaatgtacccagggatcagtgagagtgatgacatgagctggcacttgccccaggcaccctcagtcctgttgttggattgtctggttgggggcttctgacacagagaaactttgtcctctggggcagtgtgtcttccaatgattgccttggcatagtggacatgggcaaggcagcagcttatttcttgttgtacaatcttttttaaagtgtccttgtaaaccacactgataacaagccttactgggttattgttctgctctattttctgtcctctctgaaccaccatggcttgtttgcctgagggccatgactaaggctgtggtctttttctcatctcacttttcctttttggcctg

SEQ ID NO: 4862 - DNA, 504 bp, Homo sapiens
  MAP TO AC002113.1; EXPRESSED IN HELA, SIGNAL = 2.6; EXPRESSED IN HEART, SIGNAL =   2; EXPRESSED IN ADULT LIVER, SIGNAL = 0.77; EST_HUMAN HIT: BE069128.1, EVALUE 1.80e-01; EST_HUMAN HIT: BE069128.1, EVALUE 1.80e-01; NT HIT: AF418272.1, EVALUE 4.80e-01
tctccaatctcaccaatcccagattaccctttaatgatttcacattaccttgaaaataactaggcacttatttttgtgctctggtacaaaaatgcctttgtctgttgccacacaggccattatctcatggaaaacctgttttccagctgtgtcgaattcagtagtattcatagacccaacacaatctcttcttgtctttaatgtgacgtttatcctgaaaagagtgcttttctctcacactccctgtatatctggttggcttatccttgaatatcctactcaaactttaccttccccaagcacagctttccatgatctcctcaatgctgagctgcccttctctgtgctccttttgcaacagctgccaagccatttcttacatggcatttactgtctcctctcccagaacaatttcttgaggctagaaaccatgtcttaattatcttgtggcctagtatctgaatgtctgcaatatggaaaaaacgctccattggtgtttgttga

SEQ ID NO: 4863 - DNA, 554 bp, Homo sapiens
  MAP TO AC016639.5; EXPRESSED IN HEART, SIGNAL = 0.99; EXPRESSED IN ADULT LIVER, SIGNAL = 1.3; EST_HUMAN HIT: BI460072.1, EVALUE 1.00e-122; EST_HUMAN HIT: BI460072.1, EVALUE 1.00e-122; NT HIT: AL163218.2, EVALUE 1.30e-01
gcctttgtgcatcccattactaatggaggataagaagttattttcttcaaaggctgacttccagaatttttggctgaacactttttgtcaagtgtatattccctttgtaggcctttctgtatagagcccacaaacatcgtgaatgtgaatcatgtcattcagagggttagtgaccatgcctctgccatgaacaagagaattcattactacagccggctcaccactcctgcagacaaggcactggtaagagacaaaacattactaatagtctaaaattcagttgaaatgaacagtgaacaatataagccagggcacctcccagtgattgaacttctttctgactgtatttcaaggacagcatcatgcaaagtcaaagatagtaattaacacacatcctacatctcaggccagttcattcttatctaaatttgaaacaatgtttctatgttgacaacaacctggagatttttttggattaaattctcctgatccccattccccaaatctctgaggaggataaattacttttgaaatggcaagttaggccattgact

SEQ ID NO: 4864 - DNA, 591 bp, Homo sapiens
  MAP TO AL121592.14; EXPRESSED IN BONE MARROW, SIGNAL = 4.1; EXPRESSED IN PLACENTA, SIGNAL = 4.8; EXPRESSED IN ADULT LIVER, SIGNAL = 4.2; EXPRESSED IN FETAL LIVER, SIGNAL = 5.3; EXPRESSED IN BRAIN, SIGNAL = 4.7; EST_HUMAN HIT: AU152602.1, EVALUE 2.00e-11; SWISSPROT HIT: Q9YTR8, EVALUE 3.90e-01; EST_HUMAN HIT: AU152602.1, EVALUE 2.00e-11; NT HIT: gi14768464, EVALUE 1.00e-11
gcacctagaagtgcaggaggggaagctgagggtgactgggtgctgtcctgcaggtaccctttggtgccagcagcctggccaccatggatggctgtgggagacagacaagctcctgggcagaagggggtggttcccagtaaggcctcaccttcaggtctgaaggccaagggctgggatcccagtcctgcagatgggagtggggacttgtggtgcctcttccagccccacccatggctgcccttgtaccaatcagcacacactttctcccttctgaggttcataaaagccccaggctcaggcacagcagggcagaggatggagaggatgaagagacctctggacaaccagctacagagaggagcaacgctctctgctgagagcttcagagacctgcagagacaagggaactaccagttgcaaagagaagcaatcctctctagggcctcctccctgctgagagcagcagatgtggggaagaccagtagcagagaggagctactctctccagggcctcctctctgctgagagctgaacactccatgggacaacctggctatagagaagagctacccactacccactgcaggtcct

SEQ ID NO: 4865 - DNA, 515 bp, Homo sapiens
  MAP TO AC024070.2; EXPRESSED IN ADULT LIVER, SIGNAL = 2.8; EXPRESSED IN FETAL LIVER, SIGNAL = 2.4; EXPRESSED IN BRAIN, SIGNAL = 2.7; EXPRESSED IN LUNG, SIGNAL = 1.8; EXPRESSED IN BONE MARROW, SIGNAL = 2.7; EXPRESSED IN PLACENTA, SIGNAL = 2.8; NT HIT: X81199.1, EVALUE 1.20e-01; SWISSPROT HIT: P30664, EVALUE 7.20e-01; EST_HUMAN HIT: BF062298.1, EVALUE 7.00e-69; EST_HUMAN HIT: BF062298.1, EVALUE 7.00e-69
cagagaactgagggcagagggaggacatgagcttgccaggtccacatggcttagtggaatttgaatccgggcccccactctgcaccagccctgcactcacagtcatcctgctgtgttcccctctccaggaaggcactgcccacgcagtctgtctgatagaggtgttgagtgctcactgaactccgtgatcttcctgaaacccaactttgattcagtgggctctgcttggaagcctgtaaagaaaaggatcataagtttaaacttagaacagattatcactattttccctctggtcttctgtcagcaagatgtcaacagccctatctattgtcaatgcattaaccagcatcttctctgatagagaatacaagaagatatgctgtgcacaccaaccagtgtaggagacctcatggctcccgggtaaagaagaagaggtacccacaagaaggtactgtggaagttcattaattaagttgattcaagaattgcagttgcggggagtattcagtgtccca

SEQ ID NO: 4866 - DNA, 551 bp, Homo sapiens
  MAP TO AL121877.13; EXPRESSED IN FETAL LIVER, SIGNAL = 1.3; EXPRESSED IN BRAIN, SIGNAL = 1.1; EXPRESSED IN PLACENTA, SIGNAL =   1; EXPRESSED IN BONE MARROW, SIGNAL = 1.2; EXPRESSED IN ADULT LIVER, SIGNAL = 1.2; EST_HUMAN HIT: AA613597.1, EVALUE 2.00e-44; NT HIT: AL163300.2, EVALUE 2.00e-37; SWISSPROT HIT: P12835, EVALUE 2.30e+00
tatgcaaggatggaagagggaaatgggatgctcttccttctctccttcacatattccaggtatttgctaggaagagaagggaaccttggatgcctgctcctctttttctagatgagtagccattcatcttcagtctgtacacctttcaaatgcatcttgaacccctgggactccttcaaaaaacagcttctttttttattttttctttctctgtcctctcttcattgataggcaattatgtctccatactacaggacactccactcaaatgcatcctccaaactaggaaaagttaatttcccaaaccttaaactagttggcttaggattgggctcagggaaagggaacccagaagcccagtatgccggcaaaagggtaaagttttttttttttttttttttgccagtcgggcttttggcctccctctccctgtgcaaactggtataaggcctcaggatttttgacctgtcctatccaccccacccctttctcattttgatacattttttctaataaccgtttgtctcttctcaccttcaggccatcaaact

SEQ ID NO: 4867 - DNA, 584 bp, Homo sapiens
  MAP TO AC010508.5; EXPRESSED IN BRAIN, SIGNAL = 0.69; EXPRESSED IN PLACENTA, SIGNAL = 0.81; EXPRESSED IN ADULT LIVER, SIGNAL = 0.96; EXPRESSED IN LUNG, SIGNAL = 0.95; EST_HUMAN HIT: AU124350.1, EVALUE 0.00e+00; NT HIT: M14123.1, EVALUE 0.00e+00; SWISSPROT HIT: P10267, EVALUE 1.00e-105
tgtcccagtgatgctcagactcattataaatttggggtgtaatagaaaaatctgacgtattccagtcacattgtaactggaaacgatgttctaagctcatgagcctgtctcccatccaaatgacagtttgtctaagatcattaatttgatttgccaatttttgatcaatactagattgtgaattccacaatcttgtagaatttttttgccaatcattaacaaagtttactgactgaacagaagagtgcaatgcaactcctgctacagcagccgtagctgtgactgcaattaatcccataatcactgctattaaagtaaaaatgaatcttttggatctatttaaaacaccttttaatacttcagtcaaagtatggatggatggtgaggcctcccacggtcggtccatggacacagggatccacacgccctctcttgctctcaccagcagaatacggtgttgccaattaaaagttgaatcaatgcaagtaagcaatctacaattttcacaggttatagtctgggagtctggtttaataactatatttcctacaactagcatataagggggctttatgcaactttgt

SEQ ID NO: 4868 - DNA, 503 bp, Homo sapiens
  MAP TO AC026717.3; EXPRESSED IN ADULT LIVER, SIGNAL = 1.1; EXPRESSED IN PLACENTA, SIGNAL = 1.1; EXPRESSED IN HEART, SIGNAL = 1.5; EXPRESSED IN HELA, SIGNAL = 1.4; EXPRESSED IN BRAIN, SIGNAL = 0.97; SWISSPROT HIT: Q9VS78, EVALUE 3.50e+00
cctcattcagcagagaaggctcctgcaggtctgagagcctgactcacccttcagtgcctcatcacactgtgaattggtcttctctcgaccaataagcacataagcagtcactgcaggatcaccttgatgtagacaaagtttgtccaaagggtgccttgtgatcactaaacctgaaagagcctccatgatccaaaaaacagaaaaagattctgtcatcaagcacgcctgggaacactgcaccctatatcagtaagtcacaatcaacaacggcaaatgaggactctgaggagccctgcccctaagaaaactgcttaacattgtttaaataaaagaatggatttaaacgtctgcttcctaaccttattggaccatatcacccctttttgtaacacttgttttgctaactacctgtggaaataagctttctgggaaacattctttgtggtgtagaagaaaagttactgaactgggaaactggctccactcccaaccagctatgcagt

SEQ ID NO: 4869 - DNA, 599 bp, Homo sapiens
  MAP TO AC061958.9; EXPRESSED IN ADULT LIVER, SIGNAL = 1.9; EXPRESSED IN HEART, SIGNAL = 2.1; EXPRESSED IN BRAIN, SIGNAL = 1.4; EXPRESSED IN LUNG, SIGNAL = 1.5; EXPRESSED IN BONE MARROW, SIGNAL = 1.8; EXPRESSED IN PLACENTA, SIGNAL =   2; SWISSPROT HIT: P50077, EVALUE 1.50e+00; EST_HUMAN HIT: AL521707.1, EVALUE 5.00e-30; NT HIT: D87675.1, EVALUE 4.00e-17
tctcataccctgccacttccttttaaactaagtttaataatactccaaatcctttgttgtcattttaccaattttcacagcaccttcatcaggagtagatttcacctccagaaaccactatgttcatccataaggagcaactcctcataggttaaagttttactatgagattttagaaacttaatcacatcttggagctctacttctaattgtagttctcttgctatttccaccaagtcatctgcagtgacttcctttgctgaagtcttcaactcctcaaagtcatccccgtcggttggaataaacttcttccaaaattgctgtttggacatcctcccaagaatcacacgtatgcttagtggcctctagaatgctgaaatttttccagaaactttccatttaatttgcccagatccatcagaggactcactatctacagcagctatagccttacaaaatatatttcttcaataataggacttgaaattctaacgtacttcttgatccatagctgcagaatgaatgttgtgctagcaagcatgaaaacaacattaatctccacgtacatctccatcagagctcttgggtgaccatgttca

SEQ ID NO: 4870 - DNA, 507 bp, Homo sapiens
  MAP TO AC024578.2; EXPRESSED IN BRAIN, SIGNAL = 1.2; EXPRESSED IN LUNG, SIGNAL = 1.8; EXPRESSED IN ADULT LIVER, SIGNAL = 1.2; EXPRESSED IN HEART, SIGNAL = 0.95; NT HIT: AF109718.1, EVALUE 1.20e-01; SWISSPROT HIT: P18624, EVALUE 4.70e+00; EST_HUMAN HIT: R07350.1, EVALUE 1.80e-01
aaaacattttggatgcccaggttcccttgaatggggtttctggggatcggctgaatcagggcctaatttctcccggagctctgaagtcatcgtaagctggaacaatgacagcaatcccagccacctacagagaaaacctgataatactataaagtctgggattgatttttaggaagactcttggtgtttccaggggccacagcaaaaatatgactgtgttagtcatgcattcgtgggattagagctgcctcaggcagggactcagattatggatgaggccaacctcaaaaagaccctggccaattatttttatttctggagcaaggaacatttgaaaacttataatttattcaattatggaaccgggttgccctataacctgctttacatcacccagaatgatttctgagcttgacaagggtaactctttgtcaaaaacttcagtggtgagagaaaacagaattacattttatggtttgagtgtttccattcaaaggctgagaagca

SEQ ID NO: 4871 - DNA, 554 bp, Homo sapiens
  MAP TO AC053467.1; EXPRESSED IN LUNG, SIGNAL = 8.8; EXPRESSED IN FETAL LIVER, SIGNAL = 4.6; EXPRESSED IN BONE MARROW, SIGNAL = 8.3; EXPRESSED IN PLACENTA, SIGNAL = 5.2; EXPRESSED IN ADULT LIVER, SIGNAL = 6.1; NT HIT: AF274048.1, EVALUE 0.00e+00; SWISSPROT HIT: P53564, EVALUE 2.30e+00; EST_HUMAN HIT: BF984326.1, EVALUE 0.00e+00
gggaggtgacttgagctgagctgtgagtgatgagagccgggggaccgagctgttaagctgcatgacctgccagggacaaaagcctggaggccgggtgagcttggaatctttgagggcccctaggggggccaggctggtgatgggcagcaggtggaaagtgagactgaaggtcagaggggcctctggacctggtgagactgtccccacagtcctgggagaggtggccaggagcaaacctgatggtgtggatggcacttctcacgcgcctgctgtgtcttacaggactgcctggacagatcctttcgggcacaggtgttcagctgccctgcctgccgctacgacctgggccgcagctatgccatgcaggtgaaccagcctctgcagaccgtcctcaaccagctcttccccggctacggcaatggccggtgatctccaagcacttctcgacaggcgttttgctgaaaacgtgtcggagggctcgttcatcggcactgattttgttcttagtgggcttaacttaaacaggtagtgtttcctccgttccctaaaaaggt

SEQ ID NO: 4872 - DNA, 600 bp, Homo sapiens
  MAP TO AF129107.1; EXPRESSED IN LUNG, SIGNAL = 0.95; EXPRESSED IN FETAL LIVER, SIGNAL = 0.87; EXPRESSED IN BONE MARROW, SIGNAL = 1.1; EXPRESSED IN PLACENTA, SIGNAL = 0.64; EXPRESSED IN ADULT LIVER, SIGNAL = 0.65; EXPRESSED IN BRAIN, SIGNAL = 0.73; NT HIT: AL163268.2, EVALUE 0.00e+00; SWISSPROT HIT: P13808, EVALUE 1.50e+00
cctaatctgccgatggagtcataaaacagcccatgaagggatttctgaagacatgacagggactttcaataaagtccagaaattaagtgctctttttcttctcccaaaaagtgaagttattttaaaacctcttttagtattgtttgtgcataattccctccagaggaagcttgtttgatgagatcttttgcaacagcaatagtaagttgtgcgggttccagacatagtcatttcaaagccatccaggttgtgcttccctgaagaagtctcagcccctgagcactaatctttcgggcctctgcttccaggtagctgctagggtggctgattgaaggtggattctgggctgttttctctgggaaaacactcatcagtgaacatgaatgctcattcagggggtgactgggaattgggactgcctcaagggcagtatcagaggtgttcaggctgaccatgggcctcttgaccctcatcagagggatcagaaagggtctaaactttcgggttaattccacacggattgggtccctggaagatcattcaaatcagcagcaatcccctaatcttagcgcacttgttactgcctccagctaaaaccaa

SEQ ID NO: 4873 - DNA, 550 bp, Homo sapiens
  MAP TO AC020553.4; EXPRESSED IN HEART, SIGNAL = 0.92; EXPRESSED IN LUNG, SIGNAL = 2.1; EXPRESSED IN FETAL LIVER, SIGNAL = 0.83; EXPRESSED IN BONE MARROW, SIGNAL = 1.8; EXPRESSED IN ADULT LIVER, SIGNAL = 1.2; NT HIT: gi5730038, EVALUE 5.00e-75; SWISSPROT HIT: P41997, EVALUE 1.00e-13; EST_HUMAN HIT: BG286864.1, EVALUE 1.00e-79
aattggccatttgattttggaatacgttcttaagtaaatctggtcatgttatacatcattttaatgggcaattttcacttttttttgctaataacttaccacttgtttatttcatgtttattttagactatagaaatgatgttagacaaagccaaattcgagctattttcttatttgagttcaaaatgggttgtaaagcaatgaagacaacttataacattaataacacatttggtccaggaactgttaacaaatgtccagtgcagtggtggttcaagaacttttccaaaggagatgagagccttgaagatgaggagcttagtggctggctattgcaagttgacaacgaccaattaagagcaatcatcgaaactgatcttcttaaaactacacaagaagttgccaaataattcaatgtcgaccattttactgttgtttgacatttgaagaaaactggaaaggtgacaaatctcagtaagtgggtgcctcatgagctgaccaaaaaaaaaaaaaaaaaaagaaaaaaaaatcgttgttttgaagtttcgcc

SEQ ID NO: 4874 - DNA, 558 bp, Homo sapiens
  MAP TO AC020927.4; EXPRESSED IN ADULT LIVER, SIGNAL = 3.1; EXPRESSED IN HEART, SIGNAL = 2.8; EXPRESSED IN LUNG, SIGNAL = 2.9; EXPRESSED IN PLACENTA, SIGNAL = 1.5; NT HIT: gi5729886, EVALUE 1.00e-118; SWISSPROT HIT: Q13576, EVALUE 8.00e-35; EST_HUMAN HIT: BI914392.1, EVALUE 1.00e-118
agtgatttgtcacccttggcaataaagtagctattgagaatttttcccaaataaggcttgctatcgaaaagatgaagtaattcctttcaaagactacttcaaaactcaggaagaacatgttctggttctagtctctgaacttgggctggaggactactttcatttgacattaacttgcattgtgtagcttatgaactgtgaaattaggggatcagagaaaactcagcatcttgatattctcttttcaggaggtagaccatgccacggacatggtgagccgtgcaatgatagattccaggactccagaagaaatgaagcatagccaatctatgattgaagatgcacagctgcctcttgagcagaagaagaggaaaatccagaggaatcttcggacgttggaacagactggacacgtgtcatccgaaaataaataccaagacattctcaatgagattgccaaggtttttggaaacagtattctttcttccttcacttagcagacatttgctaatcaccagtcaagtgctgggcactctgtgaggtggcattagggattca

SEQ ID NO: 4875 - DNA, 558 bp, Homo sapiens
  MAP TO AC003961.1; EXPRESSED IN ADULT LIVER, SIGNAL = 0.52; EST_HUMAN HIT: AA648444.1, EVALUE 3.00e-09; NT HIT: AF044083.1, EVALUE 9.00e-09; SWISSPROT HIT: P08547, EVALUE 2.00e-18
taaggatggccactttcaccacttttgttcaacatagttccggaaatcctagccaaagaaatcagtcaaaagaaagaaatgaaagaggaagaaccaaatcaagaactcatttccatttataatatctacaaacaaacgaaaatacatttaactagggaggtgaaagatctccacaaggagaactacacaatattgatgaaagaaatcatagaaaacacaaacatggaaaagcatcccttgttcatggattaaaataatcaatattattaaaatgaccatgctgcccaaaggaatcctcagagttaaagcaatttctatcatactatcgatgccactttacaaagaattagaaaaaaaatcctaaaattcatatggaactaaaaatagagactgctggccaaagcaatactaagcaaaaagaacaaagctggatgcattacattacctacattaaaattatactacaagttaatagtaaccaaaacagcataatactggtataaaaatagatacatacagcaatagaagagaacaaaaacccacaaataaagccggata

SEQ ID NO: 4876 - DNA, 574 bp, Homo sapiens
  MAP TO AC020923.4; EXPRESSED IN BONE MARROW, SIGNAL = 2.9; EXPRESSED IN ADULT LIVER, SIGNAL = 2.7; EXPRESSED IN PLACENTA, SIGNAL = 2.4; EXPRESSED IN HEART, SIGNAL =   2; EXPRESSED IN FETAL LIVER, SIGNAL = 1.7; EXPRESSED IN BRAIN, SIGNAL = 3.3; SWISSPROT HIT: P07202, EVALUE 8.30e-01; EST_HUMAN HIT: BE386012.1, EVALUE 1.00e-100; NT HIT: gi14733629, EVALUE 1.00e-100
ctctatggcatggctgtcaccgtttaataagattttgcattgcctatacaaaatgagaattattcccataccatcctaactccccagatatttgacttttatgcatagaagttccctcctagcatttcttaaagttacgagatacatagataaatcttaaaaagcaatttattttccagaaaagggcagcaggggagacacttaaactttttgttttccctaatgtttagtaccaatgatggaaaacagaaaagatgcccttcacatcaacaaattggttatttagtaaggactgacctcaagtttccattggattccttccactttctgaaatagccttctgccctctgtacgcacggctgatagttgtgcacacaggcgaggagtagtagttgactccgcagcattcgctctgagactgagccctcgtctgtccatgtctgcttatcaatgaggtcccttagcagcctgatgaggaaggcctgagggcgttgtacagggaaacagggaccagtattgtcacaggtcatttcatgttaatataatccattatggtctcagatgatgggggcta

SEQ ID NO: 4877 - DNA, 599 bp, Homo sapiens
  MAP TO AC016830.5; EXPRESSED IN BRAIN, SIGNAL = 1.3; EXPRESSED IN BONE MARROW, SIGNAL = 2.4; EXPRESSED IN PLACENTA, SIGNAL = 1.1; EXPRESSED IN HEART, SIGNAL = 1.5; EXPRESSED IN ADULT LIVER, SIGNAL = 1.2; EXPRESSED IN LUNG, SIGNAL = 2.1; EXPRESSED IN HELA, SIGNAL = 1.6; NT HIT: AL161554.2, EVALUE 1.40e-01; SWISSPROT HIT: P52743, EVALUE 3.40e+00; EST_HUMAN HIT: AA485008.1, EVALUE 8.40e-01
ccttcccattgatgaccttgagaggttagagaccaatggcagtgacggtgatcacattattatttgaagccttatttgaatatttaagacttagtatgtttgtttaaaaaaataatcatgttgcatcataaccatactttgtaagaccagattaccggtgaccgctcgggatgttaagctagtgaagacaatgcaaggtggcctgaagcagcatgaggcagaccatggtcccgacctgcattggctggtgctggctgcagctgctgatggaggctacaaacagtgatagaagcatgcagaagctacacagcacaggccaaggtgctgtgggagaggcggaggaggaacactgaccactggcggcctggggacacgggagggctggcttctgaaactccatggtgtgagaattctgatcgcagtaggtaacttttctgatgggaaaggtgcagcattggtggaaaaacaggagatggcactcaagaatttatactggagagagaccaaggacagagattctaaaagcttaaagaaggataaacacccgtggcatgggcattcgtgtgtgtgtgtgtgtgtgtgtgaattgccagagcaaa

SEQ ID NO: 4878 - DNA, 568 bp, Homo sapiens
  MAP TO AC005903.3; EXPRESSED IN PLACENTA, SIGNAL = 3.9; EXPRESSED IN ADULT LIVER, SIGNAL = 4.2; EXPRESSED IN HEART, SIGNAL = 2.4; EXPRESSED IN HELA, SIGNAL =   8; EXPRESSED IN BRAIN, SIGNAL = 4.3; EXPRESSED IN FETAL LIVER, SIGNAL = 2.9; NT HIT: gi14736240, EVALUE 3.00e-39; SWISSPROT HIT: Q02388, EVALUE 2.00e-24
tcctcatgtgaaggggtaggggaaggggacaaccaggcaggactaccaagactcacattcggcccagagggcccagcggctcctggtttcccatccagtccgctccggccatccagcccagggggaccccggtcaccctgtggaaaatagagtggtaagaggccaccaaggctgaggtggatctgataacccaggctcatgtcctgagaaacccccacaccctctcaccttttctcctgctgggcctcggacacctgggtccccctggagggaacagggtcagataagaggtgagggtaagatggggacttggcagacggggcaaagtgcatcactcacctgtgggcctgggggtccccgaaacccttcaatgccctgaggataggggaggaagaaatcagagcaggccctcccatgcctgcacccccgaggaccaatcacactcaccctttccccaggggctccagggaggccaggatcacccttgggccctcgaggaccctcttgtccgcggtccccaggctctccctgtggcagagataagcttgctgaggaacagccttgaagc

SEQ ID NO: 4879 - DNA, 561 bp, Homo sapiens
  MAP TO AC009123.6; EXPRESSED IN BONE MARROW, SIGNAL = 2.2; EXPRESSED IN PLACENTA, SIGNAL = 2.7; EXPRESSED IN HEART, SIGNAL = 2.9; EXPRESSED IN ADULT LIVER, SIGNAL = 2.3; EXPRESSED IN FETAL LIVER, SIGNAL = 2.7; EXPRESSED IN HELA, SIGNAL =   2; EXPRESSED IN BRAIN, SIGNAL = 1.5; NT HIT: Y11740.1, EVALUE 8.30e+00; EST_HUMAN HIT: BG679514.1, EVALUE 1.30e-02; SWISSPROT HIT: Q01456, EVALUE 3.00e-07
cagcctctgctctcagtgtggggtggcgagggcctaaaaatgaagaatcatactagaaacatcccgacgagtctggggaaagctgccctcagaaggctgtttaagctgaggactaaagggtgatttggccaattgaagctgatgggaggccttccaggcagaggaccagcacgtgccaatgatgatcggtggcactgtgctagatgccagcctgagtgtagatgcccgcctgggtgtacactccatcctgagtgtagacaccagcctgggtgtagacgccatccttggtgtagatgccatcctgagtgtagatgccagcctgggtgtagacgccatcctgagtgtagatgccagcctgggtgtagacgccatgctgagtgtagacgccagcctgggtgtagatgccatcctcagtgtagatgccagcctgggtgtagatgccagcctgggtgtagacgccagcctgggcatagatgccatcctgggtgtagacaccagcctgggcatagatgccatcctgggtgtagacaccatcctgggtgcagactcaggataccccag

SEQ ID NO: 4880 - DNA, 597 bp, Homo sapiens
  MAP TO AC008413.5; EXPRESSED IN BRAIN, SIGNAL = 8.9; EXPRESSED IN LUNG, SIGNAL =  10; EXPRESSED IN FETAL LIVER, SIGNAL =  13; EXPRESSED IN BONE MARROW, SIGNAL = 7.9; EXPRESSED IN PLACENTA, SIGNAL =  12; EXPRESSED IN ADULT LIVER, SIGNAL = 7.8; NT HIT: AL163249.2, EVALUE 7.00e-96; EST_HUMAN HIT: BE393102.1, EVALUE 1.00e-107; SWISSPROT HIT: O95163, EVALUE 1.10e+00
aaaatggaccaatcagcaggatgtgggtggggccagataagagaataaaagcaggctgctggagcagctcgggtctccttccacactgtggaagctttcttgttttgctctttgcgataaatgttgctattgctcagtctttgggtgtacactgcctttatgagctgtaacactcactgcgaaagtctgcagcttcactcctgaagccagcgagaccatgaacccacggggaggaaccagcaactccagatgcaacgccttaagagctgtaacactgaccgcgaaggtctgcagcttcactcctgagccagagagaccgtgaatccaccagaaggaagaaactccgaacacatctgaacatcagaggaacaaactccagatatgccgcctttaagaactgtaacactcaccgcgagggtccttggcttcattcttggaagtcagtgagaccaagaacccaccaattctggacacactagggtcattcatcttttcaggaatacggtgacccagggaagagatgttggggtcatgtgttctcccctgttttgttttcagagcatcgttctggagagctgcatgtcgtcaaacagttgg

SEQ ID NO: 4881 - DNA, 553 bp, Homo sapiens
  MAP TO AC025450.3; EXPRESSED IN HEART, SIGNAL = 2.3; EXPRESSED IN ADULT LIVER, SIGNAL = 1.6; EXPRESSED IN FETAL LIVER, SIGNAL = 1.7; EXPRESSED IN HELA, SIGNAL = 1.8; EXPRESSED IN BRAIN, SIGNAL = 1.6; EXPRESSED IN BONE MARROW, SIGNAL = 1.6; EXPRESSED IN PLACENTA, SIGNAL = 1.6; SWISSPROT HIT: P47068, EVALUE 6.00e-01; EST_HUMAN HIT: BG993583.1, EVALUE 5.00e-02; NT HIT: U60902.1, EVALUE 1.30e-01
ccagggtttctgccacttagtatgtgcttactcaatattgtcttgattaatggcattggaagtagagataatagcagtgcagaattaatgggctagatactttgttattgaacacaattgtgtagggttgaactaacaaataggtaatgcttctgcaaagtgtgtaagtaaaaaatataaaataagtaaatagattatatattcatcagtctatttagaaaaacttactgagtagctactatgtgtcagacactgttctatgcactggtaatatccagaactctggatgcagatatgatatcaagaacattgggtacaggggtgatatccagattgctgggtgccggggtgatatccagaacactgggtgcaggggtgatatccagattgctgggtgcagaggtgatatccaaaacactgggtgcaggagtgttattgagatcactgggtacagggtgatagccaggatacttgacaaccagtgtccctagagcattagtcagaactgacagtggtggtgctcaaacagtatcctggaggtgctcttctctgc

SEQ ID NO: 4882 - DNA, 560 bp, Homo sapiens
  MAP TO AC067967.2; EXPRESSED IN FETAL LIVER, SIGNAL = 0.92; EXPRESSED IN HELA, SIGNAL = 0.85; EXPRESSED IN BONE MARROW, SIGNAL = 1.5; EXPRESSED IN PLACENTA, SIGNAL = 1.1; EXPRESSED IN ADULT LIVER, SIGNAL = 1.8; EST_HUMAN HIT: AA628080.1, EVALUE 2.00e-81; SWISSPROT HIT: P36623, EVALUE 5.30e+00; NT HIT: AF021345.1, EVALUE 4.00e-20
caggctttgtgtccctcttcaaccactgtatctcccatttattttccaggcctttgatgtttaatagtttaaattaccttattcattcaaaaatatttggcaagtgacttctgtgtctcaaacattattcagggtcttgtaaaaaacatagaaaagctattctatacctacaccatttctaaaatatgtttcattaataaaatttacttttttaggaatgatttaaaacactaaagaaatacaaacttataataattttgaaatttttaacaaatgaattttatttatttcattttattcagttgaattaaatgaagaaaagcacaaagaactaatagagaaaaaggagatggaaatttcagagttaaatgcaaagctaagaagtcaagaaaaagaaaaacaaaatgaaataatcaagctacaactagaagtaagtgtttaagagtctgctaaacttgaggacacatcccttagtctaaactgtactttgattgtttttcatcacagtgagatacattttaggattagaagcaattctgtgagagggcttcacacatgct

SEQ ID NO: 4883 - DNA, 535 bp, Homo sapiens
  MAP TO AC003967.1; EXPRESSED IN ADULT LIVER, SIGNAL = 0.43; EXPRESSED IN BRAIN, SIGNAL = 0.4; NT HIT: gi14766840, EVALUE 0.00e+00; EST_HUMAN HIT: AA907902.1, EVALUE 1.00e-118; SWISSPROT HIT: P08360, EVALUE 4.40e-01
acacttggtcgttggtctccatcccacccactggactgaaactaccatagccaagactaaagacacccggagatgtccctcctgtctctaaaacacccaacccccgcttccccaggtagggctgactgggcacgtaaacagagtcctgggtcctgagtccacagctctctcaatgctgcttcttgtggagggctagggggtcggagggtggtggctggtggaagaatgcgggccactgaaggcaacggtaggccagcaggtgggggcccagcgcatacagcagattgcacacgaagaagcagccccaggtgtcctcaggcacacggtaggtgaagggtgtgcgcaggtgcatggaagcccccatgtgcgagaactgtgcctggtagccagacagggaagatggatgtcaggggccaggaaggaactgaaatcccagcatcaccgacagccccccaggtaggtcaggcagaacccaggggatgcccatccccacctctcgggctttgctcatctatctgtttcccatctccagtcc

SEQ ID NO: 4884 - DNA, 599 bp, Homo sapiens
  MAP TO AF131215.1; EXPRESSED IN PLACENTA, SIGNAL = 1.1; EXPRESSED IN ADULT LIVER, SIGNAL = 1.3; EXPRESSED IN LUNG, SIGNAL = 0.69; EXPRESSED IN HELA, SIGNAL = 1.2; EXPRESSED IN FETAL LIVER, SIGNAL = 1.4; NT HIT: AL161496.2, EVALUE 8.90e+00; EST_HUMAN HIT: AA210887.1, EVALUE 1.00e-118; SWISSPROT HIT: P15662, EVALUE 5.90e+00
accaaggcagttccagtgtcccgtggtccccacctggcacctgcactgtgctctctcttctgggactgcccttccctccctcatgatgttcttggcttgccacctcatcgcagcagaggatcggctccagtgctacctgctcagaggcactgccgtgagcagcctctctaaaacagtcctgtctcttcatcaaatcccaagcaatctctaggcccctcctgtcctgcttgagctctctctctctagcacgatttcctactaacatactatatttttacttatttactttatcttccctactagaatgattctaatttactggcatttacatatgaaactacagtttaatcatttgagggagaaaaaagccaaccttaatgctattctattatcaagcatattcatcttaccaaagaggaaagtgaaacccctctgttaggcaaaacacaaaccaggatgtggctaagtttctacccttcatttctactggactcttgagatcatcaataacccactcagcggtggggccaactcgatgtgaacacagtacacacatccaatgaaacatgggatgtaactggcagaaacaagcacgtaca

SEQ ID NO: 4885 - DNA, 540 bp, Homo sapiens
  MAP TO AC012082.6; EXPRESSED IN HELA, SIGNAL = 1.1; EXPRESSED IN BONE MARROW, SIGNAL = 1.4; EXPRESSED IN PLACENTA, SIGNAL = 1.2; EXPRESSED IN ADULT LIVER, SIGNAL = 1.3; EXPRESSED IN BRAIN, SIGNAL = 1.1; EXPRESSED IN FETAL LIVER, SIGNAL = 1.2; NT HIT: L11910.1, EVALUE 2.00e-19; EST_HUMAN HIT: BG571263.1, EVALUE 5.00e-08; SWISSPROT HIT: P08547, EVALUE 5.00e-41
cctagagtccaccaaaaacctgttagaactaacaaactaattcaatgaagttgcaaaatataatactaaatcatgacacaaaaaaacagtagtatttctatattccaacagtgaacaatctgtaagaaatcaagaaggcaattccatttataatagttacaaaaaaataaaatacctaggaataaatttcaccaaagaggtgagacagctctgccataaaaactataaaatactgaagaatgaaattaaaaatgacacacaaaaaattaaaagacatatcatgttcctggagaaaaataatattgttaaaatgtccatactacccaaagtgatctacaatgtcaatgcaattcctatcaaaataacaatgatatttttcacagatttagaaaaaaatttcttaaaatttgcatggaactacaaagaaccccaaatagtcaaagtagtcctgagcaaaaagaacaaagctagaggcattataatacctgacttcaaagtatactacaaggctatagtaactaaaacagcatgatattggca

SEQ ID NO: 4886 - DNA, 583 bp, Homo sapiens
  MAP TO AC006231.18; EXPRESSED IN HEART, SIGNAL = 0.96; EXPRESSED IN BRAIN, SIGNAL = 1.7; EXPRESSED IN HELA, SIGNAL =   1; EXPRESSED IN FETAL LIVER, SIGNAL = 1.3; EXPRESSED IN BONE MARROW, SIGNAL = 1.8; EXPRESSED IN PLACENTA, SIGNAL = 1.7; EXPRESSED IN ADULT LIVER, SIGNAL = 1.9; NT HIT: AJ400877.1, EVALUE 2.00e-22; EST_HUMAN HIT: R55851.1, EVALUE 1.00e-21; SWISSPROT HIT: P11369, EVALUE 4.00e-32
tggagaagcaaaagacccagaataaccaacacgatattaaaggacaagaacaaagttgaagtactgacattagctgacctcaagacttactaaaatgtgacaataatcaagagagtacagtattggtgaaaaaaaaatagacaaaccagtggaaaagaatagaaagcccagaaattgacccaaataaattaaatcaactgatatttgacaaagaagtaaaggcaatacaatggcacaaagatagtctttttagcaaatggtgctgaaataactagacatccacatgcaaaaataaatacacaaatctagacacaggtcttacattattcaaaaaaatgaactcgaaatggatcacagacctaaatttaaaatgcaaaaccataaaactcctagaagataatataggagaaaatctagatgactttgagtttggaggtgactttttgtacaacaccaaagacatgacctataaaataaagaattgataaactcagtttcattaaaattaaatttttctcttctgtgaaagacactgtcaggagaatgaaaagacaagccacaggctgggagaaaacacttgcaa

SEQ ID NO: 4887 - DNA, 503 bp, Homo sapiens
  MAP TO AC026745.3; EXPRESSED IN PLACENTA, SIGNAL = 0.95; EXPRESSED IN ADULT LIVER, SIGNAL = 1.2; EXPRESSED IN HEART, SIGNAL = 1.7; EXPRESSED IN BRAIN, SIGNAL = 0.91; EXPRESSED IN LUNG, SIGNAL = 0.85; EXPRESSED IN HELA, SIGNAL = 1.8; EXPRESSED IN FETAL LIVER, SIGNAL =   2
tgaggaatgccaagggtatcaaaaccttgccttcatgcctctctgcccctcagatctccttctggggtacctttctggctgactccaacaggaagtctggggactttaactatagtccacagaagaccacctccggggatagggaaccaggcaagaagaatagcagttttggaggggaagatagaaaatgcccaggctacgtaagtctttaccgagcaccaacaatgttgcatataaatataatttaccctttaaagggaattctattgggagcaaaagtaaaaatgttccaggttgatattttctagtgatgtgtttaatatagtaaagcaaaaattatcttgagaaaataaatcattaacatagcctctaaatccttctttatggtattaactgtcctaatggggttttggtagaaactgcatagctgacaatttgcaactgaagtttagagcaagaaattaaggttgtatatttagaaatgctcccacaaggaaatacca

SEQ ID NO: 4888 - DNA, 598 bp, Homo sapiens
  MAP TO AC016594.5; EXPRESSED IN ADULT LIVER, SIGNAL = 0.63; EXPRESSED IN FETAL LIVER, SIGNAL = 0.69; EXPRESSED IN HELA, SIGNAL = 0.77; EXPRESSED IN PLACENTA, SIGNAL = 1.3; NT HIT: gi14781351, EVALUE 0.00e+00; EST_HUMAN HIT: BI519571.1, EVALUE 0.00e+00; SWISSPROT HIT: P39723, EVALUE 1.70e-01
gatttatcatccactttcttcttccttcaggtcagcttagctttcttcttagcaggtcctttatgccctttggcctttcttcttaaattccgcctgtctaccacaggcacttccacttctatttcctctgagctgctatccacagctttttctgccgattgtgtaaactgatccagttgctcggaagatgcttcagactgctcctctgactgattcttctgtcctgcattctgtgaaaatggcacgtcttcaagttcaacctctatcaaagaactctgaggaagagcagtagatgtttcctggggctcagataccccctcctcaccctggtcttccaatgaggaagtagtattaggagacaaattctcagagaccggttcttcggaaaattcagctatcacagagtttggaaaaccaccatcagatcgttcttcatttgacatagtagcaacattgtctgaactcccaagatgtgctttctttcttggaagtagggacaatttctcttccatgtgccccttttcatcagatgtgccttcatccatcaacatttctgagtcaggtatacgtggggtctgaaaattaaaaacctggtcaa

SEQ ID NO: 4889 - DNA, 570 bp, Homo sapiens
  MAP TO AC016940.7; EXPRESSED IN BONE MARROW, SIGNAL = 2.4; EXPRESSED IN PLACENTA, SIGNAL = 2.7; EXPRESSED IN HEART, SIGNAL = 2.2; EXPRESSED IN ADULT LIVER, SIGNAL = 1.6; EXPRESSED IN LUNG, SIGNAL = 2.4; EXPRESSED IN HELA, SIGNAL = 1.5; EXPRESSED IN FETAL LIVER, SIGNAL = 2.7; SWISSPROT HIT: P38533, EVALUE 3.00e-07; EST_HUMAN HIT: BF594220.1, EVALUE 0.00e+00
gccttgggtacaaaatgctcctgattctggtgtagctccatggcgagtcagaacactgaacaggaatatgaagccaagctggccccatctgttggtggagagccaacaagcgggggcccatctggttcttcacctgatccaaatccagattccagcgaggttttggacaggcacgaggaccaagccatgagccaagatccaggctcccaagataactcaccaccagaagaccgaaaccaacgcgtggtcaacgtggaagacaaccacaacctttttaggctctccttcccaagaaagctttggacgattgtggaggaagacacattcaagtctgtgagctggaacgatgatggagacgccgtgatcatcgacaaggatctcttccagagggaggttcttcaacggaaaggtgcagagaggatcttcaaaacagacagcttgacgagtttcattcgccagctgaacctctatggattctgcaaaacacgcccaagcaactctccaggaaacaagaaaatgatggtaaagtagaaagcatttctgtaatcccttttctctctttctcaaaca

SEQ ID NO: 4890 - DNA, 577 bp, Homo sapiens
  MAP TO AC020728.4; EXPRESSED IN LUNG, SIGNAL = 1.6; EXPRESSED IN BONE MARROW, SIGNAL = 1.3; EXPRESSED IN PLACENTA, SIGNAL = 1.9; EXPRESSED IN ADULT LIVER, SIGNAL = 1.7; EXPRESSED IN HEART, SIGNAL = 1.8; EST_HUMAN HIT: BG181173.1, EVALUE 0.00e+00; SWISSPROT HIT: Q06910, EVALUE 4.20e+00; NT HIT: U82828.1, EVALUE 1.40e-01
tcctggaaccgaagaaacaccttgctgagcccagcacagactgcagaatcatgagaaataatagttggtttaagccactacattttggagtggtttgttatataactaaaacaagcaatgatagaaaagtctagcaaaccaattagttatttgtaagaagtaaaaatgttatagaaacctaatatttatactctttgaactgttacatgtgctccattctgattttatacaactttaaatgcttaattctcaaattaccttactcttagggtcctcttcatatgtttttgttttaggttgcaatggaggtgaaatagtggcttgtatttgaggagactgaaatttaggcctacttttaggttgctgctcttcaaattcctgactgaatccttcaggaagtgcatcttaaaataaaagaaactatgctgaaaataaacaggcatatgatacataaaacacacaaatatttgttaagcatttgtaaaccttgcctagacttagagcacctaattttcttctattccctcatctcctaagaatagaaatcttaagatgaacctggttttatccgtcaacc

SEQ ID NO: 4891 - DNA, 536 bp, Homo sapiens
  MAP TO AF022794.1; EXPRESSED IN BRAIN, SIGNAL = 1.1; EXPRESSED IN LUNG, SIGNAL = 0.72; EXPRESSED IN FETAL LIVER, SIGNAL = 0.67; EXPRESSED IN ADULT LIVER, SIGNAL = 0.89; SWISSPROT HIT: P15398, EVALUE 5.80e-01; EST_HUMAN HIT: BF841123.1, EVALUE 3.00e-09; NT HIT: AJ229042.1, EVALUE 0.00e+00
aatgggagactgtcctgtgccttataggatgtttagcagcttctctgatctcttcccactagaagccaacagcactccctctcccccatttgtgacaacagaaatgtctctggacaatgccaaacatcccctggcgggcaaaatcaccctctccctcttgagaaccattgctctcgtgcaaggatagcaaggatgtttcaacttgcttattgacaggccatggatatctggaggactgagtggaggaggattctgaaggctcatctggaaagagtgtcttggccaataaacaaggtcttccatgggcttgggagtgggtagaagtgctgtattagtcagagttctgcagagatatagaaccaacaggatgtgcatatgtagagagaggacaaaagagagattaatttgaaggaattggtccatgggacagtagaggctagcaagtgcaaaatctgcaggatagggtggtaggcaggaaacccaagaaggattgcagtttaaatccaaaggcaatatgctggcagaattccttcttg

SEQ ID NO: 4892 - DNA, 532 bp, Homo sapiens
  MAP TO AC013602.2; EXPRESSED IN LUNG, SIGNAL = 1.3; EXPRESSED IN HELA, SIGNAL = 0.49; EXPRESSED IN BONE MARROW, SIGNAL = 1.1; EXPRESSED IN BRAIN, SIGNAL =   1; EXPRESSED IN PLACENTA, SIGNAL =   1; EXPRESSED IN HEART, SIGNAL = 1.2; EXPRESSED IN ADULT LIVER, SIGNAL = 1.1; SWISSPROT HIT: P31126, EVALUE 4.90e+00; EST_HUMAN HIT: AW340800.1, EVALUE 5.00e-05; NT HIT: U29185.1, EVALUE 8.00e-03
ttggcacatgttggtttcacttggcaaggtgtgcttccatgatgaggctgcagtggtttccatgtgacctctggagatgcctcatgtaaaagtgcctgatacatagtagggactcaataagtctttgttgaatggataaaagaagaaatgaatgaagacagccaagaagctttccaaagaatcataccactagaagaaaagaaaacccagagaaatcatatctgagaacacagatttcatcccttggtcataaccttcttgcattcttctggatttgtgatgtccttttcttcccctcagtggtcttctccagagcacctgaagctgcatcatcctccatgagccccaagaccacaggggattgctcagagaagggtgtgagctttctggagtggttcaaaggaggcgtgtcagacagacttgaaaggagatacaccgagacatatgaagatacaggagggaagagggtctattcctggtcaggctgagcagtaagaaataggaaggaaattgaaagtcacagtggggcagt

SEQ ID NO: 4893 - DNA, 509 bp, Homo sapiens
  MAP TO AL121915.8; EXPRESSED IN HELA, SIGNAL = 0.93; EXPRESSED IN PLACENTA, SIGNAL = 1.1; EXPRESSED IN BONE MARROW, SIGNAL = 1.6; EXPRESSED IN ADULT LIVER, SIGNAL = 1.2; EST_HUMAN HIT: BG745436.1, EVALUE 2.80e+00; SWISSPROT HIT: Q58168, EVALUE 3.60e+00; NT HIT: M61705.1, EVALUE 8.00e-03
tgaagggcctttttcatttgtaaaaactctaacaccggtgatagcttgttaacgagatctaaacacaacatccttcaaggttagacaactttagactgagttttcagagctcacttttctggttctttgcttttttctctgtctgtaaaatggactccgacaacaaccatgatgtaacattgctcatggcagaaactcggttaaaaacaaaatctaggggacaagttgcagggaggttagaattaaccaggtccctggccactgggccctggaaggtcagatggcttccagctggaggggagctccaaccctgtacattccaataggaagccggcagctgaagctttgtctccagggcttccaggttctctggggtttcttcctttctgaccctggaaacagaaggagactcaagactctccatgaagatactttcttctgttggctgaattcacgaggtgggtctgatccatgtatccctccttgcaactcaaaagaaggcagcagct

SEQ ID NO: 4894 - DNA, 593 bp, Homo sapiens
  MAP TO AC005568.1; EXPRESSED IN HEART, SIGNAL = 3.1; EXPRESSED IN ADULT LIVER, SIGNAL = 3.7; EXPRESSED IN FETAL LIVER, SIGNAL =   2; EXPRESSED IN LUNG, SIGNAL = 2.8; EXPRESSED IN BRAIN, SIGNAL = 3.3; EXPRESSED IN PLACENTA, SIGNAL = 3.5; NT HIT: gi16192019, EVALUE 2.00e-03; EST_HUMAN HIT: AI001906.1, EVALUE 1.00e-103; SWISSPROT HIT: P10598, EVALUE 2.60e+00
tgggatcttaccacctctgcacctggaggcaggttgtgtggagggcgatctcactagagctgggactttaagtcaaggagctcaaaaagggacttggaggaataaaaaccataaaccctgtccccaccttctccctctggttttgattccaggctccacatggaccaaacccagctggcagtcagagggcaagagcatctcgatgcagcgcatacaggccaattccagggtgcagtgcagcatggaaaaggagaaatgtacctgaagaggcaaatgaaagatatacagcgtcacaggcaatcttgcttctactaccataaaaatagtttacgtttcttagacacttagtctgtgtcaggcatgtccattatctcattgcatcttcccataaacccggtttcctccattggacagataaagaaactgactagtgaaacagcttgagggacggaggtatgaacagctaagctgtcattttcccgtccagagtcttatctggtgtatagtagttcccctgtgaatgtttgtggaatgaatgaatgaatgaggagcagacataaatagggttagatagtaaacctccctgaggagcc

SEQ ID NO: 4895 - DNA, 505 bp, Homo sapiens
  MAP TO AC016951.9; EXPRESSED IN HEART, SIGNAL = 1.2; EXPRESSED IN ADULT LIVER, SIGNAL = 1.3; EXPRESSED IN BRAIN, SIGNAL = 1.2; EXPRESSED IN LUNG, SIGNAL = 2.4; EXPRESSED IN HELA, SIGNAL = 0.78; EXPRESSED IN BONE MARROW, SIGNAL = 1.7; EST_HUMAN HIT: BI598488.1, EVALUE 4.50e-02; SWISSPROT HIT: O55127, EVALUE 4.60e+00
gttagcaacctcccagatgccttgtagcctcttgattccaatcccccatttcttcttttcttcctctcctccccagaaaagtaatttggagagctgcaagatggaaggtgcaggctcccccgcctggctgttcatgcttcacactgctggagacagaggccatggagtgagtcttcaaagttgcaagaacaccctgccccaaggaggatcagcactcaatcaggaaaggcctctgacaccctcctcctccaggccagatacatggaaaaggtgtctgctccgagccagctgaacagacctcacatgatgataatcaaatcatatttgaaaatgagatgaggaggggagtcagaacaaaagtctatgaaaagaaaaataaggtggaagttgcagaaattggtgttctgtattctaaggccttcctggctcctggcagggtttgagattagtgttgataatagcttcaccataggaccacaaaaaatcaatggaactgggactgagg

SEQ ID NO: 4896 - DNA, 585 bp, Homo sapiens
  MAP TO AC005776.1; EXPRESSED IN BONE MARROW, SIGNAL = 1.3; EXPRESSED IN PLACENTA, SIGNAL = 0.48; EXPRESSED IN ADULT LIVER, SIGNAL = 0.65; NT HIT: AF196779.1, EVALUE 2.20e+00; EST_HUMAN HIT: BE160558.1, EVALUE 0.00e+00; SWISSPROT HIT: P36291, EVALUE 3.80e-01
ctggctttctcaagtctgggaccctgctgggactcttatttccgacgtcctattgggaggagccctcacatccatcctcctggagatgcccaatgcccccaagtctggtctagatccacccttgcattccaggcttgcacatccaaccgcttcaatgacagcatccatgaggatgtcgacaagctccacatggtcaaggaactaaagtgaccccattttctctaaaacctgtcaaaacagggtgacaacagccctactgagtgttccaagcccccttcaaaggcccacttaccacaggggacagtggctaccaggctggataacccagctgcagaacagtcccaacactgcagaaagtccccctggacagcactgctttggaaattgggtaatacactgtaaaataagtaaggtctagaccagaccttggaagatggaggaaatggagtttggggggatgtctggaagaagaatcaaatgaacggaatgaggcaacagtgtgtcacagaacccaggagcccagggtgctacatgacaggagtgtaggtcttatcctatatgcagtgcggtttcagggtagcataa

SEQ ID NO: 4897 - DNA, 520 bp, Homo sapiens
  MAP TO AC020951.4; EXPRESSED IN LUNG, SIGNAL = 0.72; EXPRESSED IN FETAL LIVER, SIGNAL = 0.44; EXPRESSED IN ADULT LIVER, SIGNAL = 0.65; NT HIT: X87638.1, EVALUE 8.00e-03; EST_HUMAN HIT: AW841847.1, EVALUE 6.00e-60; SWISSPROT HIT: P10266, EVALUE 4.00e-33
tgcggggaaatctaatgaagaatctccttgcagggtttgataaagatgtttgagtcgataagttgcaatacctagcattgcgcacagccaatgaatatcccctaacaactgttgaaaatcatttaaaatctgtaacctgtctttatggagaactactttctgaggccgaacacttctttcagtaacaatagtgcctaagtaatggtatggggaagttgcttgtactttctctggaccaattttgagattccatttagtcaaagcctgcttcctttctctgaataactgatgtaagatttgatctgtaggagtggccaaaagaatgtcatccatgaaatgaatgatgtgagcagtaggaaacatattcagagtctccttcaatgtttgtcctacaaaatgctgacagcgtaggactgtaaagcatgtcttggggtaaaactttcctttgataaagagaaacaggttctcttggatgaatagaaggcacagagaaggcagatccaggcttatccttctcgtg

SEQ ID NO: 4898 - DNA, 581 bp, Homo sapiens
  MAP TO AC012085.4; EXPRESSED IN PLACENTA, SIGNAL = 2.4; EXPRESSED IN ADULT LIVER, SIGNAL =   2; EXPRESSED IN BRAIN, SIGNAL = 2.1; EXPRESSED IN FETAL LIVER, SIGNAL = 1.8; EXPRESSED IN LUNG, SIGNAL = 2.8; SWISSPROT HIT: Q9PW70, EVALUE 7.00e-36; NT HIT: gi14763457, EVALUE 0.00e+00; EST_HUMAN HIT: BI335340.1, EVALUE 0.00e+00
gaaagtatttgtggtggcccggtaaactttcgctcacacaccaccttttttttttttcttttttagagctaaaaaaattattgccaattacttgctctgttctaagaattcttataataactgttttaccctcttttctttttctttttgaacaaaaaccccaggatggtactggggaagtatgactgttaatgaagccaaagagaaattaaaagaggcaccagaaggaactttcttgattagagatagctcgcattcagactacctactaacaatatctgttaaaacatcagctggaccaactaatcttcgaatcgaataccaagacggaaaattcagattggactctatcatatgtgtcaaatccaagcttaaacaatttgacagtgtggttcatctgatcgactactatgttcagatgtgcaaggataagcggacaggtccagaagccccccggaacggcactgttcacctttatctgaccaaaccgctctacacgtcagcaccatctctgcagcatctctgtaggctcaccattaacaaatgtaccggtgccatctggggactgcctttaccaacaa

SEQ ID NO: 4899 - DNA, 533 bp, Homo sapiens
  MAP TO AC025457.3; EXPRESSED IN BONE MARROW, SIGNAL = 2.5; EXPRESSED IN ADULT LIVER, SIGNAL =   2; EXPRESSED IN HELA, SIGNAL = 2.7; EXPRESSED IN LUNG, SIGNAL = 3.8; EXPRESSED IN BRAIN, SIGNAL = 2.1; EXPRESSED IN FETAL LIVER, SIGNAL =   2; SWISSPROT HIT: Q9NRJ3, EVALUE 7.00e-35; NT HIT: AF266504.1, EVALUE 0.00e+00; EST_HUMAN HIT: BG530240.1, EVALUE 0.00e+00
ttggctacatttgcataccgcacaattgttcattttttaaaaaccaatattttgttttgttctgttgtctacaataaggagaattcagatgataaacttacaaccaatcatggccaagtccacttgaggaattgtctctgtagatttatctgtagactctctaataaggagttttatggccgtatgtttcgtgtttcccctgatgtgccctgttactgttcctcttgccatggtgtttcttcctgtggcaaacatttcctttaccatttttcttggcagcttgcactttcatccactgcttaacagtatggttgtgcgggctgacacagattcttctgcgcttgacatgaaggctgttagaaaaggaagcaaaagaaagtcactgatataaaacatatataaataatcacttagtgacttacatgcagctcccactttgggacactgtattcctagagactaaattcagactaaatttctgaattaagtgtagaaatgaagtgaattctaaagctgagcaccacaaggttcaa

SEQ ID NO: 4900 - DNA, 525 bp, Homo sapiens
  MAP TO AC004398.1; EXPRESSED IN PLACENTA, SIGNAL = 0.91; EXPRESSED IN ADULT LIVER, SIGNAL = 0.5; EXPRESSED IN HEART, SIGNAL =   2; EXPRESSED IN BRAIN, SIGNAL = 0.68; SWISSPROT HIT: P14544, EVALUE 2.80e+00
caaagccagagcaggagaaggtgtttccctggcttttactggtatttgtgtttcttattttggttgttgctattattgcttttgtttttattgttccatttttttcttttttccctacatggcagcactcagctagcactctaccatctttttcgccaccatctcctctgctacttctttagcctggaagttgtagctgctttctgcatttgctatttttagatcttctggaactcttttcatctcttttatttgttaatgatattttacttaacaaatctttatgataaattcaccctgtttcctgaatggatcctatataaaaataaatcataaatgtacagtaactaacatgagtcttactggctcacatataagcaaacaaatcaaatgaatagcatagaaaatccctaagttgatacctgaaactaaagaatacttgtttgaagcacaggtgacatttccgagcattgaaaaatagaaaatgtggtcttttcaataatttgtcctggggttatttggaaa

SEQ ID NO: 4901 - DNA, 524 bp, Homo sapiens
  MAP TO AL121906.18; EXPRESSED IN BONE MARROW, SIGNAL = 1.2; EXPRESSED IN PLACENTA, SIGNAL = 0.96; EXPRESSED IN ADULT LIVER, SIGNAL = 1.1; EXPRESSED IN LUNG, SIGNAL = 0.92; EXPRESSED IN FETAL LIVER, SIGNAL = 1.1; EXPRESSED IN HELA, SIGNAL = 1.3; EST_HUMAN HIT: U69204.1, EVALUE 0.00e+00; SWISSPROT HIT: Q06455, EVALUE 5.00e-21; NT HIT: gi4826662, EVALUE 0.00e+00
cagtagagggcggagttgaccacaggtgtatgtagttccaaagctggggttctctacatacagccccttgctttactgtgcagggaatgaatggcaagcctgcccctcaatcccagcaaccactaactgatgcctgtgtcttgcagaactgctggaactgtggccgcaaagccagcgagacatgcagtggctgcaatatcgcgcgatactgtggctctttctgccagcacaaggactgggagcggcaccaccgcctctgtggtcagaacctgcatggccagagcccccacggccagggccggccgctgcttcctgtaggcaggggctcctctgccaggtccgccgactgcagcgtgcccagcccagccctcgacaagacctcggcaaccacatcgcgttcctcaacacctgcttctgtgacagctatcgacaccaacggactctgagccccggactctgcttaccctgatggctgctcagcaccacagagtgcttgggctgagggactgactgttggaacccgt

SEQ ID NO: 4902 - DNA, 551 bp, Homo sapiens
  MAP TO AC005601.1; EXPRESSED IN BONE MARROW, SIGNAL = 4.4; EXPRESSED IN PLACENTA, SIGNAL =   5; EXPRESSED IN ADULT LIVER, SIGNAL = 4.8; EXPRESSED IN HELA, SIGNAL = 5.3; EXPRESSED IN BRAIN, SIGNAL = 4.4; EXPRESSED IN FETAL LIVER, SIGNAL = 5.5; EST_HUMAN HIT: AU139958.1, EVALUE 0.00e+00; SWISSPROT HIT: P04150, EVALUE 4.00e-48; NT HIT: U78509.1, EVALUE 0.00e+00
gccaaagtgtttttgctgaagaaaacacaaaggtttatatagttgctcttttatgttttgcatcttacctggtattgcctttgcccatttcactgctgcaatcacttgccgccctcctaacatgttgagcgtagtcatgatcctccaagttgagtctggaacagagctatcatatcctgcatataacacttcaggttcaataacctccaacagtgacaccagggtaggggtgagttgtggtaacgttgcaggaactattgttttgttaccaggattttcagaggtttcttgtgagactcctgtagtggcctgctgaattccttttatttttttctttgtttttcgagctgtgggtatttaaacaaatacatagaaatgaactgtaatgggaaggtctgcgctacacagtttattcaagaagtatttttactttctaaaactattaagatgggagaaatattttatttagcaattatgataaagtgacatggaaaaggagaaaaaacttttttttttctgaaagcaaaagatccagaggaacctattcccaa

SEQ ID NO: 4903 - DNA, 540 bp, Homo sapiens
  MAP TO AF031075.1; EXPRESSED IN BRAIN, SIGNAL = 1.1; EXPRESSED IN FETAL LIVER, SIGNAL = 2.6; EXPRESSED IN PLACENTA, SIGNAL = 3.8; EXPRESSED IN ADULT LIVER, SIGNAL =   2; NT HIT: AL163282.2, EVALUE 2.00e-03; EST_HUMAN HIT: AW998583.1, EVALUE 1.00e-100; SWISSPROT HIT: Q9JI76, EVALUE 3.90e+00
tccacgtgcttcttctgatggctggagaccttcgaccgtaagcttctagcaaggagaggctagctcagtgctgaaaaaaaggtgggctctgaattggtgaataaacaaatgatgagtttgggacatatcagtagtccgttggacactggtggcttggagatggcggaagatgaggtggaggaagtcactgaggagggcctcagtgccccagggacagtagcatggaggatggttacgccagaggatggatcgacttctagccatgtggtggtcaggtatgcagacacctctcctgctgaaacaactacaactgccaaactgagtatcttacagaagctgctagagaagccacccacaagctggcaagaaaggaaggaatacacaggctgaagagcaaataaaagtacggggcccttttctgtggagaaatctggcaggcaccaccttaacacacgaccaaactgagctcaggcccctcagtgctgctgagatgaaccagcatcacgagtaggagactgaagcttaccgtgaggagacagc

SEQ ID NO: 4904 - DNA, 500 bp, Homo sapiens
  MAP TO AC025458.3; EXPRESSED IN BONE MARROW, SIGNAL = 1.8; EXPRESSED IN ADULT LIVER, SIGNAL =   2; EXPRESSED IN HEART, SIGNAL =   2; EXPRESSED IN BRAIN, SIGNAL = 2.3; EXPRESSED IN FETAL LIVER, SIGNAL = 2.3; EST_HUMAN HIT: AW814039.1, EVALUE 4.50e-02; SWISSPROT HIT: Q9NRJ3, EVALUE 5.30e-01
gcagacgtataagcaagcccagccacaactggctgaacctggcccagatcagtagaactgtccagccaattcacagattaatgaaaaatgatcaattggttttttggccactgagttttggggtgatattctgctccattacagtggcaatagataacagagaaagttgcctacccacagtcatttcttctcttttctttgaggccaagtaggcttcccatgatggaggtttaaatgacatacgttcacttttccatctttctttgcaattagggtgatgtagttctggcagatgtacaggaaagtcagctttatgtggtggagggttggggggtgatgggccagagggtcatggttctgagaaacattttccttctgaaaagaaagagccatgagacagaggacttcccctttcctccctgtctgctttggatgctatcattaaaaatggacacttgagcaatagcagctgtcttgtgaccatgaggcaacaagcctat

SEQ ID NO: 4905 - DNA, 598 bp, Homo sapiens
  MAP TO AC005925.1; EXPRESSED IN ADULT LIVER, SIGNAL = 0.83; EXPRESSED IN HEART, SIGNAL = 1.4; EXPRESSED IN FETAL LIVER, SIGNAL = 0.67; EXPRESSED IN LUNG, SIGNAL = 0.76; SWISSPROT HIT: Q9NR22, EVALUE 2.00e-16; NT HIT: gi14766696, EVALUE 2.00e-59; EST_HUMAN HIT: BF953462.1, EVALUE 2.00e-26
aggtgtcctctcctgcaatgcccctctcttccctgcacccccacccttctgcacgccaccagggcccctgtgctggggccctcccacatccgtgccaccatggagccactctctcagtggctgtgtccaggcggactgccagcttttgacttgagcttagggagcatcacaggctctggccaaggcagccttgcctcaccaggtgggggctgtgcaggagccggcattgcctggactccagggtggcacagcggggctcccagcacacccaggtccaccccggatgagtgtccagacctttatcaaacaggcattggtcaccacttgctttggatccacgatgtccactagaggctccttcatggccacgtcccggatgcaggtcatgtcaaagccatagacattctcccaccctgtgggagcagagcaagacgtgaaggcaggcgcaggacccccagaagctcacccaaccctcctgagtcctagagcacagcgtgcctgagggctgagtggcagctcgagttcccttgcatcgaaatagaggcagaactgctcacctgggggcactttgcaatgtgccaaatgctcactcccattt

SEQ ID NO: 4906 - DNA, 567 bp, Homo sapiens
  MAP TO AL022345.2; EXPRESSED IN BRAIN, SIGNAL = 7.8; EXPRESSED IN BONE MARROW, SIGNAL =  14; EXPRESSED IN PLACENTA, SIGNAL = 5.5; EXPRESSED IN HEART, SIGNAL =  11; EXPRESSED IN ADULT LIVER, SIGNAL = 4.5; EXPRESSED IN LUNG, SIGNAL =  20; SWISSPROT HIT: Q06730, EVALUE 5.00e-20; NT HIT: gi14741170, EVALUE 3.00e-70; EST_HUMAN HIT: C17931.1, EVALUE 9.00e-81
acttcaggcctttgaagcaggaagaagcttctggggctgcttcaagttgccagtggaacattttcactggagaggtgaacacaagtatcttctggtgctcaatcaacactgactcctgaagcctaacctaagcctaaataatgtcattaaactagacagactgcctatatgttttataatcaaaataaacgaatgctatttagaatgatacagtgaacagaccttacccactgagacaaggttgctgtagttctccagcatcacatctctatacagagccctctgactagggtccaggtgctgccactcctcctgggtgaagcccacagtcacatctttaaatgatactgacccctggaacttctgatctacctgaaatgttcagaattaggtggcatgaaaaaagaagtatgggctaatccttaccatgattattattcacagaatatttgttttgctttatacttttagggaaaaaagaaatcataacagaaatattctgccattaatgcattaagatattaattcatgcaaaaaaattatcaagttcccacaatgtacctggaa

SEQ ID NO: 4907 - DNA, 577 bp, Homo sapiens
  MAP TO AC025469.3; EXPRESSED IN ADULT LIVER, SIGNAL = 1.1; EXPRESSED IN HEART, SIGNAL = 1.6; EXPRESSED IN LUNG, SIGNAL = 1.4; EXPRESSED IN HELA, SIGNAL = 2.1; EXPRESSED IN BRAIN, SIGNAL = 1.1; EXPRESSED IN PLACENTA, SIGNAL = 0.94; EST_HUMAN HIT: BG181049.1, EVALUE 2.00e-94; SWISSPROT HIT: Q16960, EVALUE 5.60e-02; NT HIT: gi8922300, EVALUE 1.00e-94
ttggctgatcaggggtaaagtcagaataatttggaggccacttagagagggacagaattaataacgttgatcgattggaagtagaatttgcctcttcctcttcaatttgatgacaacatgattcagatggtttactttatttccatgagtaacctcatttataaatagagaatcttttacagtgcatgtcttattttattttaaaataattattagatttatgtgccaaaatggcgaagcagtctttatggactcttccctattttaacctcccccctccttctttttttttttaaataaatgaaaaatctcctgatcatttttaggactgtgaggacgtgggaagttgaaaatccaaagaagcaaaaaagtgtgtttaaaccacggacgatgcaaggcaaaaaagtcattcccactacgtgcacatatagtagagatggaaacctcatagcagctgcctgccagaatggaagcatacagatctgggaccgaaatttgactgtaagttaaatcttttcttagaacatggccaccttaaatctttccttagaagatggccaccttacaaagacaaacg

SEQ ID NO: 4908 - DNA, 519 bp, Homo sapiens
  MAP TO AC002319.1; EXPRESSED IN ADULT LIVER, SIGNAL = 0.75; EXPRESSED IN HELA, SIGNAL =   1; EST_HUMAN HIT: BE563698.1, EVALUE 1.80e-01; SWISSPROT HIT: Q9M291, EVALUE 3.20e-01; NT HIT: AF132981.1, EVALUE 8.00e-03
tcatttcgccttactgtccctcccctctcgcacccttcctaggagaggtttctgctacgaaaactttctaccccatgcactggcggacctctggtgagctgcaagagggtctctcctggggtcccagagtccctggggtggaaaagagtagcccttcgtggaagggataatgcaaccccgacaggccgtgggaagaaagtgtggccagtcccatttcacagaagagaacacggaggctccgggtaattctgggagccactcacttgtgtcccctcgctgggtaggggcgcctggctcagaggcccccagcaaaggaggacagatcctaaaccggacagcaagctgcgtccagctggttctccctttccgtgactgcttcaaagctcttataaacaaggtaaggttttccccacaaatcgcttcatttctccacccgcaccctaccatggccccggacctgcggttctcggccccccgagctgggcctgctgcatcctaggcagagttctaggcggctag

SEQ ID NO: 4909 - DNA, 502 bp, Homo sapiens
  MAP TO AC036102.3; EXPRESSED IN BONE MARROW, SIGNAL = 0.99; EXPRESSED IN PLACENTA, SIGNAL = 0.72; EXPRESSED IN ADULT LIVER, SIGNAL = 0.84; EXPRESSED IN HEART, SIGNAL = 1.2; EXPRESSED IN BRAIN, SIGNAL = 0.73; EST_HUMAN HIT: BG654971.1, EVALUE 0.00e+00; SWISSPROT HIT: P26016, EVALUE 6.00e+00; NT HIT: U07563.1, EVALUE 0.00e+00
ctgcagtgcatgctttaaccagtctcatttattaaccttttctctttgaatcactttcttctccacacaatatgatttggctccttactcttcccatgaccactgttagaaatgcttgttccccggtgccataaagaaatagcacttgaacataaatttaatttcctcagcaaggccatttttactttctgcagaaagggtacactcgccagcagttttaccacaagagtacaccaaacaaaggagacagagtcatttataacctgacgcgtccaccctactgctatgtccggtttccattggctagtacgggacctcacattctgtatttgtcccaattggctagcaacttagaactttttaaaagaggcacgggcagacgagaacaaaggaaggaggaagtaacttgtggaatgctgagaaaggtaaaaacacctccaaataaggaagaggaacaggctataacctaatgcccgcttggaccagtataagcatgccaggg

SEQ ID NO: 4910 - DNA, 562 bp, Homo sapiens
  MAP TO AC020927.4; EXPRESSED IN BONE MARROW, SIGNAL = 1.6; EXPRESSED IN PLACENTA, SIGNAL = 1.1; EXPRESSED IN ADULT LIVER, SIGNAL = 1.1; EXPRESSED IN BRAIN, SIGNAL =   1; EXPRESSED IN LUNG, SIGNAL = 0.86; EXPRESSED IN HELA, SIGNAL = 1.3; EXPRESSED IN FETAL LIVER, SIGNAL =   1; EST_HUMAN HIT: BF366180.1, EVALUE 0.00e+00; NT HIT: gi12383036, EVALUE 5.40e-01
tggtcattgcacagcttctctaaagaactagaagttccctagaaactgtatatcacaattagttctgagaatactatttcaaacaagaaagttactatattgacattttttaaatcatccaaagcttttatttttaactcagtgttcctgtttaatacattgatgatgatggctggaggaaggtggtgtgtaggaaggaaaggatacattgctttctcagccacagccgctttaggaaacatgccatcccccacgtggctgtaattagctgtgggcccacctttgagtctctgtggagtatttagctgtgcattcccagacagcctgtaaatccccagcagcaaagggtcatggggccagaggaaatggttctccaaaggctagggggaagggaggcaaggaagacacattgtgattgttcttttcacacagacttctgataaataggaaatgagaaaaatgatgtttacagatggcttattggattttatcctattttcaaaagtaatatatttgtaattaacttgaagggttttctctgtcatttgggagtagttgccca

SEQ ID NO: 4911 - DNA, 560 bp, Homo sapiens
  MAP TO AC012313.5; EXPRESSED IN PLACENTA, SIGNAL = 1.2; EXPRESSED IN HEART, SIGNAL = 1.2; EXPRESSED IN ADULT LIVER, SIGNAL = 1.2; EXPRESSED IN BRAIN, SIGNAL = 1.3; EXPRESSED IN LUNG, SIGNAL = 0.79; EXPRESSED IN BONE MARROW, SIGNAL = 1.3; NT HIT: gi14781148, EVALUE 8.30e+00; SWISSPROT HIT: P00544, EVALUE 4.10e+00; EST_HUMAN HIT: AI567545.1, EVALUE 3.00e-31
ctcttaaggggtggggagacaatatggtggagtcagtacagatttcccatatctcctggttttccaagaagagccaaatattcagatttctatgtggcatgtgattttataaatgttgaaaatcatttccaaaaacatttcaatgcaaactcagttcaccaaaactataggttggctttagatatttcccctgggtcctcctgaggcctaggggagaaaagaccggaaatcctctgacatgagaatctttggcctgtggtgtccatccatactgtatgatggatcagaggccactgcagctgccacgtctcctggaagcccctgaggggatggacaatgataaccacattgtgagcagaagccacaacagttttgccgtcagcaaagtttacagcagggcttctcaaatactccccagcacagtgaggtgtctgggggatacctaccctactcaggccttccttcctgagtgtaatgtctccaatatggaagatgctaatgtctccaatatgtaagacacatgtgggatcagaattaaaggttagctgagccatatgggg

SEQ ID NO: 4912 - DNA, 534 bp, Homo sapiens
  MAP TO AC004471.2; EXPRESSED IN ADULT LIVER, SIGNAL = 2.4; EXPRESSED IN HEART, SIGNAL = 3.1; EXPRESSED IN FETAL LIVER, SIGNAL = 3.8; EXPRESSED IN BRAIN, SIGNAL = 2.2; EXPRESSED IN BONE MARROW, SIGNAL = 1.7; EXPRESSED IN PLACENTA, SIGNAL = 3.8; NT HIT: L77570.1, EVALUE 0.00e+00; SWISSPROT HIT: Q25197, EVALUE 1.30e+00; EST_HUMAN HIT: BF759457.1, EVALUE 7.50e-01
tccttaggcagatgtttgggaaagaaggccctgtttaaaataagttatcctagaaaagaagggaaggtcctaagaaaaaggaagggatcatataagatgaaagaagagaaaggcaggtccaccaagcatacctattccatgagtgacactttcaagaaaagaacagcaacttgcaatcagtccttatttcatgggggttcgggcaggaggggctacatacttgggaataagaccagggcaggagggtgggacagaactggagcgagagctatctcgcatctgatgtaaacatcagccagcagtttcatccaacactcgcaccacatttcgatcatagccacaggatagcgcagccaatttctctaagagaaagaacagctgtagtcaaatcagattcctgaatgctcattttgcatgtgccaggcagtatatcaagtgcttagaatacattattatgaatccttaagacaactcatttgctccttccatgaacaccgccgtgtacctcctaggggccaggtgttgtacaggaca

SEQ ID NO: 4913 - DNA, 578 bp, Homo sapiens
  MAP TO AC025754.2; EXPRESSED IN BONE MARROW, SIGNAL = 2.4; EXPRESSED IN PLACENTA, SIGNAL = 2.1; EXPRESSED IN ADULT LIVER, SIGNAL =   2; EXPRESSED IN HEART, SIGNAL = 2.2; EXPRESSED IN BRAIN, SIGNAL = 1.9; EXPRESSED IN FETAL LIVER, SIGNAL = 3.3; NT HIT: gi15922990, EVALUE 8.60e+00; SWISSPROT HIT: Q9G2X0, EVALUE 3.20e+00
cgtgaatcctcagaattggggagatatgtgatttctcagattggagaagtataccaagtcataggcaacacaaataaaaacaaatgcattactacaaacactataaggaaactttagaaaactaaagacaaagcgatcataaaaagaagcagagaaaaggatgatatttcctaataaggaacaacaatttacacaccaatcctttcaacaggagcaagaaaatccagaatccaaggaaacaattcaaagtgctgaaaaaataagtcactctggaattgtataccctactaaacagtcatccaagactaggggcaaaacaaagacgttttcagaagaatatgggaagatatcctcatactctgggaactccttagcttcttcagaggatcctttatacctgtttctatcacacaaatctctacggttataaaaattataggcagtactgtgctgacatttgatgccactggcagcatctttaaaattatttaggctgatgggtccctggaaagaaagagctcggttagatgactctgggtgcttatctctaaattctagccattcattttgccctgtct

SEQ ID NO: 4914 - DNA, 513 bp, Homo sapiens
  MAP TO AC005789.1; EXPRESSED IN ADULT LIVER, SIGNAL = 5.7; EXPRESSED IN HEART, SIGNAL = 8.7; EXPRESSED IN BRAIN, SIGNAL = 6.6; EXPRESSED IN BONE MARROW, SIGNAL = 3.7; EXPRESSED IN PLACENTA, SIGNAL = 7.7; SWISSPROT HIT: P25032, EVALUE 3.60e+00; NT HIT: AY048121.1, EVALUE 2.00e-19; EST_HUMAN HIT: AW971824.1, EVALUE 9.00e-96
tcttccaccagttcagtcccccctcccccagccactgtactcaaatagtcaacatctgctgtttcttcttcagcctcatgctgttcccttcgctctctggcccccttgtccaagatactttttttctctgcaactcaaatctcataaactctcaggtgcttatgggcaacgttccagaccgggggggccgcccaaatgagctggagcctcccatgcccacctggaggagccgaagagaggatggaggcccccagtgttggggtcgcaagaagaagaagaagaagtaaagggggactggtggtcgggggcggggggtcctccatgagatgctaatgctatcggtaatctctggggagtccgtttaaggctttccttggtatttggcacccaagccccccatctcctattcctgagtccccaaatgccctgctcccattcacgtcaataccaagaaccatgttctccagagaataaatttaatttatgacagctgtaggacctctctctgtgggg

SEQ ID NO: 4915 - DNA, 568 bp, Homo sapiens
  MAP TO AC016965.10; EXPRESSED IN BRAIN, SIGNAL = 1.2; EXPRESSED IN PLACENTA, SIGNAL = 1.2; EXPRESSED IN HEART, SIGNAL = 1.3; EXPRESSED IN ADULT LIVER, SIGNAL = 1.2; EXPRESSED IN LUNG, SIGNAL = 0.93; EST_HUMAN HIT: BE783706.1, EVALUE 3.20e+00; SWISSPROT HIT: P33753, EVALUE 9.30e+00
ttttgtgttcaatgcccatctagttgccaatgtgaagacttggtatcagatttcatgtatgttatgttgcaacctaaatttaaagatagcatcaatcgtttaataatgcaaaatatgcctaagttactatgtccacagctgtgaatattgcctgaatttgtgagacctctgaactatgaaatggaaccagcagattctgatgaaagaaaatagatacggtattcagcactaactactactactactactactactactactactactactactgcaatttctttatgccagaatctgtcttaatcatgaattaatttctctttttcttatttatgcctttccactgctcaaatcctgtccctaccacaaaagcagtgtacatctctattgtctgcagttttgcagttgccatatccacaacccacaacccttcctgacattcagattcagtcaccatttcttcaatgaaagtgggcaagagaggtgtagaaacattttcctagggcaattacatcatttggcacaagagtaagagttactggttgtgtctatgtgaggcaagcaccaa

SEQ ID NO: 4916 - DNA, 584 bp, Homo sapiens
  MAP TO AL023576.1; EXPRESSED IN PLACENTA, SIGNAL = 0.9; EXPRESSED IN ADULT LIVER, SIGNAL = 0.85; EXPRESSED IN HELA, SIGNAL = 0.97; EXPRESSED IN FETAL LIVER, SIGNAL = 0.98; EXPRESSED IN BRAIN, SIGNAL = 1.1; EST_HUMAN HIT: BI018172.1, EVALUE 1.00e-98; SWISSPROT HIT: P08548, EVALUE 1.00e-11; NT HIT: AJ271735.1, EVALUE 9.00e-06
ctaggccataaaacaagccgtaatacttttgagaagatggagtttatacaaagtgtgttctttgaccacagtggcattaagttagaagccagtaacagaaggaaatttgaagaaaatgacaaatatgtagacattttagaacacaccctaaataaccagtgggtcaaagaagaaatcgtaagggaaattagaaattgctgtgagatgaagaaaatgaaaacacaatatatcagcacttacaggatgcagttaaagcagtgatccaagagaaatttatagttgtaacggactatattaaaaaagacctcaaatcattaactttccactttccgaaacttagaaaaagaagggtaaaataaagccaaaacaaacagaagggagaaaataatgaagactagaacagaaataagtgaaacagacttgtagctagactgaccagagagagagagaaaactcaagttactaaattcatgagaaattttagaaatacacagcattaaagtaatactatgaacgactctacaaaccaggcagtgtatatgaaacagagaaactcctagaaacacacaaattgccaaaattga

SEQ ID NO: 4917 - DNA, 588 bp, Homo sapiens
  MAP TO AC021689.3; EXPRESSED IN LUNG, SIGNAL = 1.2; EXPRESSED IN BRAIN, SIGNAL =   1; EXPRESSED IN PLACENTA, SIGNAL = 1.2; EXPRESSED IN ADULT LIVER, SIGNAL =   1; EXPRESSED IN HEART, SIGNAL = 1.4; SWISSPROT HIT: Q9Z1S5, EVALUE 1.50e+00; EST_HUMAN HIT: AW662153.1, EVALUE 5.00e-05; NT HIT: AF287262.1, EVALUE 1.00e-04
ggctcactgattttggaaggaaactggaggaaatgagttgcagatgtttttaatctcactgagcaaggcaaggagacagaaagttatgacgttagtagatcatacagggcaagtgataatgttatctgtgtgtacttactttaatatagttcagaatagtcactgtcgtgtgtgtgtctgtgtttttacaaattgacattctggaggtagtgataagcatatgaatggcccaatctggaatgatctcctgaagaagaggtaccctgttctgtgtcaacaccaaattcttatcaactggcataaaggatgtagaagtaataataacaccattgttgtttaacagaggtgattggctcaaaaaataagcatgaagaagtgtctttgtctgtttgggcgtctataaaaaataagtaaattgggtaagttatacacaacagaaatttacttctcacattcttgaaggctgagaaacacacgatcgaggcatgggtagattgggggtctgataagggtatgcttcctggttcatggttggtggcccctagatgtgtactcacatggtgaagggcaaggcaggtctctggagtc

SEQ ID NO: 4918 - DNA, 510 bp, Homo sapiens
  MAP TO AC004076.1; EXPRESSED IN HELA, SIGNAL = 0.74; EXPRESSED IN BONE MARROW, SIGNAL = 0.85; EXPRESSED IN ADULT LIVER, SIGNAL =   1; EST_HUMAN HIT: BG167434.1, EVALUE 1.00e-45; SWISSPROT HIT: O93603, EVALUE 1.00e-03; NT HIT: gi11426550, EVALUE 0.00e+00
gctgagggaaactcttgtgcccaccctgtgataataaaagacaaacttacatccagtgtcattcagcaaatatttcaatccaaaagctgccattgtctgaggtatccctttaaagaaaaggaccatggagttagccaaggccagttggctgagaatcaagtccgtgggtctcagcttgtgtccagtgaacaaaattaagttataaaaacaaaggagaaaggaatttcccaggatcccaactccagtctgaatgaggaagctaatccctgattttacttttccaaaagccatttcatcaaaatctaggggatgttgattttcattgaggtctgaagaatcagtagaataaaaaagcagaaagaagtatcttgtcatcagtggagacagaagttttaatgtgtctccaaccatattttctcatcttaaacagaaattaagattgtccctgttcgtgcaaaggcaattgcttgtgtgtccaactgcagagaagcaggtgaatgaatgagggct

SEQ ID NO: 4919 - DNA, 507 bp, Homo sapiens
  MAP TO AC004197.1; EXPRESSED IN ADULT LIVER, SIGNAL = 1.7; EXPRESSED IN FETAL LIVER, SIGNAL = 1.1; NT HIT: Y18000.1, EVALUE 1.20e-01; EST_HUMAN HIT: R53265.1, EVALUE 1.10e-02; SWISSPROT HIT: P32215, EVALUE 3.60e+00
cccctctccctccttaactgctaagtcacttactgggtcccagaagtccaaagagaagcagccacaggaaccagaaagcaggagagatatttcctcttctcatctctaaatgatgcacatagaagttgtcatttagatgcctgggttccaaaggaaggataggtcaaagaggcagagagacaaggggcaaaccccctgggccttgatagaaaataaagttgcacaaaaagacccaaaggccagccagtgccagggtaagccttgtaggcagatggcatggttggggggagcccccaaattgctccacagtttggcttcttatttttcttcttttttcctcgcaaacgtgtctgtggcatttatagctgatactgagtaggggaggccagaactttgggtcctccctccccagggaggggcatttctgcgctgtgctttctgcagggccgtttggagagatgtaccctacaggaatcaaggcggaggagagagcagagtcggcaagac

SEQ ID NO: 4920 - DNA, 580 bp, Homo sapiens
  MAP TO AC016619.5; EXPRESSED IN BRAIN, SIGNAL =  14; EXPRESSED IN FETAL LIVER, SIGNAL =  11; EXPRESSED IN LUNG, SIGNAL =  13; EXPRESSED IN BONE MARROW, SIGNAL =  15; EXPRESSED IN PLACENTA, SIGNAL =  19; EXPRESSED IN HEART, SIGNAL =  14; EXPRESSED IN ADULT LIVER, SIGNAL =  16; NT HIT: X17033.1, EVALUE 1.00e-112; EST_HUMAN HIT: AU126174.1, EVALUE 1.00e-104; SWISSPROT HIT: P17301, EVALUE 6.00e-36
ttacaaaataaggcggacggattgcatggtttacatgacgctttctatgtctaatatgataagacccacaaatacatacatcaccataacagctcatggattacctgggaatactttgtgcggatagtgccctgatgaccattgtaaatgtatacagctccagaattctgattttctagtggtgaaccaacaatcacatcattaaagccatccatgttgatgtctgaaagagctgcaattgctgaaccaaatcgagtgttttcaatgccctcggggccttcaagaaattggtgctgacccaaaatgcccttgcaaaggggaaacaaaaggatgattaaagcaaaccttacaacttgtataattaaaattcagagcagctgggtgtggtggctcatgcctgtaatcccaaagactccagaggctgaggcagaaggactacttgaagccaggtatttgagacctgcttgagcaatagtgagaccttgtctctataaaacatttttgtaaaaagttagccaggagtggtggcacacagctgtagtcctagctctcaggaggctgaagtgggaggattgcttga

SEQ ID NO: 4921 - DNA, 504 bp, Homo sapiens
  MAP TO AC022073.13; EXPRESSED IN FETAL LIVER, SIGNAL = 2.5; EXPRESSED IN ADULT LIVER, SIGNAL =   2; EXPRESSED IN PLACENTA, SIGNAL = 1.8; EXPRESSED IN HEART, SIGNAL = 3.5; SWISSPROT HIT: Q9Z1Z2, EVALUE 1.00e-25; NT HIT: gi6005931, EVALUE 8.00e-80; EST_HUMAN HIT: AL572251.1, EVALUE 1.00e-79
tgtgtgctagatttggaaaggaataatcttacagagaaagggtcaatgatataccacttttgtgatgagaaattaattaagtacaggttttaatgtttgccttaagaattttccatctccccagtaacacagacagtattttttttttttagcatatcaatatttaacctaatagttaaaattatctaatagccctcttctttttcagaatcctacaagggacactttggtcctattcactgtgtgagatttagtcctgatggagaactctatgccagtggttcagaagatggaacattgagactatggcaaactgtggtaggaaaaacgtatggcctttggaaatgtgtgcttcctggtaagaatttttattcagaataataaaatttttaaaatgcatgattttatgtcatttttaatcattaattttatttcagggttcctgttttctataaattttaaattatatattatggtttaagcagcgagaagcccaggattata

SEQ ID NO: 4922 - DNA, 588 bp, Homo sapiens
  MAP TO AC012331.9; EXPRESSED IN ADULT LIVER, SIGNAL = 0.98; EXPRESSED IN BRAIN, SIGNAL =   1; EXPRESSED IN LUNG, SIGNAL = 1.1; EXPRESSED IN FETAL LIVER, SIGNAL = 0.77; EXPRESSED IN PLACENTA, SIGNAL = 0.78; EST_HUMAN HIT: BF111543.1, EVALUE 1.30e-02; SWISSPROT HIT: Q53554, EVALUE 5.70e+00; NT HIT: AY028079.1, EVALUE 6.00e-04
aaaaacatggaggccatctggtcctggactttctttggctggaaggttttaattatggattcagtctctctgcttgtgataggtttccaaagagaagttactaaccaaaaataccataatgctgccttttatactaacctatgttgttgcctttaacagaattcattatttcacagtgtgacctctaatttccatctactgtcctttcattttaaaatgcaggactcactttaccattgcttgccacacataaacatgtttccactctgcatgatgaacatttttctgctgcacacaatgaacactttcctatctgtggaatttttgcaaaatttttcataagcccagggtttgatggaatcttcgtcgataaatgccagatcgatcagagagaagtaaaaatcaaatataagggttggaatcttgaggattctgttagtaaacataattaaataactactgtaggtattttgggcaattggtgaaatgggattatggagtggacagaaaattattgttaattttttaagatggagtagagagaggaagcgagaatgctccctggattggactcaacgtaccccattg

SEQ ID NO: 4923 - DNA, 500 bp, Homo sapiens
  MAP TO AC004175.1; EXPRESSED IN BONE MARROW, SIGNAL = 0.84; EXPRESSED IN PLACENTA, SIGNAL = 0.87; EXPRESSED IN HEART, SIGNAL = 5.4; EXPRESSED IN ADULT LIVER, SIGNAL = 0.89; EST_HUMAN HIT: BI857092.1, EVALUE 1.00e-120; SWISSPROT HIT: P06584, EVALUE 8.00e-49; NT HIT: gi14591913, EVALUE 1.00e-117
atgaccaaagacccaccaacatgggtcgtgttggcatcaagactgtgacgaaggtggcctaggtcatcgtagaaaagtactacatgtgcctgggcaatgacttccacacaaacaagtgtgtgtgaggagatccccattatcctcagcaagaagctccacaacaggagagcaggctgcgtcacgcatctgacgaaccagattcagagaggtccagtgagaggtatctccatcaagctacaggaggaggagaaagaaaggagggacaattatgtccccaaggtctcagccctggatcaggagatcatcgaagtagatcctgacactaaggaaatgctgaagcttttggactttggcagcctgtccaacctgcaggtcactcggcctacagttgggatgaatttcaaaatgcctcgtggagctgtttgactctttctccaatgctgtaatatacagcagtcactggattttattttcaataaacctgggacaacagcaataaa

SEQ ID NO: 4924 - DNA, 504 bp, Homo sapiens
  MAP TO AC025811.1; EXPRESSED IN PLACENTA, SIGNAL = 1.9; EXPRESSED IN ADULT LIVER, SIGNAL =   2; EXPRESSED IN HEART, SIGNAL = 2.5; EXPRESSED IN BRAIN, SIGNAL = 1.9; EXPRESSED IN FETAL LIVER, SIGNAL = 2.4; EST_HUMAN HIT: AW418960.1, EVALUE 1.00e-27; SWISSPROT HIT: Q04933, EVALUE 6.10e+00; NT HIT: AL163202.2, EVALUE 6.00e-13
tgaggccagaatcacgtatgaggggttgaagatacactcatgagagttcagtttcacctctttactacagggtgatcatagggcctgttctgtttggttttggtatggacagggcagtgtggcccatattttcattactgtagcagagattgttggtatctgtgccagggaagggcacctaagacaggaaaggagaaacacatatttctataatcatggagcaactaattgttcctgaatttttcatgttataaaggacagaaatgggtggactttttcagcgggtcttggtacttctgcctgtgggtgtggtggtagcaggtaaacaggtggtgctgacacctttaaaggcatattctcaagatgcaggtctaatttgtccagagaatctcaactgaaaaggaatcccagggaaggaggagatacggaaaaaatatgcctttttttaagctaaacacgtctcagatcaagagctgtgtccattctgcctcctgaaattccatg

SEQ ID NO: 4925 - DNA, 501 bp, Homo sapiens
  MAP TO AL121721.20; EXPRESSED IN ADULT LIVER, SIGNAL = 0.6; EXPRESSED IN FETAL LIVER, SIGNAL = 0.58; EXPRESSED IN BONE MARROW, SIGNAL = 0.75; EST_HUMAN HIT: AA383822.1, EVALUE 4.00e-64; SWISSPROT HIT: P40223, EVALUE 7.90e+00; NT HIT: X64852.1, EVALUE 4.80e-01
gcagctgaaaaatgagagggttatacggagcaattcggcattattagcatttgactaaggttttttggttttctgaactgtatatcttagcgttttcccttctttcctagggaatatcattgtctatgggaatacaattgatacttacaccaccgtggagacgctcttaaaccttggcgtgagcggcagccgcatccacctcgtgcagcccccgcccgcctccaccatcacctgcatcaacaactactcggtggagagcgccgtggcggacgcgctaggagccgccggagtcactatgtaccgggatgcgatcctggcccagtggaatgacggcctgcacccagaccccatctacagcgcctccttcaccacacccaccaagcctttcagactccagtgctctgtaagtgggtccctgcaaacctcactcaccagccagggacagaggacatctccaagggatttgggggtctggaagattgcgggcagtgaatttgtagt

SEQ ID NO: 4926 - DNA, 567 bp, Homo sapiens
  MAP TO AC010643.5; EXPRESSED IN LUNG, SIGNAL = 0.5; EXPRESSED IN FETAL LIVER, SIGNAL = 0.52; EXPRESSED IN BRAIN, SIGNAL = 0.9; EXPRESSED IN ADULT LIVER, SIGNAL = 0.75; NT HIT: AL163302.2, EVALUE 2.10e+00; SWISSPROT HIT: O60610, EVALUE 5.50e-02; EST_HUMAN HIT: BI520117.1, EVALUE 1.00e-103
atgaggaaaacttgggggacgttgatggaagagggcagagttttggggtcgtgggataggggagggaggcagccaccatggtggcgtggggcatggctgatgctgtccctatgtccatcccctttggtttaccctgtgatggggggatgactgggccccatttccaggtgaaaaagtggactcagaggaggggaaagggcttgcccagtgtgtctccactgggccatggagcaggagtgccaccagcctagccagtgacatcctggtcccaagctgctgccagtccatacccatcactccccacctgccccagaccccctcactgcatgctctgtcacaggcactgtggctgtggcccaggtgctggcctacctggaggctgtgacaggccagggcccccaggatgcacgcctccaaacattggccaacagcctggaccccaatggggagggccctaaggccactgtggacttggacactttcctggttgtcatgcgtgactggattgctgcctgtcaactacatgggtgagtccccacatcttcatcctcctctgggaagtccttc

SEQ ID NO: 4927 - DNA, 540 bp, Homo sapiens
  MAP TO AC067968.1; EXPRESSED IN BRAIN, SIGNAL = 3.3; EXPRESSED IN HELA, SIGNAL = 2.3; EXPRESSED IN FETAL LIVER, SIGNAL = 5.1; EXPRESSED IN BONE MARROW, SIGNAL = 3.6; EXPRESSED IN PLACENTA, SIGNAL =   4; EXPRESSED IN HEART, SIGNAL = 3.4; EXPRESSED IN ADULT LIVER, SIGNAL = 3.9; NT HIT: AJ400877.1, EVALUE 2.00e-03; SWISSPROT HIT: P11369, EVALUE 8.00e-10; EST_HUMAN HIT: AW572962.1, EVALUE 5.00e-05
accactgacaaccactgtgctagctatcattcccaaaaatagaaaataatacatgttggagagactgtggagaaattacaaccttcacacattgaaggtgggaacataaaatggggcaatttttctggaaaactgttttgtgatcctcaacatagaattaccctattaatcatatctataattcatataatttcatatctaggtatttacccaaaggaactgaaagcaggtaatggaataaatatgcgtataggaatgtttgtagtagcactattcacagcagccaaaaggtggaaagaaccaaatgttaccagtagatcaatggataagcaaaatgtagtataagcacagaataaaatattattcctgtataaaaggaaattatgtactgatacatgctgtgatgcagatgaactttaaaaacattatgctaaatgaaaagggtcagaaacaaagatcccatactgtgtgattccatttatatacaatgactaaaacagataattaaataggatagaaagatttgtgtttgccagggat

SEQ ID NO: 4928 - DNA, 535 bp, Homo sapiens
  MAP TO AC022101.3; EXPRESSED IN ADULT LIVER, SIGNAL = 0.59; EXPRESSED IN BRAIN, SIGNAL = 0.75; EXPRESSED IN LUNG, SIGNAL = 0.82; EXPRESSED IN FETAL LIVER, SIGNAL = 0.42; NT HIT: AF189768.1, EVALUE 3.00e-05; EST_HUMAN HIT: BE700353.1, EVALUE 3.00e-09
attgccattcttcctttcccatagatcctattgcttcttgcacactttctaaaatctgtagtaaacatttgactttttttctctttcaggaagacattttgacttttaccatactttgccccatcattatgtataagagatatataatagtaataataacaataatagtcatgatgataataataataataataaaccaacattatttgtgcagtttctatgtgtcaggtactgttcttagtgatttatattaattgtctcagctgatctttacatgaccctatagctgccattgtgaatagattaaggaatctcaacaataattcccaagtaaataattataattcttgttagttactttaatgcaaatagagggtttatgatatctaaataaactgtgaagtgaattttggattaaaaaatcaagcattgtggtaaacagaataatgactgttccaaagaagtccttgtgttaatcctcccaaactctcaatatgttgccttacgtggcaaaagggactttgcagatgtggtt

SEQ ID NO: 4929 - DNA, 564 bp, Homo sapiens
  MAP TO AC005260.1; EXPRESSED IN ADULT LIVER, SIGNAL = 0.34; EXPRESSED IN BONE MARROW, SIGNAL = 0.44; EXPRESSED IN PLACENTA, SIGNAL = 1.6e+02; SWISSPROT HIT: Q00889, EVALUE 2.00e-58; EST_HUMAN HIT: BG435413.1, EVALUE 0.00e+00; NT HIT: AF106552.1, EVALUE 0.00e+00
cagcatgggacataatgcagagagtgacacaggcagagtccaggcctgacaattctgtgtgtgtgaagtagaaatgacccctgccccccaacacccagggatcatgcggaatcactcacagtataaggtgacagtgaaatatccagttactcctccagtcccatcgcctcgctttatgatgtgtaaggtgtaggatcctgcatcctcctgtgtgacattctggatcagcagggatgcattggaatatactgtttctcgtccactgtaggcaggcccatatataatttgaccgtgtactacatatgatgtaatgtaatggtagaggtccgtcatttgccctttgtaccagatgtagccagtaagattctggggcaaattgtggacaagtagaagaacatccttcccctcggaaactttgggtggcttggcttcaattattacttgggcagtggtgggcaggttccagaagtttaaaagtgatgctaggaggtagagacagcatcagttaatatttggacctatgtattggggtgaaaagatggggccctgtgtcctgagaaggtc

SEQ ID NO: 4930 - DNA, 548 bp, Homo sapiens
  MAP TO AC010300.5; EXPRESSED IN HEART, SIGNAL = 1.2; EXPRESSED IN ADULT LIVER, SIGNAL = 1.1; EXPRESSED IN LUNG, SIGNAL = 0.78; EXPRESSED IN FETAL LIVER, SIGNAL = 0.93; EXPRESSED IN BONE MARROW, SIGNAL = 1.1; NT HIT: gi6679556, EVALUE 3.30e-02; EST_HUMAN HIT: AI681703.1, EVALUE 4.90e-02; SWISSPROT HIT: P13983, EVALUE 1.40e-02
acacaaggaaccgtgaaaccaaaccagaaaagccctgctgaccgagccgccccttctagaggccgaacaggcatggaaaccctgagccgacacaggcacttacccagcagagaggacagggccaccaggatccacatggccacaaagaagggggtgtgcacgggtagccaccgcaggctgaccactggaaacccgctgctgttccgggcaacggggggctctggccctgggccccggccaacgagtgtgcagggatgggctgtgcccaccagcaaggccagcaacgtgaaggcacagagtccagacccctggggctgcatgctgggggcacgtgccgccgacaaggcgctgtgtatccgccgggctcttctcgacttcgtggacctggtatctgcagggagccacctcgttggtccccggtgagccctagagctgtgccagttcttcctgcctcaccccagcaccttccctctgctgaccacagcccagccttgtcctgggcagcctgtggcctccaggccgtcagcagataagcattccgtgtggct

SEQ ID NO: 4931 - DNA, 556 bp, Homo sapiens
  MAP TO AC026446.2; EXPRESSED IN BRAIN, SIGNAL = 1.1; EXPRESSED IN PLACENTA, SIGNAL = 0.83; EXPRESSED IN ADULT LIVER, SIGNAL = 0.89; EXPRESSED IN HEART, SIGNAL =   1; SWISSPROT HIT: P15575, EVALUE 3.10e+00; EST_HUMAN HIT: AW855316.1, EVALUE 5.00e-02
gtcttcgtccttgctcttggttctttgttttctattagtgcggaatgatgcccttgcaccatctattcctacctttggggaagaaaataccaaaagcgacagctctcttgaggaacagttgcccttcctcccagacccagcagcaggtggagaaaacccagaaattctgctatttggcatcgctattgttaagtacaaaaccatcctgccttctcaagagcctccttgcagcattgactatgaaatgggcagccttcctttcacctgaagtgggaagagttgctcattcatttgaaaaaaaaaaaaattgactaaaataggaatcctgttactataaagggagatgtaaaaaatgtgtgtaaagaaacttattctattgtttcacttgaacatgaaaggctactgcactacagagtatattctgttaaaacagtcacagattttttaaatttttactaaaaataagtttctatataatggtgtttccacttttatcattccaaaagaggcttcagaaaagtcttcccatatctttacccataaaagctgtccctca

SEQ ID NO: 4932 - DNA, 537 bp, Homo sapiens
  MAP TO AC005685.1; EXPRESSED IN HEART, SIGNAL = 3.8; EXPRESSED IN BRAIN, SIGNAL =   2; EXPRESSED IN ADULT LIVER, SIGNAL = 1.4; NT HIT: U60822.1, EVALUE 9.00e-12; SWISSPROT HIT: Q92793, EVALUE 1.70e+00; EST_HUMAN HIT: BF841302.1, EVALUE 3.00e-06
agtgttgaggggaaatgtggggttggagcccccgcatagggtgcctatcagggcactgcctagtggagctgtggcaagggggccattgcccttcagacctcagaatgaaaaagccataggcacacaactctaatccatgagtgcagccacatgggctataccctacaaagccacaggagtggaaatgctcaacgacttgagaacccaccccttccaccagtatgccctggatataggacatggagtcaaatgttattttggagctttaaaatttaatgtcttccctgctgggttttggacttcatggataggtgttgctgttctcacagtaatgagtgagttcttactctatgagttcatatgaaatctggttgtttaagagcatggcacttacccccaaattgctgtctctcttgccatatgatacaccagctccccctttgccatttgccatgattgttagccttctgaggtcctcaccagaagctgagcagatgccaacaccatgctttctatacagcccacagaacaatgaga

SEQ ID NO: 4933 - DNA, 600 bp, Homo sapiens
  MAP TO AC020923.4; EXPRESSED IN ADULT LIVER, SIGNAL = 1.5; EXPRESSED IN BRAIN, SIGNAL = 1.9; EXPRESSED IN LUNG, SIGNAL = 3.1; NT HIT: gi14733625, EVALUE 1.00e-100; EST_HUMAN HIT: AI382296.1, EVALUE 0.00e+00; SWISSPROT HIT: P15144, EVALUE 2.00e-06
taaagacccagtggtgggagaaacctgatccggtatagcggggccagaagaagctgcgggaccatgccgcggggacaaggcaaggagtttcgccaggatgttgatctcctggttatctacacttccgcctcagtatgatctgaattattaatgagaaagattaagatacagattccttccttcaagtgccttagtagtcacagacaggaggttaattataagactaaaagcaatcttgggttgttagaagaacttaaaggaaaacacctttcaacttcttgttatcaatcaatcatttttgtctttagaaatcaagaatttgaacaataacagctgctttcagaaataaaccgcgactttgtgcagcgtgtattacctgacgagctgaaatgcattgttaatgagactcgcccgatcattactgctgactgctgtgtgtgttccttttaaaaggccagtcaaagagtcccatccatcatcctcgtaatgcacaatgtaatagccattcatgcccacattaaatttgatccattccacctcttctgggaggatgagcacatctagagtaaataaaataaatcaaagttccatttgctcccc

SEQ ID NO: 4934 - DNA, 583 bp, Homo sapiens
  MAP TO AF172277.1; EXPRESSED IN HEART, SIGNAL = 1.2; EXPRESSED IN ADULT LIVER, SIGNAL = 0.9; EXPRESSED IN BRAIN, SIGNAL = 1.1; EXPRESSED IN FETAL LIVER, SIGNAL = 1.5; EXPRESSED IN BONE MARROW, SIGNAL = 1.1; EXPRESSED IN PLACENTA, SIGNAL = 1.6; SWISSPROT HIT: P11369, EVALUE 8.00e-04; NT HIT: AF003529.1, EVALUE 9.00e-06; EST_HUMAN HIT: BG529863.1, EVALUE 3.00e-16
aacttttcctcttccccagctgaaactctaaacccatttatagtaactctgaactctccattctttcttccagcccctggcaagcatgaatctttctgtctctcacatttgactattctgggtaactcatataaatggaatcatacaatacttgtccctctctgactggcttatttcacttggcgtaatgtcctcagtatcagaattttcttcctttttaaggctgaataatttcccactgtatgtggaaaccatataccacagtttgcttatccattcattctttgatggacacttggattgtttctaccttgcggttcttgtgaataatgtcgttgctatggacgtaagtgtagaccacttcctgatcttgaattagtatagttatttgtgtgctcagaggtgctcgtcttaaaaaaaaaagtctgttactatgttaacctggctatttaaagtctcaatagcagaaattcagcataaatagcccttttaagtttcagatttaactgtgaaaccctctccctatctgtgaattattaaatgaatgaattattattaagcctccacaagaagggaaccttga

SEQ ID NO: 4935 - DNA, 596 bp, Homo sapiens
  MAP TO AC018557.5; EXPRESSED IN HEART, SIGNAL = 1.6; EXPRESSED IN ADULT LIVER, SIGNAL = 1.4; EXPRESSED IN FETAL LIVER, SIGNAL = 1.4; EXPRESSED IN PLACENTA, SIGNAL = 1.6; EST_HUMAN HIT: AL530351.1, EVALUE 7.00e-94; SWISSPROT HIT: P52875, EVALUE 4.40e+00; NT HIT: gi14732546, EVALUE 3.60e-02
cacacataggcaacacccacttacttattggtggcaggagaagacctagaaacattgtagagatgtttctgcttcctcccaagggccagcagtttacacccgggggccacatcacaccagattgatttcagtgtatgtggtggggccttcactgtttacattagtaatttgatccttccattaagacccctgcacctattctttaggtaagaattgaagcaggtctgatttccgacagttacactgctgtcccagaggaaaactcagtggcagtatgttgttgttcagtgttatataagcatggcaggtacgtatgtccgcagatgtatactaaacatatacgtacatatatgtttccaattttcttcctagatcttggccctgattgcattcatctgcatagagaccatcatggcatgctccccgtgtgaaggcctctacttttttgagtttgtgagctgcagtgcgtttgtggtgactggcgtcttgctgattatgttcagtctcaacctgcacatgaggatcccccagatcaactggaatctgacagtgagtacaagcggccactctggccatgaaaggatcacgtgcctgtt

SEQ ID NO: 4936 - DNA, 525 bp, Homo sapiens
  MAP TO AC005264.1; EXPRESSED IN ADULT LIVER, SIGNAL = 0.72; EXPRESSED IN BRAIN, SIGNAL = 0.82; EXPRESSED IN PLACENTA, SIGNAL = 0.54; EST_HUMAN HIT: AL576074.1, EVALUE 0.00e+00; SWISSPROT HIT: P30679, EVALUE 2.00e-38; NT HIT: gi12741902, EVALUE 0.00e+00
tgctggttacagggaagagggtctccagaggccccctgggtccaaagagggagggtcctcacccccttcccacactgtttccccaggccctaagcaggatgctgaggcagccaagaggttcatcctggacatgtacacgaggatgtacaccgggtgcgtggacggccccgagggcagcaagaagggcgcacgatcccgacgcctcttcagccactacacatgtgccacagacacacagaacatccgcaaggtcttcaaggacgtgcgggactcggtgctcgcccgctacctggacgagatcaacctgctgtgacccaggccccacctggggcaggcggcaccggcgggcgggtgggaggtgggagtggctgcagggacccctagtgtccctggtctatctctccagcctcggcccacacgcaagggagtcgggggacggacggcccgctgctggccgctctcttctctgcctctcaccaggacagccgccccccagggtactcctgcccttgcttgactcagttt

SEQ ID NO: 4937 - DNA, 551 bp, Homo sapiens
  MAP TO AC025167.4; EXPRESSED IN HELA, SIGNAL = 2.4; EXPRESSED IN BRAIN, SIGNAL = 1.9; EXPRESSED IN BONE MARROW, SIGNAL = 1.7; EXPRESSED IN ADULT LIVER, SIGNAL = 1.5; EXPRESSED IN HEART, SIGNAL = 1.8; EST_HUMAN HIT: AL120352.1, EVALUE 8.00e-04; SWISSPROT HIT: P45707, EVALUE 6.80e+00; NT HIT: AF118154.1, EVALUE 5.20e-01
gaatggtgattggaggatgggtttggaggcttttgtgacaatactgatttttttaaaaattgtgatatgtcgtgcaaagcagtggttctccaatactaaggtaactttgaatcacctgggaattgttaaaatacccattctgattcaggatgtctggggttggactcaaggctgcattgccaacaagtttcccaatgatgataaatgctggcagtctacagggatgtcaagacctaagaatcaagccattaatcagcaggtgatatgtaccaacctaatagggagaaggatagagatgttcataattctgtaggcatagtcacactctctgaaaccaaatgccaggagagataagcatagtctttgatgcatagatagttggagatataccaggcaaagagatggctaactcatcccaagtgaccataaacctctccaggtatgagatgcagatatgtggttcatttaactacagcttcatgtcacctgctattgaccaggaattagatcagttaactacaaatgaattgagtcagcttttggcttctgct

SEQ ID NO: 4938 - DNA, 541 bp, Homo sapiens
  MAP TO AC004233.1; EXPRESSED IN PLACENTA, SIGNAL = 1.9; EXPRESSED IN HEART, SIGNAL = 3.1; EXPRESSED IN ADULT LIVER, SIGNAL = 2.4; EXPRESSED IN FETAL LIVER, SIGNAL = 2.3; EXPRESSED IN HELA, SIGNAL =   4; EST_HUMAN HIT: AL532763.1, EVALUE 3.00e-03; SWISSPROT HIT: P43252, EVALUE 5.10e+00; NT HIT: gi14771829, EVALUE 1.00e-04
tcgaagaatttgggacaaggaggaacgggatggtgcttgggaggcccagaagaaggagaggccctgccccgctgccctgtcgggaaagaggttcaggaggctctcttagcccacctaggggggctagctccaaagtcagggtctgggttggtgtcaggtgtgtcctgcttcccgctgtgcacttggtcaggttcgctcagctccctgagcttgttcctgtctgtgaaggtgggcagtgagcccgtgagggtgacagctgcaacaccgagatttagctgcaccttttggtttgggagctaggggaccagcttctctacctgtaagatctgggtcttggctcctccgggcgcagtgggtgactctgcccttggggttcttagtgtgctgcccccacacccacccccgcactgttcctggcgcatggtagctcctggtaacttccttcctttcctttgtggtcaggccacacttccccctctaagaggcgcgggttaacccacttcgaccctatctaagctgatctctggtttcttctgcccac

SEQ ID NO: 4939 - DNA, 512 bp, Homo sapiens
  MAP TO AC069278.1; EXPRESSED IN PLACENTA, SIGNAL = 1.4; EXPRESSED IN ADULT LIVER, SIGNAL = 1.7; EXPRESSED IN FETAL LIVER, SIGNAL = 1.2; EXPRESSED IN BRAIN, SIGNAL = 1.5; EST_HUMAN HIT: BI334852.1, EVALUE 1.80e-01; SWISSPROT HIT: O75244, EVALUE 1.00e-08
accactaggggttgggattcaacagctgtggactgagaacctgctcaggcagtgtggagactgccacactccagccctcggtaggggtagactaggtagctgggaccagcatcaggaaaggcccctcgggtcctgggagaaggcgaccctgagagactcacctaccaccttgaccaggactgaagtggagcgggccaggccagtgagagagttggaggctgtgcagttgtagatcccgtcgtgttcccaggtcagagccctgataatcagctgctcacccaggtgctccccggtggagtgttcaagagtccagcgatactcagcacctggcttggactcggcccaacactgcagggtcaggctggagttgagctctgcctctatggtgctgatcatctcagatgccgactccctggtgatgtgcacttggtcaggaccatctgtgtgtaaagccaaacgtgatgcaccctggcccccatcagcgagtcatcccattctgccccattcacttt

SEQ ID NO: 4940 - DNA, 592 bp, Homo sapiens
  MAP TO AL022069.1; EXPRESSED IN PLACENTA, SIGNAL = 1.5; EXPRESSED IN BONE MARROW, SIGNAL = 1.2; EXPRESSED IN ADULT LIVER, SIGNAL = 1.6; EXPRESSED IN HEART, SIGNAL = 1.3; EXPRESSED IN LUNG, SIGNAL = 1.1; EXPRESSED IN FETAL LIVER, SIGNAL = 1.1; EXPRESSED IN BRAIN, SIGNAL = 1.2; EST_HUMAN HIT: AA827420.1, EVALUE 3.30e+00; SWISSPROT HIT: Q25489, EVALUE 3.90e-01; NT HIT: AF020503.1, EVALUE 3.60e-02
tacccctggctcatggatacaaacggggtctgcttcagaagcagtcccgtcacagccagacagggcatcctcccattcaatggcagggatgacccagaaatgtccccaccgagtaatgacagaaagagaaatgcagcaatctttagtaagcaatgaggagagtgaccagaatcgatggattctgcccagggcagtcatattcatttggggtaactgtggcccccaggggacactggcaatgtctggagactttctggtttttccagctgggacaggggctcctggcattggtgaatacgggtcagggaagctggttagcatcctgtgtgcacaggacagcccccacaacctgctgccccaacgaaaggttgagaagcccagcctcagcatccttgtgggtgagagcaggtctcatgtagataaaggccaggaggttgatattttggagatggggatggagtttttcttcttcattgagtttctggtgagtcctttagcaacaggatgatgaccgaccaacagctcagtgttccccacgtgctgcgggcagccccccacccccaccccactgtgactgggccgtgacttaaag

SEQ ID NO: 4941 - DNA, 552 bp, Homo sapiens
  MAP TO AL096870.3; EXPRESSED IN LUNG, SIGNAL = 2.7; EXPRESSED IN BRAIN, SIGNAL = 2.1; EXPRESSED IN BONE MARROW, SIGNAL = 2.7; EXPRESSED IN PLACENTA, SIGNAL = 1.5; EXPRESSED IN ADULT LIVER, SIGNAL = 1.7; SWISSPROT HIT: P22735, EVALUE 1.00e-57; EST_HUMAN HIT: BE293065.1, EVALUE 0.00e+00; NT HIT: M98447.1, EVALUE 0.00e+00
gaattggaacctcacccttgaccctcaacccccaggctcagacgcagagcggaaggcagtagagacagcagcagcccacggcagcaaacccaatgtgtatgccaaccggggctcagcggaggatgtggccatgcaggtggaggcacaggacgcggtgatggggcaggatctgatggtctctgtgatgctgatcaatcacagcagcagccgccgcacagtgaaactgcacctctacctctcagtcactttctatactggtgtcagtggtaccatcttcaaggagaccaagaaggaagtggagctggcaccaggggcctgtaagtgctccttacccagccctgccccctggatggctgggcacctcagggctgtggacatggagaccccaggagcagtggggagtccctgggggaagcctcatgtagggaagcaggcctcagtgacgccatgcctcttctccacagcggaccgtgtgaccatgccagtggcctacaaggaataccggccccatcttgtggaccagggggccatgctgctcaatgtctcaggcaa

SEQ ID NO: 4942 - DNA, 550 bp, Homo sapiens
  MAP TO AC025167.4; EXPRESSED IN BRAIN, SIGNAL =   3; EXPRESSED IN FETAL LIVER, SIGNAL = 3.2; EXPRESSED IN LUNG, SIGNAL = 1.3; EXPRESSED IN PLACENTA, SIGNAL = 2.9; EXPRESSED IN ADULT LIVER, SIGNAL = 2.4; SWISSPROT HIT: P37090, EVALUE 3.00e+00; EST_HUMAN HIT: BF814710.1, EVALUE 3.00e+00
gccaaaccatatcacccaacaacaataaaatggctaaatagtaatagaatcgcacaatgaatgaacaattataaatatatgcagaaatatggatgattctcacaagcacaagaatgagcaaaagaagtcagaccccaaaaagggcatactacatcattccatttataagaagtacacaagaggagatactagtgtatgtggttggaaggcaggaaatagttattactctggggattggagaggatagtccagtgactgaggggccagagaaggtgctaataatgtatggtttcttgatgtagggttgcttacatgaatgcatccagtttgtgatgattcatcaaaccacttgtatgcactttccttgatgtaccttcatttaaagtcaaagtattaaatattcttatcacaccagatttctgataaacaaaatcatgttttactttttttttttgaaatttgggatactcatctgctgaactgcagtaaaaggataaattagactttagatattgttctttatgtgtgatggctttgtccgtggtttaga

SEQ ID NO: 4943 - DNA, 568 bp, Homo sapiens
  MAP TO AC008600.4; EXPRESSED IN PLACENTA, SIGNAL = 0.58; EXPRESSED IN ADULT LIVER, SIGNAL = 0.78; SWISSPROT HIT: Q02380, EVALUE 5.00e-40; NT HIT: gi4505362, EVALUE 6.00e-50; EST_HUMAN HIT: BG548752.1, EVALUE 9.00e-50
tttcgaaagggagatcatgggaaaagattgtttaccatcaaactttctggattcaatgataggttttgtttgtttgtttgtttgtttgtttgttttaatttattgaaattccacattttgttgactgggattccagcagcagcttgcataactttggtgaatggatgcatgggtgaagctgaactagcagaaagtccaaaagcctatatcccagaacattgggaatactataagcatcctatatcaagacggattgcccacagtttccataatagtcctgaaaagaactatgaaagagcagtgaccgtcattcagatcgaagccaaaaaggctgaattacagttaaagcagctggaaatatgaagattaatacctgacagaggagatgggccctagtatgaatatctgttattaaggcacttattgagcattctccaaaatcagctcctgaaaattaatcattcatttttctaaatacaaagtatattttctttagtgaaaaataaattgtaaatatattctcaatttttcctctctgatgaataaaagagcttcttccgttgctctg

SEQ ID NO: 4944 - DNA, 547 bp, Homo sapiens
  MAP TO AC005764.1; EXPRESSED IN BRAIN, SIGNAL = 1.6; EXPRESSED IN PLACENTA, SIGNAL = 1.2; EXPRESSED IN BONE MARROW, SIGNAL = 1.7; EXPRESSED IN ADULT LIVER, SIGNAL = 1.5; EXPRESSED IN HEART, SIGNAL = 1.7; EST_HUMAN HIT: AW947373.1, EVALUE 1.20e-02; SWISSPROT HIT: P35314, EVALUE 7.80e-01
aagctgaaggtgtccaggtgcccacaaatgcatccagcctagtgctcacctgcctgagggggtctggggaaggggggagcctttgccccagcagaaggaaggagttggtgtccacggctgcaccttcgcaagggggctggctgtgtagggggaaagttgtcggtgatagggggtctgagtccacgactcagctcttggagaatcctggagacccccatatcattagagaaagtggccagcaccctctcctttctcaaaagattaacagacactcagctgttcatttgatagtgtggggatttacagcccagtcttgggatcagagagacccgggtccagttcagcctctgaaacttcttgactgtgtgaccttgggtgagtgtgtttacctctctggacttggacagtcctgggttcaagtccctgctcatcagccacatgatctgtcctcagtttccccttctgaaaagtgaaatgcccatagtcactgagctgtctaaagcataaaacaagatagcccaccccagccctccagatgtgctgtcat

SEQ ID NO: 4945 - DNA, 568 bp, Homo sapiens
  MAP TO AC020948.6; EXPRESSED IN ADULT LIVER, SIGNAL = 7.9; EXPRESSED IN BRAIN, SIGNAL = 7.7; EXPRESSED IN FETAL LIVER, SIGNAL = 4.3; EXPRESSED IN BONE MARROW, SIGNAL = 8.5; EXPRESSED IN PLACENTA, SIGNAL = 5.9; NT HIT: gi15296404, EVALUE 1.00e-35; EST_HUMAN HIT: BI562021.1, EVALUE 7.00e-26; SWISSPROT HIT: Q9Y5X1, EVALUE 6.00e-05
atcatgctctccacctcctgcaggtcgagggcagtggtggtgcagtgctcagggtcaggaacgagctggcacccaccatgtcacctttctcgcaccacccacctcccatgaccaggccacgtatccagtgttcgtcttcgatacccacatccactcccccaagtgatgcccaccttctcgctgacctgctctgcttggatcggaggcagttttcttattttctttcctcaagaggtgctgtgccatacagaaggccttcctcttgccttgtttccaggccttctctcggtgctgctgaggcacatcaggaagtgctggaggacgtggcactgcgccagcactgggcggccggccgtgtagctcatcccgcagatcgtgctctacctgtgcttggagatgaagtcctcctggaagcagctcgtggcccacttctcaggtaggtggggcacagacatagccaggaatgtcaccagacacgcatccagccagtccaagtgcttgttgcgccgtgcactgggacctgcctgtgcgtggtcaccagcttgcaggagaggacgctattcatgcc

SEQ ID NO: 4946 - DNA, 510 bp, Homo sapiens
  MAP TO AC008624.5; EXPRESSED IN BONE MARROW, SIGNAL = 0.41; EXPRESSED IN PLACENTA, SIGNAL = 0.42; EXPRESSED IN ADULT LIVER, SIGNAL = 0.78; NT HIT: AE007827.1, EVALUE 4.80e-01; EST_HUMAN HIT: BI013504.1, EVALUE 1.80e-01; SWISSPROT HIT: P56541, EVALUE 2.10e+00
ggcatcttcgtcaggacttcttttttttttttttccttttatgatatgtatcttgaaccaagcaggaatttatttctgtctcatgaaaatgaaatctgatgttcgtgatcctgggtatctatgggaaccccatgatatcatcatgcaccttggtgccctccagctcacttccaagccaccatgggagtaccgcccttaccgacatagttcagaatggctgctccagctccagcttctacacctgcactccaggaagcaggagaaaggaaaaggtggagaaatgtgtaagttcctctctttcagatatcttagaagtcccacaggacagctcttattgtttcccgttgtccagaactgagtctcatggccatatctagctgaaagatgggctaggaaatgtagttttaaaatggtatggtaatgcactgagcaaaacatttaagttctcggcaggggtggtggggtggaaataaataaagacaaaagttcactgtgccaccatacccattt

SEQ ID NO: 4947 - DNA, 531 bp, Homo sapiens
  MAP TO AC007996.6; EXPRESSED IN BONE MARROW, SIGNAL = 2.8; EXPRESSED IN PLACENTA, SIGNAL =   2; EXPRESSED IN ADULT LIVER, SIGNAL = 2.6; EXPRESSED IN HEART, SIGNAL = 3.1; EXPRESSED IN HELA, SIGNAL = 3.1; EXPRESSED IN BRAIN, SIGNAL = 2.8; EXPRESSED IN FETAL LIVER, SIGNAL = 1.4; NT HIT: gi14762990, EVALUE 1.00e-04; SWISSPROT HIT: P20662, EVALUE 4.90e+00; EST_HUMAN HIT: AA393452.1, EVALUE 0.00e+00
aagctctttggaggaaaggcaccatgtgagggcaaggttaagtgacaacagtaagagtggcatttgatgccacacagtgcgtaacaatgctatacctggactgagttgaggtgacagtagccatttagtggaaacctgatgacgtgcgtcgagtcgtgattccagcctgcattgacagagttacacatcacgtcgccgatctctggaaatacttcttctatcaaggatttgtcaccgcttagcgtgatcctttctccgaggtctggggccacacgcacgacgaggcactcacagggccttgaaaatcgaccagtttctctgtcctgcttccatctttccatctccaacaacatgggctgaagctgaaaatattttgcctcttcatataacaaagtgtagtcctggaaaaaaaaaaggtatttcacagtgcaaactgcaaacataaagtactaaacatgtccacatctaagaggtgatttttttccacttcttgttatgtcactaatcaaatctgcatgtgcgtttttcact

SEQ ID NO: 4948 - DNA, 517 bp, Homo sapiens
  MAP TO AC027663.12; EXPRESSED IN HEART, SIGNAL = 1.2; EXPRESSED IN BRAIN, SIGNAL = 1.1; EXPRESSED IN HELA, SIGNAL = 0.84; EXPRESSED IN PLACENTA, SIGNAL =   1; EXPRESSED IN ADULT LIVER, SIGNAL = 0.74; SWISSPROT HIT: Q9Y305, EVALUE 8.20e+00; EST_HUMAN HIT: BF751005.1, EVALUE 1.80e-01; NT HIT: AF074608.1, EVALUE 7.70e+00
aggtttggacgattagcacctcagggctaataatatttttattctagtttcacatctggacactctctctatacctagcccctcctggcctttgtgattggctgttcctttggtgggtctactggctttttgattctgtaactcacccaagattctgtctctcaattttcccttttggttcttcacactgaagtctgtccacggggaagcacacatactgcaatgttccaaccatagcttctaagatattactccctgcccagagcttagcagtccctctcaggatcatgcctcttgggaaggagccatttgagaaccactttttaattgtgtggtcttgagaaattttcagttttcttgactttctgagcctcattttcctatctgcaaaatgaaggtaaaattacttagctacctaacaagtgcaatctcttactaactgtttgatcttgagaacttatttaatctcacttttcttcatctgggcaacagagataggggtacctttctcagaggg

SEQ ID NO: 4949 - DNA, 581 bp, Homo sapiens
  MAP TO AC009247.11; EXPRESSED IN ADULT LIVER, SIGNAL = 0.96; EXPRESSED IN HEART, SIGNAL = 1.2; EXPRESSED IN BRAIN, SIGNAL = 1.1; EXPRESSED IN LUNG, SIGNAL = 2.1; EXPRESSED IN FETAL LIVER, SIGNAL = 1.6; EXPRESSED IN PLACENTA, SIGNAL = 1.7; NT HIT: AF057159.1, EVALUE 0.00e+00; EST_HUMAN HIT: AI796117.1, EVALUE 0.00e+00; SWISSPROT HIT: O87125, EVALUE 1.50e+00
tcacgcaccaactgctaaagctctattgtcaaaatcagctctaactttaagaaaaagtaaatttaggcagttgactgcttcaaaaccagtttttcatcttacccgattcccaacatgacgcctgcgagtagacatgggagaatggctgtggctgtgccgtctacgataatctcgactgtaagacctgctacgtgatcgtctatgggagcgggagcgagaccgtgaccgggtataatgccttcgggagcttcttctggatctagacctgcaagacaaagacctcctaaggttatgactgaaaacaaatattgtcttctttattactctgttctaaagttaaactccaaaagagggaacaatccaggaatatgctaacatggttaccaatttagtaggatcaatacttttcttctctaattatttagtcatttcaactttgctaggaagcgttctaaaaaccacaagctctcctccagtatttcttccaattaaagacatattacttatcttttacaaatcaaggcacgcagcattttactagcttggcttgtgcccatctttccccctcagaagaccattct

SEQ ID NO: 4950 - DNA, 577 bp, Homo sapiens
  MAP TO AC005175.1; EXPRESSED IN BONE MARROW, SIGNAL = 1.5; EXPRESSED IN PLACENTA, SIGNAL = 0.63; EXPRESSED IN ADULT LIVER, SIGNAL = 0.98; NT HIT: gi14758207, EVALUE 1.40e-01; EST_HUMAN HIT: BG422074.1, EVALUE 2.10e-01; SWISSPROT HIT: P13828, EVALUE 6.40e-01
caaagcttttcacccctgacttccctcccgtgtgcccccagcccagtgagtttgaggaggaggcatctcggaaggttgatgacctgctggaaagctacatgggcattcgggaccccgagctgggtaaggggccagggtaagccagggggccctggggggagggaagcctacgggaggaggcaggggtcccagcgggaagttgggcgcggggagtgccctcactgacatcccctctggcacggcccgcagcgtccaccatggtggagacgtccaagaagacagcgagcgcccaggagtttgcacgctgtttagactccgtcttgggcgagttcgccttccccgacgagtttgtggtggaagtgtgggccgccatcggcgaggccagagaggcctgtggctagtttgccctgggggggcccagcacagccccagcccggagcccagccccctgccccggccctgctccagaacccagcccagatcggaggacaagttcctctctagaacccaatccaatttggagccccagcccaactccagaacccaacccttctctagaatccagcccagatctgag

SEQ ID NO: 4951 - DNA, 530 bp, Homo sapiens
  MAP TO AC026446.2; EXPRESSED IN ADULT LIVER, SIGNAL = 1.6; EXPRESSED IN HEART, SIGNAL =   2; EXPRESSED IN FETAL LIVER, SIGNAL =   2; EXPRESSED IN HELA, SIGNAL = 2.4; SWISSPROT HIT: P32499, EVALUE 8.50e+00
aaatttggcaagctgcattctaatcgccctggactccctacggtctttaggtctccactgctacgacaacaataaagatctaaagcagctgttcagctttgggtggaccacacagagccatccccaggagacacagcaacctgagacaacagtcagtcaaacaaatgtaaacataatcttcagtgtcctggtgagcaacttaaatgcaaatgcaaaaactccatttcccaaaatctgccatcaattttatattcttatagagaaagatgcctgtaactgtcccttcatttgactccccactattaagctcatttagaaataaatactaagctactaaggtaatgaattcatggtaagaagaaagagaaatgataaatttaaaagccaaaaatcaatgagaagttctgttaggtcctacaaattcttttggatgatcataattttaattctgttacaggcaaatggtagctctcacactaaattcagcaacagcttgcaatatgtaaattaggagcccaaagttcttgaac

SEQ ID NO: 4952 - DNA, 520 bp, Homo sapiens
  MAP TO AL121919.19; EXPRESSED IN LUNG, SIGNAL = 0.76; EXPRESSED IN BONE MARROW, SIGNAL = 0.93; EXPRESSED IN PLACENTA, SIGNAL = 0.52; EXPRESSED IN ADULT LIVER, SIGNAL = 0.8; EXPRESSED IN FETAL LIVER, SIGNAL = 0.93; NT HIT: AL163210.2, EVALUE 8.00e-06; EST_HUMAN HIT: BE869568.1, EVALUE 1.80e-01; SWISSPROT HIT: Q01532, EVALUE 1.20e+00
agactggggctgtctcattgaagggattggtaagaaagttcttagatatcaagtcattgatgtaccagggaaaacaggcatctaccttataatccagatgttctttatggagcactccagtcataaggttggctggttaggtgggaacatgagaactttccctaatagactgactgctggtaaatttagaccccattcaattctctctctccttgcctaccatcacatccatccatgcccttcagattaattttcgcaatatcatggaaattgattgctaagtgaaattgcaaattgtgctcaagatgttgcattttgtgaaactgatagaaaagaccattggcagcctgctgattcacacccattggcagaatcagactaggtgacaaatgaacaagagaaaagtgacaaagatgataactctaggagagtgacttgaatatcagaggcttaagagaagtctttggaaagattgataaagctctataatatttttttgggggtgggagtccttcttgat

SEQ ID NO: 4953 - DNA, 524 bp, Homo sapiens
  MAP TO AC011387.4; EXPRESSED IN ADULT LIVER, SIGNAL = 2.5; EXPRESSED IN HEART, SIGNAL = 4.5; EXPRESSED IN BRAIN, SIGNAL =   3; EXPRESSED IN LUNG, SIGNAL = 1.8; EXPRESSED IN BONE MARROW, SIGNAL = 2.6; EXPRESSED IN PLACENTA, SIGNAL = 4.1; SWISSPROT HIT: Q9UKB1, EVALUE 2.00e-43; NT HIT: AB033280.1, EVALUE 0.00e+00; EST_HUMAN HIT: BI088274.1, EVALUE 0.00e+00
gcttttcctcctaccttgcctacaactctacagatatacagagtgggatggcctcaagggttcataagcacagaggagaataaagatcttgccaggtaccaggttggtataagccacctctgctttgtctctgttctaaaagggacaggaacaggtagggttatgactgcagacatacttactttgatggtcctgtcaccagaggcagacacgatgtacttgtcgtcaaagtctactacattgacggcagcccggtggccaaccaggacacggcgtaaagtgatgtcggtcgcagaagccatgtcccacacagcaatggagcggtccttggaacaggtcaccatcagtccattgctgaagcgtaagtgcaatacagcctcattgtggtggatcaatgtgttaagaacttcacccgtgttcacatcccacactctaggagagaagagaaaagcatgatgcttaattatggagacagccaggaaatgattctggtatctgagctctgtctgggtctgcaatggttt

SEQ ID NO: 4954 - DNA, 569 bp, Homo sapiens
  MAP TO AC012083.6; EXPRESSED IN LUNG, SIGNAL = 2.9; EXPRESSED IN FETAL LIVER, SIGNAL = 4.1; EXPRESSED IN BONE MARROW, SIGNAL = 2.3; EXPRESSED IN HEART, SIGNAL = 3.8; EXPRESSED IN ADULT LIVER, SIGNAL = 2.4; SWISSPROT HIT: Q07890, EVALUE 7.10e+00; NT HIT: U60822.1, EVALUE 9.00e-74; EST_HUMAN HIT: BI022322.1, EVALUE 1.00e-104
tggactaatgcagaaaattggtactaggaatggggcactgctataaagatacctgaaaatgtggaagtgactttggaactgggtaatgggcagaggtttggagggctcagaagaatacagaaagatgttgtggaaagtttggaacttcctagagacttgttgaatggatttggccaaaatgctgatagtgatatggacaatgaagtccatgctgaggtggtcttagatggagatgaggaacttattgggaactggattaaaggtcactcttgctatgccttagcaaagagactgatggcattttgcctgtgccctagggatctgtgcaactttgaacttgagagagataatttaggatatctggaagaagaaatttttaagcagcaaagcattcaagatgtaacctggctgtttctgaaagcatataggcatatgtgttcacaaagtggtctgaaagtggaacttatttttaaaagggaagcagagcatacaagtttggaaaatgtgcagctgggccatgtggtagaaaaacaaaaaacatttttctggggaaaaattcaagctggctg

SEQ ID NO: 4955 - DNA, 600 bp, Homo sapiens
  MAP TO AC010398.6; EXPRESSED IN PLACENTA, SIGNAL = 0.52; EXPRESSED IN ADULT LIVER, SIGNAL = 0.78; EXPRESSED IN BRAIN, SIGNAL = 1.3; EXPRESSED IN LUNG, SIGNAL = 0.92; SWISSPROT HIT: Q27972, EVALUE 7.70e+00; NT HIT: L17328.1, EVALUE 9.00e-03
aataccatggaccaagtggcttgtatgtgtcaaacttacgaattactagataattacatcgtgaggcagagtcttcttaaggcagtggttgagttaaaaatgaaactccaagctacaaggaatgctttagatcacacttagaaaacttgaaatggaaaatcacagtgattttcctcagacattttttattgtagctgctttttaaaatatgcaaatattgtctaatgatattagcttcatcttacttagctcatccatgtgtgacacattaagtgtcatcttaaactgataaatccgggctacgatttcaacacggcggccccttgtgcatttctttcctccggaaatgatctcagagagcttcagatggaacataactctaatggcaagctgaacagataggttctgtattcattttcaaaatctgtaaatcctggtggatggccttctttgattgctataacaacacaccaaaagtgcaaatctgactaaccgttcctcataatatccttagtgctttcaatacatgtaacccttaactcacttgaacagctcccaatactcttgatggtaacttcacctccttggtcagctccagaa

SEQ ID NO: 4956 - DNA, 579 bp, Homo sapiens
  MAP TO AC016597.4; EXPRESSED IN PLACENTA, SIGNAL = 1.7; EXPRESSED IN HEART, SIGNAL = 1.7; EXPRESSED IN ADULT LIVER, SIGNAL = 1.8; EXPRESSED IN BRAIN, SIGNAL = 1.9; EXPRESSED IN FETAL LIVER, SIGNAL = 2.1; EXPRESSED IN BONE MARROW, SIGNAL =   2; NT HIT: M28127.1, EVALUE 2.20e+00; EST_HUMAN HIT: BF947736.1, EVALUE 2.00e-04
agggtctgcatccttgtcagcagctctcactggctggggaggagcctgatgctaacagctaaggtgtttaaatttcctccaacagggaaggactcaataaatgcttatgtggtgagctagaggaagaaagaaaggaaggaaggaaaggaggaggaagggaagaagagaaggaagggagagaggaaggaaggaaggaaggaggaaaggaaggagggaaggaggaaaagaaggaaggagggagggagggagggaaggaaggaaggaaggaaggggaagtggaagaattcaaaccatagagagtggctcttaactttggctgttcactgaagcagaatctctaggggtggggcccagacatttttaaagatccacccaagtgatttccacgggtagccaggataaaaaatcctggtcttcagagagtcaacggtgggccaccacacccttcttgggccttacatataaactatttgctcattgtctctttgcaccataagtgaaggcgctggtctctcacgagactgagagagtgatccccccagcccctcacagcgctgggcccatcagagtcccttacga

SEQ ID NO: 4957 - DNA, 584 bp, Homo sapiens
  MAP TO AC006290.1; EXPRESSED IN PLACENTA, SIGNAL = 0.66; EXPRESSED IN ADULT LIVER, SIGNAL = 0.71; EXPRESSED IN HEART, SIGNAL = 0.96; EST_HUMAN HIT: BG767988.1, EVALUE 0.00e+00; NT HIT: L17432.1, EVALUE 8.70e+00; SWISSPROT HIT: P35574, EVALUE 4.30e+00
gcattgagccaggagtcttcaaaagaaatcagctttatgttctaacaagattaggtaagtggtatcccaacaaccccgggggcccctctcataattaaaggcaggcttgagttttacggggcttgggccccgtagctaagcccttggatccagctcccccggaagcagccgcctcttctccacctgcagctggcactcacctttaactttttcacagcacactgctctcctggttttatcacttcattcactcttgacacagacacagacagcaaaggacaggctggcagcctggcagtggctgtccctcctgctgcctggtgcacatgggcagctggggtgaatgcagaggggccggacagcttccaagtcagctctggggagcacacatcttggtttgctgtgccccagaagtcatctcctcctccaggagcccttggaccctgcaaaggggttggaactggatgttagggagaaagacatcgcagataagccacacttagggcaaaaagcttggtcagggccagacacattggagagtcctaggaagacatcacaggtggaggtgtgcagagaagatgcaa

SEQ ID NO: 4958 - DNA, 588 bp, Homo sapiens
  MAP TO AL109827.8; EXPRESSED IN FETAL LIVER, SIGNAL = 8.6; EXPRESSED IN BRAIN, SIGNAL = 5.7; EXPRESSED IN PLACENTA, SIGNAL = 7.5; EXPRESSED IN BONE MARROW, SIGNAL =   8; EXPRESSED IN HEART, SIGNAL = 6.4; EXPRESSED IN ADULT LIVER, SIGNAL = 5.7; EXPRESSED IN LUNG, SIGNAL = 9.2; EST_HUMAN HIT: AW852185.1, EVALUE 0.00e+00; NT HIT: gi13376130, EVALUE 4.00e-91
ttcaggtcatgtcttgctgcctccatctcaaccctgcacccacaatttgactcattcctggagcccgaaaccattcattcatgcaacagaggtttattgagtacctactatgagctaacactgtcccaagcactgggacgctgtagtgaagagacaaatcttgccctcatcaagctttcatcccctgcatgtgtgtgagccactgtaactatgtgtatgaacatggcagtgtctatgcctatgagcaagtgactggagaatccacccttcccacaccccctgggactgtgtgtttgtgagggcagatgggtgtgggagcaggtgtgccgtgggtacaagttacctcttgagggggctgaacataacaccagaaagttccacgtcaggctcatcatccaggtcctgctccagctcaagctccagctcattctcttcatcgtcctgctggcctagacttcgagctagcctgcggcctagagccactgcccgccgctccagctgggcctccccaggcctgataggaaagaccctcaagggacatgcctggaacccatcacccatctccaggcaatcccttgacttcctgga

SEQ ID NO: 4959 - DNA, 577 bp, Homo sapiens
  MAP TO AC022127.3; EXPRESSED IN BRAIN, SIGNAL = 1.6; EXPRESSED IN HELA, SIGNAL = 1.7; EXPRESSED IN ADULT LIVER, SIGNAL = 1.3; EXPRESSED IN HEART, SIGNAL =   1; NT HIT: L10641.1, EVALUE 2.00e-09; EST_HUMAN HIT: AW089534.1, EVALUE 2.00e-16; SWISSPROT HIT: P11369, EVALUE 2.00e-18
aagcgttgtacctgctgacctacatctctccatttccttcttctccctgcccctcgttaccgctgttctatgctctgtttaacatattcaacctttttttttagattcacatataagtgagattatgtggcacttttatttctatatctgggttatttcacttagcataatgtcatccaggttcatccatgttgtcacaaatggcaggatctgcttctttagtaaggctgcatattattccattgtgttcattcatataccaccatttctctatcccttcatctgttgacagatgcttaggttgtttctatgtcttggctattgtgaataatgggggaatgaatatgagaatgcagacagttctccaagatgctggtttaatttcctttgtgtatatacccagcagataaatcattgtggtatatggtagttctgttttcaattttttgaagaatctccatactgttttccataatgtttgcaccaatccctatgaaaattccaatggtgtttttcacagaaatagaaaaatacctaaaatttatatggaaccaaaaggtcccaaatagccaagaca

SEQ ID NO: 4960 - DNA, 574 bp, Homo sapiens
  MAP TO AC004201.1; EXPRESSED IN FETAL LIVER, SIGNAL = 0.77; EXPRESSED IN ADULT LIVER, SIGNAL = 1.2; EXPRESSED IN BRAIN, SIGNAL = 1.3; NT HIT: U53588.1, EVALUE 0.00e+00; EST_HUMAN HIT: R41116.1, EVALUE 0.00e+00; SWISSPROT HIT: Q91428, EVALUE 7.20e+00
acatggagacggtgagttccacttttctgttccctccttttctcaccagctgccatagccatcacgttctcactgggcccacacctttgttcccattaataggcaggttttctggggtatagtctcatcccttcttcctccagagatgtgagtggggtatgcgtgggggcattaggatcagagggctgatttcctgacccttcccctcatctgtgtagatttgaagtcccaacatccaagtcatctaattcagaggatgatctccctgaagattatccagtggtcaaaaaaatgcttcatagactgacaggtaaggaaagaagaagggagggaagggaattgaatgaaagtctgtgttagattttcttccttttagccctaaaaagtgatcaggtcctttttgatgtctgcattagtttcctagtactgctctaatgaagcaccgcaaagtaggtggctgaaacaacagacatttatctcaaagttcaggaggtagaagtctgaaatcaaggtgtcagcagtgttggttccttctgacggccatgagacagaatctgttccatgcctgtctcct

SEQ ID NO: 4961 - DNA, 585 bp, Homo sapiens
  MAP TO AC008696.5; EXPRESSED IN PLACENTA, SIGNAL = 0.59; EXPRESSED IN ADULT LIVER, SIGNAL = 0.49; NT HIT: U20902.1, EVALUE 3.60e-02; SWISSPROT HIT: P41213, EVALUE 2.50e+00
gtagggaaggaggttgggagggctggggtgggctatttcagaccagtggttaccctccagtgttgctttgaaatccattccaaggcaactagagctattaaaaagcaagcaattcttaccttatcatgcctgcaagaggaaagactttgctctcatcactgagaactggttttctgaaattaaataacaatccaagaccagtatgtctagcagggtgttggagatcaatactccaaggcaagtgaaaggcaactagaaaagaaggtggtccacaggctggaaccccaaaaatacaagagtggaaggaaactaatgactgatggtataagttacctgtcctttcaaatgcatggacacccaatagtgttcccacagagagaacaccttcaccaccctttctctggcaaccaaaccaagggtttgctttttcattgatctttccccaaattaagccagcattagaaagaacctagagaaaagggtgcaaacagagttgttttctccattggcctctctgtctcatacctttcacttaacaattttcatggctgctcagcaagccactcaagaactgcacttccccat

SEQ ID NO: 4962 - DNA, 559 bp, Homo sapiens
  MAP TO AF207955.1; EXPRESSED IN HEART, SIGNAL =   1; EXPRESSED IN BRAIN, SIGNAL = 1.6; EXPRESSED IN HELA, SIGNAL = 1.3; EXPRESSED IN BONE MARROW, SIGNAL =   1; EXPRESSED IN ADULT LIVER, SIGNAL =   1; EXPRESSED IN FETAL LIVER, SIGNAL = 1.5; EXPRESSED IN LUNG, SIGNAL = 1.6; EXPRESSED IN PLACENTA, SIGNAL = 1.8; EST_HUMAN HIT: AI798870.1, EVALUE 3.00e-03; NT HIT: AL163248.2, EVALUE 0.00e+00
tttcacccttatggcctctgagggagcaagtgggtatgttgagaagaaagagtgacctccagctaacaaccagcaagaaatggaggccctcaacctaacgtgccacaaggaactgaattctaccaacgaccacatgagcttggaagcagatccttccccaattgagtttcaggtgagactgcagctccatttaacattatggtttcagcctcatgaagccaaggactagaagagccagctatggtacactcaaactccggatgtacagaaactaataagtgtgtgttggtttaaactgctaaaggtgagatgataaatgtgtgttgttttaagctactaagtgtgtgctaatattgttacacagcaatagctaaataatacgctaactataatcttgtattgacttactggcttttagtcctaagaattttgctatttatattgaatacttttaaaccaataaaccatgtggtttgcaaattattggatttgtcattgcctttttgaaatacaggctaccaaatcagccaaaaagtttccaccgacacacaattccttg

SEQ ID NO: 4963 - DNA, 505 bp, Homo sapiens
  MAP TO AL121928.13; EXPRESSED IN HELA, SIGNAL = 1.7; EXPRESSED IN BONE MARROW, SIGNAL = 1.5; EXPRESSED IN PLACENTA, SIGNAL = 1.6; EXPRESSED IN HEART, SIGNAL = 2.1; EXPRESSED IN ADULT LIVER, SIGNAL = 1.3; EXPRESSED IN FETAL LIVER, SIGNAL = 1.9; EXPRESSED IN LUNG, SIGNAL = 1.6; SWISSPROT HIT: Q92538, EVALUE 4.00e-17; NT HIT: gi14746255, EVALUE 0.00e+00; EST_HUMAN HIT: BE746582.1, EVALUE 0.00e+00
tgtaaccaccttgctttccctacagactttgagaagcccgagagcccccgagccgccagcagcagctccccaggatcaccagtggcctcaagccccagcaggctgagccccacccccgacgggcctccacccttggctcagcccccactgatcctgcagcccttggcctccccactgcaggtgggcgtgccacctatgactctgcccatcatcctcaaccctgcgctcatcgaggccacctcaccagtgcccctcctggccacaccccgccccacagatcccatacccacctctgaggtcaactaaggcaggtcactcagagatcaggaccagtgcttcccaccaggctttccttgaccccacttctggctgtcctgcgggccacaagctcttcaggccaagtcagagctgctgttgctgccacttggatggggacctgaaaaagagaatgttgatagccccagctaagacccccaatcagctgtgggacctttttcctcctctg

SEQ ID NO: 4964 - DNA, 590 bp, Homo sapiens
  MAP TO AC012156.14; EXPRESSED IN BRAIN, SIGNAL = 1.5; EXPRESSED IN LUNG, SIGNAL = 2.1; EXPRESSED IN HELA, SIGNAL = 1.4; EXPRESSED IN BONE MARROW, SIGNAL = 1.4; EXPRESSED IN PLACENTA, SIGNAL =   2; EXPRESSED IN HEART, SIGNAL = 1.8; EXPRESSED IN ADULT LIVER, SIGNAL = 1.5; EST_HUMAN HIT: BF332913.1, EVALUE 1.00e-110; SWISSPROT HIT: P10272, EVALUE 2.00e-05; NT HIT: gi10864048, EVALUE 4.00e-73
aaggccaatagtccccaaagtaaatataatactctaagaatgtttagacaggagatcatacaggcctggtctgaagtcttaggtcaattagctgtccactcagatgttgtcaacttctcgtcctggtttcagggttgaagctgtttggtgaatcagagacagggatctttggtgggagtcatggtccattcaggaagttgtgcctttttaaggtgagagatatggatccgtgagtctacaacctttaactctgctgtgcatggattagtcaacgatacctggtaagggcccctccaccaaggctggagggagtcctttatgagatgtcttttccaacagacaaaatttccaggttggaggtcatgaccagaatcttcatctcccaggagcgcactgtgggacgtgtcttgcactaaggtctggcttttcatgagctggtgaacaagtcccttacaacagtgcaagatgtccccattcagtaaatttgtatcagtcatcttgattcccatgtgcctgggtcttccagttacaatttcatgagaagagagctgataaagggatggatcaaaggttgagcaataccaagggga

SEQ ID NO: 4965 - DNA, 553 bp, Homo sapiens
  MAP TO AC008033.8; EXPRESSED IN HEART, SIGNAL = 2.4; EXPRESSED IN ADULT LIVER, SIGNAL = 2.6; EXPRESSED IN LUNG, SIGNAL = 2.9; EXPRESSED IN BRAIN, SIGNAL = 2.2; EXPRESSED IN BONE MARROW, SIGNAL = 2.7; EXPRESSED IN PLACENTA, SIGNAL = 1.5; SWISSPROT HIT: P32916, EVALUE 6.80e+00; EST_HUMAN HIT: R67858.1, EVALUE 2.00e-29; NT HIT: AB010408.1, EVALUE 1.30e-01
gcttctgtcctcagtttgccacctgatttcccctgcagttgtcaagtaactgcctttttagctggatattactacacagacctctttctgtgtgccagactgggataatcatctcaatcctttcttcaacacctcctcccctagagagcagaaaataaagttgtggttgggagttaagccagaagctggctatccttgcagggtaccaggcaactgccagagtagatagtaacttatggcatatatgttgctaatggtggatgaggtcatttcaagagctggaattgggaagaaggataaatacatacatggaggagcaatagaagtctaccttatggagcatgtggaagtgagtattgaagttgaggttcaaatccttgctctgtcacttactggttatgtaaggcaagttttcttagcttaacttctctcctatgtaaaatgggttctataatggttaatgtggctaagactgcggggctggcagttaaccccaatccattcttgttttcttttgtggtaacagatatgtgggcacatggctgctaacata

SEQ ID NO: 4966 - DNA, 574 bp, Homo sapiens
  MAP TO AC016951.9; EXPRESSED IN ADULT LIVER, SIGNAL = 0.63; EXPRESSED IN FETAL LIVER, SIGNAL = 0.89; EST_HUMAN HIT: BF879144.1, EVALUE 3.00e-19; SWISSPROT HIT: P32432, EVALUE 6.30e-01; NT HIT: gi14249445, EVALUE 4.00e-20
ctcctattaggcccacctccaacattggaagtcacatttcaacatgagatttggaggggacaaaacatccaaaccttatcatgcccaaagcagcaaaaagcagaaaccaggccctggtaatcaaaagccactcaccttcccacacgaagaggatgagcaccaggaagacaatgcccacaacacttgtcagtgttgcaatatgatggcaaaaatatgacaaatgcaatatattttttaaacatataagtttattttaatttaaagaactatgctgtacattatgtccttaccatttggggcatggggatcaaggtgacttttacagaataacagtggctgtaggtggtcattacattttcaagagagtcacgtctaactcaaaaggttaggatctaaagtcatcaaataaagcaaaatcatgtgtaatctaatcctagaagatcccctcaatcggccatccatattagtcatgtatacatgctgtcttgaatgtatctctatatcatttcctctaacttgcctttagtcaatgatttatatcaatttggatgccagcaacaggaaacaaactgca

SEQ ID NO: 4967 - DNA, 589 bp, Homo sapiens
  MAP TO AL079302.4; EXPRESSED IN LUNG, SIGNAL = 2.7; EXPRESSED IN BRAIN, SIGNAL = 2.5; EXPRESSED IN PLACENTA, SIGNAL = 1.6; EXPRESSED IN ADULT LIVER, SIGNAL = 2.8; EXPRESSED IN FETAL LIVER, SIGNAL = 2.4; EST_HUMAN HIT: BG026703.1, EVALUE 1.00e-119; SWISSPROT HIT: O43281, EVALUE 2.50e+00; NT HIT: gi14748360, EVALUE 9.00e-37
tggctgctttacacgttgactgcccttgttttgggatcccatccctgctcagtctttcctgagagcacagcagacccctcctcctcatcgccccaggaggatgtcagggaagtctgggggactccgtcccatggggccaaccccaaatctccacttcccgcagttgtggctgtggggactgtgctcgtggcgctcagtgccatgggcttcacctcagtaggaatcgccgcatcctccatagcagccaagatgatgtctacagcagccattgccaacgggggcggagttgctgctggcagtctggtggctattctgcagtcagtgggtgagtgttctggacaggatgaccagagccaggagatgatccagccccgaggctgaaccagggaggcctctcctctccctgcaggtccgtgatcctctgcctcttgggccctttgtctttctgtcactgtcccctcttctggttggaggtgggaccaggggtgcagcctaagagatctgcattcctggtgaaccctacaaaacccaggcaggtctcctcccctctctgggcctttggaagataaggaacctgccatttctcaga

SEQ ID NO: 4968 - DNA, 589 bp, Homo sapiens
  MAP TO AC012313.5; EXPRESSED IN HELA, SIGNAL = 1.9; EXPRESSED IN FETAL LIVER, SIGNAL = 1.8; EXPRESSED IN BONE MARROW, SIGNAL = 1.8; EXPRESSED IN PLACENTA, SIGNAL =   2; EXPRESSED IN HEART, SIGNAL = 1.6; EXPRESSED IN ADULT LIVER, SIGNAL = 1.8; EST_HUMAN HIT: BE743568.1, EVALUE 0.00e+00; SWISSPROT HIT: P28698, EVALUE 5.00e-35; NT HIT: gi14755564, EVALUE 0.00e+00
tctattctggtgtcctggggaccttccccaggggactccactgtccctgaggggtgggggctcccaagtggttcctctgtcttctgggctgcagggagcacctcctgcttcaggacatgggctgtgatctgaggagaagaggtaggtcacaatggctctagccagggtctatccctccaagaagctgatgccagccacactcacccagcccaacagttgcccagggtcatgctgcagtccttcgactagggcagcggcctcctcaggactgcctggccgctgaccgcgcacccaggcctggatctcgggaggcagtgtgcccaggaactgctccagcaccagcatctccagcatctgctccttggagtgtgcctcaggctgcagccactggcaacacagctcacgcagccgggccagggcttctcggggacctgccacctcctggtagcagaaccctcggaagcggaggcgggcagtctcaggctcctcaagggtggtctctgggtccatgacgggcaggcatgggggacccagaggggatggcattcttgctcaagggggtggtcttggaatcgtcaagatgggccta

SEQ ID NO: 4969 - DNA, 514 bp, Homo sapiens
  MAP TO AL109839.11; EXPRESSED IN BRAIN, SIGNAL = 1.7; EXPRESSED IN PLACENTA, SIGNAL = 2.1; EXPRESSED IN BONE MARROW, SIGNAL = 2.1; EXPRESSED IN HEART, SIGNAL = 2.1; EXPRESSED IN ADULT LIVER, SIGNAL =   2; EXPRESSED IN LUNG, SIGNAL = 2.5; EXPRESSED IN FETAL LIVER, SIGNAL = 2.5; EST_HUMAN HIT: AU119786.1, EVALUE 0.00e+00; SWISSPROT HIT: Q13310, EVALUE 5.00e-06; NT HIT: gi14771031, EVALUE 7.00e-68
gctggacagctggaaaaatcttaacccttacactgagtcacaacacacttccttgtaccaaaagacctacctacagaacaacacagaattagtctacggaagggctgaagtagcaaacccttacctaaggccccttccactcttaagattcagcaggccttcaggtattagcaagaagaaacactttatctggccaaacagctatccactggctccactaggagagcccttgtcgttagctctcctcctgccccctcgggctccctgctgcccaggctcctgcttaccttggcatggagggattctggagactccagcatgagcaacagctctgagttgtcaatctccagcagcatgcccgtgatcttgccagccagctgggtgtggacatcatggataagggggtagagacgctcccctgtgtggaacaccttctaatggcttgtgcacggcctagctcacaccccagcatcccagggctcgtatggagtggagcactgaggacatctgggtt

SEQ ID NO: 4970 - DNA, 591 bp, Homo sapiens
  MAP TO AC008149.14; EXPRESSED IN ADULT LIVER, SIGNAL = 1.7; EXPRESSED IN HEART, SIGNAL = 2.1; EXPRESSED IN BONE MARROW, SIGNAL = 0.97; EXPRESSED IN PLACENTA, SIGNAL = 1.3; NT HIT: AF275948.1, EVALUE 2.20e+00; EST_HUMAN HIT: AV681473.1, EVALUE 0.00e+00
tggcagaattcccagtaaggagagaaatgagaggccacttattattcacaaatacctactgaactctacagaagctctgtgttagattctaggattagagtagtataacaatccctactgccatggagtttactgtaaccaaacaatttctttctattctattaattttagaattctgctgctctaatcttaagactttcaggaaatgaggtgtttttatctctccaccaaaagattagtattcctaattttaaactttcctaatacaacatttgctcattgctttttgctatttctagtttctcttttcctacccaagctgaaattgttaaaaatcaacatgactatagctcaagttgttgtgatgggaataagggctgtgaaagagatagaaacccaattactccaaggatatggtcacttcatgacaccctaccctaactccactaggaaaccaaagaagcaagatggcaatcaaaacctctttagctccacccttacaaagagaccctgaatcccagcatgtacagctcctggcacagaggaggtactcagcagacattaaccttgacaagcaaaatgaccagctca

SEQ ID NO: 4971 - DNA, 598 bp, Homo sapiens
  MAP TO AC000038.2; EXPRESSED IN BONE MARROW, SIGNAL = 0.41; EXPRESSED IN ADULT LIVER, SIGNAL = 0.42; SWISSPROT HIT: Q92859, EVALUE 1.10e+00; EST_HUMAN HIT: AA923184.1, EVALUE 1.40e-02; NT HIT: AF035584.1, EVALUE 6.00e-04
tacctctgccattttcccagaatagagaaatagaaagtgaaagaactgtgttcagaagagagaaaatgacagacttaagttgatcaatgaccaattaaggcaacacgggagtcaggggccctctctaaagaacccctcgcttctgcggtagaagcagctggagatcaggccctcgacgtggttgtggaaagggaggacctgagagaagacaagagtatcaaacctcaagagtctcctacccctggggtcggggccctgatagggaaggcatgggatgccaggagcctggaggggatgtccgggcagatgctgcaaagcgtcttgctcccctgaacgctgggttgcagaagtgcttcactccccttcccggaagacagaggagggccccattggttggatatcgtgcagaagcctcatgcgtgggcttaccacatgaaataaagggtgcccagttaaatctggatttcagataagcatcgcacactcatttaggatgaagtatgttccatcgtcaaacggtaatagggctggctggtaataacagctccgttccagcaggattgtttctctgccctttggttcttccttcacaggctgc

SEQ ID NO: 4972 - DNA, 540 bp, Homo sapiens
  MAP TO AC008699.4; EXPRESSED IN BONE MARROW, SIGNAL = 0.79; EXPRESSED IN PLACENTA, SIGNAL = 0.49; EXPRESSED IN ADULT LIVER, SIGNAL = 0.55; EXPRESSED IN LUNG, SIGNAL = 0.83; EXPRESSED IN FETAL LIVER, SIGNAL = 0.55; SWISSPROT HIT: P27666, EVALUE 1.30e+00; EST_HUMAN HIT: BI668570.1, EVALUE 7.60e-01; NT HIT: Z26269.1, EVALUE 5.10e-01
aaccattctgtgggacttgcaaagagggaggccaacaccaattctgcctctgttaacccttctctctatcaaaagtagaatgcattagagagttgactagggtctgggtcctgcctgagtaatgtaaaggattccatggataaccttgcaaagagcaccacagcttcttggctgcatcctgaaaggatatcacacacaggcaggctgaagtgcccagggggcagtggaaggaggtctgtgctcctcgtgagcaggccaaagatgtatgtcttcagtggaccaggtgtgggtaagtaggcaggtgtggggttgcccttgattctgttatagagagtccctaggaagggcaaagtgagctcaaaggcagctggaggtggcccgctaactgggaatgaggaatgagacatgatgattagcagggaaaaaatgcattcgctgcatcaaaggaatgacagagagagatcaccagcaatagaggccttcaaagaacccataactgctaccgtaggaaaatcataaaggaactcaaggccagattga

SEQ ID NO: 4973 - DNA, 579 bp, Homo sapiens
  MAP TO AL096791.12; EXPRESSED IN BRAIN, SIGNAL = 3.8; EXPRESSED IN BONE MARROW, SIGNAL = 2.2; EXPRESSED IN PLACENTA, SIGNAL = 2.6; EXPRESSED IN ADULT LIVER, SIGNAL = 1.4; EXPRESSED IN FETAL LIVER, SIGNAL = 1.7; EXPRESSED IN LUNG, SIGNAL = 3.3; SWISSPROT HIT: P51784, EVALUE 1.00e-41; EST_HUMAN HIT: AU117079.1, EVALUE 0.00e+00; NT HIT: gi14758440, EVALUE 1.00e-125
ccgagatcttgcctttcttggggaccacgagccggtgctaagggaaaaacggtatccacaaaagaccaaaagggcttgtggtgagttaatgcaagaagccttgagctatggcagctaatcaaactctatgtgtccatcatcatctccccaggcccccactgccccacacctgctctggcttgcggcgcggatccatggggataaagaagacctccaagaccctcttgtggctgataggcagtggaacactgaggtagcagaaggggtcgaaggtcacagatacattgccacaatcggggcacaccagcgtggacttgaagaggccgtggaaagtgtccacgatcacagaatcgttccgccgtttgtggttttgccatgcctcctgtgccacctcctgttgatagtgtcatggtgggtggtggggcttgcccagggtaagaggaaaccatggcttggggtgcattcaaatggggtgaagcggaaggccactgctaaagtccagaggcagagctccagctagggatacacagagactatgttcacggtcaagactgggggtcatttagggcaggagactgc

SEQ ID NO: 4974 - DNA, 523 bp, Homo sapiens
  MAP TO AC011604.10; EXPRESSED IN BRAIN, SIGNAL = 0.51; EXPRESSED IN LUNG, SIGNAL = 0.64; EXPRESSED IN BONE MARROW, SIGNAL = 0.7; EXPRESSED IN ADULT LIVER, SIGNAL = 0.45; EST_HUMAN HIT: AI492062.1, EVALUE 8.00e-04; NT HIT: AL163283.2, EVALUE 8.00e-06
ttacccaattccaaagccacttccacatttttaggtatttgttgcagcatcacgccactctatggcaacaaactatgtactaaagtattcaggctgctattacaagatactgaatactgaatggcttaaacaacagaaatttatttctcatattctgcaggctaagaagtccaaggtgaaggtgccagctgattcaattcctggtaagtgccctcttcttagcttggagacagctaccttctccctgagttgttacatggcctttttgttgtgatcacttggagagagagagagagagagagaggaagagagagagagcacttcctttctctacttataaggccaccagttctttcaggtaagggcacactcttatgagctcatttaatcttaattattttctaaagaccctgtctcaaattacagtcactttaggatgagggcttcaacatatgaatttggagaaatgcaattcactacatagcacctccttctgaagaaggccctgaagaggatgaccaga

SEQ ID NO: 4975 - DNA, 564 bp, Homo sapiens
  MAP TO AL109910.27; EXPRESSED IN BONE MARROW, SIGNAL = 0.61; EXPRESSED IN PLACENTA, SIGNAL = 0.48; EXPRESSED IN ADULT LIVER, SIGNAL = 0.46; SWISSPROT HIT: O95613, EVALUE 3.10e+00; EST_HUMAN HIT: BG721945.1, EVALUE 7.90e-01; NT HIT: AB001523.1, EVALUE 9.00e-03
actgtggctggtcctaggtggctgagctgagggagcgctgtggttcgctgtccccgcaggacacagggccccgcgagagaggcttgtggccgccccagatgacctcagctccctgtctgtggccgctttgtctgtcgactgcaaggtctccaggccacacgaccactttgcagatgatatttgagtacaaccagacttttaaagtaagttcggagcaggaaaagactttcttcagttagaaatttcagtgctgatgagtaatgccatattgaatattcaggaattctggatattctaaatttgtaaataatcagcaacttgctgagcaggggacgttgactgaaggccaactgtgcacctggcagagacacacgaggagcttgttttctcctcctgccaggccctcgcaggtgatcgggtctcctcactttatggatgagagatgcagctagcgacgtcccgcacctgaccctagacagcaccagctcctgggagagctgggacggaacccacgtcggccccaggccttctcctcaaaggctttgctgtcacaaaacgtggatg

SEQ ID NO: 4976 - DNA, 504 bp, Homo sapiens
  MAP TO AC004208.1; EXPRESSED IN PLACENTA, SIGNAL = 4.8; EXPRESSED IN ADULT LIVER, SIGNAL = 5.7; EXPRESSED IN HEART, SIGNAL = 4.5; EXPRESSED IN HELA, SIGNAL = 8.9; EXPRESSED IN BRAIN, SIGNAL = 3.4; EXPRESSED IN LUNG, SIGNAL =  18; EXPRESSED IN FETAL LIVER, SIGNAL = 4.6; SWISSPROT HIT: P06489, EVALUE 1.20e+00; EST_HUMAN HIT: BF689874.1, EVALUE 4.50e-02; NT HIT: AL163249.2, EVALUE 3.10e-02
ttgaggtcacccaaatctgcttttctttctcttttttgggaacagattctggattcaagatcccctccaacagtgaaagccattttcgtgggccctgggcccaggatactccaacctggtcgcataccccttgggatttcccagcagcgggctgcagaatataacgtccaggagtggggtgtcctctctctccgggctcttggaagacgctgctccgcctttgatcacctggatttttaactattcgaatctagctgaagatctgtgtagcctgggcaagcctctgcagaaccctgggcttcagtttccttctctgggcactggggtgatcacagggtctccctgaccaaacctacaaatggaaagttctcccggaaagctctttgtaaccacagacggtgatgcaatgtaaacccttagaatgacctcctaggatctagccgtaaaccctgttcaaatgccacacttcatccttagttctgtcccttctggaattcttcagcg

SEQ ID NO: 4977 - DNA, 555 bp, Homo sapiens
  MAP TO AC008413.5; EXPRESSED IN HELA, SIGNAL = 4.2; EXPRESSED IN BRAIN, SIGNAL = 4.5; EXPRESSED IN FETAL LIVER, SIGNAL = 2.3; EXPRESSED IN BONE MARROW, SIGNAL =   6; EXPRESSED IN PLACENTA, SIGNAL = 3.1; EXPRESSED IN ADULT LIVER, SIGNAL = 3.9; EXPRESSED IN HEART, SIGNAL = 3.5; NT HIT: U67504.1, EVALUE 2.10e+00; SWISSPROT HIT: P42705, EVALUE 1.00e+00
ttgttttcgagcagtgttgcatgttctatgtgccaagtgcatatgccatgacaatgtattttaaaatggtaaatcgtatagcctttgataatgcacttttaacaaaacactgtgtcagctgaccctcgatttgctggcttggctctgggaatcatgtcagctacagaaactaattagagagattcactttgataggtttgccaggaaaaaaaaaagtgtaatacagaagtggaaaatcgcttacagtactcccctcatacttatatcatcatcatatcaaggcttaataaagctaatttgcttctaggtaacttggctgatgaggctgagtaaaccctgttctcacccagggttcttccagtcagcaggacccgaggtgagaatgacagcattcttgatgggagcattgagattcttccatcacaagtacacactgtcacgttcagcctgcctcacgctgtgtttcctctcctgcgtggagcttccagagtgctcacatctgtgaatggaccagccttaatggctgtgagcagatgccctacctgcacctgtatc

SEQ ID NO: 4978 - DNA, 541 bp, Homo sapiens
  MAP TO AC006272.1; EXPRESSED IN ADULT LIVER, SIGNAL = 1.2; EXPRESSED IN HEART, SIGNAL = 1.4; EXPRESSED IN BRAIN, SIGNAL = 1.3; EXPRESSED IN LUNG, SIGNAL = 0.92; EXPRESSED IN PLACENTA, SIGNAL = 1.8; NT HIT: gi4503780, EVALUE 3.00e-33; SWISSPROT HIT: P50419, EVALUE 3.90e+00; EST_HUMAN HIT: AA625209.1, EVALUE 7.60e-01
agggaatcaaggagtccaccatgggtccagcacagtgtgtcaggtgagagtgcagagatgaggtctggggatacacaagacaaatctcagggtgcttgagaagtgtgagttagaaatgtggaagccatagaagagtgctgagaagaataacatcattgtcttatttttccttttgaaatataatttgtctgtgtctggattttagcagagggaatagcaggaccaggaacaaactatctgcaaagtttgtacaaatatccaagcctgacagggccatggacatgggtagtggagatggagatggctctggctgtgcattcagcatgttctgtagatataatcaataggacttggattgtattgggtggtaaggaaaatgaaaggtgagttctacatttagagctttaataactgaatatttaaactccaaatagatacagaatattggaagaatggcaggtttgggaggaagggacaagcaacagtttagtttgggcaatgttgggtttggagtgtctatgggactgcaggggagatatca

SEQ ID NO: 4979 - DNA, 567 bp, Homo sapiens
  MAP TO AL121784.2; EXPRESSED IN HELA, SIGNAL = 0.42; EXPRESSED IN FETAL LIVER, SIGNAL = 0.79; EXPRESSED IN ADULT LIVER, SIGNAL =   1; EXPRESSED IN PLACENTA, SIGNAL = 0.84; SWISSPROT HIT: Q92911, EVALUE 3.20e+00; EST_HUMAN HIT: BI907524.1, EVALUE 0.00e+00; NT HIT: gi16191240, EVALUE 0.00e+00
aatggtcacttggatcaggcctgccacacgattcagaactgcgagtagcttaaagggcacccaatccaggagacctctgcttcaaggctggctctgcctctggcttttgaggggcagcagggtgccagccctcggcttacggcttgggacctcaggcctgctgctcatccagggtaaaagctgcttccaggcgagcggctggctggggtttgttaccttaatgaccgacgggagggcctgagtccaggcctgatctccaggtgccctggagggtccgactgctttcctcaggtactgactgtggacagcacatgagtacaggatgtagagtgcgcaggccagggcatagcctccccagttagaaacacctagaacagcaaaacaagattccatcatggagttggaaaagtcatgtgtctgtcagcctgcctctaggaagcagaactatctgcaggactggtccacggtcccgtagcaccagtatcatctgggagcttgctagaaacacaaattctttggccccagccaagaactactgaataaaaagctcagcaggagaggagagga

SEQ ID NO: 4980 - DNA, 534 bp, Homo sapiens
  MAP TO AC008390.6; EXPRESSED IN LUNG, SIGNAL = 0.61; EXPRESSED IN HELA, SIGNAL = 0.52; EXPRESSED IN BONE MARROW, SIGNAL = 0.43; EXPRESSED IN ADULT LIVER, SIGNAL = 0.58; SWISSPROT HIT: Q9Z1S5, EVALUE 1.30e+00; EST_HUMAN HIT: AI950186.1, EVALUE 2.00e-20; NT HIT: AF224669.1, EVALUE 7.00e-28
aagacacagaaacatattttggcctaggcctacacagggccagggttatcaatgtcgctgtcttccaccacctccccatcttttcccattggaaggtcttcaggtgcaatagcacacatggagccgttatctcctatgataacaatgccttcttctggaatacctactgaaggccctgcctgaggctgccttacaatagaagtacactctaaaatagtgataaagtgtatatatatatgtaaagaagtgataaagaggtccactctaaaaaagtgataaaaagtatatatgtgtatatgtactttttgtatatatacatatgtgtatatatgtatgtgtgtgtgtgtgtatatatatacatactttttatcattattttagcatagtcatttcttgtgatcaattatgtcccatactcaattgtatgtgtcatatttttatatgaccagtcacacagtatgtttgttataccagtatcaccacaaacatgtgaataatacgttatgctacgatgttatgaaatccatgctggca

SEQ ID NO: 4981 - DNA, 510 bp, Homo sapiens
  MAP TO AC067968.1; EXPRESSED IN BONE MARROW, SIGNAL = 6.4; EXPRESSED IN PLACENTA, SIGNAL =   2; EXPRESSED IN ADULT LIVER, SIGNAL = 2.4; EXPRESSED IN HEART, SIGNAL = 1.2; EXPRESSED IN LUNG, SIGNAL =   5; EXPRESSED IN FETAL LIVER, SIGNAL = 1.3; EXPRESSED IN BRAIN, SIGNAL = 1.9; SWISSPROT HIT: P33485, EVALUE 5.50e-01; EST_HUMAN HIT: AA757166.1, EVALUE 8.00e-07; NT HIT: AL445565.1, EVALUE 1.90e+00
aatgtgttgtgagggaagggaatataccaattcatgataggtgagtgggctattggtataagtgaaagaaggtccagctgcttatctcttatagaaaaaagccaaaataacaacaggaaagtgtgataaaaagagtgaattttattacttgttgctagcaagggaaagagtgattggaatcttttccaaaagttgccacttttcaatttctggagagagggccacagtttaagaagtgggcttggaatgcagagaggtaagggggtttaggaggtacctgatggcatgtctcgctctgatgatcttgaattattgttgcatctggtgaaggggccagcacgatcatgggctcaatcaggttataaattaatggactgtcaatcttgcagttcatctgtagccaggaggagagaattccagagctgcctgatcctcatcagtattcttcccctgaagcttctaaggaaatatgtgagcagataagtgagcgcggtgtgagcttaacaagca

SEQ ID NO: 4982 - DNA, 596 bp, Homo sapiens
  MAP TO AL096870.3; EXPRESSED IN ADULT LIVER, SIGNAL = 4.3; EXPRESSED IN LUNG, SIGNAL = 9.2; EXPRESSED IN BRAIN, SIGNAL = 4.8; EXPRESSED IN HELA, SIGNAL = 9.1; EXPRESSED IN FETAL LIVER, SIGNAL = 4.9; EXPRESSED IN BONE MARROW, SIGNAL = 8.3; EXPRESSED IN PLACENTA, SIGNAL = 2.6; SWISSPROT HIT: Q24167, EVALUE 1.00e+01; EST_HUMAN HIT: BG330808.1, EVALUE 1.00e-109; NT HIT: gi13385891, EVALUE 2.00e-44
cccctaggtccactttcctcttgtaatacttaccagatgattgggaaccacggggcctggctctctcagactccagaatagtccctcctaacacctgaagcagagttctgaccacgaagctgccatgtgtgtctccacagtagacaagaaaatcatcacacacctcagcggctagtcccaggaccagctcctccagggtctccgtgggaccatcctttccatcctcctcctcctcctcctcctcctctgcagcactccccagcaatcgagggagctgtagcaaagcactttgtaatacatggaccccgcatcggtgacaggccacagtgcgcaagttagagcgcagagcagcccacacgcgacaaagcggtttcaagggactgaatcccaacagttcctgcagcatctcactgccagtcctgttcgtggacaaagctagggcctgagtctctacttccttcattatattgtgcaccatcagatctgaaaagggaagaaagacacactttgaagagacttagtagagaatacagttatgtaccctcgcttaaccaagggtcgtgggtcggaggccgaggaagaggacatgggaaatg

SEQ ID NO: 4983 - DNA, 511 bp, Homo sapiens
  MAP TO AC068323.6; EXPRESSED IN BONE MARROW, SIGNAL = 1.3; EXPRESSED IN ADULT LIVER, SIGNAL = 0.83; EXPRESSED IN BRAIN, SIGNAL = 0.89; EXPRESSED IN FETAL LIVER, SIGNAL = 0.72; NT HIT: AF405693.1, EVALUE 3.00e-67; SWISSPROT HIT: P70414, EVALUE 1.40e-01
tttaggacaggacacttgaaggtattgtagcatttaaacttgtctctaatttcaggtcctgggatactgagaattggagcagggataaatggcaatgacagatttacaggtctgatgcaggatgtgaggtcctatgagcggaaactgacgcttgaagaaatttatgaacttcatgccatgcccgcaaaaagtgatttacacccaatttctggatatctggagttcagacagggagaaactaacaaatcattcattatttctgcaagagatgacaatgacgaggaaggagaagaattattcattcttaaactagtttctgtatatggaggagctcgtatttcggaagaaaatactactgcaagattaacaatacaaaaaagtgacaatgcaaatggcttgtttggtttcacaggagcttgtataccagaggtaagtagtgagcttggagaattttggatttaaaaattcattgtaggtggatttgtttgggactcggctttctttcatttgg

SEQ ID NO: 4984 - DNA, 595 bp, Homo sapiens
  MAP TO AC005547.1; EXPRESSED IN HEART, SIGNAL = 4.6; EXPRESSED IN BRAIN, SIGNAL = 5.6; EXPRESSED IN FETAL LIVER, SIGNAL = 7.6; EXPRESSED IN BONE MARROW, SIGNAL = 4.2; EXPRESSED IN PLACENTA, SIGNAL = 6.2; EXPRESSED IN ADULT LIVER, SIGNAL = 6.5; EST_HUMAN HIT: AI690027.1, EVALUE 8.40e-01; SWISSPROT HIT: Q63120, EVALUE 6.70e-01
accagcccctaattgctctctcagggaaggtatcataaactcaggtatggctgacacagatgtagcttcaactttatgcaggcaggaatgctacatcaaagctatttgcaaagtgacatagctagttgtttaaaagaacatttttattatattccttggaatttgcattcttctagaaaccaagtgtattttttaacacggcctcagaaatgttggggcaattgaccattcatgatgtctgcaaaggaaaagcatctaaatatttttcaagcgactttaataaatttgagtgcgtctgtcactacatgtaacctgattatttaaataagttaatattatcacttctcttttgccagctgctgtaagcagtcggctgctgtcattaagcaaaaaggccaagacaatgtgagtttatctggtcctacctgcatttctactcatcgttggactgaaacaaatgggaaagaaaaacttactgacttttggcgaactacaaaggttaactctattcatcatggagaaactgatactaagtgctttctgtctgtccatatattctaaagatttagaaggaacctggtagtgttcctgggag

SEQ ID NO: 4985 - DNA, 582 bp, Homo sapiens
  MAP TO AC010615.5; EXPRESSED IN HELA, SIGNAL = 0.57; EXPRESSED IN BONE MARROW, SIGNAL = 0.89; EXPRESSED IN ADULT LIVER, SIGNAL = 0.76; EST_HUMAN HIT: AA482523.1, EVALUE 1.00e-102; SWISSPROT HIT: P53742, EVALUE 7.40e+00
tctccatgtggggaaaagtctgtacaacttatatctatacactaagattattaataaaacaatgtaagggaaattgatatgatgagaatctactcaccttccattccttgaacatcttttccttgcaaaaacattggccagagtgtaagtgctggattgagtttattgaaggagggtgctgattttatattcaatcttggtttttctaaataatcaaggtttttattctttgtaggtgacatataacaagcatagttctttgcaacaagatcatcattaacacaaacctgtaaaattttaaacatttcatgactaataagacaaatatagtcaagcgattttaaaggaaatattccaaacttaaccccaaagttctaccttcagagaaattattttacagaacataatctgagagaaacagatttgactcctgctctggtaaaccaaatacttcccaccaatcctgatgaggaaaaacagcaagcatctgtgtgaaacacatgagatgtcttcttggacatacgcactgtagcactaaaactacctggccaggcaaaagcctggtgggaggacagagacaaa

SEQ ID NO: 4986 - DNA, 507 bp, Homo sapiens
  MAP TO AC016552.5; EXPRESSED IN BONE MARROW, SIGNAL = 5.7; EXPRESSED IN ADULT LIVER, SIGNAL = 2.3; EXPRESSED IN HEART, SIGNAL =  18; EXPRESSED IN BRAIN, SIGNAL = 2.5; SWISSPROT HIT: P18124, EVALUE 2.00e-43; EST_HUMAN HIT: AA226033.1, EVALUE 1.00e-117; NT HIT: gi16173022, EVALUE 1.00e-124
tgatctccatgatccactgcataatgattttgagataaaatgaagggttaattatgagtcctagctaaatgaagagaaactgacttgggcaaggcaataatgcattgttctgagggaaaaggaatatgattgtctaatttgatggcattagaaagaacggggcatgcctctttttcagctggaaccatggaggttatagaagagaagaagaagtttcctgctgtgccagaaacccttaagaaaaagcgaaagaattttgcagagctgaaggtcaagtgcctgagaaagaagtttgcccaaaagatgctttgaaaggtgaggaggaagcttacctaggaaaaagccatgcactattccaaggaatataggcagatgtacagaactgaaattcgaatgacaaggatggcaagaaaagctggcaacttctatgtacctgcagaacccaaattggagtttgtcatcaggatcagaggtatcaatggtgtgagcccaaagttctgaaaggtg

SEQ ID NO: 4987 - DNA, 551 bp, Homo sapiens
  MAP TO AC008507.6; EXPRESSED IN LUNG, SIGNAL = 0.72; EXPRESSED IN BRAIN, SIGNAL = 1.1; EXPRESSED IN PLACENTA, SIGNAL = 1.3; EXPRESSED IN HEART, SIGNAL = 2.6; EXPRESSED IN ADULT LIVER, SIGNAL =   1; EXPRESSED IN FETAL LIVER, SIGNAL = 0.97; EST_HUMAN HIT: BF345314.1, EVALUE 1.00e-115; NT HIT: gi14759200, EVALUE 1.00e-115
tttacccatggaaactaactggaaatttaaataatgtaaaattctagtatgtttgtttgatcttgttaattttcttccttgctagtaagcctgatactgtgattgcaaatggagaagatacgacatcttctgaagaggaaaaggaagatcgtaacacaaatgtgaatgcgatgcatcaagtaacagactctcatactccttgtcataaggatgttgcaagttcagaaccattcagtggtcaagtgaatagtcagttgaactgttcagtgaatggttccagttcttaccacagtgatgatgatgatgatgatgatgatgacgacgacgacgacaacattgacgacgatgatggtgataacgaccatgaggctttaggggttggagataattctataccaacaatatatttttcacatactgttgagcctaagagggtttgtatacttttaactttactaattttgcatataatttgaacattaagcattatgatattttttagaagagcaatattaacaatcattatcattgtggatagtgccagacaggaa

SEQ ID NO: 4988 - DNA, 552 bp, Homo sapiens
  MAP TO AC006334.3; EXPRESSED IN BRAIN, SIGNAL =  11; EXPRESSED IN HELA, SIGNAL =  10; EXPRESSED IN BONE MARROW, SIGNAL = 2.8; EXPRESSED IN PLACENTA, SIGNAL =  15; EXPRESSED IN ADULT LIVER, SIGNAL =  10; SWISSPROT HIT: P35053, EVALUE 7.90e-01; EST_HUMAN HIT: BG203647.1, EVALUE 0.00e+00; NT HIT: gi14748596, EVALUE 0.00e+00
caacccctcttccttcttcccacacctgcttctcccaccaccagtgcattcccagaagcagaacagacagacctgcgtccggaagagcctcatatgcgcctttgctatggccttcatcatcagtgtcatgctgattgcagccaaccagatactccggagcggcatggagtagcagcctcccgccagccacactgtgttgcagctcaccgcgcatgtgcatgccgtgcgggcagactcttcctccacacagcagacacggacctatggactatggatggatgcggacgatggaaccgttcagtaaagaacccaaggttgagtgcaactggggttgcacttcagcttcatctccttggcagggacactaaagggctgtcttcagtgctttaatggttttgttttctaatgcaataaatcgccaggatttccaaattattgcttcaaccatcagtcataactctagagaaaaacttcatcttcatctcggaattccagcagccatccaggtataatggtgagagagcaagagagaggcatgaacacacagtcacc

SEQ ID NO: 4989 - DNA, 503 bp, Homo sapiens
  MAP TO AF172277.1; EXPRESSED IN HELA, SIGNAL = 2.9; EXPRESSED IN FETAL LIVER, SIGNAL = 1.4; EXPRESSED IN BRAIN, SIGNAL = 2.6; EXPRESSED IN PLACENTA, SIGNAL = 1.6; EXPRESSED IN ADULT LIVER, SIGNAL = 1.5; EXPRESSED IN HEART, SIGNAL = 2.1; SWISSPROT HIT: P35331, EVALUE 1.00e-18; EST_HUMAN HIT: AL134791.1, EVALUE 4.00e-92; NT HIT: AJ001057.1, EVALUE 2.00e-99
ttaggccccatcagtaaagcaactcatgctggcattcatactgtatcattgacatcgaagtttatggtgtgccatcaattagtatagttctgattatgtgaaaacgtaaaactgtgagcattatttataaaagtgtggtgctaattaaaatatctatgtatttcttatgattttttaataaagatttgttacaaagttgcatgaaaattcatcctcaaaagtagtcataggtggattccttttttgtaacatcattatttatttatcctatcaggcctaccccaattatttactgggcaaaggaagatggaatgctacccaaaaacaggacagtttataagaactttgagaaaaccttgcagatcattcatgtttcagaagcagactctggaaattaccaatgtatagcaaaaaatgcattaggagccatccaccataccatttctgttagagttaaaggtatattgtttaaaatccattcttcttgccttcatgagagaccc

SEQ ID NO: 4990 - DNA, 561 bp, Homo sapiens
  MAP TO AC011890.4; EXPRESSED IN LUNG, SIGNAL = 3.3; EXPRESSED IN FETAL LIVER, SIGNAL = 1.6; EXPRESSED IN PLACENTA, SIGNAL = 1.6; EXPRESSED IN HEART, SIGNAL = 4.7; EXPRESSED IN ADULT LIVER, SIGNAL = 2.7; NT HIT: gi14764711, EVALUE 1.00e-69; SWISSPROT HIT: P39188, EVALUE 4.10e-02; EST_HUMAN HIT: BG533159.1, EVALUE 2.00e-69
cacaaaaatttcccagggcatattaagtagtctccaaaaaccatagttttgaaattacggtttttggagaatacttgggatgctgaggcgggaagattgcatgagtccaagagttcaaggttattgtgaggtattgattgctccactgtactccagcctgggtggcagagcaagaccctgtctcaaaaaaacaaacaaaaaagattaccaatttggtaaacaaatgatagtgtttcagagttttcttttgtatctgtcagattaatttggggaaatactgttcagatcctttgcctttttctgttgagtcattagtcttattattaatatattgtatatcttttcttacagatccttttatcctgccacaccagcaggttgataaaggagccatcaaatttgtactcagtggagcaaatatcatgtgtccaggcttaacttctcctggagctaagctttaccctgctgcagtagataccattgttgtatccttcccaggctaaaactgctgaaaaatgtattcattgtgctcttatcattactgcgaaaggtgtaccatcc

SEQ ID NO: 4991 - DNA, 524 bp, Homo sapiens
  MAP TO AL117257.1; EXPRESSED IN FETAL LIVER, SIGNAL = 1.5; EXPRESSED IN BONE MARROW, SIGNAL = 1.5; EXPRESSED IN PLACENTA, SIGNAL = 1.6; EXPRESSED IN ADULT LIVER, SIGNAL = 1.6; EXPRESSED IN HEART, SIGNAL = 2.1; NT HIT: AF195953.1, EVALUE 5.00e-04; SWISSPROT HIT: P09395, EVALUE 2.80e+00
tgggtgatcttgagcaagtgatttgacctctctgggcctcaactcccatatctgtaaaatggagcccaaaacacaggaagaacagagaggcatgggaggcatgggggtggtacctggaaagctggagctggaatctcccacgtccactagacaggtccagcgagtacctactttccatccagacactcggcagagcacacaccccttggggacagcttgagtgccttcaagcagtttgattaatgttccatttagtgcaataaacaatacaattactcaactcctgcaaactctactctgagtgcagtgcgcaggctaggatggggctttggagtcatccttgctattaattacaggtacttaagcacagctgtagaaaaccaatgtcacaccttctctgtggctgaaagggtggatgcagggagtggacaagaaggtgtctcagggtccaccatcgtggcatccaacaaaggagacacagaaatggcttaaggaagacatttcctccctcctttctctcccac

SEQ ID NO: 4992 - DNA, 558 bp, Homo sapiens
  MAP TO AC010519.6; EXPRESSED IN LUNG, SIGNAL = 6.9; EXPRESSED IN BRAIN, SIGNAL = 0.75; EXPRESSED IN BONE MARROW, SIGNAL = 0.9; EXPRESSED IN ADULT LIVER, SIGNAL = 0.88; EST_HUMAN HIT: BG831594.1, EVALUE 0.00e+00; NT HIT: gi16163028, EVALUE 0.00e+00; SWISSPROT HIT: P13666, EVALUE 2.00e-14
gaaaaagaaagatgcgccctgggctcgcggctggcacacctgttgaggaaggtgtttccgaaagggttgagtttgcggaagggcttgtccgggtccacgacgagggcgttgccgggcacggtgccctcagtgtccccgtgcatgacggccacaaagcagtcggtggtgggctcaggccccacgcgggagccgggcacctcctgctccagcaggtactggatgaagctggtcttgcccgtgctgtactggccggccaccagcaccatgggcttgccgtcgaagtctgcgtcctccagggccggcgagtggaaggccccaaagcggtagtgctcctccagcggcagcagcttcgtgcggtacagctccttgagggccgaggtcaccgtgcggatggcctcgggctgctggccccgtgccccgccccgcttcagccagctgaacatggtggctgcacaccgctcacggggttcacggagagacgtgcagatggagagctgcctgtgggagggggagagggcatgagcataggcggcccagccaaggaggaagaaaggggtc

SEQ ID NO: 4993 - DNA, 542 bp, Homo sapiens
  MAP TO AC009510.9; EXPRESSED IN HEART, SIGNAL = 0.98; EXPRESSED IN ADULT LIVER, SIGNAL = 1.3; EXPRESSED IN FETAL LIVER, SIGNAL = 0.76; EXPRESSED IN LUNG, SIGNAL = 0.43; EXPRESSED IN HELA, SIGNAL = 0.56; EXPRESSED IN PLACENTA, SIGNAL = 0.92; SWISSPROT HIT: P08547, EVALUE 5.00e-05; EST_HUMAN HIT: AV658831.1, EVALUE 1.20e-02; NT HIT: AJ251973.1, EVALUE 2.00e-03
ccaacagcattggacacaagtgtttaccaaaagacatttagaagattgttcatagcaggacttttcttaatagcgccaaactggagacaactcacatatccatctacaataaaatgcatacatacattatggaatatccatgtgatggaaatcaattcagcaatgagaatgaatgcaacaacatggaggaacctcacaatggtaatgtggaacaagcacagaagacacaaaagaaaaggaaatcaagaaaaaccatctatagacaacgatatatgactggaagcaggacctgagctccaggaaacaaggctggtactagaaagccacaggcaatcccccagtggaatggatcatgtaaaagccagcaaagtagaaggtgctagataagtgctatgcccccatggggcattccggggccgagacccatcagtagtcctgaacacttgctgcttcagcacctgggacccatagagatagtgagactatttccaaacacccgatgaaagaagaaaagagagccaagcaactccgacaagcttctc

SEQ ID NO: 4994 - DNA, 548 bp, Homo sapiens
  MAP TO AL078581.11; EXPRESSED IN PLACENTA, SIGNAL = 0.98; EXPRESSED IN ADULT LIVER, SIGNAL = 0.95; EXPRESSED IN FETAL LIVER, SIGNAL = 0.88; SWISSPROT HIT: P04147, EVALUE 7.80e-01; EST_HUMAN HIT: BF670066.1, EVALUE 4.00e-64; NT HIT: AJ409115.1, EVALUE 6.00e-10
ttcaccagtacaaaattcgcctagaattcacagaatcatcaaaatatgtcattagaaaaccaccaactgatacctagtttttctaaatatctctttcactaattctaaggattaccttcttattggcccaaatctagagaatattatttccagatcctcatctgtggtcactgggttcaatttacacacaaacagtacattttctggaggtttaatatctgcatcaggtaggtctcccacctaaattacaaacaaacaaaaacataaatcaattcctatttagtttccattctaaatcctatccaatcccacaatgctgatttccttaaaacatctaaatttatgttacaaactgcaggctctggaaaagaaatccaaataagatttcaaaatttgaactacactgttcctattcttaacagtgttaatagctaatatttaaataactcatactttgtgtgaacagtgcttggagcttcagatctattacgctaattcttgaaacaatcctgcaatctccattttaaagacaagtaaagcggctgagc

SEQ ID NO: 4995 - DNA, 589 bp, Homo sapiens
  MAP TO AF274857.1; EXPRESSED IN BONE MARROW, SIGNAL = 3.6; EXPRESSED IN ADULT LIVER, SIGNAL = 4.2; EXPRESSED IN PLACENTA, SIGNAL = 5.1; EXPRESSED IN HEART, SIGNAL = 7.3; EXPRESSED IN BRAIN, SIGNAL = 4.6; EXPRESSED IN HELA, SIGNAL =  10; EXPRESSED IN FETAL LIVER, SIGNAL = 6.8; SWISSPROT HIT: P32928, EVALUE 1.90e+00; EST_HUMAN HIT: AA720574.1, EVALUE 7.00e-97; NT HIT: AL163227.2, EVALUE 6.00e-75
aagctatgaggatgcaagggcataagaatgacccaatagactttggggactcagggagaaaggtgggaagcgggtgaggaaaaaacgactacaaatcgggttcagtgtatactgcttgggtgatgcgtgcaccaaaatctcacaaatcaccactaaagaacttactcatgtaaccaaataccacctatgccccccaaacctatggaaataaaaaaataaaaaaaaagacacttcttattccagatactttaaatcatctctctcaagtttaaagctccacagatctctagggcaggggcaaaatgccagcagtatcttcgctaaagcataacaagagtcacttttgctccagtcctcaacaagttcctcatctccatctgagaccacttcagcctggacttcatcgtccattccactatcagcattttggtgaaagtcattcaacaagtcgctaggaagttccaaactttcccacatcttcctgtcttctgagccctccaggtctctaggaagttccaaactttcccacattttcctgtcttcttctgagccctctaaactgttccaacctctgcctgtttcccagttc

SEQ ID NO: 4996 - DNA, 515 bp, Homo sapiens
  MAP TO AF178030.1; EXPRESSED IN BONE MARROW, SIGNAL = 1.7; EXPRESSED IN PLACENTA, SIGNAL = 1.4; EXPRESSED IN ADULT LIVER, SIGNAL = 1.2; EXPRESSED IN BRAIN, SIGNAL = 1.4; EXPRESSED IN LUNG, SIGNAL = 1.1; SWISSPROT HIT: P30416, EVALUE 5.50e-01; EST_HUMAN HIT: W76523.1, EVALUE 6.00e-29; NT HIT: AJ010770.1, EVALUE 2.00e-22
atggtttggggatgaaactgttcctcctcagatcatcaggcattagttagattctaataaggagcgtgcaacctagatccttttcatgcgaagttcacaatagggtttactctcctatgcgaatctaaggcagttgctgatctgataggaggcggagctcgggccatcatgctccctcaacagcctctcacctgctgtgtggcccagttcctaacaggccacagactggtacgggtccatggcttgggggtttgggaccccagccttgggaaacatctatttcctccactcccttatcatatttggggcttatatcaagtccagaaatgggctccaggtgctcaagttctaattcttctgaaaaacaggaaattacacaaaagaaaaatagagacatgattgaaagtggaaagggataattctaccagttttgtttagggaacatccttgtgatctgagtagcttttctgattcatgctgctcagtttcaaagggcagaccctctacttgcccaa

SEQ ID NO: 4997 - DNA, 600 bp, Homo sapiens
  MAP TO AC001479.1; EXPRESSED IN ADULT LIVER, SIGNAL = 0.96; EXPRESSED IN LUNG, SIGNAL = 2.1; EXPRESSED IN HELA, SIGNAL = 2.2; EXPRESSED IN FETAL LIVER, SIGNAL = 2.4; EXPRESSED IN BONE MARROW, SIGNAL = 2.1; NT HIT: gi4507770, EVALUE 1.00e-130; SWISSPROT HIT: P23567, EVALUE 2.00e-16; EST_HUMAN HIT: AA897541.1, EVALUE 0.00e+00
tctgtcatgaaaactccacaccaacattatacacttggaaaaaaatacaaacaggatatattacaaatttatgcagcaataacttagttcacaccatgcaataaaaagtacattaatcaagatacacaagcttttgtaggttctaaactgaaggacttttttcttttttttctgcagaatccttaaaacctgtggcacttaaaatttgttagcctttctaatgagaggtaaattatacacaacaatgatgaaaaagattaacagaccagttgtctattatgaatcattccagctttgttcaacaatggccgaaactcttttctcatattctcgtttgttttcctgataaagctgtgctgcctggctattggctggactgttaggattcggttcatccagcagagactaggaggaaagagaagaaaaaacagatttgcatagttgttctttataccaacaggggtcagatatggaatatattacagaaaagttatacaaaacaacaaattacttcagagattaacatgtcatataattttgggtctaaatacttttagaaatgatttgataaatactatggggtttcctgctgctaaggaa

SEQ ID NO: 4998 - DNA, 577 bp, Homo sapiens
  MAP TO AC016577.4; EXPRESSED IN PLACENTA, SIGNAL = 5.3; EXPRESSED IN ADULT LIVER, SIGNAL = 3.7; EXPRESSED IN HEART, SIGNAL =   8; EXPRESSED IN FETAL LIVER, SIGNAL = 5.5; EXPRESSED IN BRAIN, SIGNAL = 3.8; EXPRESSED IN BONE MARROW, SIGNAL = 3.9; NT HIT: M14123.1, EVALUE 0.00e+00; SWISSPROT HIT: P10267, EVALUE 5.00e-31; EST_HUMAN HIT: BG501905.1, EVALUE 0.00e+00
tggacaatacctggctttcctaggcagaggtccctgcggccttccgcagtttttgtgtccctgggtacttgagattagggagtggtgatgactcttaaggagcatgctgccttcaagcatctgtttaacaaagcacatcctgcaccgcccttaatccattcaaccctgagttgacacagcacacgtttcagagagcacggggtttggggtaaggtcatagattaacagaatctcaaggcagaagaatttttcttagcacataacaaaatggagtctcctatgtctacttctttctacacagacacagtaacaatttgatctctcttgcttttccccacatttcccccttttcttttcgacaaaaccgccatcatcatcatggcccgttctcgatggtcgctgtctcttcggagctgttgggtacacctgcagactaacaacagacaaaacaggcacacaaggattaatatgagatttataatcgtagtacttccaatggtcttaacccaagtgacagggttaagatttgcgaggccatcagcaactcctgcaattgcctcagttcctggcaccaaat

SEQ ID NO: 4999 - DNA, 527 bp, Homo sapiens
  MAP TO AL022321.1; EXPRESSED IN BONE MARROW, SIGNAL =   2; EXPRESSED IN ADULT LIVER, SIGNAL = 1.5; EXPRESSED IN FETAL LIVER, SIGNAL = 1.4; NT HIT: L29337.1, EVALUE 0.00e+00; SWISSPROT HIT: P13866, EVALUE 3.00e-30; EST_HUMAN HIT: BG742097.1, EVALUE 1.00e-85
cagcctggagctaccacttctcctacctctgttcctttgcctctgcctatgcctctccaaagaatgttagaaaggccatctgttttgtgtgttcagcatgagttaacccagggttttctttcacagggagccttttggggactgatcctaggacttctgattgggatttcacgtatgattactgagtttgcttatggaaccgggagctgcatggagcccagcaactgtcccacgattatctgtggggtgcactacttgtactttgccattatcctcttcgccatttctttcatcaccatcgtggtcatctccctcctcaccaaacccattccggatgtgcatgtgagtatccatttaggggatctgtccttgtttcatgttcacactgcaatgttctttaattttttttaaatttttcattattatgggtacataatagttgtatataattatggggtacatgtaatgttttgatacaggcatacaatataaaataatcaaatcagggtaattggggtgtccattgc

SEQ ID NO: 5000 - DNA, 569 bp, Homo sapiens
  MAP TO AC007487.1; EXPRESSED IN HEART, SIGNAL =  33; EXPRESSED IN ADULT LIVER, SIGNAL = 1.5; EXPRESSED IN FETAL LIVER, SIGNAL = 1.8; EXPRESSED IN PLACENTA, SIGNAL = 1.2; SWISSPROT HIT: P00003, EVALUE 2.00e-22; EST_HUMAN HIT: BG779265.1, EVALUE 0.00e+00; NT HIT: M22877.1, EVALUE 0.00e+00
tggcactcaccatctttgtgaaaagttgaacattactaacgaagtctaatcatatctttaaaaggggtaaacagtgataccatttactgaattggagttactattaaaattcaaaaactgaacatattcatttaaccacaagccagtcttagttttaaatcaggactgcccaacaaaatattctgtcagtcattcatgatctgaattctggtgtatgagatctattaaaggatggtacacataaaaaagtcatgagacatttctgttttgtaataaataaggcagtggccaattattactcattagtagcttttttgagataagctattaagtctgccctttcttccttcttcttaatgccgacaaagatcatttttgttccagggatgtacttcttgggattctccaaatactccatcagtgtatcctctccccagatgatgcctaaacaagaaagaatgcatcggttatttcacactcctgatagtttgccacatgttatattcctgcattttgtgttgttttatttaacaagtgactcttacctttgttcttattggcggctgtgt

SEQ ID NO: 5001 - DNA, 543 bp, Homo sapiens
  MAP TO AL117337.25; EXPRESSED IN HELA, SIGNAL = 3.2; EXPRESSED IN FETAL LIVER, SIGNAL = 3.8; EXPRESSED IN PLACENTA, SIGNAL = 3.5; EXPRESSED IN ADULT LIVER, SIGNAL = 2.9; EXPRESSED IN HEART, SIGNAL = 4.1; SWISSPROT HIT: P52736, EVALUE 3.00e-06; EST_HUMAN HIT: AV746778.1, EVALUE 9.00e-47; NT HIT: gi15299302, EVALUE 6.00e-10
tggaagttactgacccctgctcagaggactctgtataaggatgtgatgctggaaaactatagtcaccttgtctcagtgggtgaggaaaacttccccaggtgtaaatcccagtagtttgcatctatcttctcagttactggagtataaaatgtccctatagggttgaatgattgacattatctatgattcagaggtcgaagttaataaatccattttgggtactagaaaaaatatttgtgtccctctctccccgctgaaagaatctaaatttgccaagcctaactggaaccttcattattatcctgaaactccacttcctcatctttcacagtccctaaattccaagcaatttgtatcatttccttgatattttccattcataggttaccatgtgaataagccaaatgcagtcttcaagttgaagcaaggaaaagagccatggatattagaagtagaatttccacatcggggcttccctggtgagttagaagaaattatatcccatgttactggtgagtagttggtgcctcttgccttctgaag

SEQ ID NO: 5002 - DNA, 538 bp, Homo sapiens
  MAP TO AF190641.1; EXPRESSED IN FETAL LIVER, SIGNAL = 1.1; EXPRESSED IN PLACENTA, SIGNAL = 1.1; EXPRESSED IN ADULT LIVER, SIGNAL = 1.6; EXPRESSED IN HEART, SIGNAL = 1.2; EXPRESSED IN HELA, SIGNAL = 1.9; NT HIT: AL163252.2, EVALUE 0.00e+00
aagcaacccaagatcttttccaagaatttgtagtcagcagggatgaagagacttctgacactcatgacttgtgagacctcatgacggtcaaataaggaagaccttgctgtattttttaaggatggaaacggccaagagggagaaggggagctttgtactgatagtcaaaaactttgttacaaatgagaagactgacacgatgtttgccataggagtcatagtatttgttggggtggcggggggggtggaaaaaagtaaaatattattagtctgctgagattttaactgtttctctgactggcattctgtatgatatgtaatcatgtctataatgaggactcctttctttatctacatgagcaattctccttcccaggtactgataatttcaaaatgaaagccatgtacatactctgttacattaaaggaggaagaaaacacagaatgcaataatattctgccctcagatgccctcatgatctctccatcccttcctctccttcatacagtaacacggagggagtcaaaatggtctgga

SEQ ID NO: 5003 - DNA, 570 bp, Homo sapiens
  MAP TO AC012083.6; EXPRESSED IN BONE MARROW, SIGNAL = 1.6; EXPRESSED IN PLACENTA, SIGNAL =   2; EXPRESSED IN ADULT LIVER, SIGNAL = 2.2; EXPRESSED IN BRAIN, SIGNAL = 2.4; EXPRESSED IN FETAL LIVER, SIGNAL = 1.6; NT HIT: X87369.1, EVALUE 1.40e-01; EST_HUMAN HIT: BG289466.1, EVALUE 3.20e+00
atcagttcaggtggggtcagagattatgccaccttggactaaagctgtttctgtattgtcacataacagttaaacgtgcggatttaaatatgaaaatttagttagttcttctcctatgacttatttggcttgattaaaccagatttaaataagctaattttccagcctgccagataattcctctagatcttaacaggtcctgcagtgatgaggaaattcttcttaaatacacacagaaacgtgaaagtcttcacctaaacaaccacaaaaagctgtctaaactcaaccataatacttcacttgctccaacaaagaagtggattttcgatagcctattccagaagttccccacacttgtgtatattaatttttcagatggaaactggtgaggtgaaaataatttagagaggaaaaaaatccaaaaatccaagaccttgttagtgagctttgacaggcagagctgaagctgatgaaattcacacttgtgactgaacaaattattgatgggttcctctgggccttcagttcccagtcaagggcaattagtatgctcacggctacatggatgtg

SEQ ID NO: 5004 - DNA, 503 bp, Homo sapiens
  MAP TO AC004200.1; EXPRESSED IN BRAIN, SIGNAL =   2; EXPRESSED IN PLACENTA, SIGNAL = 1.8; EXPRESSED IN ADULT LIVER, SIGNAL = 1.4; EXPRESSED IN HEART, SIGNAL = 2.3; NT HIT: AF055066.1, EVALUE 0.00e+00; SWISSPROT HIT: P37319, EVALUE 8.00e+00; EST_HUMAN HIT: AA700304.1, EVALUE 7.00e-35
taagaggcaatcccaacaccaccctgcatcgttcaggcatgtaatggcagtgccacccctatactacctgcagtaccctccacaagacccaccctggggcacaatattgcttctggttcagcttggatgagggatgtttccctttgggcttcagcacaatgagatgccttactctccagactagggacacagtgtggggtgactccagttgccagtgcatcaaggccaattatgtactcagagaatggggagataaccaggacaggatttatggaaccggtgattccaccatggggcataatgtgtctaggtttattccctggcctctgtaagccccactgtgatagggacataatggtgctgtgggaatctgggcagcaatgtcagctcacacccaatgttaatacttatcccatctcctgattaaatggctataggctcctttgcagaagggctgatggaattgtcccagcatgtaaccatcatcgtgtcccaaggttctt

SEQ ID NO: 5005 - DNA, 574 bp, Homo sapiens
  MAP TO AC009533.9; EXPRESSED IN ADULT LIVER, SIGNAL = 1.1; EXPRESSED IN BRAIN, SIGNAL = 0.8; EXPRESSED IN FETAL LIVER, SIGNAL = 1.9; EXPRESSED IN LUNG, SIGNAL = 1.3; NT HIT: gi14765667, EVALUE 0.00e+00; SWISSPROT HIT: P22516, EVALUE 4.00e-06; EST_HUMAN HIT: BE799797.1, EVALUE 0.00e+00
taacaggatccctgcagaccacgcccacgacaaacactgtctccagagggcaggacaaaggaagggcacggcgccgggcggtggtgtggttgcccatcaggaagaggccgacttctcccggtgaaactgggcagacagaaggcagtgagaaatgtgatctcggggttgggaggctctcagaaagaaaaaggtaggactgaccttctgcacagcagcaatggcggggccaaaggtagctttgacctccacactggctcggatccaggccggcagcttggccaggacagggggccgggcgtatcgctggtccaggagcactatgctggcaaaatccttctggtgcctgatggccctgcctgcataggaacagaggctggggctccgagcaacacctgcctcccctacagcacattcccatggcgaccccctccccttcctcagacttatataggaaacagggcaggcaacccctctttcctgttctccccttctccagcccccatctgtccacccagctggaggcagccaggctcacctatggactggttgacggccttcatgcacaggttctcca

SEQ ID NO: 5006 - DNA, 590 bp, Homo sapiens
  MAP TO AC022163.3; EXPRESSED IN BONE MARROW, SIGNAL = 1.8; EXPRESSED IN PLACENTA, SIGNAL = 3.2; EXPRESSED IN ADULT LIVER, SIGNAL = 1.8; EXPRESSED IN HELA, SIGNAL = 4.1; EXPRESSED IN FETAL LIVER, SIGNAL = 4.9; NT HIT: AL163303.2, EVALUE 2.00e-31; EST_HUMAN HIT: AL521707.1, EVALUE 1.00e-89
aatcccactgtgagacctgctgctcagaaaaaaaagatttctttcaaaatattgctcctcattgacaatgaacctagtcataagagctctgatggagatgtttgaggagattaatgttgcttttattcttgctaacacagcatctattctgcagcccacagatcaaggagtaagtttgactttcatgtattattatttaagaaatatgcttaataaggttatagctgccaaagatagtgatatttctgatggatctgtgcaaagtaaattgaaaaccttttctgaaagattcatcattctagatgtcattaagaacatttctgatttatgggaggaagtgaaagataagcattaacaggaatttagaataagacgattccaactcttatgtatgactttgaggggttgaagacttcggtcaagaaagtaacagtagatgtggtggaattagcaatgtaactagagttagaagtggagcctgaagatgtgactgaattgctgcaatctcatgataaaactagaatggatgagaagttgcttctgacggatgagcaaagaaagtggtttcttgagatggactcgactacggg

SEQ ID NO: 5007 - DNA, 594 bp, Homo sapiens
  MAP TO AC016597.4; EXPRESSED IN ADULT LIVER, SIGNAL = 4.6; EXPRESSED IN HEART, SIGNAL = 3.9; EXPRESSED IN BRAIN, SIGNAL = 4.3; EXPRESSED IN FETAL LIVER, SIGNAL = 3.6; EXPRESSED IN BONE MARROW, SIGNAL = 3.2; EXPRESSED IN PLACENTA, SIGNAL = 4.2; EST_HUMAN HIT: AA435573.1, EVALUE 2.10e-01; SWISSPROT HIT: P52225, EVALUE 7.60e+00; NT HIT: AB045575.1, EVALUE 5.70e-01
tcgtctcatgacctgtgagcaggcgggatgatctgtccttggctgctgcagccctatgctcacttcctcttggacaaggagagtcacaaaggcatctttctccagtagagaccagttttatctgcacagacccttttgcccctgagcgtctttcatttgggaggaaatgctcctccagcaacatgatcatcaggtgctgtctgtgccctttgagtcatattatgctaagaacatgcttttaaaaattaaatcaccctttctccaagtgaaggtcaatgctgcagctccactaccagagcttttcccatcctggctttccagaaccgtcctacatggcgccccagttctccaaaatcacgttccctctgtgcactccctcacaccgcacacacgtgcacacgaggtaaccaccttttaattctttttgatgctctcatcgctcacttgggcgaatgctagcctgaataccccatgatggtggatttattcccatcacagacctagaggatggtggatctattcacacagtccatttgtgccaccagcaaaagccaaattgcacattttaacttctcccaaactgctcttttctgg

SEQ ID NO: 5008 - DNA, 530 bp, Homo sapiens
  MAP TO AC008901.4; EXPRESSED IN BONE MARROW, SIGNAL = 0.55; EXPRESSED IN PLACENTA, SIGNAL = 0.87; EXPRESSED IN ADULT LIVER, SIGNAL = 1.6; EXPRESSED IN HELA, SIGNAL = 0.48; SWISSPROT HIT: P19883, EVALUE 8.00e-43; NT HIT: M19480.1, EVALUE 0.00e+00; EST_HUMAN HIT: BF223132.1, EVALUE 1.00e-128
gggttttgtgcgtgtgtatgtgtgtgtgcatttgagtttcagttttattatccagcatttttgcataatatctccattacccccattagtaataggctattactattatgtttatataaaataaattatgtttatatttattgatagaggactagagaaagggagaaaagggggatatggggaaatcagtttactcatcacagatgtattatatcctagaagcaaagtcctgtgaagatatccagtgcactggtgggaaaaaatgtttatgggatttcaaggttgggagaggccggtgttccctctgtgatgagctgtgccctgacagtaagtcggatgagcctgtctgtgccagtgacaatgccacttatgccagcgagtgtgccatgaaggaagctgcctgctcctcaggtgtgctactggaagtaaagcactccggatcttgcaactgtaagtgcgatttttaaccttgctgccatttaaggctttcccaggcaatccctagggaatggacacttacaaagcacgca

SEQ ID NO: 5009 - DNA, 525 bp, Homo sapiens
  MAP TO AC002325.1; EXPRESSED IN ADULT LIVER, SIGNAL = 3.5; EXPRESSED IN HEART, SIGNAL = 5.2; EXPRESSED IN BRAIN, SIGNAL =   4; EXPRESSED IN PLACENTA, SIGNAL = 4.3; SWISSPROT HIT: Q92908, EVALUE 4.90e-02; NT HIT: Y17803.1, EVALUE 1.00e-102; EST_HUMAN HIT: BF206274.1, EVALUE 1.00e-102
gggggtctctagtcccagacacgagctggaccacgcaagtatcaaggggctctgcagaaggagctctgagagaaacagctggctcagagggtcctggccccacgaggccacctgtctgtccacagcggccatcatgtttgctgccaacctgactctggggctgtacatccactttggccccaggcctctgagccccaacagcactgcgggcctggaaagcgagtcctggggggacttggcgcagcccctggcagcacccgctggctacctcaccctggtgcccctgctggccaccatgctcttcatcatgggtaggtgtggtggtggctcagaggggcaggctgtcttgggtgttaagggatgggtgatgtgtctggggtggctggagaggggggtctccagcagctcagcggagacagacacagccgcctccagtcaccccacagggcctgaacctgcctcctcctccgagcaggctacgccgtgggctggggtcccatcacctggctgctcatgtctgaggtc

SEQ ID NO: 5010 - DNA, 501 bp, Homo sapiens
  MAP TO AC020728.4; EXPRESSED IN BONE MARROW, SIGNAL = 1.4; EXPRESSED IN ADULT LIVER, SIGNAL = 1.2; EXPRESSED IN HEART, SIGNAL = 1.8; EXPRESSED IN BRAIN, SIGNAL =   1; EXPRESSED IN LUNG, SIGNAL =   2; EXPRESSED IN HELA, SIGNAL = 2.9; NT HIT: gi14721268, EVALUE 4.00e-88; SWISSPROT HIT: P42285, EVALUE 2.00e-20; EST_HUMAN HIT: AW388069.1, EVALUE 0.00e+00
cactttctaacatctgcttgctctgcctcaaatttttcaaatggacattttgtattttccatgtacttaatattttaggtagtatttaataactttacagatacatcattactcttgtataatgttccgggaatgtatctaagaagctccagtttccccagtctccccagcactgaagctttaacccagaagtatactgtaagatgttctttaaaaatattttttgtttgatttcatgaataaatctccttgtacattgttcactttattattgaactttctttatactttcatgtgctttagattgcaatagatattaaatctgcaaagcgagaactgaagaaagcaagaacagtcctacaaatggatgaactcaaatgtcgcaaacgtgttttaagaaggttgggatttgctacttcttctgatgtaatagagatgaaaggacgagtggcttgtgagataagcaggtaaaatctggttattgttctagaaagttcattt

SEQ ID NO: 5011 - DNA, 515 bp, Homo sapiens
  MAP TO AC012156.14; EXPRESSED IN PLACENTA, SIGNAL = 1.4; EXPRESSED IN ADULT LIVER, SIGNAL = 1.4; EXPRESSED IN HEART, SIGNAL = 1.7; EXPRESSED IN BRAIN, SIGNAL = 1.4; SWISSPROT HIT: P21414, EVALUE 5.50e-01; EST_HUMAN HIT: BI031398.1, EVALUE 4.60e-02
tacagccagcattcttttgcctttattccatttcacaatttccacatccctggctgttttcctcacccccactcagctccttgcttatcgccttcttcttcaccctccttgtcacgaccctgtcagaagctctgataaccctccaagaagaccaagtccaagagagcagaccaggaaccaggactcctgggtttcagccccagcaacgccactgtctgcacctatgcaactaacccctacccagttcacatcacatgaaagcccagcagagcccccaaagagatgttcagaagtcactgctgctgctacttctacaaggcaaacaaaggagagcccccatccctcagaacctgtttgctgggatccacctcaggcagcagaacagggacatggaccaggctgcctggcagggcaccacggagggctggggaaatgggaatatagatgccatgatgatcatattaatgagggtaaaaattaggaccaacaggggacgtcccctctgcacatgtgta

SEQ ID NO: 5012 - DNA, 554 bp, Homo sapiens
  MAP TO AC024076.4; EXPRESSED IN BRAIN, SIGNAL = 1.4; EXPRESSED IN HELA, SIGNAL =   2; EXPRESSED IN BONE MARROW, SIGNAL = 1.7; EXPRESSED IN ADULT LIVER, SIGNAL = 1.5; EXPRESSED IN HEART, SIGNAL = 2.4; NT HIT: gi14756322, EVALUE 1.00e-108; SWISSPROT HIT: O95076, EVALUE 7.90e-01; EST_HUMAN HIT: AA744545.1, EVALUE 3.00e-96
ttcacctctggttcctttggggcagctggtttctgttgtgattatttttggttttctcttttgttggttagtttctttcctttttttttttttttttggttggttgtttttttggtctttcctcccttgtcactcctgctctgaggaccctctgcgtccccaccactggcctcctcgccctcttcccaggcaagggaccaaggcagggaccagaggaatgggaggggaggcatggctggccctcactcaggtttggaccctgcctcgggcccccctggacctccaggggtctgtgctgccgtctcgctgcaagtggaggaggaggaggatgaggatgaagaggatgaggaggagaggccaggagacttgctggagatggaggctgccacagccgcagccgctgctgagaccaggcccacaccaggcggggtgctgagcaggggcagcccagcatgattcaagaagagcggcgaggtcaccaggccagggctccccggggctgcaccggctgcccccagcaccagattcccgctgccatcaaggctggtaagggg

SEQ ID NO: 5013 - DNA, 596 bp, Homo sapiens
  MAP TO AC012083.6; EXPRESSED IN BONE MARROW, SIGNAL = 1.2; EXPRESSED IN PLACENTA, SIGNAL = 1.4; EXPRESSED IN ADULT LIVER, SIGNAL = 1.3; EXPRESSED IN HEART, SIGNAL = 1.4; EXPRESSED IN LUNG, SIGNAL = 1.5; EST_HUMAN HIT: AI436360.1, EVALUE 0.00e+00; NT HIT: AF248246.1, EVALUE 3.00e-15; SWISSPROT HIT: P06155, EVALUE 1.00e+01
tctgtgtcttcttcgcatggtctttcctgtatatgtgtctgtgttcaaatttcctcttcatataagaacaccagtcctattggattaggactcatcctaatgacctcattttaacttcattacctctttaatgactatgtctccaaacaaaaccatgttctgaagtgctgggagttaagactcaaacatataaatttgggcaggatgcagtttagcccataacagccaggttgtaggtaccttaagtccccactggggaaaatcagattccaggctcactcatgtagttgttggtaggatttagttccttgtggactataggactttagggccttagttcctcactggttgttggatagaagccagtctcagttcctcgccacatgagcctctccacaaggcacctctcaacatggcagctgtcttcccacagcaacaagaaactctgacactgccggtaattcattctttgccattgtggttgaaatactccatccatcactgtgaagtatttaaaaaaaagctaacatttaaaaatatatatttaaactatcactgaaaccttcacttttatttcccttgaggctttcctcttc

SEQ ID NO: 5014 - DNA, 515 bp, Homo sapiens
  MAP TO AC004204.1; EXPRESSED IN BONE MARROW, SIGNAL =   1; EXPRESSED IN PLACENTA, SIGNAL = 1.1; EXPRESSED IN ADULT LIVER, SIGNAL = 1.1; EXPRESSED IN BRAIN, SIGNAL =   1; EST_HUMAN HIT: AW819527.1, EVALUE 0.00e+00; NT HIT: AJ304496.1, EVALUE 0.00e+00; SWISSPROT HIT: P30507, EVALUE 2.00e-54
accagaagtcgctgttcctccctcagagactagaactttccaatgaataggagattatcccaggtgcctgtgtccaggctggcgtctgggttctgtgcccccttccccaccccaggtgtcctgtccattctcaggatggtcacatgggcactgttggagtgtcgcaagagagatacaaagtgtctgaattttctgactcttcccgtcagaacacccaaagacacacgtgacccaccatcccgtctctgaccatgaggccaccctgaggtgctgggccctgggcttctaccctgcggagatcacactgacctggcagcgggatggcgaggaccaaactcaggacaccgagcttgtggagaccaggccagcaggagatggaaccttccagaagtgggcagctgtggtggtgccttctggagaagagcagagatacacgtgccatgtgcagcacgaggggctgccagagcccctcaccctgagatggggtaaggagggggatgaggggtcatgtgtct

SEQ ID NO: 5015 - DNA, 530 bp, Homo sapiens
  MAP TO AC002051.2; EXPRESSED IN LUNG, SIGNAL = 3.6; EXPRESSED IN HELA, SIGNAL =   2; EXPRESSED IN FETAL LIVER, SIGNAL = 2.8; EXPRESSED IN ADULT LIVER, SIGNAL = 1.2; EST_HUMAN HIT: AL042278.1, EVALUE 0.00e+00; NT HIT: gi14777543, EVALUE 0.00e+00; SWISSPROT HIT: Q9Y2N3, EVALUE 4.00e-09
tctgctgccttttcacactgggtgtgacctgaagagacagcctgaggcctgtcctcactcactgtctttgaggaactgagggtcagctggcagtgggatgaggctggccccctcctccgctttagccccggcaagcctcccgtggagctgtaggagctggagatggcatttcggttggtgcaggagctcgtccaggaggtctgggatgtctggttatatctgatttctgacctctgggcatggaggtctgtctgcagaggcccgggcccgggcacaaagggagagaggcctccattgtcccgcaggggccgaaatgcagacggtgcatccccggtgacctcggggacccttctctgatcaccaggattctcttggactctagggtccttgtcctgctcaggcatccctgccccgctctccttgagggccctcaacactatcttccctggacacaagtctggggacagccgggtgttgtggaccccaaaggggtgactcccggctcctgggccccacagagagtccatgtt

SEQ ID NO: 5016 - DNA, 517 bp, Homo sapiens
  MAP TO AC005864.1; EXPRESSED IN BONE MARROW, SIGNAL = 0.74; EXPRESSED IN PLACENTA, SIGNAL = 0.94; EXPRESSED IN HEART, SIGNAL = 1.3; EXPRESSED IN ADULT LIVER, SIGNAL = 0.94; EXPRESSED IN LUNG, SIGNAL =   1; EXPRESSED IN HELA, SIGNAL = 0.98; EXPRESSED IN FETAL LIVER, SIGNAL = 1.1; EXPRESSED IN BRAIN, SIGNAL = 1.2; EST_HUMAN HIT: BE825946.1, EVALUE 1.80e-01; NT HIT: AE000029.2, EVALUE 1.90e+00
acagccatattcaagcaggccatataatgtggaagagtgatgtttgtctcatttatcaagaaagcaacgcagtcccagaagcccctggcaggtacctcgttctgtctcatcggtcagagctgtgtgatatcagtacctggaaaaatgagtatttactttttcaaccaatgtagtggaggtagacaaggcacaaaagaattaagagtgggtgttagttacaagccttcagtgactgccacattgctagtttccaatcgttactctaacacatctcagactaacatgtttacactgcctctggggcccactcgctgcataattaagcagacgctgggaatacagcacttgctgtacacccatgctaagtgccgggtgaacagtgataagcaagacaaccacggtccttgatgctataaaaattagaggttttcgagggaagcagtattaaatagccaattaaatgattaagtatttaattatggtttgttattaaatgtgcaatgacatgaaagaggca

SEQ ID NO: 5017 - DNA, 524 bp, Homo sapiens
  MAP TO AC020908.5; EXPRESSED IN BONE MARROW, SIGNAL =  12; EXPRESSED IN PLACENTA, SIGNAL = 7.7; EXPRESSED IN ADULT LIVER, SIGNAL = 9.2; EXPRESSED IN HEART, SIGNAL =  17; EXPRESSED IN BRAIN, SIGNAL = 7.8; EXPRESSED IN LUNG, SIGNAL =  13; EXPRESSED IN HELA, SIGNAL =  29; SWISSPROT HIT: O29048, EVALUE 7.40e-01; EST_HUMAN HIT: BE002990.1, EVALUE 0.00e+00; NT HIT: gi15302739, EVALUE 1.00e-75
acagcccttttcacatttgcattggtttctgttgaggacaccagagtgacatttcagttctggtccaatgccctcctggatagatggatgtgcctgtcccacaatctcagagcacgggatggataagggacgaatgtcttccttggcttctgcttcttccctgtgcgctctccacggttccagcgcgatagccgagcatcatgacagaagtctgtcggccgctccacttgtgtgtgccttgcgtggggcaccttgccatccatcgcccaccatccctcttcccctccagacgccctgcagcatgaactggtgaccactcagcgcctcctgggagaacttgatgttggtgattcggaagaaaatgtgcaggtgctggacttactgagcgaactcaaggacgtgacggcgaaaaaggaccttgagctccgaaggtacctcggaaaatgctttaagaaagaggtggcaccctgtttgctcagggctgttggtggctgcactgttggggtggtgccgagttcctctag

SEQ ID NO: 5018 - DNA, 560 bp, Homo sapiens
  MAP TO AC009123.6; EXPRESSED IN ADULT LIVER, SIGNAL = 0.88; EXPRESSED IN BRAIN, SIGNAL =   1; EXPRESSED IN HELA, SIGNAL = 0.77; EXPRESSED IN PLACENTA, SIGNAL = 0.72; SWISSPROT HIT: P13627, EVALUE 1.40e-02; EST_HUMAN HIT: BI038627.1, EVALUE 0.00e+00
actcccacattcacctttgcattttctgccattaggggagatgacatcttcagatgatggtgagaatgtgcccgccagtgcggaaggcaaggaggagcctcccggggacagagaaacaaggcagaagatggagctatttgttaaggaaagctttgaggccaaggacgagctctgcccggaaaagccaagtggagaggagccgcctgtggaggctaaaagagaggatggaggtccagagccagaggggaccctcccagctgagaccctgctactgtcgtcacctgtggaggttaaaggagaggacggagatggagagccagaggggaccctcccagctgaggccccaccacccccgccacctgtggaggttaaaggagaggatggagatcaagagccagaggggaccctcccagctgagaccctgctactgtcaccgcctgtgaaggttaaaggagaggatggagatcgagagccagaggggaccctcccagctgaggccccaccaccaccgcccctgggagctgccagggaaggtaatgtgagcggagaaacacacacag

SEQ ID NO: 5019 - DNA, 537 bp, Homo sapiens
  MAP TO AC010613.5; EXPRESSED IN LUNG, SIGNAL = 1.2; EXPRESSED IN FETAL LIVER, SIGNAL = 0.55; EXPRESSED IN BRAIN, SIGNAL = 0.93; EXPRESSED IN BONE MARROW, SIGNAL = 0.89; EXPRESSED IN PLACENTA, SIGNAL = 0.84; EXPRESSED IN ADULT LIVER, SIGNAL = 0.75; NT HIT: U07563.1, EVALUE 2.00e+00; SWISSPROT HIT: P26451, EVALUE 1.70e+00; EST_HUMAN HIT: AW853277.1, EVALUE 4.80e-02
agctcgagaacatggctgacctgcacagggtgtcaaggccagtcaatgacagacctgaaatttagatcaatatgagtctgatgctgtgctctgtgttctttccacaacagtaacaacataagcataaataaaaaaaaaaatgttcaaagcagtctgagttcagggtcaaatgagtagtaaagttcagccaaatgagtagtactgtggaagttcagccctgaatgaaatcatttcaggctgtggtgaaaaatgaggcttcttggaggaagtggtaaactgcataatgagggatataaaattgcagaaaggcaagaggcatttgagaagggagattatacaataagaatgaagaatatcaagggatggggtaggaatgtgccagtctaatttgggaacagtgaatgagtccttccagttagaacacagccttagagaaaagtgggagaaaaaattccagagtaggttagaagtgaattacggattgccctcagatatcttgcttaggactctgaacttacccaatcagacaagggagaa

SEQ ID NO: 5020 - DNA, 562 bp, Homo sapiens
  MAP TO AC010285.4; EXPRESSED IN BONE MARROW, SIGNAL = 1.5; EXPRESSED IN PLACENTA, SIGNAL = 2.7; EXPRESSED IN HEART, SIGNAL = 2.9; EXPRESSED IN ADULT LIVER, SIGNAL = 3.2; EXPRESSED IN LUNG, SIGNAL = 0.78; EXPRESSED IN FETAL LIVER, SIGNAL = 1.9; EXPRESSED IN BRAIN, SIGNAL = 2.6; NT HIT: gi14733372, EVALUE 1.00e-38; EST_HUMAN HIT: AI379587.1, EVALUE 2.00e-38
cgggtctttcaaactgcttctttcctgcaggccaagtacccaaggcactggtcctgaccacaggcacggccgccggggcttccccagaagctagacatgccaggctccagatgtgtgtgatgaacgcaaagtgggctcttcccatcagcgatgaggatgctgacagccttttacactctaagactatactgctcctttgccacttgcattacactgctgattcattctaagcctgtggctaatgaaaacctctggatcttttctcaaacgggctgctcttgttgaataaggtgaattcccaatctgtgttactgactaaaaatatatgctcatgaaataaagtattttgctagatacgatcccatcaggatccgtatgaaactggtagaaagccagttctcaccaccttcatgaaaactgctccatgtgttttcctgggatcatctggcacatgcaatccaaaaacaatttgttacttactcattagcattcaagctagctgtggctctgatgatcatgtagcagagtgtgagggcactgaggaggccaaaactggcaataa

SEQ ID NO: 5021 - DNA, 597 bp, Homo sapiens
  MAP TO AC008546.5; EXPRESSED IN BONE MARROW, SIGNAL = 0.94; EXPRESSED IN HEART, SIGNAL = 1.8; EXPRESSED IN ADULT LIVER, SIGNAL = 1.2; EXPRESSED IN LUNG, SIGNAL = 0.54; EST_HUMAN HIT: AV730914.1, EVALUE 0.00e+00; NT HIT: AJ278581.1, EVALUE 0.00e+00; SWISSPROT HIT: P11269, EVALUE 3.00e-03
cctatcaggatcatctgaaaacttacccaggtctgccttgatctgctttaaatcagagagggagaaggggacatgtacctgggttgggccaaattcccctccccctacagcttgaaggggacataaccgatagcctgggggtttttgtggtcctttggagatttcttggcttatttccttctgggcaggggagatttgaggaggcttatcattaataggaaggggatctatagggagcctaagatacgggtgtaagctgagaggtcctcctgtgggatgtaaattgcaagctttgcatagttgtgtattttccttcaatgaaaagaaagcttggacataaggtatttcactccatttgccttccctcttacagaaaaggtcaaactgcaggatagtattgtaatttgtacttccctcaggtggccatttttccccatcagagagagaatattggggcccggctgtagggcagaaaaaaatgagccacctctttttcagggtttgtgggtcaaattggtcccaatggcttaggacgcatttcaagggtgagcctgttgatgcctgagtgtttcccatctgaaagccaaaactgcccat

SEQ ID NO: 5022 - DNA, 500 bp, Homo sapiens
  MAP TO AC002469.7; EXPRESSED IN HELA, SIGNAL = 1.5; EXPRESSED IN FETAL LIVER, SIGNAL =  22; EXPRESSED IN BRAIN, SIGNAL = 0.85; EXPRESSED IN BONE MARROW, SIGNAL = 0.41; EXPRESSED IN PLACENTA, SIGNAL = 0.57; EXPRESSED IN ADULT LIVER, SIGNAL =  26; EST_HUMAN HIT: BI522113.1, EVALUE 1.00e-109; NT HIT: M15656.1, EVALUE 0.00e+00; SWISSPROT HIT: P05062, EVALUE 1.00e-27
cccgaagaaaacaatgcttctccgtgttggaaagtcaagccccaaatgtgaacatcatcaagtagataagaggtggcagcatcttaccatggcccgcttcataaaagcctcctgggttgcctccttgtttgcagccttgccaccccaggcagccagtgcactggcctgcagggcccgtccataagagaaacttagtttccagggctttggtagagggcaaaggttgatagcattgaggttgagagtggcatcctcttcactcatgccaccagacaaaaagcagatgcctggtaggagagaagccatttcactctattagtcccaccttatataccctgcttgagaaagcaagcaatgaacctgccagaaaagtaatgtctcagtcttttctctgcttaatttgccttaaagcaaactgagaaatcagtttgcttttgctgaagctagttgggctagagataagtgctttaaatacgtaaggaaggcagtgaaatgttgaa

SEQ ID NO: 5023 - DNA, 597 bp, Homo sapiens
  MAP TO AC018557.5; EXPRESSED IN ADULT LIVER, SIGNAL = 1.9; EXPRESSED IN HEART, SIGNAL = 2.2; EXPRESSED IN PLACENTA, SIGNAL = 1.3; EXPRESSED IN LUNG, SIGNAL = 2.8; EXPRESSED IN BRAIN, SIGNAL = 2.1; EXPRESSED IN HELA, SIGNAL = 2.5; EXPRESSED IN BONE MARROW, SIGNAL = 1.7; EST_HUMAN HIT: BI464188.1, EVALUE 0.00e+00; NT HIT: gi15316865, EVALUE 2.00e-50; SWISSPROT HIT: Q20168, EVALUE 6.70e-01
ggtgaggcaaaacaaaggtgagtggcaaagtgaattatggaaggtttctggagctggcaccccgtgggcatttccccgaggccactgccggccacatccgcccagctaggtctcaccagctctccgctcaccagtctcaggatcttcaacattccagtgggcgagaaggagaaacgtttgaggctgtccctgaatttgtacgggactttggctcggccctccacgcgctctttgatcgccatctcatttaagagtttggattcagtgtgtgcagagggcgtggggggtgggagtgtgggctttgggggtgggcgtgtggtggctttccttgagggtgcggtgccctcactgccttggggacgtgcggcggctgcggactgcgcactgcgaattgagactgcggggtgcttccggggtgcggtcttcgctgagatgttgcgctgtgccttgggtacagaactcactacgctgccgctacttgccagggctgcggcagtctccggttgtttcaagttccctgaaggtgcctcggatgactcaggtttggcgtgttcaggatccatggtgggtccctagggcctggccgtctgaaccagt

SEQ ID NO: 5024 - DNA, 533 bp, Homo sapiens
  MAP TO AL121674.12; EXPRESSED IN FETAL LIVER, SIGNAL = 0.97; EXPRESSED IN BONE MARROW, SIGNAL = 0.97; EXPRESSED IN PLACENTA, SIGNAL = 0.79; EXPRESSED IN ADULT LIVER, SIGNAL = 0.9; EST_HUMAN HIT: BE784070.1, EVALUE 0.00e+00; SWISSPROT HIT: Q08696, EVALUE 5.00e+00; NT HIT: gi14779133, EVALUE 7.90e+00
aggcaagtgctcagagaagggagaaaggaacgtacctggccttcctggacttcgtcctggctgcagagtcagtgcagctcctcttctctttggcctccttggtgcccgaggcctcccggggcttccgtgccttctttgccccatctttttgcttcggctccttgtgctccttggccttcttcggctccttggcctttctgggttcctttggctctttcggttctcgtttcctctttggcttgggctctctgtccttgcttccctttgctgcaccctcttggtctcctggctcctttttcttccgtttcttcttcactccagtacctcctcctccactgtcctccatcccattatgggatgtcattttcctaggaaaaagggtagcagcttcctcttcagcagtatacaggtccttctgaggcagacagtgactagcaacatcttcaattttctcttcttgatcagtgctgcagtcaaatggggatggagatttgtagtcaaaattgacagaggcatcagacattggggagtga

SEQ ID NO: 5025 - DNA, 571 bp, Homo sapiens
  MAP TO AC003110.1; EXPRESSED IN ADULT LIVER, SIGNAL = 0.51; EXPRESSED IN PLACENTA, SIGNAL = 0.4; SWISSPROT HIT: P04929, EVALUE 7.00e-11; NT HIT: X13414.1, EVALUE 1.40e-01; EST_HUMAN HIT: T85142.1, EVALUE 3.00e-03
agctcatagctttgccttcggttgtggagcaagtgtgacttgtgtgtggcccaggccaggtatggttgtgtgtggcctgaccaggttgattgtgtatgtgattgtgtgtggcccattgtggctgtgcatggctgggtgtggttgtgcatggctgggtgtggttgtgtacggctgggtgtagttgtgcatggctggatgtcgttgtacatggctgagtgtggttgtgtatggctgggtgtggttgtgcatggctgggtgtggttgtacatggctgagtgtggttgtgtatggctgggtgtggttgtgcacgaccaagtgtgattgtgtgtggctgagtgtgattgtatatggccaggtttgcctgtgcatggttggtgaaacctgtgtgtggcccggtgtggttgtgcatgactgggtgtggttgtgtatggctgagtgtggttgtatatggctgggtgtggttgtgtatggctgagtgtggttttatatggctgggtgtggttgtgtatggctggatgtggttgtcattggctgggtgtggttgtgcatggctgggtgtagttgtgcatgg

SEQ ID NO: 5026 - DNA, 528 bp, Homo sapiens
  MAP TO AC009145.4; EXPRESSED IN BRAIN, SIGNAL = 1.4; EXPRESSED IN HELA, SIGNAL = 1.4; EXPRESSED IN BONE MARROW, SIGNAL = 0.82; EXPRESSED IN PLACENTA, SIGNAL = 1.5; EXPRESSED IN ADULT LIVER, SIGNAL = 1.5
atgccttcagcttaccttggcgccacagaaatgcaaggtgagagaaccgagcagccccaggaaaagcaaacactgaaccccaccgttgtctgtagggaagaatgtggatttcgaggagaacttggaaataaaggtggcaattcgcttgcaggatttaaacatcaggactttgtgctaagagacttggaggacccaacccagcacatgcaaccaagaggtctgcagatcctgcctagcaacagatggctcagaagaaatgaattgctagataaacatttaactgagagtttgacttcgtaagtgtggaaattaggtgaaacaaaaggagaatgattctgaggcattccaattagtcatctgtgatttctctggcaatgcgtgctgaacctcctactggtcctgacattctcaaagaaagaaattttggaaatccgtgaaaggaaatgtaaagtatctaagagaactttagtaacacagttaccgaaaaaagagagagagcatttgcaagggaaataggtcttggccaca

SEQ ID NO: 5027 - DNA, 592 bp, Homo sapiens
  MAP TO AC012315.4; EXPRESSED IN BONE MARROW, SIGNAL =   3; EXPRESSED IN PLACENTA, SIGNAL = 1.8; EXPRESSED IN ADULT LIVER, SIGNAL = 2.3; EXPRESSED IN BRAIN, SIGNAL = 2.7; EXPRESSED IN FETAL LIVER, SIGNAL = 2.2; EST_HUMAN HIT: AW512434.1, EVALUE 3.00e-90; SWISSPROT HIT: Q63189, EVALUE 1.90e+00; NT HIT: AL163280.2, EVALUE 6.00e-78
ctttgggcaagaagcagaagtccctatagtgactttatttactttattgttattgtcagcatttggaaaaaaaaatgtagagattgactattttatactatttaagtaattttttgttatattgattttacctaaacaagagtttattagaagtattttgttatacagcttataacaaataattgtacaaaaattagaaaaatcagatgaacaaatttttataagacttctcgtggttatagaatgactctaacaccttgtagtgtattttttaggattttgttcttagtgcatgtgttagtctgttttcatgctgctgataaagacatacctgagactgggaagaaaaagaggtttaattggatttacagttccacatggccggggaggcctcagaatcatggtgggaggtgaaagacacttcttacatggtggcggcaagagaaaatgaggaagatgcaaaagtggaaacccctgataaaaccatcagatcttgtgagacttattcaccaccacgagaatagtataggggaaacttcccccatgattcaaattatctcccaccgggtgtcccccacaacacatggaaatt

SEQ ID NO: 5028 - DNA, 546 bp, Homo sapiens
  MAP TO AF235098.1; EXPRESSED IN BONE MARROW, SIGNAL =   6; EXPRESSED IN ADULT LIVER, SIGNAL = 4.5; EXPRESSED IN PLACENTA, SIGNAL = 5.5; EXPRESSED IN HEART, SIGNAL = 5.9; EXPRESSED IN LUNG, SIGNAL = 3.1; EXPRESSED IN FETAL LIVER, SIGNAL =   5; EST_HUMAN HIT: H77552.1, EVALUE 1.00e-14; NT HIT: AF288742.1, EVALUE 1.00e-14; SWISSPROT HIT: P39188, EVALUE 1.00e-09
acacactgacactggcttgcatgtacccatggctacacagtctggagttaaaatgtagtacttgtagttaaaaggacctgaaatggtcttttctagtgtgcctcttcttcttcttcttcttcttcttgttcttcttcttcttcttcttcttcttcttcttcttcttcttcttcttcttcttcttcttcttcttcttcttcttctttttcagagacagggtttcattctgttgcacagggtggagtgcagtggtgtgatcatagctcactgcagtcttgaactcctgggctctagcaatcctctgcctcagcctcctgagtagctgagactacagtacacaccatcatgcccagctaatttttaaagttttttgctatgttgtccaggctgatcttgaactctcagcctcaagtgatcctcccaccttggcctgcccatctagtacaaccaactttcatcagtttctcttccagcatctccagtctcctgactacaaatcatgtaagggtatagctggtaatattctctttgaaaatgcagcttgca

SEQ ID NO: 5029 - DNA, 553 bp, Homo sapiens
  MAP TO AC010163.7; EXPRESSED IN BRAIN, SIGNAL = 1.5; EXPRESSED IN LUNG, SIGNAL = 1.5; EXPRESSED IN BONE MARROW, SIGNAL = 1.6; EXPRESSED IN PLACENTA, SIGNAL = 0.89; EXPRESSED IN ADULT LIVER, SIGNAL = 1.3; EST_HUMAN HIT: BI871127.1, EVALUE 3.10e+00; SWISSPROT HIT: P35569, EVALUE 1.40e+00
agagagctgcactggaggagcccaccaaggaaaacatctcaagaaggaggtaggatcctggcctgaatgctgcaaagacattaagaatttagatgaggatttggagacgtgcagtcgatgtgttcatcgggtccatggtgacctcggtgagagtgcgttcaattcaattgagtatgtgactgtgtaagcccgaatgcaatgtttaggagagaacgaaatgtgcagaattggatatggtaaacactttcagaaagcttggtcatgaaaggaagatgagaaggtggaagctgatgggagacagggcagcttgtgggtgtctctttcttctcctcctcctcctctttttcctacttctactccctctcttccttcttctcctcctctgcctcctctttcttctccttttcctccttctctttctccttctcctcttctcttgctcctttccttctgatttttcccttcttttctttttcctcctccttttcctcctttcccctctcctccttctttgtccccatcttctttcccttcctcgcctcctcctcattat

SEQ ID NO: 5030 - DNA, 549 bp, Homo sapiens
  MAP TO AL121776.19; EXPRESSED IN FETAL LIVER, SIGNAL = 0.84; EXPRESSED IN ADULT LIVER, SIGNAL = 0.9; SWISSPROT HIT: O00167, EVALUE 5.00e-13; NT HIT: gi14786191, EVALUE 7.00e-99; EST_HUMAN HIT: AW249252.1, EVALUE 1.00e-98
tggtgtctccttcaccttccaaacagcctccttgcacttgaatccttgccccggggtctgcttctgggaaaccaaaatgaagacagtttctgcccacagagagcttttattctaatggtgagacagagtggccaggctgaccaacggcccgagcccagaaaggcttcctcacatatgtccttggtttgtttttctcttcccaggactatccttcctaccccggcttcccccagagccagtacccccagtattacggctcatcctacaaccctccctacgtcccggccagcagcatctgcccttcgcccctctccacgtccacctacgtcctccaggaggcatctcacaacgtccccaaccagagttccgagtcacttgctggtaggtgcagtcactggtggggccattcatggctgtggtctgagagcttctatgaaggagggacccgcacatgggtcccaattgtaacaaacaggttacccaagggtcattcatggatgtggcctgagagcttctctgaaggagggacctggatatgggtcccagttg

SEQ ID NO: 5031 - DNA, 573 bp, Homo sapiens
  MAP TO AC022149.3; EXPRESSED IN BRAIN, SIGNAL = 1.2; EXPRESSED IN BONE MARROW, SIGNAL = 1.8; EXPRESSED IN PLACENTA, SIGNAL = 1.3; EXPRESSED IN ADULT LIVER, SIGNAL = 1.2; EXPRESSED IN HEART, SIGNAL = 1.7; EXPRESSED IN LUNG, SIGNAL =   2; SWISSPROT HIT: P29776, EVALUE 4.20e+00; NT HIT: gi14768139, EVALUE 1.00e-111; EST_HUMAN HIT: AW403498.1, EVALUE 6.00e-91
tgtcaaaaacgctgtcgttctaaactacctctttgagaatgcctcgttacctgggtatctcccatgtatatatgaaatatgaatatatgttaatgaacttctgtttgctttttctcttatctgtcttttgttacatgggtcccagctacgatctcagaagggtagcgggaaaattatatttttctcctctacagacccaaggacattttattaaggaatctagtgcagcattgctccatgagctcagtgtaccttggggcagaaagggcatcctctgagacactgtcagtaccttgggttcagttcgatcaatccccacgaggaagaggaggtgggccaggaagaggcagagcgagagctgcagatgcagtgaggtgctggtgttccggatggctttacacaggagaaaagtgagggccgccaggaggaggcacagcagagagacgctcagccccacgtaggtgatgacagtcagcacgggatcctcctcctgggaccgagaaaaaaagttcacagtgatgctttcctgcactgggattatggctccctccttgaactggggcatcctagaca

SEQ ID NO: 5032 - DNA, 560 bp, Homo sapiens
  MAP TO AC016626.4; EXPRESSED IN BRAIN, SIGNAL = 0.88; EXPRESSED IN LUNG, SIGNAL = 0.67; EXPRESSED IN PLACENTA, SIGNAL = 1.3; EXPRESSED IN ADULT LIVER, SIGNAL = 0.96; EXPRESSED IN HEART, SIGNAL = 1.4; SWISSPROT HIT: P08547, EVALUE 7.00e-13; NT HIT: AF055066.1, EVALUE 7.00e-22; EST_HUMAN HIT: BG720326.1, EVALUE 3.00e-71
tgcccaaagcgatttataggtttaatgcaatatttatcaaaatttcaatgtcattcttcacagaaatagaaaaaacaatttgaaaatttatatggaaccacaaaggatcctgaataactaaaggactcttgagcaataagaacaaagctgaaggcctcacaatctgacttcaaaacatattacaggaaaagaacaaaagaaggaagaagagggtagaggagaagtgcagcaagggtggagggaggtgcccacgctgggtcggaggagcaggaggagtatggagggaagactcctgggtggcatggagctcttgcacctctaggcactgcccagccctgtgtcagccagggctgaacccccacaggataaggaagcctgtgtgtgtaccaacaatcaaagctacatctgtgacacaacaggacactgctatgggcagtctcagtgttgtaactactactatgaacattggtggttctggctggcgtggaccatcaccatcatcctgagctgctgctgtgtctgccaccacagccaagccagccctcaagtccagcagtagc

SEQ ID NO: 5033 - DNA, 598 bp, Homo sapiens
  MAP TO AL023801.1; EXPRESSED IN LUNG, SIGNAL = 2.3; EXPRESSED IN FETAL LIVER, SIGNAL = 4.4; EXPRESSED IN PLACENTA, SIGNAL = 2.6; EXPRESSED IN BONE MARROW, SIGNAL = 2.4; EXPRESSED IN ADULT LIVER, SIGNAL = 2.6; EXPRESSED IN HEART, SIGNAL = 3.4; NT HIT: gi14779492, EVALUE 0.00e+00; EST_HUMAN HIT: AI214482.1, EVALUE 0.00e+00; SWISSPROT HIT: P08547, EVALUE 1.50e+00
tggcaaggctttctcacacaaagattatgtagtatgtaacagtcatcttaattttcttctatttttatggttgtattattctatttagtgtacatttcactctatctagtgtttatcctagagtaagatagtgagtagatgattacttttattttttccaaaatgtttagccagttatttcaacaccattaatcagatggttcatcattttcttggtttattcaagccttccttttttaccaaacaagtaatgattaaaatgaaacaatatttaaatgtttaacctttgacaatgttgataagccgaagctattttgtttcaacagaggtctcgttggagaatcaacaagccaaaaattccaaaaaggaacgtttgctaggttctgcatcatctgaagatatctggagaaactactccttggatgaaattgagaggaacttttgtctacaagtaagatgttttcctaagccacaattacctacagagtaaacacagcaaagtagacaatatggaaaactattaggtttacacattatttctaaaatttgtttcgatcctacctatgtcttctccaatactgagaccccctctacctcc

SEQ ID NO: 5034 - DNA, 512 bp, Homo sapiens
  MAP TO AF196972.1; EXPRESSED IN PLACENTA, SIGNAL = 0.76; EXPRESSED IN ADULT LIVER, SIGNAL = 0.83; EXPRESSED IN LUNG, SIGNAL = 1.7; EXPRESSED IN FETAL LIVER, SIGNAL =   1; EXPRESSED IN BRAIN, SIGNAL = 1.7; NT HIT: gi14759602, EVALUE 1.00e-115; EST_HUMAN HIT: BI910716.1, EVALUE 0.00e+00; SWISSPROT HIT: Q9UET6, EVALUE 1.00e-17
gcttcagtcagcccatcttctgtgtgagctgtcatgtgggtcagatgagcccagtttagtttgtgtggttctctccgccctacagaggtaggtggtagcccattcatctggttactgatactggccggcatcagtggactgtcggcaggtccttgagcaactggtgtgtgaaatgggacggacgtcaaaggacaagcgggatgtctactaccgcctggccaaggagaatggctggcgtgctcgcagcgccttcaaactgctacaactggataaggaattccaactcttccaaggtccctgactggtgggcaggtcactgggcggtgaggtgggcacaggaggtaaacaagtaggctgggtctgcagagctccctgtggtaggtgggctgactcagagggtctctggggcagggagacaggcaggaagataggcagaataccggagaggagttgggcacctgggcaatggagatatgtgggtgctccccaggggagaggggtgaattttgcaa

SEQ ID NO: 5035 - DNA, 583 bp, Homo sapiens
  MAP TO AL109767.3; EXPRESSED IN BRAIN, SIGNAL = 2.3; EXPRESSED IN HELA, SIGNAL = 2.4; EXPRESSED IN ADULT LIVER, SIGNAL = 2.3; EXPRESSED IN PLACENTA, SIGNAL = 2.5; EXPRESSED IN HEART, SIGNAL = 1.9; EXPRESSED IN FETAL LIVER, SIGNAL = 3.1; NT HIT: AF252284.1, EVALUE 3.60e-02; EST_HUMAN HIT: BG256699.1, EVALUE 5.30e-02; SWISSPROT HIT: P07387, EVALUE 8.50e-01
atatggagtgacgtcctggccccactctcaccttcttgagggtcttggtgctgccacctgaccgtgaggcctctgtgcagaaccggccttgtagggcgggaagaggtgggaggaggggtgactgactggcttgtgacttgtggtgggggttgcaggttgaaacaataagaatgaggagcggcatgaggacatggatgtggcaggaatgtaatcatcatctttttcctttatgtagtgagctgtccagatccaagtgctcattctgttagtctccagggaggtcttcgattgtctttggggacaagtgcttcctggctcttctgcctttgcctctgccccggcctggcagagccccttccttcactgtcttctagaatgctctggtccctccgtctccactttgacccgactctactgtctgtacctacagctcaactgagcttctcctgtgtgtcgggtctgggcctggccaactctgagccccaccctggctgccccctgcatccaccttattcacaagcctggctcttcttggcttccccatcccagatctcgtgggagtgctcccccaacttgtgaaatg

SEQ ID NO: 5036 - DNA, 534 bp, Homo sapiens
  MAP TO AC007096.3; EXPRESSED IN BRAIN, SIGNAL = 1.9; EXPRESSED IN PLACENTA, SIGNAL = 2.2; EXPRESSED IN HEART, SIGNAL = 3.4; EXPRESSED IN ADULT LIVER, SIGNAL = 1.9; EST_HUMAN HIT: BE874677.1, EVALUE 2.00e-97; NT HIT: AF106704.2, EVALUE 2.00e-96; SWISSPROT HIT: P42660, EVALUE 8.00e-03
ctcatgccagtggttttctgatttaattaaacttacttacctttttggatcttcccagcttcaatgtaaggggtgagaaataatggctgtcctgagtctcccttaggtggcatggaaacacttctgtatagggagcgaaacagcccatcacaggggccaggcatcaacaggaccagcgaaacaatcaccttccacatggcaccaaccatctctcagggtctaggataaaaacagcattccaaaaatgaatcataagagtaaatatttacctggcccttttacatgcaagaaattcatttattcacttaaaaaaaatattgtgtgtaaaggccctctgcaaggaccttggatagcaccataaataagcacacccaatccctgcttactcttaaattcaaaggctaatgggagactcttcaagggatttacagtgtcagtaatttttcaattactgattttttttttttaaacagagtcttgctctgttgctcaagctagagtacagtagcacagtcacgtctcactgttgccttg

SEQ ID NO: 5037 - DNA, 576 bp, Homo sapiens
  MAP TO AC004209.1; EXPRESSED IN ADULT LIVER, SIGNAL = 0.54; EXPRESSED IN PLACENTA, SIGNAL = 0.63; EST_HUMAN HIT: BG744340.1, EVALUE 1.00e-111; NT HIT: gi16174607, EVALUE 1.00e-111; SWISSPROT HIT: P36915, EVALUE 2.00e-34
gggttgactttcactgctccatcctcttatcaactctgtcctaggttgtgaatttcccgccagcactttatgagtatgtgactggagaacttggactggccctggtgctggttttgaacaaggtggatctggccccgccagctcttgtggttgcctggaagcattatttccatcaacactatccccagctccacgtcgtccttttcacctcttttcctcgggacccccgcaccccacaggaccctagtagtggtgagtgggcaatgagagagggcaacttgggagaggtgagttggcaggggacaaaggggagaacagagaggcttattgacaagggggcacctggtcttgggcctaagggtggtgggagagatgagaggcctaagcccgtgtgcccatccttttgtgccctctgatctcagtcttgaagaagagtcggaggcgggggagaggatggactcgggccctggggccagagcagttgctgagagcctgtgaagccatcactgtggggaaaggtatgtggcccttagaggagggctgtaggaggacatgggggagaccaaagatgcagaa

SEQ ID NO: 5038 - DNA, 542 bp, Homo sapiens
  MAP TO AC008983.6; EXPRESSED IN PLACENTA, SIGNAL = 0.76; EXPRESSED IN ADULT LIVER, SIGNAL = 0.77; EXPRESSED IN BRAIN, SIGNAL = 0.76; EXPRESSED IN BONE MARROW, SIGNAL = 0.67; NT HIT: gi14768148, EVALUE 0.00e+00; EST_HUMAN HIT: BF365485.1, EVALUE 4.00e-49; SWISSPROT HIT: P17141, EVALUE 3.00e-55
ttcgcatgtgactcttcagggttgaaagacgactcaagacctgaccgcaagtcgcgcactcatacagtttctcccctgtgtgtatcctcttgtgcacgttcagatgagtgctcgtccggaagggcttgccacactggttgcattcatatggtttctctctggtatgggttcgcaatgtgtcttcagtgaagagtgttccctgaaggctttcccacactggctgcattcaaagggcttctctccagtgtgagttctcacgtggctcctgagggatgatggctgattgaaggctttcccacaatctttacactcgtaggcttctctcctgtgtggtttctctggtgcaaaatcaggttaaagttcctcgtgaaggttttcccacactgactacattcaaatggcttctctccggtatgggttctcatgtgtcgccggagattcgaggaatatttgaaggcttgcccacattcttgacagtcaaagcacttctctgcagtatgagtcttctcatgcctgataaggtcagagctgtatctgaagga

SEQ ID NO: 5039 - DNA, 515 bp, Homo sapiens
  MAP TO AF241735.1; EXPRESSED IN HEART, SIGNAL = 3.5; EXPRESSED IN ADULT LIVER, SIGNAL = 1.5; EXPRESSED IN BRAIN, SIGNAL = 1.6; SWISSPROT HIT: O61363, EVALUE 4.80e+00
aaatgggcattgagttgagggctaaatgagatagttcatgcaaaaaggactcacaaggctgtctccttgtagatggggttaacgaacagaagttcccaggccactggctgcagggtgcgtttgtctcccaggtcttgcatggttcttggcagggatcaggcccagtaaatatttgctgaactggattacaccaatgccacaacagaggcctcactgtcaaaccatgctggggaagtagcagataaagctgtgagggccacggaaggttctcaaagggatcagggccaatagcatagaaagaggaaaaactgagtttaaaaagctcatactgcagtctgaagccccatggaggctgggaccagactcagaaggggacaaatgttcttgggtagattctgaaggacagatccccaaaatgttctgagcaacctttcagatcagtttcccaagcctggcaaattgggaaaaatctgatcaatgaagtggaagcagcagccacaaatgccacatgagag

SEQ ID NO: 5040 - DNA, 537 bp, Homo sapiens
  MAP TO AC010499.4; EXPRESSED IN FETAL LIVER, SIGNAL = 0.55; EXPRESSED IN ADULT LIVER, SIGNAL = 0.64; NT HIT: AL445565.1, EVALUE 8.00e+00; EST_HUMAN HIT: L25510.1, EVALUE 4.80e-02
catgaaacggacaaaagcactacatacagtcaagttccaggatgacattaaaattcattcagcctgtcacgtagctttaccatatccttccattgccccattttaaatacatttggatatatgtttttatttgtttaatttagaatgtaatagtaaggcttcattgtaaagggtttagttttaattaaaatttagaaaatcatttccagaaagaagtaatctaaaggacaatgctatctctaatactaaggaaaataactaggttgggtagagggccaaaaattcactttctccccagggggaggagcagagttttcttaggaagcttactggtcctgcctcttctggtttgatcaccttttcttccgccttctcctcggttgtccttcttctcttgttcagaatgccctgtactatcttctgtgcaggtctaggtctctgtagttgttcattggccgaagtagtttctttttcctcaaattccttctgtttgaaattccttattatagataatattggttctccatccttggttca

SEQ ID NO: 5041 - DNA, 590 bp, Homo sapiens
  MAP TO AC005576.1; EXPRESSED IN BRAIN, SIGNAL = 1.5; EXPRESSED IN BONE MARROW, SIGNAL = 1.3; EXPRESSED IN PLACENTA, SIGNAL = 1.1; EXPRESSED IN ADULT LIVER, SIGNAL = 1.3; EXPRESSED IN LUNG, SIGNAL = 1.9; SWISSPROT HIT: P03342, EVALUE 3.00e-03; NT HIT: AF280107.1, EVALUE 1.00e-54; EST_HUMAN HIT: BF739117.1, EVALUE 3.00e-71
gcctttttgagccacttgactaggcaggagactgtgtaatcttgcctagctatacctggggagtccgtctggtattgccaatgggaatcctctcggggaactgccctggtgccctcttggaagcctggctcatgaagccggtgggtatctgcgtaggactgggctagaaagtaaactctttcttgttcatctgaggagagggtagaggtcaggacgacctctccatttaaatggagtgactccatttaagtcactccaggttagattgtaggactgagttagatattggaattcctgtatatgtttagtggagtctgatgagaaagaccctaaacgctggctgatttgggaaaggtctgatagagaaaaggggacacgtaccctgactatgccttcagctccagccacctctgtaagaggaaattgttgggcaggtaggggagagctaattgctaaacgaaactgtaagccagaccaggtgtgaggaggggaggtaatggaagggttatagagtgggggagcagaggctgccgaagaattgggacctgattcagcctggcaaggtgcggccaggggagaaggagagaggt

SEQ ID NO: 5042 - DNA, 558 bp, Homo sapiens
  MAP TO AC019106.3; EXPRESSED IN BRAIN, SIGNAL = 1.4; EXPRESSED IN ADULT LIVER, SIGNAL = 1.4; NT HIT: M31757.1, EVALUE 5.30e-01; EST_HUMAN HIT: BF514201.1, EVALUE 5.00e-02; SWISSPROT HIT: P26846, EVALUE 6.90e+00
cgttcctgtatcaccctgtgtagaaataaaaaagaacacttaatcctcacttactctaccctgtatttttctccatagcatttctatattactgatatatctgatatatttttttgtacaattaattattgtttcacctaactagaatgttcatagagcaggaacattttctgttttgatcactgatgagtccctaacatctagccaagtttttggcacatcatagttgctcaataatatctgttcaatgaatatgaatttagtcactattttcacgcatacaccgatgcctactgttgtctggtcttcccctcgcagccgtgtactccgcctctcttctttctcaccacatcccacaattcccatcccactagcagctttcttcacaacaatgaggttacatacttgattaaggaaccatctcttatggatctttctcaggtgcttagtgtgacaccatgtgtggctgtgccctcttagaggtgagagctgagctcctgatttggcttctttatgcccttccttcatgaaggacagtggttctcagagtgtcccctg

SEQ ID NO: 5043 - DNA, 546 bp, Homo sapiens
  MAP TO AC008994.3; EXPRESSED IN LUNG, SIGNAL = 3.1; EXPRESSED IN BRAIN, SIGNAL = 5.8; EXPRESSED IN BONE MARROW, SIGNAL = 4.3; EXPRESSED IN PLACENTA, SIGNAL = 7.1; EXPRESSED IN HEART, SIGNAL = 6.4; EXPRESSED IN ADULT LIVER, SIGNAL = 6.2; NT HIT: U55927.1, EVALUE 1.30e-01; EST_HUMAN HIT: BI818467.1, EVALUE 7.70e-01; SWISSPROT HIT: P00521, EVALUE 1.70e+00
cccctacctactgcctttccactctaggtctcaccttgattgtcctggcatgggggccttccatggcacagaccagggcaatgctgtggtccctggctcagggactgtctttgccccacggggaatgctgtgagggggtgcctggagtcccagcgttacgcattgaccagcgcatggtgagtgctcagtgagggttcctggaacaaacggatgaggtaaaggtggaggggcaggaggaaggaggtggtgaagggaggaggggaagaagaggagaggaaaaggtggtggagaggattgttcctgagcccagctctgggttctgcctgttcccgaacgccaacctttgctgcactgctcccagtgggtgccaactcagaatgcctgtttaagtcactccacaaaactcagcttctcaatctgttttatatttgcaagggccagatccacattccttttttaaaagtcaagcttctgagacagtcatttatattcacagtgattctcctttcaaagactgctttgcatggggcgtgtagagtcatggat

SEQ ID NO: 5044 - DNA, 574 bp, Homo sapiens
  MAP TO AC004791.1; EXPRESSED IN ADULT LIVER, SIGNAL = 1.8; EXPRESSED IN HEART, SIGNAL = 1.9; EXPRESSED IN HELA, SIGNAL = 0.77; EXPRESSED IN BRAIN, SIGNAL = 0.85; EXPRESSED IN PLACENTA, SIGNAL = 4.1; NT HIT: AB002461.1, EVALUE 5.00e-32; EST_HUMAN HIT: AV645396.1, EVALUE 2.00e-32; SWISSPROT HIT: P78329, EVALUE 2.00e-10
attgccccttaaatccatcctaaaacctggtccctctcctgctcaagcacctcccatagctccttattgcccacatgataaagtccattgttgggctctgaacctgcgatccatgtggtcagccagagaggcagtcagggtcttggcttcagagaccctgccccacttccacccacacacaccctggatccttgcagtccccaagcagcccctgctggctttagatgagactcaggcagaggtgacaaacattttattcctgggaatctgcaaaggtgggtgggtggggttagggtggatccctgcaggcctcagctcagtggctccaccagcagctaaagtccgccctccgcatgcatgatcagctctggcttcctgccgggctccatgtggtgccgcaggaagcggaagcccagcagcgtgagtgccaggaccaccttcatctcggccacggcgaacacctgccccatgcagatcctgcgggcagatgagaggactctgactgtgcccaagacccgcatcctggccccatcctggcaccatcccccaaaccaggcacagctctgagaggatt

SEQ ID NO: 5045 - DNA, 510 bp, Homo sapiens
  MAP TO AC005327.1; EXPRESSED IN ADULT LIVER, SIGNAL = 2.5; EXPRESSED IN LUNG, SIGNAL = 4.6; EXPRESSED IN BRAIN, SIGNAL = 1.9; EXPRESSED IN BONE MARROW, SIGNAL = 2.8; EXPRESSED IN PLACENTA, SIGNAL = 1.5; NT HIT: AF114491.1, EVALUE 1.00e-38; EST_HUMAN HIT: BG720310.1, EVALUE 2.00e-38; SWISSPROT HIT: P47974, EVALUE 5.50e-01
ggtaccctgcagtggagaagtcctggcctctattttccccgccccccgcccatgtctttctatgcgctatattaagagcagtggctctggggtcctagcactcactttttgcccctttccttcccccgtgcctcagtttcccctcttatggagcagatgccaaactggctccagtagaaagcttgaggatccctccgggcagggtagcaggctccgagagcaccctggagttcctgccggggtgtgggggtgcccaagcaccaccagcccctctcgccgtgtgcccgtgagtgcctgcttgaccatgtggctttctccatcgccggccccacagacaccagcggcgcctcccgtttctcagacgcatccaaggggtcccgctggagcttcctcgctaccacccccagcggggccccaaagtacttaccgagaaagacgagaaagacgcggcctcccatggttccagctgagctgccggcaggagcagcaggggaaagagtgagtgggaca

SEQ ID NO: 5046 - DNA, 582 bp, Homo sapiens
  MAP TO AC008795.5; EXPRESSED IN BONE MARROW, SIGNAL = 1.3; EXPRESSED IN HEART, SIGNAL = 2.6; EXPRESSED IN ADULT LIVER, SIGNAL = 1.1; EST_HUMAN HIT: BE078192.1, EVALUE 0.00e+00; NT HIT: AY052369.1, EVALUE 1.40e-01; SWISSPROT HIT: P36140, EVALUE 4.30e+00
gcttctcctttttatttcccgaaggtatataactatttggcaacataacataaaaagctagtagtagtattatatttattttgtaacggcacatatgttttattacctagaattatgatgacaatttcaatgtaaatggacctggagaaggagtaaaggttgatccagaagatactaacttaaatcaagacagtgccaaagaattggaagatagtccccaggaaaatgtcagtgtcacagagatcattaaaccatgtgatgatccaaaaagtgaagctaaaaggtaagtcaaagttgcatattatttgtaaattactgaatattgatagtaaggatgtagcttttcatatatcaaataaaatcttctttcccatgactgaccaggtaatttagatgtatctgtacatatttatgtatagatacacacacacatatgtatacagatgaagagcgttgagaagaggatgctagaggaatgtgcccacacacatctcagcagcatggccaaaatcagaaagatgtcactttgatccagttcttgtttaccttatcctgctgtggcgctgattttgtcgtggatca

SEQ ID NO: 5047 - DNA, 522 bp, Homo sapiens
  MAP TO AC004181.1; EXPRESSED IN PLACENTA, SIGNAL = 0.73; EXPRESSED IN ADULT LIVER, SIGNAL = 1.1; EXPRESSED IN HEART, SIGNAL = 1.5; EXPRESSED IN FETAL LIVER, SIGNAL = 1.2; EXPRESSED IN BRAIN, SIGNAL = 1.2; EST_HUMAN HIT: AU143330.1, EVALUE 1.00e-124; NT HIT: gi14782292, EVALUE 1.00e-124; SWISSPROT HIT: O62732, EVALUE 5.60e-01
ctgaccaggctgagaaggactcaggttcctgggtttcatgggaggcatcacctgtttgggagggtgggatgggggtagttggagagaggctgtgagaaggtgatgggccccaagaagcagggaagcacagaggagggggcagaggagcctagtgtgacgcattcatgcagatggaaagcagccagtggggaagggcagctgtggatagcagtggacttctcaccttcaaacctccccatgacttcctgccactcgtcctccagctcaccctggagcttctgtctccattcccgctccttggaggcatcatcttcttcctcctcttcagcagaatcccaggggggtccccagcccaaaatttggccaggggtctccccatccttattctttattcccatggcggagggacagcggcttagcagcgggaggaagaaatcggtgtaggctgttggtgggagagcagggagcagaagttagctgggactcccactcctcggcagagctgccatcttgaatcctgct

SEQ ID NO: 5048 - DNA, 586 bp, Homo sapiens
  MAP TO AC022336.12; EXPRESSED IN BONE MARROW, SIGNAL = 2.2; EXPRESSED IN ADULT LIVER, SIGNAL = 3.3; EXPRESSED IN PLACENTA, SIGNAL = 4.5; EXPRESSED IN BRAIN, SIGNAL = 4.7; SWISSPROT HIT: P18084, EVALUE 3.00e-27; NT HIT: J05633.1, EVALUE 4.00e-91; EST_HUMAN HIT: BF930285.1, EVALUE 6.00e-91
cttcagagtggtcaggagccacatgctggggcactcaaagactcctgcaggaagtaccaacacccactgacgctctctaccttgacctccccatgcagggacaggaccagaaaggaaagttaccttgcagacggctgcctggagtactgcatcaaagcccccctcaggggcatctcggttccgggacaccctctgtttccgaacttcctcattgaagctgtccactctgtctgtgagaggcagcagatggcggaacccaaaggaggggacgcaatttggaaacaacttgtaactagagaggaagaagagaagagtcacttttccatcattgtctgtaaatcttaaccaagtgttctgagcattcactgagtgccttgagaggcaccaataactatttacccagcacctaccacatgccccaggacaggcacagcagagagagcaaagataaataacatagttcctgttctccaaacatcagccctaaactgcaggcaaggcagtatatgccaagttataaatgaatggtatggacaaattgttcaaaggaaacagagataatagtaggctactgtggttggaggaa

SEQ ID NO: 5049 - DNA, 513 bp, Homo sapiens
  MAP TO AC009482.4; EXPRESSED IN HELA, SIGNAL = 1.3; EXPRESSED IN PLACENTA, SIGNAL = 1.4; EXPRESSED IN HEART, SIGNAL = 2.1; EXPRESSED IN ADULT LIVER, SIGNAL = 0.74; EXPRESSED IN FETAL LIVER, SIGNAL = 3.9; EXPRESSED IN LUNG, SIGNAL = 1.2; SWISSPROT HIT: P20315, EVALUE 1.10e-01; NT HIT: AF289666.1, EVALUE 4.90e-01
ggaaagacctattggagggcaccttctctcagtacctggggcccccttcttctcctcctgggggcaccattatggtctgctcgttcataaccccttcactcagttcaatcgctatttcgccagacttcagatgtactaaggcagtcaattcactctcatgagatgaaagcatctgtatttgaacaggctgagataccaagtttctttctttcattttaaagttccaagcagaattattatgcccatcacaggatgaccagtatggcctattaggtaagaaatatgatcccatttctaatatcctatttgcatattttcttttccaaaaggtgctttttgcacaggtcgctggcccctgaagtatgtgtctcagggcttataaggggctgatttccctctaaaagtgcttcaccctccagttggagtcaggcatgtctataggagcttgaaggctgtgttctagttctgctgaaaagacagtactagcaaaaaacacctttgtgttttccccat

SEQ ID NO: 5050 - DNA, 518 bp, Homo sapiens
  MAP TO AC011525.4; EXPRESSED IN ADULT LIVER, SIGNAL =   1; EXPRESSED IN HEART, SIGNAL = 1.1; EXPRESSED IN FETAL LIVER, SIGNAL = 0.95; EXPRESSED IN HELA, SIGNAL = 0.76; EST_HUMAN HIT: BF572330.1, EVALUE 4.60e-02; NT HIT: gi16166716, EVALUE 4.90e-01; SWISSPROT HIT: P34340, EVALUE 8.30e-02
gcaccatgataaacatgcccgaggcctcgcagggagtggggtctaggatattctcaataccctgcagcctctttgccaccaagaaaggaagagagatattaagaactaagaacggggcgctgttctcccacttccaccacctctatccatcaccatctgacaaaggctccagcacacgcttcgagaaaaatattgagaagaaaaagaacctagaaacagggcaatttggagaggccttcggggagccaggggtgcccaagcggcccactcgccagctgcaattaacaagaggacttgtcagggaagagggggaagctgggcgtgggatttccaggacacaactcacaggccatcagccggagagagcatcctgggggctgctggctggtcctctgccctctcccggctccagccctcctcagaccagtgggttatgcacacagacagctgcttgccaatgaaggaaacacactttatttccagcttaagaattcacaccatcacttgggcagttgcta

SEQ ID NO: 5051 - DNA, 571 bp, Homo sapiens
  MAP TO AC006127.1; EXPRESSED IN BRAIN, SIGNAL = 1.9; EXPRESSED IN HELA, SIGNAL = 4.3; EXPRESSED IN BONE MARROW, SIGNAL = 1.5; EXPRESSED IN PLACENTA, SIGNAL = 1.6; EXPRESSED IN HEART, SIGNAL = 2.2; EXPRESSED IN ADULT LIVER, SIGNAL = 1.1; EXPRESSED IN LUNG, SIGNAL = 2.8; EXPRESSED IN FETAL LIVER, SIGNAL = 2.1; EST_HUMAN HIT: BI768577.1, EVALUE 0.00e+00; NT HIT: AF254822.1, EVALUE 0.00e+00; SWISSPROT HIT: P51532, EVALUE 1.00e-45
ttgcaagaggctacgttgtgtggctccaactcggtgagtcagccccggggcaggacgtcaggcctgtgctctccacccagctgcgctcttccacctggagccttcctggctgctgggcgcagagtgggagattctccccatgtgccgggccacctgctgccccctgccctgattgcccactctggggcccgcagatccgttggaagtacatgattgtggacgaaggtcaccgcatgaagaaccaccactgcaagctgacgcaggtgctcaacacgcactatgtggcaccccgccgcctgctgctgacgggcacaccgctgcagaacaagcttcccgagctctgggcgctgctcaacttcctgctgcccaccatcttcaagagctgcagcaccttcgagcagtggtttaacgcaccctttgccatgaccggggaaaaggtgggtttgcccagctgtgcccatgctgacggttccaggtgcggctggctttgctggttggaacgtgttgagcaccagctacagctggctgggcctgtgctgggtgcctggtgagagtctgcatctgcatggag

SEQ ID NO: 5052 - DNA, 546 bp, Homo sapiens
  MAP TO AC010646.4; EXPRESSED IN ADULT LIVER, SIGNAL = 1.3; EST_HUMAN HIT: W26021.1, EVALUE 0.00e+00; NT HIT: gi14785839, EVALUE 4.00e-88; SWISSPROT HIT: P49918, EVALUE 1.80e-02
gcctcacagaagtctcaggggtgcaagaccaagctgtgggatgcaagactcaccattcgcttcatctcaaactccctccaaacccgggctgcaacttgggcctccttctgcaaggggaggagtagaaagggggtttagggagagttgaattcaagaagggatgaagaaactgaggctcagacagactaaatgcccatctagtggggacttcaagggctgaccttagccatgtgtcacggcgcccagccaaccgagaggagaaagagtcctggaaatctggacccagtgggtgtcccagaggcttgggtcgggccactcagaagggctgcggggcagggctttctccctagtgctgacctggctttggggtgggggcagggagctcagcagggcctccagctgcctgagctttgcctgtgcacaccccacctcgtgctggagctccaagaactctccgtactggtcctggaacactgcgacatagcggctccgttccctctcactgctcactggcgggtacttactaccaggttgaagagggtcaga

SEQ ID NO: 5053 - DNA, 565 bp, Homo sapiens
  MAP TO AL121886.22; EXPRESSED IN FETAL LIVER, SIGNAL = 0.78; EXPRESSED IN BONE MARROW, SIGNAL = 1.1; EXPRESSED IN ADULT LIVER, SIGNAL = 0.94; EXPRESSED IN BRAIN, SIGNAL = 0.84; EST_HUMAN HIT: AA237086.1, EVALUE 4.00e-83; NT HIT: gi13653683, EVALUE 2.00e-83; SWISSPROT HIT: Q14624, EVALUE 1.80e+00
tgctgtgctaaaaggaaccctcttgtggctttcagatttctgactacatgatgctgccctacacagccaccctatcaaagcggaatcgagagtgtctccaggagagtgatgagatcccaagggactttaccaccctcttcgacctgtccatcttccagctggataccacctccttccacagcgtcatcgagtcagtacctgtgggcctctgagccacactgcactccattctgagtgtttggtttggaaacatgaacctgggaacgggaattagggtcacagtaaatgtggcatgcagaacatgttctcagatctatgatgaggtcaacaaagaaactgggctgggcatgaggggttgatgtagaggaactgccagaggttattagcccctgcgtgttccagattctggaccaggcatttagcctgaccagcttgtttcattttgccccagacttctggttttagcacagagagtcccaagtcccaggaaaatggagtcccaagtccctcagtaaatggagatggtggtcacctcatttctctctgggtatctgggcaactggta

SEQ ID NO: 5054 - DNA, 552 bp, Homo sapiens
  MAP TO AC010203.13; EXPRESSED IN HEART, SIGNAL =   2; EXPRESSED IN ADULT LIVER, SIGNAL = 1.9; EXPRESSED IN BRAIN, SIGNAL = 1.9; EXPRESSED IN BONE MARROW, SIGNAL = 1.6; EXPRESSED IN PLACENTA, SIGNAL = 1.9; SWISSPROT HIT: P55159, EVALUE 2.30e+00; EST_HUMAN HIT: AJ239404.1, EVALUE 6.00e-51; NT HIT: gi14754096, EVALUE 1.00e-105
tgttctcagggaagatttagaaccatccaattaaaaatttttaaaaaacatcttgtctccacagttccatctcccaacctctatagccagctgaatgcactacagtttactgtggatgaaagaagcattctatggttaaatcaatttctgttggatttaaaacagagtcttaatcagttcatggctgtgtacaagttgaatgacaattcaaaatctgacgagcatgttgatgttcgagttgatggcttaatgctaaaggtatcatacaaacaagtagtagtaatgatttaattttgttctttttattttatgatttgtgcgtatatgtatgttacattgattattaattcatgttatgttttttaaaaagattctcttcttagtggtcatgtaagtcccctttactcaatttaataagatttgaggggaagagttagtgttttacgtcttaataggaaagtagtattttgggggaaaggtcaagaaaaagaatttctgagctaagtcatgttcttttatcttcaagatgtatggatttgccagttggatgag

SEQ ID NO: 5055 - DNA, 531 bp, Homo sapiens
  MAP TO AL031590.2; EXPRESSED IN BRAIN, SIGNAL = 1.6; EXPRESSED IN LUNG, SIGNAL = 1.5; EXPRESSED IN HELA, SIGNAL = 1.6; EXPRESSED IN BONE MARROW, SIGNAL = 1.6; EXPRESSED IN PLACENTA, SIGNAL = 1.4; EXPRESSED IN HEART, SIGNAL = 1.9; EXPRESSED IN ADULT LIVER, SIGNAL = 1.4; SWISSPROT HIT: Q9NQX5, EVALUE 2.20e+00; EST_HUMAN HIT: BI008318.1, EVALUE 4.80e-02
ttattttggggtgccttacgggggtggtgccccaggggaggggacgtgggggtgctcagctgccttcttctagtccacgtccccctcccaggttcctccccacccccaccccgtcctccctgcccgagttctgggaggagggaaggaagcctgccaagccagggtataaataacccaggtggttactcagctcctgagaacatgataacatgagtcatgacgtgaaatcaacaggagcagcgagcgcccgggccgccgccccggcagggcagtgggctgcagggagcgaccgcgaggggccgggactgcagtgggcagggcccaggctgatgggtgaagctgctgccctgtgcctggtcccaggcaggcctcttcccagctcagacccttggtttactcatctggcatacacggggtgggggctgccttccttccccaggtcctcctgcagctggagagaggaaaggagggcgggggtgagctctgaacatccctggggcctttgcctgtgcctgacacacagtggtggac

SEQ ID NO: 5056 - DNA, 529 bp, Homo sapiens
  MAP TO AC009509.7; EXPRESSED IN BONE MARROW, SIGNAL = 1.6; EXPRESSED IN PLACENTA, SIGNAL = 2.3; EXPRESSED IN ADULT LIVER, SIGNAL = 2.2; EXPRESSED IN FETAL LIVER, SIGNAL = 1.5; EXPRESSED IN LUNG, SIGNAL =   2; EXPRESSED IN BRAIN, SIGNAL = 1.9; EXPRESSED IN HELA, SIGNAL = 2.2; EST_HUMAN HIT: AI051948.1, EVALUE 1.00e-102; NT HIT: gi4505986, EVALUE 1.00e-102
ctggatttcaggaccagctctatcactcactaacttgggagaaatggagaaaagatatgtaaattaaagatcaaagtccatattgtgtctacctcaccgggctgttgagaggatcattggagataacctaagagaaagctttgcaaattataaagcacaatacaaacatgtatgatttgtggtgacttttgacaagcttttttttttttctttaaacaggttctagagcctcgttttaacgtagaaacaatggctcagttattgaacatcccacccaataagactttgctgcgaagacatttggccactcatttcaaccttctgattggggctgaggcacagcaccagaagcgagatgccatggagctgccggattatgtacttctaacagctactgccaaagtgaaggttggttcaggctcatacggtttaataattgcttggcgcaaaggcaacgttttgtcggttacctggttattctgttttctggggtttactaagttttgtgggtgggttccttaccagcaga

SEQ ID NO: 5057 - DNA, 574 bp, Homo sapiens
  MAP TO AC008624.5; EXPRESSED IN HELA, SIGNAL = 0.5; EXPRESSED IN PLACENTA, SIGNAL = 0.51; EXPRESSED IN ADULT LIVER, SIGNAL = 0.72; EXPRESSED IN FETAL LIVER, SIGNAL = 0.49; NT HIT: AY028080.1, EVALUE 1.40e-01; SWISSPROT HIT: Q04833, EVALUE 2.80e-01
aaaagatgttcccatgtggctatcattcaaggctttatttgtataaactgttagagcttccacatgccaaataacatatttgatgcccaactgaaaaataaaaatagaggccatacgattacaccaatggaaaacagattaggcccagtgggacttcaaatgaaagagatttttaggctttgtaagaatagcaactatttggccttatgcccatgtataaacaaagaatatcttcctgaccatccagggagtaaccaaggccataacttggtgccacatatccaagaagttttgtttgaggccaaccaatatgtttctggatgcattgctcattctgtaccatgccagtcagtacttggtaatattttcccatataaacatcagtctcttgatatccatttcatattccttgtgctatttggccaagtatatttagaatgattcttttgttcccaacatggtggtgggtggggggacaactttactaagctggccaaaagacggagttagccaaataaacccatcctataattgggtcctgacatcacagtaatgggtcgttttgtcctttcaa

SEQ ID NO: 5058 - DNA, 575 bp, Homo sapiens
  MAP TO AC005789.1; EXPRESSED IN LUNG, SIGNAL = 5.7; EXPRESSED IN FETAL LIVER, SIGNAL = 3.1; EXPRESSED IN BRAIN, SIGNAL = 5.4; EXPRESSED IN BONE MARROW, SIGNAL =   5; EXPRESSED IN PLACENTA, SIGNAL = 4.4; EXPRESSED IN HEART, SIGNAL =   7; EXPRESSED IN ADULT LIVER, SIGNAL = 4.7; NT HIT: AF119570.1, EVALUE 8.60e+00; SWISSPROT HIT: P70460, EVALUE 3.30e-02; EST_HUMAN HIT: D80468.1, EVALUE 8.00e-75
ctgaccctgctttccttctgcccctcagacaaccttggagtgtacactgaagccaggcttggtttacaacaaggtgaatcccatctttcaccactggagcctgggtgactgcaagtttggactgacgtttcagagccctgcagaggctgatgagttccagaagagcctgctggctgcgctggccgcactgggtcgaggtgagcagcccaggtgatgtgcactgtgggctggcctgggagcgggaggagaagctgggctcaaggaactcactctctgcctctctccctgccccaggctcactcaccccctcctcctcctcctcctcctcctctccttcccaggatactgcagagaccccctgccctctgacggtgagtgtccaggatgcctctctgctgggggagggtaggggttttgtttttattctatgaacattcttgagcacctactgtgtagcaggcaccatgccacacaccgggtacacaaaattgggccggaactatgagtgtcaattcaatcccagttattctagtctttctgccctgtcatgattcacacgttcattcaagggtcct

SEQ ID NO: 5059 - DNA, 513 bp, Homo sapiens
  MAP TO AC009004.5; EXPRESSED IN PLACENTA, SIGNAL = 1.7; EXPRESSED IN ADULT LIVER, SIGNAL = 1.5; EXPRESSED IN FETAL LIVER, SIGNAL = 2.8; NT HIT: D85429.1, EVALUE 0.00e+00; SWISSPROT HIT: P25685, EVALUE 3.00e-39; EST_HUMAN HIT: BI871086.1, EVALUE 0.00e+00
gcagactggaatgccttttcctgctgttcccaccacctgatgccctatagctcgaaaaaccactgaagtctagtgtgcgactttgaaagattgtaatatatgctctggaaaacattcagcagtacgaaagccctccctgggccctcccaccctctcatggtccacaactggtagaaaggtccagaaatccttgagctctggaaaggtccctggtcagtccttggggagctcagatagctatattggaagaacctgctcaagtacggttcttgatgtctggggaatcctttcggggaagatcacttcaaactcaataatgaggtccccacgtttctcgggtgttttggggagggggaggccttctccaggaacttttcgccgcatgccaggcctgataacatctttgaatacgacgggtatcgtcctgccgtccagagtggggacgttcactgtgcagccacacagagccttgaaaagcaaaaggacagcattagatggaagctggctcaagag

SEQ ID NO: 5060 - DNA, 538 bp, Homo sapiens
  MAP TO AC004753.1; EXPRESSED IN PLACENTA, SIGNAL = 0.64; EXPRESSED IN ADULT LIVER, SIGNAL =   1; EXPRESSED IN HEART, SIGNAL = 0.95; EXPRESSED IN HELA, SIGNAL = 0.93; EST_HUMAN HIT: BF237841.1, EVALUE 1.20e-02; NT HIT: AJ132478.2, EVALUE 1.30e-01; SWISSPROT HIT: P04278, EVALUE 8.60e+00
actcacaggtaggcagacggccgcgcggagagcaccaaggggcagaaggatgctgcttgggggtggggaaggtggcgacgcaatgaaaacagatgaaggacaaggagaaaaaaaatcaagtgctgccagacactggcacaaagctggaagggaggtcacatctatcgagggggaggagggcaacacaggaggagaagagacagggaaaccgcctctccggtgccttccacagagggtccattgcaagcaagtggagaatcagccacatgccatgtactacgtggcaggggtggcagcccgagccctgagatcggagagcctatcccatgtgacgcatgtcagccacacatcacccaggcctgcgatgaaggacaagcgcacgctccgctctgatgacacgcgcagctggcacggacccaggagggatcatggacgtgaggagacgtcagtgtccaaagagggcccatcagcccagagaaagttgacacagaatcatgaaacataatctacttaggggacagctcactctcagcaccag

SEQ ID NO: 5061 - DNA, 566 bp, Homo sapiens
  MAP TO AC004191.1; EXPRESSED IN ADULT LIVER, SIGNAL = 2.1; EXPRESSED IN LUNG, SIGNAL = 1.8; EXPRESSED IN BRAIN, SIGNAL =   3; EXPRESSED IN PLACENTA, SIGNAL = 2.5; EXPRESSED IN BONE MARROW, SIGNAL = 1.7; EST_HUMAN HIT: AU124571.1, EVALUE 0.00e+00; NT HIT: AL163227.2, EVALUE 1.00e-106; SWISSPROT HIT: Q01668, EVALUE 7.20e-02
tttcccccatactgttctcgtggtagtgaataagtctcatgagatctgatggttttatcaggggtttctgcttttgcatcttcctcattttctcttgttaccgccatgtaagaagtgcctttcacctcccgccatgattctgaggcctccccaaccatgtggaattctaagtccagttaaacctctttttcatctcagtcttgggtatttctttatgagcagcatgaaaacgcactaatacagtaaattagtaccagtagagtgggtgctactgaaaagacacccaaaaatgtggaattgactttggaactgggtattaggcagaggttggaacagtttggagggctcagaacaagacagaaaaatgtgggaaagtttggaacctcctaaagacttgttgaatgcctttgacaaaaatgctgatggtgatatgaacaataaggtccaggctgaggtggtctcagatggagatgaggaacttgttgggaactggagcaaaggtgactcttgttacgttttagcaaagagactggtggcattttgcccctgccctagagatctgtggc

SEQ ID NO: 5062 - DNA, 565 bp, Homo sapiens
  MAP TO AC010238.4; EXPRESSED IN BRAIN, SIGNAL = 1.7; EXPRESSED IN HELA, SIGNAL = 2.1; EXPRESSED IN BONE MARROW, SIGNAL = 1.5; EXPRESSED IN PLACENTA, SIGNAL =   2; EXPRESSED IN HEART, SIGNAL = 1.6; EXPRESSED IN ADULT LIVER, SIGNAL =   2; EST_HUMAN HIT: AU148569.1, EVALUE 7.90e-01; NT HIT: M16988.1, EVALUE 5.40e-01; SWISSPROT HIT: P01047, EVALUE 1.10e+00
acagaggggtcatttgcttgttggaaacatctctaacagagctgttaatccggaaatgtgcgtcctgcagtcagctggactttaggtagaacattttccctgtcttattaagcagaaattaaacacaggtataaatgctgctgaaaatgcagctctattttctggacccaccacatgcagatcacgtggaactgccaagccttgatgtggctcccctgagatagaagaggctgttctgtggccacgaggtcttcacagctcattgtgacagggggcacccaggggaaagttggggcagcttggctcttccagtgggagcaggctgacagcccaggtatgggggaggaaggatcctgccgctgaactctacacccagggctcgggatgtgttgaccccttcttcttgcagcttggagaaagttgccacactgtctgggggcagtttggaacctgatgcaggtaagtgggcaatatacagtttttttgagctgagcatctagaactttctctgtatgaaaaattcaatctgtacaaaatttggggcaggtgatccatgggaaaacat

SEQ ID NO: 5063 - DNA, 534 bp, Homo sapiens
  MAP TO AC002083.1; EXPRESSED IN ADULT LIVER, SIGNAL = 0.94; EXPRESSED IN PLACENTA, SIGNAL = 0.99; SWISSPROT HIT: O00222, EVALUE 3.00e-22; EST_HUMAN HIT: BF339228.1, EVALUE 1.90e-01; NT HIT: gi14753097, EVALUE 5.00e-72
agtcgattccacaccacctccaacacacagacatacaaaaaatgtacaaagattacaacaaatgactctttcataaaagggcaaaatttatctaagggtatagtcaactgcaggaaaaaaatcagatcattcattaaattcttacagatatcaggagatttctctaaagaggctgaagaatgtccataacatttttaaattgaagagagaatcaagtcatacattttctaagagtttatttatggggaaaacctattctagcaaaagttatacacttaaaaataaagcatccctcctggagagctatatacattaatatatgtttatgacgatacttgcttttagatgaagctgattggtccagtggccgatgactttgtactctgtgcttttgttggttatttgatactggaagatatcataacgtccaggagcatctccgttttcattaaaagtgacaggagtgccagcactgcctataaagatttagaaaacaatgttaataaagttttagtaagatagcccactgggttt

SEQ ID NO: 5064 - DNA, 529 bp, Homo sapiens
  MAP TO AC004939.1; EXPRESSED IN HELA, SIGNAL = 0.74; EXPRESSED IN BRAIN, SIGNAL = 0.72; EXPRESSED IN ADULT LIVER, SIGNAL = 0.61; SWISSPROT HIT: P53004, EVALUE 2.00e-25; EST_HUMAN HIT: AA032049.1, EVALUE 2.00e-94; NT HIT: gi14747482, EVALUE 1.00e-94
gctggcattctgtaagcctctgtctactgactggcagatgggattatgtttgtcttctttacctcacagggctgctgagaggatgagatgaggcaacacaagtgcaatctcagcactccatctgcagaagcagacagcccttctggagctgggagtgagggtctagcccctcggggctccctttggatcatacctgcaaatgtactaggatgtccttaaatttcctcctcctcatggcttctcatgacttaccttttcttctctgtctccagacacactgtcattttcatatactgatcttcctttcgctcttccaaagtggcagacacaagagaaagctccccaaagagggagaccagccaggtcaggcgagagatgccgctgaatgcagggaagccaaaccgctcttcttccaacgggccagctgtgggaaatcacaaatgctgtgggaactgggaagcaggaatgccaagtggaaagcaggacaggggggtgggggtggcgggggtgtgaaaagatgtggccgagt

SEQ ID NO: 5065 - DNA, 566 bp, Homo sapiens
  MAP TO AC035142.2; EXPRESSED IN BONE MARROW, SIGNAL = 1.4; EXPRESSED IN ADULT LIVER, SIGNAL = 1.2; EXPRESSED IN LUNG, SIGNAL = 1.1; EXPRESSED IN FETAL LIVER, SIGNAL = 1.6; EXPRESSED IN HELA, SIGNAL = 1.2; EXPRESSED IN BRAIN, SIGNAL = 1.4; NT HIT: gi12545405, EVALUE 1.00e-81; SWISSPROT HIT: P20936, EVALUE 1.00e-23; EST_HUMAN HIT: L44504.1, EVALUE 2.00e-88
caggcaatcctggaagtagggagatgggtagaaatggaagagatttatatatgagatgactaggactgagcttttagaacaaattaaagaccaagtaaatgagtattttttgagactgaggttaaattgagttaaaattggaataactggttcagagtaaaatgtaaatgtttaagttacatgtaggcatttaaaacctctagtagtatgtttttcaagtgtccatagaaattctgcacttgctatttatattgtaatatcttctctgtttttcccctaggtggtatcacggaaaacttgacagaacgatagcagaagaacgcctcaggcaggcagggaagtctggcagttatcttataagagagagtgatcggaggccagggtcctttgtactttcatttcttagccagatgaatgttgtcaaccattttaggtaagtctttattcctattatgaagccaaatgatgtagctattttgatataatattcataaatatacctgtataataaaggtgaatgactcagtaacaaataatagagaaggaagcttgttttcagtcaaatg

SEQ ID NO: 5066 - DNA, 531 bp, Homo sapiens
  MAP TO AC008639.6; EXPRESSED IN BONE MARROW, SIGNAL = 1.3; EXPRESSED IN PLACENTA, SIGNAL = 1.4; EXPRESSED IN HEART, SIGNAL = 2.9; EXPRESSED IN ADULT LIVER, SIGNAL = 1.6; NT HIT: AL163303.2, EVALUE 7.00e-99; SWISSPROT HIT: P52556, EVALUE 1.30e+00; EST_HUMAN HIT: BE512633.1, EVALUE 4.00e-89
gcaagaggtaggctccaatggccttgggcagctccaccattgtggctttgcagggtacagctcctctcttagctgctttcatgggctgatgttgagtgtctgtggcttttccaggtgcatggtgcaagctgtcagtggatctaccattctggggtctgcatgatggtggccatcttctcacagctccgccaggcagtgccccagtggggattctgtgtaagggatccaaccccacattttcctttcacactgccctggcagacattctccctgaggggtctgccactgccgcaaacttctgcctggatatctgggcatttccatacatcctctgaaatctaggcggaggttcccaaacctcaattcttgatttctgtgcacccacaggctcaacaccatgtggaagctgccaaggctttgggcttgcaccctctgaagtgacagcctgagctctatgttggctccttttagccacagctggagctgaagcagctgggacacagggcatcatgtcctgaggctgcatagagc

SEQ ID NO: 5067 - DNA, 509 bp, Homo sapiens
  MAP TO AL121919.19; EXPRESSED IN BONE MARROW, SIGNAL = 0.92; EXPRESSED IN PLACENTA, SIGNAL = 0.77; EXPRESSED IN ADULT LIVER, SIGNAL = 0.9; EXPRESSED IN FETAL LIVER, SIGNAL = 0.94; EST_HUMAN HIT: AW394037.1, EVALUE 7.10e-01; NT HIT: AL163303.2, EVALUE 7.50e+00; SWISSPROT HIT: O08774, EVALUE 3.60e+00
catcttacagttggggccagttgttgaagaagaaaggttgtttttgttaaggaaggtcaagggtcaagccccatgtgggagaggctgggatgcagggggttgggtaggtggaaattccatcaagaagctggctctgagctctcttcctcatctgtggctctcaacctcacctccatctccctcctctgtatccagcgaaattgcccattgggctgtgcttgatactgccacgccccatggagggcatctcagggctaaatgctggtctgtaccaccaggacaagaggatgtctcccccatgcaaaggccaggggaccatgcaactctctgctttctcgttgggccgtcctgtgacaggcacaggtgccatcgatatcacctctgtgctctccaggtgccctgtggatgcccctcgtctctccttaagagttttccaatgtataacccacagctgggaatccaggtccagcccagcaccctctgaagtgccaactcagggtacctgggaa

SEQ ID NO: 5068 - DNA, 530 bp, Homo sapiens
  MAP TO AC012000.3; EXPRESSED IN ADULT LIVER, SIGNAL = 1.5; EXPRESSED IN BRAIN, SIGNAL = 1.3; EXPRESSED IN HELA, SIGNAL = 1.4; EST_HUMAN HIT: BG023721.1, EVALUE 7.40e-01; NT HIT: AB051466.1, EVALUE 1.00e-130; SWISSPROT HIT: P97857, EVALUE 8.60e-02
caaacagcaacaacaaaccctcttactctatcagagacccagaaatatctattgcttgataaatgctttcaactaaaaatactcaacatgaaataagcaaatgcattttcagtaacagcctaataaataccttttggtcattacttgtcccacgtgactcttgacacagaagactctccgagtctgaatgcctacaccacacgtggcttctccattccagccaatggttgcattaagggcagttaccaatgtgtcctcagaacaagggccccaaggcgatgtctcccagtgaagctgcatacaggaatggtcattacacaaacgatgctcttggagagcctgactagggggacatggctttccacctgccaaaaataagaacaaaaggtaatacatagtggttgctgttcttgtttttgttgtttctgctgctttaatggtctagagagacagctttgctgacacagccttccaaagacctgagccactgcactgttcttctcagtctaagaacagggatttttgtccca

SEQ ID NO: 5069 - DNA, 547 bp, Homo sapiens
  MAP TO AC004239.1; EXPRESSED IN HEART, SIGNAL =   1; EXPRESSED IN ADULT LIVER, SIGNAL = 0.63; EXPRESSED IN BRAIN, SIGNAL = 0.69; EST_HUMAN HIT: BF735428.1, EVALUE 1.90e-01; NT HIT: AF196779.1, EVALUE 1.30e-01; SWISSPROT HIT: P32542, EVALUE 1.30e+00
ctctctccaatccaaatgccaaatacatacatggtagaatgtgaagatgacttttttaattccaaaaattatttaacattctcacaggaagtacgtgttcagaggcaaaaagtgagctgtgggaagacagatgctcccagacatccatttcccaaccattgcttcctgaacatcaaggtaagccaacaagtctgaacagtcatttgagggggtggtgtcagttccttccatttctagaataggtcttttctaaaaggaggtattcattgtggggcacagagggaggagtatgaatggctaacaaaaatgtttgtgagcagactgaaaagtgttatttaatttggaaaaaaattcagaactataggtgaaaagagataatttgggaactctgggttataagttatgtgcctgtctgtggtaggcagaataatggtccacaaatatgtccatgttctaacccccagaagcactgaatgtaccttatatggcaaaagggacttctcagatatgatggggagattatcctggattgtcctgggaggtctga

SEQ ID NO: 5070 - DNA, 569 bp, Homo sapiens
  MAP TO AC011311.11; EXPRESSED IN BONE MARROW, SIGNAL = 0.48; EXPRESSED IN ADULT LIVER, SIGNAL = 0.61; EXPRESSED IN HELA, SIGNAL = 0.47; EXPRESSED IN BRAIN, SIGNAL = 0.52; EXPRESSED IN LUNG, SIGNAL = 0.55; NT HIT: AJ277892.1, EVALUE 1.40e-01; SWISSPROT HIT: Q9P2G3, EVALUE 6.00e-06
tttaacatagcagccagactcagtatagccatgccaattatgtatacaggaaatttcttaacctgaggggtccagcctccaattacataaagtttattattcactgtcactacagcatgacatgccaattgcagtggaaggggagacacccttttccaattgtcccgttctacagagtacttatcaacacagtttgtaataagatactggtttttaattttcatctgtcctcctataacataaaggtcattatgaatactgcccagagcatagagttctcgaaattcagctgtgcataacttttcccaaaactggtttcctctatcatgatacctgcaaaagagagagagagtatccaggattagaggtaacatgaaagcaatttacccaagaaatacacttatttattttctgaccaaaaataatgagatatggttcttccaattggaggacaaaaaacattaatacaagaaaatgacacaggtttgctttttttttaaggaataatgaacaaaatataatgtgctttaaaataattagccacatatacctgaagagttttggggaaa

SEQ ID NO: 5071 - DNA, 538 bp, Homo sapiens
  MAP TO AJ009613.3; EXPRESSED IN ADULT LIVER, SIGNAL = 1.2; EXPRESSED IN BRAIN, SIGNAL = 1.4; EXPRESSED IN PLACENTA, SIGNAL = 1.3; NT HIT: AF223576.1, EVALUE 5.10e-01; SWISSPROT HIT: O09112, EVALUE 2.60e-01; EST_HUMAN HIT: BG491339.1, EVALUE 0.00e+00
attgtcccctcccctatttgctgtgactcccatgggaagatcctatctctgttcctctcgcactggggcaaagcagtgctggcagggggctggggaactggcgggtggcctctcctgggcaggaagtccatggcacccaggtgctccctgtgctccagaggggctggggaggtttcatggagtcaataggcattggcaagctgacatgtcccctgtcccacgcaggcctgttgcagtctccaaggcaccatgaatgccatcgtggctctctgccacttctgcgagctccacggcccccgcactctcttctgcacggaggtgctgcacgccccacttcctcaaggggatgggaatgaggacagtcctggccagggtgagcaggcggaagaagaggaaggtggcattcagatgaacagtcggatgcgtgcgcacagccccgcagagggggccagcgtcgagtccagcagcccggggcccaaaaagtcggacatgtgcgaggcaagtgtctttggggtcttggttttgtgatccctgcagt

SEQ ID NO: 5072 - DNA, 594 bp, Homo sapiens
  MAP TO AC004091.1; EXPRESSED IN BRAIN, SIGNAL = 3.2; EXPRESSED IN BONE MARROW, SIGNAL = 1.1; EXPRESSED IN ADULT LIVER, SIGNAL = 2.4; NT HIT: AL163282.2, EVALUE 4.00e-36; SWISSPROT HIT: O02705, EVALUE 7.60e+00; EST_HUMAN HIT: BG705017.1, EVALUE 4.00e-58
acccataggctcaacaccacatggaagctgccaaggcttggggcttgtgctctctgaagccatggactgaaccttaccttggccccttttagccatggctggagcacctgggatgcagggtaccaagtccctacgctgcacacagtagggagaccctgggtctggcctgaaaaaccattttttccttctaggcctctgggcctgtggtgggaggggctgctgcaaaggtctctggcatgttctggagacattttccccattgctgtggtgataaacattcagctcctcgttactcatgcaaatttctgcagcaggcttgaatttctccccagaaaatcgttttttcttttctattgcatcatcagactgcaaattttccaaacttgtatgttcttcttcctcctgaacactttgcagcttagaaatttctaccaccagatatcctaattcatctctctcaagttcaaagttccacagattcctagggcaggggcaaatgccaccagtttctctgtatagcaaaagggacttttactcctgttcccaacaagtttctcatctccatctgggaccacctcagcctggaccttattg

SEQ ID NO: 5073 - DNA, 559 bp, Homo sapiens
  MAP TO AL121928.13; EXPRESSED IN BONE MARROW, SIGNAL =   1; EXPRESSED IN ADULT LIVER, SIGNAL = 0.96; NT HIT: gi14746263, EVALUE 0.00e+00; SWISSPROT HIT: Q92538, EVALUE 1.00e-32; EST_HUMAN HIT: AW504665.1, EVALUE 0.00e+00
tgagctcccatcctaccatcagaatgacgtgagcctggatcgagggtacacttccgactcagaggtctacactgaccatggcaggccgggcaagatacaccgatcagccacagatgccgatgtggtcaacagtggttggttagtggtgagtgacaatatgggcagcaattgagtctctcctgcttgacctgtgggaagaattcctggtcctctgcaaggacattcacacaggggccaagcctgtgtccccagctcctctgtgtactttacaggttgggaaggatgacgttgataactccaagccagggcccagccgcccaggcccttcacccctgatcaatcaatacagcctaacagtgggactggatttggggccacacgacactaagtctctgcttaagtgtgtggaatcgctgtccttcattgtgcgtgatgctgcccacatcacacctgacaactttgagctctgcgtcaagactctccggatctttgtggaggccagtctgaatggcggtgggtcagctgatgagggggcagctggggagtagccatgcaatta

SEQ ID NO: 5074 - DNA, 587 bp, Homo sapiens
  MAP TO AC023818.3; EXPRESSED IN ADULT LIVER, SIGNAL = 1.9; EXPRESSED IN LUNG, SIGNAL =   2; EXPRESSED IN BRAIN, SIGNAL = 1.7; EXPRESSED IN BONE MARROW, SIGNAL =   1; EXPRESSED IN PLACENTA, SIGNAL = 1.4; NT HIT: gi14777711, EVALUE 0.00e+00; SWISSPROT HIT: P36774, EVALUE 2.00e-29; EST_HUMAN HIT: BE895254.1, EVALUE 0.00e+00
atattttgccctcgtcatgcttgaaaggagttctttaacttaaaaattttatgtgttctaattatttctgttgggttatttgacagaccgcctggacattagggcagcccggattcttctggataatgaccattacgccatggaaaaattgaagaaaagagtactggaatacttggctgtcagacagctcaaaaataacctgaagggcccaatcctatgctttgttggccctcctggagttggtaaaacaagtgtgggaagatcagtggccaagactctaggtcgagagttccacaggattgcacttggaggagtatgtgatcagtctgacattcgaggacacaggtagaacacttctctcagtttaatctctgattcctctttctttttaattgactagagctccctaaaagcttaggcatagcatacatctattttccttaaagggctatgtgtggtaccttgaatgaaaaggacatttacaagaagtatcagctagcctagagcctctaagcgtaatgataaacccaaactaaccttgatttgtatgacagtggatactactctgtgcctcaactttcctggaa

SEQ ID NO: 5075 - DNA, 568 bp, Homo sapiens
  MAP TO AC010267.5; EXPRESSED IN LUNG, SIGNAL = 1.6; EXPRESSED IN BRAIN, SIGNAL =   4; EXPRESSED IN BONE MARROW, SIGNAL =   3; EXPRESSED IN PLACENTA, SIGNAL = 3.6; EXPRESSED IN HEART, SIGNAL = 3.6; EXPRESSED IN ADULT LIVER, SIGNAL = 3.9; EST_HUMAN HIT: AL521707.1, EVALUE 5.00e-70; NT HIT: AL163303.2, EVALUE 8.00e-34; SWISSPROT HIT: Q00940, EVALUE 4.80e-01
agcctgctttactgaccaccttaagccagctgttgtggcctactactcagaaaaaagactcctttcaaaatatgatttcttattgacaatgtacatagtcaagcaagagctctgatagaaatgtacaaggagattggtgttgtttttaatgcctgctaatataacatttattctgcagcccatagatcaaagcgtcatttttactttcaagttgtattatttaaaaatacatttcataatgctatagctgccataggtagtaattcctctgatggatctgggcaaagtaaattgaaaatcttttggaaaggatttagcattctagatgccattaagaacattggtggttcacaggagaaggtcaagatatcaacagaagcaagagtttggaagaagttgctttcaaccctcatgaatgagtttgagaggtccaagactttagtggaagaagtatttgcagatgtggtggaaatggaaagagaactaaaattagaagtggagactaatgatgggactgaattgctgtaatctcatggtaaaacttgaatggatgagggttgcctctttt

SEQ ID NO: 5076 - DNA, 557 bp, Homo sapiens
  MAP TO AC004398.1; EXPRESSED IN ADULT LIVER, SIGNAL = 0.51; EXPRESSED IN HEART, SIGNAL =   1; EXPRESSED IN BRAIN, SIGNAL = 0.44; EXPRESSED IN HELA, SIGNAL = 0.81; NT HIT: AF202114.1, EVALUE 5.30e-01
accattgattgaggcaggacaaggaaaaggtaatcaagtggcagttttatatttaatgtctgaagctaaaataaaaatgccaaactatatgccatcaaaacaccttgtcaaggaaagccacaggttctcttaaatctctctcaagaacattattctctattagtataaaattagaaggttttattgtcgttgttagtaactgttaattttgtgattaaaattggttccaaattgtggctggtaagtcccatacattacatatggatgttaaaggtgatcgtgttgaagtttcaaaagttaagtgaagagaatggtagagaaagcttttattgttttagtgaatgcatatatcatcataatcagaatgttcatggaaataatcagccttaaaggaaataagaggaagaaacttagtatcatgctattggacactggagataaggtgatccatgtcataaagtgacaaaaatcctggatgaattgtgttctgttgggtggaaaataaaacttttaagcaatgcacttgaatatttaactgtgagggtttccaagcaaag

SEQ ID NO: 5077 - DNA, 536 bp, Homo sapiens
  MAP TO AC020894.3; EXPRESSED IN BRAIN, SIGNAL =   2; EXPRESSED IN BONE MARROW, SIGNAL = 1.7; EXPRESSED IN ADULT LIVER, SIGNAL = 2.1; EXPRESSED IN PLACENTA, SIGNAL = 1.9; SWISSPROT HIT: P54136, EVALUE 2.00e-45; EST_HUMAN HIT: BF219872.1, EVALUE 0.00e+00; NT HIT: gi15149475, EVALUE 0.00e+00
aagggaacagtggtgattgcctgatgatttttttgttttttttaaggtctattgcacgtctggccaatattgatgaagaaatgctccaaaaagctgctcgagaaaccaagattcttttggatcatgagaaggaatggaaactaggccggtgcattttacggttccctgagattctgcaaaagattttagatgacttatttctccacactctctgtgattatatatatgagctggcaactgctttcacagagttctatgatagctgctactgtgtggagaaagatagacagactggtgagtgtcttttttttttttttttttttttttagtgagagacacggatcttgctctgtcccttgggctggagtacggtggtgaaatcataggtcactgaagcctcaaacttctggcctcaagtgattctcccacttgagcctcccgaatggctggacttacacacgtgtgagccactgcacccagctccaagtgtctcatttagtagccatattagggatggggtgccattaaagcatttg

SEQ ID NO: 5078 - DNA, 540 bp, Homo sapiens
  MAP TO AC004711.1; EXPRESSED IN BRAIN, SIGNAL = 0.71; EXPRESSED IN PLACENTA, SIGNAL = 0.67; EXPRESSED IN ADULT LIVER, SIGNAL = 0.47; NT HIT: AB020684.1, EVALUE 0.00e+00; SWISSPROT HIT: P34413, EVALUE 3.90e-02; EST_HUMAN HIT: AW957835.1, EVALUE 0.00e+00
tcatccttgtcacaacccactgtgttttctttatacaggtagctttgctcactttagcacaaatattaaagtcaagtacaagcatatactcatttgcatagcaaattttaaagggtgcattgaaatagtaaccaattgataaaggtgtaagtcatttttataattagaatgacattcaaattgaccaaataaaacgttttctatttgaaaacagttacctataaaagtttttgggatatgaacaacacatgacttagcaaaacattaaaaccattacagatgtagttctccgtaggcagcaggtcatgtagcagtcattcttttacaacttctaggactttgtaaacactgttctggaatacagtggtgaagtgaggtttggaatccttcaccaagaggttacataagggagttttcccagcattggcaggatcttctacatcccaaatttcaggcatactgcaaccaggcctagaaaaatgaatgtacatgttaaaaatcaatatgcattatataactgcagagaaagcagagcacttc

SEQ ID NO: 5079 - DNA, 570 bp, Homo sapiens
  MAP TO AF061032.1; EXPRESSED IN HELA, SIGNAL = 1.7; EXPRESSED IN BRAIN, SIGNAL = 1.8; EXPRESSED IN BONE MARROW, SIGNAL = 1.8; EXPRESSED IN PLACENTA, SIGNAL = 2.9; EXPRESSED IN ADULT LIVER, SIGNAL = 1.5; EXPRESSED IN FETAL LIVER, SIGNAL = 1.8; SWISSPROT HIT: P50891, EVALUE 4.20e+00
tgtgttcatgccttctgctctggttatgcaggtaaacctgagttcaaatccaattcagctaagtgttaagttcctaaacctctctgggccccatatttttcatctgagaagtgggttaccaaacagttacctgtaagactctatgtaaaagggccactatggacatcaggaggtgatatgggtcacagtgccaacaggtcggggtaatgtggcgaggcagagggcctggcatataggtgttccagaaatgaagctcctgttaagattactacccatccacatcactgacagtcttctccttgctgctcaaaagaacagcttcccatttctggaggcacatacaggcagcatacctgtcctcagaggactttttggaactagtaaaatacacagcagactgaaaagccctctgtaattagaacaaagataacttgttaaccgccctttaaactcctgggagcctaaagccagcctctacttgctacttgctagagcctggaaggatttctcagattatgcagagttgcttctgtgtgctttctgaggtctgccagggttactcagccacat

SEQ ID NO: 5080 - DNA, 523 bp, Homo sapiens
  MAP TO AC004151.1; EXPRESSED IN LUNG, SIGNAL = 4.8; EXPRESSED IN HELA, SIGNAL = 3.6; EXPRESSED IN FETAL LIVER, SIGNAL = 1.8; EXPRESSED IN BRAIN, SIGNAL = 1.3; EXPRESSED IN ADULT LIVER, SIGNAL = 1.7; NT HIT: gi14765643, EVALUE 0.00e+00; SWISSPROT HIT: P51780, EVALUE 1.60e+00; EST_HUMAN HIT: AL570030.1, EVALUE 0.00e+00
ctccccatctctcctgtctgtccctccccttgtctctcctccatctctcctgtctgtctccccccgccatctgtctccctttcttagaatcccgagttgtgtccaacgattcggactcggacctagaggaggcctccgagctgctgtcctcatcggaggccagtgccctgggccacctcagcttcctggagcagcagcagagcgaggccagcctagaggtggcttctggcagccacagcggcagtgaggagcagctggaggccacagcccgggaggacggggacggggacgaggacggcccggcccagcagctctcaggattcaacaccaaccagtccaacaacgtgctgcaggccccactgccccccatgaggctccgtggcgggcggatgacactgggctcctgcagggaaaggcagccggaattcgtgtgagctggggtggggctgggaccacaggtggcttctctcttgcctgctcctgtccctccagcacgtcccctgcaccacggcatagcttaggt

SEQ ID NO: 5081 - DNA, 561 bp, Homo sapiens
  MAP TO AL121612.3; EXPRESSED IN ADULT LIVER, SIGNAL = 0.76; EXPRESSED IN BRAIN, SIGNAL = 0.73; EXPRESSED IN FETAL LIVER, SIGNAL = 0.61; EXPRESSED IN PLACENTA, SIGNAL = 0.75; NT HIT: gi11345471, EVALUE 8.30e+00; SWISSPROT HIT: P13602, EVALUE 4.10e+00
aacacagcttgcttgcactgtgccagacatcgttctcagcgccttataaatatgaacccagaaggtgatcctgagagtggtcaggatacaggaggatagggcaagagctggcttgtaagaccatggtggcttcatccaggtggaggtatgtaagcaagacctggaggtgggacgggcacaccaggcaggaggcacagctggaggaagagcaggagatgctcaacaattggcagaaactgcaatccagtcagagcttggggtgtgcagggaggtgggagagaggccacaccaggcaaggttgcaggagtcaagactttgtcttggagacctctaagggtctgagcagcagttgcagatgcagtttttgagagatccaaagctgatataatttgagcgattccccttaagaaaaaaagcatacaaaagtatgggtcatggaaaggccccattcaagtaagaggccctgagcttacgcttcactagcatggcagtaaatcacctccagtgagaagagatgtgacatagtcacaagcgggccttagagaagcagtgtggtcacca

SEQ ID NO: 5082 - DNA, 569 bp, Homo sapiens
  MAP TO AC022163.3; EXPRESSED IN PLACENTA, SIGNAL = 2.8; EXPRESSED IN ADULT LIVER, SIGNAL = 2.8; EXPRESSED IN HEART, SIGNAL = 3.7; EXPRESSED IN LUNG, SIGNAL = 3.8; EXPRESSED IN HELA, SIGNAL = 4.3; SWISSPROT HIT: P27512, EVALUE 9.40e+00
atgagctgggatgtctgtccttattcttattcagatgatgtctattcttatttagatgatgtctatgtggtctgctgaggatcaaaagcttcagctgtcagaggctgggtgtaccattcacttacattcttttagcattgtgctgtgtactatttggagagcataaaataagtgtttctagatatcataatttattccaggcagtatgaatagtagcttcctaatcctactaaaaaaacagggcagaaaagtaaaatatttgaatcttcatccctcagaatcaccctcagagtgctggtaacctagcagtctatggcagctggtacccactcactttgggtttatgatagaagcatgagaatcttgctggggctgatgccttcctttgagcctccacagtgccacctaagagaccaggtgtgttctctgcagctttcatagtcattaggggtgcagtgagtgtgtccgcaagcagtaagaaagtcagtctttgagttcccatggttgtcaatatttcttttgaatctgtttgtctagctacttttcaagcctttgggaaatgcttgaaa

SEQ ID NO: 5083 - DNA, 574 bp, Homo sapiens
  MAP TO AC010387.4; EXPRESSED IN HELA, SIGNAL = 1.1; EXPRESSED IN BRAIN, SIGNAL = 1.5; EXPRESSED IN ADULT LIVER, SIGNAL = 1.2; EXPRESSED IN FETAL LIVER, SIGNAL = 1.1; NT HIT: AJ278581.1, EVALUE 1.00e-97; EST_HUMAN HIT: AA663213.1, EVALUE 1.00e-106; SWISSPROT HIT: P03341, EVALUE 1.10e-02
ccatagctgcttgaggaaggagaaggattttcttcctttccctgagttatgatggacttcattgaacaattcatgggctttttcctaattctccttagtctttctagaacacaggtgaacagatgtttatgactccagtccccatggtctgagttgaggtcctagtggagatccatactggggatggcttgctgaccagtagggaatttgtccctttgttcagctgtcattctatcatttactggacgatgataccaggtatctccaaactcttgggctgcagctaaagccacattattttcattaaaggccagggtttgatctaacaatagcatgacatctctccaagtgagatgtaggacatctatgtacctatcaggatcatctgaaaactttcccaggtctacctggatctgctttaaatcagatagggagaaaggacatgtacccaggttggcccaaattcccctccccctacagcttgaaggggacataactgatagcccagggggttttgtggtcctttggagatttatttgcttgtttctttgtgggcaggggagattagaggagg

SEQ ID NO: 5084 - DNA, 554 bp, Homo sapiens
  MAP TO AC020893.4; EXPRESSED IN BONE MARROW, SIGNAL = 1.8; EXPRESSED IN PLACENTA, SIGNAL =   1; EXPRESSED IN ADULT LIVER, SIGNAL = 1.4; EXPRESSED IN HEART, SIGNAL = 2.6; EXPRESSED IN BRAIN, SIGNAL = 1.2; NT HIT: gi13650805, EVALUE 0.00e+00; EST_HUMAN HIT: AL550272.1, EVALUE 0.00e+00; SWISSPROT HIT: Q99653, EVALUE 7.00e-72
ggggttggtagaaggaggactttcaagttccagttattaaatactagaccgcaaggaacagtttggtctctgtcctttagtgaagaaattggatgctcattttctgttctacatccaccttctccaaaaccttaacaaattctgtgagagatatggcactgtccccatcctgatcagcctcttgaatggtcctgtctgcgatgctgccgagctgctcatctgagatatttactctgaccattaagtgtagcacctgtatcagctcaccacgggagagcttatcatctttatcgaaatcatatagtcgaaaagcaaactgcagtttgttgcttcggctgttgagtggttcgggtccattcacatctttgctcttttcattatcctcaatggggtggaaatgagccaaagttcacatgaatccatggaagtttacctggtcctctccctctggaaagaagacattgatgattcggtcccccagtgggttgatgacaagttctggaatcctcaggaaatcttcatggctgagaatgccatctctcctttgtccaggc

SEQ ID NO: 5085 - DNA, 591 bp, Homo sapiens
  MAP TO AC010276.5; EXPRESSED IN BRAIN, SIGNAL = 1.8; EXPRESSED IN HELA, SIGNAL = 1.5; EXPRESSED IN PLACENTA, SIGNAL = 1.6; EXPRESSED IN ADULT LIVER, SIGNAL = 1.8; NT HIT: L35772.1, EVALUE 9.00e-03; EST_HUMAN HIT: BF590229.1, EVALUE 3.00e-03
ggtcctttcaaactgacctttgttagcttactcttgttcatttaacaaaatggttattgagtaactactcattaatcagacagtgcctattacccagaggattttaaagcagttattagttgaatgggtgaatgaatgagtagatgaatgaatgaagaaaaagcattagactttgggattactattggaggtagaaaggttaatcagctagaactctaacctgcggcgtctgcagtccagcaggttgtatgtgactaaatggataagctctagctagagagctcagaaacttcagagaaggaggagcccacttattgctctggggtgcagagaagacttcacagaagatataaaacgtaagattagccttgctgctgagcagatttactctgtgtggagagaaagcaaatagaatttggtgcaatgagaacatgagaaaaaccagggaaccagaaatattagaaaaagaaactccaaataaataattcaatgtggccagaacacagattggcaatgggaatcaaaggtaaattaataaatgtttatggataaataaggagatgtcttaatcctcaaaccaaatgggaggaa

SEQ ID NO: 5086 - DNA, 551 bp, Homo sapiens
  MAP TO AC009123.6; EXPRESSED IN PLACENTA, SIGNAL = 1.7; EXPRESSED IN HEART, SIGNAL = 1.4; EXPRESSED IN ADULT LIVER, SIGNAL = 2.1; EXPRESSED IN LUNG, SIGNAL = 0.59; EXPRESSED IN BRAIN, SIGNAL =   2; SWISSPROT HIT: P54910, EVALUE 6.80e+00; EST_HUMAN HIT: BF379519.1, EVALUE 7.70e-01
ctcacccttctccgtctcacttcttgggctcaactctgtctggctaggacacgctgagtcaaagtttcccagttacctctggcaaccacgtcgacaatacaacacgaaaatggctcgccgtaaagggccgttttctctttgccttcagctggaagatgtccacctttggctatagtcatgcccactggcctcagagaaaacaagagcttctgggtaacataagggacctttcagccaacaggggtgaagaaactgcctggtaacttgcttgtcacttccaccccattcaatcagcacgaaggaaaggcagttcggcaacgctagactaaaacaatttagacccgtctcctgggacattaccagggagaaaaaatagagcgtttaattaagccccacatgcgagcaatcaattccaattttccatgtctaatttagcagagaatctcaactgggtgaacattaagacactatagaatctcataatggtggtggtgcttcacctaattttgattttaaatgtttcttttagtgctggcacactttggtgaaga

SEQ ID NO: 5087 - DNA, 562 bp, Homo sapiens
  MAP TO AC004755.1; EXPRESSED IN BRAIN, SIGNAL = 2.3; EXPRESSED IN BONE MARROW, SIGNAL = 2.1; EXPRESSED IN PLACENTA, SIGNAL =   2; EXPRESSED IN ADULT LIVER, SIGNAL = 1.9; SWISSPROT HIT: O60423, EVALUE 3.00e-46; EST_HUMAN HIT: BF307709.1, EVALUE 8.00e-04; NT HIT: gi15294793, EVALUE 6.00e-04
cctcctcctcctgtccctacacacacacacacacacacacacacacacacacacacacacacacacacacacacacacacataagccagccttcctgaagggactcacagccaaggcctcctctgtggcaaattccattgcccccctcctgtgcaagcgttcgaagatgaccgtgtcggcgcccttggtgtacaggcagatggcgccctctggctttcgaactgtgggggaacaggccctgctgcccacagaggctccccgtctgcccgccccaccttggggggcccagggcttgggtggcggggctcacccagcaccgacatccgtttgcgcgtgctgttgaagtccattatggccaggacctggtagacccgttcctcccccagctccatgatcgtgacggtgtcctgggtgcgggacaggaacacgtagccgaagttccgggctgcggtgaccagcgccccctcgtcgggggaggccgcctggtacaacagctggtctggtagggaggggggccattttggggtcacgtggtggagcccgtctccatctccacagtgca

SEQ ID NO: 5088 - DNA, 501 bp, Homo sapiens
  MAP TO AC007559.3; EXPRESSED IN ADULT LIVER, SIGNAL =   3; EXPRESSED IN FETAL LIVER, SIGNAL = 3.6; EXPRESSED IN PLACENTA, SIGNAL =   3; NT HIT: AL163246.2, EVALUE 5.00e-47; SWISSPROT HIT: P97691, EVALUE 6.00e+00; EST_HUMAN HIT: BE420422.1, EVALUE 3.00e-43
tttggagggctcagaagaagaaagaaaaatgtgggtaagtttggaactccctagggacttgttaagtggctttgactaaaatgataatagtgatatggacaatgaagtccaggctgaggtggtctcagaaggagatggggaacttgttggaaaccagagtaaaggtcactcttgctatgcaaagagactggcagcattttgcccctggaccagagatctgtggaactttgaacctgagagagatgatttagggtatctggagaaagaaatttctaagcagcaaagggttcaagatgaagcagagcataagagtttacaaaatttgcagcctgatgatgcaatagaaaagaaaaacccattttctagggagacattcaagcctgctgcagaaatttgcataagtaacaaagagccaaatgttaatcatgaaaacaatgggaaaaatgtctccagggcatgtcagagaccttcacagcagcccctcctatcacaggcctggag

SEQ ID NO: 5089 - DNA, 517 bp, Homo sapiens
  MAP TO AC006154.1; EXPRESSED IN BONE MARROW, SIGNAL = 0.67; EXPRESSED IN ADULT LIVER, SIGNAL = 0.76; EXPRESSED IN BRAIN, SIGNAL = 0.79; NT HIT: gi9961251, EVALUE 1.00e-91; SWISSPROT HIT: P21439, EVALUE 2.00e-26; EST_HUMAN HIT: BG772586.1, EVALUE 8.00e-13
cacacataaaaaggcccagctttcacatacctttgcccaaacggctgcagagagtcctagaatagggctgatggccattatcacaagggtgagcttccatcctctgatgaatcccactatgaatcctgcaaaaaacgtggctactgcttgaaagaacattccaaccttgtcaccaattccttcactgattttggagatgtcactaaaaaagatcacacctaagtggttacaggcaggaggtttcagttagaaagatgaagtagacatccaacaaacacatagacaagtaaaatttgttcactgactgcaagcctctttcagagtcttagcctcttgaataacatcttccccacctaaacaccgcacaaaggaagaaattcaggattgatcaatgcttctaataagttagtatcattaagttgatactattaaatgagtcaatcctatgagagaagcattaacattttgagcataaaaatgtatctgtttaaaagcaagaattaagaagaacattgca

SEQ ID NO: 5090 - DNA, 504 bp, Homo sapiens
  MAP TO AC022424.3; EXPRESSED IN ADULT LIVER, SIGNAL = 1.4; EXPRESSED IN LUNG, SIGNAL = 1.9; EXPRESSED IN HELA, SIGNAL = 2.4; EXPRESSED IN FETAL LIVER, SIGNAL = 2.4; NT HIT: AL163246.2, EVALUE 1.00e-108; SWISSPROT HIT: Q89662, EVALUE 5.00e-03; EST_HUMAN HIT: AW340174.1, EVALUE 1.00e-101
tagggtggaagtggaagtggtaccactcaccatcacctctagtaatccactagcaaaatttttgctccctgttctgcgacattatgttctgctggcctagatgtcttggttctagagggaggaatgctgccaccaagagacacgacaatgattccattaaactggaagttaagattgccacctggacacttcgggctcctcctgcctctaaatcaacaggctaagaaggtagttacagtgttggctggggtgactgacccggactatcaagacaaaatcagtctactactccaaaacagaggtaaggcagagtatgcatggaatagaggagatcctttagggcgtctgttagcattaccatgccctgtgattaaggtcaatggaaaaatacaacagcccaatccaggtaggactacaaatggcccagacccttcaggcatgaaggtttgggtcaccccacgaggtaaaaaacactgcctgctgaggtgcttgctgaaggaaaag

SEQ ID NO: 5091 - DNA, 533 bp, Homo sapiens
  MAP TO AC005796.1; EXPRESSED IN BRAIN, SIGNAL = 2.5; EXPRESSED IN FETAL LIVER, SIGNAL = 1.4; EXPRESSED IN BONE MARROW, SIGNAL = 2.1; EXPRESSED IN ADULT LIVER, SIGNAL = 2.3; NT HIT: D87920.1, EVALUE 8.00e-74; SWISSPROT HIT: Q92911, EVALUE 9.00e-44
aaacccactccaaatgtcccctataaggtccagaagcgctgtctggggcccttgggagggtgaagtcagcgtgacatctccacgtggctaacttgccctgtccccacccagctttaaccctgacccgaggagccgctatacattctggacttttgtggtgggtggcacgttggtgtggctctccatgtatggcgtgaaccaggcgcaggtgcagcgctacgtggcttgccgcacagagaagcaggccaagctgtgagtgtttcggggagcaaggtcggggtttctgggacatgctgcccccctccaccagcctgaggctatcccctaagcctgaggctgcctcttcccccagggccctgctcatcaaccaggtcggcctgttcctgatcgtgtccagcgctgcctgctgtggcatcgtcatgtttgtgttctacactgactgcgaccctctcctcctggggcgcatctctgccccagaccaggtgagtcccacccaggctcctggttggctctgcactccctcactagcttgg

SEQ ID NO: 5092 - DNA, 535 bp, Homo sapiens
  MAP TO AC010398.6; EXPRESSED IN ADULT LIVER, SIGNAL = 0.72; EXPRESSED IN BRAIN, SIGNAL = 0.51; NT HIT: AF239241.1, EVALUE 3.30e-02; EST_HUMAN HIT: AW954862.1, EVALUE 1.90e-01; SWISSPROT HIT: P32997, EVALUE 8.60e+00
tgtagggttcattcttgaaaacgataaaaaagagtactggaaagtaagaaaggaaacacctagcaatctcttcatagggaataacttttttcctgttattttcatacctgcatatcctatgtaaaagttaaaaataggcttttatcaacaagtttgtattctggaacatgtctaaaaatacaaatgcatcaatgtgagaagtttagatttacactcttaaggaaaggaatacatctattcactcagagcctttcaaatctgcagctctgatcacagtttgtctttgtcacttggagagcaaatatgttacctttgtgggaactgacatttgtactgattggcttgtaggtagtagtataaacaaaatggataatataagaatctctaccactgcaaactcagatataattgagggaagagagaaaatatttccagtatgtgtagaagccaaaattggagcacaattccaacatagaccttcagacctaccaattaacaagaacaagatatgaaccaattactcaggagtgggcaa

SEQ ID NO: 5093 - DNA, 545 bp, Homo sapiens
  MAP TO AL031719.10; EXPRESSED IN PLACENTA, SIGNAL = 2.9; EXPRESSED IN ADULT LIVER, SIGNAL = 3.5; EXPRESSED IN BRAIN, SIGNAL = 2.7; EXPRESSED IN LUNG, SIGNAL = 3.3; NT HIT: gi14774690, EVALUE 0.00e+00; SWISSPROT HIT: Q02817, EVALUE 5.00e-04; EST_HUMAN HIT: BG539339.1, EVALUE 0.00e+00
gtcctctagccacccctagcagcgtcggctctccctggacgtgcggccgcggactgggacttggctttctccggataagcggcggcaccggcgtcagcgatgaccgtgcagagactcgtggccgcggccgtgctggtggccctggtctcactcatcctcaacaacgtggcggccttcacctccaactgggtgtgccagacgctggaggatgggcgcaggcgcagcgtggggctgtggaggtcctgctggctggtggacaggacccggggagggccgagccctggggccagagccggccaggtggacgcacatgactgtgaggcgctgggctggggctccgaggcagccggcttccaggagtcccgaggcaccgtcaaacgtaagtccaattgttttcctgatgccttcagcgtggccgaggctcgagggcacatgggagatgttaggcgcggacctggtgagcgggtggggaggcctggcccctgctctgccctgagcgtggcctctgggcaggcaggagggggcactgtgtctcccagggaacc

SEQ ID NO: 5094 - DNA, 595 bp, Homo sapiens
  MAP TO AC011452.5; EXPRESSED IN ADULT LIVER, SIGNAL = 3.5; EXPRESSED IN FETAL LIVER, SIGNAL = 3.1; EXPRESSED IN HELA, SIGNAL = 2.4; EXPRESSED IN PLACENTA, SIGNAL = 3.4; NT HIT: gi11424606, EVALUE 2.00e-74; SWISSPROT HIT: Q57859, EVALUE 1.50e-02; EST_HUMAN HIT: BG722066.1, EVALUE 3.00e-74
ctgactcctaactgcctcggccatgagatgactctactcacaccccattggccagaattagtcatgtggcctctaccttgctgcaagggaacctgggaagtataggggagcatattgatatttggggaacattgactgtcactcccattcccattgcatgttttaagaagtgaacatcacaaacagttgaagaccctggttgtgcctcctgccactcaccctgtgattaagagcagttcaacaatacttccactgaccttcagctggcccgtttcactttgtgtttgttcattctgttttgtagcatgatctccttctgtccagactgtggcaaaagtatccaagcggcattcaaattctgcccctactgtggaaattctttgcctgtagaggagcatgtagggtcccagacctttgtcaatccacatgtgtcatccttccaaggtaagaaccagagcattgagcctgtttctgcggtgggaataaggtgcatacacgtgtgtgtctgcggagggaggatgcctttgcagcctgtctgaccctgtcctgacactggagaagcccaggcctcaggactggacccctctgtctacca

SEQ ID NO: 5095 - DNA, 569 bp, Homo sapiens
  MAP TO AC020908.5; EXPRESSED IN BONE MARROW, SIGNAL =   7; EXPRESSED IN PLACENTA, SIGNAL = 1.7; EXPRESSED IN ADULT LIVER, SIGNAL = 1.9; EXPRESSED IN BRAIN, SIGNAL = 1.7; SWISSPROT HIT: Q09475, EVALUE 3.20e+00; EST_HUMAN HIT: AW405480.1, EVALUE 6.00e-85; NT HIT: gi14785824, EVALUE 4.00e-85
ctccctctttcatctcagcgccgcagaaaaccaaataaaagaaaatagaagcaatagacccactacagtagagaactaccgaatatcaaactgaatacagaaaatccacacaagccagagttctccccctgctgggaaaagagctggatttataccacttcatcaggaattgagagggtctttttcttttcttaaggatttatctgaagcaatggaaatgatggagtctcagacactactgctgacgctactatccgtaaaggtgaaaacagtttcttgttcacgtatgccatggatggaagggtggcctccattcacggggagggagtccccacctgcttgagcttttctttcacatttaacagatggagaacaatcttgctgagtttgaaagaagggcagaaaagaatttattaataatgtgtaaggagaaggagaagctacagaaaaaggcccacgagctgaagcgcaggcttctcctctctcagaggaagcgggagctggcagatgtcctggatgcccaggtcagttgtaagtgacactctgtgaccagtgagtgttccctgtga

SEQ ID NO: 5096 - DNA, 515 bp, Homo sapiens
  MAP TO AL031843.2; EXPRESSED IN PLACENTA, SIGNAL = 1.1; EXPRESSED IN ADULT LIVER, SIGNAL = 0.87; EXPRESSED IN BRAIN, SIGNAL = 0.97; EXPRESSED IN BONE MARROW, SIGNAL = 1.9; SWISSPROT HIT: Q10900, EVALUE 1.90e-01; EST_HUMAN HIT: BI463836.1, EVALUE 1.00e-125; NT HIT: gi14779488, EVALUE 0.00e+00
tgtacattctggccagggaccaggctgacgctcagccaacggtgtgcagggtgaggactgactggcgtttcttacctgttcgtccgtcaggatttggacgcggcgattacaaatggccctaaactcctctctggagatggtgttcgttttcatggtgtcaaaattctcaaactcctgggtgatggcatggtaatgggaagtcactgctttgtggaggcgagccaggatgtctctgtcggctgtggccttgggagaggtaggcggcgggcctttgggcattttctcagcccactcatcagctgtctggacaaaatagaatggaaattgatccatgtgagaaataatcgaccacctcttgctctgggctcctcacccagggcaagttgcagggagacccagcgtggtggggaggagaggccagaagacagctacagcctggaggtgggttcaggcagcctccagccccaggtcaggccctgctgagcagaagcctgggtttcctgccatgaaggatc

SEQ ID NO: 5097 - DNA, 571 bp, Homo sapiens
  MAP TO AC018757.4; EXPRESSED IN BONE MARROW, SIGNAL = 1.3; EXPRESSED IN PLACENTA, SIGNAL = 0.95; EXPRESSED IN ADULT LIVER, SIGNAL = 0.8; EXPRESSED IN LUNG, SIGNAL = 0.73; EST_HUMAN HIT: AI241563.1, EVALUE 6.00e-82
aaagggtggaaggttatgggtaccgctctcgccataacctgaacgctgaccacaaactccattacactgcacgccacagactacgtccggtcttgggtcatttttaggcttactatctgttatgcctcaggcatttcctgatattctaggaaggtgagttaattaaaaccacaataaaaacacagcaactcagaaaaaaatcttgtcactatttccatttttcacaacacaaatgagatcatttattcaactgcctacttgacattgacatttggatgtgaaacagtgtcgcaaacttgtctgcaatcaaaatcgtgattttccccaaaattgctcttcccaaagtcatctccattcctgcagatggcaactccatctccccagctgctctggccaaaaaccttggcattatccttggcttctctcttattctcatatccacattcttgtaagtaaatcctggcacctccatctccaccttccaagtatgtccagaattcagccatggctactccactactcctactgtggactgactcactctcacgctcccctgccttgctgttaacat

SEQ ID NO: 5098 - DNA, 532 bp, Homo sapiens
  MAP TO AC010320.7; EXPRESSED IN BRAIN, SIGNAL = 3.5; EXPRESSED IN HELA, SIGNAL = 4.1; EXPRESSED IN PLACENTA, SIGNAL =   3; EXPRESSED IN ADULT LIVER, SIGNAL = 3.7; EXPRESSED IN FETAL LIVER, SIGNAL = 2.9; NT HIT: AL163284.2, EVALUE 3.20e-02; SWISSPROT HIT: P11369, EVALUE 1.00e-04; EST_HUMAN HIT: AW813512.1, EVALUE 0.00e+00
aaatctgcagttgtgggtcccacactttcagttgacagttccctgttctccccaaataaccactattcttacttccatcatctcgattccttcattctgcctgtttctgaacttgacataaatggtgtgttttcttgattttggctcctcactcaacatggtatctgtgagagtcacctgttgctgcttatagcaggcatttgtttcgtcactgctgaatagttttccactgtttgaatgaactaaaatttatctactctactgtggacagacatggaggttgtttccatttttacggctactatgaataaagctaccatgaacattcttctgacagaaacagcactcatttctcctggatagagacccaggagtggaagggctgtttcacaggctgtttgtataacaagcttcaccaaattccactccagatccactcccgttttcagagtgatcaaaccctaaatgtacagccccacgtgcaatggatgagagttccagctcttctatgtcttcaccatttgcaccactg

SEQ ID NO: 5099 - DNA, 574 bp, Homo sapiens
  MAP TO AC020663.1; EXPRESSED IN FETAL LIVER, SIGNAL = 3.6; EXPRESSED IN BONE MARROW, SIGNAL = 2.1; EXPRESSED IN PLACENTA, SIGNAL = 1.9; EXPRESSED IN ADULT LIVER, SIGNAL = 1.9; EXPRESSED IN HEART, SIGNAL = 3.1; EXPRESSED IN LUNG, SIGNAL = 2.6; EXPRESSED IN HELA, SIGNAL = 4.2; NT HIT: AB002337.2, EVALUE 2.20e+00; SWISSPROT HIT: P34683, EVALUE 2.40e+00; EST_HUMAN HIT: BG334970.1, EVALUE 4.00e-55
tagaagcttggcacctggaccaaaggcacattcagttccaaagcttctagttcaacaagaacacatgaagcctgttcaagacacatttcagcacagacttcaagggccctagtagtgttcattctttgatctgaattaaaggaagtctgtattcaattaatgcaaacacccttcacaatgggagatggcccctgatgggaaattcagccccccacatgtggacactcacttggtgtgcaggggaggaggggaagaggccagccagcaatcctggctgtgacccggagttgctgaggggagggagggggtccttacgtccttggccgccttgggatccgacacgcaggcgaaagtgatgtcgcaggttgagacgacttcagcgggggttcttcccagacgggccccctcctggatgaacaaatcacactgcaaaagtcacagatcctaacgtgagctgcaggcagtgcacaacaaacatgccagccaggccagagaattgctgaccaggcctcctggcggcctaccaaggcaggaggctgaggccgggagcctgggtcatggagataggagccca

SEQ ID NO: 5100 - DNA, 503 bp, Homo sapiens
  MAP TO AC003960.1; EXPRESSED IN ADULT LIVER, SIGNAL = 0.43; EXPRESSED IN BONE MARROW, SIGNAL = 0.49; NT HIT: AF370524.1, EVALUE 5.00e-04; SWISSPROT HIT: P08548, EVALUE 4.00e-03
aaaccattgtgctatacctgtcacttataaacaaaacactgcatctcacacttacaaagtatatactatttcctagtgcatatatcacattcaacaaaatgaataatatactaggccataaaacacatgtgttatctaaccatatgtaattagaggcaaataacagcaaatatcaatgtactaacaaatcataggaaagagaaaaacattttcaaattaataaaaataaaaatacatcttatcaaaatgctaaagctagaacagtgctctgagacaagttttatctttaaatacttacattcataatgaagcagcccagaagaaagaggaggaagaaaaggaagataaggagaatgagtatcttaaggaaaataatagcaaagtataataaatccaaagtaaatagaatgaatactaaaggtaagaccagataataatacaaaacaacaaaaaatagacaatagaggaacttataggccaaagctgctttttgtctgtgtgtg

SEQ ID NO: 5101 - DNA, 518 bp, Homo sapiens
  MAP TO AC025167.4; EXPRESSED IN LUNG, SIGNAL = 0.99; EXPRESSED IN BONE MARROW, SIGNAL = 0.74; EXPRESSED IN PLACENTA, SIGNAL = 1.7; EXPRESSED IN ADULT LIVER, SIGNAL = 1.1; EXPRESSED IN HEART, SIGNAL = 1.9; SWISSPROT HIT: P38972, EVALUE 2.80e+00
ggacacgaatgttgatgcagatccacaaagacacccatgcatgcaagcacacacacagattgcattcataactgtcacctttccttcctcttttccagagacacaaattagactagcaatttagcaggccactctcattaatggaaggggaggaccatgggtatcaaagattagccttgaaatgaaccatctagatttcctccttggcctgaaggagaaggaaatggatcaggtctgggaggggagactttgcagagcccagaaggttgtcatgcaggaggggagctgtctgaagaggctgggaatgctggcctacggggaaggcatgtgtggagttgaccttcagagagcagtatcaggcgtatcaaatgcactcacccttctgagattccttcttccctttgacattgctaaaaatggaatcagctgcaaacggtatgtgactgtgtatggtaatttgcgtaaagcttgtcaagtgtaacatttagccagaaacatggtatggtctgggatcgaaa

SEQ ID NO: 5102 - DNA, 597 bp, Homo sapiens
  MAP TO AC009286.31; EXPRESSED IN ADULT LIVER, SIGNAL = 0.95; EXPRESSED IN BRAIN, SIGNAL =   1; EXPRESSED IN BONE MARROW, SIGNAL = 1.3; EXPRESSED IN PLACENTA, SIGNAL = 0.65; NT HIT: AF216776.1, EVALUE 0.00e+00; EST_HUMAN HIT: BI521576.1, EVALUE 0.00e+00; SWISSPROT HIT: P12018, EVALUE 5.00e-29
gggaaatggagagaaaagcctgttaccacaagaaagtacttccaaatatactttgtaaataggcaagttaagtttacaatttgaaaattgtcacagaacaagagtgagagcagggtgaggtttttgtcccacttccccatgtgtgtgtgtcactgtgagaagtgctgctgtaccaaatggcacagtaatagtcagcctcatcttcagactggagcccagagatgagtaaaaggcctgcattggttgaagcatctttggatccagagaagcggctggggactccagagccctgctgcttatctgagtctgatttgtacctcaggagataccggggaagactccctggcttctgctggtaccagtatatcctgtaggtaccaacattgatgccactgcgcaaggtgcaggtgaatctggctgatgctccaggagatgctgagagggaggttggctgagtcagcacaggctgcgagagggaacctagaaacacaggcatttatgagtgataaggcagaatggagggtaaagttttttagggatctttgccagaagagtcagaatcaggctgaggtgctggccctggtctgttaggccttt

SEQ ID NO: 5103 - DNA, 536 bp, Homo sapiens
  MAP TO AC005903.3; EXPRESSED IN BONE MARROW, SIGNAL = 1.1; EXPRESSED IN PLACENTA, SIGNAL = 0.78; EXPRESSED IN ADULT LIVER, SIGNAL = 0.74; EXPRESSED IN LUNG, SIGNAL =   1; EXPRESSED IN BRAIN, SIGNAL = 0.98; EXPRESSED IN HELA, SIGNAL = 1.3; NT HIT: gi14736264, EVALUE 1.00e-115; SWISSPROT HIT: Q16877, EVALUE 1.00e-36; EST_HUMAN HIT: AL038786.1, EVALUE 1.00e-115
ctcaggtcgctctaagggtggcatgcctctgacaaaaggggctcagtgagtgacagctcacatggaaaccagagatccaggcatttgcctgttgcttgatgaccttccctacatgatgggaagattctaggttgaatgaaggtcattcacctcgactgcacattaaaagaatgggagcctagccccagcgcactcacacatgcatatacccagccacgcagggtacaaatgcaggcccgtgtgcgcacgcagggacacatgcactgacctccctgccccgaggggacagtcctgggtccccgccaatccggcccttgaggttgagctcgctctccccgtgccggcagaggtagatggagcggggggtcacgtggatgttcatgaggtaatatacgatgcggctctggatgtggtcagccacacggttcaccacgtagctctggcccacatccatgatcttgatataggacaggtccctgtccagagagaaagtagaaagaggcctgtgagcgtggccagggttctcacagagcaca

SEQ ID NO: 5104 - DNA, 553 bp, Homo sapiens
  MAP TO AF207550.1; EXPRESSED IN FETAL LIVER, SIGNAL = 1.6; EXPRESSED IN HELA, SIGNAL = 1.7; EXPRESSED IN BONE MARROW, SIGNAL = 1.2; EXPRESSED IN PLACENTA, SIGNAL = 1.5; EXPRESSED IN HEART, SIGNAL = 1.1; EXPRESSED IN ADULT LIVER, SIGNAL = 1.3; EST_HUMAN HIT: AW818594.1, EVALUE 2.00e-60; SWISSPROT HIT: Q64092, EVALUE 2.00e-13; NT HIT: AF207550.1, EVALUE 0.00e+00
tagacctggtaggcacagggctcacctggggtaaagtgtagggccatggggccaagaccctatcacctaccagagatctcccgtttgatgttgggcagctcagctgggcaggagttgctgacagtgatggctggtgtggccacgccttgactactgtacacatcaagcagattccctgacacaggcagctgggggcagagagggcagagaaccaccagttgggaacaaacccaggcttggctcctcctcagaaccaggttcctgagcttccacatatcccaaagatggggcaccctctaatgcaaggactggctgactcagcaccagaacccttgcttctccttcaaggcaaattcacatggcgaccaaacagggaggacagagcaaactggacctaccttgcttcgctgggagactggagcctgcctggcctgcttatcacttcctccagtccctcatatccctcagtgacctctaaagcccctttcccaaaccccggggctggctctgagaagaaatgctggaaaaccacccttctcaggtctttgtcggc

SEQ ID NO: 5105 - DNA, 523 bp, Homo sapiens
  MAP TO AL117257.1; EXPRESSED IN BRAIN, SIGNAL = 3.1; EXPRESSED IN BONE MARROW, SIGNAL = 3.3; EXPRESSED IN ADULT LIVER, SIGNAL = 3.2; EXPRESSED IN PLACENTA, SIGNAL = 3.4; EXPRESSED IN FETAL LIVER, SIGNAL = 2.9; EST_HUMAN HIT: BF026381.1, EVALUE 9.00e-56; SWISSPROT HIT: Q05793, EVALUE 9.60e-01; NT HIT: AJ131016.1, EVALUE 5.00e-01
cagtcccttttcagcctctgcacctgtgcacatgctgtttcctctttctgtgctgggtaaattcatgcgcaatacccagctaaaatatcccttcctccaggaagcgcctctggtcctgagtctgtctctcaccttaatctgacattctgggtccatctccccgactggactagaaggttcttcagggtgtgaactttgtgttttacaccttcacatttggccagttcctggtaccagacggtcctgtggagttacgtaacgtaagcttcggagactcagtttcgtcaactggataatgggattatcatgccaacctcctaccattgtggggaggagggaatgagcaaggcctgtgaagctccgcacagaagctgcccctcatagcagtcccaggggtgggcagaacagtgccagccccgacctggggggagtgaggatgacaaccagtgtgcatcagtcccctgctgcagaggtgcagactatgggtcattcacttcttgtggctcaaagccaccttcgtctc

SEQ ID NO: 5106 - DNA, 524 bp, Homo sapiens
  MAP TO AC064878.7; EXPRESSED IN BRAIN, SIGNAL = 0.46; EXPRESSED IN ADULT LIVER, SIGNAL = 0.45; EST_HUMAN HIT: BI767509.1, EVALUE 4.70e-02; SWISSPROT HIT: P10266, EVALUE 2.00e-10; NT HIT: AP002945.1, EVALUE 7.80e+00
aacaaacacaggcgagttccatggagacaaggagggctcaatagtgtttgcttgtagtaaatcattaacaatttcaattaaagcctccaacttgtgtttgaaaagtggccactgctctacctaaacaggtgattcacacatccattgtgcagaggcagaggaaaagagagaaggagagtgagggcgccggcacacagacgaggtggaaggaggattccaagcttctgaaagaaggggtcccggagcgtcgaaagaaacagtaggcttagaagaggggagaggtccaaaaggacaagaggaacaagaaacaggccattcagatgaatgccacacatcctcctctggcagagggggcaatggcttagtagaagaagagttaacatatacaggttccaagataggaggcggagggagggtatcatcaccaggttccttctcctggggagaaaacaaggagagatcgaattcctcctcatcatcacaaggaggattggtagggagtcagctacccgaggtaaagggag

SEQ ID NO: 5107 - DNA, 576 bp, Homo sapiens
  MAP TO AF131215.1; EXPRESSED IN ADULT LIVER, SIGNAL = 2.3; EXPRESSED IN FETAL LIVER, SIGNAL = 1.6; EXPRESSED IN BONE MARROW, SIGNAL = 2.3; EST_HUMAN HIT: AW737060.1, EVALUE 1.00e-127; SWISSPROT HIT: Q9P2Y4, EVALUE 3.20e+00; NT HIT: X87344.1, EVALUE 1.00e-38
gacttctcctgggaaccctctgtctcccaaataccccacttcaaatcatccactgcagtgcacagactgggggctggtgggaccgacatcgatggagtggttactagcagccagacactaggcagatgaccacacctatcatcctcacagacctctggggtggcatcaacgtcagcattgtcaatgtcatcatcagcatcatcatttctgaggctccaagattcccaagttacttacccaaagcccaggcctgcctgcaccttccctctcctctcctgcagactgactgctgcttctttaaaacacagaatgccactaaaaaataggctgaaggagggagagcatcaggaagagcagctagtgggtgctgagcttaatacctgggtgatgggatgctctgtgaagcaaaccaccacggcacatgctaacctatgtaacaaacctgcacatcctgcacatgtacctctgaacttaaagtaaaagttggaaagaaaaaaagtaggctgatacaaaggcaaatttccttataaaatctttaacgagaaagcctgcagctccaggctagagaaacaggga

SEQ ID NO: 5108 - DNA, 536 bp, Homo sapiens
  MAP TO AC004258.1; EXPRESSED IN BONE MARROW, SIGNAL = 0.4; EXPRESSED IN PLACENTA, SIGNAL = 0.49; EXPRESSED IN ADULT LIVER, SIGNAL = 0.45; EXPRESSED IN HELA, SIGNAL = 0.43; NT HIT: AF134195.1, EVALUE 5.10e-01; EST_HUMAN HIT: BF247185.1, EVALUE 1.90e-01; SWISSPROT HIT: P22808, EVALUE 3.90e-02
catgagtgtgtctgtgcgtggcacccgcgtttgcatgtgcgtgcccttgcacgggatgtctgcagtgtccgaggtccctgtgcgtgtctgcctgtggcatgcatgcgttttgtctgtgcgtggagtgcaggtgtgtgtgcgtgtctgcgtgtggggtgcatgtaagtgtgtctccctgggggcagtgctggctggctgagggcctgcaatgtgggggcagtggtggccccagcacggtccacaatggcaaccccgctgttggccctccctctcctcctcccctggggacgggaccagggcccgtgtgcagacggccatcaagcctcagagcagggtggacgcaggggcctgtggtccccgggagtccccaccttctgattggaaatctgcagccttgggggcactgggtgggcgcttgcccacactgggcatctctgggcttcggccaccctcccggggttccccacggacccagtggccctcgggtgtgggcagcagccgggttcccctcaaacactggatggaaaatggtgacc

SEQ ID NO: 5109 - DNA, 570 bp, Homo sapiens
  MAP TO AC022163.3; EXPRESSED IN LUNG, SIGNAL = 1.6; EXPRESSED IN BONE MARROW, SIGNAL = 2.7; EXPRESSED IN PLACENTA, SIGNAL = 2.6; EXPRESSED IN ADULT LIVER, SIGNAL = 2.1; EXPRESSED IN HEART, SIGNAL = 1.9; SWISSPROT HIT: P16566, EVALUE 2.40e+00
aaacctgccaagtgatttgctgctatggccttacctacccttgtgttttcctccagtgatgaggggttggatggggtagggctcagggcctgcagcataaatggcagtttgacaaagagatcttgtacctgacccttggtgtcccagacaccagacattccagatctgaaaacatctggaagataatactaatgaaatggggaagtaaggaatacacttacaaatttgggccacatcagtggattttaacactggacatgcttgacaattatatgtgtagctgcttttaccttactattattattttttaatatcttaatgactgcctggtattatccaattctgacatttctctgtatgcttgtggtagagcaggacaggaagtctttgtatttgctcttaggattgaaggctttattacttggtctggccttctctctgtgggtttcagataaactcttgactcactgagagtttggaaaactacacagaacacatcacctgtatagaggatcttgaactccttcacagattccctttcaaaatcaccactggcccagaattcttatg

SEQ ID NO: 5110 - DNA, 545 bp, Homo sapiens
  MAP TO AC002133.1; EXPRESSED IN ADULT LIVER, SIGNAL = 0.73; SWISSPROT HIT: Q08180, EVALUE 7.00e-06; NT HIT: gi16177538, EVALUE 1.00e-120; EST_HUMAN HIT: BI963009.1, EVALUE 2.00e-07
gtctctcacccatacccaggatggagaggatcactctgggagacacgagctcgggccccatctcagagcggccgacctggcactcatactccgcgtcatcgctgaggtcacaggcctcgatgtgcaggtggaattcacctgcagggggagccggaagtcagggccgcagcttccgctggtggctgagggtctcaggctctgatcccttacctctagcagggtccccttccaggcggtacctcgggaagcctgggatcctggggtcggggcccaggagcagcccatctttggcccattgcaccgcactgccaggggtgctgaccccacaacgcagctccactgaggccccctccaccaccgtcaggttttcaggcagggcccagaagccccggggaacggaggcaggaatcgccaactgcgccaggcctgaggacacagcgcggtgcaaggaaagggcagagggtttgtctagggaaggtaagtgggaaatgggggccacttggcgctgggtacaaggctgggatcccactcaccttcagtcagca

SEQ ID NO: 5111 - DNA, 553 bp, Homo sapiens
  MAP TO AC005937.1; EXPRESSED IN ADULT LIVER, SIGNAL = 4.5; EXPRESSED IN LUNG, SIGNAL = 6.5; EXPRESSED IN BRAIN, SIGNAL = 4.4; EXPRESSED IN HELA, SIGNAL = 3.8; EXPRESSED IN BONE MARROW, SIGNAL = 4.8; EXPRESSED IN PLACENTA, SIGNAL = 2.4; SWISSPROT HIT: Q55522, EVALUE 2.00e-11; NT HIT: gi15304389, EVALUE 1.00e-66; EST_HUMAN HIT: BG768431.1, EVALUE 1.00e-61
accatgggatgaagaagcacctgggggcagggaggggtcagcagaggggggtttccttggaggtgccttgggatctctggcctccatacttttgggggtagggtaggaagtgaattaggaaaaaggaatcagcaacgtggaaaggaccacattaggggttagaagggaggacaaggtttggggaacactggggtcacagaaagcggcagggcactgaagggctcttaccttgctgaagggcagctgccctgtgagctgggtccccaacatgaccatgcggcccacccagaacagcagaaggtcgctgcccgtttccaaaagtgacagggggtagaaacgagcaaggtctggggtctagggggaagaggagcagtaagaggcccaggccccaggcccccctcaagcctctgtgggggcccagccatcccttccttatcgtttccccttcactttcgccctctcaacccacctcacctcttggggccagcccagggcagaaaaggggaacagggcagaagaaaaccatgtgtctaggacatcaggatctgggaaa

SEQ ID NO: 5112 - DNA, 600 bp, Homo sapiens
  MAP TO AC025447.3; EXPRESSED IN PLACENTA, SIGNAL = 2.8; EXPRESSED IN ADULT LIVER, SIGNAL = 1.7; EXPRESSED IN HEART, SIGNAL = 2.7; EXPRESSED IN LUNG, SIGNAL = 1.3; EXPRESSED IN HELA, SIGNAL = 2.4; EXPRESSED IN BONE MARROW, SIGNAL = 1.6; EST_HUMAN HIT: AW139414.1, EVALUE 0.00e+00; SWISSPROT HIT: P16471, EVALUE 1.00e-113; NT HIT: AF091870.1, EVALUE 0.00e+00
ggttgcctttccctcttctctagacttaatggtttgagaggattttaaagcatctttacctgcttcattcaacagagtggccggtgcacctgcagggcccacagccagctcacacacatcagtaatattgtggtaagaggatctggggttgtgctggctgggctgtggtaagggccatgttgaacatttggatccaccagcatgaaaataggggattttgccttccatgcttatgcactgggggtcccaggtgtgggttgtttcaggattctctggcttctcaatgacctcaggatcatagaatgtggagggattggcctggggttcctcacacttttcagacaaaagggaagggctgtcacagctcccccggcctgagtcagtgtcaggatccaggtatgtgggtttcataccttgacttgggtgttcttttgaatggactgacattagatgctggtcctcactatcatctacttctaaatactccaccagcaagtcctcatagtcagaagtgggaggaaagtcttggcatcccaaggcactcagtagttcttcagacttgcccttctattaaaacacagacacaagaagagatggctg

SEQ ID NO: 5113 - DNA, 579 bp, Homo sapiens
  MAP TO AF172277.1; EXPRESSED IN BONE MARROW, SIGNAL = 1.3; EXPRESSED IN PLACENTA, SIGNAL = 1.7; EXPRESSED IN ADULT LIVER, SIGNAL = 1.3; EXPRESSED IN HEART, SIGNAL = 1.2; EXPRESSED IN BRAIN, SIGNAL = 1.6; EXPRESSED IN HELA, SIGNAL = 1.2; EXPRESSED IN LUNG, SIGNAL = 0.95; EST_HUMAN HIT: BF342999.1, EVALUE 0.00e+00; SWISSPROT HIT: P35331, EVALUE 9.00e-41; NT HIT: gi15300442, EVALUE 0.00e+00
tcgtcattggagtcaacctgaaaattagatttggccagagaagcccaggactccaaatgctttctcataatttgcatgcatggtctttaaaaacagaaaatgttacctaaatgccaatcttgacaaaaatgttttctctttcttccagtgatgcagaagaccacaagcctttgaaaaaaggaagtcgaactccttcagacaggactgtgaaaaaagaagatagtgacgacagcctagttgactatggagaaggggttaatggccagttcaatgaggatggctcctttattggacaatacagtggtaagaaagagaaagagccggctgaaggaaacgaaagctcagaggcaccttctcctgtcaacgccatgaattcctttgtttaatttttaagctctttgccaatattccatttctctagaatgtttatcctaagcacttgtttgtcagccctctcatactatgaacatatgggtagagagtatattttctgctgtatgttagtattatgagaatagttacagcaaaaacataactcagtcaaatgatatgttaatatgaactggaatgcaaagtgca

SEQ ID NO: 5114 - DNA, 576 bp, Homo sapiens
  MAP TO AC069278.1; EXPRESSED IN HEART, SIGNAL = 3.3; EXPRESSED IN BRAIN, SIGNAL = 2.4; EXPRESSED IN LUNG, SIGNAL = 2.3; EXPRESSED IN HELA, SIGNAL =   3; EXPRESSED IN FETAL LIVER, SIGNAL =   5; EXPRESSED IN BONE MARROW, SIGNAL = 3.8; EXPRESSED IN PLACENTA, SIGNAL = 3.9; EXPRESSED IN ADULT LIVER, SIGNAL = 3.6; EST_HUMAN HIT: AV731368.1, EVALUE 1.00e-117; SWISSPROT HIT: Q9UK13, EVALUE 4.00e-07; NT HIT: gi14755763, EVALUE 5.00e-66
ttcaaagctggggacaaaagaaaattactgcagaatctggtcctggcctttggtctttaggaacatgaagactgaaaatctcaagcccaagaatctgcactatttctaccctacaaactaaaattaatcttcactggggaataaagagcacaaacacaatctagatgcagccaaaatcattctggctgctgaatttcacagttcttaatcgatcagaatgtgaaatcatttcagtagatggatcttcattaaagaggagtgtattcttaccccaagagactaggtccctgtggttctccaggatcacatctctgtccagggtcctctgagcagggttccaagtaccctgttcctcccgtgtgaagtccacagtcacaattttgaagttcactccttcctaaaaaaggacacacattcctgctcagctgggcatcatttccttccaaagttcatggaggaggaaaagtctgacagatggaaaaaggaaaattggtgacctggggagttgtccttaaattgtcagtgcccaaaagattccagtcaagatgtacaggtgccttctgggtgagctctttg

SEQ ID NO: 5115 - DNA, 537 bp, Homo sapiens
  MAP TO AC026743.3; EXPRESSED IN HEART, SIGNAL = 6.3; EXPRESSED IN ADULT LIVER, SIGNAL = 5.3; EXPRESSED IN LUNG, SIGNAL = 7.6; EXPRESSED IN FETAL LIVER, SIGNAL =  11; EXPRESSED IN BONE MARROW, SIGNAL = 3.5; EXPRESSED IN PLACENTA, SIGNAL =  10; SWISSPROT HIT: P13887, EVALUE 3.80e+00; NT HIT: gi14746263, EVALUE 2.00e+00; EST_HUMAN HIT: AA339576.1, EVALUE 4.80e-02
aatagatcatgagcccgtggagctctttgtgtgaatgcctggatatttggaggtacctgaggatgagtgcaggaagcggaatctcgttaaaatgaaggaagctcaccttcatgcgtgtactgagcattgcttcctggggaaatacgatgtgttgagacagtgtccctagtgtcaaggctggggacattgacagtgttgacattggggacattatctccacatgttgtattgaggggaaggttcagggcagttgaggcaggcaccccagactgggccatgctagaaggttaccaaggcaccaaccctctggctcaccatcttctggaagtcacagtggctaacttacattcatattggtttctaccctaccacagcctgcagaattttgtgtccataacttttatttaatgtttcttgaataatataaaggaaaatatatccaggaaagaaacatgaaagggatgtggagtgataggaatggagctgataggaactaaccacactcaagaggactttggggttcaggttcccataggt

SEQ ID NO: 5116 - DNA, 580 bp, Homo sapiens
  MAP TO AL078614.2; EXPRESSED IN FETAL LIVER, SIGNAL =   1; EXPRESSED IN BONE MARROW, SIGNAL = 0.76; EXPRESSED IN PLACENTA, SIGNAL = 0.78; EXPRESSED IN HEART, SIGNAL = 0.96; EXPRESSED IN ADULT LIVER, SIGNAL = 0.64; SWISSPROT HIT: Q02224, EVALUE 1.90e+00; NT HIT: AL163204.2, EVALUE 0.00e+00; EST_HUMAN HIT: BG190090.1, EVALUE 1.00e-101
tgcggtgaaataaatgaaagcacattacagataaacttacctgatttaaaaaactaacctgtaaatggatttcttctaatttttctactgcctgcattgccttttcatctagctccaatttatattcttgtagtttactaagttctaccctattgttttccatatgtgtcttaagatttaatatttcttctttcaacatctttttatcctcctcaagtttttcacattgctgttgtacttttttcatagataaaaactcctgttgaagaacttgattgtctttagccaaattgacacattttgaagataaagcttccttctctgcggtaagatcatcaaactgcatgaataaaataatatagcttgataatgaagtaggctgagtataatctaatacaaaaccaatagcaaattttgaaatgcatttacttgcaataaaatgttatctgtaatgcagtggattcttcaaatgtgaacccttaaattactcagaattttaagaacaaagttaaagctaccatgagtcacaaaaatatattatttgctatcatcatctttgccacagaacttttgcacttca

SEQ ID NO: 5117 - DNA, 517 bp, Homo sapiens
  MAP TO AF020515.1; EXPRESSED IN BONE MARROW, SIGNAL = 1.2; EXPRESSED IN ADULT LIVER, SIGNAL =   1; EXPRESSED IN BRAIN, SIGNAL = 1.3; EXPRESSED IN LUNG, SIGNAL = 1.3; EXPRESSED IN FETAL LIVER, SIGNAL = 0.99; SWISSPROT HIT: P56093, EVALUE 2.40e-01; NT HIT: AF055066.1, EVALUE 8.00e-06; EST_HUMAN HIT: AA261895.1, EVALUE 1.00e-08
ctccttaggaagggaggtggttgggtgggatgccccacacttcgtggtcagccagccctcccctaccacagccaagcagaagacagctaaacttctgacattggcggtctcactgctagcccctagaaggacctgctacagtcagcaggacctgctgcagtcagcagcacctgccaagaagatattcttactcccctttatggtgaggacaactgtgtgtgagatgagggatgaggcatggccggcccacatcattccatctgtggagacaaaagtgactccatcttggatgctaatcgccatgttgactctgtttagccaccgccctgagaatgttgatgtcatcgtgcatatcattggctatggcgaatatagcgtcctcgacagtcctggaggtggccttcaattgtctctagagagcatgtaccccctttccctatggtatataagcccgggtctgggggtaacagtgggacatctacgtgccttgcccctgcccaagaccatgcctctgtct

SEQ ID NO: 5118 - DNA, 553 bp, Homo sapiens
  MAP TO AL022317.1; EXPRESSED IN HEART, SIGNAL = 1.5; EXPRESSED IN ADULT LIVER, SIGNAL = 2.5; EXPRESSED IN FETAL LIVER, SIGNAL = 1.6; EXPRESSED IN LUNG, SIGNAL = 3.4; EXPRESSED IN BRAIN, SIGNAL = 1.7; EXPRESSED IN BONE MARROW, SIGNAL =   3; EXPRESSED IN PLACENTA, SIGNAL = 1.8; SWISSPROT HIT: Q05285, EVALUE 1.40e+00; NT HIT: U63408.1, EVALUE 1.30e-01
tactcaagtggcaggtgctggagaggcagatgactatgacacattggcacctgcaccactcactctgcacagggctcttccaggaaggccagcatggcctccaccaaatacactggcattggcaagagcctctctggcctgggaccacataggagcagcaaccagggacggcatccctcacatttatggtggagctgtttatgtagaaataaaggcagaaggctagagccaagccagccaagccaactggggtcaggagggatcctcctaggagggaagcctggcccacctgggccccaggtctacagggtaaccagctaggtgggagtgacagtggggacatgggactcagcctcttgttctgccccttaagggatgctgcaaggtgatgccgcaagacatgaactcaaggactgacagccccaggttcaatgctgactctgccactggatggctgtgtgcccttgagcctgtcccttgcctccggggtctaagttcccacatgggtgctgtgagaatgggtgggttacagtggtcattactgtgcggtgtg

SEQ ID NO: 5119 - DNA, 538 bp, Homo sapiens
  MAP TO AC006277.1; EXPRESSED IN BRAIN, SIGNAL = 1.4; EXPRESSED IN BONE MARROW, SIGNAL = 2.4; EXPRESSED IN PLACENTA, SIGNAL = 1.1; EXPRESSED IN ADULT LIVER, SIGNAL = 1.6; EST_HUMAN HIT: U51702.1, EVALUE 2.00e-60; SWISSPROT HIT: Q9Y463, EVALUE 1.50e-01; NT HIT: D87917.1, EVALUE 1.30e-01
taggccaaaacaaaactccgaaatccccttactcctatccccacgaccccacacagcaggtttctctcgctctgcagcaacccacttacctctcggaaatcatcccaggcctgttcggagtgcacgcagccccgttagcctccctggctgctcctgtaaccagcccagctctgcctgagaggttccgctattccctccgtctggaatacccaccactctctcccaccccgcgcttgcatccggcaatactgtatcagcctcagggcctctgctgtcccgctttctgctctcagagcctttgtcactgggctggaagagcagttgggaaaattcggtgataaatgcatagcccggggctgggaccatcaaggggacccagtaagttggctccagaaagaggacttgaagcttcgtttgcattgcacgttatttaatattgaggaaaatgtaattagcccgtatctaagaattggggtgacagcgctaaagattgaacccacccacctcccactcctcacctccagccataagccacttc

SEQ ID NO: 5120 - DNA, 594 bp, Homo sapiens
  MAP TO AF024534.1; EXPRESSED IN BONE MARROW, SIGNAL = 1.8; EXPRESSED IN PLACENTA, SIGNAL = 1.8; EXPRESSED IN HEART, SIGNAL = 2.3; EXPRESSED IN ADULT LIVER, SIGNAL = 2.1; EXPRESSED IN FETAL LIVER, SIGNAL = 1.8; EXPRESSED IN LUNG, SIGNAL = 2.2; EST_HUMAN HIT: R42590.1, EVALUE 6.00e-08; SWISSPROT HIT: P09099, EVALUE 2.00e+00; NT HIT: AB036934.1, EVALUE 1.40e-01
atagggtcaaaggggaggtggatgcgtgccaagagggacaacccagggaggttcctggcattatgataacccagtctcaagggaactcatccagtccctaaagtctggtcagagcaagaactcattcactgccaggagaatggcaccaagccattcatgagggcatccactgccatgacccaaacacctccctctagaccccaccccccaatgcccccacactggggatcaaatttcagtagcagttttggtggagacaaaccatagcagggtgggtgggtactctcacttggacgtgcctccttgggaccatggagcaggtttcggaaggatagaactctcattgtcaggcctgtccagcaccctgggctgtccccaggagtagacttgcccgtcacagacaggatgggccacatccaggactctggcatccaacgtgacgtgcagccctgtgaatacaggacaaattctagggatatagggcaaaagggacctatggcccagcattcagagagagctcacagcgtgggcacccagtgaaaactcaaacctggaaactaggactagggacagtgccacttcctgagacagagc

SEQ ID NO: 5121 - DNA, 586 bp, Homo sapiens
  MAP TO AC004235.1; EXPRESSED IN BONE MARROW, SIGNAL = 1.1; EXPRESSED IN ADULT LIVER, SIGNAL = 0.99; SWISSPROT HIT: P03876, EVALUE 1.50e+00; NT HIT: AB046772.1, EVALUE 1.00e-118; EST_HUMAN HIT: AA290743.1, EVALUE 1.00e-111
tcacagagttaaagcgtgcgggtgaacgctggccgcggagcgtgcagcccggcagcagctcagcggggcagctcctgcttccagccctgcctctgctggtgcttcgcccacaaaccctgctgtatgacatttgcaccacatggtgtgtgtccgtgccctttgacatgacagtgccaacaacatctcatgaaatttaaaataaatccccaaggcatcagaaacgtatcaactaagaactctaagtttgaaaatgggggtggggcagtggccagttccgggagcccctggccccccgggacctgacccacagtcataaggtgggccccattccccagtggtcccagcctagcctcctgtcccacctcctctgccaagacagagtggcacaggacccctgtcgctcaggccagcaggtgtgtctctgagctggccgtgggcactgaccgccctcccaggtcccctccagtgccagctcttctggcttcccctcccagcccccttcgtgagcgccttgatccagcccaaccttggagtgggggttggtgatttgggggctggacctcagccctcttctgctctgccactt

SEQ ID NO: 5122 - DNA, 553 bp, Homo sapiens
  MAP TO AC005211.1; EXPRESSED IN PLACENTA, SIGNAL =   1; EXPRESSED IN ADULT LIVER, SIGNAL = 3.1; EXPRESSED IN HEART, SIGNAL = 1.3; EXPRESSED IN HELA, SIGNAL = 1.6; EXPRESSED IN FETAL LIVER, SIGNAL =   2; SWISSPROT HIT: P18627, EVALUE 3.50e-01; NT HIT: AF331669.1, EVALUE 3.40e-02; EST_HUMAN HIT: BF513767.1, EVALUE 0.00e+00
aagaagcaagcgcagtaagcactgtggagtggggaccgggggcagcaaagggaccggctctgggattgctctctcctccctcaagcccgccagagcttgagcccctggtgcccctttcctgctgtgcagctgcggccgccagcgcatcaggggttaatgtctggctggtgccggcttcagcagcagcagcagcaacagcagcaacagacagtggtgccagtaactcagaggctgaaatgtgagaagcaagacgagaggggcagggctgggaaaggctgagcagcagcgagcagagagggtttccctggcaggagccacaggaggctgcctggtcctcccttccatggccctgccgtacagctggccctccagcctcgggctggggtatggcaccctctcagggtggtgggggtgtccatggtcatggccagcgtccaagcccttaggccaccgggaagcagttccctactgcagatctagggaaggggcacaggcgcccaggcaaccagcagagaaggcacccggctctgcccggctctgcaggaagctctag

SEQ ID NO: 5123 - DNA, 546 bp, Homo sapiens
  MAP TO AL022343.6; EXPRESSED IN FETAL LIVER, SIGNAL = 9.7; EXPRESSED IN PLACENTA, SIGNAL = 3.4; EXPRESSED IN ADULT LIVER, SIGNAL =  10; SWISSPROT HIT: P93528, EVALUE 3.50e-01; NT HIT: AJ315771.1, EVALUE 5.20e-01
aggtaccagtgggtggtgagtggtgctaatttgggttgcatgaggaaagtaatcacactcatttcaagaacagaattctggtagcagaggactagattattcagtatatgccacaagctcctcattggcataaaaaatggtttattaagacaacaggtacatctgttcacttttatttgtgtataaacagagacaatacatagaagcaaaggaacccaatatttctgtacataagaactagtttacttccctccttcccttgttgagattctcagcatatcacaaaggcaatgtttgaaaacttaccatttattttgtctaaacctctgaattgaagcaacacaagtgaaaacattaccaggtaacacactgaatacattatctcgaatttagccattatgggtttattcacccccttgcaaattcgcagaaacagcccctcagagtccccctctaagggagaaaaaaggccaaaagcacttcttgtacatgttttgtacggtttgactctgcaaccctggtcaccgtagacttggccagggagtg

SEQ ID NO: 5124 - DNA, 580 bp, Homo sapiens
  MAP TO AC035149.2; EXPRESSED IN BRAIN, SIGNAL = 0.56; EXPRESSED IN FETAL LIVER, SIGNAL = 0.39; EXPRESSED IN BONE MARROW, SIGNAL = 0.51; EXPRESSED IN PLACENTA, SIGNAL = 0.53; EXPRESSED IN ADULT LIVER, SIGNAL = 0.53; SWISSPROT HIT: P75955, EVALUE 3.70e-01; NT HIT: AF092539.1, EVALUE 1.40e-01; EST_HUMAN HIT: BF683816.1, EVALUE 2.10e-01
tgcttatttcctgtgaggggttttcctgtgataggaggcacttttcttcctttcctccccagaatccgaggagaaggaactgccccactgaccagagtgacaatgcccataggactgaaggggtaagagcaacagaaacggaatgcttgaaaggagcagaaacagtgtatggcagcagcaaatatgtgtcagatagaaagacaaagggaaagggacacaaagaagtattcacaatggagcaacacacatgtagtgtgttttataatgctggaaaaattctgtacctttcccatctcacagagaaaagagaacacaaaggaagatggataaaaaaaaaaaatgatgcagccactgggccggttatctctggctagagaaggattaccatttccttacaaaaagaaattgataattgaaattaaactcagattgcccaggtatacctgccggcagttggaatgtttaacttaactgctcggtttacttattgacaagcaaactcccttttactaatagaaccaatttacaaaactttccggtcatcataaatagaaaagccagatatggtaacaccgcgatg

SEQ ID NO: 5125 - DNA, 526 bp, Homo sapiens
  MAP TO AC005784.1; EXPRESSED IN ADULT LIVER, SIGNAL = 2.3; EXPRESSED IN LUNG, SIGNAL = 2.1; EXPRESSED IN BONE MARROW, SIGNAL = 2.3; EXPRESSED IN PLACENTA, SIGNAL = 1.4; SWISSPROT HIT: Q10586, EVALUE 1.70e+00; NT HIT: U50649.1, EVALUE 5.00e-01
gaggctgagcaccttgagacaggccacatccagccactcaccctccacctcccactgtggtggcactgaaaagcccgctgtcgctgcacgtcccacacttagggtgcacttctggacttctgcttggtttagtcccactaccaagagcgcgtggttccccttgttttccatggccagtgcttactcctgcacagacaccatctccttcaggaagctcccactgtgagaggcgtgcctgccctgctgcactccctcccgagcaggccttatatcctgccacggggcacgcggagaccacggccacagcagctgaaacagcctatcacccagcgtacaccgcatcaacaccctgcaatgagtgtttgaactaggccctctctctgtcattcatctacacaacaccagctgctacgtactcacaaatatttactaagccctcattctgtgcagggcgccacaggaagagtggagaacaggaagctgagggcagacgcttcaggagaaaacatctgactgaaagggaggg

SEQ ID NO: 5126 - DNA, 522 bp, Homo sapiens
  MAP TO AC018359.7; EXPRESSED IN HEART, SIGNAL = 2.1; EXPRESSED IN ADULT LIVER, SIGNAL = 2.1; EXPRESSED IN LUNG, SIGNAL =   2; EST_HUMAN HIT: AI028282.1, EVALUE 9.00e-16; SWISSPROT HIT: P57503, EVALUE 3.20e-01; NT HIT: gi15294371, EVALUE 6.00e-16
ggaataaggggaaggcagagatgaacagccagagcacagaggatttttcagagtagtgaaactactctgtatgatatcacaatggtggacacatgtcattatactttgttcaaacccacagaacatacacaccaagagtacatcctagtgtaaactatgaactttgagtgataatgatgtttcaatgtaggtttattgattgtgacaaatgtaacgttctggtacaggaggatgatggtgagaaggctcgtcatgttttggggcagtgggtatgtggaacatttctgttctacccacttaatttcaccattaacccaaaattgctctaaaaaataaagtttgtatttaaaaaatagtttctcattatccaatccccaataacattagaaacataacaaaaaagtaccaaaatattcttaactcttagttaaaatatgcaagtaatataatatgcacacatgtgcaaacacacacacacagtttacctatgcaaaaaagatcaccagatcacccagtgtaact

SEQ ID NO: 5127 - DNA, 527 bp, Homo sapiens
  MAP TO AF031076.1; EXPRESSED IN PLACENTA, SIGNAL = 1.1; EXPRESSED IN HEART, SIGNAL = 1.4; EXPRESSED IN ADULT LIVER, SIGNAL =   1; EXPRESSED IN FETAL LIVER, SIGNAL = 0.97; EXPRESSED IN LUNG, SIGNAL =   1; EST_HUMAN HIT: H21421.1, EVALUE 4.70e-02; SWISSPROT HIT: P32323, EVALUE 2.90e-02; NT HIT: AJ400877.1, EVALUE 3.20e-02
aggtgcacatcagtgcagagactcaagggagggaaaggattgtctcgtatgggtattggggttaactgacgacgacagctctgggaaaagaagtgacaagcagctcccagatttaacaacatgaaggtcatcactggagacctcatggagcagcttggcagagctgtggcagcaaaggaacaactggagaaggttgaagagggtgtggagacagggactggagtcttgctggtaaaggaaaacagagatgctagacaggtggggggttgggagcagcttttgtcaaggtgggagaagtagcaacaagtttctagggcaggcgagggaggaatctctgatgggggagagtgcagtagaggactggagagatgccttagaacaggagtgagggcctgggacaggcgctccgtgacagcatgagggaggcagagcgaaggagtagacgctggcctgtagacactctcttgagcttgcttctgtgctctctgggaactaagatatcagctgcaaggaggtgtgacagctga

SEQ ID NO: 5128 - DNA, 600 bp, Homo sapiens
  MAP TO AC006128.1; EXPRESSED IN BONE MARROW, SIGNAL = 0.99; EXPRESSED IN ADULT LIVER, SIGNAL = 0.98; EXPRESSED IN PLACENTA, SIGNAL = 0.78; EXPRESSED IN LUNG, SIGNAL = 0.65; EXPRESSED IN HELA, SIGNAL = 0.85; EXPRESSED IN FETAL LIVER, SIGNAL = 0.54; SWISSPROT HIT: P98106, EVALUE 3.00e-01; NT HIT: gi6681126, EVALUE 5.70e-01; EST_HUMAN HIT: AA699374.1, EVALUE 3.30e+00
tgctatgggagctatttgggggcgatggtggctgctgggctcacgcagccaagggcacacctgctcaaggccctgcccctggaagcacggcagactcagtggaagcaacttcaagggaacataaggtgccaaatggggggctccattgggcagggggtgagaccctggggtcacccccagactctaatgtccacaaagatatgggaaagcctgatgttgtaagggacgtccttgttaaacctgctcactgcacctggagggtttcttcccaaaccctgcctgccgtgcccacaggcagcccaggaggtggggcttcaccggcaggcgcagagagctgcctctgcgtggtggacagccaggaagacttgatgacaggaccaatcgtgggcacctcccatcaggtgatcccctgtctatccaagatgcttccaactaccactgagaaagctaggccacaggaaccctggttaccttcaccgcccctacccacaggcccagagaaagccaagagctgcccctcagtggcgagcatgaccctggcaggctcatcagccgcagtgaggctttcaggggaagatcagcaaagtaaagtgggaggca

SEQ ID NO: 5129 - DNA, 501 bp, Homo sapiens
  MAP TO AD000684.1; EXPRESSED IN ADULT LIVER, SIGNAL = 3.4; EXPRESSED IN FETAL LIVER, SIGNAL = 2.7; EXPRESSED IN BONE MARROW, SIGNAL =   4; EXPRESSED IN BRAIN, SIGNAL = 3.9; SWISSPROT HIT: P24349, EVALUE 2.70e+00; NT HIT: Y07661.1, EVALUE 0.00e+00; EST_HUMAN HIT: BI037543.1, EVALUE 5.00e-45
ttggttgtgggagaagttccatttagaatgcctcaggagggaagatcgggaaggcctcgaatgcccgagtgaggggctgaatgctgagtcctaaaggtggtgatgggactggggtctgtggcccaggtagttgtgttctgagcagctcctccctgagttcaggcgttcattcagcgcgtgcatactacgaccagccccccttttgcgtcctcagatatggcaatgcagcagatgataggacagacaaggtctcagctctctgtgcgcgttctggtgggagagatgggagtcacacagccgcatcaggcagtgcaggcagtcacaggcaggagaggaaagctggggaagaaggtggcgggtgatggcggcatggtagtgtgctctgaagggctcttcgagaggtgacattgaagcagatccctgaagcgacctgagggaaggggcctgttgagaacctcaggagagtcccgggcagagggaagagctagaacacaggccagg

SEQ ID NO: 5130 - DNA, 535 bp, Homo sapiens
  MAP TO AC026431.2; EXPRESSED IN HEART, SIGNAL = 1.9; EXPRESSED IN PLACENTA, SIGNAL =   2; EXPRESSED IN BRAIN, SIGNAL = 2.2; EXPRESSED IN ADULT LIVER, SIGNAL =   2; SWISSPROT HIT: P56655, EVALUE 3.80e+00; NT HIT: AY011094.1, EVALUE 5.10e-01; EST_HUMAN HIT: BG193576.1, EVALUE 7.50e-01
atgattgacagccagatccccatgtctggattttatccatgagactgccttcgctctcaagcctaacctcattcatagcttgagatgaaccacgttctttcctaaatgccatttattttgaatgagcatcccattcccaattcctttctttcagtctcaacagtttgatagcctgtgacactttcctctgattggccctttcccattctcacccacttgtgttgttccagctcatgcttttggtccttaagccaaagccctgcccatctccaagagagtttctctatgcttttagattctcctctttttacagtgacttgaccttgcagaattcttggctgtcccaggtaagactctaccctgcctatctcttttcctccataagtaaacagataataaactggaaaaggaaggtaaatccagattgtttagaaatgtagaggaacaaagaaggtggagctgaggcaggaaacattaggtagaacagagtagaggtcatagatagaagaaggaatgaaggaaagcaggaatggaa

SEQ ID NO: 5131 - DNA, 560 bp, Homo sapiens
  MAP TO AC018452.11; EXPRESSED IN HEART, SIGNAL = 1.1; EXPRESSED IN ADULT LIVER, SIGNAL =   1; EXPRESSED IN HELA, SIGNAL = 0.97; EXPRESSED IN BRAIN, SIGNAL =   1; EXPRESSED IN PLACENTA, SIGNAL = 0.99; NT HIT: gi14730577, EVALUE 1.00e-115; EST_HUMAN HIT: W35217.1, EVALUE 1.00e-115
gtcagcatgtggtcatgtggttttgttctaactgttaaatagattaacatttcttgctctatttcagcagagcaaataattttgaaaaaatgattcctggtttttctgaattgtgttttgaggtggtaacagaccagccattctaaatggctcagtgtgattgcagtgtgaattttaactgcactttagttattcactcataaccacactttagttgattgctcactaaatgttttagcttttgagccatcgcttgtgaaactccttgtatcaggtaaattagtttcatttattatgttatttggtaatatatctgcctttgttgaacatgtataatttttccaaccttaggaattaagaaaggaactagatattcttctgcaagagaagattgaaagtcctcatcctgtagactggaatgacactaaatccagagactgtgcagtactgtcagctattatagacttgatcaaaacacaggaaaaggcaactcccaggaactttccgccacgattccaggatggatattacagctgacagcttttcaggggtggtctgaa

SEQ ID NO: 5132 - DNA, 506 bp, Homo sapiens
  MAP TO AC006133.1; EXPRESSED IN PLACENTA, SIGNAL = 3.7; EXPRESSED IN ADULT LIVER, SIGNAL = 1.1; EXPRESSED IN HEART, SIGNAL = 1.3; EXPRESSED IN BRAIN, SIGNAL = 1.1; EXPRESSED IN LUNG, SIGNAL = 0.96; SWISSPROT HIT: P97400, EVALUE 5.00e-16; NT HIT: gi11425973, EVALUE 1.00e-116; EST_HUMAN HIT: C18923.1, EVALUE 0.00e+00
actgcagtatcatcggggagactttttgccctgggtaaaggggggaagggatttgtgtgtgtggcgagtgtgtgtctgcacaatggggggacctgcccaacatgctgtgtgctttgacctcagcaaggacccacagctggaggtgaatttctacactgggatggatgaggactcagatattgctttccaattccgactgcactttggtcatcctgcaatcatgaacagttgtgtgtttggcatatggagatatgaggagaaatgctactatttaccctttgaagatggcaaaccatttgagctgtgcatctatgtgcgtcacaaggaatacaaggtgagtacttcaggatcttccagcgctggagctctgtgggctcttagagcaggaggcagctttcattgacctggtgccaccagtcccttggggcccatcttccataactattcctgtttcaggttttcatcacagagcaccctctgcttgcactgccatcctcagctctttc

SEQ ID NO: 5133 - DNA, 529 bp, Homo sapiens
  MAP TO AC034103.5; EXPRESSED IN BRAIN, SIGNAL = 2.8; EXPRESSED IN LUNG, SIGNAL = 2.2; EXPRESSED IN BONE MARROW, SIGNAL = 2.2; EXPRESSED IN PLACENTA, SIGNAL = 2.8; EXPRESSED IN HEART, SIGNAL = 3.3; EXPRESSED IN ADULT LIVER, SIGNAL = 2.4; EXPRESSED IN FETAL LIVER, SIGNAL = 3.1; EST_HUMAN HIT: BG468726.1, EVALUE 5.00e-11; SWISSPROT HIT: P27715, EVALUE 1.00e-05; NT HIT: U75361.1, EVALUE 8.00e-37
agattgccacagacccagagaaaaagaagactcattttatttaacctacctttgcaaatcttctcattaagtgagataatgcttcaggattagggcattccagtttcttaataatttcaaagctctgattcagctgagcaaagacatcaaccacggagcaagaaaagagagcatgctcagatgtctgctggaactgtggggagaggaggtgaaaccatcccaaacagtacattagaggcggaatggaaaaatcttcactgtttcccatcaacaactgaatctcccgtatcacatatttacatttcccagtaataaaatgcttacccactttaaaatcattaatctccttttcttgaaagtgtggtggaactaatatcatggggcaagctactgctaattggtttttccactgctgaattgaggtactggttcttttgtctttcattttctccacaggcaataggttagcttagcaagacggttgtggctcacgattttgggagctgcttcacagggactgggagaatgt

SEQ ID NO: 5134 - DNA, 589 bp, Homo sapiens
  MAP TO AC020914.6; EXPRESSED IN BONE MARROW, SIGNAL = 2.4; EXPRESSED IN PLACENTA, SIGNAL = 1.8; EXPRESSED IN ADULT LIVER, SIGNAL = 1.7; EXPRESSED IN LUNG, SIGNAL = 3.1; SWISSPROT HIT: Q11116, EVALUE 2.50e+00; NT HIT: gi9506560, EVALUE 8.80e+00
gctgctgcttctccattttcttcctgtattttaatctccagcattagcctctcattatctgaacctagttggaagctggctaataaagatgcctgataaatgtggtctggcagaggaagtatctggagtacatagcaatgtagaggaggtgcaaggaaaggttctgagagcagagcagtcatggacggtccatccaaccatcaactatccagccagccactcatccatccatccaatcattcattcatccatccatccatccatccatccatccatccatccatccatccatctcgcccagcagtacagttcaggagataggatatgaaactggacagagattatttctggatgaaccaagtcagcaagtgattcaagatgcagagaggtgggctttagtaagagatacaggggctctgttcctctggacttcaatgtccatcttctcaccatgtccagaggagagagatcagttcagtccactctcccagccatgcttctctgggaccctctgatcctgtgagaaaatgtaagaggaggttagcagttagggctgcagagagctcaccctgaggaagacagaccaggc

SEQ ID NO: 5135 - DNA, 596 bp, Homo sapiens
  MAP TO AC005264.1; EXPRESSED IN FETAL LIVER, SIGNAL = 1.3; EXPRESSED IN ADULT LIVER, SIGNAL = 1.8; EXPRESSED IN PLACENTA, SIGNAL = 1.7; EXPRESSED IN HEART, SIGNAL = 1.5; NT HIT: gi12741902, EVALUE 1.00e-100; EST_HUMAN HIT: AL532310.1, EVALUE 1.00e-100; SWISSPROT HIT: P30679, EVALUE 2.00e-24
tacagatggggaaaccaaggcacagagcggcaaagccgctagcctagggtcactgagtgaggtcccggctgcaccggggtttgaacccaggaggcctggcgtggagttgggggtgtctgacgtggggttgggggtgtcgggggtgggagtcccgtggagggctgagcggttctgctgctccatccccaggcccaggcgagagcgggaagagcaccttcatcaagcagatgcggatcatccacggcgccggctactcggaggaggagcgcaagggcttccggcccctggtctaccagaacatcttcgtgtccatgcgggccatgatcgaggccatggagcggctgcagattccattcagcaggcccgagagcaaggtgagccgccagggcaggcaggggcccagggcaggcaggggcccagggcagggttccccagaccccggagcagggccaagttccccagacttcagggcagggcagggcagggcagggcaggcagggaagggtccccagaccctggggcaaggccatgtcctccagacatatgtgcatacatacaagtgcacacacaagtatacacgcataaatgcacacacg

SEQ ID NO: 5136 - DNA, 569 bp, Homo sapiens
  MAP TO AC004205.1; EXPRESSED IN BONE MARROW, SIGNAL = 0.68; EXPRESSED IN ADULT LIVER, SIGNAL = 0.46; SWISSPROT HIT: P30466, EVALUE 2.00e-10; NT HIT: X80018.1, EVALUE 9.00e-03
ctcagctgatccctctcaggtggggaagcgctggggccattttgctccaggtttctccttcaatctggatcatgactgacttgttctgtgaccaatgacagaggaaggaaggagctggggtgggcggggcgacctccctcccctccctggccccgcctccggctcaccctggggcaggtccagagtaccgcacctgcagatgctgctgtctggctgggtggtggctccggacaggagcttcctcgaaggacactttaagtccgcctacgacaaggagatttcatgtccctgaacgaggacctgcagacctggacagcggctcaaagagtggcttggaggatccatcacacctgggagaggttctggaccgcggaggccacaagggaagccccgatgggtcactgcactaggtggctgctcagacacctggagcatggcaaggagatgatgctgccggcaggtactggggtcctccaggccccacgtcaggacctcttggagctggaattatgttccttggaggcatccatatttgaggaaagaggagaccgaacagtctccgtctcctc

SEQ ID NO: 5137 - DNA, 591 bp, Homo sapiens
  MAP TO AC026711.3; EXPRESSED IN BRAIN, SIGNAL = 2.8; EXPRESSED IN LUNG, SIGNAL = 1.4; EXPRESSED IN ADULT LIVER, SIGNAL = 2.5; EXPRESSED IN HEART, SIGNAL = 2.1; SWISSPROT HIT: O60610, EVALUE 2.60e+00; NT HIT: gi9838361, EVALUE 5.60e-01; EST_HUMAN HIT: AW998655.1, EVALUE 2.10e-01
ccaaagcacttaaatcctgcacttactagaaataaactctcttctttgaaacaaattagagtgtgctctaaaaggtgacttgtttactgttcttttttgaaataaaacatcactgaatttcatgttgtgattctatttaggagaagcaggatcagtaaaagcagcacttataaaatggaaaccttcagcagcctaggcagggccttcctggatggaactggtgaggggtcaggtttaagacctgctgatttagacagtccaccttctggctttggaatcctcattaaaattgccctgcgaaccctgggcttcccactcctttgccctgcaatgttgcttctgtcgtgtggctgcactgctaacaccttcattacgttctgtcgcactagattgcatcatggctgggttcttctccccttcctctacccaggccctttggcaggtaacttcacagagtcctttgaccctggatccagcagcttcttcccttgatttggttcaaccaatagtgtaaggcagatgtaagagtgtgcagggttccagcccaggcctggagagtctttgtgtttcagttctctctggagcctctgc

SEQ ID NO: 5138 - DNA, 578 bp, Homo sapiens
  MAP TO AC016651.5; EXPRESSED IN HEART, SIGNAL = 1.3; EXPRESSED IN ADULT LIVER, SIGNAL = 1.6; EXPRESSED IN BONE MARROW, SIGNAL = 1.5; EXPRESSED IN BRAIN, SIGNAL = 1.2; EXPRESSED IN PLACENTA, SIGNAL = 1.4; SWISSPROT HIT: P70213, EVALUE 5.00e-39; NT HIT: AL163209.2, EVALUE 0.00e+00; EST_HUMAN HIT: AI452907.1, EVALUE 1.00e-123
aatctggagaacaggcatgggaatggctattaagggtgtgggataatggtgaaaggaacatagagtaggatcaggctgaatttattgatttgggcccactaaataggaactctatatttaatgttgcagctcagggagttaaaggtttatttgcttggttagcggacattcggactaaaagatggcccactgtgaacaagctggaaatgcctgatctcccttggtttaatgtagaggaagggatcaaaaggcttagagagattgggatggtggagtggattagtcactttagatgtactcatcccagctggaagggtccagaagatatacccttgaccaatgccttgcaaaatagattcgtgagggcagcacctgcatctctgaagagccttgtaattgctcttctctgtatgtcagatgcaacagcgggaactgcagtcactcaattacaaaatttaaatacaatgggaataattggatcccgaggtgtcagggaccaagtggtagcactcaaccatcaaaggcaaggtgggtgtagcgaccgtaatggacagcagaggcaaagtggcaatcagaat

SEQ ID NO: 5139 - DNA, 592 bp, Homo sapiens
  MAP TO AF050737.1; EXPRESSED IN ADULT LIVER, SIGNAL = 1.2; EXPRESSED IN LUNG, SIGNAL = 1.1; EXPRESSED IN FETAL LIVER, SIGNAL = 0.94; SWISSPROT HIT: P52702, EVALUE 4.00e-42; EST_HUMAN HIT: AW139137.1, EVALUE 0.00e+00; NT HIT: AF050737.1, EVALUE 0.00e+00
agcaaaagagtggcagaaggcccaacatttttagaaaattcttagccgtaaaccttaaaatcccgagttggaaaattctcattattaaatgccaggagttggtcttcttcctggagacctctgcaagaggccctctcactgacaccttgtgtccatttttcctggccagagcctggccacccagtggctccaccgccctgatggatccactgaatctgtcctggtatgatgatgatctggagaggcagaactggagccggcccttcaacgggtcagacgggaaggcggacagaccccactacaactactatgccacactgctcaccctgctcatcgctgtcatcgtcttcggcaacgtgctggtgtgcatggctgtgtcccgcgagaaggcgctgcagaccaccaccaactacctgatcgtcagcctcgcagtggccgacctcctcgtcgccacactggtcatgccctgggttgtctacctggaggtaggtgggccccctgcttgctccagcactttctccagcagggccctgcactggacactggggactctagctccccactggcttttaccaatgagtttcctggtgct

SEQ ID NO: 5140 - DNA, 578 bp, Homo sapiens
  MAP TO AF015721.1; EXPRESSED IN ADULT LIVER, SIGNAL = 0.86; EXPRESSED IN BRAIN, SIGNAL = 0.81; EXPRESSED IN LUNG, SIGNAL = 1.3; EXPRESSED IN FETAL LIVER, SIGNAL = 0.71; EXPRESSED IN BONE MARROW, SIGNAL = 0.66; EXPRESSED IN PLACENTA, SIGNAL = 0.9; SWISSPROT HIT: Q01113, EVALUE 4.30e+00; EST_HUMAN HIT: BG391485.1, EVALUE 8.10e-01; NT HIT: AL163267.2, EVALUE 0.00e+00
tgtttggttgagaatggctgaatttgaactctgggatgaggtctgcatatccctcagcatatctgaggagcataaaggcccaggggtcaggttccaatgtgtcctcactgagaagccgagcttctctctatcagtctggccgagagaagagcttcaggtcaccttggatccctctcgtggttccacttggttcttgccttctccatcctgaggtaccagttcttgaccctggtccgtatttctggtcccgtgtggttcccatctttctgtgtgaaccacaggagagcctctgtatcccgcatctctgtctcgctaggctgaactctccttgctgatctttggcatctgctgtctttatgagacaagataacttggagaatttctaaagctgtgttgattgaaaaagatttgttgtgagaagttccatacagacatagatctaccatgtcctgtaagtgtccaccaagcgtgtaaattaggataccgtttatgagacacccctcacacctacatttcactccagccgtgcattgcaaccaccatcttcccatctgtaacctcatagcctcctgcctgag

SEQ ID NO: 5141 - DNA, 563 bp, Homo sapiens
  MAP TO AC025182.2; EXPRESSED IN BRAIN, SIGNAL = 2.1; EXPRESSED IN LUNG, SIGNAL = 0.96; EXPRESSED IN PLACENTA, SIGNAL = 2.2; EXPRESSED IN ADULT LIVER, SIGNAL =   2; EXPRESSED IN HEART, SIGNAL = 2.2; SWISSPROT HIT: P31792, EVALUE 9.00e-17; NT HIT: AJ298105.1, EVALUE 4.00e-23; EST_HUMAN HIT: BG914193.1, EVALUE 1.00e-18
ttatcctccatgctcatgccaccaattggaaggagagacagtttctcactcctaatgggtctcccatgaaataccatcaggaaattaataggcttttatcttcacttttccttccagaagaagtagcagtaatgcattgtaaaggacatcagaaaggatcggatgaaatagctgagggaaataagttagccaaccaggcagccaagtcagcagcacgaaagcctcagagtgccaacacccttgaagcccctctaatctgggaaggctccatcagggaaataaacttcagtattctcctgcagaaacagaatgggccatttctcgcagattcactttccagccatcaggatggttgcagtcagaggatggcaagctccatttgccagcctccaaccagtgtaaggtccttaagactcttcaccaaacttttcatctagggaagaataaaacttatcaatgtgtccaaagattattctcagaggagaacctactaaaaacagtcaagcaggttgttaatgcttgtgaaatctgccttaaaaacacctccctcaacagatggcttc

SEQ ID NO: 5142 - DNA, 525 bp, Homo sapiens
  MAP TO AC026743.3; EXPRESSED IN BONE MARROW, SIGNAL = 2.3; EXPRESSED IN PLACENTA, SIGNAL = 2.7; EXPRESSED IN ADULT LIVER, SIGNAL = 2.6; EXPRESSED IN BRAIN, SIGNAL = 2.7; EXPRESSED IN LUNG, SIGNAL = 3.3; EXPRESSED IN FETAL LIVER, SIGNAL = 2.1; SWISSPROT HIT: O15393, EVALUE 9.60e-01; NT HIT: AF155142.1, EVALUE 3.20e-02; EST_HUMAN HIT: AW811789.1, EVALUE 7.40e-01
ttgtgtgtgtgtgcatgtccatgtgtaaggctgaatccgtcctgcctcaaagacagcaaaccttttcataatgactgtggaacacgtagccttcgccagagtcgatgctgaagagctgagtgcctgcggcccctcgtgccattttctggtgctccctccacaggtctcaccatcctgtctctcaaacccccttgcaaagccctggcttcagccagtgaacgtgacatgctgagatgcgctgatgcccaggagtgggaagcagcccggcagagtcaggccagtaaaggaaccctgagaaaatcaaccagaaacgtgtggacactggtgggggatccctggagggccggatgcagctgctgttacagaaggagcactttccacccttgaagcctgaaggcctaggagacgagagagcctggtgggtgaccagttaccattcttaccccttctggcaaggaaggtgggtaggctgcatgcttcccatctcttcttggagtaactgccagacacctttggtggggtaga

SEQ ID NO: 5143 - DNA, 553 bp, Homo sapiens
  MAP TO AC010613.5; EXPRESSED IN ADULT LIVER, SIGNAL = 1.1; EXPRESSED IN HELA, SIGNAL = 0.74; EXPRESSED IN LUNG, SIGNAL = 0.51; EXPRESSED IN BONE MARROW, SIGNAL =   1; NT HIT: AJ131016.1, EVALUE 8.20e+00; EST_HUMAN HIT: BF694396.1, EVALUE 3.10e+00; SWISSPROT HIT: P10290, EVALUE 9.10e-02
acattgtcactctccggctccaaaatatcccagaacttcatccatacttaaagtctgcaatctggcagctggctgcctctttcactggtatcctatacccttcctcattggcatcctctgctgcagtcacactagcctgcctgctgttcattggacacactaatcaccatcttgtcccaggaccactgcacttgctcatctttctgcctggaaagcatcttctgtagaaatccgcattgcttttgctctcacttcaggatctggttggaagtcttttactacatccagcccacctgctgccatgatttttatgtcccttaccctgcttttcgctttgcagcatttgtcgctacctatggtacatagtttatcatttgatccattactagaatgcatcttatccactccagcacttaggacagcatctaacacacagtgacttctcaataaatacatattaaaaggataaatggatggtccttattattccctgaagtacctttatttctcttgatcacgttttaattttttaagaaccaatgcaattcccatc

SEQ ID NO: 5144 - DNA, 527 bp, Homo sapiens
  MAP TO AC005795.1; EXPRESSED IN LUNG, SIGNAL = 1.3; EXPRESSED IN BONE MARROW, SIGNAL = 1.9; EXPRESSED IN ADULT LIVER, SIGNAL = 0.97; EXPRESSED IN HEART, SIGNAL = 2.1; EXPRESSED IN BRAIN, SIGNAL = 0.45; SWISSPROT HIT: P34909, EVALUE 3.70e+00; NT HIT: gi13937343, EVALUE 1.00e-04; EST_HUMAN HIT: BF829514.1, EVALUE 2.00e-04
gtacatcccccaagatgtggagagtgatagcagcctccttccccaggatattatgaaccataacacacccccggcaatatgaggagtaatatcaccctctcccgacctggatattacgaaccatgtcacaggagggtgtacatgccccgagatatggggagtaacattaccctctcctcccctggatattacaaaccatgttacaacccccgtgatatggtgagtaatatcacccactatatcccctagatattacaaaccgtatcacaggaaggtgtacgccccccacaatatggggagtaatatcaatctctccccttctggatattacgaaccatatcacagggaagggtatacctcccatgatatgggaagtaatatcaccctctccaacttggatattatgaaccatatcataaaggggtgtctgcacccagcaatatggaaagtaatatcaccttttcctcccctagatattacaaaccatatcacagggggggtgtatgccctctgcaatacggggatta

SEQ ID NO: 5145 - DNA, 513 bp, Homo sapiens
  MAP TO AF067846.1; EXPRESSED IN HEART, SIGNAL = 6.3; EXPRESSED IN ADULT LIVER, SIGNAL = 1.7; EXPRESSED IN LUNG, SIGNAL = 2.8; EXPRESSED IN PLACENTA, SIGNAL = 3.2
ggccttgctatatgagctgctgtgattagacatttccaagcccagcttaaggcaacatctaaccagaagagctctaaatataaactaaatgaggtgctgctctagtaatccatttatacacagcatttattttagccattttttttcatttgactgttggcagtcgatcattggatttatacggtttggcattgatcttggagaaggccagtttggtgcccacgtcaaacatgcccaatattctattgtccatgtgactccctagaattaattagaaaacatttcaaaagggccactctaggatttaatactatcaataatagttgtttaacccaaaatatgatgaatctttgctttatttatttctaattgggcagttttgcattttgccgagtaggattaataagcaggttaagtctaattggcttgctttgactgaagggctgaatcatttcaatatagaaacctgtactttttataatttgaaaaaaatccacccaaatcaatcctgaa

SEQ ID NO: 5146 - DNA, 569 bp, Homo sapiens
  MAP TO AF020800.1; EXPRESSED IN HEART, SIGNAL = 2.2; EXPRESSED IN BRAIN, SIGNAL = 1.7; EXPRESSED IN FETAL LIVER, SIGNAL = 1.5; EXPRESSED IN BONE MARROW, SIGNAL = 1.2; EXPRESSED IN PLACENTA, SIGNAL = 1.5; EXPRESSED IN ADULT LIVER, SIGNAL = 1.3; SWISSPROT HIT: Q9UGI0, EVALUE 2.40e+00; NT HIT: AL163267.2, EVALUE 0.00e+00; EST_HUMAN HIT: AA167573.1, EVALUE 8.00e-01
tcactgatgcctcaatcagcttcaagcgacgggaaaatggcaaaggaccagccactcattttaggactgccgctccatacaggatttgggatgcaacctccatacctagcagataattgggctgcggccacctacggagtcatttcaccagtgacaactgcccactgtgtgactaccagtgatatgattcatctggttttaaatcttctgctgaggtctcccgccccttgccagatcacagaagtgggttcttggcaaggactcagttacagcagaggagccagtgcccacagccccaagcggccctggttcatgggtcttctgcggggttccatgctctcctgtgtctcttcttcatgttgttacaatgtcaccaaagagtttgtccaaggtaaccttaaagaaactgtaatttcttgtcgtgaaaagagcactgggcaagaagttaagggatcagagttctggagagcaggaatcataagccttgcccttggacttgccttacagagttgccgtgagcaacgaacaggtgattaacatgaggacgggctctttgcaggtgatggaca

SEQ ID NO: 5147 - DNA, 596 bp, Homo sapiens
  MAP TO AC026796.2; EXPRESSED IN PLACENTA, SIGNAL = 3.1; EXPRESSED IN ADULT LIVER, SIGNAL = 2.8; EXPRESSED IN HEART, SIGNAL =   2; EXPRESSED IN BRAIN, SIGNAL = 2.7; SWISSPROT HIT: Q28071, EVALUE 8.80e-01; NT HIT: AB011399.1, EVALUE 1.40e-01; EST_HUMAN HIT: AI693006.1, EVALUE 2.00e-04
atacagggcaaggtgtgctcctgccagagtcaggacaaagggtctggaagaaagcacataccagggatttaagtggggaagtggtactggtgggagactgaagggatccagagggcacaaactctcttggctgcagttgcagagaccagctggggctgtcttggcagtcacagcagtggcagcacaagctgtaatggccacattggctggggtcccatcataagcctgcagatatgttttggggtagtggcattttagttattaattgctgggtaacaaaccactctaaaatgtagtggcttaaaaaagcaaccattttatttgctaatgattgtgtaatgtgggcttgccagtggccattgtgtggctgcaatcagctggtggagagtttgggggtctgtatttttgtggaatgccgggactactgggttctctcttcatgtagtcatgggacttctctatatggcctctccagtggagtagccagacttcttacatggcaactcaagagagcaaagaagcaaaaataaacttctaggactctgtaaaggtaggctgaccactggcacagtttcacttctggtttcagtggtccc

SEQ ID NO: 5148 - DNA, 572 bp, Homo sapiens
  MAP TO AC016830.5; EXPRESSED IN HEART, SIGNAL = 2.4; EXPRESSED IN ADULT LIVER, SIGNAL = 1.4; EST_HUMAN HIT: AA513125.1, EVALUE 1.30e-02; SWISSPROT HIT: P28217, EVALUE 9.40e+00
gctgccctgtaggatgtctcaccttctggattgattttgttttctctgatatcactgaacttaattaaccctctgatccctgtgtttcctgtgaagtggaaactgaatctacagggctcagtgatgagggctgagtatttttgagaagaagtcctcactggtggtgtgtgtgtcacattgcgtcccatcaggaggtcctcgatgtcgggttggcccacagttagcgatgctgagattgatcgcggccttaggctggtgaccctggtagttacgtccccccttgtgactataacagtggttctttggctctcggcgaagatccagttccccatcagtctttcacctaatggtgttggcgttcttgtccaaatcaatcacgtaattagaagatggaatagggcaatatttgataatctattattcggtccacattgcttagcagacattcttcaattaaagaaaaaagagccttctctaactaacggggctgtctggatagggacaaatgagtttttctctgggggttttctttgaggacttgtgggttttcatcttgcatcctgcttcactca

SEQ ID NO: 5149 - DNA, 547 bp, Homo sapiens
  MAP TO AC005266.1; EXPRESSED IN LUNG, SIGNAL =   2; EXPRESSED IN BRAIN, SIGNAL = 1.2; EXPRESSED IN PLACENTA, SIGNAL =   1; EXPRESSED IN HEART, SIGNAL =   1; EXPRESSED IN ADULT LIVER, SIGNAL = 1.3; EXPRESSED IN FETAL LIVER, SIGNAL = 0.72; EST_HUMAN HIT: AI198608.1, EVALUE 2.00e-10; SWISSPROT HIT: P04634, EVALUE 2.30e+00; NT HIT: AF107201.1, EVALUE 3.30e-02
aaggggagtcatgtcacagcatgttgctctacaccaataagacatctccttccccataaggccttaatttctcccttccactcagacataccatgaagccacaaggccactggcaaggagatcctgacataacaaccatatggtccaggaagctctctccatcccccactggcaagggggggaacccatcacacaagcagacagcctgggaagtgcgctctgtctatcagagacccttccccagtaaggtttaccagatggctcagcctggggaagcttcttcttcccattcaagcaccagcagggaccagcgaaagcctcagtcacaggagataaaccaagcagaccaaaataacaccacataggctctgaaaattagactgtcattggaaccatagcctttaaaagtaggccagggcctgcatgccaaatctaaacagggtgactgcctgctaaaatgaaagatttaaataggaaccagagtctcctaaaataacatccaaaatgttaaggatacaatcgaaagtcacccatcgtaccaagaacc

SEQ ID NO: 5150 - DNA, 569 bp, Homo sapiens
  MAP TO AC005575.1; EXPRESSED IN BONE MARROW, SIGNAL = 5.7; EXPRESSED IN PLACENTA, SIGNAL = 8.7; EXPRESSED IN ADULT LIVER, SIGNAL = 6.1; EXPRESSED IN HEART, SIGNAL = 7.3; EXPRESSED IN BRAIN, SIGNAL = 6.6; NT HIT: gi14733262, EVALUE 2.10e+00; SWISSPROT HIT: P13264, EVALUE 4.20e-02
gctgctaagaaaggtgggtgcggtaggcagaggcaagaggggagtcctgtgggtgggctggccagaaatcacaggcccttaaggcaggaggaacctggcacagccagaccctcggacaatctccctaggccagcacaaccacatcgctgcgaactggaccgggaacattccaacctaatcgcagctcagatcagcgagctccggaggctccacacattggggccgaactccacccagggtgcctgccacttttgggtaggggggcgggtggggggcagcctgctctctcaccaggccaggcagcagcggggacttccagatcctcaaggattctccagaccgttgtctggagacccagagttttttcctctccagcttctggggcaacttggtggggcagaggggtggccccacctgtgggagggactgaaaagatcctgcctcaggaccaggactttggtgatcccagttctcaaggaccccctgctcaggctgctattatccaaaagggccgagggtcaggatttcagccccagcccgggcccaagcctgcactgttgcctctacca

SEQ ID NO: 5151 - DNA, 598 bp, Homo sapiens
  MAP TO AF131216.1; EXPRESSED IN ADULT LIVER, SIGNAL = 0.83; EXPRESSED IN BRAIN, SIGNAL = 0.86; EST_HUMAN HIT: AW737055.1, EVALUE 5.00e-39; NT HIT: AF163863.1, EVALUE 6.00e-04; SWISSPROT HIT: P17255, EVALUE 4.40e+00
cggaaatgccaatttttctgtaagagtaaaataaatgatgaattactgccacctccccattgactcaggcattcttgaaacacatcatgtaacagaacgattggatggggtccaaggcagaagggtcttgttggatccactcctataagcttcaatcgatgccctgaacctttttgggccccagtttcattacactaaaatagaaaaaataatctcgttcccatacttatatcttaaatttagtaggaagatcaggagtgtgcaaagcctagcttattcatctctctgcccctcacccccaggcctggtctactgggcatttaatgaatgctggattacactgaggaaggaaatccatctgaggagtctaaaaataaaatgaagcgtctgtaaactcaggtctacagtgctcctacccaccattaaacttgtacgaccatctggaaacagtgtctgtgtttgtgtactttgtactaagagatatctatgagtatcttgtattcatagaaggagaagaggagggtaaaatccaagaacatacatgtaaaaatcaacttaatttaatggtttttaaaagggtgttttgttgttgttgttg

SEQ ID NO: 5152 - DNA, 505 bp, Homo sapiens
  MAP TO AC025447.3; EXPRESSED IN BONE MARROW, SIGNAL = 1.1; EXPRESSED IN ADULT LIVER, SIGNAL = 1.2; EXPRESSED IN HEART, SIGNAL = 1.7; EXPRESSED IN HELA, SIGNAL = 1.9; EXPRESSED IN BRAIN, SIGNAL = 1.3; EST_HUMAN HIT: AI147950.1, EVALUE 4.50e-02; NT HIT: AJ243213.1, EVALUE 1.90e+00; SWISSPROT HIT: P26597, EVALUE 4.60e+00
tcactgaagtcttaggcccctcgctatactccatttctgcccagggtgacttccatgtccatatgtgcaacccagcaaactcacttctcactgcccttattgccacaactcccagaatctttatgtccacccttctgcaaccattcatacccatggccaatgccatgagcctcctcttcaccaggaacaactcaatttctgattcccactacagctttccttttcatgaagacttcagaatcctcattcacccattgttttcaggtctattgctccactcaggtctcctccttcctttctacccagctcagaacgcagagttgaatgaagtaggctcacacttgcccctcattttgcttgcatttctaccctttttctgctgcacccacaccacagccaatcccagcgctaatgaaatattttattgaatggcttttttctaatctagatggctgagaagagttagagaaaaatcacacagctaggctgagtgatgccgctagat

SEQ ID NO: 5153 - DNA, 507 bp, Homo sapiens
  MAP TO AC068499.1; EXPRESSED IN BRAIN, SIGNAL =  10; EXPRESSED IN FETAL LIVER, SIGNAL = 4.1; EXPRESSED IN BONE MARROW, SIGNAL = 5.9; EXPRESSED IN PLACENTA, SIGNAL = 5.2; EXPRESSED IN ADULT LIVER, SIGNAL = 6.2; EXPRESSED IN HEART, SIGNAL = 6.3; EST_HUMAN HIT: AL534649.1, EVALUE 0.00e+00; NT HIT: AF157809.1, EVALUE 0.00e+00; SWISSPROT HIT: P20336, EVALUE 2.00e-31
gtgacgggctaagtcaggagcaggggtcttgtgcccgtggctggtaggggccgggtcaggcccgggtagttgggggaaggtggggaagacagggaagaggggaaagggagtgggatggctctcagcaggcgcagtcctggtgcggtggcacctgctggtcactgagctgtgggccctgcttggcgcctgtgaccgcagggtccgccgtgtccaacgactcggacatcttctcgcagatgacatccaccaggcgctcaaaggtctgcttgacgttaatgttgtccttggcgcttgcctcaaagaactcgaaccctgtggtcagagaaggcagggatgaggaccctggccacgccctatgccaactcccagagatgcttctctgaggaaagggaacacctggagattcccagtgccaagcaacttattgaaggtactgacaaatcccacagagaagaaacttattgaaggtactgacaaatcccacagagaagcaacatggaactgggt

SEQ ID NO: 5154 - DNA, 517 bp, Homo sapiens
  MAP TO AC020954.6; EXPRESSED IN BRAIN, SIGNAL = 0.92; EXPRESSED IN FETAL LIVER, SIGNAL = 0.4; EXPRESSED IN BONE MARROW, SIGNAL = 1.2; EXPRESSED IN PLACENTA, SIGNAL = 0.71; EXPRESSED IN ADULT LIVER, SIGNAL = 0.95; EST_HUMAN HIT: BI821444.1, EVALUE 7.00e-32; SWISSPROT HIT: Q9NPB3, EVALUE 1.10e-01; NT HIT: gi14759046, EVALUE 1.00e-38
gtctatggagaaagcggtgcgatgcagaaggaggcgtggctagtagcaaaaaaaatggttttaagggggcggagcaagggcctgggaagttagtttgaggcggggcccgcagggggcggggtctgcaggaggtgtggtcaggtaactgggctgagttcccactaggtgtggtctgggaaggctggggcggtggcaaggtggagggcgggggtgacagcagcccggagccgcggagcctcagcttccgcctggacccagcctcgtgggagccccgcgggtcctgcccaggtgagtggagccccagggcagatccagaaccaggattattgggatggggagtcctctctttccaggtggggtcaccggctcgcagggaggatctggggtagaagaggtcgcctcgcgaatgagagggtcgctgtgcgttacgcgtgtcggtgtgctcgggctcacctgggcgtgcctctctaagtgtatttcctgtgcagcacagaaagccattgtttccatttttgcc

SEQ ID NO: 5155 - DNA, 561 bp, Homo sapiens
  MAP TO AL117256.1; EXPRESSED IN BONE MARROW, SIGNAL = 0.69; EXPRESSED IN PLACENTA, SIGNAL = 1.4; EXPRESSED IN ADULT LIVER, SIGNAL = 1.4; EXPRESSED IN HEART, SIGNAL = 1.9; EXPRESSED IN BRAIN, SIGNAL = 1.2; EXPRESSED IN LUNG, SIGNAL = 1.4; EXPRESSED IN FETAL LIVER, SIGNAL =   1; EST_HUMAN HIT: AA345220.1, EVALUE 5.00e-02; SWISSPROT HIT: P23004, EVALUE 2.40e+00; NT HIT: Y17455.1, EVALUE 9.00e-03
tcagcctttaccggtgattcattgagaatgtactgcaccctttcctcagccccaccgaaggctgcgagcactaagaatactttcctttattgcagcaaatgacatgtgaattcatttttctacctattatgcacagagacaggagaggctgagtggttattacctgcctgccattatgtaacgtgacagaaatacgccacagctggctgctgtcggacacctttggggcctcccagaacctgctggtctgcaggacacaaggcaagagccttgttccgtaagctaggtgccagcgcggccactgtatcaccttgtgactttgggcaagttaccttgttgcccagggcttcagtttcatcatctgctaagtgggggtgagaggcatgagctgaatgacccaaccctcctgtagatggttctggggtcagattaggctcctcctagacctcctctctccagggcatgagggttgcatctgtcaagtttaagagcgtgagtcctcccctgtgagtcctccaattcatccatttattgagcaagggtggttgagggtctgcatct

SEQ ID NO: 5156 - DNA, 566 bp, Homo sapiens
  MAP TO AF015723.1; EXPRESSED IN FETAL LIVER, SIGNAL =   1; EXPRESSED IN LUNG, SIGNAL = 0.71; EXPRESSED IN PLACENTA, SIGNAL =   1; EXPRESSED IN HEART, SIGNAL = 1.1; EXPRESSED IN ADULT LIVER, SIGNAL = 0.74; NT HIT: AL163268.2, EVALUE 0.00e+00; SWISSPROT HIT: P53071, EVALUE 2.40e+00; EST_HUMAN HIT: AW592261.1, EVALUE 2.00e-51
cccaaaatggtggtagatgctagcaggtgatgggcaggactgatatcccttctcccatctttattcgctaggatccaagtaaattctagtgggcaagaggaagagaagagaaactacaacatcattatcttactgctggaggcagcagattacggacccctgactgtgatgtgtcaaatgcactgtgtgacaaccaagaccctacacatctggggggcacttcaggattcctccaggcggcagttgctggcctagactcacttcttcaggagggaggttcgccctggaaaagctgatttgcatttctgctgggatcgatgccgtggagactgaatacattggtaagtagtttagcagctagtttggtctcagctgacaatgattatggattggggtgttcagagcaagaatgcacaaatggtctggagaaaaatcagcagtgaaactacattttttgtaacgtctaaatcagcaaagaaaaacgctgcagaatagtttcgggtgtctaggagaatacgaagagggctccaggcaggttaatggacagatattcccccgatgtcctt

SEQ ID NO: 5157 - DNA, 510 bp, Homo sapiens
  MAP TO AC011738.4; EXPRESSED IN BONE MARROW, SIGNAL = 0.79; EXPRESSED IN PLACENTA, SIGNAL = 0.52; EXPRESSED IN ADULT LIVER, SIGNAL = 0.79; EXPRESSED IN BRAIN, SIGNAL = 1.1; NT HIT: gi14750537, EVALUE 1.00e-109; SWISSPROT HIT: P46934, EVALUE 1.00e-16; EST_HUMAN HIT: AL566180.1, EVALUE 1.00e-85
ccacaactgacacatggaccaagatattacagctcaaataccatcagtcatcaaaacctccctaagaataatatagtttcagtgcaagtctcacagccacctcaccttcacctttccctaataactccaatgacaatactttgggtgacaggaaagaattccatcccaaaggatggtcactcaaaatcaaatagcaaagtatactttgccctcttcagcaggtttccccgaaggctggcaggagctctgtacctggggagagaagtaattttcccccatttctctatgcagaagcgccgaagcccattgctcccacggagggctgcgaagccttcgtagggcacgctggatgttcccgtgacaaactgcagtaatctcagcctctgctcattattgaagcgctccaccgcagcccagaaccagcggatcacaagatgcccatcgtggtaacctgcacgaggcaaagggagggaggaagacaggatgtggagaaaagaggaaggggtgagg

SEQ ID NO: 5158 - DNA, 577 bp, Homo sapiens
  MAP TO AC011526.6; EXPRESSED IN BONE MARROW, SIGNAL = 1.2; EXPRESSED IN ADULT LIVER, SIGNAL = 1.4; EXPRESSED IN HEART, SIGNAL = 1.3; NT HIT: gi16175212, EVALUE 1.00e-108; SWISSPROT HIT: P30667, EVALUE 4.30e-02; EST_HUMAN HIT: AL519310.1, EVALUE 1.00e-108
gggttcactaaggggaggaggaacttggaaaaaacatggggaaatttttggaatctcaaagacagttttgaagttttgaaggaagaacttagggtgagttgggaagcagagggattgaggttcatggagcaagaactgggggatccagctctgtgtctcccaggaggctccaggctcagctcctttcctctccccctccccagtccctgcgcctggtcgcccccatgtggaatgggcgtatcaggggcatccatcgcctgggtgcggcagtggccccagagggcaatcagaagaagaaaaggacaatactccagttcctgaccaactatttctacgatgtggaggctctgagggattacttgctccaaagggagatgtacaaggtgcatgagaaaaatcggtgagaatccctggtctgcaagaccctgtggagaccctggcccaccagagcccaggtcctgtccttgccattcccaggcagcactgtggcttccagtgccagccttgatgtctcttgcagctccatctccaggctgtacccttctcaaggactccagctcacataggcagtttgcca

SEQ ID NO: 5159 - DNA, 525 bp, Homo sapiens
  MAP TO AC069278.1; EXPRESSED IN BRAIN, SIGNAL = 3.1; EXPRESSED IN FETAL LIVER, SIGNAL = 4.5; EXPRESSED IN BONE MARROW, SIGNAL = 3.7; EXPRESSED IN PLACENTA, SIGNAL = 3.5; EXPRESSED IN ADULT LIVER, SIGNAL = 3.5; EXPRESSED IN HEART, SIGNAL = 3.9; EXPRESSED IN LUNG, SIGNAL = 3.8; EST_HUMAN HIT: AW794915.1, EVALUE 3.00e-28; NT HIT: AL163248.2, EVALUE 1.00e-17
gagctctccccaaatcttccacccctggcctgtgggcattcattgcaggaggtaagcccttcctcccctactcacatatttaggctctcattctttcctcatatttctcagaatgagactgataaaattcacacaccaccaaggaccttgatctatttgttgcttctggagaaaagtcaatgtttatccaatgttctggataaaccagtgttaatggaatcatgggagaactttgattttgttggaagttacaacagccaacacttatgggtatatagtaagtgtaatctaagtgttggcttatttgattactttttgataaatatccaacctcattttcatttctcaaagtttcatgtacagttaggtattacctaagtttagtttataagatagtgatatggtttggctgtgtccctaccaaagtctcatcttgaactgtagttcccataattcccataggttgtgggaggggcctggtaggaggtaactgaatcatggaggggggtctttctcgtgctgttc

SEQ ID NO: 5160 - DNA, 589 bp, Homo sapiens
  MAP TO AC020633.3; EXPRESSED IN BONE MARROW, SIGNAL = 1.1; EXPRESSED IN PLACENTA, SIGNAL = 1.8; EXPRESSED IN HEART, SIGNAL = 1.8; EXPRESSED IN ADULT LIVER, SIGNAL = 1.3; EXPRESSED IN FETAL LIVER, SIGNAL = 1.4; EST_HUMAN HIT: AI524851.1, EVALUE 1.00e-86; SWISSPROT HIT: P15309, EVALUE 4.00e-24; NT HIT: X74963.1, EVALUE 0.00e+00
agtggaggagtgtttggtggtataaatatctttggataatctggagagtggagaaacctgtttggggcaccaaaagcctgggaattaaggcagaacactgggggacttgtctatctccctctccctctctctctctctctgtgtatgacgatgagggggcaaattgccaagagttgcaagagtggcaaaacaaagtggatcatacagatccaaagagaaatttggttcctactctctcttagctagggttttccatgtcctaaattgtcctttgtatctttatttaagaaagaattaaaactgcacagctcaaggagtgtccagactcccaaatccacaactgttgagtagcctgccttcctcattctaggtccatctgaaatctcctggttttcccagtatactgacctgatcttcagaaagaggaactgtgtgcaccgggatgggctgccagagtaggataggattccagatgctgacaccttctgggggaaacagggctgccaggtttgtcatagcactcatcaaagtccggtcaacgtctgtgcttcgaatataaacctagagtaggaaaatcaaagcagaagcg

SEQ ID NO: 5161 - DNA, 535 bp, Homo sapiens
  MAP TO AC004751.1; EXPRESSED IN HEART, SIGNAL = 1.5; EXPRESSED IN ADULT LIVER, SIGNAL = 1.8; EXPRESSED IN FETAL LIVER, SIGNAL = 0.84; EXPRESSED IN BONE MARROW, SIGNAL = 1.3; EST_HUMAN HIT: BG954869.1, EVALUE 1.00e-70; SWISSPROT HIT: Q57823, EVALUE 7.50e-01; NT HIT: AJ297357.1, EVALUE 3.00e-24
ttaggacagggactgccaaggagagagggcactaggaaacagggttgtttttggctttcttacctggggtgcaagtggagcaccctgtgggcatcatgagggtgtcaggaaagccttctggtaactgaaacgcagtccattctgtgtcccccagattctgagttttcagcacctgacagtggcgggggatggcagacacacctgtgggtgctggagacatcttggcggcccttcctccagtttggcatcatagtcccctgtggggtgagcacatggggctcctggacagttgttaccgatggagggtatccaggttcttgacatcttgaacaaagaattggacaaaacggcacaaacaaagcaagaaaaagatgaagcaacaaaagcagatttattgaaaacgaaagtacactccatagggtgggagcaggccctggttacagaattttctggggtttaaataccctctagaggtttcccattggttatttggtgcatgccctatgtaaatgaaagtgacctgcgatcagtctga

SEQ ID NO: 5162 - DNA, 576 bp, Homo sapiens
  MAP TO AC008449.4; EXPRESSED IN BRAIN, SIGNAL =   1; EXPRESSED IN LUNG, SIGNAL = 1.3; EXPRESSED IN BONE MARROW, SIGNAL = 0.91; EXPRESSED IN ADULT LIVER, SIGNAL = 1.3; EXPRESSED IN HEART, SIGNAL = 1.9; EST_HUMAN HIT: BG287612.1, EVALUE 5.20e-02; NT HIT: gi7706082, EVALUE 3.50e-02
tattgaatgctggccatgtgcacacactggcttgggagcctttgaaataatcaggagtcagtactatgaacatactcattgtgacatatgaggaaactgaggctctcttagcgtgacagtaaagcttgcgtttgacgtcagaaagaactttctgactatccacggccccgggcacaatgcctggcatgtagtaatcgctcattgaggatttactgacacgaatgaatgtaaagaaggtcgaactcaggaccgtttggtaactcttagtgtaagaaaaatgtctttgcattcatttataattagtaccccatctacttccaaccagtcaacacctgctgagatattaaacccttgtgtaagagaaaatgttgatgggtaaagtagaatagaggctttctgaacgaaggcaacagacattttagatacagtcaggttcaagacagctgtttttaggaaatcagcttgactgtgaatgaatgtttagacatcctcttgtcagaaagtaaatcttcctggctgctacatctgccccaaagtgttctcactttgttcaagtccaaaaaggacagaggacca

SEQ ID NO: 5163 - DNA, 577 bp, Homo sapiens
  MAP TO AL117330.6; EXPRESSED IN ADULT LIVER, SIGNAL = 1.1; EXPRESSED IN LUNG, SIGNAL = 0.88; EXPRESSED IN BONE MARROW, SIGNAL = 1.2; EXPRESSED IN PLACENTA, SIGNAL = 1.4; EST_HUMAN HIT: BE297100.1, EVALUE 1.00e-129; SWISSPROT HIT: O96017, EVALUE 1.00e-05; NT HIT: AF096279.1, EVALUE 1.00e-129
tcactttggcctctaatgggctgtgagccagcacttcatttacataggatgtaaacagtgggagacctctagagggtacttgaaccccagaagactttgctacaagggctctgcagccacttgctcaggcctgctcccatcctgtgacatgtactttagcttctattgccttccacttcaataaatctatgctttcattgcttgttcatgcatgatgttcaattatttgttcaacgtgccaaaaacctggacaactccaatcagaaccttccacctggtaatacaactttctgtaagtgtttttctgaacaaaacgtgatactatacaacaaagggtcttaccaagattggcaaatccatcctgaagggcccataatcgagcccagggggcaggggtaggctcctcaggttcttggtcctcaggttcttggtcctcaggaatagaatagagttcctgagtggacactgtctctaaggagctcagtgtcccagagctggagtgagaggactggctggagtttggcatcgtgctggtagaggagctggatatgccctgggactgtgaggaggagccttg

SEQ ID NO: 5164 - DNA, 574 bp, Homo sapiens
  MAP TO AC027307.3; EXPRESSED IN ADULT LIVER, SIGNAL = 4.4; EXPRESSED IN HEART, SIGNAL = 3.6; EXPRESSED IN BRAIN, SIGNAL = 4.7; EXPRESSED IN LUNG, SIGNAL = 7.1; EXPRESSED IN BONE MARROW, SIGNAL =   4; EXPRESSED IN PLACENTA, SIGNAL = 3.5; NT HIT: AE001989.1, EVALUE 5.50e-01; EST_HUMAN HIT: R41581.1, EVALUE 1.00e-126; SWISSPROT HIT: P28481, EVALUE 7.00e-04
tgtacagtggagcacttggcctcccgaccccgagttcctgtggctggggcaggcactaggggccagactgggggctctgggtccagtgtccacttgtccttctggagcgccacggctggaggcaggtgcaggggtacccgtctccccttgactggtatcttaccctttgcaggtgagcttcagtggagtcccggcccaactggtgctgagtggcgagggtgagggtttgcagctcaccctctgggagcaggggtcccctggcacctcctactccctggacgtcccgcggagccacggctgcgcccccaccaccggacagcaccttcaccacgccctccgcatgctgcagagtatctagtgcccctgagggtcagagtggacccctgcatggtagtgccagggacccaggctccatttccattcctgtggctcccccagaggggctgtcctgggggagggctggggggcacacgggaggtgggttcttgccttgtggcatgactgttcaacccagactttgctgggatctcttcctttttcattaaagacaatttgaaatgctgtaggccatggt

SEQ ID NO: 5165 - DNA, 591 bp, Homo sapiens
  MAP TO AC022517.1; EXPRESSED IN BONE MARROW, SIGNAL = 3.9; EXPRESSED IN PLACENTA, SIGNAL = 3.9; EXPRESSED IN HEART, SIGNAL = 4.1; EXPRESSED IN ADULT LIVER, SIGNAL = 3.8; NT HIT: gi16163250, EVALUE 5.00e-72; EST_HUMAN HIT: AI657032.1, EVALUE 2.00e-72; SWISSPROT HIT: P39956, EVALUE 3.00e-11
aaacaccccaacccctagacccgagcagccggccatgcccaggaggcccacgcaggccgagggataactggtgtatggaactcgctggagatgggccctgggccaccatcgtccacccgacctgcccacctcctctccagtcttcgaggtaaggagcgttctgggcaaaagctctctgaggagcccagaatcagaccctggttgagagcccaggccctgggctgagcgaaacggctgctggaccagctatgggcgtgtggctgcagaggcaaaaaagagcctcctcccgccctgctgggacccgttcccagcaggcaagcttttacctgagtggccactttgccgtagtcaatccaccgcagggtggcgaagttggtagattctgcgcagttgaacccgtgattgaagccggcgtggtagccgtagggaaatgtgatcatgaattccccggcctcctgcgtgatctgcagagggaaaggagacaggtgagggcagggccaccagaggcgcaccaggggatgggacgtgggcacttcccagcaagtgccagggagcctggcttatgagccaagggggtttcacaaagtcaaa

SEQ ID NO: 5166 - DNA, 515 bp, Homo sapiens
  MAP TO AC037199.1; EXPRESSED IN LUNG, SIGNAL = 1.4; EXPRESSED IN BONE MARROW, SIGNAL = 1.8; EXPRESSED IN PLACENTA, SIGNAL = 1.2; EXPRESSED IN ADULT LIVER, SIGNAL = 1.2; EXPRESSED IN HEART, SIGNAL =   1; SWISSPROT HIT: P20151, EVALUE 5.00e-54; NT HIT: M18157.1, EVALUE 0.00e+00; EST_HUMAN HIT: BE770929.1, EVALUE 0.00e+00
gtctcccttatcctcccctgccccatctacctttccccattttctctctcctcatgcatccacccccttcctccccaggaatagccaggtctggctgggtcggcacaacctgtttgagcctgaagacacaggccagagggtccctgtcagccacagcttcccacacccgctctacaatatgagccttctgaagcatcaaagccttagaccagatgaagactccagccatgacctcatgctgctccgcctgtcagagcctgccaagatcacagatgttgtgaaggtcctgggcctgcccacccaggagccagcactggggaccacctgctacgcctcaggctggggcagcatcgaaccagaggagtgtacgcctgggccagatggtgtagctgggagcccagatgcctgggtctgagggaagtggggccaaagaaccaggtggggtccggccacagcccagtttttctctgacccatagtcttgcgccccaggagtcttcagtgtgtgagcctcca

SEQ ID NO: 5167 - DNA, 520 bp, Homo sapiens
  MAP TO AC021689.3; EXPRESSED IN HEART, SIGNAL = 1.1; EXPRESSED IN LUNG, SIGNAL = 1.1; EXPRESSED IN FETAL LIVER, SIGNAL =   1; EXPRESSED IN BONE MARROW, SIGNAL = 1.6; EXPRESSED IN PLACENTA, SIGNAL =   1; EXPRESSED IN ADULT LIVER, SIGNAL = 1.6; SWISSPROT HIT: P32455, EVALUE 4.00e-29; NT HIT: gi16160877, EVALUE 0.00e+00; EST_HUMAN HIT: AW104003.1, EVALUE 0.00e+00
taaggagatgaaccatggggtcaaaaagctacactttatgcatcatttcggaagggcagaaatcaggaaggataaatgctaaaagtaccacaagcttcttctggaattcatggttttcatccttgaaggagtgctccatgaagactgcaatggcttccctctcacaggctgcatgcacgtccagcagctcctggagcgtgtctgtggggagcctcagttgctgggccatctgctggctatagtggtcggctgccctctgcacagccgctgggttctcaagctgggccagtgctgtcactgcattctccagacaaggtactgctccactgttgatggcatctacataagtcaccaccagagtccccagccctgaatcacatatatttagggaaaatttacagttcttactcattatttatacaagttttaagagtcagcattctaaaaattacaaaaattctaattatcttgaagtttcttatcactcctttattctcttcctcctcctttttcatcttcc

SEQ ID NO: 5168 - DNA, 598 bp, Homo sapiens
  MAP TO AF045449.1; EXPRESSED IN BRAIN, SIGNAL = 1.5; EXPRESSED IN BONE MARROW, SIGNAL = 1.5; EXPRESSED IN PLACENTA, SIGNAL = 1.6; EXPRESSED IN ADULT LIVER, SIGNAL = 1.4; EXPRESSED IN HEART, SIGNAL = 1.2; EST_HUMAN HIT: BF740384.1, EVALUE 1.40e-02; NT HIT: AL163281.2, EVALUE 0.00e+00
tatccatgccgttgatgatgtggagttttgttgctttatattagtgactataaatgtatttacattggctttcaagcttactgcgctttgaaagttcttaaattcctcaacgtcagattctacaatcaaattctatgacccatgggtctaaccctccagtagcggtgcagggaaatctgtagtatttaagggtttggatccccagaacttagtgatgtacttggtggagagggggctggaggtggctggggcaggagtcaggactgggcacagggaggcagctacatgagttgtgggggcaggggcttacggggctcctgtgggacaggcatagtcacgtgacttggagctggaggcatgtagtcagcaggtcgggctctcccagcaaatcctcttaggtcacagattccacccggttcatgtgttagacgtgcactcacatgggtgccacctttcctagtgggaaacaaccgaatagcaatacgctgatatcagtatcattttctttttttttatcagtatcatttccttttatttgccaagaaaagagatctctgtgttttggaatgagactgggccattttcttgacctggggaa

SEQ ID NO: 5169 - DNA, 553 bp, Homo sapiens
  MAP TO AC006273.1; EXPRESSED IN LUNG, SIGNAL = 3.1; EXPRESSED IN ADULT LIVER, SIGNAL = 3.9; EXPRESSED IN HEART, SIGNAL = 3.5; EST_HUMAN HIT: BF934973.1, EVALUE 8.00e-07; SWISSPROT HIT: P28329, EVALUE 1.40e+00; NT HIT: AL163209.2, EVALUE 1.00e-04
ctctgaccctcctggacttgcggccgcttccctcccaattctgcctctgctgccccacggcggtctcctctgcatctgtgtccaaatttcccttgtctcccgaagtcgcctgtcactgcggtggtgcccgccctaatgatctcatcctaactaattacatctgcagaaaccctatttccacataaggtcccatttgtaggtgcctggggttcacgcaaagacagatctttgagggaactcaattcaccccaccccggggagtttgcctttgtggccggcccttccccctcagatcaaattctgcctcctcagcgaggccttcctgaccctcccgggcccttcctgcctttctctctggctgcggctgtttcctgcggggctggctgcagctcccggcggcgccctgtcctgtacctgtttcatgtccatcgtcggcaacccctggcttctaacacagctcattgcccgcaggacctcccagcaggagcagggacccagtaggccctgcgtctccgtccgaaccacaagctgctgtgggtggtcacttgacaga

SEQ ID NO: 5170 - DNA, 566 bp, Homo sapiens
  MAP TO AC004760.1; EXPRESSED IN HEART, SIGNAL = 1.2; EXPRESSED IN ADULT LIVER, SIGNAL =   1; EXPRESSED IN PLACENTA, SIGNAL = 0.83; EST_HUMAN HIT: BI045648.1, EVALUE 0.00e+00; SWISSPROT HIT: P97151, EVALUE 1.10e+00
atggttctggttgttcgctcatagcggagaggctggggctgcggttgtggttgtggcggcgtgggtggtggctgggaactgtggcccaggcttagcggccgcccggaggcttttcttcccggagactgaggtgggcggctcagcgttggccccacacattcgaggctcacaggtgattgtcgctcacacagttagggtcgtcagttggtctgaaactgcatttggcccactcctccatcctccctgtccgtcgtagctgccacccccagaggcggcgcttcttcccgtgttcaggcggctccccccccccgtacacgactcccagaatctgaggcagagagtgctccaggctcgcgaggtgctttctgacttccccccaaatcctgccgctgccgcgcagcatgtcccgtgtggcgtttgaggaaatgctgagggacagacaccttggagcaccagctccggtccctgttacagtgagaaaggtcccccacttcgggggatacttgcacttagccacatggtcctgcctcccttggagtccagttccaggctcccttactgagtgg

SEQ ID NO: 5171 - DNA, 511 bp, Homo sapiens
  MAP TO AC013559.2; EXPRESSED IN ADULT LIVER, SIGNAL = 1.4; EXPRESSED IN LUNG, SIGNAL = 1.6; EXPRESSED IN BRAIN, SIGNAL = 1.3; EXPRESSED IN PLACENTA, SIGNAL = 1.1; EST_HUMAN HIT: BG495917.1, EVALUE 4.60e-02; SWISSPROT HIT: P52720, EVALUE 3.20e-01; NT HIT: Y08742.1, EVALUE 1.90e+00
acttagtgccttgtggggtgtgtcactacagacttcctccttcagagtgtcctaacaggggcaactcttcctgaggaggaggaagggattctgctcctaataaccattttgttacccatgtggatgctcaccagaaaggtccctatgctgaaaaaggggacctttaccaagagcaaactgttcgtcagctaaatgtggaaaatgaattgttccttgctccagagcaagcagatgtgcaaccagttgcctccgggatccacaagagatggctcatggaaattcagacaggatcccagattgggcaagaatgcatggactgcgacagttgtgagaagacaccataacaacgtgaaaaagctgcttgcttgtcagaccccggtcaaggctaacaatactgtccagggacaggttcataaagccagtgggccaggatattctcagcagatagaacatggtgggcctctcattctgtctgtaatgttcctgtggctcctgattgcagctgacatgt

SEQ ID NO: 5172 - DNA, 508 bp, Homo sapiens
  MAP TO AB000876.1; EXPRESSED IN FETAL LIVER, SIGNAL = 1.8; EXPRESSED IN LUNG, SIGNAL = 1.6; EXPRESSED IN PLACENTA, SIGNAL = 1.6; EXPRESSED IN ADULT LIVER, SIGNAL = 1.1; EST_HUMAN HIT: AU121385.1, EVALUE 0.00e+00; SWISSPROT HIT: Q13838, EVALUE 3.00e-35; NT HIT: gi14782287, EVALUE 0.00e+00
aactggggatggaaaagaggtggtgaaggctgtgctcgtgattaagtcttgctttttttttcccccctccagctcttctgttagaaatagtatctttgttttcctttgctgttcctcaatcccctactcttcaccccttgttttcacctattttgcgagaacccatccagatcccccttcccttcttcccctgccggcccagttatggcagagaacgatgtggacaatgagctcttggactatgaagatgatgaggtggagacagcagctgggggagatggggctgaggcccctgccaagaaggatgtcaagggctcctatgtctccatccacagctctggctttcgtgacttcctgctcaagccagagttgctccgggccattgtcgactgtggctttgagcatccgtcagaaggtaaattttctcttgggcatgtagtgctcattgggctctttaagggtacaatacaaagatgtgtttgtcgttgctcaggtggtggtaagggtt

SEQ ID NO: 5173 - DNA, 530 bp, Homo sapiens
  MAP TO AC025760.2; EXPRESSED IN PLACENTA, SIGNAL = 3.3; EXPRESSED IN ADULT LIVER, SIGNAL =   3; EXPRESSED IN HEART, SIGNAL = 2.7; EXPRESSED IN HELA, SIGNAL = 2.8; EXPRESSED IN BRAIN, SIGNAL = 2.9; EST_HUMAN HIT: AI684541.1, EVALUE 5.00e-36; SWISSPROT HIT: Q9Z9B6, EVALUE 2.90e+00; NT HIT: gi14861872, EVALUE 2.00e-22
aagggtgagaaaggggtgagggataaaagactacaaatagggtgcaatgtatactgctcggataatgggtgcaccaaaatctcacaaatcataattgaagaacttatttttgtaaccaaacactacctgttccccaataacctatggaaatctaaaaaataataataaaaaatagaaataaaaagagcaggagaaaggaagatggaggaaacccttatcctcatttgcaaaaacgttgttcacatcacttccaatcacatctcagtgcaggaactcaatcacagagccagagtgcactgcaggcaagtcttaggctgcatggccatggtcctgctacaattcgtgcccctagtcctgaccgttccttgccctccccttcacactaagacaaccctgttcccagtataacacataatgtagtacagacatccctggcattcgacttaagattttcgactttgcagtggcgtgaaagcaatactcattcagtagagaatgtacttgtggtactcatggaacccatctgtgtt

SEQ ID NO: 5174 - DNA, 559 bp, Homo sapiens
  MAP TO AD000671.1; EXPRESSED IN BRAIN, SIGNAL = 5.2; EXPRESSED IN BONE MARROW, SIGNAL = 5.3; EXPRESSED IN PLACENTA, SIGNAL = 6.6; EXPRESSED IN ADULT LIVER, SIGNAL = 5.8; EXPRESSED IN LUNG, SIGNAL = 7.1; NT HIT: AJ276505.2, EVALUE 5.30e-01; EST_HUMAN HIT: AW866956.1, EVALUE 2.00e-56; SWISSPROT HIT: P06470, EVALUE 6.10e-01
tgtggagtctagcgttggtgtccagtgagagcaggtggcacagggtggggccttgtgtccaagtccagaattgagaccatggttgaagaaggcaaaacagcccaagcacttggccagagttcagctaaggatcgggagcgggaggtgggcgagcagcgtggaggtgcttggtgtgagggccaagacagcggagccatggatggcagggaagggcaggctgggatggaaaaggcagtgggaagaggcctggtggctggttttgaactggtgacctctgaggtaaaggagaggagggaaagcaggtgtttatgcagaaactgtaatacatggggtggaggcccctggaggaggcttggctgatggactccttgaagctggcggtggagtggtggagttttctgttggtccctgagggcagtggctgggggagtggctgcggccaggtaagctggtggtcgagcagcctgaggctgggattttgtggtggcccaatcctgtccagatgtttggattttctcatgacacacagctcagttgctgagctgggaagcagagtgac

SEQ ID NO: 5175 - DNA, 553 bp, Homo sapiens
  MAP TO AC022073.13; EXPRESSED IN BRAIN, SIGNAL = 0.96; EXPRESSED IN PLACENTA, SIGNAL = 0.96; EXPRESSED IN ADULT LIVER, SIGNAL = 1.1; SWISSPROT HIT: P00882, EVALUE 3.10e-02; NT HIT: gi15305555, EVALUE 9.00e-80; EST_HUMAN HIT: BG401985.1, EVALUE 1.00e-79
gttggaggttggttggtttgtttatttattaaatttactttgttttcacttttgtttaaaccaggctgcttggctcctgaaagctgttacctttatagatcttactacactttcaggtgatgatacatcttccaacattcaaaggctctgttataaagccaaatacccaatccgggaagatctcttaaaagctttaaatatgcatgataaaggtaatgttgttgtgtgtgatctatgtggtgtttagtgcttacaatactgattactaaatcaaagacgacttaagatacagctgctaatgatagcggtgatagaatccatgatagaaactcttgctgtgtatacatagacagattcttctctgaaaaacagcaggaagagaatctgagtctttttttttttttttttttgaggtcagttctttccatcaatggattaaaatgcttggtagagagtgactttatttcttttcagttcttcagttttggaaaatttctgtttagtgacactgaaatactctttctgattccctagccatacgtgaaaaagccag

SEQ ID NO: 5176 - DNA, 596 bp, Homo sapiens
  MAP TO AC020728.4; EXPRESSED IN BONE MARROW, SIGNAL = 0.93; EXPRESSED IN PLACENTA, SIGNAL = 0.82; EXPRESSED IN HEART, SIGNAL = 1.4; EXPRESSED IN ADULT LIVER, SIGNAL = 0.89; EXPRESSED IN FETAL LIVER, SIGNAL = 0.73; NT HIT: gi16156989, EVALUE 0.00e+00; SWISSPROT HIT: P22674, EVALUE 2.00e-41; EST_HUMAN HIT: BI828887.1, EVALUE 0.00e+00
ccagggactaaaaggaaacgaaggatctgttttatttcgagctcgggggcaggctgcacttctcgcagatctgaacgggcagcatgtgagtcaaggaagtactgtttatggccaccagcagctgcaacttgcccatacagtcctccagcgccgcctccgggtggtctcccagtcgcaagtccacgggccgcgagacccgcagcatgcggtccgccagcgccaggcagcagatcgccaggagggaaggggagtagctggtgaaggcatagtcggccagactcagctctgccaccccccgcgccagggcttgcgcttccagagcttcggaggcctcagcctgccccgcctccacgcgagcgtgcgtgaaatgctccaggaagaagctaatggtgggcgcacccagggtgaagtgcagcttgtgcagcacgatgcactcgaggttgcagagctgctgccgggagaaggcgccgcagcagagggccagaagctgcttcacgcgcggcgggtgcacctccacctgcaacacagggcgcactcaaccccgctttgcggcttcccgggccccaggcccaccccagtatgacgcccggactttc

SEQ ID NO: 5177 - DNA, 532 bp, Homo sapiens
  MAP TO AC025816.1; EXPRESSED IN ADULT LIVER, SIGNAL = 1.8; EXPRESSED IN HEART, SIGNAL = 1.9; EXPRESSED IN LUNG, SIGNAL = 3.4; EXPRESSED IN BRAIN, SIGNAL = 3.1; EXPRESSED IN PLACENTA, SIGNAL = 2.1; SWISSPROT HIT: O14514, EVALUE 5.70e-01; EST_HUMAN HIT: BF962259.1, EVALUE 2.00e-94; NT HIT: gi12232412, EVALUE 8.00e-71
agccatatcctgaggtcgtgggagttaggactccaacatagaaattttgaggagactcaattcgacatataacaccagctctgcttctttgcaggaagaactgtaggaatagtcacagcttgacaaccgaacacaacctgagtgtgctgagaactcatggcgttgaccacctgagctataatgagctatgccaactcttgtttcagaacgacccctggcttttgccagaagtgagtgccaggggaagtctgggttccacagctccctggggacattcctgtgtcttgggaaatgtaatgactgggagtggaatgggtgggcccttggtgatctctggtctggtttccacctgcagaaatttggaatgtggagcagaaggagcagtgaagttcaagggccagctttgccaacaacccagttccacaaacatcacacagatgccatggatagctgtgcgactagggctgattctttaacttctctgagcctctcagtgtgctccattgagaaatgaaagggtggtatttggcct

SEQ ID NO: 5178 - DNA, 539 bp, Homo sapiens
  MAP TO AC025761.3; EXPRESSED IN ADULT LIVER, SIGNAL = 5.1; EXPRESSED IN PLACENTA, SIGNAL = 4.1; EXPRESSED IN HEART, SIGNAL = 3.6; EXPRESSED IN BRAIN, SIGNAL = 5.3; SWISSPROT HIT: Q10310, EVALUE 2.30e+00; EST_HUMAN HIT: BG912415.1, EVALUE 1.00e-122; NT HIT: U91328.1, EVALUE 1.30e-01
tgagagtgtggctgcatagccttttgctaatagttgagaaactattcagactaagagtattcaatcacacaaaaggcacttgaaagagattaagagtgtgacttacagataccctcaattaaaccaggagtgtttaggaaacttaaaagccttaatcgtcagccatctcagcaaaagccaaaaacagagatggaattatcttggaaagacctgtggacaagcttcttatctaatggagtaaactcctatgacatacaccaacatagtcaccatctggtgactccacagtgcttcaaaggagagaaacaggaagcagagttcatgtgagtctggatctgtgccctggtctggggtgcactggaattccccactggaactgcatctcatctggttctgtgaactcaagggagggggaatagagtaaatttccaggagtacttctggttcctcgtgtccacgtgggtcttagggcagtactatatacatcaaatgttgtctaatacttccagtggggtctgggcctgtggtcaaacacttca

SEQ ID NO: 5179 - DNA, 502 bp, Homo sapiens
  MAP TO AC005615.1; EXPRESSED IN HELA, SIGNAL = 2.8; EXPRESSED IN BRAIN, SIGNAL =   2; EXPRESSED IN BONE MARROW, SIGNAL = 1.9; EXPRESSED IN PLACENTA, SIGNAL =   2; EXPRESSED IN ADULT LIVER, SIGNAL =   2; EXPRESSED IN HEART, SIGNAL = 2.4; SWISSPROT HIT: O15265, EVALUE 4.60e+00; EST_HUMAN HIT: T52026.1, EVALUE 2.00e-07; NT HIT: AF072408.1, EVALUE 8.00e-03
gctttgaagacagtgggagccatgagccaagggagcaacaggccccttgaagctgagaaagacaaggaaatcattcctccctggagcctctagagggaatgcagccctacctacaccttaatttccaccctgggagactcatgttggactccaacttcctgagctgtaaagtaatagatttgtgttgttctaactcaccagatctgtggtgtgttctcacagcagcaacaggaaaccaacaccctatgtcctaggtaagatgggtctgggaaccaaagagcggatgcaagaggtcctgcttaccctcatgctcatctgcccacttggagaacatgtgcttcttgttcccacagacctgggctctgaggatttggaaatcctgcttcccacatgagctatgcgtctatcaatgaacacggcaagagtcctgtggaactgtaagctgtggctgctgcctggacactttagactgcttgggctaagacaccagcaagcaagatga

SEQ ID NO: 5180 - DNA, 532 bp, Homo sapiens
  MAP TO AF053936.1; EXPRESSED IN BONE MARROW, SIGNAL = 0.73; EXPRESSED IN PLACENTA, SIGNAL = 1.1; EXPRESSED IN ADULT LIVER, SIGNAL = 1.1; EXPRESSED IN HEART, SIGNAL =   1; EXPRESSED IN BRAIN, SIGNAL = 0.97; EXPRESSED IN LUNG, SIGNAL = 1.2; SWISSPROT HIT: P30290, EVALUE 8.50e+00
tattgggtgagtagggcctggaaagcatatggagggcttctggggcattggtcacatcttgtttctttatctgtgtgctggttgcaagaatgtgttcagtttgtggaaacccatggagctgtatacttaagtgtatttttccagaaggattttttatactttgacagaatgttcaaaggatgtcctcttactgtgaacaacacaaatgattggagttataatgacacccttgctgtttgagggtgcatttttcaaaggattttagtcacagattcccatgttcactgaagctcaatagactatcccctacctgatgacaagtaatttgcttctttctttagtcctgcttttacctctggccatgaagaatcctgctttccactggtgagttcagaaatttctagcagcgatatttcttcagcccaaagtaaatatcctaggacatggaagaagcagtatagcccctgccacactctgactcatcttatccctgcaactcagttttctcattcctcaccgtcacttgcaggta

SEQ ID NO: 5181 - DNA, 559 bp, Homo sapiens
  MAP TO AC035150.1; EXPRESSED IN HEART, SIGNAL = 1.9; EXPRESSED IN BRAIN, SIGNAL = 1.8; EXPRESSED IN BONE MARROW, SIGNAL = 1.7; EXPRESSED IN PLACENTA, SIGNAL = 2.2; EXPRESSED IN ADULT LIVER, SIGNAL = 1.8; EST_HUMAN HIT: AA702321.1, EVALUE 5.00e-05; SWISSPROT HIT: O08677, EVALUE 3.60e-01; NT HIT: gi14861872, EVALUE 6.00e-07
aagattttagggggccaatgctcagctctcaactcctggactgcatgttgtaactctggtgggcttatatcgggccctgactttgttctctggattctcgaggttgggaacgaactacactggggtggccaaggtgttcccaggctgctggtcactgcactacaatggatggtgccaaagcattttttagtgcagtggcagcaggatttgtcatcattctcacatgccagctgcagtggcagtggcaacatggtggggtgcatgctcatcagctgtggcagcttgctagtgggtaccgggatgcctgcttctgtgtgagcacttacagcagtggtggaggcagcatggctcaagggggcaggggggccccccactggtgactgtatgtgtagtagtgctggtggtggtgttagcatggggatgaggcactggcttctgcaggtctgtgtgtgtcccctgtgcatgttcatatgttatttaacctacactccatatttaaatttattctgtttttaatttaaattccttgtaattgatttgcctccagtttagcccactt

SEQ ID NO: 5182 - DNA, 590 bp, Homo sapiens
  MAP TO AC010219.4; EXPRESSED IN ADULT LIVER, SIGNAL = 1.8; EXPRESSED IN BRAIN, SIGNAL = 1.7; EXPRESSED IN HELA, SIGNAL = 3.3; EXPRESSED IN LUNG, SIGNAL =   3; EXPRESSED IN FETAL LIVER, SIGNAL = 3.9; EXPRESSED IN BONE MARROW, SIGNAL =   2; EXPRESSED IN PLACENTA, SIGNAL = 2.6; EST_HUMAN HIT: AA219387.1, EVALUE 4.00e-09; NT HIT: AB017581.1, EVALUE 2.00e-09
tcacctcccaaaggctacacctcccaatactgttgcattagagattaagtttcaacatgaattttggcaaggacaaaaacatttaaaacatagcaatcactatcatcatcatcatcctcatcctcagcatcatcatcatcaccataatcagtaccaccatcattatccttatcatcaccatcaccatcatcaccattaccaacattatcaccatcaccatcatcatccttaccatcatcatcctcaccatcatcatcctcaccatcatcaccataattataatcaccacagtaataattatcatcattcaccatcgctatcatcatcctcaccatcaccattgtcatcctcaccatcaccaccatcaccatcatcatcatcattctcaccatcaccatcactgtcaccaccatcaccatcaccatgatcatcatccttaccatcaccatcactaacattgatctagtgcttaccatgtgccagatcctctcttgaatttctgccacacattccatagcagtccagtgaggtggaaaccatagctatcctcattttacctggggaacttgagggcaggaaaagtgaaatga

SEQ ID NO: 5183 - DNA, 558 bp, Homo sapiens
  MAP TO AB014077.1; EXPRESSED IN FETAL LIVER, SIGNAL = 3.8; EXPRESSED IN ADULT LIVER, SIGNAL = 2.7; NT HIT: gi15304504, EVALUE 0.00e+00; SWISSPROT HIT: P36915, EVALUE 6.00e-18; EST_HUMAN HIT: AI086424.1, EVALUE 4.00e-98
ttcttgttttggttccccaggcacctgggagtcccatccagagaccacggagctggtggttttgcagggcagggtggggccagcaggtgacgaggaggaggaggaagaggaagagctgagcagctcctgtgaggaggagggagaggaggaccgggatgcggatgaggagggagaaggggatgaggagaccccaacctcggctccagggtccagcctggctggccgaaacccttatgccctgctgggtgaggatgagtgctgagttcctcgcccagcgccatcttccctcccagtatctttgcttttggactgacctgggggtatctcccctctgccaccccaattgtgaataaagattgtttgctttgtagccccttccccagatgaactgaggtgagagcggctgttccaggctaacagctgtgggaggcttctctcctcttctcccttcttttttcatgcattctctttgcaagggaaagttctcttaggagtttagtaggttctcagtctctgaaacctgcttcctctacccattctcccactctgcaccttagg

SEQ ID NO: 5184 - DNA, 516 bp, Homo sapiens
  MAP TO AC006485.1; EXPRESSED IN ADULT LIVER, SIGNAL = 1.5; EXPRESSED IN HEART, SIGNAL = 1.9; EXPRESSED IN BRAIN, SIGNAL = 1.2; SWISSPROT HIT: Q57081, EVALUE 5.50e-01; NT HIT: AF280107.1, EVALUE 5.00e-10; EST_HUMAN HIT: AI188096.1, EVALUE 7.20e-01
aaggtggtcactggagttggaggacaaccaggatacccaggccagtttccctatgtagactcttggcttaatgtgccacaaactcaccccaagtggctacagccctgcctatgatattgcaaggcattagtggcttggggcagcccaaccaaaggaagcagaggaacctaaagtccctagcatctcccaggaaaaggaatccccaaagcctcagctgaaaccagttcttcaggccccacctgaggaaatgggatgtctgccccccatatgtgccagtctacctgtttttggcaagaatacacaggaggcagagttgggagcatctgaagagtcgggctcggaggaaagtgaggctcagtctccccaccaagtggaacagaagcccccattagaaaaaaacaaagaagatggaaagggtgatgcagctaggcacctctgctctggccaaccatgggctttgcagatgccactttgagagaccaggacacaagtttttgatgaccaggggcagataga

SEQ ID NO: 5185 - DNA, 517 bp, Homo sapiens
  MAP TO AC026431.2; EXPRESSED IN ADULT LIVER, SIGNAL = 1.4; EXPRESSED IN HEART, SIGNAL = 1.6; EXPRESSED IN LUNG, SIGNAL = 1.9; EXPRESSED IN PLACENTA, SIGNAL = 1.4; EST_HUMAN HIT: BF911568.1, EVALUE 5.00e-39; NT HIT: AL163218.2, EVALUE 1.00e-29
ttcagttgcttcattgcctcccctcatcacccccataccacgttcacacccttccagatggctgaacctgctcattttgacttcctggatcattttctcccattggtctggccaagcacaggtggtgctcaggcactcgatgtgtctcagcacacacttttattctgaaaacatgcattcgatgttccatcttctgcagtaattactggtccctgtctacttctctgtatttgtccactttcacactgctttaaagaactgcccaatactgggtaatttataaaggaaagaagtttaattgactcacagttccacatgtctggggaggcctcaggaaacttacgatcatggcggaagaagaaacaggcaccttcttcacaagccagcaggagagagaagagaaagtgaagaggaaagaggcctttatgaaaccatcagatctcctgagaactcactcactgtcatgagaacagcacagaggaaatggccccatgatccaatcacctccctccttcaa

SEQ ID NO: 5186 - DNA, 586 bp, Homo sapiens
  MAP TO AC006541.1; EXPRESSED IN ADULT LIVER, SIGNAL = 0.86; EXPRESSED IN HEART, SIGNAL =   1; SWISSPROT HIT: Q61245, EVALUE 7.00e-03; EST_HUMAN HIT: AA834205.1, EVALUE 5.30e-02
ctggtgaaagacaaggaggcacagaagggctgcagcagtgccaggcagagccgcaggctcgggctatgggtcaggacaggcagcagttccgccaacagcggagggtcttgtgcttttgcagggcagccactgcgtctcactctgttcctgctgtcccgctggcccagccactggctctcaacctggatggcctctgctgtcccgtgacctctgctgccccatggcctctgctgttccatggcttctgctctttcatggcctctgctgccccatggcctctgctgtcccgtggcctctgccatcccgtggccaccactgtcctgtggcctctgctgccccgtggcctctgctgtcccgtggcctctgctgttccgtggcctctgctgttctgtggcctctgctgccctggggcctccactgtttggtggcctctgctggcctgaggattctgctacctggtggcctctccttattgtgttttctctttataatatgagatctggaatcaggcctcccggtttcaagccttggcgctcctgtttcctagctgggtggccccgggcaaccgactgacctcctctgagct

SEQ ID NO: 5187 - DNA, 577 bp, Homo sapiens
  MAP TO AC004213.1; EXPRESSED IN BRAIN, SIGNAL = 0.73; EXPRESSED IN PLACENTA, SIGNAL = 0.77; EXPRESSED IN ADULT LIVER, SIGNAL = 0.64; SWISSPROT HIT: Q63627, EVALUE 5.50e+00; NT HIT: AF055066.1, EVALUE 0.00e+00; EST_HUMAN HIT: AW292869.1, EVALUE 4.00e-09
gtgcagggtgtgtctcaatgtctccctgagtcttcgcccgggggctgagaaaccagggagaaaccttcggcatggacccagtccatctcccttcattattcattccgaaatcccagtcccttgattgaactttctgcctcccattccatacctggactccccggactcttttggaagaaaattcaccccaaggagcttggtgccagacaatgaacttgtcctgagaatgaaggtgtagagacagtttcttcttcttccttttcttcttcttcttcttcttcttcttcttcttcttcttcttcttcttcttcttcttcttcttcttcttcttcttcttcttcttcttcttcttcctcttcctcttcctcttcctcttcctctccttctccttctccttctccttctcctccttctttcctcctcctcctgctcctccccgcccccctcctcttcttctctggaaaagttgtacctgagcatatgaaataggacagagaccagtttctttctttcttttttttttttattagctgcagtgagtagtagaatcttggtaacccctgaattatcaggaacc

SEQ ID NO: 5188 - DNA, 500 bp, Homo sapiens
  MAP TO AC024077.2; EXPRESSED IN FETAL LIVER, SIGNAL = 1.2; EXPRESSED IN PLACENTA, SIGNAL = 4.1; EXPRESSED IN HEART, SIGNAL = 3.4; EXPRESSED IN ADULT LIVER, SIGNAL = 1.2; SWISSPROT HIT: P11369, EVALUE 6.00e-15; NT HIT: L14723.1, EVALUE 3.00e-98; EST_HUMAN HIT: R64273.1, EVALUE 0.00e+00
cacctcatttgcctacccacttatctttcaatggactttttggttgtttccattttttcgctagtgtgagtaatgcttctctgaacatcagtgcacaaatatttgttcaaatttctttcaattctatggggagtatgtccagaagtggaattgctggatcaaacggtaatttattgtttaattttttgagaaacagcacaccaatttttacagtggctataacatttcccattcccatcagcaatgcactagagctccaatttttccatctgcttgaaaacacctgttgttttgtgttgctgtcattgttgttgtttatcaaagccatcctaaagtgtgtgaggtggtgtaacattgtggttttgatttgcacatctctaagtattcatgatgctgaggaactttgcatgggcttactggatatttgtgtaacctccttggagaaaactccattttaatcttttgttcattttttaattgggttttcggatgtttgctgt

SEQ ID NO: 5189 - DNA, 523 bp, Homo sapiens
  MAP TO AL020992.1; EXPRESSED IN LUNG, SIGNAL = 3.3; EXPRESSED IN PLACENTA, SIGNAL = 2.4; EXPRESSED IN ADULT LIVER, SIGNAL = 2.1; EXPRESSED IN HEART, SIGNAL = 2.1; SWISSPROT HIT: P50554, EVALUE 6.30e+00; NT HIT: AF003529.1, EVALUE 1.00e-20; EST_HUMAN HIT: BI030956.1, EVALUE 6.00e-20
catggactttgccatgtttgtgagtagatagagttactgtttcttaaaagtctggtcccctgtatggctgcaatttggtgctttccacctcagatctaggtggggcttggactctcttccccgaaggtatgagaagggagggtcctaacatctatgttgcaaggagtgggtgtcttagtccatttgcattgctataaaggaatacccaaggctaggtaatttataaaggaaagaggtttatttggctcatggttctgcagactgtacaagaagtgtggcgccagcatctggttctggtgaaggccccagggatcttccactcatggtgcaaggtgaagggaagcaggcatcacaaggtgagaaaggaagagagaggaaaaggtatcaggctcatttcaacaaccatttatcatgggaattattgtaagagtgagaactcactcactgtgagaatgagaccaagccattcatgactgatctgcccccactaccctaatccctctcaccaggctcctaccttcaa

SEQ ID NO: 5190 - DNA, 514 bp, Homo sapiens
  MAP TO AF072711.1; EXPRESSED IN PLACENTA, SIGNAL = 1.7; EXPRESSED IN ADULT LIVER, SIGNAL = 1.7; EXPRESSED IN HEART, SIGNAL = 3.5; EXPRESSED IN BRAIN, SIGNAL = 1.5; EXPRESSED IN HELA, SIGNAL = 1.4; SWISSPROT HIT: P19835, EVALUE 2.00e-33; NT HIT: M94580.1, EVALUE 0.00e+00; EST_HUMAN HIT: C06313.1, EVALUE 1.00e-111
gaggaaggcattgagtggaggactgggagtgaggaagttagcaccggtcggggtgagtatgcacacaccctcctgttggcacaggctgagtgtcagtgcctacttgattcccccagggaggacttctacaagctggtcagtgagttcacaatcaccaaggggctcagaggcgccaagacgacctttgatgtctacaccgagtcctgggcccaggacccatcccaggagaataagaagaagactgtggtggactttgagaccgatgtcctcttcctggtgcccaccgagattgccctagcccagcacagagccaatgccaagtgaggatctgggcagcgggtggctcctgggggccttcctggggtgctgcaccttccagccgaggcctcgctgtgggtggctctcaggtgtctgggttgtctgggaaagtggtgcttgagtccccacctgtgcctgcctgatccactttgctgaggcctggcaagacttgagggcctctttttacctcccagcc

SEQ ID NO: 5191 - DNA, 550 bp, Homo sapiens
  MAP TO AC020908.5; EXPRESSED IN HEART, SIGNAL = 2.1; EXPRESSED IN ADULT LIVER, SIGNAL = 1.7; EXPRESSED IN PLACENTA, SIGNAL = 1.9; SWISSPROT HIT: Q61838, EVALUE 3.00e-15; NT HIT: gi15302735, EVALUE 1.00e-130; EST_HUMAN HIT: BF838385.1, EVALUE 1.00e-111
aagctcctagggtgcctctctgagccatgcagcctgggtcatccatgcccactggcccccctgaggcatggccctggagaagggccccccatcatggctgtctgtctctccgcagtgacccatctggtgaggggacactcagtgtgaaggtcccggactccatcaccagctgggtgggtgaggccgtggccctgtccacctctcagggcttaggcatcgccgagccctccctgctgaagaccttcaagcccttcttcgtggacttcatgctccccgctctcatcatccgtggggagcaggtcaagatcccgctcagtgtctacaactacatgggcacctgcgctgaggtactcagccccccaaatacatagccttcctccattcagtggggagttgggactgcattggtgctataaggtaggcaggggtgggacagtgtcagcttgggggatttaggagggcgagagcctctatgatgttgaggaggcagggatgggtgggctcagcctggggggctttggggaggatgcgtcatctgtgctgtcaggga

SEQ ID NO: 5192 - DNA, 508 bp, Homo sapiens
  MAP TO AC006076.1; EXPRESSED IN BONE MARROW, SIGNAL = 0.78; EXPRESSED IN PLACENTA, SIGNAL = 1.2; EXPRESSED IN ADULT LIVER, SIGNAL = 1.1; EXPRESSED IN HEART, SIGNAL = 1.3; NT HIT: AF111167.2, EVALUE 5.00e-10; EST_HUMAN HIT: AW812869.1, EVALUE 2.00e-13; SWISSPROT HIT: P07688, EVALUE 6.10e+00
ggttttcctttctggccttcttctctcaccattttctctctgcttgtcaggtctttgaacagcctaacctgctttccttgctgaatcctggtaggtaccgtgggaatctagcttctttactctgggggtcctggggcccccctttctgggcagctgtctctgtacccccatcccctgtcatcacctgatcacacttcattgtactgattggataacacctgctatggattgaatgtgtcccccaaagttcgtatgttggaaacttaatccccggtgcaacagcattgagaggcagggcctaaacaagaagattaggtcaaatgagggctctgccctcatgaacggattaatggtgtaattgtgggagtgggttagttatcaaatgagtttggccgctcttgctggctcatacttttttgcctttttggcttccactatgagatgacacagcaagagggctcttgccagagccttaaatcttggctccagagccaagagccaaacaaat

SEQ ID NO: 5193 - DNA, 584 bp, Homo sapiens
  MAP TO AC008518.3; EXPRESSED IN FETAL LIVER, SIGNAL = 0.96; EXPRESSED IN PLACENTA, SIGNAL = 1.1; EXPRESSED IN ADULT LIVER, SIGNAL = 1.2; EXPRESSED IN BRAIN, SIGNAL = 0.89; EST_HUMAN HIT: AW820328.1, EVALUE 8.20e-01
ttgcattttacaaggcctccaggggatttgcagatctttgtaaggtttgagaggcctggctctaaggtacctgaagttcagatattctgtcagtgaacttataaaattaagaagtgctgacaaaaataatgggtcccagacatctacagtgatatgaaaaatgagattatgccatttctcaaggtaaataactttcctgctctagtctaattgacaaactcctatgacctacaaactgacaaactcctatgacccacaaaagcactatcactaacctgagctatgcagctcaccttttgtgaaccttcatgtactagaacagtcagcacttctagtgtacaatggacatttgaagtcactgtccttacctgtgctcattcccagatttacaccaaggaattcccactggagtttagaaaccacaagaatgtgaaagacgccagccagccagcaattcaacccatgggaaggaaaaacctagcctggaagtacaaaaggacaacaccaaacaggagcccagtggggcactggggtgaggcagcaaaggtgtggaccgacagccctgctcaacataacagggctcc

SEQ ID NO: 5194 - DNA, 548 bp, Homo sapiens
  MAP TO AC013412.3; EXPRESSED IN LUNG, SIGNAL = 0.53; EXPRESSED IN BONE MARROW, SIGNAL = 0.8; EXPRESSED IN ADULT LIVER, SIGNAL = 0.63; SWISSPROT HIT: Q99218, EVALUE 6.00e-24; NT HIT: M55419.1, EVALUE 0.00e+00; EST_HUMAN HIT: BG198114.1, EVALUE 1.00e-124
ctttgctgcaccattttcacaggatttgcattgtagtggcttcaaggtgtactcaccacttcctcctgcttggtcttgtctgttgctggccaagcttccagatgcagatcaggaagtatggggggcaggggccgcagggggaacattggaggcagaggtggctgtggcagcaggggctgcatgggttgcacaggtggctggggctgcatgggctggtgaggctgtggctgaacaggctggggctggaagggctgctgggcaggcagagggaggtttggctgatggtgttgggttggagtcatggattgctggccaggaacaggcatcagtgcttgctggcggaccctgggctgctgagctggcaccactgggatgtggtgatgagactgcagggtgtgagtcagggggtgctgttgggacaccacggggatgatttggtggtgcagccatccacccatgggctcgtaaccataggaagagtactggtgagaaacagagatgcaggtttaccattggctcacgtgactccaaccagagaagcagcagtg

SEQ ID NO: 5195 - DNA, 598 bp, Homo sapiens
  MAP TO AC010252.3; EXPRESSED IN LUNG, SIGNAL = 1.1; EXPRESSED IN BONE MARROW, SIGNAL = 1.1; EXPRESSED IN PLACENTA, SIGNAL = 1.1; EXPRESSED IN ADULT LIVER, SIGNAL = 0.83; SWISSPROT HIT: P05060, EVALUE 1.00e+01; NT HIT: AB062390.1, EVALUE 5.70e-01
tgtgatcccagggctatttcattcaaatgttcattgattcgttcatgcctgcatgctttactcttttatcagaaaggtcgtcctctaggcagctgcttaccttctgtaggatgatgtgagcttgtgtttcctgcaagtccaatcttttgggatgaggaccctttctccttgcatctttcttgagaagttcttgtaactgtatatcttttcaattcaatttccaaaatttgtcgggctttaattggagacattataatgatattgtgaaggaggaaaataaatgtataatttagatgtcatgagggttgcttataatttattataaactttgtcatcttcggtctagaacagctgcagagagggctgctttttttaactgatgaaagaatgttttgactttcatatttcatagaatcaagaacaaatttaacttaaatccacaaataatatttgtaatgctacttaataccattattgttcatttaaacctcctttctcttggactcccctttaccagaatgcttataggaaaaaatgctgtaagtttttgagtttcttttttgttttttcctcatcaggaatcccctccaaagagagg

SEQ ID NO: 5196 - DNA, 583 bp, Homo sapiens
  MAP TO AC016396.5; EXPRESSED IN LUNG, SIGNAL = 0.96; EXPRESSED IN BRAIN, SIGNAL = 0.54; EXPRESSED IN ADULT LIVER, SIGNAL = 0.61; SWISSPROT HIT: P13693, EVALUE 2.00e-44; NT HIT: gi4507668, EVALUE 2.00e-71; EST_HUMAN HIT: BF910644.1, EVALUE 0.00e+00
tttccatttctgaaccacccttaaagaaaatcatttatgggatcactatcctcatgatagtccaacagagcaaccatgccatctggattcatgttttcaccagtaaagaactagtagcttttgcaatcagcaaggatgtgcagcctctgtcgcaaaaggttttactttttctggtctctgttcttcaagtttgcctttgattgttttcatgtaatctttgatgtagttcttgtaggtgttttttgtgaagctggtttcttgcaagtgatagtctgtgacagtatcaacagtgataactgtggttttggtacctttgccctcgggaccttcagcagaggcatttccgccaatgagcaagtcatcagtgttaccctctgtcctactgaccatattcccctccaccaccaggcacagcccatctgcaatctcccaaatctcataaatgtggaataacacctatctcatcatagctgatgagatgctggtaaacaatcatgatggcagctgaagggagacagaggacagtggtgctagcttagcaggagccgggagctctgggcgatggtggtggagctagagtgct

SEQ ID NO: 5197 - DNA, 595 bp, Homo sapiens
  MAP TO AC004206.1; EXPRESSED IN ADULT LIVER, SIGNAL = 0.42; EXPRESSED IN BONE MARROW, SIGNAL = 0.45; SWISSPROT HIT: P53587, EVALUE 4.00e-47; NT HIT: gi11321582, EVALUE 0.00e+00; EST_HUMAN HIT: AL546176.1, EVALUE 0.00e+00
atcccatcttctgtgcaagctggagagcttattcctctttgataccttctacaatatcaataggtactttaattattgcttcaggagtctcagcagcaacatcttcaatgttggccccactatgtaaacttcctattaatacaagaccttgaaatgacctttccattgttattgcaaagtagcactctctcttgggatattttcactcacagaccaatacctgattgcatattctgcccttttctcccatttgcttggtaaacaactgtttcctaatcatttgtgaaggaacagcttttgcttcttctggagagaaaaccatcttcactcctcctttgaggccactttcaaatgttccttttcctctaccaccagctaaaacctgtgccttcatcacaacatcttttgaacctaattttttggcaattgcataagcttcatctggtcactttgccacatatcctttgggaacagagacaccagtttcttgcaataattccatactcatgtattcatgtagtgagagattcctttgctgttgctgctgtacttggagtccatggttattaaacaatccagaacttcccagaacctg

SEQ ID NO: 5198 - DNA, 546 bp, Homo sapiens
  MAP TO AF004877.1; EXPRESSED IN ADULT LIVER, SIGNAL = 0.76; EXPRESSED IN HEART, SIGNAL = 1.4; EXPRESSED IN LUNG, SIGNAL = 2.9; EXPRESSED IN FETAL LIVER, SIGNAL = 2.1; EXPRESSED IN BRAIN, SIGNAL = 0.76; EXPRESSED IN PLACENTA, SIGNAL = 2.5; SWISSPROT HIT: P22577, EVALUE 5.00e-05; NT HIT: AF004877.1, EVALUE 0.00e+00; EST_HUMAN HIT: AI906078.1, EVALUE 1.00e-48
ctcctcaaagaaggggaatgaattgcaaaaattgaatattatactctagaagcaacgaattctggagtcgtagtcatggaacattagagctaagtgacactttagagaatatctcatcaatctcttcattttactagtggagaaattaggaacaaaagaaattttaatttgctaataaatgcaaaccagggctcggaagctacacaaatgtaaactctcatatgtaaaacagtatcactgaaagtgatgaatggtgcaacacttcttctaatcacttttttcagggggaacgcggtcccccaggtgagagtggtgctgccggtcctactggtcctattggaagccgaggtccttctggacccccagggcctgatggaaacaaggtaaaatcttatgttttctatattgctggtttggcccagtctgcctggaataagtagaccctttacaatagaaagataattgtttttcagatttttatttatttccagttctgtgatgacttccctctcagtaaacagcaatccgattccagtggacctgaat

SEQ ID NO: 5199 - DNA, 578 bp, Homo sapiens
  MAP TO AC022150.5; EXPRESSED IN PLACENTA, SIGNAL = 1.2; EXPRESSED IN HEART, SIGNAL = 1.2; EXPRESSED IN ADULT LIVER, SIGNAL = 0.78; SWISSPROT HIT: P03342, EVALUE 1.00e-05; NT HIT: AL163246.2, EVALUE 4.00e-17; EST_HUMAN HIT: BF739117.1, EVALUE 1.00e-39
cctagcttctggtcccaatgtgactagtcccaaatgcttctttccctcctgcctgtcccttcagtcccaacaccaactgctgctgagtcttctgaatcctccttttctgaagacccctcttacctctctccccctccccaggccactcctcagaaggctgaatcaagtcccaattcttcctcagcctccactcccccaccctgtaaccctgctgtcacctcccctccccacacccagttcggcttacaatttcgttctgcagcaaatactccccaacctgcccaacaatttcctctttgagaagtgcctggagctgagggcatcggcagagtgcatgtaccattttctctatcagacctttcccaaattaatcaacacttaggccccttctcgtgagacaccactaaatatatacaggaattccagtatttaatccaatactacaacttaacctggagtgacttaaatgtcatcctaccttctaccctttccccagatgagtgggatagagtttataccctagcccagtcccacactgacacctgcaggcctcatgagccaaaccttcaacaaggcat

SEQ ID NO: 5200 - DNA, 551 bp, Homo sapiens
  MAP TO AC005756.1; EXPRESSED IN PLACENTA, SIGNAL = 1.2; EXPRESSED IN ADULT LIVER, SIGNAL = 1.1; EXPRESSED IN HEART, SIGNAL = 1.2; EXPRESSED IN BRAIN, SIGNAL = 1.4; SWISSPROT HIT: P51531, EVALUE 4.60e-01; NT HIT: AF322193.1, EVALUE 2.10e+00
cgggagaggtatctgctgagtcgctgagtagggggagctgaggatcagggaggcgtcagtggtggggatggcccggctgctgggaacagggccaggggacttagccagggcccgacgagagctgcctgatgtcattgctggagcctcttgtcatccctcccagcagatgctgcagcatagggacctaatccccacggcacgtggccacatggctggcagcttgagcttgcggcctggagacacctgagccttgcccaggcagctccgtgccacctgccgtccagccacgctgccatcagccagcacttgtgtgtcccagaggacggggctcagggcaggctccagggacctcaccctggccgtttgacctccagcaaaggaggtctggtctcccggtcagaaaacaggagagagggcagggacttctccatggagaatatattcatggagaaggacgtaaaaggatccagaccagacaccacgggcacatgcgacccctcggccatcggccaggttttaaatcatcactgtcttcgtcgtcatcctgagtg

SEQ ID NO: 5201 - DNA, 585 bp, Homo sapiens
  MAP TO AF087017.1; EXPRESSED IN ADULT LIVER, SIGNAL = 1.5; EXPRESSED IN LUNG, SIGNAL = 0.92; EXPRESSED IN BRAIN, SIGNAL = 1.7; EST_HUMAN HIT: BI035864.1, EVALUE 3.30e+00; SWISSPROT HIT: P17473, EVALUE 5.70e-02; NT HIT: gi14741899, EVALUE 8.70e+00
tccattgctgctctcttcactgtatgaccgggggttccctctgtgcccctcaaagccccaacttgcctggactttgggtctgcagctggcgcatgggaatcttcccacatggcagcgtagggtgactatggagccgaccaaggctgccaaggtcttacttgagtagaagacttccatcctgagcgatcctgttggccggtcctccggatccagccttcctgggaatgcggccacccacaggactccaagcgggtctggggtctctggtcccccaggttgaccaccccttgctgcagctgctccggaaacagagggtgctgccctggccattttgctccttgctgggtgtctgggagggctgcgaggggaggaagaagggcagggagaggtgagagacccgagagaagggggaaggagtctcaaaggaggggagggacggccggccagcactgtggcgcagtgtgcaggaggggaacatggcggtgcccggcacgaggtggggtgcggggcagccctggagccctggctgcctctcccagcagtgggtccggcactagctagccagctgagcttgctgtgtttgga

SEQ ID NO: 5202 - DNA, 509 bp, Homo sapiens
  MAP TO AF196972.1; EXPRESSED IN PLACENTA, SIGNAL = 2.2; EXPRESSED IN ADULT LIVER, SIGNAL = 1.3; EXPRESSED IN HEART, SIGNAL = 1.6; EXPRESSED IN FETAL LIVER, SIGNAL = 2.1; SWISSPROT HIT: Q60476, EVALUE 2.80e+00; EST_HUMAN HIT: AL538245.1, EVALUE 0.00e+00; NT HIT: gi14759583, EVALUE 1.00e-72
accatcggactggactgttcacagcactggagagacagaggtccttcattcactccaggtcacaggctgtgcgtgtgcatgccgaacacccacatgcacacagttggtggctcagtctgatgtacctgacttctcacgccttcccccagtcctccagtaccgtgcctctacatgggctgggcagccccaaactgaaatgtgagtgccagagtgcatcctttaagcgaggtctgccccacggacacccgctccctctgtgtccctgctttgacagatctatccatctggccatccatccgtgggggtctgcaatggccacctttagccgccaggaatttttccagcagctactgcaaggctgtctcctgcctactgcccagcagggccttgaccagatctggctgctccttgccatctgcctcgcctgccgcctcctctggaggctcggtaagtgcctgccataccgtgtgccaccatgccaggccatatcagacctcccacattcatcc

SEQ ID NO: 5203 - DNA, 586 bp, Homo sapiens
  MAP TO AL024496.5; EXPRESSED IN BONE MARROW, SIGNAL = 1.2; EXPRESSED IN PLACENTA, SIGNAL = 1.3; EXPRESSED IN ADULT LIVER, SIGNAL = 1.5; EXPRESSED IN FETAL LIVER, SIGNAL = 1.8; SWISSPROT HIT: P13983, EVALUE 5.00e-03; EST_HUMAN HIT: AI061328.1, EVALUE 8.20e-01; NT HIT: Y07848.1, EVALUE 9.00e-03
tccttgttcaccaaagggagaacagagccatgcctccctcccagccctgagcagggcctgtgccgggagggccagttcccctggcccagagtcgtctccctgtcccagccaggctggaggtgagtgggacgaaggggtccccagggcaggtgctgccggtgaggaggagagtggcttctccgaggttgcagcgaaggacggccaggtctggagaggatgtggcctggccagtcctgacgccggaggtgacgtggcgagggctggaggtggctcctcctgggaggctgccccgggacagaggtctgggctgcgtgtgttgggcctggcccactctccgtggccagatgccacccacccccacgtctgctcagagcagagggcaggccagcagctcatgccagggtaggcaaggcctgtagccctcagagcctgcagcagaacatagagcacactcagcccactgtttcccatggatccctagagccccagcactgctgagatagtccccaggcctcagtcccacccccagacacacacacgcacacacacacacagaactcttgtcgcccagtctaagccagctcac

SEQ ID NO: 5204 - DNA, 563 bp, Homo sapiens
  MAP TO AC005307.1; EXPRESSED IN ADULT LIVER, SIGNAL = 2.2; EXPRESSED IN HEART, SIGNAL = 1.5; EXPRESSED IN FETAL LIVER, SIGNAL = 1.6; EXPRESSED IN BONE MARROW, SIGNAL = 2.9; EXPRESSED IN PLACENTA, SIGNAL = 1.8; SWISSPROT HIT: P39194, EVALUE 1.40e+00; EST_HUMAN HIT: AV762016.1, EVALUE 2.00e-07; NT HIT: AF043251.1, EVALUE 3.00e-15
ctcacctcagcctccaaaagtgctgtgattacaggtgtgagccgccacgcccagccagcaggcagtggtgacatataggagtcagataagaagtgaacaagacagactaggatctccacgaggtggtggctttgtctgactgactgagattgatgcagtaatgatacccaaaggggaaactgatgaagtaaaatgagggggggtgggcagtttcactcaccttgtctccttctggcagccaagagggagaggtgggcagcaccgggaggccgggatggttttgctcagggccctgactgcctgaactgcttctctaaataacctgaggcctctttctgcactcaagggccccatatcctctgatccctgtgttgctgcacccgaatcagcccaggctggggcagcatggattccaggtggagcagctgctgagtccctgctagtttctgagaatagctcacaagagcagaggtgagattctgcagagctttgtgggtctctaagccagtcatccatcttcctgccacctttggagccctccagggatgagcagaacccatgtt

SEQ ID NO: 5205 - DNA, 594 bp, Homo sapiens
  MAP TO AF036876.1; EXPRESSED IN HELA, SIGNAL = 1.7; EXPRESSED IN FETAL LIVER, SIGNAL = 1.8; EXPRESSED IN BONE MARROW, SIGNAL = 1.2; EXPRESSED IN PLACENTA, SIGNAL = 1.3; EXPRESSED IN ADULT LIVER, SIGNAL = 1.5; EXPRESSED IN HEART, SIGNAL = 1.6; SWISSPROT HIT: P49777, EVALUE 2.30e-01; EST_HUMAN HIT: BF035327.1, EVALUE 4.00e-92; NT HIT: AL163248.2, EVALUE 1.00e-41
agcttgcatggtctgggtagatcacactagccataacattcccttaaaccaaagcctaatccagggcaaggcactaattctctccaattctatgaaagctgagaggtgaggaagctgcagaagaaaagcttaaagatagcagaggttggttcatgaggtttaaggttggaagctgtctgcataacataaaagtagaacatgaaacagcaagtgctgatggaaaaggtgcagcaagttatacagaagatctagctaagattattgatgaaggtggatgtaccaaacaacagacttttaatgtagatgaagcagctttatattggaaaaagatgccatctaggacttccatagctagaaaggagaagtcaatgcctggcttcaaagcttcaaaggatatgctgactttcttgttaggggctaatgcaaaaaaaaaaaaaaaaaagcaaccaaaaaaaacaccttttttcaacatattaccactcattgacaaggcactaagtacccaagaacactgatggagatatacaaggagatttatattgtttttgtgcctgctaacacaacatccattctgcaacccatggatcaaggagt

SEQ ID NO: 5206 - DNA, 554 bp, Homo sapiens
  MAP TO AF129076.1; EXPRESSED IN HEART, SIGNAL = 1.4; EXPRESSED IN BRAIN, SIGNAL = 1.6; EXPRESSED IN BONE MARROW, SIGNAL = 1.1; EXPRESSED IN ADULT LIVER, SIGNAL = 1.3; SWISSPROT HIT: P31792, EVALUE 4.00e-03; EST_HUMAN HIT: AV730071.1, EVALUE 3.00e-77; NT HIT: AL163246.2, EVALUE 0.00e+00
ttggctggatagtcagggacttggaagaagcatgattggaaaattggtgacaaagaaatttggggaagaggaatgaggatggacctctctgagtggtcaaaaaccatgaagatatttgtatcccatgtgagtgctcaccaacgggtgacctcagtagaggaggattttaataatcaattggataggatgacctgttctgtggacaccacccagcctctttccccagccacccctgtcattgcccaatgggcccataaacaaagtggccatggtggcaaggatggttgttatgcatgggctcagcaacatggacttccactcaccaaggctgacctggctgtggtcactgctgagtgcccaatttgccagcagcagagaccaacactgagccctcgatatgacaccattccttggggtgatcagccagctacctggtgacaggttgattatgttggacctcttccatcatggaaagggcagaggtttgtcctcactagaatagacacttactctggatatggctttgcctatcctctatgcaatgcttctgccaa

SEQ ID NO: 5207 - DNA, 537 bp, Homo sapiens
  MAP TO AC007766.1; EXPRESSED IN HELA, SIGNAL = 0.55; EXPRESSED IN BRAIN, SIGNAL = 0.74; EXPRESSED IN FETAL LIVER, SIGNAL = 1.1; EXPRESSED IN PLACENTA, SIGNAL = 0.88; EXPRESSED IN ADULT LIVER, SIGNAL = 0.68; NT HIT: gi13651457, EVALUE 0.00e+00; SWISSPROT HIT: Q04725, EVALUE 4.00e-08; EST_HUMAN HIT: AL580788.1, EVALUE 1.00e-124
gggaaaaggggcataatagctaggaacctaaaggatgaataggagttcgctctcatgaggcaaagcagtccaggcagaatgccacggggggcgacagctcacagtgactctgcccatcccagacccctggggccttcctgcgcacctgcctgctgtcctcaaacagcaggagcctgctcaccggtggctacaacctggccagcgtgagcgtgtgggacctggcggcgccctccctgcatgtgaaggagcagttgccctgtgcaggtctcaactgccaggccctggatgccaacctggatgccaacctggccttcgccagcttcaccagtggtgtggtcaggatctgggacctgcgggatcagagtgtggtcaggtgcgtttggggggtgggaaggggaagcatcctgtgccagcctcctgtggccacctctgcccaccttactgctaccacctctgcccgccttcctgccacctcctgaacctgggatatagcactctcccagccaaaaccccttgcccccttgaacttggatttga

SEQ ID NO: 5208 - DNA, 576 bp, Homo sapiens
  MAP TO AC025432.3; EXPRESSED IN HEART, SIGNAL = 2.6; EXPRESSED IN ADULT LIVER, SIGNAL = 1.2; EXPRESSED IN FETAL LIVER, SIGNAL = 1.3; SWISSPROT HIT: P20130, EVALUE 2.20e-01; EST_HUMAN HIT: AW893749.1, EVALUE 8.10e-01
ggaagggctttaaggagtggaaaggttggtaattgggttttcctttttgaaagaccatgaggaacaatgtggaggacggactggagttgacctaagtggaggctcagactctgggtagaaggtttttatagcagttcttatgagaactgattacttcactagggcattggccctagaacttctgaggaggagaagggtgtggatttacttagcaggcagcaatggcaggacctggtgatgatcatatttgaggtggtacaagacaaggagtcaacaataagtcccgagtttcagacttggatacctgggtagatggtagggctgtttgctgaacaagaggaaacaggagaaagagcagttttaggggaaacaatcatgggaatagatttgaaatgtcttccagaagcaggtgggaaatgccggcttagaatgcagaagagctcagggatggagctaaatacaaggaagtcgtcatcagaggttgaaggattgctgtgaaaggatcttttcttttgggttccttggcccctacccctgagtgtgatttccagggtttcttattcgaaggccatgagc

SEQ ID NO: 5209 - DNA, 515 bp, Homo sapiens
  MAP TO AC005760.1; EXPRESSED IN PLACENTA, SIGNAL = 1.9; EXPRESSED IN ADULT LIVER, SIGNAL = 1.8; EXPRESSED IN HEART, SIGNAL =   2; EXPRESSED IN LUNG, SIGNAL = 2.7; EXPRESSED IN HELA, SIGNAL = 1.2; EXPRESSED IN FETAL LIVER, SIGNAL = 0.97; SWISSPROT HIT: Q11116, EVALUE 1.60e+00; NT HIT: U93037.1, EVALUE 3.00e-05; EST_HUMAN HIT: BF755492.1, EVALUE 4.60e-02
ctccttccctctttcccttgcgtgtcttgttggattaagatttatttttaacccagagcaaatctggggagctggccaccctgtcagatgccattggctggatgcttctctttttgcaagagaaatggctgactgaggacctgcagccagacctgggacatgttgtccaggacctggacttcatgttaatggcatcttctgaaatgacagagcagcatcattactcccagtcctattctaaaaatggacccatctctaggtcaacatcctcagcacagttcccacccacttgctgatattgtcaagtgcattggctagggttgtataaggcaagggagtcagaaggagttctttctccttctctccctccttcccttcctttcttccttcatttctttaatattatgcttgtgacaacaaaattaaaatttttttgtgtcacatttttcaattgctatccattcatccatccatccttccctctgtcaattcatccatccatccattcatccaca

SEQ ID NO: 5210 - DNA, 590 bp, Homo sapiens
  MAP TO AC020946.4; EXPRESSED IN FETAL LIVER, SIGNAL = 3.6; EXPRESSED IN BRAIN, SIGNAL = 3.5; EXPRESSED IN BONE MARROW, SIGNAL = 3.1; EXPRESSED IN PLACENTA, SIGNAL = 3.8; EXPRESSED IN HEART, SIGNAL = 3.4; EXPRESSED IN ADULT LIVER, SIGNAL = 3.2; EST_HUMAN HIT: AL044131.2, EVALUE 1.00e-116; SWISSPROT HIT: Q61626, EVALUE 3.00e-40; NT HIT: gi14756303, EVALUE 1.00e-127
gaaagaccctcccatcttccccttgtgatcctcctgcccagaattcacggtaccaaacgtaccagcgcatgtggaactacatgcagtcgaagcagcccagcgtgttcgtcaagagcacagaagagggcattgcccgcgtcctcaactcccgctacgccttcctgctcgagtccaccatgaacgaataccaccggcgcctcaactgcaacctcacccagatcgggggactcctcgacaccaagggctacggcattggcatgccgctgggtacggcacagcacggtgtggaacacagcagggccgtgggcatccaaaaccacctgtgagcaggcccaggaccgggccaggcacccccgaggcaggctgggtgtgttgcatgtggcctcctggctgtatggtcttgggcaggcgacatcaccgtcctgagcctctgtacccccaacctgcaaaaccaggcctagcagcaatccagccctcccagagctgttgggagaattcagtgagactgtgtatacaattcagtatatgtgggtggtggggcttgctgtcttcccccaagggccctgtgggggtgaggacctggtcttgtt

SEQ ID NO: 5211 - DNA, 599 bp, Homo sapiens
  MAP TO AC004175.1; EXPRESSED IN ADULT LIVER, SIGNAL = 0.45; EXPRESSED IN BONE MARROW, SIGNAL = 0.61; SWISSPROT HIT: P35410, EVALUE 5.00e-82; NT HIT: S78653.1, EVALUE 0.00e+00
aaagctttctgggctcttccatgctatcctttcacttgtgatgtgtgtgtcgagtctgactctactcattagattcctgtgctgctcccagcagcaaaaggccaccagggtctatgcggtggtgcagatctcggcccccatgttcctactctgggccctacccctgagcgtggcacccctcataacagatttcaaaatgtttgtcaccacctcctatttaatttccttgttcctcattataaacagcagcgccaaccctatcatttatttctttgtggggagcctcagaaagaaaaggctgaaggaatctctcagagtgattctccaacgggcgttagcagataagccagaggtggggaggaacaaaaaggcagctggcatcgacccaatggagcaaccacactctactcagcatgtggagaaccttcttcccagggagcacagggtcgatgtggaaacataatttcccacatctgagctggggaattgtacacatagtaacccagcctgttctgcatcataaggctgctgcatcaaatcaatgctttattctaatcaagttcagctttcatggactttcaaaacaaccccttgctgtt

SEQ ID NO: 5212 - DNA, 500 bp, Homo sapiens
  MAP TO AF241735.1; EXPRESSED IN FETAL LIVER, SIGNAL = 0.55; EXPRESSED IN BONE MARROW, SIGNAL =   1; EXPRESSED IN PLACENTA, SIGNAL = 0.8; EXPRESSED IN ADULT LIVER, SIGNAL = 0.88; SWISSPROT HIT: O28374, EVALUE 6.00e+00; NT HIT: AE003959.1, EVALUE 3.00e-02
tctcagtgggagtccacctcggagtccactgtctagactgaagatactcccagccgcaagaccttcatgacggcagggaccttgtcatgcctttcttgtccagccccatatccccagaacccagaatggcgattgatcgggatccccagaagcagatcctgagatggaaattcacgtgcgagtatttgattaagggcatgctcccagtgggaggtgggtaaagggagccaggaagcaagacagggaaggggagggtgccaaatacgaggcgatttcctgccaggtccccgcagagggaagcttgtgcctgatactgccgggagctctggagtgcgagttacacctcagcaagggagctgggctttcagactctcctactggtagtcactagtgaacatggcctcgggcctggagcaggcaaagcgatggacaccccaggatttctcaggctctctggggaggcaaagtggtgccagtagcctgagggcaatcctctgaaa

SEQ ID NO: 5213 - DNA, 588 bp, Homo sapiens
  MAP TO AL031033.5; EXPRESSED IN PLACENTA, SIGNAL = 1.2; EXPRESSED IN ADULT LIVER, SIGNAL = 1.4; EXPRESSED IN LUNG, SIGNAL = 0.99; EXPRESSED IN FETAL LIVER, SIGNAL = 1.8; EST_HUMAN HIT: AW973666.1, EVALUE 3.00e-77; SWISSPROT HIT: Q9Y4K1, EVALUE 3.80e-01; NT HIT: gi14777082, EVALUE 2.00e-77
acacttgcagttggggaaactgaggctcggggcagttaaacctggctgccgcagggttggggtgcggtggcaccaggactcagccccacattcctgctctggccttgtggcttttggggtttgcggttggagtgcccggcggctctctggccctgagcctggccccgctgacctgccctggtgtccccctgtgctgagcaggaacgtggaggaactctgccgcttccctgagctgcctgcccgcaagcccctcacctaccagacgaagcagctcatcgcccgcgagatcgaggtggagaagatgcggcgggcggaggcttctgcccgggtagagaacagcccccaggtgagcccacccaggctctggagcaggttgcagtctgggcgtgcaccatccccactgtatccctgtgtggccagatctcacaatgcctgctccctacaggtggatgggagccccccagggctcgagggtctgctggggggcattggggagaaaggggtgcaccgacctgccccacgcaaccatgagcagcggctggagcacatcatgaggcgagcggcccgggaggaacaggtgtggaatgg

SEQ ID NO: 5214 - DNA, 505 bp, Homo sapiens
  MAP TO AC019183.3; EXPRESSED IN HELA, SIGNAL = 0.7; EXPRESSED IN BONE MARROW, SIGNAL = 0.59; EXPRESSED IN PLACENTA, SIGNAL = 0.64; EXPRESSED IN ADULT LIVER, SIGNAL = 0.65; SWISSPROT HIT: P50852, EVALUE 1.10e-01; NT HIT: AL163282.2, EVALUE 7.50e+00
gcccgatctctgttcatttctttaaaaaaacgtttgctctgtgttcttcagattgaataatttctcctatgctatcttcaagttcatggcatctttcttctgtcctatattctactcttaagctcatctatcaaagtgtggttttatcatatgtgcagatatgtttgtttgaaaaaaactgctttgtattgttcctccttttttcaaaaatgtatcaataggaaggggagcaagaaggcgggcattaaaagccaggctgagaaacaaaatgagccccaaagggatgaaaatgacactatggggcagaggaatgacgtggagcagtcgaagcaatggaacctgagtacttcaggggaataaaatgaacggctttcttttgtaatgtggtttctagggttgaggtacaaggctgggcagtcagcagaaagtaaatctctggaggttcttggaccaaaaggatttttctgccagctcctggatgacatgtgttttgctagagcgaggg

SEQ ID NO: 5215 - DNA, 584 bp, Homo sapiens
  MAP TO AC008462.5; EXPRESSED IN PLACENTA, SIGNAL = 0.93; EXPRESSED IN ADULT LIVER, SIGNAL = 0.9; EXPRESSED IN HEART, SIGNAL = 1.2; SWISSPROT HIT: P34284, EVALUE 2.00e-06; NT HIT: AF176529.1, EVALUE 1.00e-82; EST_HUMAN HIT: BF371400.1, EVALUE 0.00e+00
gatgattcacttgagtctctgggaactatttttaacgtaaccatttaaaatgttgttgctagaaaacatttttaattaattcaagtaaaatcactttataaatgctaaaatttacctgcttgagtccttcatcagtgagtttgtcctggttgcctacatgcactttctgaagtaaaggacagtgagaggcaaccgcaataatagaggtgtcagaaagctgtttacacctgtaggctgtatacctaagaagtccaggacatttaaatgctaaaacacatacgccattatcagacatactgcgacaatcagaaatgttgatttcaattatattctgacttcttgatgcaattttttccaacaattcatcagtgacctgtaagagaaaaagcaataaatttaaacttttgctaaaaataaaaacgtattttccattttttaattaaatgttccacaataaacaatatactaattagattatagcatgaacgatataatcaaaagagaaaccgtcttaacattgaagcataacaagaatttggtataataataatattgtaattggtctttgtcctgaattcttgcca

SEQ ID NO: 5216 - DNA, 524 bp, Homo sapiens
  MAP TO AL050328.24; EXPRESSED IN ADULT LIVER, SIGNAL = 0.71; EXPRESSED IN LUNG, SIGNAL = 0.78; EXPRESSED IN PLACENTA, SIGNAL = 0.76; EST_HUMAN HIT: AL564845.1, EVALUE 1.00e-58; SWISSPROT HIT: Q16653, EVALUE 5.00e-08; NT HIT: Z48051.1, EVALUE 0.00e+00
gggaccaattctgtgtcaccttctttgaatcctgatgatattcacttctttatttgacctgatttattgggccccagacaccatgctgagtgttggggattcagctctggacaatgtcaaatgtcagtcctgcctttcagatcctttctactgggtgagccctggagtgctggttctcctcgcggtgctgcctgtgctcctcctgcagatcactgttggcctcgtcttcctctgcctgcagtacagactgagaggtacagggcagagggtgggtggatcaggatcctttctttaaatgagctggcttcttggagctacaccacttaacatgtatttgtgagtgacttctgggttcagaagttcttctcactattgagtgataaagaaaaaaaataactccatgatgaaagagttttacatcttacggaatgctttcatatgaataatcggacctagcatttccctatgagctaactatggcatatagtaaccccattttacagaggatacaactgaggccagga

SEQ ID NO: 5217 - DNA, 564 bp, Homo sapiens
  MAP TO AC020626.6; EXPRESSED IN FETAL LIVER, SIGNAL = 0.68; EXPRESSED IN BRAIN, SIGNAL = 1.1; EXPRESSED IN BONE MARROW, SIGNAL = 1.3; EXPRESSED IN PLACENTA, SIGNAL = 0.63; EXPRESSED IN ADULT LIVER, SIGNAL = 0.75; EST_HUMAN HIT: BG105160.1, EVALUE 2.00e-01; NT HIT: AL163210.2, EVALUE 2.00e-03
tggctcttggtgtacactggcaaagtgcccatccatcaggctgaggcctggacctcgacagaggcacagatgctggctgttggagtaaaagcattcgggagcctgtttagactaaagcggtaaagggatttgggggaaggtagatggagccctgccagctcctgcttcaagctcacaacaggaaccaccgtgaaaactaaccccatgaaaggagacatcaaattttacaaatgaaagaacaagctctgagaaaagagttaattgaaaaatatagaaaatgactctagaataagtttaacctgtatcttcatggacagagaagcagatattacatctgctgaatcagagatcttgaaaattaagtcttcgatcatagacattttttttttgaaaattaagtctttgatcatagacatttttttaaaaagtagatggactaaatagaataagagaacaaattagtgagctagaagattgaactaaagaactccctggaaagagataaaaagtatgaaagaaaagttaggaacatggaaaataatttcataaattcccatatccggc

SEQ ID NO: 5218 - DNA, 513 bp, Homo sapiens
  MAP TO AC013455.4; EXPRESSED IN BONE MARROW, SIGNAL = 0.52; EXPRESSED IN BRAIN, SIGNAL = 0.48; EXPRESSED IN ADULT LIVER, SIGNAL = 0.51; SWISSPROT HIT: P98158, EVALUE 6.20e+00
cccccattcatgacataacagtttgtgttactattatatataaacacttaaaagtactggtacccccccattgactcagtgttttacaattaattaatcctgattaatcctattatcaggattaataaataatccaagaaaagttcttttagaacctaggatggatgtgatatacattttaggttatggttattattaaaaataatcacagaaatacaattcttccatatcactatgtcacagtaaatgttaaatgcatatgagaacaaacttcatatctgagtaacaataaggcttaaaacttacattttcaagttattatactgacttccagatttcagagtagttctttgcagagtggaaatgtttaagtgaacaaacatccaaatatgtttcatgaatgatttcatttcttctgtctcacaacgtccattaaacttagaggacacaactaagtcccacagaaagcaggtcaaagacaaacagtagttgaccaagaatagccactcagca

SEQ ID NO: 5219 - DNA, 525 bp, Homo sapiens
  MAP TO AC006127.1; EXPRESSED IN BONE MARROW, SIGNAL = 1.2; EXPRESSED IN PLACENTA, SIGNAL = 0.94; EXPRESSED IN ADULT LIVER, SIGNAL = 1.3; SWISSPROT HIT: P51532, EVALUE 3.00e-38; EST_HUMAN HIT: BF312157.1, EVALUE 1.00e-128; NT HIT: AF254822.1, EVALUE 0.00e+00
gctccaccagctctgttttcatgcggcggcaggtcaggctgggcagaattgtcaggccgagggtggcacgcacagcacacctctccagctagtgtcagaggccaccttcccttttatgacctcctgggctcctttgggactgactggcacctcttcccccaggacctgcaagcgcaggaccgagcccaccgcatcgggcagcagaacgaggtgcgtgtgctccgcctctgcaccgtcaacagcgtggaggagaagatcctagctgcagccaagtacaagctcaacgtggaccagaaggtgatccaggccggcatgttcgaccagaagtcctccagccatgagcggcgcgccttcctgcaggccatcctggagcacgaggagcaggatgaggtgagcccagcaccggccccgacccctccccagcgtgaatggtggacgcgtgagcggctttcatttttgtttttttaccttttttgcactcttattttttttgcatccctttggagtaaagggagtgtgggctga

SEQ ID NO: 5220 - DNA, 547 bp, Homo sapiens
  MAP TO AC005596.1; EXPRESSED IN ADULT LIVER, SIGNAL = 3.4; EXPRESSED IN HEART, SIGNAL = 3.6; EXPRESSED IN FETAL LIVER, SIGNAL = 2.4; EXPRESSED IN LUNG, SIGNAL = 2.7; EXPRESSED IN BONE MARROW, SIGNAL = 3.4; EXPRESSED IN BRAIN, SIGNAL = 3.5; EXPRESSED IN PLACENTA, SIGNAL = 3.5; EST_HUMAN HIT: BF204233.1, EVALUE 1.20e-02; SWISSPROT HIT: P07657, EVALUE 7.80e-01; NT HIT: gi16159062, EVALUE 5.20e-01
tttccagggatcacaaaagcctgggatttagaatagcagataataacatacagtgcatattattgatgctgctttaattgtcttattgacaactcacttgaacttggagaagcatgctaatatttatcatcctgtgaactcatgtgcattttctctactcaagccataattacagaagaatttcgaaactcagatgtctgcctgctgcactgcctcaccttccctgtgtttggacaaaggcttccagaccactgcattgccagctgtctttgctccttgcccctgaagcttttagcaccctctggatgcttctccctctaggggagatctggctaattaacactttgaccagcgtctggccaggatcggggtggcgatgtgacccacctgaggagttgcaaggagggcagcatttgggttgcctagtggttttttgttttttccaagagacagctgtttcttacctttaggaaatgccaatggaacacattagaaagatttagaacaggctgaagctagaattgaggccactgtcctggctaggaga

SEQ ID NO: 5221 - DNA, 599 bp, Homo sapiens
  MAP TO AL031716.8; EXPRESSED IN BRAIN, SIGNAL =   1; EXPRESSED IN BONE MARROW, SIGNAL = 0.84; EXPRESSED IN PLACENTA, SIGNAL = 2.1; EXPRESSED IN ADULT LIVER, SIGNAL = 0.8; EXPRESSED IN HEART, SIGNAL =   2; NT HIT: AB044947.1, EVALUE 5.70e-01; EST_HUMAN HIT: BI004601.1, EVALUE 2.00e-10; SWISSPROT HIT: P02674, EVALUE 7.80e-02
tgtgttttccgtcagaatcggcggctgatggcgcaggggaggggtgggcagtccagactctgctctgttcctgctacctccagggggctgctcaatcccaaccatgtggggcaggggatacaaacgcttgtcagagtggccgccccaggtctggtcacgtggacgtctccaatcctccatgctctgccccaccctgggccccaccccacactgtcctcagatcccctcccgtaccccagcggggccccatccctgcctcctgctcctcttctgaaggccccagctctccccaaaaccttgtcctctggtcacaatgctcagggtccttagtgtctccctgtgcaccccagctcccctgcgtggagtctggaaagtcatccctggtatggagaggagggtgacttcccccatggctaccacctctggctcctgagaatctgaccctgcggggctccctccttggaatgtcaccacgtcactggccggagtgggcgaggctgcagggcccacagggctctcactgcagtcccctgcccagttcaccatggacccctggggctcctggagtgagggccctgcctgtccttcttgcctctcca

SEQ ID NO: 5222 - DNA, 586 bp, Homo sapiens
  MAP TO AC000080.2; EXPRESSED IN BRAIN, SIGNAL =   2; EXPRESSED IN HEART, SIGNAL = 3.5; EXPRESSED IN ADULT LIVER, SIGNAL = 2.1; EXPRESSED IN LUNG, SIGNAL = 0.47; NT HIT: AJ277546.2, EVALUE 4.00e-14; EST_HUMAN HIT: BF928228.1, EVALUE 2.00e-14; SWISSPROT HIT: Q01860, EVALUE 3.30e-02
ctcactccagcctccaactcctgggcccaagcaatcctcccacttcagcctcctgagtagctgcagctataggcacaccaccatgcctggctcaatgggtattttgtggccattaaacttctggtcattcctttagattcccagaggctggatggaggtgagtggccagcccctgggtccagagatgagcgcggggcctggctgcagcctgtggggtctcccaggctggcctccaggtgtcctctcagcctgtccacaggcgctgcccaagcgtgtggcctacctggtgctgcctggcctgtctctacgcacctgtactggctctccctggattactggatcgcagtcgaatcccctgccagaatcctggtccccctttatcacaccggatcagccccaaagggcagggcttcttgcagcagttccagcctttgctgggggtttccagccctgttgagcaagccccaggtagggccctctgcagcccccgtgggggacctgtgtgccgagcagagctgccccgtgtgtaaacgcttagaactggcctccttcctgccatctgtgtcctgtttgtcatcacgcctgt

SEQ ID NO: 5223 - DNA, 539 bp, Homo sapiens
  MAP TO AC007207.22; EXPRESSED IN PLACENTA, SIGNAL = 1.2; EXPRESSED IN ADULT LIVER, SIGNAL = 1.2; EXPRESSED IN BONE MARROW, SIGNAL = 0.93; EXPRESSED IN BRAIN, SIGNAL = 1.5; EXPRESSED IN LUNG, SIGNAL = 0.81; SWISSPROT HIT: Q07020, EVALUE 7.00e-38; NT HIT: gi16163056, EVALUE 4.00e-51; EST_HUMAN HIT: AI277025.1, EVALUE 1.00e-79
ggtggacatagggtttggtgtggctgtgtggggttccccaggcctggccgaaatgcctgtacaccttggcccttgtaagtatgggagagcaggctgaagccacaggccttgggaaggccagggccagctgggcaaaggtgagggttttgcccaggcttgaggatgcggctgtagatctgctgctcacatgcaatgcacacaccttgagtttgggcacctccagcacgggcacaacatccattatgatccccacaaccacagctgttttgttcttccagccagaaagcttcatcttccccatcatatgggagagagacagaggtggccagtttctgtgactcattaacaatgtcttcagcacaacctggttgaaggtggagttggttcatctggccggaaacctgaacagcttgaccaacagcctttggtggatgtcctggctcttgggctcctgatgccgaaccttttggtccttgtcatggcaaacatcaactccctcgatggcaccttctgccctgccaggtccagaagggaaatga

SEQ ID NO: 5224 - DNA, 537 bp, Homo sapiens
  MAP TO AF181449.1; EXPRESSED IN BONE MARROW, SIGNAL = 2.1; EXPRESSED IN ADULT LIVER, SIGNAL = 0.59; EXPRESSED IN HELA, SIGNAL =   2; EXPRESSED IN LUNG, SIGNAL = 5.5; EST_HUMAN HIT: AA428498.1, EVALUE 0.00e+00; SWISSPROT HIT: Q01469, EVALUE 1.00e-27; NT HIT: gi13642859, EVALUE 2.00e-93
tgaaaatatgccgcacaaagtgattacaatggaattattgcttttatcatgtaaatgataactttggtcttcctgttatttaacatgacttaacattctacaggagtgggaatagctttgcgaaaaatgggcgcaatggccaagccagattgtatcatcacttgtgatggtaaaaacctcaccataaaaactgagagcactttgaaaacaacacagttttcttgtaccctgggagagaagtttgaagaaaccacagctgatggcagaaaaactcaggtcagtcgtgacatgttatgaaatcacagaagcttctagaatgataggctgtatcaataacattttactgtttataggcaagaacttaatgaaaaagttattttatgaattgaattttgtcaaattagcaaaagtatcaacttcatcatagaattggcatcttttattagctactaggttgaaaaccacaaactattgtgaataaaatcaatatgggttaatgaagtagactcagaaaggagaaggtgaaacaaatgttga

SEQ ID NO: 5225 - DNA, 590 bp, Homo sapiens
  MAP TO AJ251973.1; EXPRESSED IN ADULT LIVER, SIGNAL =  11; EXPRESSED IN HEART, SIGNAL = 9.2; EXPRESSED IN BRAIN, SIGNAL =  10; EXPRESSED IN FETAL LIVER, SIGNAL =  12; EXPRESSED IN BONE MARROW, SIGNAL =  12; EXPRESSED IN PLACENTA, SIGNAL =  12; NT HIT: AJ251973.1, EVALUE 0.00e+00; EST_HUMAN HIT: BF842513.1, EVALUE 0.00e+00; SWISSPROT HIT: P50494, EVALUE 2.90e-01
atggaggaggtggagcttgggcaggtggggaggaggtgacagggcctgtgggtggaggggaggcattgctggggtgcatgtgaggggacagggcacacggcggctgtgccaaggactaagtagtgccttctgctctccacccagctccctggagatgacctgctacgacagcgatgatgccaacccacgcagcgtgtccagcctctccaaccgctcgtcccctctgtcatggcgctatggccagtccagtccgcggctgcaggctggtgacgcgccctctgtgggtgggagctgccgctcggaggggacgcccgcctggtacatgcacggcgaacgggcccactactcccacaccatgcccatgcgcagccccagcaagctcagccatatctcccgcctggagctggtcgaatccctggactcggatgaggtggacctcaagtccggctacatgagcgacagtgacctcatgggcaagaccatgacggaggatgatgacatcactaccgggtaagcgcaggggcttcttggatggcgggggaggatggtggaaagaccactgggatgcgacgccttaaaagtggagtgga

SEQ ID NO: 5226 - DNA, 574 bp, Homo sapiens
  MAP TO AC020728.4; EXPRESSED IN BONE MARROW, SIGNAL = 1.4; EXPRESSED IN PLACENTA, SIGNAL =   2; EXPRESSED IN HEART, SIGNAL = 2.1; EXPRESSED IN ADULT LIVER, SIGNAL = 1.6; SWISSPROT HIT: P11801, EVALUE 1.00e-35; NT HIT: gi14776112, EVALUE 6.00e-44; EST_HUMAN HIT: BI000996.1, EVALUE 0.00e+00
tcatatgagctccagggtccgctgtcagcaggcagtcagtgaaatccttagccaggttggacatactgggtagccagggctcattcgagtaactatacttgtctctgaggcatgattgttgtccccaaagggcatagtgctactcagcaggatgtagacgatgatgcctgggacccacacgtgcactgaatggtgtagtacttgcaggccaaaacctctggggcacggtatgctggtgtgccataggtggtcttcatcaggccgttgtagttgttgctgttcttgcaggcactgaccagattgaagtcagtgatgatgatcttggagtcagtgcctggatggtggtagagcagattgtgaggcttgaggtcttggtttgtgatgcccagtgcatgcagatactggatgccatctagcaccatctgcagcattcacatggcgtcatgctcagtgaaggaacccttggtgatgatgtggttgaacagctctatgctagcagggatcagttgtatcaacatgtatacatgctcctgcatcctaaacacctccaccggctggacaatgttggcatgac

SEQ ID NO: 5227 - DNA, 545 bp, Homo sapiens
  MAP TO AC005789.1; EXPRESSED IN PLACENTA, SIGNAL = 2.3; EXPRESSED IN ADULT LIVER, SIGNAL = 3.6; EXPRESSED IN HELA, SIGNAL = 1.8; EXPRESSED IN FETAL LIVER, SIGNAL = 1.9; EST_HUMAN HIT: AI024165.1, EVALUE 0.00e+00; SWISSPROT HIT: P07916, EVALUE 2.30e+00; NT HIT: AF332859.1, EVALUE 1.30e-01
gagggtgttgagccgactacactcagttggaatgggtggcctgcaagtcgtagtgctccagcttggccaccagagagccggacagcttgatggtggcaacccagggtggctcgcccaggtggttggtggatgtgctcagcctagtgggggagggtagagtcagcaaagcccagcaatgggaccaggcctctagcccttctagggcctccctgtccccatatgaatagggaagcttctgaaggctatattggaatatcccaaaggcagtttagggcagggctgtggccacttaataggaaagggagctgagggctggcgagtgtcccagctaagcttcaagaggtccagggcagtctcccagtggttcagcactcccaggagtcagtatcagaccccagtggccagatctggtgattcagtgtgggtagggggtggctggaggatgcattgtccccctggatgtgggactcaggaggagcctccccagcacaagggctgggacatcagtgccctctggcggctgaagccttgagtcccagagtcag

SEQ ID NO: 5228 - DNA, 561 bp, Homo sapiens
  MAP TO AC005239.1; EXPRESSED IN BRAIN, SIGNAL = 0.88; EXPRESSED IN PLACENTA, SIGNAL = 7.3; EXPRESSED IN ADULT LIVER, SIGNAL = 0.77; EST_HUMAN HIT: BG831907.1, EVALUE 0.00e+00; SWISSPROT HIT: Q12962, EVALUE 1.10e+00; NT HIT: gi16163266, EVALUE 0.00e+00
ataggagtaccccaccctggctctcctgatatttcttcttatcccttctgtagccatcgtcagccagtggcagcaggagtccaaagagaaggtggtgtccctcctgctgtcccaccttcccctgcttcagccaggcaacacagaggccaagtcggagtacatgaggctactgcagaaagtgctggcctactcaatcgagagcaatgctttcatcgaggagagtcgccagctgctttcctatgccctcatccacccagccaccacactggaggaccgcaacgcactggccctctggctgagccacctggaagagcggttggctagtggcttccgctcccggccagagccctcctaccattcacgtcaaggctcagatgagtgggggggccctgcagagctaggccctggggaggcagggccaggctggcaggacaagccaccccgggaaaatggacacgtgcccttccacccatccagctcagtgccgccagccatcaacagtattgggagcaatgcaaacacaggtaagtggcgggggtgtcccagaaggccatgcctact

SEQ ID NO: 5229 - DNA, 508 bp, Homo sapiens
  MAP TO AC008580.5; EXPRESSED IN ADULT LIVER, SIGNAL = 1.1; EXPRESSED IN LUNG, SIGNAL = 0.7; EXPRESSED IN BRAIN, SIGNAL = 1.1; EXPRESSED IN PLACENTA, SIGNAL = 0.84; EST_HUMAN HIT: AW089240.1, EVALUE 7.10e-01; NT HIT: D17676.1, EVALUE 4.80e-01
gcatttaagggagcaggatgacataaagtcatgaaaggttaaatagaaaagtgatagaagagaaaaatgagatttttacaaatgccaagttcaaaggaggaaaatccactgtgtctcagcactgtgagggaaagtttcttgagggaagtagtgcaggcaaaggccttgaagattgggagggacatgataaactcagcacctgccatcgtgtcagtcagctttggggatgaagaaagcacatgtggcctcaacgtgttactgctggcagaggtggaactagtcaaattattcagttctactacacaaggagaaaaaaaaataataaagactaagattagagtaactcaggaaggaaaagtaggacaaatttacatgataagaaaataaagaacatagaaaaaaatctgtctgtatctattttgaatctctacaaaaattcaataaaaatgacaacagatatgcctaaaaatggctgtgtattatggtaggaactgtgtttttcctgtgg

SEQ ID NO: 5230 - DNA, 562 bp, Homo sapiens
  MAP TO AJ239328.2; EXPRESSED IN ADULT LIVER, SIGNAL = 0.38; EXPRESSED IN LUNG, SIGNAL = 0.86; EXPRESSED IN BONE MARROW, SIGNAL = 0.73; SWISSPROT HIT: Q12381, EVALUE 3.10e+00; EST_HUMAN HIT: AJ003574.1, EVALUE 0.00e+00; NT HIT: AL163303.2, EVALUE 0.00e+00
agaggagaggggagagcaacagagaacgagagacagacggccccaccggaagtgcttcgtgctgtcagcagatggggcaaacctggagttggttctgaggaggtttctcttctctaaaccattttgaacgtttgcccagctcagtagctgctcctcgtaacgcagttccagtctgtgtgctgctccctctgaactgcgagaggcgcctctgagctggttgggaggtggccgccaggtgagcgggctgctccagagccttctgcaaaccctgatgcttttgagttgggggcaaggacgtccatctgagtgagatgagaaggcaggtcaggagtgtttttaagagttaatgaacattaaataaatctttgatatagagatgcaatttactatcattgcaggaaaatttatattgaatggagaatagataacaatagttattccattaaaggcaacacatgaatcaaatggtagagaaacgctgatcaagaaaagcctttccccacctgccccagaggccgtttttagtggttcctggcgtcagacctttggtgatgctgctgta

SEQ ID NO: 5231 - DNA, 598 bp, Homo sapiens
  MAP TO AC006479.2; EXPRESSED IN BONE MARROW, SIGNAL =   1; EXPRESSED IN ADULT LIVER, SIGNAL = 1.2; EXPRESSED IN PLACENTA, SIGNAL =   1; EXPRESSED IN FETAL LIVER, SIGNAL = 1.1; SWISSPROT HIT: P56224, EVALUE 2.00e+00; EST_HUMAN HIT: BE065953.1, EVALUE 5.40e-02; NT HIT: AB004245.1, EVALUE 5.70e-01
taaggcttttgggctactgcattgctaaaaaatgaatacttgagttacattagatcttattgatttctaatttaatgacattattatgttttagatgatttaggcctccagacttccatatttttagatatggaagcccaagtctgtcttgaaagtaacagctctggtggctggctgttttcttcttcaccaaacatgttctcagtcaggacagaaaactgccaagcctggcgcttctggaacttcatcctactgtctagtcttttgtgccctcatcacatgcctgttcctgaagcccaggaacagagagaagctcctctggatcaggttcgtgagcctggggagcagcatcttatgattttgtttcactcatttgctgatctcttccgcagcccagaaaatttccttgtgaagttaacaaaatctgggaggctgcattcagaaaagatgacatgcacactggctggtggttgtggagatgaggatgggagggtgcatgagtggcttcaatgggttagtgagtcagagaagggtctgtatggtcactgacgtggggctacttgagatgtccagggggcctcccacatcctaaccctga

SEQ ID NO: 5232 - DNA, 551 bp, Homo sapiens
  MAP TO AL031707.17; EXPRESSED IN ADULT LIVER, SIGNAL = 1.5; EXPRESSED IN HEART, SIGNAL = 2.8; EXPRESSED IN FETAL LIVER, SIGNAL = 2.1; EXPRESSED IN LUNG, SIGNAL = 1.9; EXPRESSED IN PLACENTA, SIGNAL = 1.7; NT HIT: X07645.1, EVALUE 3.40e-02; SWISSPROT HIT: O33013, EVALUE 9.10e-02; EST_HUMAN HIT: T03074.1, EVALUE 1.00e-115
gcttgtcctttgacgaggagtttgcgcctcattcaagtcccctacctgcatccctggcggggcatctgcagtccagcctggcagggaccctgagtttgggtctgtgggggtgtggcctctgggggagggcaaaccccggtgggcactggtcaccggtgagccggcgtcggggccacagccttcactcccagccgctgcaggtccccgtttccgtacgtcacccagcgccacgcttctgcacccacgcagagccaccccacctgtgcgttcatgctgacttattaccgactcttctcgagtgaggagttctctccaaacgccattaggctttcagcttccagatgaaatgaaatggctgatgaatcactatatttcaacatattaggaaagatggacctatttgcatccgatgagcaaaatgcacttttttattgattgaaaagttgatgaggcaaacaaatcagggaaaatggctcccttttcatttccctctgagcagcaaattaagcgacttaaaagagctttgaatgagtcaacaacaaaatgcccct

SEQ ID NO: 5233 - DNA, 512 bp, Homo sapiens
  MAP TO AC022078.12; EXPRESSED IN BRAIN, SIGNAL = 1.3; EXPRESSED IN FETAL LIVER, SIGNAL = 1.2; EXPRESSED IN LUNG, SIGNAL = 0.76; EXPRESSED IN ADULT LIVER, SIGNAL = 1.3; NT HIT: gi14778141, EVALUE 8.00e-03; SWISSPROT HIT: P53971, EVALUE 7.20e-01; EST_HUMAN HIT: BG259218.1, EVALUE 1.20e-02
taattcctggttcagcggtcatgaggcaggtctgagagtcagcgtttctaccaaatgctgctcatctgctttgtgtgacgagggatagaggacttaggttagagacgtggggtctgtgtcctaaggataagcttctgggtagtcatttctttccctgacttgtgaaatgagcaagttgggtgatttttaaggtctgttcgagcttgtacaaccctgcactccctggcttcccacatgtgggcagtttgctttagctgccattggcgtttccttggccatgactgtccaggaggctccagagagagaagctggtttgcgtggcctcctcctccccacgttctgaattcagatcacagctcctgagcctctggactgacaggatgtactctgctgtcagctgtttccttccaactctgagatctcccagcatctggctccgctcccttctgccccatggatcctcactccctgtcacagaggattagggtgctggctttaacaacggagcctga

SEQ ID NO: 5234 - DNA, 591 bp, Homo sapiens
  MAP TO AC006522.5; EXPRESSED IN ADULT LIVER, SIGNAL = 0.34; NT HIT: AF139978.1, EVALUE 0.00e+00; SWISSPROT HIT: P00455, EVALUE 7.50e+00; EST_HUMAN HIT: AI868165.1, EVALUE 1.30e-02
tggccttggtcttctagtgccataaaatctagactctcttgcccctcagaatagcaatataaaaataatttttattgaaagtgagtctttaaaacaaaatacacacagataccggcatgcgtgtcttactccatagggtgttgccactgtccaagtcgctgtgcctagaacagatgagacagagattgaataactcgtcccttaagaaatatcaaatagatgatggaacagcaacgttcaagattttaaagttacaaaacctgtactctttaatgaactgattttcatttttatcaccttccagttcttgctcacaagcagacagatctttacaaaacaccacatcacactgacagagctttatcttctacagttctattgtcaaatgtttaatattatttttatttaccttctctcagcaagagttgctttattgccatcactttttaaaatgtctagacatggctattctaacatactttaaaaatatatataatgtcttcctttcttcctccattcctttcttccttccatccatttattcagaaatcatttactgagaagatacagtgggcttaaaggtaggggtga

SEQ ID NO: 5235 - DNA, 533 bp, Homo sapiens
  MAP TO AJ007973.1; EXPRESSED IN PLACENTA, SIGNAL = 5.1; EXPRESSED IN ADULT LIVER, SIGNAL =  12; EXPRESSED IN HEART, SIGNAL = 6.6; EXPRESSED IN FETAL LIVER, SIGNAL =  11; EXPRESSED IN BRAIN, SIGNAL = 6.5; NT HIT: AJ007973.1, EVALUE 0.00e+00; SWISSPROT HIT: P29400, EVALUE 7.50e-01; EST_HUMAN HIT: BG750602.1, EVALUE 3.00e-83
atcatggcaggaggtgaaaggcagttcttacatggtagtggcaagagaaaaggaggaggaagcaaaagcagaaacacctgataaacccaacagatctcatgatacttatttactatcacgagaatagcatgggaaagactggcccccatgattcaattatctcctcctgggtccctcccacaacatgtgggaattctgggagatacaattcaagttgagatttgggtggggacacagccaaaccatatcaacaatgatgataaaaatgaaaattaacccttccttcttttcagggcctcttcaaaatttatcccctcccagaagacccagccatccccatgcccccaagacagttccaccagctggccgcccagggaccccaggagtgcttggtccgtatctacattgtccgagcatttggcctgcagcccaaggaccccaatggaaaggtaactttcctagagccctcacctcccccagagtagcaggctcaggtacaagtggcctatagaacctggacacaaactctgcct

SEQ ID NO: 5236 - DNA, 518 bp, Homo sapiens
  MAP TO AC006138.1; EXPRESSED IN ADULT LIVER, SIGNAL = 1.6; EXPRESSED IN HEART, SIGNAL = 1.8; EXPRESSED IN PLACENTA, SIGNAL = 1.5; SWISSPROT HIT: P43535, EVALUE 2.00e-05; EST_HUMAN HIT: AA311258.1, EVALUE 8.00e-78; NT HIT: gi14761357, EVALUE 8.00e-80
ggagggagaggtaagccttgagcctccctattggccttggaagaatgagaagggaaagaggaaaagggccccggtggtctgaggctggaagggagggcagtgaggtgaatggcccacctggccagggagacacgcatgcgccagccccctgagaacttctgtgtgggtcgattctgcatttcagggtcaaagcccaggccagccaggatccgccgtgctttggcctctgcagctgccgccccagtggcccgcaattcctcatacacctgggaggagggagaagaggacacacgtctgagggtcccaggaacccccaagtctttgcccgtgtcccctgcgccatctcctctaccttctctagcctctcagcagctgtgtcatccccttgttccagctgtccctgaagccgccgctcctcttccagcagcttcaatcgcttggtgtcagctcgaagaacagcctggactgctggtgtctcatctgctaccacctctgggaggcagagggagaacagtcag

SEQ ID NO: 5237 - DNA, 577 bp, Homo sapiens
  MAP TO AL118559.4; EXPRESSED IN ADULT LIVER, SIGNAL =   3; EXPRESSED IN HEART, SIGNAL = 4.7; EXPRESSED IN BONE MARROW, SIGNAL =   3; EXPRESSED IN PLACENTA, SIGNAL = 4.7; SWISSPROT HIT: Q60401, EVALUE 5.00e-03; EST_HUMAN HIT: AW851379.1, EVALUE 3.00e-03; NT HIT: AY009158.1, EVALUE 4.00e-17
tgctaccccaacctcttgtcattagaggctcatcccccacgcttcagggcatgcatctgccgggcccagggagaaaccactgacctggccagcaaacagtccgcacactccaattatgcacaggatgttgaacacagcagagcccacgatggtgcccaccccgacgtccccatgggtgatgaacacccctggaaaggaaacacacagaccctgggcctcagccacacgtccccagcctgccccttcctcagtgtccccctttcacaggaaagtgggttgctttactaacaaacagagcacccgtgaagcggaagagaatggcagaagcagtggcagaaccagggaggtggaaatgccaccagggaccagctactccaatcttccctttttctctgagcagctttactcagatataatgtgcatgctataaaatttacccatttaaatatacaattcggtggttttagtatattcacagaattgtgcaaccaaaaccacaatctaattttagaatatttttatcaccttaaaaagaacatttttatcacccctcagcaccctactctaccacatgccc

SEQ ID NO: 5238 - DNA, 523 bp, Homo sapiens
  MAP TO AC020894.3; EXPRESSED IN BONE MARROW, SIGNAL = 1.3; EXPRESSED IN PLACENTA, SIGNAL = 1.6; EXPRESSED IN ADULT LIVER, SIGNAL = 1.3; EXPRESSED IN BRAIN, SIGNAL = 1.4; EXPRESSED IN FETAL LIVER, SIGNAL = 1.1; SWISSPROT HIT: Q05215, EVALUE 4.30e-01; EST_HUMAN HIT: BE926650.1, EVALUE 0.00e+00; NT HIT: gi14733018, EVALUE 0.00e+00
tgggagaattcaaaacaggcttcccagggcaagggcaagccccattcggaaggagtggatgcctacaagagagggtatttgagggtcagaggaagaggctgggtgggctcactgggcagagctctaataacaagagaagccgtccccacccccacagccttcctcggtcaagtcgctgcgctccgagcgtctgatccgtacctcgctggacctggagttagacctgcaggcgacaagaacctggcacagccaattgacccaggagatctcggtgctgaaggagctcaaggagcagctggaacaagccaagagccacggggagaaggagctgccacagtggttgcgtgaggacgagcgtttccgcctgctgctgaggatgctggagaagcgggtgagttctgcctcgaaggcaggggagccctgcgctctgccccagagagtcggggggcactgccccggggaagagaggccagagctcatgatgcatcctacaattcccaccacaggttccactgagggtgtt

SEQ ID NO: 5239 - DNA, 565 bp, Homo sapiens
  MAP TO AC006049.1; EXPRESSED IN ADULT LIVER, SIGNAL = 0.93; EXPRESSED IN HEART, SIGNAL = 1.6; EXPRESSED IN BRAIN, SIGNAL =   1; EXPRESSED IN FETAL LIVER, SIGNAL = 0.85; SWISSPROT HIT: P26675, EVALUE 3.90e-01; EST_HUMAN HIT: BF971746.1, EVALUE 1.00e-124; NT HIT: AF151017.1, EVALUE 7.00e-59
aagacacacgtgggaaggtctccactcgtggattcctgacagtggagcgacaacctcgagaaggtataaccaacttgaggttgtgcaaaatgtctttcgaagagttacctgaactctgtgagaacctcggaagagagatagcataggaagccgcctcagcacggtgtttaatacagacgccgccatcttgacgtacgcccaggacaggaattgacggaaaggcaactgcgcatgcttcaggaaactgagtagggcagggccaaggacaagcccgcagtgcggaaggcggccccacgtttgcgtcaggacggaagcgtgaaagggaaggcatgggggagaagctaatttcaactgcgtcacaatcgaattagaccccaaaattgcggttttttttggccagtcactacgactcttagatcgcattgttaaagtttgccttttaagcaattttgaaggcgatttttagcggtatcctctcagtgcgcatgcgctcttaggtttctaccaatcctgggtgagaaatgttctccagggcggaagtggcggaagcagaggaaagggaggt

SEQ ID NO: 5240 - DNA, 522 bp, Homo sapiens
  MAP TO AC005793.1; EXPRESSED IN BONE MARROW, SIGNAL = 3.7; EXPRESSED IN PLACENTA, SIGNAL = 1.8; EXPRESSED IN ADULT LIVER, SIGNAL = 3.1; EXPRESSED IN HEART, SIGNAL = 2.8; EXPRESSED IN BRAIN, SIGNAL = 2.7; EST_HUMAN HIT: AW084099.1, EVALUE 4.70e-02; NT HIT: U34363.1, EVALUE 1.30e-01
ggttaaactcagcctcacgcataacgtgtgcaggcaccgggtaacgtgagctgttattactactactactattatcttattacatttatcatctcctacttggacctttgctttacacatgaccgaatttcaaaacaccaggtcccacaaacagagcatcccccggcagagaagggctagagcctgtatctggacttttgtctctgccgctactggggtggctcctctaggttcagccctccaaggtgatcctgctttctcatggacagcttccacttattttcctcctcctcctcctcctcctccttctccttctcctcctcctcctcctcctcctggaagccctggggctggtgccatgtggtccatgctgacttctctcccatttaattccaggggcatcgaacttccaaccgggcttggtgcccagcaggctgagtctcacctccctttgcacgtgctgtttgctgggcatggactggtgttttccatgtgcctgcaggctttgtttgacacccccta

SEQ ID NO: 5241 - DNA, 547 bp, Homo sapiens
  MAP TO AF245226.1; EXPRESSED IN FETAL LIVER, SIGNAL = 2.2; EXPRESSED IN BONE MARROW, SIGNAL = 1.7; EXPRESSED IN PLACENTA, SIGNAL = 1.5; EXPRESSED IN ADULT LIVER, SIGNAL = 1.5; NT HIT: AF196779.1, EVALUE 1.00e-04; SWISSPROT HIT: P23960, EVALUE 2.30e-02; EST_HUMAN HIT: AI792345.1, EVALUE 2.00e-04
gagccctcatgaatggaatcattgcccttataaaataggcccatgcgggcacagtggcatagtgtggacctgtaatccccactactcaggaagctaatatgcaaggattgcttgagaccaggagtaaaccagctggggcaacagagtgagaccatatctcataatgaataaatgaattaatgaatgaataaataaacaggcccaataggcccatttaccctttctatcatgtaaggacatagcgagagaaagcacaacctttgaattaggaaatgggctctcactagaaaccgtgtttgctggcacctgaattttgtgtttgccagtctccacctatgagcaataaatttctatgatactttatatttcagcccagatcaactaagacaacatgtcttctaaaatgctacatataaaatgtacttatttatttgtaaaaattgtattgattggttatctctctagaaagtaagttttatggaagaactttgtaaataaataagtgaataaacaagtaaatgaataagctggttttacacttgttccc

SEQ ID NO: 5242 - DNA, 583 bp, Homo sapiens
  MAP TO AC006541.1; EXPRESSED IN BONE MARROW, SIGNAL = 2.1; EXPRESSED IN PLACENTA, SIGNAL = 4.3; EXPRESSED IN ADULT LIVER, SIGNAL =   4; EXPRESSED IN HEART, SIGNAL = 5.3; EXPRESSED IN BRAIN, SIGNAL =   4; NT HIT: gi14783604, EVALUE 3.00e-12; SWISSPROT HIT: P53326, EVALUE 4.30e+00; EST_HUMAN HIT: AA632530.1, EVALUE 7.00e-20
cttctggtgagacctcagggagcttttactcatagcagaaggcaaagggggagctggcatgtcacatgacgagagatggagcaagagagagaaggcggagaggggccatactcttttaaacaatcagattgcggatgaacacagagtgagaactcactcattaccccagggtggacagcaccaagctattcatgaaggatctccccgcatgacccaaaagcctcccaccaggccccacctccaacattgggatcaaatttcaacatgagatttggaggggacaaacacccaaacagtatcagatgactttgccattcaggctgttcatggaatgagggaccctcacgatggccacgaatctgtctcctagctcaggctctgagttcagagagacaggactgaacttggaggctctaagctcagaaagtaggatctgtggggccacactttgggcaatgtctggccctgcagttccaccgctaccaaggtgatcaattcttctgcagtcattcttgtagaggcaggtgtggcctggggacatcgcgtcccaggcaggccgccctctgtcctgaaacaggcttcc

SEQ ID NO: 5243 - DNA, 552 bp, Homo sapiens
  MAP TO AL008708.4; EXPRESSED IN LUNG, SIGNAL = 3.7; EXPRESSED IN PLACENTA, SIGNAL = 2.4; EXPRESSED IN ADULT LIVER, SIGNAL = 2.6; EST_HUMAN HIT: AV702285.1, EVALUE 0.00e+00; NT HIT: AF220189.1, EVALUE 0.00e+00; SWISSPROT HIT: Q00994, EVALUE 3.00e-07
tgtaaattcgaaagcaggggtctgtttccgtaataactttagggaaaccatcaggattcagggcataaggcaaaactcatcatgatggtcatggtgaggggggtcagtgctgactgcccgcagactatgactcaactgcttttccctcagcttttccatcagctgtctcacctcctccccaatcctttccatattctcttctctcatccttgcctgtggttctccaagcctatgcatcatatcccatctatactgcaggatgggctgcctaacgcggaaccgcctacgatttcctctaggcacacagtattcaccagcatccaaagggagggccaagggctcccctttattagcaacttgctccttttcttcattttcttggttggcattttccatgctgagactgtttactgctcgtttctctttggactccattactcctaggagacaaaaggagagagaaggggctgaacagctggtgaacgcttcagtaccgaggacagaggcacggctactcatttttcaggattccgcgtcatggctatcaacatg

SEQ ID NO: 5244 - DNA, 515 bp, Homo sapiens
  MAP TO AC006133.1; EXPRESSED IN ADULT LIVER, SIGNAL = 0.6; EXPRESSED IN LUNG, SIGNAL = 0.69; EXPRESSED IN FETAL LIVER, SIGNAL = 1.3
ctacagggtcctacatgctgcctgtgctagacaaacacacagtgactgccttttcttaactgatattcaccagctcagttcagttcacataggccatttgttacactcatctttatactacctactatcctgtgctcatggtagccaggagtgatgtctcagataaaaagataacacatagagaccaggaagcaatgttcaacaagcaagttttgatttgcctctggggacctactcaacatctttttcatgctcctcaacctaaattcactaaatacagcattcccactaaatatagcattgctcaaaacacagaaggttattcttggactctaaagccttgccttctgaaaggtctggagggcttttcagtttttgctgaaagcccccaaagaataaatctagtctttgaaaatgtccttgatgcctaagtccaccaaagctgtttcctctggggtgctgtccgtgatgctgagcactggtgcttctaggcctgtatttgcaagtgaggggct

SEQ ID NO: 5245 - DNA, 576 bp, Homo sapiens
  MAP TO AC012384.16; EXPRESSED IN ADULT LIVER, SIGNAL =   1; EXPRESSED IN HEART, SIGNAL =   1; EXPRESSED IN BRAIN, SIGNAL = 1.2; SWISSPROT HIT: O00159, EVALUE 3.00e-21; EST_HUMAN HIT: BG821344.1, EVALUE 2.00e-07; NT HIT: U04049.1, EVALUE 2.00e-09
ttctgatgcccaggtcctacccagaccaatgaaatctgaatctctggagggtatggcccaggcatttgtgtttttaaagggctcttcaggtgattctagtttcagccagggatgagaaccacttacctagacattggttactttaccaaggtgatatagctgccaggcataagaggagatggattagattgcttgtgatatatatatggagaaatcagccaataggacacatagcaggatggtaatagaatgtctcaaacatcctacagcagcacgtagaaacatctctgatcccctgctccaaagagtcaccaaagccaggtgctggtccttcccacctgtgagaggtatttatacagctgggggtctcgctcgagtcccaggtaagacaggcgctcctcttcgccacctgccagcagctggtagaagatgtggaaattccgctcgccttcgttttggtagacaactcgggacttctctatcaagtaactgatgatatgcccacctacgggaatgcccttcaaaacagaacaaaaattgcagcagtgacaacaatcaaaccactctcttcctggc

SEQ ID NO: 5246 - DNA, 600 bp, Homo sapiens
  MAP TO AC007207.22; EXPRESSED IN PLACENTA, SIGNAL = 0.79; EXPRESSED IN ADULT LIVER, SIGNAL =   1; EXPRESSED IN LUNG, SIGNAL = 0.85; EXPRESSED IN BRAIN, SIGNAL = 1.1; EXPRESSED IN FETAL LIVER, SIGNAL = 0.71; SWISSPROT HIT: Q9KNZ9, EVALUE 2.00e+00; NT HIT: AJ229041.1, EVALUE 5.70e-01
ggtaggggcacagacacaagattgttaaggcaaagagaaatatgatcaatatcaagattctatggaagtttattatctactgtgtgacaaattactcaaaacttagtggcttaaaacagtttgtttttataatctcactgtttctgtgagtcaggagtctggcacggctgagctgagtcctctgtctcaaggtccctttacaaggagacagtcaagatgttgccaaggctggggcctcatcagaaaactctacggaagaacaatcctcttccaaacgcagacgttgttggagatctttatcttctctggttgctggccagaggctacccttggttccttgccatgtggacccatccagtagagtccactagcaagagagaagtcaaaatatcttgtaacctaatcacagaagtgatgtcccttcaactttgccatattgtattgattaaaattaagtcaataggtccagctcctactcaagcagagggagttctatacaaggacaggaataccaagaggcaggagtcactggggccaccttggaagtcttcctatcacaggtaaggtctagattttcacaggttgtggaataggggttca

SEQ ID NO: 5247 - DNA, 506 bp, Homo sapiens
  MAP TO AC006506.1; EXPRESSED IN ADULT LIVER, SIGNAL = 0.98; EXPRESSED IN FETAL LIVER, SIGNAL = 0.71; SWISSPROT HIT: P46936, EVALUE 7.10e-01; EST_HUMAN HIT: BF947356.1, EVALUE 5.00e-42
attccctgattggtaagggcagtggaatgtcatggggaagactttgtccttgttggtgtcttgggaagagagcagaacagtgccctgtcagccctgcaggtcccagaacccactacctgggccaggtgacagaactcagagcctttggctgcttcaggagatgtcaccatggctgtctcttcttggtcaaagttccagttggccaagacatcctggggaaaatgggcagggaggttcctcctgggtgaaacccttttgtatggctcttgacagtgcagaggggtctgggaggagattctgtgaactagccggggtgaagggtgggtggatctctccagggctcaggtcctgtttctgtggctgccatctctaaccatggaaggctggcttggacagctctcagcttgctctctacccccagggagcctaaaatgtgtccaaagctgcaggtttttgctgagacatcatgcaaaagctggttcttctccctggtcacctaatgtgct

SEQ ID NO: 5248 - DNA, 528 bp, Homo sapiens
  MAP TO AL096808.1; EXPRESSED IN BRAIN, SIGNAL = 2.6; EXPRESSED IN HELA, SIGNAL =   2; EXPRESSED IN HEART, SIGNAL =   2; EXPRESSED IN ADULT LIVER, SIGNAL =   3; EXPRESSED IN PLACENTA, SIGNAL = 2.7; EXPRESSED IN LUNG, SIGNAL =   5; EXPRESSED IN FETAL LIVER, SIGNAL = 3.1; SWISSPROT HIT: P54741, EVALUE 9.70e-01; EST_HUMAN HIT: BI596392.1, EVALUE 0.00e+00; NT HIT: AL096808.1, EVALUE 0.00e+00
aaatggtcaaagagcgatgggcccagaaaagggtcagacccagatggagatgccactggctgctagcagacccccacgctgggtctagcccacccaatcccatggggatgctcctgtgctctgcagacatctgggtgctgccacaggggcccgacagagttggcatctgggtggatctgagccaagtggtgcttctgggcctcagcaagtagctggtgctgattctgggcagccaactgtggcagcatcttcaggtgcgagtgctgctgggtgaagctgcgtgggcagtccagaaagtgacgtgacagtccacagggaccgacgtagggtttccagcccctatctgtgcagatgctgtcctccaaaccatcacggtccctctctggctggggacgtgcgcctgccactgctggcttgccagcatgatcattggttgtgacctgttgagcccatcttgccagcctcacaaaggacagtactagctgcttatgacaggaaagtggaagaacttggcctggatatttctgg

SEQ ID NO: 5249 - DNA, 571 bp, Homo sapiens
  MAP TO AC022101.3; EXPRESSED IN FETAL LIVER, SIGNAL = 8.6; EXPRESSED IN BRAIN, SIGNAL = 8.2; EXPRESSED IN LUNG, SIGNAL = 4.2; EXPRESSED IN ADULT LIVER, SIGNAL = 8.5; EST_HUMAN HIT: AL521707.1, EVALUE 0.00e+00; NT HIT: AJ271736.1, EVALUE 3.00e-95
tcaatcctttcaaaccctgctgctgctttatcaactaagtttatgtaattttctgaatcctttgttgtcatttcagcactgttcacagtatcttcaccaggtcaccaggagtagattcaatctcaagaaaccactttctttgcccatccataagaagcaactcctcatctgttaaagttttagtatgagattgcagcaattcagtcacatgttcaggctccacttctaattagagttcttttactatttctactacatctgcggtaacttcctctactgaagtcttgaacctctcaaagtcatccatgagggttggaaccaacttcttccaaactcttgttaatactgatattatgacctcctcccatgaatcatgcatgttcttaatggcacctaggatggtgaattctttccagaaggttttcaatttactttgcccagattcatcagaaaaatcactatctgtggcagctatagccttacagaatgtatttcttaaataataagacttgaaagtggtaattactccttgatccataggccacagcactgatgtgctagcaggcatgaa

SEQ ID NO: 5250 - DNA, 571 bp, Homo sapiens
  MAP TO AC020914.6; EXPRESSED IN PLACENTA, SIGNAL = 5.7; EXPRESSED IN ADULT LIVER, SIGNAL = 1.1; EXPRESSED IN BRAIN, SIGNAL = 1.2; EXPRESSED IN HELA, SIGNAL = 1.1; EXPRESSED IN BONE MARROW, SIGNAL = 0.83; NT HIT: gi14754841, EVALUE 0.00e+00; SWISSPROT HIT: P20138, EVALUE 1.00e-32; EST_HUMAN HIT: AL542696.1, EVALUE 0.00e+00
tgcttaattgtacccgcctcccaagacggggctcccgtcccagccctgccctacggcccccatgaccttcccctgtggctagtcctggagctggttccttacccatcacacgcacagagagcttggaagatgtataaccgtatttcatccatttggacttcaaccgaaagaagtatgcagcattgtccctcctccgggcatctctgatgctcagggagcagttcttccttctgggatcccagaggaggtggaatcggccccgggtctcctcctgcacttcttcgtctgggtcgtttgtggccactggaacatcagccccttccaggaaccagtagccataaccatagtacgaggctggaagggtagtgggcaatctgcagggtacgaggacgcacagaccctcctgcaccgtcagtgactctggcccctccagctggaatctccgctcctgagccagggcccctatggagacatgagggtcagctcggcccagccccacggcacctctcccctggcccactcacctgcccacagcaggggcagcagcagcggtagcatctctgaggcggag

SEQ ID NO: 5251 - DNA, 550 bp, Homo sapiens
  MAP TO AF172277.1; EXPRESSED IN FETAL LIVER, SIGNAL = 1.6; EXPRESSED IN BRAIN, SIGNAL = 1.2; EXPRESSED IN HELA, SIGNAL = 1.4; EXPRESSED IN BONE MARROW, SIGNAL = 0.95; EXPRESSED IN ADULT LIVER, SIGNAL = 1.1; EXPRESSED IN PLACENTA, SIGNAL = 1.2; SWISSPROT HIT: P02469, EVALUE 1.00e-06; EST_HUMAN HIT: BG332016.1, EVALUE 3.00e+00
cagttcattagcacagggggtacttaaaattaaagtcgcttcccggaacactgctttcaaatcaatcattctatacagtaacatatgttccaaagctgcagtattagcacattattctcagctggattctggactgtatcctgcttagaataatttatctgtgactcatatgaatcatatacacaccaggaaatacagggggtggtgcagtgggggactggttttcttgaactctttcaggccttgactgtaggcaaagctatttacattcctctcccattttagggctcggagacgtttggccagagtcctgctgttcacgttgttttaggagagccagttcctgggaaccctgttacatggactggacctggatttgccagggttctccctggggctggcttgagatttgctgtcaacaacattccctttcctgtggacttcaccattgccattcactatgaaacccaggtatcctttaactctccaactttggtggtgaaaagctgacagaaatacattcttgaactgtttccatttcagccttgct

SEQ ID NO: 5252 - DNA, 598 bp, Homo sapiens
  MAP TO AL117191.4; EXPRESSED IN BRAIN, SIGNAL = 0.7; EXPRESSED IN FETAL LIVER, SIGNAL = 0.41; EXPRESSED IN BONE MARROW, SIGNAL = 0.87; EXPRESSED IN PLACENTA, SIGNAL = 0.62; EXPRESSED IN ADULT LIVER, SIGNAL = 0.63; EST_HUMAN HIT: AW272516.1, EVALUE 2.10e-01; NT HIT: U91328.1, EVALUE 1.40e-01
tcccagatttgctagggatggttggcactgttacagggcccagttcaagtgcctgagaaaatgacttcagtgtgtgagacatgccaagggttatactatttctaccttctagaatagggtgtaggaaactggatgggagggaagggttgcactgaatcagccagagggctgagctttgcaccatgacccttcccactatggcaatgatgtggcatctcactggccagcacattggtaatttgagtatgtcttttgttatgttctctgtatttagaattaagggagttcagacactgtaaagagaaggtgtaatatgttaaggcttttaaaatgtgaattttttggcatatatggtggagaaagcaaatgcttagttgtgtgacagggatcagagtctccttagaaactaattaacaaagtgtccagtatattaattatttaaattcataaaatcatggacttgtattagatgatctttcaggtttttttccatacataaagtttcacagtacttcacacactacagtttctttctatatagtctatgatgacctcttcattttaccctcagacacaagcttttacggttggccttttg

SEQ ID NO: 5253 - DNA, 555 bp, Homo sapiens
  MAP TO AL118559.4; EXPRESSED IN HEART, SIGNAL = 3.7; EXPRESSED IN ADULT LIVER, SIGNAL = 3.8; EXPRESSED IN LUNG, SIGNAL = 4.9; EXPRESSED IN FETAL LIVER, SIGNAL = 4.6; EXPRESSED IN BRAIN, SIGNAL =   5; EXPRESSED IN HELA, SIGNAL = 2.9; EXPRESSED IN BONE MARROW, SIGNAL = 4.4; EXPRESSED IN PLACENTA, SIGNAL = 4.2; SWISSPROT HIT: O42701, EVALUE 3.50e-01; EST_HUMAN HIT: BG177113.1, EVALUE 2.00e-01; NT HIT: AF015954.1, EVALUE 8.30e+00
agccctagccctagttgagcactggctcctagataaatccccaaagcctaattacttactattgtacctggtaatcttaggaggtgtttattttctctttccccttggacagccaatgagcaagacacagtggttgctagcaagcgttcctccaggtacgggaggtgatgctgcgatttctcagggggcagtttcaggtgcacactgctgtctgcgtaaatgcccttccacagcctccacctaccctttgaggccaggctcagacgtggtctgctccagggagggcactcttgccctgaaccaccacactctttcctctgtggcaccctccctaggaagatcccccaccgtggtatttgcggcaggtggcttggtctggtttttgagccctggcctgtcttccccatgctcactgacagcagggactgggtgccttccagcttcagagcctagtacagtacagggtgtgtggacatttaagaagtatacattgaatttaatttcttgcgcaattactaggagactcagggctggagccacacactgtgctgaatt

SEQ ID NO: 5254 - DNA, 587 bp, Homo sapiens
  MAP TO AC007343.4; EXPRESSED IN ADULT LIVER, SIGNAL = 2.1; EXPRESSED IN LUNG, SIGNAL = 0.94; EXPRESSED IN FETAL LIVER, SIGNAL = 1.7; EXPRESSED IN BRAIN, SIGNAL = 2.1; EXPRESSED IN PLACENTA, SIGNAL = 2.6; SWISSPROT HIT: O75348, EVALUE 5.70e+00; EST_HUMAN HIT: BI763120.1, EVALUE 3.30e+00; NT HIT: M64239.1, EVALUE 5.60e-01
tcccagacaacccaattctcctgccccattgtacactgacaacacttggttcctccagagggagtcttgcatacctgctgcctatggaatgtattcaccgcaccctctgggggaacttgccttggtcagtgccaagttcttgggatcattttgttgttgcttgaacgaacaattaatgcaatgaaactgcatatacctgtgcctccatttccccttctgcctcagtcgaccccctctccccaccccctgctccagccacaaatccatctgccagtctcagcagtgccccactgggcccaccagtcagtctcccagaccacagtaggggaaaatggtggcttcctttcactagagggtgtgataaatgctactgtgtttttcttgactgctcctctatttttcctggcataggcctggagcagggtgtgctttgtggctgtgtcactgccaattattaatgtgaacatcatcatcggtggctgttgctgctgcctggtgttgcaagctaagctcagccgggctttgcacggctccgcaatgatctctataattaacttagatgattcactgctgtacacccattgtgc

SEQ ID NO: 5255 - DNA, 560 bp, Homo sapiens
  MAP TO AC008413.5; EXPRESSED IN ADULT LIVER, SIGNAL = 4.6; EXPRESSED IN PLACENTA, SIGNAL = 5.7; EXPRESSED IN BRAIN, SIGNAL = 4.5; EXPRESSED IN LUNG, SIGNAL = 2.6; SWISSPROT HIT: Q04860, EVALUE 1.80e+00; EST_HUMAN HIT: AW771791.1, EVALUE 4.00e-24; NT HIT: AL163248.2, EVALUE 9.00e-09
cagattgaaggatgatgccccttcagtctttgaagttgctgtcctttggatgaagttttttctcttatcttctctgatgcccttgggagtttgattgtggtataaagtgagttcagtcaactggcttcatttctggaagattttagcaggccaagactcagcccagcactcccgggctgcgtgctctaactttgggtggtttgtaccaggcccctggttttgttctctggccccatgaggttaagaacctgctgcactagaggagctgtggtgttcccagtccatcggccacaacactctgatgaggggcttccacctgaagcacatcgtcagtgtggtgacagtgggatttgtgctcactcgcacatgccagaagccataccagggtgcacacacaactctgggaagcaacactggtgggggtgttgctggtacccgtgctaacactcacagcagcagcagggcagggcgctggtgtggttgctggatcctgtgcacatttttgctccatttgtgaatggaagtacttaatgtggttatcttatgcctgtcccaccatc

SEQ ID NO: 5256 - DNA, 599 bp, Homo sapiens
  MAP TO AC008509.5; EXPRESSED IN BRAIN, SIGNAL = 1.9; EXPRESSED IN BONE MARROW, SIGNAL = 1.3; EXPRESSED IN PLACENTA, SIGNAL = 1.9; EXPRESSED IN ADULT LIVER, SIGNAL = 1.4; EXPRESSED IN FETAL LIVER, SIGNAL = 1.6; EXPRESSED IN LUNG, SIGNAL = 0.79; SWISSPROT HIT: P10394, EVALUE 2.00e-08; EST_HUMAN HIT: AL542685.1, EVALUE 0.00e+00; NT HIT: gi8923123, EVALUE 0.00e+00
agagggcactggttctggacactgaaaagaagtaagatatgctcccagacctaagtagtttatttgtcttacctgttgaatgaattcatctctttggtccattattattttctgaggaggtccatataagaaaaatatattgataatagctttagaaacttctgatgctgaaacatcacatagaggcaaaatcacaatccatttggtgaacaaatctgtcatgattatagcatatacatgacttctgttgcttgtatgaaaaggccccatcagatcaacagtaactaaactccatggattttccaccttgagaaggtgctgtttcggtgctacaataactgtattttttgccacttggcaatgctgacaagcatatacctacaacaggcacacaataaagaaaacacatacaaatgttaacactcaacacaatataaaagcagtcttataaatctgaattttaaaatggttaataggtatactttgtgttttgaaggagaaacttctggactgagaatcactggattaaacctatttagaataacaaacaaataaaacaacaacaaacaactgtagtagccactacagctgaccctcaa

SEQ ID NO: 5257 - DNA, 595 bp, Homo sapiens
  MAP TO AC008747.4; EXPRESSED IN HEART, SIGNAL = 2.9; EXPRESSED IN BRAIN, SIGNAL = 1.1; EXPRESSED IN LUNG, SIGNAL = 0.94; EXPRESSED IN ADULT LIVER, SIGNAL = 1.2; SWISSPROT HIT: P52742, EVALUE 3.00e-61; EST_HUMAN HIT: BF673094.1, EVALUE 0.00e+00; NT HIT: gi11034834, EVALUE 0.00e+00
cgtcgtctctcattcaccatcagaaaatccatactggagagaagccttatgaatgtagagaatgtgagaaagctttctgctgtagctcacaccttactccacatcaaagaattcacactatggagaaacaatatgaatgcaacaaatgtctgaaagtctttagtagcctctcatttcttgttcagcatcagagtattcatactgaagaaaaaccctttgaatgtcagaaatgcaggaaatccttcaaccagcttgaatcactgaatatgcatttgagaaatcacattagattgaaatgtgatttctatctaatgaatgccatatatgtgggaaagcctttagtcataggtcatccctgcttcaacatcacagaattcatactggagagaaaccttacgaatgtattaaatgtgggaagaccttcagctgtagttcaaaccttaccgtacatcagagaattcatactggagaaaagccatataaatgtagtgagtgtgggaaagcttttagcaaaggctcaaatcttactgcccatcaaagagtacataatggagagaaacccaatagtgtggtaagtgtggaaaagcctttagac

SEQ ID NO: 5258 - DNA, 559 bp, Homo sapiens
  MAP TO AC016543.5; EXPRESSED IN LUNG, SIGNAL = 2.1; EXPRESSED IN HELA, SIGNAL = 1.5; EXPRESSED IN FETAL LIVER, SIGNAL = 1.2; EXPRESSED IN BRAIN, SIGNAL = 0.92; EXPRESSED IN PLACENTA, SIGNAL = 0.99; EXPRESSED IN ADULT LIVER, SIGNAL = 1.2; NT HIT: gi13540831, EVALUE 3.40e-02; SWISSPROT HIT: P37728, EVALUE 4.00e+00
tgaagtgcttgaacattgcctgcagttacactccatttagacattattttgatgataaaattatgtcttcccccctactgctcattgtcttctgcagaatataggagaataaggtggtggtgtctcctgagggcttttccccccttttaaataattctatacctacccccctccccacactcatttgaatcatcaaattgattattatccctgtggctggtgcatctcaaaagatgaaaaacccagaagcagggctggggcatgacttacagctcattttggtacagtggcatcccataatattcgggttcactgagggagcagcggacggggatgcaggtgcgtttgtagctggggattcaggtgtgtatttcaaagtgtgtacttgtgccttggagtggatgtggcgggtaagttgatcattttcaccacgattgtattttcctaagcagacaggaatttatttgctcatgtctgtgtcctgggtacatttcagagagctgccaatgactagagcatcacttcatacattgagagaacgttttatagatgcgcaccc

SEQ ID NO: 5259 - DNA, 591 bp, Homo sapiens
  MAP TO AL078460.6; EXPRESSED IN BONE MARROW, SIGNAL = 1.1; EXPRESSED IN PLACENTA, SIGNAL = 1.1; EXPRESSED IN ADULT LIVER, SIGNAL =   1; EXPRESSED IN HEART, SIGNAL = 1.3; EXPRESSED IN HELA, SIGNAL = 0.96; EXPRESSED IN FETAL LIVER, SIGNAL = 1.1; SWISSPROT HIT: Q9QZZ4, EVALUE 8.70e-01; EST_HUMAN HIT: BG105603.1, EVALUE 0.00e+00; NT HIT: gi14777930, EVALUE 0.00e+00
aaaaggaggtgccatgtttggaaatgcaggggtgagctctggtttctcctggggttctggaatatctcagccctcaaaatagaggagactcaagtgcactgattctctaaaaggtgtcatcttcagaatatacttgccatcaagtatttcagggggcgggagggtcccatgagaagaaactatttttctattctccaaagctgtctggatgttggagggtggtgtgaatgctgactgaggaggtgcagagaacaggggcaggggattttaaatcacagcagaccatccagtggaatcctgtatcatctgatctgaacatcaatgaagacagagagaggaatttcattcagaaaggattccatagccccacatctagtcacacgggcattcctcttattttatcagggtctgttttcccccaacccagtgaaaccggtgagtgtgtaactcttgggaagattcttttctaaatacaggtataaagagaaggtggagggtgcgggtgcatggaagaaatactatgtgtgaagcagattcaccttcctgggaccggtgacatggtggtgacagtcaatggcttggacagacaga

SEQ ID NO: 5260 - DNA, 526 bp, Homo sapiens
  MAP TO AC005305.1; EXPRESSED IN PLACENTA, SIGNAL = 0.57; EXPRESSED IN ADULT LIVER, SIGNAL = 0.74; EXPRESSED IN BRAIN, SIGNAL = 0.86; SWISSPROT HIT: P97445, EVALUE 5.00e-19; EST_HUMAN HIT: BG820937.1, EVALUE 2.00e-96; NT HIT: Z80139.1, EVALUE 0.00e+00
atgaaatctggggttgcttgttactgcggcataacctagtctaaactgactgatacatacactatatgatgtgtttcctctggaaactccatgaagggctgccctgaagactggattcggttgggacaatgcttctgttccctcccccaggtacccctagaaaggggttcctgggtgttgtgtgtgttttaaagtttgtgtgtgtccccagtttttaaaggacagatggaattggaagtggcacctcatttttctccaggctgtattcctccatcatcttgtccccttgctcctggaaggtgatgatgatcaaggccacaaagatattgacaaagaagaaggggaacaccacaaagtagacgacgtagaaaatggacatctccatgcggtacccggggctggggccctggttctcaaaggtggcgtccaccgaatgcttgaggaccctgcaaggaatggggcagggagagggaaggggcaggaaggagagagacagggacccaaggggtgatgaggaaggtggaga

SEQ ID NO: 5261 - DNA, 589 bp, Homo sapiens
  MAP TO AL117259.3; EXPRESSED IN BRAIN, SIGNAL = 1.4; EXPRESSED IN HELA, SIGNAL = 1.9; EXPRESSED IN FETAL LIVER, SIGNAL = 1.3; EXPRESSED IN BONE MARROW, SIGNAL = 1.3; EXPRESSED IN PLACENTA, SIGNAL = 1.3; EXPRESSED IN ADULT LIVER, SIGNAL = 1.2; EXPRESSED IN HEART, SIGNAL = 1.3; SWISSPROT HIT: O51111, EVALUE 9.80e+00; EST_HUMAN HIT: BF725230.1, EVALUE 2.00e-94; NT HIT: AB046842.1, EVALUE 2.00e-99
gagggagacctagtggggaggcaaagggaaacctgagtcccctcttctggacctacgaagctgacatcctcctaggtagaatggaatgaactgagtttgttctactattttgaaaatatgaagagttttggtaattccagaaccaaccatgagttcaaaagaataagatgaaaggtactgagctcacatttgtcatcatgattgtgaacattctttgtaagaaacggtaataaatctgatcgcttgatatgacatgtggcaggcaggcatatttctgaagtagcttctcatgagttctccattttaaagaggctgcagctcgctgttcagcagctgtgagtgctggaatcaagtcaggcagagaagataactgaaaatgaaacgcatcaaaaaatcaattataaataaattgcagcactcagtaaaattactcagtcttataacacattggggaagagaatactccttctcatttcagagtttaggagacatcttagttgtcacaaggagataattatctggttaaatcaaacacttttaaaagaaatcattaagtaaaaagtatgattcctgggaaccaaattttgaa

SEQ ID NO: 5262 - DNA, 537 bp, Homo sapiens
  MAP TO AC008775.5; EXPRESSED IN BRAIN, SIGNAL = 1.5; EXPRESSED IN LUNG, SIGNAL = 0.72; EXPRESSED IN PLACENTA, SIGNAL = 1.4; EXPRESSED IN ADULT LIVER, SIGNAL = 1.3; NT HIT: AL163227.2, EVALUE 1.00e-103; SWISSPROT HIT: Q09459, EVALUE 1.70e+00; EST_HUMAN HIT: BE420422.1, EVALUE 1.00e-108
aatggctttgaccaaaatgctgataatgatatggacaataaaatccagactgagatagtctcagatggagatgaggaacttgttgagaagtggagcaaaggtgactcttgttatgttttagcaaagagattggtggcattttgtccctgccctagagatttgtggagctttgaacttgtgagagatgatttagggaatatagtgaaagaaatttctaagcagcagagcattcaagaggtgacctggatgctgttaaaagcattcagttttataagggaagcagagcataaaagttcagaaaatttgcagcctgacaatgagatagaaaagaaaaaccaattttctgagaagaaagtcaagctggctgcaaaaatctgtgtaatgaggagctggatgtttatcaccaagacaaaggaaaaaatgtcaccagggcatgtcagtggtcctcatggcagccgcttccatcacaggcccagaagcccaggaggaaaaagtggttttgtgggctgggcccagggttcccatcctttgtgcagt

SEQ ID NO: 5263 - DNA, 552 bp, Homo sapiens
  MAP TO AC007883.3; EXPRESSED IN PLACENTA, SIGNAL = 4.1; EXPRESSED IN ADULT LIVER, SIGNAL = 3.1; EXPRESSED IN BRAIN, SIGNAL = 3.4; EST_HUMAN HIT: AL518405.1, EVALUE 7.00e-66; NT HIT: gi14724054, EVALUE 2.00e-65; SWISSPROT HIT: Q57408, EVALUE 2.30e+00
caagaaggtcaggtcatcagcataaatatctacttgatgatatcaagcacgcattatcacaaatttttttcccatattaggacaaggatagtgggaaaacctctgtggttgtcgggacatggaaccaagaagagcatattgaatgggctaagaagaatactgctagagcttatcatcttcaagacgatggtacccagacagtcaggtaaagattcactttacttgcctttggagctaattactacaatttctaaaactcaaaatattgaaaaacataaaaattcaaacatttaagtaaaatccctgtttagtttttttcaagggatatcttttaggttagttttcttttcttagggaagcaacacagtgtaatagttcagagcacagtccctggagtcagactacctggattcaaatgctggctcatcacttcctaccttggagaaattacatcatcttttttatctctcacttttgttgtgtaatggtatttgcctcatatgattattgtgtcatttaagaggtaatttatgtaaaggagaatgcctggca

SEQ ID NO: 5264 - DNA, 544 bp, Homo sapiens
  MAP TO AC010200.7; EXPRESSED IN ADULT LIVER, SIGNAL = 2.2; EXPRESSED IN HEART, SIGNAL = 1.5; EXPRESSED IN BONE MARROW, SIGNAL = 4.7; EXPRESSED IN PLACENTA, SIGNAL = 1.1; SWISSPROT HIT: P34021, EVALUE 9.00e-10; EST_HUMAN HIT: BG171220.1, EVALUE 0.00e+00; NT HIT: gi14754214, EVALUE 0.00e+00
attacgccaaactgcctctctaatttccagaatgatgacattcattccagttttgttgtcacttttgttcaggtgttttaacagaacaagtggcaggtcctctgggacagaacctggaagtggaaccatactcgcaatacagcaatgttcagtttccccaagttcaaccacagatttcctcgtcatcctattattccaacctgggtttctacccccagcagcctgaagagtggtactctcctggaatatatgaactcaggcgtatgccagctgagactctctaccagggagaaactgaggtagcagagatgcctgtaacaaagaagccccgcatgggcgcgtcagcagggaggatcaaaggggatgagctgtgtgttgtttgtggagacagagcctctggataccactataatgcactgacctgtgaggggtgtaaaggtaagcatctttgattggcagttttctccttcaggttttactatattggttgttgaaatcccttgaactaattgcttcccttttcccaggcaacttcccattttct

SEQ ID NO: 5265 - DNA, 576 bp, Homo sapiens
  MAP TO AC016553.4; EXPRESSED IN BRAIN, SIGNAL = 1.9; EXPRESSED IN ADULT LIVER, SIGNAL = 1.2; EXPRESSED IN HELA, SIGNAL =   2; EXPRESSED IN FETAL LIVER, SIGNAL = 1.9; SWISSPROT HIT: P03364, EVALUE 2.00e-06; EST_HUMAN HIT: AA403053.1, EVALUE 5.00e-79; NT HIT: AL163209.2, EVALUE 4.00e-85
aggggcttacagaggtcaggtaattaatgcagttttagctctggtctgacttacagtgggtccactgggtccccagactcatcctgtggtcatttccccagtgccagaatgcataattggcatagacatccttcgcagctggcagaacccccacattggctccctgacttgtagggtgagagctgttatggtgggaaaggccaaatggaagccattagagatgcctctacctagaaatatagtaaataaaaaacaatgttgcatccccagagggattgtggagatcagtgccaccatcaaggacttgaaagatgaaggggtggtgaaagatgtgggggtggtgattcccaccacatccctgttcaactctcccgtttggcctgtgcagaagacagatgcatcttggagaatgacagtggattatcataagcttaactacgtggtaactccaattgcagctgctgtaccagatttggtttcattgcttgagcaaattaacacatctccttggacctggcatgcagccattgacttggcaaatgcctttttctccattcctgtccataaggcctacca

SEQ ID NO: 5266 - DNA, 579 bp, Homo sapiens
  MAP TO AL078611.1; EXPRESSED IN BONE MARROW, SIGNAL = 1.8; EXPRESSED IN PLACENTA, SIGNAL = 1.5; EXPRESSED IN ADULT LIVER, SIGNAL = 1.5; EXPRESSED IN HEART, SIGNAL = 2.2; EXPRESSED IN BRAIN, SIGNAL = 1.4; EXPRESSED IN FETAL LIVER, SIGNAL = 1.6; SWISSPROT HIT: Q07869, EVALUE 7.00e-83; EST_HUMAN HIT: BE168040.1, EVALUE 0.00e+00; NT HIT: gi13630102, EVALUE 0.00e+00
aggctggtactggatttcccattgtcaaatttttcaagacaggagcctgtcagtgacatgataccagcagattaaatcaaccactcacctccacagcaaatgatagcagccacaaaaagggagatatcactgtcatccagttccagtgcattgaacttcatggcaaaatcaaacttgggttccatgatatcacagaacggtttccttaggctttttaggaattcacgagttataaacccatttccatacgctaccagcatcccgtctttgttcatcacagaagacagcatggcgaatatggcctcataaactccgtattttagcaatgtcacttgatcgttcaggtccaagtttgcgaagcctgggatggccttggcgaattccgtgagctccgtgacggtctccactgacgtgcactggcagcagtgaaagatgcggacctccgcctccttgttctggatgccattggccaccagcttggccaccagcgtcttctcagccatacacagtgtctccatatcatgtatgacaaaaggctacaaaggaggacaccaaggtaagtcaggtgatgtgggatgc

SEQ ID NO: 5267 - DNA, 537 bp, Homo sapiens
  MAP TO AC006231.18; EXPRESSED IN PLACENTA, SIGNAL = 2.4; EXPRESSED IN ADULT LIVER, SIGNAL = 1.9; EXPRESSED IN HEART, SIGNAL = 2.2; EXPRESSED IN BRAIN, SIGNAL = 1.8; SWISSPROT HIT: P40021, EVALUE 9.90e-01; NT HIT: AF303384.1, EVALUE 3.30e-02
aacagcagataccagcccacacccggagcaactcggggcagagccgaagcctgggcctcggcagctgggactgattcaacttcctggttttagctgtggtcagctggatagatggatagactcaaatagaatcccagaatgggttttgagaatgaaatagaaagagaaaggccctggggaacagaaagaaatccccagaaatacaaaagttggggagagagaaggagaaacattgagaggaggagaaaaagagaccaaaactggaaaagcttcaaaggaagaaggacctaggagagcggcaaatgatggagagatctcataacttcttttccagccggtccaaaggagcagagaaatttgatcatgaaaactggaagaagcagctcagagaagggtcagcagaagatagcgtatctggtgaccccgccttaggcttggaattacatgatgattcccccaaacatagcgcagaggtgaagtgacccactgattaggaaaaatgtgttctgtcatctctgcagggcaaatggctttata

SEQ ID NO: 5268 - DNA, 501 bp, Homo sapiens
  MAP TO AC001478.1; EXPRESSED IN BONE MARROW, SIGNAL = 1.7; EXPRESSED IN ADULT LIVER, SIGNAL = 1.7; SWISSPROT HIT: P98092, EVALUE 3.50e+00; EST_HUMAN HIT: BF795432.1, EVALUE 3.00e-86; NT HIT: AL163249.2, EVALUE 5.00e-72
tagctaatctggtggggacgtggagaacctttgtgtctagctcagggattgtaaacgcaccaatcagcgccctgtcaaaacagactgctgggcactctgtaaaatggaccaatcagcaggatgtgggtggggccagataagaggataaaagcaggctgcctgagccagcagtggcaatcctctggggtctccatagcaatcctgtggggtctccatacatattgtggaaaatttgttcttttgctctttgcagtaaatcttgctgctgctcactctttgggtccacactgcctttatgagctgtaacactcacggggaaggtctgcagcttcactcctaaagccagcgagaccaccaacccaccaggaggagcgaacaactctagacgcgccgccttaagagctgtaacactcaccacgaaggtttgcagcttcactcctgagccgggaagaccacgaaccccaccagaaggaagaaactccgaacacatccgaacatcag

SEQ ID NO: 5269 - DNA, 593 bp, Homo sapiens
  MAP TO AC005942.2; EXPRESSED IN ADULT LIVER, SIGNAL = 1.2; EXPRESSED IN BRAIN, SIGNAL = 1.2; EXPRESSED IN PLACENTA, SIGNAL =  19; NT HIT: gi14861873, EVALUE 1.40e-01; SWISSPROT HIT: P03344, EVALUE 4.50e-02; EST_HUMAN HIT: AU140532.1, EVALUE 1.00e-30
tcaaacccctcaacaagacctccttaacctggcctgtaaggtcttcagcaacagagatgagcaaaataaattagataaagcccaacgagattgtgctaaataccagctcttagcagcagctattcatcagcctacccaggctgcctaggggcacaaaagacccaatagcagtgaccctcctggtccctgtttaagtgcagcaaagaaggccagtaggcctgagcgtgccctaacctgcaagtgccaaaaacgccttggccagcctcccaacaaactggttactggaaatctgattgccctcttaacaagcaagctaacaggccggttcctcaaggccctggaaaagcaaagagtaaaaaggcactcatactgctgcagccccatggcctggccactgaagactgatggagcccagtcccccggccccatctgccatcactacatgggagcccagggtaactctgctaatagcaggtaagccaatctctttcttaattgatagtggggccacctacctattcggctttacctgaatttttaggacccacttacccttcccaggtctctgttgtgggggttgagggactcatctt

SEQ ID NO: 5270 - DNA, 600 bp, Homo sapiens
  MAP TO AC005175.1; EXPRESSED IN PLACENTA, SIGNAL = 0.91; EXPRESSED IN ADULT LIVER, SIGNAL = 0.95; EXPRESSED IN FETAL LIVER, SIGNAL = 0.79; EXPRESSED IN HELA, SIGNAL = 0.99; EXPRESSED IN BONE MARROW, SIGNAL =   1; NT HIT: gi14765070, EVALUE 0.00e+00; SWISSPROT HIT: O14342, EVALUE 1.00e-30; EST_HUMAN HIT: BE379385.1, EVALUE 0.00e+00
ctttactgtgcccccgaggacacctgcctgccgttccccagggccgtcaccgccgatagcggtagcgcttgaagtgaaaccacagctggaagatgccgttggcaaactggcagcggaagccgtggcggtgcgagtattcccactcgcggttgacgatcttgaaagcgatgtcctcgtagggcggccccgcgtggaagcgcaggatggcgaaatccttgttgtcggcgcaggcctccaggaagtactcgggcgtggagcgcttgtcgatgaggtcggggtagaagatgttgaacttgtatccctgcacgatcttgggcggtgggttgtcaaagtcgtagtgcgtctggttgtacttgttccactcgaagcccgtgtgcacgcggttgaagaagcgcggcttgcgtggccggtacttgtcggcccacaggtaggccttgccggtgagtggcatctccacgctgaactgcgcctcgtcctggcccatgccctccttggcccgccggaagaagatgtcctcggcgctctcgctggcgtctcctgcgggcgggacggcgttcacccgggcctcggcctccccctgggtcctggcctccctcctag

SEQ ID NO: 5271 - DNA, 572 bp, Homo sapiens
  MAP TO AL049813.1; EXPRESSED IN BRAIN, SIGNAL = 1.4; EXPRESSED IN BONE MARROW, SIGNAL = 2.2; EXPRESSED IN ADULT LIVER, SIGNAL = 1.3; EXPRESSED IN HEART, SIGNAL = 1.3; EXPRESSED IN LUNG, SIGNAL = 2.3; EXPRESSED IN FETAL LIVER, SIGNAL = 2.8; EST_HUMAN HIT: BE147401.1, EVALUE 3.00e-03; NT HIT: X03100.1, EVALUE 5.00e-26; SWISSPROT HIT: P90970, EVALUE 3.70e-01
tttctaagtcggatgccaccgacatcactcaccaataatccctttaatgtcaatcaaattaagtcctcttcttccatcattttactcctatgcccatttcctcactctttgttcaggcactattagtcttgcctcttgaaccaacttctttcactcatgctgcccactgttgccgtagtgatcttcctaaattgcaaatgcgccatcactctcctgcttaaaatccttcaatgattccttatgacttccaggacagagtagccactcctgagctttgcatgtaacatctgtcatgatccagcccctgcctgtctatttttccttttttcttgctgctgttccacatccaaagctggctccattcatactgaagcagctgaagttcttcagatatgtcattgccacactgggcccacacttttgaacctgcttcctcctgtgtgagaagtggcttctgccctgttttcggactgcctacattgaagccatctgttccccaggaagccttccctgatgccttgacagcagcatcttgtgcctgccccatatctgcacttatccatctgggcctg

SEQ ID NO: 5272 - DNA, 555 bp, Homo sapiens
  MAP TO AC008620.5; EXPRESSED IN ADULT LIVER, SIGNAL = 0.79; SWISSPROT HIT: O18935, EVALUE 1.80e+00; EST_HUMAN HIT: BG830268.1, EVALUE 1.00e-122; NT HIT: gi14754090, EVALUE 0.00e+00
tgagtaggattcccagcaccacggcagcgatgagcttctttttctcggtgtgtttgcgcaggctccgaatccaaaaagcagcatcacacagcaccccacgctcgggaccacgaagcccgctcggaagaacaggttacttgcggggagaaacgggataacgagcaatcccaggcgcagagtaaggatccttctctggtggccgtctgcagagcacagggcttggcgtatgaggccaactgggcggaaccagagcgctgcaaatgcagttaccctccagtcgctgagggacttcatgagggggctgcagcccactgaccaatcaaaacacagccaccagggacgcagcagcagcagccaggcattcaatgaataggagtaattgtcgtttatggccctcgccagcacgcggtcagcaaaggaggcccagttgtcctcctcggtgaaggccggcgggcccgggcctatgatcctccagcgcacggagagcatcccagcccctccggaggcgagcagggtcattctgaagaggagtcccggttcctgagcatgccaaga

SEQ ID NO: 5273 - DNA, 513 bp, Homo sapiens
  MAP TO AC008989.6; EXPRESSED IN BRAIN, SIGNAL = 0.7; EXPRESSED IN HEART, SIGNAL =   1; EXPRESSED IN ADULT LIVER, SIGNAL = 0.76; EXPRESSED IN LUNG, SIGNAL = 0.79; SWISSPROT HIT: Q91661, EVALUE 3.20e-01; EST_HUMAN HIT: AW245444.1, EVALUE 1.80e-01; NT HIT: gi14782775, EVALUE 1.20e-01
accggaaacacccctaagagtttaagtcccagtgcagtccctgcttgtccttgggatcagccagctgtcatctccaccagccccttcagcacccgtgtggatcccggaaagtcatcccctctgggcagctgaattatggccaaggggtgtccccactgctggctgacacagccatgtctggtgagtacgggaggccacgtcagcccccatccctgctgcctccttgctttaggacatgagggtattagtagaatgtaatgggcaaagaaagagctccagtgagcgccttgggggaaaaggcaagaaaaggaagaacatgtgtgattcagtaccaggtatgggggcaccaaagccccagacgacagtaaaatgtgtgtggctgtaaatgtattatgtatctatgcctctatccatcagtcatctgtctatccatctctctaaataatctctatttataatctatttatctatcatatctcttatttatcaatcagctatccacctatccgtctc

SEQ ID NO: 5274 - DNA, 518 bp, Homo sapiens
  MAP TO AC012467.9; EXPRESSED IN BONE MARROW, SIGNAL = 0.4; EXPRESSED IN ADULT LIVER, SIGNAL = 0.55; SWISSPROT HIT: P22434, EVALUE 1.20e+00; EST_HUMAN HIT: AV715921.1, EVALUE 0.00e+00; NT HIT: gi14735840, EVALUE 0.00e+00
gcctaccagcagctaccttgctttggaatggtcaaagcatcttcatctgtgcaccgtctctcattcctaagttacctgggaatgggtgctgggcagttgttgtattgctgtgtggcttttgttttatagtagtagggtagggagggatctagctagacaacatcaatagtgttctgttgttgtaataccacatacttgattgtccttttgatttaaagtctgcaaaagctactgctgaccgaaagtctgcatccaaacctattggatttgaaggggatcttcgtggccagtcctctgatcttccagaaagactccattcccaggaggtagatttggggtctgcacagggagatggcctgatggccggcaacgattccgaggaggccctcactgcactgatgtccaggaagactgccatctcgctgtttgaaggaaaagccctgggcctggataaagccatcctccatagcatagactgctgttgtaagcacatctggggagaccgggagatagcagtg

SEQ ID NO: 5275 - DNA, 552 bp, Homo sapiens
  MAP TO AC010203.13; EXPRESSED IN ADULT LIVER, SIGNAL = 1.7; EXPRESSED IN LUNG, SIGNAL = 2.3; EXPRESSED IN BRAIN, SIGNAL = 1.4; EXPRESSED IN FETAL LIVER, SIGNAL = 1.1; EXPRESSED IN BONE MARROW, SIGNAL = 1.5; EXPRESSED IN PLACENTA, SIGNAL = 0.83; SWISSPROT HIT: P10263, EVALUE 3.00e-10; EST_HUMAN HIT: AA676622.1, EVALUE 0.00e+00; NT HIT: gi14754128, EVALUE 4.00e-57
agtaagtcattgatgcccgctcggaatttccaagtttggcggggattgttcaggctagggtttcatcatgggacaacagttatcagctcaacaggaacagtatataaaagtattgaagcagctgcttaaaactagtggagcctcattttcacaggctcaattaagggacctaatgcaaactgttgtctcacataacccatagttcccagaaaaaggaacgctagacgtagagctctgggaacaagtggggagaaatcttaatcagcatcatgtgcaagggcaatgggtcccagtatcatctttaatgctatgggccttagtcagggcagccctggctccattatacacagaagagcctaaaaaggggaaggaggaggaaccgtcacctgctttaccacctccttttccctcagccccaatatcgccaggccaaaataacaaagaggaaatggaggttttgcctgagccccctcctccaataaataggaaaaaagacaagagctatgctacagctatgggaccctttcttaggcaagaggcattaagtgggga

SEQ ID NO: 5276 - DNA, 537 bp, Homo sapiens
  MAP TO AL021182.1; EXPRESSED IN PLACENTA, SIGNAL = 1.4; EXPRESSED IN ADULT LIVER, SIGNAL = 1.5; EXPRESSED IN HEART, SIGNAL = 1.4; EXPRESSED IN FETAL LIVER, SIGNAL = 1.5; EXPRESSED IN LUNG, SIGNAL = 1.5; EXPRESSED IN BRAIN, SIGNAL = 1.4; EXPRESSED IN BONE MARROW, SIGNAL = 1.4; SWISSPROT HIT: Q28992, EVALUE 2.90e+00; EST_HUMAN HIT: AL603245.1, EVALUE 2.00e-96; NT HIT: AJ298105.1, EVALUE 1.00e-107
tgctgacaattatgtttggggttgagtttatagttttataactcttatggccaattttgacaccttatgatattctgcaaggataagtatgaaactacttgatcaataaatgcaaacaaaagtgctgacaattttaaagacatctctaatattactttaccagtaattttgtgtccggaatttattccttccagtgggttcttggtctcgctgacttcaggagtgaagctgcagaccttcacggtgagtgttactgctcttaaaggtggtgcgaccagagttgtttgttcctcccagtgggttcgtggtctcgctgacttcaggaatgaggctgcagaccctcacagtgagtgttacagctcataaaggtagtgtggacccaaagagtgagcagcagcaagatttattgtgaatagcgaaagaataaatcttccacagcatggaaggggacccaagcaggttgccactgctgggttgggtggccagcttttattcccttatttggccccgcccacatcctgctgattggtccatttt

SEQ ID NO: 5277 - DNA, 586 bp, Homo sapiens
  MAP TO AC009510.9; EXPRESSED IN BRAIN, SIGNAL = 0.75; EXPRESSED IN PLACENTA, SIGNAL = 0.61; EXPRESSED IN HEART, SIGNAL = 1.1; EXPRESSED IN ADULT LIVER, SIGNAL = 0.7; SWISSPROT HIT: P42682, EVALUE 7.40e+00; EST_HUMAN HIT: AI807461.1, EVALUE 2.00e-91; NT HIT: AF231112.1, EVALUE 5.60e-01
ggcccatgttacctcatttgtttggaaacaatttgtaagcaaagaaataaacaggaagatatttatttttatctgtctagtcatacctgaatagggactctcttgacagccaaatttcattctgtttcacagttttccaagagaaaagcaacagcagcaacacagtggacacaatcagggtggtggccccacatcgattcagccaagtgcagagcttgctcagtccatgcacaaaaaggatgcagtagcccatgctggaaaacagggtggaaggaacgggattactttgggggtgcaatagcttccccccagaattatctcctacaaaactaactttcaaatgaagcttgtcctgtgctagagaaacaaatagaaactcccctgccttggacaatattaacatgttagttctctaaagtgctgcactagcaggtttgctatttcttgtagaaatatttcttgctatttcttcagtgtagggaatgagagagtcatcttgtaggcttaaagtgccctggatttcagcagctgaggcatcatgagaagtcccacatataagctcttgggtcctgaatggctcctctga

SEQ ID NO: 5278 - DNA, 565 bp, Homo sapiens
  MAP TO AC068323.6; EXPRESSED IN ADULT LIVER, SIGNAL = 0.83; EXPRESSED IN BRAIN, SIGNAL = 0.64; EXPRESSED IN FETAL LIVER, SIGNAL = 0.5; NT HIT: gi9631294, EVALUE 5.40e-01; SWISSPROT HIT: Q9UPR5, EVALUE 6.00e-07; EST_HUMAN HIT: M62022.1, EVALUE 3.00e-06
tcacatgagcaacttcgagtgtcagaagcacagagggtatagtatgaaatgcttaagattttaatatcatttttatttttagatatgaaaatgttttcttgtttctattccagagttttcataaactgattaatttgctccaaacatcattattttaacatataatctatataattttataaccttatatgtaattttaacacaatcctggtaaatagaacgtttagttacagacagtattgtctggtagattaaacatccaaatcaaataagaaaatgcattttgcataggttaacatcacaatcatccgttccagtggagattttggccatgtgcgactctggtacaagacgatgagcgggacagcggaagcaggcttggattttgttcctgcagcaggggagctcctctttgaagcaggggagatgaggaaaagtctgcatgttgaaatccttgatgatgactatcctgaaggcccagaggaattttctctaacaattacaaaggtggaactccagggaaggtaaaggagaaaggcaattaggaaaaagaaagcaaagagca

SEQ ID NO: 5279 - DNA, 600 bp, Homo sapiens
  MAP TO AC008626.5; EXPRESSED IN BONE MARROW, SIGNAL = 0.83; EXPRESSED IN PLACENTA, SIGNAL = 0.71; EXPRESSED IN ADULT LIVER, SIGNAL = 0.74; EXPRESSED IN BRAIN, SIGNAL = 0.65; SWISSPROT HIT: P04484, EVALUE 3.40e+00; EST_HUMAN HIT: AL514462.1, EVALUE 4.00e-09; NT HIT: U19283.1, EVALUE 5.70e-01
ctcaggaccttacccattgccctaagcccagctacaagaatcaacacctcttctattggctaaatccaagtatgagagtcatcattgcacctgtgagcttgatccagaaatgagtcatcatctcacacattgctaaatttacataggacagtcacaactctaactgtggaccatgtccacatgtgagattcaggacctcaccagtggattctgtccatgtgtgagagtgacaattctaattgtccactgggcgtgcctatgggatgcacaatctcacctgtgtgctgagtcctgttaggacactctgtgtcactcaaggatgttataggatatgcatgagtgtcatcatcttctgtgacattaccacaagtaggaaacagaagaccttacctattcccctaattctagccatgagagtcaaaatcttttctgttggttgggtccacatatgacagtcatcatcacacctgtgagctaggcctaggtatgtcacaatcccacctgtgggaagaccagacaggagagtcacattgcttgaatgttggtctaggaatatttcaataaccccatgtgttcagggccctggcaagaaagtcacat

SEQ ID NO: 5280 - DNA, 555 bp, Homo sapiens
  MAP TO AF207550.1; EXPRESSED IN BONE MARROW, SIGNAL = 1.6; EXPRESSED IN PLACENTA, SIGNAL = 1.8; EXPRESSED IN ADULT LIVER, SIGNAL = 1.7; EXPRESSED IN BRAIN, SIGNAL = 1.9; EXPRESSED IN LUNG, SIGNAL = 1.5; EXPRESSED IN FETAL LIVER, SIGNAL = 1.3; SWISSPROT HIT: P97432, EVALUE 9.20e-02; EST_HUMAN HIT: R19492.1, EVALUE 1.00e-126; NT HIT: AF207550.1, EVALUE 0.00e+00
tgtggctagcaggtaggagggctgcttacctctgaggggcatggctcctgcgcagccctgccagcatgtccagctcctgcatgctgccacggctgactgaggcagtggagttggcaaggcggatggcgcggcgcttggccctgcgagggcagcaagaagacagcaggcttccgggtcccactggctgggaagacacagaggtgctacggctggtgcggccacccggcgagacggctcccagggcttcactgaaggtgagctcatctgtgaactcatggcactatgggcagaagggaggcagggtcacggggcatcccatgggagctgatcccaccctcaagcctttgctcaggctgttttctcctttctggacattgttccctcttcccttcccttgcccattcttcaaggcttggctctcctgtagcctcttccaggaagctctgtgtgatttccacaatttgtagtgagcctcccatccaagggagagagctggcatggccgcagagggaccccctctattctgctatatcacctcacattaggcctcaccgt

SEQ ID NO: 5281 - DNA, 536 bp, Homo sapiens
  MAP TO AL109944.19; EXPRESSED IN BRAIN, SIGNAL = 0.48; EXPRESSED IN FETAL LIVER, SIGNAL = 0.92; EXPRESSED IN PLACENTA, SIGNAL = 0.82; EXPRESSED IN ADULT LIVER, SIGNAL = 0.6; EST_HUMAN HIT: AA435789.1, EVALUE 7.00e-72; NT HIT: AB038954.1, EVALUE 2.00e-19
ttgccttttgtcaacattgcaagtaacgtggaaacaaatttttattcacaaatttttgttatttctatttttaggatcgaataccataagaggaattctggactgaagagttatgaagtcatttcagacacttccagacaatttgtgttaattaaattctcactggttgagttccattctacactggaagagcatttttcctggaaaggctcctcaaaatggtaataaagggtaattcttttagatgatcttgcatttgtttgaatgggaactgagcttaatcaaacatgttaggaagactatgtctgtttcactttttaaaattattttggatggacacaataattatatatatttatggggtacagagtgatattttgacacatgtatacaatgtgtaatggtcaacttagggtatttagcatatttctcacctcaaacatttattattaatttgtgttgggaatgtttaaaatcctttctatttgaaattatgcaataaaatattatctatagtcacccaacagtgctgtaga

SEQ ID NO: 5282 - DNA, 599 bp, Homo sapiens
  MAP TO AC010205.5; EXPRESSED IN LUNG, SIGNAL =   1; EXPRESSED IN FETAL LIVER, SIGNAL = 0.66; EXPRESSED IN BONE MARROW, SIGNAL = 0.98; EXPRESSED IN BRAIN, SIGNAL = 0.78; EXPRESSED IN PLACENTA, SIGNAL = 0.76; EXPRESSED IN ADULT LIVER, SIGNAL = 0.99; NT HIT: gi4505294, EVALUE 1.00e-107; SWISSPROT HIT: Q00872, EVALUE 4.00e-32; EST_HUMAN HIT: AA442145.1, EVALUE 1.00e-107
acaaaactcctgctcttgccttagggacaaggacaattcatccctgtactgctttgacagaactttctggctccttcatctaaacctaccaatgatctggatgtcaattgatgcggtctccacgaatttgtccactttgacttgcagatcatatttcccagagtggctcctctctgcttttctaataaatatgattgtatcagtctcagagttgcgaatgtttatttgattcttatcaatttctgcaccatccttcttccaagttaattctggtcttggttttccctaaaaagaaagacagcaaaagtagagagggtaaatcatattgtctcaagatgtttcttcagcattatgagaaggacagtggcttaacccattctaggcagggctggaaaataccacccttctagtctggtggtgagcaattacagcagcaaagctgtaatctgtattttatgtgcaaggcactaccttaggtacataacattgattattttccttaatcttcacatcaagcttatcattatcctcattttttggatagagaagttaaataatttgtccaagttcctgcagttaggtaagcactggaaccaggt

SEQ ID NO: 5283 - DNA, 595 bp, Homo sapiens
  MAP TO AC016605.4; EXPRESSED IN ADULT LIVER, SIGNAL = 2.2; EXPRESSED IN FETAL LIVER, SIGNAL = 2.3; EXPRESSED IN BRAIN, SIGNAL = 2.2; EXPRESSED IN LUNG, SIGNAL = 1.9; EXPRESSED IN BONE MARROW, SIGNAL = 3.4; NT HIT: AF279897.1, EVALUE 0.00e+00; SWISSPROT HIT: P33551, EVALUE 2.00e-35; EST_HUMAN HIT: BI225812.1, EVALUE 0.00e+00
tggtggaggtggctctactcaagaagcaaagcagttaccagcacattcaaacagtgtattgaacatcttttaaatatcaaagtgagaaacaagaaggcaacataataatgttatcagaaagatgttaggaagtaaggacagctgtgtaaagcttgaggctgaaaagtagcttgccagcttcatttctttggtttcttgggtagtgggcgccggaacagcaagatgtgaggttctggttcatggatcatataatggacccatccctgactctgctgaacgccaagattcctccattcagattcagacatcagatgggttttagggaccagcttggctatgtccttgggcagcatgacatgtcgatactcaaactcctcgtcatcgtatttgtccgaatagtaaatttgtttgtgcgacataaatgatttaacttttattctgaaaagcctcctgaatatttatatccctagaacgatacataagaattgatcatctttccttatgggaggacttttttttgttgttgttgttgttttctttttaattttattttttttttaattgatcattcttgggtgtttctcacagaggggga

SEQ ID NO: 5284 - DNA, 593 bp, Homo sapiens
  MAP TO AL121594.3; EXPRESSED IN ADULT LIVER, SIGNAL = 0.62; EXPRESSED IN FETAL LIVER, SIGNAL = 0.53; EST_HUMAN HIT: AW965296.1, EVALUE 5.00e-70; NT HIT: gi13649256, EVALUE 3.00e-70; SWISSPROT HIT: O15091, EVALUE 8.00e-21
gtagtcagcaggccaaatccagcctactgcttgttttcatgaataaagtttactggaacacagccatgtctattcatttatgtattatctatggatgtcttaactacaacagcagagttgaaaagttgcaacagggaccgatgacctacaaagcctaaaatatttagtatctggcattttacaaaaattgctaacccctgctctagacaagcaatccaagaagaaataaaacttgttagactcacctgaggtgttgtctttctgtactggtcacctccatctatcacatccctcatgatttttcccttaagacattcatattcttctggactcagctgaatagactctatggtttttccacagcccgaacactggccactgtaattataattgttaaataataatatttaaatatgtcgaataatgttctggggaaaaaaatttgtgaaatgaacaatgaggaaattaaaaggtaataaaaaagaacattaaaacctttgtgataatcacatacatctaattttttgtaaacctgataatatcacaaattagtgtgccagaaaacccaaaaaagtagattggccgtttggatg

SEQ ID NO: 5285 - DNA, 598 bp, Homo sapiens
  MAP TO AC008565.5; EXPRESSED IN ADULT LIVER, SIGNAL = 3.1; EXPRESSED IN LUNG, SIGNAL = 1.9; EXPRESSED IN BONE MARROW, SIGNAL = 2.6; SWISSPROT HIT: P50747, EVALUE 1.10e+00; EST_HUMAN HIT: BE420422.1, EVALUE 1.00e-111; NT HIT: AL163282.2, EVALUE 2.00e-77
caaaatccagttgggcagtcaaattttaaagctccaaaatgatatcctgtgactccaggcctcacatccaggtcatgctgatgcaagaggtgagttcccattgtcttaggcagcttcacccctgtggctttacagggtaaagcctccctcctggttgctttcatgggttgatgttgagtgtctgaggcttttccaggtgcacagtgcaagctgtcagtggatctaccattctggggtctggacaattgtggccctcttctcacagctccactagtcccaaatagggactctgtttgggggctctgactccacatttcccttctgcactgctgtagcaaaggatcttcgtgagggccccatccctgcagcaaatttttgcctgtgtatccaggcatttccatacatcttctgaaatctaggtggaggtttccataccccgtttcttgacttctgtacacccacaggctcaacaccatgtggaagctgccaaggcttggggttttcaccctcttaagccacagcccaagctgcatgttggcccctttcagccaaggctggagcagctgggacacagggcacccaagtccctaggttgcat

SEQ ID NO: 5286 - DNA, 546 bp, Homo sapiens
  MAP TO AL079302.4; EXPRESSED IN ADULT LIVER, SIGNAL = 1.7; EXPRESSED IN LUNG, SIGNAL = 3.8; EXPRESSED IN HELA, SIGNAL = 2.6; EXPRESSED IN FETAL LIVER, SIGNAL = 1.9; EXPRESSED IN BONE MARROW, SIGNAL = 2.3; SWISSPROT HIT: P38112, EVALUE 2.00e-07; EST_HUMAN HIT: BE927222.1, EVALUE 0.00e+00; NT HIT: AF214731.1, EVALUE 1.00e-104
ccttttctcccttttcccaggtatgttgctctcaatcctttctacaagtctccttgttcagctgttggcagaaccattccttagttttcaagggttatgctgccagagtcccacagcaaggtgctctgcaagggagcagcacaatcccttcattagcactggggttttaactgctttctaccttgaccacatccatgtattttgtctgcacggggaacagtgggatatcctcatctttcttgagcgttttgtaaatcttcttaaagttgatcacatcctcaggcccaatgagcatcagactgaggccttcattggtagctcgagcagttcgaccacttcggtggacataaatctccgaggtacgtgggacctgccacaggaagaactgggagatcaatacatggccactgccaaacactggtcctctcctcagggccacatccccaaaccagaccctcctacctcccagccaggcaggtagaaacttctgcagcattgtagagcaatctagccctcctctcttagtcccacattcaaaatgttccc

SEQ ID NO: 5287 - DNA, 547 bp, Homo sapiens
  MAP TO AC010238.4; EXPRESSED IN HEART, SIGNAL = 1.5; EXPRESSED IN HELA, SIGNAL = 1.3; EXPRESSED IN BRAIN, SIGNAL =   1; EXPRESSED IN FETAL LIVER, SIGNAL = 0.87; EXPRESSED IN PLACENTA, SIGNAL = 1.1; EXPRESSED IN ADULT LIVER, SIGNAL = 1.2; SWISSPROT HIT: Q60519, EVALUE 1.70e+00; EST_HUMAN HIT: BG959372.1, EVALUE 7.70e-01
atgccgagttcacataaggccacatgtcccacatgctgtatctccctcctgccactgtcaggaaggtgcctgcaggtgcgtgaggccagaaggagggagcgtctctatcctaggaaggagttttttctgttattttcttgtctgtctagtccatgggtaagggcatgagtggtcctggtagctttgtcagccctgtaatcctgcttctcatgaagctgcatgtaaatcctgtccccctctcttcacccctgcccctcacctgccagctgtctgctctgctctcacaagggactctggtctcatgtcacagagctacagtcaccagggataggctgccaggagggaataggacatttctgctgggttcacagatctggcttcacaaaggaggtggaattcaggctgaaccttgaggcatgaaagaatttttgctagtagagaaggggctgtcattgtctgatcccatccttggaaagcactgtgctgaacttgcaacagctatgcttctatttcatgttcatgaaggcctgtgttgctgtctgcctgt

SEQ ID NO: 5288 - DNA, 508 bp, Homo sapiens
  MAP TO AC000038.2; EXPRESSED IN ADULT LIVER, SIGNAL = 1.5; EXPRESSED IN BRAIN, SIGNAL = 1.4; EXPRESSED IN FETAL LIVER, SIGNAL = 0.57; EXPRESSED IN PLACENTA, SIGNAL = 1.3; SWISSPROT HIT: Q03276, EVALUE 3.20e-01; EST_HUMAN HIT: BG057230.1, EVALUE 1.00e-24; NT HIT: gi13376434, EVALUE 8.00e-03
tgcagcaacctcaattcttgcctccccagaaaaaaaaattcaactgaggggcataaggcagaaaaggacaacaggcaagcctcagagctggagtggaagtttattaaaaagattttagaatagaaaagaacacttggaagagatcctagtgggcgacttgaacaagttccttgcttaactgtaatcctaggactttatacgccggcatcttgcatccctttcctatgattcttcccttagggtgggctgcccacatgtgcagtgcgctccttaccttgggaagtgagcatgtgcagtgtgttggggaagatgtacgcatgcccgtttgaggctgtcttcctttttccagtggcgtgccccggaaggtcatcctctgccatttttgtctcttactgtgcatgcccaggaagttgtttctccctgacacttgtgttcaattatcactttagtacaataggtgtggacatcaggaaatggcctctccctggcaccagctgccagtttatca

SEQ ID NO: 5289 - DNA, 505 bp, Homo sapiens
  MAP TO AC006129.1; EXPRESSED IN FETAL LIVER, SIGNAL = 0.63; EXPRESSED IN BONE MARROW, SIGNAL = 0.8; EXPRESSED IN ADULT LIVER, SIGNAL = 0.72; NT HIT: gi14786815, EVALUE 0.00e+00; SWISSPROT HIT: P22059, EVALUE 7.00e-05; EST_HUMAN HIT: BE870790.1, EVALUE 0.00e+00
gtgccgttgaaacatctcaggtttaaacctggcattggctatcttcacacattcctcaagcgttgtgatgaacgtgttacacgtggcactaagcagagaagaggcttcattgatgttctctgcactaggagatgaatgattctcatcgtggtgaacaaattcctgtatcgtatgaacttgctgcattaagaggtcacagtagaggcgaagttcagacattttggttttcagcgattcactggtttcacttctttctttttcgtttttagtccttgtatcagtcaaacatgctttggagctccccagagcgaccagccacctctgtctttcagctgcgttcactgccttcatgtagaaatgctgctctccaggaatgattaattccattcttgtgttgtctgctgaatgaacagaatttatgtatccaatcaagggtggtcccctccaaagctgtcacctttaatttcacaaactgccatctttatgcttcctttgctccctttgc

SEQ ID NO: 5290 - DNA, 508 bp, Homo sapiens
  MAP TO AL121768.2; EXPRESSED IN BONE MARROW, SIGNAL = 1.1; EXPRESSED IN PLACENTA, SIGNAL = 0.86; EXPRESSED IN ADULT LIVER, SIGNAL = 0.9; EXPRESSED IN LUNG, SIGNAL = 1.2; EXPRESSED IN FETAL LIVER, SIGNAL = 0.81; EXPRESSED IN BRAIN, SIGNAL = 0.8; NT HIT: AF050157.1, EVALUE 1.90e+00; EST_HUMAN HIT: BE719722.1, EVALUE 1.80e-01
tcaagatgaccctagcccacagactactgctggatagtccaggcaagtagaaaggcagtgttcctttacttcttaaaatgctctacactccaggacaaattttgtttaatttaaaatctctttaggttacttactttttccaatgcatgcatactgaacactggcccatcatgcgctttcactgtttttacaagaaagatgtctctccagatacacacatctcctgtggatgttccagaaaaagccatctcttcagtccatccatacactgcacacatcattgtgtcatttttccccagtgtgcctatgtagccttttcttccaatcaatcctccccctagttcacaaaaaatattatgaaagtaccactttcaaaatgtactcaattataaagaagcaaagtttcttttctactgttgttgttgttgtttgaatagtaaggcatgcaacagtaaggagaattgaaaactacaggtgtctcaatcagtgatgtgggtaacaccttgca

SEQ ID NO: 5291 - DNA, 589 bp, Homo sapiens
  MAP TO AC008705.4; EXPRESSED IN BONE MARROW, SIGNAL = 0.68; EXPRESSED IN PLACENTA, SIGNAL = 0.6; EXPRESSED IN ADULT LIVER, SIGNAL = 0.7; EXPRESSED IN BRAIN, SIGNAL = 0.56; EST_HUMAN HIT: AV742478.1, EVALUE 8.30e-01; NT HIT: AJ289880.1, EVALUE 8.80e+00; SWISSPROT HIT: P23360, EVALUE 2.50e+00
ttgccatgcatgactgtaatctataggccttattcaaatttgtcaattgttagagaaatattcatgatagcaaaagaaaagttttttatatactttttaaaaatcttgaaaatgagtgtgtataacttttgtaattttaaaaacaatgaaaaagagaaaaatgtacaaatactgcctccaaagagataaaaagaaaaggtgtttttctgtaaattgctgcagccagcatggggaaccatctcagtgactctattcctggaggtcaaatttctgggccgatgtccaggaggacagatctctgttgttctctaaggtcaaaaagaacagcatcaaagccaggctgagttccatgaagaaggacttgaagctgggcttccctgagccatgccagctgttccaggaccaccaatatggtgagtccctcacaagacatcactgagaggcagacagcaaggaaacaaagtagttaagatttttatctttatcttaaaatgtctaatgcctagctagacattttaaggtctagctgaatatcctattgagaagttctgagaccttaaggaggcaatgttgcccagtggagctagtc

SEQ ID NO: 5292 - DNA, 567 bp, Homo sapiens
  MAP TO AC002481.1; EXPRESSED IN ADULT LIVER, SIGNAL = 1.7; EXPRESSED IN HEART, SIGNAL =   4; EXPRESSED IN BRAIN, SIGNAL = 2.2; EXPRESSED IN HELA, SIGNAL = 4.7; EXPRESSED IN PLACENTA, SIGNAL = 3.1; SWISSPROT HIT: P06914, EVALUE 2.80e-01; EST_HUMAN HIT: BF922047.1, EVALUE 0.00e+00; NT HIT: gi15297983, EVALUE 2.00e-71
agctagtcagggagaagggcaagactcatgaacacattggtgggcaggaaatagccatgggctgaggtgcccatgtccagggtccaatgcatgatggagctgggactgggggtagggggaaagcagagctctccagctctgccccttgggcaattccttcccctttgtgggcctccgtttctcactccataaaaagagaaagattagccctacccagaggcacctgcttgccccaagggatgctgggaggcctggatggtaattgaggacctcttggaagaagtggcactgaggatatggatggggccccctgcagatgagtccaacaccatccacttgaaggtgattgagcagcggccagaccctccggtggcccaggagtatgatgtacctgtctttaccaaagacaaggaggatttcttcaactcacagtgggacctcactacacaacaagtatgccatccctccctgggtatcatcacctggggctggccacagccctggcctcatcctgtttcttctgaccttgtcccactctgcccagatcctgccctacattgatgggtt

SEQ ID NO: 5293 - DNA, 533 bp, Homo sapiens
  MAP TO AC009024.6; EXPRESSED IN HEART, SIGNAL = 1.4; EXPRESSED IN ADULT LIVER, SIGNAL = 0.96; EXPRESSED IN LUNG, SIGNAL = 1.6; EXPRESSED IN HELA, SIGNAL = 1.2; EXPRESSED IN BONE MARROW, SIGNAL = 0.93; EXPRESSED IN PLACENTA, SIGNAL = 0.81; SWISSPROT HIT: P28178, EVALUE 4.40e-01; EST_HUMAN HIT: BE143665.1, EVALUE 6.00e-14; NT HIT: AL163248.2, EVALUE 1.00e-13
tacttggggttggagactggaaggagggcaaggatcaaagagcgcctatcaggtactatgcttattgcctgggtgatgaaataatctgcacaccaaacccccacgacacataattaacctctataacaaacatgcacaggtacccctgaacctaaaaataaagtcaaaaaaagagaatactctggttttgtaagtgttacttagcttcatgaagctaagtaatttttcttaaaaaagtaaattacagagttgggtcctgatcttagttctgacttcaaataacatttagaaatgagaaggtctccagtcgctggggaattgagaagatgtgatatccctgatttgaaactcttacttcaaacttcctctccacccttcctctccaccaatcccagtaagctttctcctgtcttacttcatattgaacttcaagtgccagcttgcctatccccttcttctcgaagcctttctcaacccgtgtgagctgactctccatttgtaggcctctggcagcttgtgcaggcatctgttgt

SEQ ID NO: 5294 - DNA, 557 bp, Homo sapiens
  MAP TO AF190641.1; EXPRESSED IN BONE MARROW, SIGNAL = 0.95; EXPRESSED IN PLACENTA, SIGNAL = 1.4; EXPRESSED IN ADULT LIVER, SIGNAL = 1.1; EXPRESSED IN BRAIN, SIGNAL = 1.3; EXPRESSED IN LUNG, SIGNAL = 0.59; EXPRESSED IN FETAL LIVER, SIGNAL = 0.97; SWISSPROT HIT: P13886, EVALUE 6.90e+00; EST_HUMAN HIT: F10209.1, EVALUE 3.10e+00
ttcacattggatttacgacgacacatctttcaattattagttattaagacatggtggtaaagaatagcagctaataaatatacaagatatgatctatttttaaaatcattattttgcaatccaaaatatttggcacattcaagaatcatctataaatgctacccatttggcagaagctttttagggagtagaataacatatggccacaaaacattactatagagataatttatcaattacaaaggggtaaatacactttttctatggagagacccagtggtcaccactttagtgaacgaaattagcattatcaataataagacaacatgacattatgggccttcctatgtgacacaataagaaatactgttatgaaagatcctggcacaaatgttaaatctgaaattgatcgcaaggtatacataagaaaaatcctaaacaatgactggcttaaccttcaagataacagaatcataagcagccacaaaaaaggtaaaacaatattttagattaaaagcaactaaagtagcataaccactaaaggcaatgcatgagca

SEQ ID NO: 5295 - DNA, 528 bp, Homo sapiens
  MAP TO AC004175.1; EXPRESSED IN BRAIN, SIGNAL = 0.58; EXPRESSED IN ADULT LIVER, SIGNAL = 0.5; EXPRESSED IN LUNG, SIGNAL = 0.53; SWISSPROT HIT: P17755, EVALUE 1.30e+00; EST_HUMAN HIT: BE833020.1, EVALUE 1.90e-01; NT HIT: M22125.1, EVALUE 7.80e+00
ccaagtgttctctctgcacgtgaacaggcggaataattgtgataaaatggaagagcccagcaggtggggtctgtgagatcattcagctgactcctgcagacaatgtgctctctctctctctgcccccacactaagggtgcactccttgttcatctccaggacggtgtcagcaaatgctgcctggggcatgctggtgatcactgtgtcactttgggtcaggaaacacattctggagaggacaaagcaagtgaacaggccttgtacgctgagtggaaggccttttatctccaaaaaatcaaaccagagaaattaaaaaatatcttgaaacaaaagacaagggatacacaaatataaaaacttgagggttccagggaccagagggcttctgcaccttagcctgtttcctgctttgctaaatgagcagatgtgtgatgtgctctctttggtcccatcgcttcctattgtgattcctccaccctgggcacttgctctcatcctgttctgccggctgctgcctcactcaacaaa

SEQ ID NO: 5296 - DNA, 591 bp, Homo sapiens
  MAP TO AC010267.5; EXPRESSED IN FETAL LIVER, SIGNAL = 1.2; EXPRESSED IN BONE MARROW, SIGNAL = 1.4; EXPRESSED IN PLACENTA, SIGNAL = 1.3; EXPRESSED IN ADULT LIVER, SIGNAL = 1.4; SWISSPROT HIT: O33261, EVALUE 9.80e+00; EST_HUMAN HIT: BF911568.1, EVALUE 5.00e-39; NT HIT: AL163303.2, EVALUE 2.00e-31
ttgaaggagggaggtgattggatcatggggccatttcctctgtgctgttctcatgacagtgagtgagttctcaggagatctgatggtttcataaaggcctctttcctcttcactttctcttctctctcctgctggcttgtgaagaaggtgcctgtttcttcttccgccatgatcgtaagtttcctgaggcctccccagacatgtggaactgtgagtcaattaaacttctttcctttataaattacccagtattgggcagttctttaaagcagtgtgaaagtggacaaatacagagaagtagacagggaccagtaattactgcagaagatggaacatcgaatgcatgttttcagaataaaagtgtgtgctgagacacatcgagtgcctgagcaccacctgtgcttggccagaccaatgggagaaaatgatcccggaagtcaaaatgagcaggttcagccatctggaagggcgtgaacgtggtatgggggtgatgaggggaggcaatgaagcaactgaaaaaagaacaattaaaaaatatgatggacaaataaatttatgtatattctactagctctttgcttcccatgtaca

SEQ ID NO: 5297 - DNA, 557 bp, Homo sapiens
  MAP TO AC002497.1; EXPRESSED IN HEART, SIGNAL =   1; EXPRESSED IN LUNG, SIGNAL = 0.53; EXPRESSED IN BRAIN, SIGNAL = 0.69; EXPRESSED IN HELA, SIGNAL = 0.48; EXPRESSED IN ADULT LIVER, SIGNAL = 0.66; SWISSPROT HIT: P11369, EVALUE 9.00e-15; EST_HUMAN HIT: AW853786.1, EVALUE 8.00e-07; NT HIT: AF111168.2, EVALUE 1.00e-11
agtgggaggattgtgtcagcccaggagtttcagaccagcctaggcaatatagcaagatctcatctctgtttaagaaaaaagaaaaagaagaaaaagaagaggaggaggaggaggaggaagaagaggaagaagaggacgaaaaagaggaagaggaagaagaagaaggaggagggaggaggaggagaaataatagaagacataagtgttgcaaagggtgtggagaaaatgaatccttgtacactgttggtgggaatgtactagaacagctattactgaaaacagtacagaggttcctttaaaaatttaaaacagagctaccatatgaaccagcaatcccactttgggtatatatctaaaaaataaaataaatattttggggagatatctattcctccttttccattgtagcattatttacaatagggaagctatgaaaacaacctaagtgtccatggacagaagaataagtaaagaaattgaggtacatatatacaatggaatattattcaaacattaaaaaaagaaaactcgtcacttgcaacaacgcggatgaactc

SEQ ID NO: 5298 - DNA, 558 bp, Homo sapiens
  MAP TO AC008413.5; EXPRESSED IN BRAIN, SIGNAL = 2.6; EXPRESSED IN HELA, SIGNAL = 3.6; EXPRESSED IN BONE MARROW, SIGNAL = 2.2; EXPRESSED IN PLACENTA, SIGNAL = 3.2; EXPRESSED IN ADULT LIVER, SIGNAL = 3.2; EXPRESSED IN HEART, SIGNAL = 2.4; EST_HUMAN HIT: BG479756.1, EVALUE 2.00e-01; NT HIT: Z54337.1, EVALUE 3.40e-02
gtgggggtgatttcattttgctattgtttccctgtatttggcaaattcttactttacacacagaatgcatatgaaatgagaaaaaaattacaccaaatttttagggtgtctaaaatgactccaacgttttgtccatttaataaaacaattggtcaaaccactctagactttcagtgctgtgaaaaccaaagtatagtttgagtacacctgtcagtttccagcccttcttggttgtggtgagcagagctcaaggaaaacagtagaataagttgatgatgtctaatttactcattatcattgaccccttgtaatttaatttatatgctatgctaagtgtttacctgggatctctgttgggcattgcggacgctggtgttggaagttggggtgctggcttcatgaagcttctggtcctgtaggcggctctgacccataaagaggctgctacaatcacctgtactaagtgctgggacagaggaagtagaaagagtagaatgagcttcaaatgtacagaattattgtgtgcccaagaaatataggatacagaggaggggctct

SEQ ID NO: 5299 - DNA, 512 bp, Homo sapiens
  MAP TO AC005254.1; EXPRESSED IN PLACENTA, SIGNAL = 0.61; EXPRESSED IN ADULT LIVER, SIGNAL = 0.65; EXPRESSED IN BRAIN, SIGNAL = 1.3; EXPRESSED IN LUNG, SIGNAL = 0.58; EXPRESSED IN FETAL LIVER, SIGNAL = 0.74; SWISSPROT HIT: P55066, EVALUE 5.00e-29; EST_HUMAN HIT: T26375.1, EVALUE 1.00e-106; NT HIT: gi4758083, EVALUE 9.00e-86
tcacgctcctatcccatctcccagacaccgagggctgtgaccgcggctggcataagttccagggccactgttaccgctattttgcccaccggagggcatgggaagatgccgagaaggactgccgccgccgctccggccacctgaccagcgtccactcaccggaggaacacagcttcattaatagtaggggctctggggagggggccacctgcctggagggtgggcaggggtggcacttgtagcccttttgccagggcatcgcatccctcccctggttttcaagacgtcatctttccaaagctgtgttcattaacgcaagccctgactgcttcttaatgcatgaaatctgtcaattcacttgttaattcatacattcacttcattcattcattcaccaaatatttactgagcacctgctatatgccaggcaccattccaggaatattgacacagcacagcagcaatcaaggctgactttgctttgtccccagggagtgaccatttcttgggga

SEQ ID NO: 5300 - DNA, 572 bp, Homo sapiens
  MAP TO AC011512.5; EXPRESSED IN FETAL LIVER, SIGNAL = 0.37; EXPRESSED IN LUNG, SIGNAL = 0.87; EXPRESSED IN BONE MARROW, SIGNAL = 0.92; EXPRESSED IN ADULT LIVER, SIGNAL = 0.65; EXPRESSED IN PLACENTA, SIGNAL = 1.1; SWISSPROT HIT: P04280, EVALUE 1.40e-02; NT HIT: U67252.1, EVALUE 1.40e-01
ggaatcctggaaactagggctcctgctttcccctgcagccgcaaagcattgggggtgccagccgtgaggtggcctcctggggtgctctcgccaaggtatttggtggaagcccctgtcgcaccctgctctgcggatttgatcttcctgggcagaggacactggcgtcgagggggcagcgggcatccccgcaccctggccttttcctggctggcggttgtgttgtggccgactaccacctaaggcacacaggaaagaagggtgtcagggacttgccatgggggcgccgatcgttcctcgcccttccattggacaggtgcgtgttttacagggatccatcagtgtggagttcaccttccttgtgcgagtcgggggctcggtgccaggtgcctcgtgagtcctggaaaaaggcggaggaccttctcccgctgaaaaaatttgtagcagttccggggcttcccttcctcctcccacaccggccctcatcctactgtggtttcctctgcccccagcaccagcctctgcctgggacccctctccccatcccactcatgtctgttaggaaactgcgaccc

SEQ ID NO: 5301 - DNA, 514 bp, Homo sapiens
  MAP TO AC008282.2; EXPRESSED IN BRAIN, SIGNAL = 3.8; EXPRESSED IN LUNG, SIGNAL = 1.9; EXPRESSED IN BONE MARROW, SIGNAL = 2.9; EXPRESSED IN PLACENTA, SIGNAL = 4.8; EXPRESSED IN ADULT LIVER, SIGNAL = 3.4; SWISSPROT HIT: P19823, EVALUE 2.80e+00; EST_HUMAN HIT: BG533557.1, EVALUE 7.20e-01
cctatttccttcctgggagcttgggtcatctcctcaaggcttccagggaatcaggtcacccttcttttgacttcaggagcagatggtgtcctgctggggctccaaaaagcagcaccacacacttccaagctggattgtgttccggatgctgcattttacggcacagtattcacagggctctgcacttctagtcatagtaaatcttccttcgtcttcctgcagaagtaattgccatacacacataaaactgactgttgaaaagtttcagcccatttccttgttccctttccactgtgtaagcattcctacagagcctggctccattgcgcagatggtctatgagaagaaatcaataacaactcatcaccgggtgttattcggtgccaaggctcacagaaggcttatgcttcacaatggaaaggtaagtatttcgaacaaggaagaacccagagtcttaaaagcttcttttatttcatactctctttcatagtggtgggtttcattcggaatctca

SEQ ID NO: 5302 - DNA, 597 bp, Homo sapiens
  MAP TO AF241733.1; EXPRESSED IN PLACENTA, SIGNAL = 1.4; EXPRESSED IN ADULT LIVER, SIGNAL = 1.3; EXPRESSED IN BRAIN, SIGNAL = 1.4; SWISSPROT HIT: O06220, EVALUE 2.00e+00; NT HIT: Y11505.1, EVALUE 1.40e-01
ctccaggaagggtgagtcagcctccccaagggcctgcctcctttaggccccttatgactccagcttctgaggggaattagaacgaaattcaaatggtattgaggtatccagggtgaacaaggctgcttcttgtccctccttccgctggaggggcttcagagcctgactggaacacctgcgtgtccgtgaggtccttcaggaggcttctggaatgggctcacttgtactgtgcacatcagcatccctcagcatgaacctcaagcttgttgcagccaccgtattgggaattaacctcagcacactgggaagagggggaagtgtttcttcatcattggcttttctggctgaggatgctgttttagctttggctgcatcttttatgttgccacctgaggcatttagctcatctctgggctctcctaaactgacagaatgcagacaggttactcagaagcatcagcacagaaaccacagaatctcactggctgtgactacaagcctcttgccttctgacccgcggttggccacacttcctgcctgccaggtcaggccgggcagccagctgaaggctgacctgcttgcagaactctggcctct

SEQ ID NO: 5303 - DNA, 543 bp, Homo sapiens
  MAP TO AC023818.3; EXPRESSED IN PLACENTA, SIGNAL = 0.78; EXPRESSED IN ADULT LIVER, SIGNAL =   1; EXPRESSED IN BONE MARROW, SIGNAL = 0.92; SWISSPROT HIT: P93647, EVALUE 2.00e-09; EST_HUMAN HIT: AA683395.1, EVALUE 2.00e-81; NT HIT: gi14777715, EVALUE 1.00e-81
gcagaaataccaaccttgccagtacatcatgtgtgttttcacttatatacagccttctgttggcactactaaagtttttaaaatgttttttgttctcccctaggtgttggatcctgaacaaaaccataacttcacagatcattatctaaatgtggcctttgacctttctcaagttctttttatagctactgccaacaccactgctaccattccagctgccttgttggacagaatggagatcattcaggttccaggtacctgactcttaaatcattatgatacatcttgcctttctgaccataactttaaaattagttatgctatggagttttgactaaaagaagttcatttgccaacatacaatcttcagaagttctgaggaatgtatataaatcagtttctatgtagcttcaaagtctggaagagcaaaacagcaaacgttgacaacaacaatttcagatttaattagcatgaaagaatgataattttatgacaaataagacattcttctttagtataatttctaaaatggcaggctgtgtg

SEQ ID NO: 5304 - DNA, 582 bp, Homo sapiens
  MAP TO AL121784.2; EXPRESSED IN ADULT LIVER, SIGNAL =   1; EXPRESSED IN FETAL LIVER, SIGNAL = 0.98; EXPRESSED IN BRAIN, SIGNAL = 0.86; EXPRESSED IN LUNG, SIGNAL = 1.6; EXPRESSED IN PLACENTA, SIGNAL = 0.95; SWISSPROT HIT: Q07113, EVALUE 9.60e+00; EST_HUMAN HIT: N21592.1, EVALUE 1.00e-15; NT HIT: AF240786.1, EVALUE 6.00e-13
ggttctgggaatttgcagtccccagcactcctgggacggtgtcttgcttttttgtttttgctctcactgccccctctgcctagaatcctggattcctactccatccctcacccatgcccactcatctttcaatcctgacccaagtatcaccatccctgtggagtttcccagatccttcccagtagctttgagcacttgcccttttccacctccaccgggtcctaaacaggttcctattggaacactcaagacactattgcacacacagtggcccttcctatctatggcttctacatctgcagactctacatctgcagacaaccttggatggaaaagattcaggaagaaaaaaacaataaaaaatacaaataaaaaacccatacagtgtaacaactgcttacctagcatttacactgtattaggtattataagtagcctagagattataaagtacatgagaggatgtgcacaggttacatgcaaatattatatttcatacatagagtaaaatgagcatctacagatgctacgaacttgagtatccatggatattagtatccttggggatcctggaattaatcc

SEQ ID NO: 5305 - DNA, 502 bp, Homo sapiens
  MAP TO AC005546.1; EXPRESSED IN ADULT LIVER, SIGNAL =   1; EXPRESSED IN BRAIN, SIGNAL = 1.1; EXPRESSED IN PLACENTA, SIGNAL = 0.71; NT HIT: gi8923218, EVALUE 1.00e-78; EST_HUMAN HIT: BI914225.1, EVALUE 0.00e+00; SWISSPROT HIT: Q9NXH9, EVALUE 2.00e-21
ccccaactcctcccttagactggctctgtcccttaagaagccccagatcccccagggcaaggtcctgtctcctctctcaatccaccaccgctctctgcccccgggctgacctggctgaggccttgaccttggcctggccggtgaagacacggacaaaaacacgcacgtagaagtcagcgctgatgctgagcagcggcaccacgaagcgctggtagcagttggcgcggaggtccaggctgtgcaggacgattctcagggcctgggggtggggggtgggtgtcagcctcccctccactatccacccaccccaccaggagccctatgtggtactcacaagtacaggctcagggccagctccctgggatccaagcccacccctgaaagtcctggctgtgggaccctcaacaagtgagtatcccctctctgtgcctcagtttcttcatctgcaaaatcacaacagtccctgtctgtggcactgctgggggcactaaacgagtgagga

SEQ ID NO: 5306 - DNA, 587 bp, Homo sapiens
  MAP TO AC010451.5; EXPRESSED IN ADULT LIVER, SIGNAL = 0.36; NT HIT: AF387519.1, EVALUE 9.00e-06; EST_HUMAN HIT: AI806446.1, EVALUE 2.00e-81; SWISSPROT HIT: P11369, EVALUE 1.00e-04
gtcagagttggtctttgcccaaggaggtcctcagcttgtagtgacagggccttctgggagggcttcatcttctcccttgagtcccacaaaacccttgaaggtgttcctggggcagtccgtgttcatccgaggacacaaaagcttcctggagcacttccccgccccagcgctgctgatggaggccacggggttccatgagcatgcaagcctctcctggtcatcaaccctaatgtcccacctggaggaagagctgagccacatggagagaatgtccacagtgcacgctcctctttttcctcgctcttgtttccagtagctgaaggacaaaattttgtcccttcctgcaaggacaaaatcaaaacaacaacaaaacactattgtttctcagaaatgactttctacttagcataagcccctccaggttcattcacattattgcaaatgacagaatgttctttgttttcaaggcagaatagcataacattgtgtatatgtaccatattttctttactcattttctcatgatgcacacttaggttgatccatatcttgcctattgaccaagcacttggctagtgctgcaatga

SEQ ID NO: 5307 - DNA, 594 bp, Homo sapiens
  MAP TO AC009087.4; EXPRESSED IN ADULT LIVER, SIGNAL = 1.4; EXPRESSED IN LUNG, SIGNAL = 2.5; EXPRESSED IN FETAL LIVER, SIGNAL = 0.99; EXPRESSED IN BONE MARROW, SIGNAL = 1.2; EXPRESSED IN PLACENTA, SIGNAL = 0.93; SWISSPROT HIT: Q92620, EVALUE 1.00e-25; NT HIT: gi14779295, EVALUE 3.00e-83; EST_HUMAN HIT: AW852053.1, EVALUE 4.00e-83
aggtgctgatcccaaatcacctgcaggagtttgttccaagcagcagcacctttcatctaaatcagaacctctagagggacacacaaatggtaagtgtccctagcccacatcagagacacaaagaacacagaccacagaggcaggtcccaatgcacctgttcccatcaacagtacttcccctcaaggaagtactgcaaaagagagaagtacgagccggggctttccttaagctactaaaaggctcatcacccactcctcttccacctccagaggatctgggcttctcggcaatcaggggacaagctgtgctgccctcacttggggataacctgctgcttccccacgtgctctacctccagctctgaatctgctccaacttctgcaggcagcctcacctcattgatctgtctccgctgagctgaaatgcgcttctgcttctgtttatgcaggtgctgctcccgcctcctcacgtagtcctcggaggagtaggccagcgggttgtggaactcgtcatagccctcgtccatcatgtaccaatcccgatcggcttgctgcagggcaggaggcaaagcaagggagtgagggacagatcaa

SEQ ID NO: 5308 - DNA, 539 bp, Homo sapiens
  MAP TO AC016046.1; EXPRESSED IN BRAIN, SIGNAL = 0.94; EXPRESSED IN HELA, SIGNAL = 0.62; EXPRESSED IN BONE MARROW, SIGNAL =   2; EXPRESSED IN PLACENTA, SIGNAL = 0.83; EXPRESSED IN ADULT LIVER, SIGNAL = 0.93; EXPRESSED IN FETAL LIVER, SIGNAL = 1.1; EST_HUMAN HIT: R98294.1, EVALUE 1.20e-02; SWISSPROT HIT: P03203, EVALUE 1.00e+00; NT HIT: U67669.1, EVALUE 8.00e-03
tgaaagcatgctctgtggaccagtagcagcatctgggagctggctggaagtgcagctttccagaccctgccctcgtcctacaaaatcagaatttgcattttaacaaatccccagatgacttaccagcatgtggtggtgcgttgccctatgcctggtacctcccaagttatctcctgtcctgatatctgccccagccactctgcagctgcttacatcacagttcagcttgaaggtccaccagacatattaaacatatccaaaatcagattcttagtttctgctccctaaccctgccccaccccctgccttccccattccagcaattacccttatccagttgttcagaacagcaatcttgtcattatccctgaagacttccctcatacgctatccaatcccccagaaactgcttccatccacttattaccacttgccctgctgcctgtccaaggcaacatggcgtctgacataaagtgatacaatttcctccatcttgctacttccagtcttaccaccacagcagccatcatgatcctttt

SEQ ID NO: 5309 - DNA, 542 bp, Homo sapiens
  MAP TO AC010280.5; EXPRESSED IN BRAIN, SIGNAL = 0.96; EXPRESSED IN FETAL LIVER, SIGNAL = 1.3; EXPRESSED IN PLACENTA, SIGNAL = 1.3; EXPRESSED IN ADULT LIVER, SIGNAL = 1.2; EST_HUMAN HIT: AW998324.1, EVALUE 1.90e-01; SWISSPROT HIT: P98140, EVALUE 5.10e-01; NT HIT: X05996.1, EVALUE 2.00e+00
agcctctccctctctccttgcagaagcccagagaagccaggctggcccaggccacatgcatgagggaacaatcctgatgcctctttagccttgttctgcatgattaattgaggttattgcattgagactcttgtctgattgtgaaaaaaattatcccaaggtggcctcagattctttggttagtcattgccatgccttagggctcttgtgagccctggacacacagcgacaacaaccagccaccggctgccttctgctctgtggctcagatactttgttcggaccatgctgtgctcccagcttggcttctgttccatggaaactgtgaagtgcttattgtcctggggctggttgggactcaggaaagctgtacgggatgagagctgtgcaggacgagagctgtgctggagggtaggctgcttgcaggatttagggaggaggagtggagctgctgtcagaccccaagttctggtggggcttcccagacctttccttactccagggatccaagaaagggcttaagggaagagttggttgtggaa

SEQ ID NO: 5310 - DNA, 527 bp, Homo sapiens
  MAP TO AC008747.4; EXPRESSED IN ADULT LIVER, SIGNAL = 1.2; EXPRESSED IN HEART, SIGNAL = 0.99; EXPRESSED IN HELA, SIGNAL = 0.94; EXPRESSED IN BONE MARROW, SIGNAL = 0.93; SWISSPROT HIT: Q09630, EVALUE 3.70e+00; EST_HUMAN HIT: AW071736.1, EVALUE 8.00e-44; NT HIT: AJ271736.1, EVALUE 5.00e-32
aatggaaggaggggtcaaacctgcctcattatacccatctcccttttggaattcaggaaaaaccaaccaggatttaacatcaacacagaccttaagtctgataagaaacatttacaatctattatttctgaagcctgctacctggacacttcatctgcatgataaaaccttggtctccaccatcccttatcacaacccagacattcttttctattgacaatcactctttgaacccactgccaatcagaaaaattttaaacccacctaagaactggaagcccccccaaccccacttcaagtcattctgctcttccagatcaaagcaatgtaaatcttacatgcattgattgatgtattatatctccctaaaatgtataaaagcaagctgtactctgaccaccttgtgcacgtgtcctcaggacctcctgaagctgtgtcatagacacatccctagccttggcaaaataaactttctaaattgattgagacctgtctcagatacttttgggttcacaggcttatggctc

SEQ ID NO: 5311 - DNA, 522 bp, Homo sapiens
  MAP TO AC011522.6; EXPRESSED IN PLACENTA, SIGNAL = 0.55; EXPRESSED IN ADULT LIVER, SIGNAL = 0.85; SWISSPROT HIT: Q05319, EVALUE 5.00e-12; EST_HUMAN HIT: AI698086.1, EVALUE 8.00e-07; NT HIT: AB047758.1, EVALUE 8.00e-03
taacatgggaccctccactcccagggatccctccgtctctcccggtacctggtagctgggtgtgtgtggtggcctccggggcgtctggaaatggcgtctgtcccctagcagtggtgctcacggcagataaggttgagttggcaggttggcccgtcaccctgctggcagccccaggggtgggtctgctgggtgtggcccccgggactgtgaggccagctgtcgtcctggggctggtggtggccagcatccttgtggtcgaggggggagacatgggaaggggctgggaggacatgatctccaggatccagccctttagcctggtgatgcgcgtgtacacgcccggcttcttaacctgagcgcagccaataccccagctcacgatccctgccagataaaacacgccaggggcctcctcgcaggccagggggcccccagagtcaccctagaaaggaaggaaagagcactggttggtcctccagggaccctctcttcccagcactgccataccctcctgcgttccta

SEQ ID NO: 5312 - DNA, 554 bp, Homo sapiens
  MAP TO AC010328.4; EXPRESSED IN ADULT LIVER, SIGNAL = 1.1; EXPRESSED IN BRAIN, SIGNAL = 0.84; NT HIT: AE007611.1, EVALUE 5.30e-01; SWISSPROT HIT: P31796, EVALUE 2.00e-13; EST_HUMAN HIT: BF988781.1, EVALUE 0.00e+00
acttcacagcctcccagatggcccttgctgaagcacctccttttccaaagtcatggagccacgtagcctcatcatagatcttttttatatcctcctctatcgccccactgttattgacataaacgcaacaggatttattgatcactgcacagactccaccctgctctgctaagaggtaatctaaggccaatctgttgtccatgactacatttgctagagaatctatggaggccttgagtttagagatgctatctctggtactcttagctatgttgtctatttgtctggagagatttctgagggtgacatcatgataagtgaaccctccccatggggcgatcattcctatggccgcacccatccctgccagtattagacccagagctcttttctgtctgggttgggtggtgttataaatggtcacacctatcccccgtggtcccaaaagtcccacagcacattctcccgtatgttggatgttattaatgcaagtgtagaggtttgccacagggggggttgaataggttatcttaggacttccatcaaagggcagt

SEQ ID NO: 5313 - DNA, 565 bp, Homo sapiens
  MAP TO AL049861.18; EXPRESSED IN ADULT LIVER, SIGNAL = 0.88; EXPRESSED IN LUNG, SIGNAL = 1.4; EXPRESSED IN FETAL LIVER, SIGNAL = 0.86; EXPRESSED IN BRAIN, SIGNAL = 0.94; EXPRESSED IN BONE MARROW, SIGNAL = 1.3; EXPRESSED IN PLACENTA, SIGNAL = 0.82; SWISSPROT HIT: P20355, EVALUE 5.50e-01
gttggggagaaaggtcaatgaaggaaatgaggtgaaccaagagggccaatcaattgcaggtcacagtggatcaattacagcccatctatgacttccaaccagaaactcagagtcagcactatctcccttttttccctcactctcttatgagtcccaagacccatcaattctaatcctgaaatcagttcttatctacctattcatactgtcccagctttaatttaggcttttgtcatatcttggctggaaattttcaatgatttttcaactataatcttcatgcctttagactcactcccttaccctaactattgcaagaatttcttttaaaccacaaacctggtcacattcatggataaaaatcctttgatggctcctcagttacctactagataaagttctttgcatggtattcaaggcccttcattatcagacctcaacatatttctccaacctcaccttctaccagaccacctccaatgcacactatattttggtcatcacaagtgacttcctcaacttctatatcttttatctttgcttaagttgttccctctgcctggta

SEQ ID NO: 5314 - DNA, 546 bp, Homo sapiens
  MAP TO AC005265.1; EXPRESSED IN PLACENTA, SIGNAL = 0.42; EXPRESSED IN ADULT LIVER, SIGNAL = 0.61; EXPRESSED IN BRAIN, SIGNAL = 0.5; NT HIT: AJ278830.1, EVALUE 5.20e-01
cctctataccccagggaagcctgcaaaggagccccctgatctctgagacacatgttctggtgtgattgtgttgaatgaagtcccagatgcagtgccactggcacattggcacatggagctcaaaggaaaggaacaggggaatgagtcggacctgtgtgtcttgtgccaggcctgccactctgcacaccggccccagccttacaagtctccctcactgtgcagtcctactctgaacgtttccacgttttttgtttttttttgcctcctagtttctgcttctccaagtccctgccttcacacatcatgacctcctgtggcccatccaccttgtggcaactttgctgcttttagcttcaaattcaaatgtggattgccacgctgagagaaagcaatgcctaggaaaatatcctggaaaaaaaaaaaaacaagaaactacactgctctttcctttactgccccttttcctttctctgccttttgttcaaagaggtatccaggaagtgtgaagtctcccaggatccaaggaggctgaggaaaccagcatag

SEQ ID NO: 5315 - DNA, 600 bp, Homo sapiens
  MAP TO AC008427.5; EXPRESSED IN FETAL LIVER, SIGNAL = 2.8; EXPRESSED IN BONE MARROW, SIGNAL = 4.3; EXPRESSED IN PLACENTA, SIGNAL = 9.3; EXPRESSED IN ADULT LIVER, SIGNAL = 2.9; EXPRESSED IN BRAIN, SIGNAL = 3.3; SWISSPROT HIT: P19137, EVALUE 1.20e+00; NT HIT: AB050050.1, EVALUE 3.00e-12; EST_HUMAN HIT: AW902924.1, EVALUE 4.00e-12
ttggggctttggtatcagacagcctgggttcaagtctcagctctttcatttattggtggtgtgacctcaagcaggtgacttactccctcacctcagtttcctcatctgctcagtgaggatcatggtggtgcctactttgtggaccatcatgggggctgagctggagtatgtggaatgcagtgcagcaggtagtggtgttcggtgcttcctgtggtataagaagacatatatgtttggtcttcgttcctggttcctgacagagatcctaaaacccttggaatttcctgagtgataggagcatcttttgttctgatgggatgactcttggcaggaccctagacagcttcaggctaggggctggtcaccagaaagaccaagccttcatttgaagcttggaactttcagccccatccccagcctccggggagggaagaggctggagattgagttaattgccagtggataatgatttaatcaatcatgcttctgtgattaaaaacaaaaaaagctccatacaaacctctaaacagcagggtttagagagcttctggtttggtgaatacttcgaggtggtggcacgcattccccctcccataactt

SEQ ID NO: 5316 - DNA, 506 bp, Homo sapiens
  MAP TO AC000067.2; EXPRESSED IN FETAL LIVER, SIGNAL = 1.2; EXPRESSED IN PLACENTA, SIGNAL = 2.1; EXPRESSED IN ADULT LIVER, SIGNAL = 2.4; EXPRESSED IN HEART, SIGNAL = 2.5; EST_HUMAN HIT: AW577202.1, EVALUE 2.00e-50; SWISSPROT HIT: P56746, EVALUE 1.20e+00; NT HIT: AL163280.2, EVALUE 2.00e-34
atctgttcactgcaccctccagtgggaaacgagcaaaacaagaggcaatgcatttgcagtcactacagtaggaagaggtattcgctttccaccagtaagtgacaaatcactcataagggagtgctgggaagggaagagcatgatccctttaaatgataccaagtggggaaaggaagtgctgggtagaggaggtcgtggtccctggctagggctccacccccacggacctaggtgaggacaggcatttttgtttgcctgcccaaatgttgcatttcccaagaccaccctggcctgccatgcccctgtcctgtgcctgtaaaatcccctgacattctaacaggcagacacacaacaggctggatgtggagagaagcggatcggcggaagaagacacaagcggctggacgtcaaggggagcacgctggcggaagagcacagcgacagaagagcacactgacagacgtcggcaggccacccaccctggcagaatgacacagggtttggct

SEQ ID NO: 5317 - DNA, 595 bp, Homo sapiens
  MAP TO AF022141.1; EXPRESSED IN PLACENTA, SIGNAL = 1.2; EXPRESSED IN ADULT LIVER, SIGNAL = 1.5; EXPRESSED IN BRAIN, SIGNAL = 2.4; EXPRESSED IN LUNG, SIGNAL = 2.3; EST_HUMAN HIT: AV705610.1, EVALUE 4.00e-06; SWISSPROT HIT: P25632, EVALUE 1.10e+00; NT HIT: AJ229041.1, EVALUE 0.00e+00
caccatatgtgctggtttcctattgctgtataacaaattaccacaaacttagtggcttaaaacaacaccgatttcttttcttacatttctgtgagtcagatccgccatagatctcaccaggctaacaccaagctgttgccatgactgtgttccttctagaggctctggggggatatccatgtccttgacattccccccttctggagccacccacattccttgactcatggccccttcctccatctgcaaagccagtaatgtcacttctctgatccgtcctctgtcttctgtcctcccatcaccttctgattgcaggtgaggaaggtactctgcttttaaggactcttttgatgacactgggcccacctggataacccagagtatgctccccatctcaagactcttagctgaatcacatctgcactcctttatctcatgtaaagtaacatatccataggttttaaggatcagggcgtggacatcattgggggtcattccgcctaccttgtcccgagaaggtgtaacaaggggagtggtctagagaggtggggggttcaggcttcctaggatgaaaggacattgagggtggtggagt

SEQ ID NO: 5318 - DNA, 578 bp, Homo sapiens
  MAP TO AL049779.5; EXPRESSED IN ADULT LIVER, SIGNAL = 0.9; EXPRESSED IN HELA, SIGNAL = 0.6; EXPRESSED IN BRAIN, SIGNAL = 0.65; EXPRESSED IN PLACENTA, SIGNAL = 1.1; EST_HUMAN HIT: BI752906.1, EVALUE 2.00e-60; SWISSPROT HIT: Q03326, EVALUE 4.90e-01; NT HIT: AE004916.1, EVALUE 2.00e-03
tccctagttatgcgatcatggccagagtgggagttggaagccagcaggtgggtcaagggcagaggtacaaagtaatataattaagtatgattgccttacttgtagtctagctctggctcttgctttgaggaatccacaaactcagaccaaactgaccattagagttactcatggcatcaaaattggttcacacccagaagatagtgagctaacactgaagtcctcttggctcccacatgctgagcctgggctgtcattccactttcaatcttccctgctggctctcctcacaggccacttcctcctcacctacctgctcctggagcggctaaaggtgtctgcccctgcacgggtggttaatgtgtcctcggtggctcaccacattggcaagattcccttccacgacctccagagcgagaagcgctacagcaggggttttgcctattgccacagcaagctggccaatgtgctttttactcgtgagctggccaagaggctccaaggtaagtctggagaaagaggaatagcaaaaatggtcctcagaccaaattagaggtccacagcaacttgggaagtca

SEQ ID NO: 5319 - DNA, 592 bp, Homo sapiens
  MAP TO AC016651.5; EXPRESSED IN HELA, SIGNAL = 0.42; EXPRESSED IN BRAIN, SIGNAL = 0.83; EXPRESSED IN PLACENTA, SIGNAL = 0.88; EXPRESSED IN ADULT LIVER, SIGNAL = 0.83; EST_HUMAN HIT: AW085938.1, EVALUE 1.00e-12; SWISSPROT HIT: P43298, EVALUE 2.60e+00; NT HIT: AL163248.2, EVALUE 1.00e-17
ggttaagaaccattgctgggatactattgtcatttggacataaaaagacactctgggtctttgaattgccagagtccttgtgctggttctttctcatctgtgtgggatgatgttccttcaatctttgaagctgctgtcctgtggatgagtttctttccttttatcttctttgaattctttggcagtttgattgtggtataaggtgggttcagttgactgggtttgtttctggaagattttaggtggctgaggctcagctcagtgctccctgtctgcatgttcttactctgggaggctggtactgggtctccagctttgttctctggcccctcaaagttaggaacctgctgttccagagggaccaaagtgtgcccagtccactggccaccacactttgaagggtgatgttggccaaagcacttcattggggtggtggcagcatgatccatgctcacttacacatgccagtagccatggcagtggtggggtgcatgcgtgctagctggcagaagcagggctgcagcattcctgcatgtgcttccactggcagtggggcagaagtggggttgcctgcatgtgttcgtactgtcgg

SEQ ID NO: 5320 - DNA, 564 bp, Homo sapiens
  MAP TO AC008449.4; EXPRESSED IN HELA, SIGNAL = 1.7; EXPRESSED IN BRAIN, SIGNAL =   1; EXPRESSED IN BONE MARROW, SIGNAL = 0.68; EXPRESSED IN PLACENTA, SIGNAL = 1.7; EXPRESSED IN HEART, SIGNAL =   2; EXPRESSED IN ADULT LIVER, SIGNAL = 0.9; EXPRESSED IN FETAL LIVER, SIGNAL = 2.2; SWISSPROT HIT: P75219, EVALUE 9.20e+00; NT HIT: X04986.1, EVALUE 5.40e-01
atttttaaaacaagcgggggattttccatatatataaatatattcatgcccaggttccacccaagacaaattctaagtctctggtgatgagactcaagtattgttattctacaaaagctctctacataaatttcaatacggagtggtaccgactcactacgtgccacgctctgtcctggattctgaggattcagagacagaaaatctagcccctgcttttaagagaccacagtgtattagcagcataggactagggaagaaccacatagtaaaggaaggatcctgacagtgctattacagggagctgagaaacctcagaaaaaaagtcgtcacccaatctaggaaaatgtgagacggtgtcctgagggaggtgctgcagagccagctgggagaaacatgcaacatagttctttgcaatgtagtaaataaggctttataataacactgcctctccatattaagagtgtagcctaataatacataactaactcttatatattcttgctgccaacccctttccttgaaactgtatcaagtctcactcgcagtgagtcagaccaacca

SEQ ID NO: 5321 - DNA, 559 bp, Homo sapiens
  MAP TO AL050302.2; EXPRESSED IN LUNG, SIGNAL = 6.2; EXPRESSED IN BRAIN, SIGNAL = 2.8; EXPRESSED IN FETAL LIVER, SIGNAL =   3; EXPRESSED IN BONE MARROW, SIGNAL = 5.9; EXPRESSED IN PLACENTA, SIGNAL = 2.1; EXPRESSED IN ADULT LIVER, SIGNAL = 3.8; NT HIT: AL163203.2, EVALUE 0.00e+00; EST_HUMAN HIT: BF819216.1, EVALUE 2.00e-56; SWISSPROT HIT: P39188, EVALUE 1.00e-09
aagaaggaaccaaattctccgtagctcaactcgagccatttcctgatttcttcatcaggaatgagctggttattgggatgtccaggcctctcaagcagcacagaaatgaggtgagtgcgttttcctgctgctccactctgcggagaattagaggatgtttactcattttcagagagagatgccttgtaggcaccttaggatggaggaagccctgattccaatgtcctttttttttttcttcagaaacaggatcttgctctgtcaccctggatggagttcagtggtgcaatcacagctcattgtagcctcaaccccccaagctagcaatcctaccacggcctttcgagtagctgtgactacaggtgagcaccatgacactcagtgaattttgaatttttcggtagaggtggggcccggctgtgttgccagggctggccttgaactgctgcactcaagggattttcctgcctagggctttcaaagtattgatattacaagcatgagccactgtgctcactctgtctggttcttaacttcctgcctccctcgtccatattta

SEQ ID NO: 5322 - DNA, 574 bp, Homo sapiens
  MAP TO AC010990.3; EXPRESSED IN ADULT LIVER, SIGNAL = 0.97; EXPRESSED IN BRAIN, SIGNAL = 1.2; SWISSPROT HIT: O08628, EVALUE 2.20e-01; NT HIT: AF105122.1, EVALUE 2.20e+00; EST_HUMAN HIT: BE873349.1, EVALUE 2.00e-97
attcaactctgggtgcgttccttttaggtcctagtgggctggcggggctaccgcagcacctagtccctcagagcaggccagctaaggctgctggaaactgagagggacgccggctggtacaatacctgctcaggggccctgctcctgcctggccttgcgcaacggccacaagccgatctgatgccttgattctgctcaaatctcgtccctcacagtatttgcaaccctctcttgccctctaaccagcaaatggtcaccgagccggcagtcagctttctgggagtgggagatgatggggaaagaggaaagaatcgtccgctcgccggaccctggcttggagaagttctgcgctccgctgggactctgcgggccctttgcgtctacagacctatccctgccccgactaccccttcactcagacccaggtaacctcttaccccagcctgccccaaaccagccctccgctgtctgtctgccttcacgcaattctgtagatagcgctaagaggggatatcaaatagctgaggagtcccctgacccctggcttcggagccccctagcacgtggaacaagt

SEQ ID NO: 5323 - DNA, 501 bp, Homo sapiens
  MAP TO AL117190.3; EXPRESSED IN ADULT LIVER, SIGNAL = 1.5; EXPRESSED IN LUNG, SIGNAL = 2.4; EXPRESSED IN HELA, SIGNAL = 2.9; EXPRESSED IN BONE MARROW, SIGNAL = 2.3; EXPRESSED IN BRAIN, SIGNAL = 1.1; SWISSPROT HIT: O04928, EVALUE 2.70e+00; NT HIT: AF140708.1, EVALUE 7.40e+00; EST_HUMAN HIT: AA483579.1, EVALUE 2.80e+00
gaggctgtgaggatggaaaggggagtaagggagaggtgggttctctggaatgctggccatgcctcctctcctggcctccagaaactagcccagtcacacctggggcccctggctctctgggctgccaggatgggtgtcaggtgaagatccctgtccatcttggcctccttgtaggtggtgctcagagctccttgggtttgagggacatagctactgggtcttaggagggaagtggcctcaaaatgaatacccccagcagctccctctgctgcctggcctgctgtggcctcctgtggatggaaggcacagcgtcacagtgagggtggacatgcagggaccctgggagggtttgttattatttatcgattattattattatttattttgttgaactcgtgtcaaggttaagatgtgtccatggcagcttgaggcttggaagccttcctggtttccctggtatgaacaagtgtcaaggatggctcacttgatgggacttggtga

SEQ ID NO: 5324 - DNA, 557 bp, Homo sapiens
  MAP TO AF274853.1; EXPRESSED IN PLACENTA, SIGNAL =   2; EXPRESSED IN ADULT LIVER, SIGNAL = 1.7; EXPRESSED IN BRAIN, SIGNAL = 1.8; EXPRESSED IN LUNG, SIGNAL = 1.3; EXPRESSED IN BONE MARROW, SIGNAL = 1.9; SWISSPROT HIT: P14688, EVALUE 6.10e-01
tggggtaagatggtgagagctcccatccccatgccaggctctgttgttcagggactgagtagggttaatcctaagagtgaaagatcttcagttcttgagattgagtagagcttgaccagttaaggactgacatcaactctcagtaagtaggtgaccaagtggagaagaaggaagaagacatagaaaagcaaaaccatgaaagattaggaaatgaaatggcaaaggaaatcctggttttaaaaaaagagttgggaattgatgaacttgaaggtaattccatagaattagctaggaacatagtggaaatattctgggaaatgcctcacagacccaattactcagttactatcttaagttgaccaaaagaggaaataggatttccccaaaaagaagggcaccagaaagatgccccaacccttgctctcttagagactttgaatccaacggatgacgcttatacaataaagagtatgtaagtccaggtgcaaagaaagagcttattgaaaggacttaaaatgataaaagacaaaagaatcgggctgctgaggaaaatgatc

SEQ ID NO: 5325 - DNA, 575 bp, Homo sapiens
  MAP TO AC004172.1; EXPRESSED IN BONE MARROW, SIGNAL =  39; EXPRESSED IN ADULT LIVER, SIGNAL =  23; EXPRESSED IN LUNG, SIGNAL = 1.3e+02; EXPRESSED IN FETAL LIVER, SIGNAL =  27; EST_HUMAN HIT: AL542094.1, EVALUE 0.00e+00; NT HIT: S50740.1, EVALUE 0.00e+00; SWISSPROT HIT: P17693, EVALUE 1.00e-53
aggctcctgctttccctaacagacatgatgcctccatctccctccttactccatctcagcatgaggggctccggcagcccctcatgctgcacatggcacgtgtatctctgctcctctccagaaggcaccaccacagctgcccacttctggaaggttccatcccctgcaggcctggtctccacgagctccacgtcctgggtctggtcctccccatcccgctgccaggtcagtatgatctccgcagggtagaagcccagggcccagcacctcagggtggcctcatagtcaaagacagggtggtgggtcacgtgtgtcttgggggggtctgaaaggaagagtcagaaaattcaagcactttgcatctctcatgggacactccagcagcacctggatgtgaccatcctaagaatgaaccagatacctggggtggggaagggagcacagaacccagacaccagcctggacacgggcacctgggataatctcctattccttggaaagttctagtctctgagcgggggagcagggacctccggttctgacctgagtggaggccaagggactcagaggagctg

SEQ ID NO: 5326 - DNA, 501 bp, Homo sapiens
  MAP TO AC008777.4; EXPRESSED IN ADULT LIVER, SIGNAL = 0.59; EXPRESSED IN LUNG, SIGNAL = 0.5; EST_HUMAN HIT: AW779903.1, EVALUE 1.00e-110; NT HIT: gi13644850, EVALUE 1.00e-115; SWISSPROT HIT: P22274, EVALUE 3.00e-09
gcagcataaccagcacattcctaattacatgcatttttccaggttccaacgtggcagcaaaagtacaagcaaggaagacaaagagttgtcatgctaatgagacatacctcttgtactgagcgagctgctggcttgtcttgatgattggccaatattaaaaagggtaaagtgcataactgtggatgctgaagagctgagtgcagctcatttctagcagcttctaaatcatcctctgaagaggcactgtctaatacaaatattaccccttgagatccttggtagtagcggctccagtatttccggatgttatcagcccctgtcaaaaacaaaacaaattttcgttttaaaaagagctttcagcaactgaaaaatgttcccaacagtaattcctactggaaaccaatgtaccttttaaaaattaagtgctaaactctgtggtatggattaaaacaggaatttagaaaaggcagaaatcacagtggatgggaacaaagaaggcag

SEQ ID NO: 5327 - DNA, 557 bp, Homo sapiens
  MAP TO AC027307.3; EXPRESSED IN HEART, SIGNAL =  15; EXPRESSED IN LUNG, SIGNAL = 5.1; EXPRESSED IN BRAIN, SIGNAL = 4.7; EXPRESSED IN HELA, SIGNAL = 9.7; EXPRESSED IN FETAL LIVER, SIGNAL = 8.6; EXPRESSED IN BONE MARROW, SIGNAL = 3.2; EXPRESSED IN PLACENTA, SIGNAL = 5.5; EXPRESSED IN ADULT LIVER, SIGNAL = 3.5; EST_HUMAN HIT: BG178787.1, EVALUE 9.00e-90; SWISSPROT HIT: P51989, EVALUE 2.00e-13; NT HIT: gi9506536, EVALUE 6.00e-90
tgccagcattcagagttgtcttgtttgccttgccttaaacgttgccttcctggacgcctacaaagtcaggttgtaaccgctggccactgctgtgctcactggcagcccctgatttacgtgaggacctcaagtgtgtgttgggcagaattccccagcgcttcccgtacaccccccacccccagtgcagcatcgctcggtgcgtggctggtggactggaggagtgtgcgtgccggcagcactgccaggcacgtgcctaatgctctggccctgtgtgtttgtgttttcttcccgatttctgagcagagactctgcgcagctacttttcccaatatggagaagtcgtagattgtgttatcatgaaagataaaaccaccaaccagtctcgaggctttgggtttgtcaaatttaaagacccaaactgtgtggggacggtgctggccagcagaccgcacacgctagatggccgaaacgtaagtgcccttccgggagctcacacccgctctctgtctcccctgtccttcctctgcttcattttttcctggactctgaccgatgtt

SEQ ID NO: 5328 - DNA, 587 bp, Homo sapiens
  MAP TO AL035609.7; EXPRESSED IN ADULT LIVER, SIGNAL = 3.1; EXPRESSED IN LUNG, SIGNAL = 2.6; EXPRESSED IN BRAIN, SIGNAL = 2.7; EXPRESSED IN FETAL LIVER, SIGNAL = 3.9; EXPRESSED IN BONE MARROW, SIGNAL = 3.4; EXPRESSED IN PLACENTA, SIGNAL = 3.6; EST_HUMAN HIT: BG112409.1, EVALUE 1.00e-49; SWISSPROT HIT: Q99406, EVALUE 3.00e-03; NT HIT: gi14769605, EVALUE 7.00e-50
agaaggccaaaactgcaaagtttgcatggatctttaggtataagaccactgacccaaactgatggatgcagaaaaatgtctaataagcataaagtgaacaaaactaagatttttctagtgctaaatccaatattccaagattgatttttaaggtggtttttagtaattttccaacaagaaactagttttcccccccattcctattaagacttatgtgagaactacttatataacccaagtaggaagatgactatttgatgtttttaactgttacattaaacaccatggtactctaattattgcttactttgtggcaaaaatttactagaagataggtttatttactgaacctattaactttctctactgtgtgtttccactagaaccccccatgacttactttcctttgagggaagagtatttttttcttcagtattagttttcttcagttttgacctgtcaaacttctccacttccgacaagtctggcttatcactcatcttgactagaagatagcctgaaaagaataaacatttttaagaaaacttacctggcagaactgtcttcggactaaggggtcacaagca

SEQ ID NO: 5329 - DNA, 596 bp, Homo sapiens
  MAP TO AC007031.2; EXPRESSED IN ADULT LIVER, SIGNAL = 0.51; EXPRESSED IN BRAIN, SIGNAL = 0.41; EXPRESSED IN FETAL LIVER, SIGNAL = 0.49; EXPRESSED IN BONE MARROW, SIGNAL = 0.7; SWISSPROT HIT: P09101, EVALUE 1.10e+00; NT HIT: S44029.1, EVALUE 2.20e+00; EST_HUMAN HIT: T06532.1, EVALUE 5.40e-02
tcttcagcaaatggcacaaccttccacctggtcacctgaggcagaaacctgctattgctttgaccatctcctccttcatcttccacatccaaatgaatggtcaccagcatgttgggtccctgctggaagtccatcaccacctgtttattcctactgcattgccacaggcccttatccatcttcccggactcaacactatgatcatttccaagctgagctccagcttctgcatgtatccagccccactcggtcttccactctctcacatcccatggccagaggtatcttctagacagagaacattaatatcatctcatcactccactgcttaacatccttctgtggcttgccttttcccataggcaagttcaaatgcatgcatccaaatggacggctctttaccgtcctgccccatcaggtctcgcagctgcaaccccctctcccaccatatccctgcccccttcactccccttgctccctaacactgaccttcttgcaattcctccaaagtatcaggcctcctcccacctctagacaaatgcccaggctgttctctctagcctgaaatacccccgcccctccactccatccaacta

SEQ ID NO: 5330 - DNA, 584 bp, Homo sapiens
  MAP TO AF037222.1; EXPRESSED IN ADULT LIVER, SIGNAL = 1.4; EXPRESSED IN HEART, SIGNAL = 1.7; EXPRESSED IN PLACENTA, SIGNAL = 1.3; EXPRESSED IN LUNG, SIGNAL = 3.4; EXPRESSED IN BRAIN, SIGNAL = 1.6; EXPRESSED IN HELA, SIGNAL = 2.2; EXPRESSED IN FETAL LIVER, SIGNAL = 2.3; SWISSPROT HIT: Q9H0B6, EVALUE 4.00e-08; NT HIT: Y14586.1, EVALUE 3.00e-49; EST_HUMAN HIT: BF357350.1, EVALUE 0.00e+00
tcctgggaaaaacctacgtggcaactatgaaacccttcggttgtgagaatacgggaaccaactggagtgtctttcctcaagtctgtgggtgaggaaggctgcgctaggaagagaagcggcccagcagccggcgtgcagggagtcgggagagctggaagagatagttacccggggttctttggctcactctctcgtgaacttcctcccttcagcttcctaaccagcttctcactgctgcgtctaatggaagcccggagtttgctaaaggaaccactgcgttttaaagatccagtgccatcctgaaaaaaacgtgaacaaacgtgaagctgcaggtggttctccctccttcccacaagagccacaccgggtgcaaataagagctccaccaaggccgccctgcttgccagcagctcactgctgacagagtcttgcagaaaccaccaattaccatgtacgtgaatatactttaactagaaattgttctttttaagtttcattaaagataatccaatgatcatgaaaacctttggacataaggaagctcattcaaacaagtgatcgcatcccaaaagcaatgtgaatcc

SEQ ID NO: 5331 - DNA, 576 bp, Homo sapiens
  MAP TO AC010203.13; EXPRESSED IN BONE MARROW, SIGNAL = 4.8; EXPRESSED IN PLACENTA, SIGNAL = 7.3; EXPRESSED IN ADULT LIVER, SIGNAL = 5.9; EXPRESSED IN BRAIN, SIGNAL = 6.1; EXPRESSED IN FETAL LIVER, SIGNAL = 8.4; SWISSPROT HIT: Q08379, EVALUE 2.00e-39; NT HIT: gi13487903, EVALUE 0.00e+00; EST_HUMAN HIT: AW969280.1, EVALUE 0.00e+00
ctcagacacaggcagagcagctgagcacccctccctccaggtgaagctgctggagctggcgtggcttgtggacgactgcaacaagtggcatagcagattcctggcagctgcccagaaccctgctgatgagcccactccaggggcccccgccccccagtagcttggggctactgacaagccagggtagtgagtagagtcctcaggcacagtgggcacgcaggagcaggggagggctcccacagcaccctgcctccctctctccaaagatctttgtgaggtgagccttgccagcagtggggagtctgcacaaggagaggcggggaagcattctccctgtgacaaccccactgagcagcagatcatgcaactgcttcatgagatgcagaacctccaggagcacccaggcttgggcagcagcccttgcattccttttttgtaccagactgatgagaacaatgaggtgaagatcaccatcatctaaaagccggccactgtcagcaaaacctggggaagtggggctggaggctctgcccctaccatgtccctaccaccccttcccagtcaaccctttaccct

SEQ ID NO: 5332 - DNA, 546 bp, Homo sapiens
  MAP TO AC008999.5; EXPRESSED IN BRAIN, SIGNAL = 0.82; EXPRESSED IN BONE MARROW, SIGNAL = 0.68; EXPRESSED IN ADULT LIVER, SIGNAL = 0.81; EXPRESSED IN PLACENTA, SIGNAL = 0.77; EXPRESSED IN HEART, SIGNAL =   1; EST_HUMAN HIT: BF756692.1, EVALUE 1.20e-02; SWISSPROT HIT: O68433, EVALUE 6.70e+00; NT HIT: U80078.1, EVALUE 8.10e+00
accatctgtggcttgtgttgtctttgaagaggttttcaggaggcctggtatttatacttctccttaaaagggggaaggcacgtaggaagatacaagtagaggaaagaatgatttgtctcatcttgtctttcttcttggatagataagccttatcagtgtgaaatcttagattgcaaacctaaagttagtattgacatgtccttgttttgtggaaggatatacatcttgaaaggtttcaaggccagcaaagaacaatttgtgaaggcagtcatctagagatgcctgaggccttttcaccttcttgtgggaggtctggctataacgtacaatgctttgacacaaggttgtgtagtaacagttgttcatctggagaaaagatggtggcattatgtgactcagtcttcagactgaactatccctttggtgtaatgagtgtgacatgagatttttattttcccttacataattttaggagttgtacttccttgatgctgtctgactgaggtcaaaaggatgggtgtggaaggcatcacacctttctcccat

SEQ ID NO: 5333 - DNA, 565 bp, Homo sapiens
  MAP TO AC009265.5; EXPRESSED IN LUNG, SIGNAL = 1.1; EXPRESSED IN BRAIN, SIGNAL =   1; EXPRESSED IN BONE MARROW, SIGNAL = 0.85; EXPRESSED IN PLACENTA, SIGNAL = 1.2; EXPRESSED IN HEART, SIGNAL = 1.3; EXPRESSED IN ADULT LIVER, SIGNAL = 1.3; EST_HUMAN HIT: AL521707.1, EVALUE 1.00e-127; SWISSPROT HIT: Q23449, EVALUE 7.00e+00; NT HIT: AL163303.2, EVALUE 5.00e-32
ttacccaagagctttgcctgctaacacaagatctattctgcagcccatggataaaggagtaattttggcttttaagtcttatttgagaaatacatttcataaggctgtatcttccatagatagtgattcctctgatggaactgggcaaagtaaattgaaaacctggaaaggattcaccattctagatgccattgagaacattcatgggcacggaaggaggtcaaaatatatcaacattaagaggagtttggaagaagttgattaaaaccctcatatatgactttgaggcgttcaagacttcagtggaagaagtaactggagatgtggtagacatagcaataaaactagaactagaagtggagcctgaagatgtgactgaattgcttcaatctcaggataaaactggaacagatgaagagctacttcttatggatgaacaaagaaagtggtatcttgagggggaatctactcctggtgaagatgctgtgaacgttgttcaaatgacaacaaaggatttagaatattccataaacttaaactgataagcagcagggtttcagaagat

SEQ ID NO: 5334 - DNA, 544 bp, Homo sapiens
  MAP TO AC005327.1; EXPRESSED IN ADULT LIVER, SIGNAL = 4.5; EXPRESSED IN FETAL LIVER, SIGNAL = 2.2; EXPRESSED IN BRAIN, SIGNAL = 4.3; EXPRESSED IN BONE MARROW, SIGNAL = 4.6; EXPRESSED IN PLACENTA, SIGNAL = 3.6; EST_HUMAN HIT: AI571894.1, EVALUE 1.00e-120; NT HIT: AK024426.1, EVALUE 1.00e-111; SWISSPROT HIT: P29776, EVALUE 3.90e+00
attaaggaatcaaatgccgcatcattccatgagccagcgtgtcctgcgtcaaggaagggagccctctggaacaccgctgtcaataccttgtgtccggtttgatcaattgccacgaggaagaggaggtgggccaggaagaggcagagcgagagctgcagatgcagtgaggtgctggtgttctggatggctttacacaggagaaaagtgagggccgccaggaggaggcacagcagagagacgctcagccccatgtaggtgatgacagtcagcacgggatcctcctcctgggacccggaaaagaagagttcacagtgatgctttcctgctctggggtaatgaccccaccaccatttaaaatttttactttggcatagcacattcaagaatgagggagccaggtaaatttgtgaagatgtcaccaatttaatttaatttgcgaaggtgtcacccgagcctcatgggtggctaggaatacaggcgtagtcatgtaggtgacaacgggtgtgcattatagtcatgtatggcaccatgccctgctaatttt

SEQ ID NO: 5335 - DNA, 512 bp, Homo sapiens
  MAP TO AC008988.7; EXPRESSED IN PLACENTA, SIGNAL = 1.2; EXPRESSED IN ADULT LIVER, SIGNAL = 1.8; EXPRESSED IN HEART, SIGNAL = 1.5; EXPRESSED IN BRAIN, SIGNAL = 1.8; EXPRESSED IN FETAL LIVER, SIGNAL = 1.9; EST_HUMAN HIT: BI771193.1, EVALUE 0.00e+00; NT HIT: gi14762671, EVALUE 2.00e-71; SWISSPROT HIT: P29353, EVALUE 3.00e-05
gaggtcacgttcacaggctctgagggctgggacctggccgcatcttcccgcggtcacctttcagctcccgacaggaagcgtggccccagaaccctgggggtttcagagcccgtgcccatgggtggttctggaattctgaggccgatcctttggctggtgtcccggaattccctggtccggcccctcgtccatgcaggcaccctaggggctccccggcaggaccccagaacgccaatatcctactccacgggtccaggcgggctcccgggagctgatgccgaggtctctgtcccgcaggtacggacgaaggacgtgctgtttgagagcatcagccacctgatcgaccaccacctgcagaacgggcagcccatcgtggccgccgagagtgagctgcacctgcgtggcgtggtctcacgggagccctgagccaggtgtgtggctgccgccgtgggtcgctggccttgcctcctttgccagattcttttctgatttgaaaattgagacccggttca

SEQ ID NO: 5336 - DNA, 504 bp, Homo sapiens
  MAP TO AJ004799.1; EXPRESSED IN ADULT LIVER, SIGNAL = 0.92; EXPRESSED IN BRAIN, SIGNAL = 1.2; EXPRESSED IN BONE MARROW, SIGNAL = 1.1; EXPRESSED IN PLACENTA, SIGNAL = 1.9; EST_HUMAN HIT: BF170851.1, EVALUE 2.80e+00; NT HIT: AJ271736.1, EVALUE 0.00e+00
acctttttgctgtggaatgcgtgctccatgctccctgtccccatcttgggaggaggcaggaaccgagatgaaggaggagcgcagaagcaaacactttatgtgcccaactggaactgttcgctttggtcaaccaacactgattgctcattcctctgtgttccctcttaaacagcttctgaaaattgctcgagaggggcggagtcaggaagccaagagcgtgggaggcaaatctcagccccctcgctgtctgtgaggctagaagcctcggttttccttatctggaaaagggggttgctgataataataattacttcacaccattactgcgatgattaaatgcagtaatatatatctatcttagaatactgtttggtactgaggagtgttagcccttgtcattagtatgcattctgtcaacaaactgtaattgagcacaagctctgtgctaccctgaggagataagagtggtgaacaagactaataacgttcctgcccatatgaaat

SEQ ID NO: 5337 - DNA, 552 bp, Homo sapiens
  MAP TO AC004076.1; EXPRESSED IN ADULT LIVER, SIGNAL = 0.43; NT HIT: gi14766466, EVALUE 1.00e-14; EST_HUMAN HIT: BF800939.1, EVALUE 0.00e+00; SWISSPROT HIT: P17024, EVALUE 1.00e-07
ctgtattggggttttggcaggaaaggcatgcagggtgggatgaggagcttaaaactcagtggtttgcataagtctggcagccttagggctaagagattatcccttattgtgtggtgacagggcttgtgttgattaggacaggagaaataatcatgtatgagcattagatagtggttcagcatatgggatctggatcgcaagggaaatgtaaaaacattggctgttagtttggccctccaattcttagattttaagtagataaatacagatctaaggaaacacagaataagaagttgttcatagactgaagtgtcataattttggcaggattgtatggtctttgaggatgtggccatatatttctcccaagaggaatgggggatccttaatgatgctcagagacacctgcacagcaatgtgatgttggagaactttgcgcttttgtcatcagtaggtaaggccttcatacctactctggtgtcttgtgctgggtgctgtttttttgctcttttccatgacaactctgtctttcccacaccagattgtgagtgc

SEQ ID NO: 5338 - DNA, 549 bp, Homo sapiens
  MAP TO AL121924.12; EXPRESSED IN BONE MARROW, SIGNAL = 0.77; EXPRESSED IN ADULT LIVER, SIGNAL = 0.84; SWISSPROT HIT: P31858, EVALUE 4.00e+00; NT HIT: gi14770824, EVALUE 1.30e-01; EST_HUMAN HIT: BI550414.1, EVALUE 3.00e+00
tcttgacatctccccacctcgctgtgcccagaggagcaaactgatgaatgtgttcagcatgtaccacctttcttgtgggaaggagcatgggttccaggtccctgcctgcttccagaccctctgtggaagctgccgctggcactcagcttccttttccggggtatgagcaactgtgtctccaagcagaatgcctttgtccacggggtggggaggagctggaagactgcaggcctccaggttctttctctcaggtttctgttccctttggcgtccacaggacatcaggagccaggtggctggctgacctgtccccctcctcctctgtgtcttccccaggctgtgcagtttccccgctcacagggatttgccgttggcacctgttcggccctgtctcagcatgtgggagagagtggtctgtaggttggtgttggtttcctgctcagaggatgcttcctcagtaggcccggctgaggcccagggaacctggagttactcacttaaaggtagcaaaaacctagaaagttaatctctttcaggcttgtttgttca

SEQ ID NO: 5339 - DNA, 525 bp, Homo sapiens
  MAP TO AC010202.6; EXPRESSED IN HEART, SIGNAL = 4.5; EXPRESSED IN LUNG, SIGNAL = 3.2; EXPRESSED IN HELA, SIGNAL = 4.3; EXPRESSED IN FETAL LIVER, SIGNAL = 3.8; EXPRESSED IN PLACENTA, SIGNAL = 3.2; EXPRESSED IN ADULT LIVER, SIGNAL = 3.5; EST_HUMAN HIT: AW865833.1, EVALUE 2.00e-04; SWISSPROT HIT: Q60596, EVALUE 6.40e+00; NT HIT: AY046056.1, EVALUE 8.00e-03
ggaagaggaagaggaggaggaagtagttggtctaaaactgaaaggaaattgaattccccttcctagtcagttatcaaacatctctgaggttatccaaaccctgcttggccttattgatagcatttattcattcagcaaatatgtgtggagccccctccttgtgccaagccctgcgagtctaggctcctatgtggattgacaaattctgaatgaccattagtcaatatataaagcaattatctttatttgccctcagatgcctccttccaactccaaagggtgctcaactgctcagcagttctagaacttaatgagaaactctctgctaaccctgtcccaagtttttctccccaccgcagagcagatacaacccgctttgaagactcgggttggctctgggttagaagtgggtttggattggttgtgtggcatgagctgcagaagatgaggaatgagcatactgacgtgaacccatattagtcaggaaaattctaagaaactgttcccaaagtgaggcggtaagag

SEQ ID NO: 5340 - DNA, 594 bp, Homo sapiens
  MAP TO AC009533.9; EXPRESSED IN BONE MARROW, SIGNAL =   1; EXPRESSED IN PLACENTA, SIGNAL = 0.78; EXPRESSED IN HEART, SIGNAL =   1; EXPRESSED IN ADULT LIVER, SIGNAL = 0.88; EST_HUMAN HIT: BF907294.1, EVALUE 1.00e-92; SWISSPROT HIT: P50282, EVALUE 2.30e-01; NT HIT: M68516.1, EVALUE 1.00e-05
ctcagttgtgtcctccccacattgatcttggacatcccaagcctctgggactgtgagaaaacacatttctgtgtctaagccacccagtttatggtattttgtcacggcagccggggctgaccaagacaactatgtggcaggtactacctaccgtatggccctaaaatgttttaacttcacacacctggaaagcaccacagccccaagagaaaagcttttccgcactgctgttaagccagggccacacactgcagtgctgcggtgctccaccagctggaggatggcctggcccataatacccgcattcccaccttgctctggccctgtgtcccctccaacgtgcatcctgagctcgcaacctgtgtggaacccaaccagctgcttatcaacatttaagtccacttttatgacacttccgtcaacaatctggtcaactgcactcatccctggcctccgtactgtaccctgctccgcctcgattcccgccccgggggaagctagactcacgcagctaactttatcggctctgggctctgatcgccaagtttaggatcccagctgtatccttgctaaagttagtatcgctggggctca

SEQ ID NO: 5341 - DNA, 509 bp, Homo sapiens
  MAP TO AC004403.1; EXPRESSED IN BRAIN, SIGNAL = 0.97; EXPRESSED IN PLACENTA, SIGNAL = 0.76; EXPRESSED IN ADULT LIVER, SIGNAL = 0.45; EST_HUMAN HIT: AL552262.1, EVALUE 5.00e-39; SWISSPROT HIT: P04258, EVALUE 2.10e+00; NT HIT: AL163280.2, EVALUE 4.00e-17
tactccttgctgggtgtgtgacagcggtgtggcttgcttcttcggtgccccactgctcaaacccctaggacaagcatgccgatgagcagatggtggagagcgtgggctccgaccccacggcagcatctaggattggttgtttacagttcctggagccccagtgggcgtgtgttacagtttgctctttcagcttagccgtccgcaggcagcttgttagtcagttcaatcagagcctctgctaaattgcaaggacagagggcttctgtatccctggattcttgccctactgtaccagaaaaatcggatcacatgtggtcttggagagtgagtgcaaagttttgtagagtagtggaagcagttctcagcagattgatggggagacagaagaggtttaagtgggaaggtagtcttcccctggggttggctgctcagtggcggggatctcctcagaccacccacccttggccgaattccccttggcgtccctgtcgttctgccatcagtagcct

SEQ ID NO: 5342 - DNA, 550 bp, Homo sapiens
  MAP TO AC016940.7; EXPRESSED IN LUNG, SIGNAL = 3.4; EXPRESSED IN HELA, SIGNAL = 2.5; EXPRESSED IN BRAIN, SIGNAL = 2.9; EXPRESSED IN BONE MARROW, SIGNAL = 2.7; EXPRESSED IN ADULT LIVER, SIGNAL = 3.1; EXPRESSED IN PLACENTA, SIGNAL = 3.3; EXPRESSED IN HEART, SIGNAL =   3; EST_HUMAN HIT: BG481340.1, EVALUE 6.00e-54; SWISSPROT HIT: P43363, EVALUE 1.00e-57; NT HIT: U82671.3, EVALUE 1.00e-47
aagcacttgatgggaaggtgactgagttggttcatttcctgctctacaagtattgagtcaaggagacaaacacaaaggcagaaatgctagagagtgtcatcaaaaattataaggattactttcctgtgatcttcaagtgcatgtggctggtcttttttttttttgacatgaaggaagtggataccactggccactcctacatccttgtcacttccctgggcctctcctatgacggcctgctgggtgatgatcagagcaagcccaatgcaggcctccagataatggtcctgtgcacgattataatggagggcaactgcacccctgaagaggtcatatgggaaaccctgagtgtgatggggctgtatgctgggaagaagcacagtgtctatgggaagcccaggaagctgctcacccaagactgggtgcaggaaaactacctggagtaccaccaggtgcccagcagtgatcctgcacactatgagttcctgtagagtccaagagcccacactaaaaccaacaagatgaaagtcctggagtatgtggccaaggt

SEQ ID NO: 5343 - DNA, 571 bp, Homo sapiens
  MAP TO AC008518.3; EXPRESSED IN PLACENTA, SIGNAL = 0.89; EXPRESSED IN HEART, SIGNAL = 1.2; EXPRESSED IN ADULT LIVER, SIGNAL = 0.72; EXPRESSED IN BRAIN, SIGNAL = 0.94; NT HIT: gi14734137, EVALUE 9.00e-40; EST_HUMAN HIT: BF766478.1, EVALUE 1.00e-39; SWISSPROT HIT: Q13972, EVALUE 4.00e-06
ggaatgtagccatggaaagctcaaataatgatctcacacatgactaaggaataggtaccaggagaaaactcatcttagagttgcaagttcttccaaaactaccaccaacagtgataaccccaatgcaggacccagacaatcaagtactacacaggaagactgagcctatacctggcttggtgaatggcctccatccactctttaccatcctgctcctcctcacagcgcagctccagtggcttctgaccttcatggccaaaaagaacagtaaagtaatactggaaagaaaaagaaacacaaaaaacttagttctatttttcaagcacaacagcataataacacagtatctgcctacaaagggtacatatttacaaaatgcatcagtgcttatgcaaattttatttcaaaatgtaacatttcactctgggtccagttggcaatgactctgcacctagaagataccacagactgcatcttaacacacctcagtaagggtcaacccttaacactcctttaatgtacctttctataatgtacaaaaaagaatattgcacaaattcggctatgcaga

SEQ ID NO: 5344 - DNA, 560 bp, Homo sapiens
  MAP TO AC008996.5; EXPRESSED IN ADULT LIVER, SIGNAL = 0.56; EXPRESSED IN BRAIN, SIGNAL = 0.6; SWISSPROT HIT: Q9PAG5, EVALUE 4.10e+00; NT HIT: AL163246.2, EVALUE 1.00e-107; EST_HUMAN HIT: BG620088.1, EVALUE 1.00e-101
agagttgaatggggatgtggtaggaatcaccacctttgcgtctttttagtccttaatggtggcactaatctctgaaatccctccacggatgcaatattggttttgatttactattttcccaggtagaggcagctctaatggcttccatttggcttttcccaccctaatagccctcaccctactactcagggagccaatgtaggagttctgccatctgctaagtatgtctatgccaattttgcattctggaactggggaaatgaccacagagtgagtcttgggacccacttgatcaactgtaagttggacctgagctaaatttctattaagtacatgacctccataagcctctactttaactggaggaccacagtgatgttttgggtcccctggaatcaatgtcacctcagagccagtgtttaatagtccccaaaatgtccaatcatttccctttccccagtgcacagttaccccataaaaggccagagatctccttggggaaagatgggagaaagattcactgcataaattgtcattagtgtagtgggctcgttcctcaa

SEQ ID NO: 5345 - DNA, 570 bp, Homo sapiens
  MAP TO AC011358.5; EXPRESSED IN PLACENTA, SIGNAL = 0.87; EXPRESSED IN ADULT LIVER, SIGNAL = 0.96; EXPRESSED IN HELA, SIGNAL = 0.87; EXPRESSED IN BRAIN, SIGNAL = 0.95; EXPRESSED IN LUNG, SIGNAL = 0.72; EST_HUMAN HIT: BG566091.1, EVALUE 3.00e-03; SWISSPROT HIT: P23312, EVALUE 3.20e+00; NT HIT: X56692.1, EVALUE 2.00e-03
tgaagagccacaatgactgcactcttactgtaaacttgttcctgagcttcttggcaggtatttctctaactctctattgtccacaaagacaaaccattccctttttccaagagaatcacagagttcttatttgtcacctggggcaggtaacaaacccaatgaaagatgaagtggatgatgcctttacaccatatcccttccatccactcagcaactggttccataaaattgtttcctacaaagcctggaaacgtggcaggacaccaaagcgcactgacgccatgaatcacggcagctgactccgctccaatagctactcgcacagctttttcaccttatgtggatcatttctcctttctgagtggtagctttctcatctgaggagattcatggtattttttcctgaatcatattgacacatcacacatcatggaaagacaagagaaacattattattatctttatcacgcagaccgtgttcggagggtgagcagctggaggagtattcttccttgcagtttgtccaagacatgggcaaacttttgatgaacccacaggagacctgtcttc

SEQ ID NO: 5346 - DNA, 540 bp, Homo sapiens
  MAP TO AJ012008.1; EXPRESSED IN ADULT LIVER, SIGNAL = 3.9; EXPRESSED IN BRAIN, SIGNAL = 2.5; EXPRESSED IN LUNG, SIGNAL = 2.3; EXPRESSED IN BONE MARROW, SIGNAL =   3; EST_HUMAN HIT: BG775607.1, EVALUE 4.80e-02; SWISSPROT HIT: P11680, EVALUE 3.00e-02; NT HIT: AJ012008.1, EVALUE 0.00e+00
agccagaaggattgacatggggctggaggcagggaaaggctgctggaagagggagaaactgaggactcacggtttccaggtagcttgatctgttccaggcctggctggggtctgccctcgccacaggtggtcacggcctctttgcaagaactgctggggcttccaccacagttgtagcaccgcattcggtttcctggcaggagaaaagaggcgctggacctgggccctcggtggagccggctggcagaaggcctgtgtgagaagctagctggccgcctccttacccaaggcagcccctagcagggagctgagcaagatcccaacaaactggggtttcatcgcagtctgcccgtgtcaggaccgcctctacctcctgcccacccccctccccagcccggctctgcctgccttatatcccccgtgccttgagctttatagggctataaaaaaggaagaaagagtctcccccagcaggcaccaagggccccagtggggacagggaggggccccacagcatgctctcagcatcctctggagtcc

SEQ ID NO: 5347 - DNA, 587 bp, Homo sapiens
  MAP TO AC005173.1; EXPRESSED IN ADULT LIVER, SIGNAL = 0.93; SWISSPROT HIT: P09212, EVALUE 3.30e+00
caggtcaagggaagagcaagtgcaaaggggtgaagcaaaagctgtgtggcatgttgaggagaaaagcaaagggccagtgacactggcaggacgctggtctggggtcagaagggggctgagatcagagagggagaaggtcaatggggccatgtgagtcatgtgaaaaactttgcaatgtctctaagtgaaatgagaagctacccggaagggatgaataggatacagaacacagtcgatttaaacttaaaaaagaattatcctggctactgtgtgggtaagtcacagactctacaaatcaatcaatcagaagagatacagttgttgtttgtaccactaagaaattgaaaaacactgctaattaaatcacacataaagttccttatgactcaggaaatttttacacccatttaaagagctgttttaaaatttatttagacttaggttttcaatcatgtatcacttttgtgcatatgtagaaggaaaatatacatgaaactaactggttaaagaattcttaagtatttttcatattcagagtccagctcttctgaaacactctttcaattcaaagtcatcaaggaaaccaa

SEQ ID NO: 5348 - DNA, 535 bp, Homo sapiens
  MAP TO AC010205.5; EXPRESSED IN HELA, SIGNAL = 0.7; EXPRESSED IN FETAL LIVER, SIGNAL = 1.2; EXPRESSED IN LUNG, SIGNAL = 0.86; EXPRESSED IN PLACENTA, SIGNAL = 0.99; EXPRESSED IN ADULT LIVER, SIGNAL = 1.4; EXPRESSED IN HEART, SIGNAL = 1.3; EXPRESSED IN BRAIN, SIGNAL = 1.2; EST_HUMAN HIT: BG723417.1, EVALUE 9.00e-50; NT HIT: gi6981617, EVALUE 1.00e-13; SWISSPROT HIT: Q63520, EVALUE 2.00e-07
gctaaagcttgtgacagggcttttcttctattagtttgttagaaaaaaaatacttctggaatcagtgtaaatcataattttactttttggtttcccatcagaagacttaagctgcaggtatttccttttcttatatagtataactgtgtcaactcagttttgttttaaattctttttatattggtatgaaatatgacaataattcatcattatgttttacaggcagaagcttaaccaagaatattctcagcagtttctgactttgtttcagcagtgggatttagatatgcagaaagctgaggaacaagaagaaaaaatacttgttggtatcatgattaggtttataatcaaccaagtctcaagtaggaatggacaacctagccttttattgtgaccagtggaactgagccaggtttcattaaccattgctggccatgtgttttaaacctactgaactgtaaaccacagacgtataggcacataccatactcataaaaggcatttatattgtttggggttcctgcatttccaagtg

SEQ ID NO: 5349 - DNA, 566 bp, Homo sapiens
  MAP TO AL031713.6; EXPRESSED IN BONE MARROW, SIGNAL =   2; EXPRESSED IN ADULT LIVER, SIGNAL = 2.5; EXPRESSED IN BRAIN, SIGNAL = 2.1; EXPRESSED IN LUNG, SIGNAL = 1.4; EST_HUMAN HIT: AI811172.1, EVALUE 9.00e-10; NT HIT: gi14726179, EVALUE 2.00e-06; SWISSPROT HIT: O62732, EVALUE 1.80e+00
ttatttgggagacgggacagaaaacgcaggacggcgcctgcacggtgccagatactcactggcagccaggcgcagctgcaggaccgtggggtagcggcgtggtggccatgcacgcctggcggtcgacatagaggctgttggtcttgacggcgatgtttttctccaggctcctgcacgtactccaggttgcccagcgactgctccacttctagaagcttctcccgcagcaccaccagggacgcatgcagcccctccacctcattccccagcctgagggtgcggggcatgagtggggctgcagaagggagcagcaggcaccttccagtctgggagggacaggacccaaggctcacaggctgggactggggcagcaggaggtcctggcaagaccccgtgaaggatccctaagggaagtccaccaaaaaaagccccggtctgtgattttccgcagcgtctgcaggcagcacagtgcctgtgggcctacacctggggcaagcagggtgctggcgtccccgtgccccggtgtgtgggccgggccaggccagcgctgttctccttcaccagct

SEQ ID NO: 5350 - DNA, 528 bp, Homo sapiens
  MAP TO AL049773.1; EXPRESSED IN LUNG, SIGNAL = 5.6; EXPRESSED IN FETAL LIVER, SIGNAL =   7; EXPRESSED IN BONE MARROW, SIGNAL = 6.1; EXPRESSED IN PLACENTA, SIGNAL = 6.8; EXPRESSED IN ADULT LIVER, SIGNAL = 5.4; EXPRESSED IN HEART, SIGNAL = 7.2; EST_HUMAN HIT: BG654582.1, EVALUE 3.00e-12; NT HIT: AL163283.2, EVALUE 6.00e-10
tcatcaccaccatcatcaccgttatcactatcaacatcaacatcaacatgatctccatcatcatcaccatcatcatcatcaccaccactatcatcattaccgtcaccatgattactatcaccaccaccatcatcaccatgattaccattaccatcaccattatcatcaccatcatcatccttaccatgatcatcaccatcatcaccgtgatcaccatcatcatcaccatcaccatcaccatgatcactatcactatcaccatcatcattaccaccatcagcagcagcaccatcatcaccatgatcaccatcattatcactataatcaccgtcatcattaccatcaccatcacctttatcactgtcaccaccaccatcatcaccatcaccatcaacaccaacaacatcattattgtctttcaactaggtagcagtgaccattaattttatgtgtcaacttgactgggccctggagtgctcagatgactggtgaaacatcatttctgggtgtgtctgtgagcgggtttct

SEQ ID NO: 5351 - DNA, 547 bp, Homo sapiens
  MAP TO AC005204.1; EXPRESSED IN LUNG, SIGNAL = 2.7; EXPRESSED IN BRAIN, SIGNAL = 2.3; EXPRESSED IN BONE MARROW, SIGNAL = 2.7; EXPRESSED IN ADULT LIVER, SIGNAL =   3; EST_HUMAN HIT: AI149574.1, EVALUE 2.00e-38; NT HIT: L14723.1, EVALUE 4.00e-23; SWISSPROT HIT: P08547, EVALUE 2.00e-25
gttgtttccaccattttggctattgtgagtaatgctgttgtgaatggcagtgcataaatatctaatcagatttctttccattgttttgggtgtatgtccagaagtgggattgctggatcaaatggtaattctttgtttaattttttgggaaatagccataccattttccacagcagctatagcatttcccatttccatcagcaatgcactacagctccaatttttccacttacttgaagatactttttgctttgtgctgttgttgtttttatcaaagctatcctaaagtgtgtgaggtggagtatacttgtggttttgatttgcatatctctaagtattagtgatgtcgagcatctctacatgtgcttattggttatttgtatatcttccttggagaaatctctattttagtcctttattcattttttaattttttttttggatttgtgctgttgttgatttgtaatagttcttcatatattctggaaattaatcccttatcagatatataatttgcaaatatttttcccatttcataggttgcctt

SEQ ID NO: 5352 - DNA, 502 bp, Homo sapiens
  MAP TO AC009001.6; EXPRESSED IN PLACENTA, SIGNAL = 3.4; EXPRESSED IN ADULT LIVER, SIGNAL = 3.2; EXPRESSED IN FETAL LIVER, SIGNAL = 7.2; SWISSPROT HIT: P04406, EVALUE 7.00e-24; EST_HUMAN HIT: BE875050.1, EVALUE 6.00e-20; NT HIT: AF017079.1, EVALUE 4.00e-29
atgattctacccacggcaagttccgcggcaccatcaaagctgagaagtgggctgggtgtggtggctcatgcttgtaatctcagctacttaggaggttgaggtgggaggatcacttgagaccaggagttcaggaccagcctaggcaacatagggagatcctctctctcttaaaaaaaaaaaaaaagaaaagaaaagactgagaaagagaagggaagcttgtcatcaataggaaatgggaatctcatccccatcttctagaagccagatcccagcaaaatcaaattgggtgacgatgctggcactggttatgtcatggagtccaccagcagcatcttcacgaccatggggaaggctggggctcgcttaggatgggcagccaaagggatcaccatctctgccccctctgcccatgcccccatgtttgtgatggacatgaaccatgagagatacaaaaacctcatgatcgtcagcaatgcctcctgcaccaccaactgcttaccct

SEQ ID NO: 5353 - DNA, 504 bp, Homo sapiens
  MAP TO AJ009613.3; EXPRESSED IN ADULT LIVER, SIGNAL = 9.8; EXPRESSED IN BRAIN, SIGNAL =  20; EXPRESSED IN LUNG, SIGNAL =  66; EXPRESSED IN FETAL LIVER, SIGNAL =  22; SWISSPROT HIT: P53506, EVALUE 9.00e-27; EST_HUMAN HIT: BG756210.1, EVALUE 0.00e+00; NT HIT: gi11038618, EVALUE 1.00e-129
tgctactcatcggctcacagtccgtttaaaagcgtttgtggtggatgatggaggggcctgactcatcttactcctgcttgctgatccacatctgctggaaggtagacagtgaggccaggatggaactgccgatccacactgagtacctgtgcttggggcggggcacaatgatcttgatcttcgtggtgctgggcaccagggcagtgatctccttctgcatcctgtcaggatgccccagtacatggtggtgccgccagacagcacgtgttggcatataagtctttgcagatgtccacatcacacttcatgatggagttgaaggtggtcttgtggatgctgcaacattccatgcccaggaaggaaggctggaacagtgcctccagacactggaactgcttgttgccaatggcgatgacctggccatgggcacctcacagctattctccagggaggaggaggatgcggcggtggccatctcctgctcgaagggcaacacagcttctc

SEQ ID NO: 5354 - DNA, 502 bp, Homo sapiens
  MAP TO AC037199.1; EXPRESSED IN BRAIN, SIGNAL = 0.68; EXPRESSED IN PLACENTA, SIGNAL = 0.65; EXPRESSED IN ADULT LIVER, SIGNAL = 0.73; SWISSPROT HIT: Q9WVC7, EVALUE 1.60e+00; EST_HUMAN HIT: AI992056.1, EVALUE 6.00e-23; NT HIT: AF295068.2, EVALUE 1.00e-07
gccctgaaattggggtttagccaaggagggttcttggcttcacttaggaaaggattcaagggtgctggtagtgtgagacagcaattttcgttgaatggtgctgctccttgcgaagcagggctaactcataggcaatgtgcccagagtcagccacctatgggctcttggcaactatatttatactcatgtaaatccactttcaattacatgcaaattaagtaatgggtcaatgtaaattgaggggtcatttatttagaactttctaggaaaagagcagtaacttccaggtcattggcatggaaaggagcagtaacttccgggtcactgccatggaaaggggaggtaacttctgggtcattgccatggaaaggggaagtaactttcaggtcattgccatgacagtttataaatgccatgacactggtgagggtgttctataccaatgagcaatgagagcagatagggatcacttttgtcttcatctggtcattcctgctggttt

SEQ ID NO: 5355 - DNA, 568 bp, Homo sapiens
  MAP TO AC005601.1; EXPRESSED IN BRAIN, SIGNAL = 0.8; EXPRESSED IN ADULT LIVER, SIGNAL = 0.85; EXPRESSED IN HEART, SIGNAL = 1.7; EST_HUMAN HIT: BI916691.1, EVALUE 1.00e-48; SWISSPROT HIT: P03181, EVALUE 9.40e-02; NT HIT: AL163282.2, EVALUE 2.00e-47
gaagtaaggggtgggctttcatacccttgggcagctccgcccctgtggctcagcagggtacccctgtggctttcacaggctggcattctgtggcttttccagacgtatactgcaaactgtcggtgaatctacctttctggggcctggaggacagaggccctcttctcacagctccactaggtagtgccccagtggggactctgtatgagggatccaaccccatatttcccttccgcattgccctagcagaggttctccatgaaggctctgcctccatggcagacttctgcctggacatccaggcgtttctatacatcctcttaaatataggcacaggttcccaaacctcaactcttgtcttctgcgcacctgcaggcccaacaccacgtgaaagctgccaaagcttggggcttgcaccctctgaagcaatggtgcgagctgtaacttggccccttacagccacagctggagctggagcatcagggatgcagggcaccatgtcgtgaggctgtacagagcagcaaggccctgagcaggaaaccatttttccctcctagttctcaggcct

SEQ ID NO: 5356 - DNA, 513 bp, Homo sapiens
  MAP TO AC011513.2; EXPRESSED IN HEART, SIGNAL = 1.1; EXPRESSED IN ADULT LIVER, SIGNAL = 0.99; EXPRESSED IN HELA, SIGNAL = 0.67; EXPRESSED IN PLACENTA, SIGNAL = 1.1; EST_HUMAN HIT: BG118207.1, EVALUE 1.80e-01; SWISSPROT HIT: Q9UIU6, EVALUE 5.50e-01; NT HIT: S77846.1, EVALUE 1.20e-01
cccttgttagccttcccttcagcccccatgaatatcacccagcattcaagcccagcctctcctctccctttgagcacattgcctaaagtctcaaataaatgtcaagtttagtgagtgctgatattctatgcccctaatgtttacttcaagtattattacctttcttcttttgcccggggccatttccaaacaagggctggagccaggcgccccagcagctgggcaaacacacttcagggctccttccctcctgtggctcctgtttctcaaaccctctgggacctgcagctctgggggtctcttcccccaacccagttccctcccctttagaccagaacaactaagccatggccaccttcccgatggacacacaaggaggcctggtgtcacccactgctccaggggcggtgttctcggcaggggagctgcctcttgtcccggatcctgctctgctgccaccttatgtggctgcagaattggagggaattgtgaacagagagaggacagggcaac

SEQ ID NO: 5357 - DNA, 581 bp, Homo sapiens
  MAP TO AC004205.1; EXPRESSED IN BONE MARROW, SIGNAL = 3.4; EXPRESSED IN ADULT LIVER, SIGNAL = 2.9; EXPRESSED IN FETAL LIVER, SIGNAL = 4.9; EXPRESSED IN HELA, SIGNAL = 7.6; EST_HUMAN HIT: BG563226.1, EVALUE 5.20e-02; SWISSPROT HIT: P47104, EVALUE 5.60e+00; NT HIT: AF088893.1, EVALUE 2.20e+00
aatttcccattgaaaacccctttatttcgcatacaaataagaattcagcatgtttttctatacccagagagaacagagataaacagggtcctttcatgtggtttgggtattttattagatgctgagttcaagaaagtctcacccctgaagaagctgaaattccatttttcttcgaaatggggtcttttcaaagttagtaacaatgaagctgtcattcacacgatgcatggctgaacaaaaagacagagacagcgggtgctgcattttgtttttgtaatgttgccttgtccacaagacactatttacacttaaatcaattaaaattatattaattttaaaagtcagttttcccagtttctcatttgtactagccacatttcaaatactcagaattcatgggtggccggtgactgacgtaatgaacagcacagatataggcattccatcactacagaagggagctggacagcagtgtgccaatgttttaaggacagaatcctgagtagaattataggatgatgacaattccgagttcccattccaattcatggtctcttctctgatgagtggtgtagggggaa

SEQ ID NO: 5358 - DNA, 529 bp, Homo sapiens
  MAP TO AC020553.4; EXPRESSED IN LUNG, SIGNAL = 1.6; EXPRESSED IN HELA, SIGNAL = 1.6; EXPRESSED IN PLACENTA, SIGNAL = 0.82; EXPRESSED IN ADULT LIVER, SIGNAL = 0.79; EST_HUMAN HIT: BF887011.1, EVALUE 7.40e-01; SWISSPROT HIT: P11260, EVALUE 3.30e-01; NT HIT: AF364606.1, EVALUE 3.00e-05
gaaattccggagctgaaaaagtacaattttgaaataaaaaaaaaattgctagaggagttaaacagcagatttgagcaaagaaaacaggctgtcataaaagtgaagataggacaatggaaattatccagtctgaaaaggagaaagaaaaagaatgaagaataatggatagattctaagagacatgcaagataccatcaaacagatcaatatatgcagtgtgagagtctcagaaggaggagagagaaataaagaggaagtgagaatatttgaggacataatggccacaaacttcataaatttgaggaaagacatgatcaaaaaattcaagaagctcaacaaattccaactagaataacctcaaagaggtccacaataagagacagtataatcaaaacactgaatgacaaagagaaagaaataatcttgaagcaggagggatagataattaactcattatatataaggaatcttcaagaatattaacaactgatttttttatcataaaccatggaagccaaaggacagtgag

SEQ ID NO: 5359 - DNA, 566 bp, Homo sapiens
  MAP TO AC004510.1; EXPRESSED IN ADULT LIVER, SIGNAL = 0.49; EXPRESSED IN LUNG, SIGNAL = 0.57; SWISSPROT HIT: P03356, EVALUE 2.00e-20; EST_HUMAN HIT: T87947.1, EVALUE 1.00e-113; NT HIT: AF109907.1, EVALUE 6.00e-47
tttcacacttgctgtctgcccctcgacatctccagctctattcactctttattgaaaccccaacaataactactgcccatgggcccgatttcaacccagcttctcacttagcacccaacacaagtcctggccaacatgattgtatctccctaatacacatagcatcttccccctttcctcatatttctatttttccaatcccaaatccagaccacacttggtttattcatggcagttcctctaaacccagtcaaatctcgccagctaaagctggttatgctgtcgtgtcccatacctctattattgaggctgctgcacttcctccctccactacttcccaacaagccaaactgattgctttaacttgtgcactctctgtcgccaaaggaatgcacattaaaatttatattgactcctaatatgctttccacatcctccacaaccatgctaccctttggactgaaagaggttttctcaccacacaaggctcttccattatcaatacctctctaataaaggccctccttaatgctgctctcttgctggccaaagctgggttcattcat

SEQ ID NO: 5360 - DNA, 504 bp, Homo sapiens
  MAP TO AC010609.5; EXPRESSED IN PLACENTA, SIGNAL = 1.4; EXPRESSED IN HEART, SIGNAL = 1.3; EXPRESSED IN ADULT LIVER, SIGNAL = 1.8; EXPRESSED IN FETAL LIVER, SIGNAL = 1.4; EXPRESSED IN BRAIN, SIGNAL =   2; SWISSPROT HIT: Q08881, EVALUE 3.00e-26; EST_HUMAN HIT: AA354109.1, EVALUE 3.00e-80; NT HIT: gi16159882, EVALUE 5.00e-84
tctctagggaaggagggaggtcctcaaattgtatacgacaatgcatggggaagcacttcctccactgacctctttccagcagtgattcataatctggtagacgtgtgtggaggccagccggggcttgtacaaccgaaatccggtactgatgtcttccaccacctctgagttgcttcggttttcatacgggattttgccttcactgaaaacttcccacatcagcacacctacaagaaatggtgagcacagcacagtgaatgacaaagcccacagacagcaaacaaaccaacctgcctctagaaattacagactccttgcattaggattcatgtgctacctccagaagtgcatcaagtctacctgaggcttattaggcctgtcctatttttaaagaactgaaatttcccaacctttgtagtggagaaggattttcaagatggaccctttgttgtaccaaactcaaatgctacaactaagagttgtagactcaaatgccaagatgca

SEQ ID NO: 5361 - DNA, 592 bp, Homo sapiens
  MAP TO AC005239.1; EXPRESSED IN BRAIN, SIGNAL = 0.59; EXPRESSED IN BONE MARROW, SIGNAL = 0.59; EXPRESSED IN ADULT LIVER, SIGNAL = 0.55; SWISSPROT HIT: Q9TTR7, EVALUE 3.30e+00; EST_HUMAN HIT: BE740100.1, EVALUE 0.00e+00; NT HIT: gi14764241, EVALUE 0.00e+00
gtctgaaccagccctgaatgccctgggactcagtcactgtcactatcagcttcactggaatcagaagctgcagcttcactgccatcctcctgggccgagtgctcgctgccactggggaagggactggcgctgcggctgtggctccggctccgctggccacccccattgctgccgctgtctgaatcattgtcactgccaccttgggcctgtcctctgtcctcatcatcagagtcggcatcgtcctcagaatcagcatcactgccaaagatctcctctttgtcacgggcagcccgggcctcatcctcgctgctctcgtcctcaccactgccactcttgtcactggcctcgtccctgtcaccttcctcccgttcactctcgctgcccgagtgctcatcttcactgccctccttctcactgctgctgcccttctcctgctcctcatctggaagggagtggagagagatgaaacccacttttccaccctcccagggctcccagagtctggcctgtccagatttacctgagcccccagcttctttctcttctgtctccatctcctcttcctcttcctcctccggttcgtggttttcta

SEQ ID NO: 5362 - DNA, 551 bp, Homo sapiens
  MAP TO AC002103.1; EXPRESSED IN PLACENTA, SIGNAL = 0.8; EXPRESSED IN ADULT LIVER, SIGNAL = 0.99; EXPRESSED IN HEART, SIGNAL = 2.5; EXPRESSED IN FETAL LIVER, SIGNAL = 1.1; SWISSPROT HIT: Q00587, EVALUE 1.60e-01; EST_HUMAN HIT: AW613968.1, EVALUE 3.10e+00
agtgcaggtacggatggttcccttcagctgagaatctcagaccactctgggccttctcaagaggctgggaggaggaagggagggcagggccctgctgaatcggaatagctccacttttatctgttttttatgtggcattttgctgacattttgcttaaagaaagggttctgaagagggtaaaaacatagttggaaaccattgatccgtcacagctgaggaaacctgcctcctttgagttgggcctggggacactggcggtggggacaggccgctgggggcactggcagtggggacaggccactggggtcgctggtggtggggacaggccgcatcactacgtccaggatgagggagtcagctgtgcacctgctgcagatgatggacgggcagctgtggtcatcccagtccctctggccctgggtttgtcagcagctgagaggccccttggcttttgcgtgcaggcagaggggcccttcctccttgctggagtaagacccctccctcaccacttctattcctctcctcttctgcctgggacccttgtctatca

SEQ ID NO: 5363 - DNA, 520 bp, Homo sapiens
  MAP TO AC000041.2; EXPRESSED IN PLACENTA, SIGNAL = 0.47; EXPRESSED IN ADULT LIVER, SIGNAL = 0.65; EXPRESSED IN BRAIN, SIGNAL = 0.94; SWISSPROT HIT: P19474, EVALUE 2.00e-04; EST_HUMAN HIT: BI758586.1, EVALUE 0.00e+00; NT HIT: gi16167919, EVALUE 0.00e+00
tcaaatctctgaagacggggggtggggggatgtgcttgagtgtttgtactcatggtcttgttctagaagtgacaaagctgggacacaatacctttatgcatgaaaaggttgtcacttgtcacaactaacaggctttcacctcacggaaattttcttcccttgtgcacttttcccctggcagtggacatggctgcactcttccaagaagcaagcagctgtcccgtctgctcagactatctagagaaaccaatgtccctggagtgtggatgcgctgtctgcttcaagtgcatcaattcactgcagaaggagccccatggggaggatctactttgctgttgctgttccatggtctctcagaagaacaaaatcaggcccagttggcagctagagaggctggcttcccacatcaaggaactggagcccaagctgaagaagattctgcagatgaacccaaggatgcggaagttccaaggtgagggatctgtatacactgcccccttcctacgaccagaccaggaaa

SEQ ID NO: 5364 - DNA, 573 bp, Homo sapiens
  MAP TO AC022116.3; EXPRESSED IN PLACENTA, SIGNAL = 2.6; EXPRESSED IN ADULT LIVER, SIGNAL = 1.7; EXPRESSED IN HEART, SIGNAL = 2.8; EXPRESSED IN BRAIN, SIGNAL = 1.8; EXPRESSED IN LUNG, SIGNAL = 1.4; NT HIT: AL163248.2, EVALUE 3.00e-86; SWISSPROT HIT: O69882, EVALUE 9.40e+00; EST_HUMAN HIT: AI884381.1, EVALUE 3.00e-59
ggcccgtgtgattatagaccctgtacctgtaccctcctcttttctcatctctgtttgccaaggcaccccacaggcttatttccagtacacccttgtgttagggttctctagagggacagaactaataggatagatgtatgtatgaagagcagtttattaagatgaattgactcacacaatcacaaggtgaagtctcacgataggctctctgcaagctaaggagcaaggaagccaatccaagtcccaaaacctcaaatgcagagaagctgacagtgtagccttcagtctctggccaaaggcctgagagcccctggcaaaccactggtgtaactttaagagtccaaaagctgaaaaacttggagtctgatgtttaagggcaggaagcatccagcatgggagaaagatgaagactggaagactcagcaagtcaccttcttctgcctgctttatcttggttgcgctggcagatgatcacatgctgcccacccagattgaaggtgggtctgcctctcccagtccactgactcaaatgttaatctcctttggcagcaccctcacagacacacccaggaa

SEQ ID NO: 5365 - DNA, 513 bp, Homo sapiens
  MAP TO AF087017.1; EXPRESSED IN HEART, SIGNAL = 5.2; EXPRESSED IN LUNG, SIGNAL = 2.8; EXPRESSED IN BRAIN, SIGNAL = 1.9; EXPRESSED IN HELA, SIGNAL = 2.9; EXPRESSED IN PLACENTA, SIGNAL =   2; EXPRESSED IN ADULT LIVER, SIGNAL =   2; EXPRESSED IN FETAL LIVER, SIGNAL = 3.9; EXPRESSED IN BONE MARROW, SIGNAL = 2.2; SWISSPROT HIT: Q9WF19, EVALUE 1.60e+00; NT HIT: U50731.1, EVALUE 0.00e+00; EST_HUMAN HIT: AI016090.1, EVALUE 7.20e-01
cgactccgtctaaggacagcccccaaatccccagccttttactgaactgacaattgcctccccagtgaacactctgatctcctcagccctaagtggccagacattaacattctcattcaatgcaggtttgaggtgctaattcaggagcttaagatgctaaagagctgggagcgccactgctgctttattctctggtccaggatccttgtgttgctggagataatccattatcgtgggtgcagcagacaccctgcggcttgtggactcggtacggggtggggatcctgatggggttaggatgttcgatggctcgggtgtgctccacgctcagggatcatcacgtccggccggcggtagttggcacgtggagaggtgaatttgcccacaggtgttccccgtgcctgcgcattgctggcagcacgaccggatcctgtgctagcccctcccacaatgcctggagcaggagcgaggggcctggggagccgccttgcctggagcatttgtatttccgga

SEQ ID NO: 5366 - DNA, 598 bp, Homo sapiens
  MAP TO AC010451.5; EXPRESSED IN BRAIN, SIGNAL = 0.94; EXPRESSED IN HELA, SIGNAL = 0.71; EXPRESSED IN BONE MARROW, SIGNAL = 0.72; EXPRESSED IN PLACENTA, SIGNAL = 0.93; EXPRESSED IN ADULT LIVER, SIGNAL = 0.95; EXPRESSED IN LUNG, SIGNAL = 1.1; SWISSPROT HIT: P57064, EVALUE 5.80e+00; EST_HUMAN HIT: AL582688.1, EVALUE 8.40e-01; NT HIT: AJ248287.1, EVALUE 1.40e-01
aatgaagcaatggagcgaaggtacagggatgaccggtcagatgctgctgcccatggggagaagcacatgccctgggggcctgatcatgaggtgtccagtgtcagagccccttgttggagggagtgcagagagcatgaagtcaaccatcctccgatggctttgctctgtcatcttcaaggactttgcacagaccctgatcagaacagaagctgctgaggctgaacatgtgctcatggacttaagtgactctgaaacatcttgaccactcctcctactcctggaagttatcccaatggcaggaagtaactttaagatcactgtgattaacatgtaatcaaacaatcaattaatcaaccaaatagaacttgctttggcattaccttctaaaggaaacaaaattggtaactttgttgaatgattcagagcaaacaagtaaagtgctttgataaaatctgaacccagtttgaagttagaggacattcccattattttactgaacttctgatttattgtgaggtgagagaaacctgtgtttgtttagggtccctttattcctcattctgagaatagatcagaatgcaagaaaatcctggtctgc

SEQ ID NO: 5367 - DNA, 583 bp, Homo sapiens
  MAP TO AC005903.3; EXPRESSED IN BRAIN, SIGNAL = 2.8; EXPRESSED IN BONE MARROW, SIGNAL = 2.4; EXPRESSED IN ADULT LIVER, SIGNAL = 2.2; EXPRESSED IN PLACENTA, SIGNAL = 2.3; EXPRESSED IN LUNG, SIGNAL = 3.5; SWISSPROT HIT: Q02388, EVALUE 5.00e-07; EST_HUMAN HIT: AA190658.1, EVALUE 6.00e-82; NT HIT: L06862.1, EVALUE 1.00e-38
caggcctcagctactccaacctctgacccagtgccctaatatctgaccccaggtccctcgcccttcaacattaggccttcctgaccagaaaaaaaccaatcttgtttctttcctaccttgaggccccggggacccatgaagccaacatctcctttttctcctcggataccaggcactccatcctttcctggggatccctagcagggagagggtccatgtgaggtcagaggaggtcagtgagggaccaaagagaatcgccctggatagtgggtagggaacaccatggggtgggagtcacctctggaggccagagccactggggcttgccatggggacaagggtcaccataggcaggggacaccatcataggcggctactgtggaggtgggggaccctgggtgacatgaggacaccatgagagcactgggtcactataaggtcaaaagctaccacactggtgggaccaccatggtgacgggggccctctggggacagggggcccctgtgggagcaggggcatcttaccgggtcaccagggatccctgctgcaccaggttgaccctgtgagaaacacagatggggg

SEQ ID NO: 5368 - DNA, 541 bp, Homo sapiens
  MAP TO AL023774.1; EXPRESSED IN HELA, SIGNAL = 0.78; EXPRESSED IN PLACENTA, SIGNAL = 1.1; EXPRESSED IN ADULT LIVER, SIGNAL = 0.9; EXPRESSED IN FETAL LIVER, SIGNAL =   1; SWISSPROT HIT: P35228, EVALUE 3.90e+00; EST_HUMAN HIT: BF907653.1, EVALUE 1.00e-05; NT HIT: AF224669.1, EVALUE 6.00e-07
atttgctttggtaggggaggactttttcctgaacacatacctatatgttggttgggtagaaaatttttgctttgcttctgggtgccgtgccgtagtgtcatctctgtgtgactcctttagctgtaaacaacatcagtagtgtctatgatgtcctcagtggcttagtgtgcagtttttagtgaaggctaaagcaaagttttgctgcagatgaggatgccagctgggcccctccttgagctgcagtggtggcagtggcaggccaagtgtgcctgttcttgggcccattcaaggcagtgcatgctggcaccagtcttagtgggtccaggcaggttgatcattgggtttccagaaagcttgctcaagtgctggcaattgcagcagtggaccaagtgagtgggtgggcccttgggctgctggccagcaggtgtggcatggacagtagcagtagcagtgacaagacaaccttctattttccaagtgatctgtgcttgtgttggcagtggctgtggcaggttggacaggccaattcccaggtctgtag

SEQ ID NO: 5369 - DNA, 516 bp, Homo sapiens
  MAP TO AC005797.1; EXPRESSED IN ADULT LIVER, SIGNAL = 1.6; EXPRESSED IN PLACENTA, SIGNAL =  67; EXPRESSED IN FETAL LIVER, SIGNAL = 2.7; EXPRESSED IN BONE MARROW, SIGNAL = 0.89; SWISSPROT HIT: Q14002, EVALUE 2.00e-69; EST_HUMAN HIT: AL602909.1, EVALUE 0.00e+00; NT HIT: gi14786809, EVALUE 0.00e+00
aaatgcccaaactccaacactggataaaatgtagatggggacacaggcacaacccaggcctgacaaccccgtgtgtatgaagtagaactggcccccagcacccagaagtcatggaggtatcactcacagaatacgtagaattgtctggttacttcttcattcacaagattttcttttataacgtgtagggtatagaatcctgcgtcattgtgggtgacgttctggatcagcagggttccattggggtatattgtctctcgaccgttgtgtgcgggccctggggcattttcttgacttatattttttacatatcctataattcgatagttggcatgcaccctttcccctttgtaccagttgtagccataaagattctgggactcattatggactactagaaggacctccttcccttctgcgacattgaacggcacgacatcaatattggtctgggcactgtttggcaggttccagaaggttaaaagcgaggctaggagggggagagaacatcagtca

SEQ ID NO: 5370 - DNA, 528 bp, Homo sapiens
  MAP TO AL121768.2; EXPRESSED IN PLACENTA, SIGNAL = 0.85; EXPRESSED IN ADULT LIVER, SIGNAL = 0.98; EXPRESSED IN FETAL LIVER, SIGNAL = 0.83; EXPRESSED IN BRAIN, SIGNAL = 0.83; EXPRESSED IN LUNG, SIGNAL = 1.3; SWISSPROT HIT: P74442, EVALUE 2.20e-02; EST_HUMAN HIT: AI868584.1, EVALUE 2.00e-29; NT HIT: X12667.1, EVALUE 2.00e-03
aggcctccactgaatgattgtttcaaccaccaactttaagacaaatattaaatacagaattcctactacctttgtattcttgtttttttaaaaatcaaacacacaaaagaatcctaccttcctgccatctccaaatggtaatagtatgttctgggtctagtcccacagacagcaatagtttgccagtagcactgaagctgactgaacatactccctttgaatggtagcatcttaggatagataaagtctgcttgttcattgcatcccagatgtgaatagaaggagctgtagctaaataaagatagtatcaaaaagttgtaatctacctgttataaatatttctgtttctaaagcttatgcatattcatctctgaaacatggacaaatgtgtaccaaacaaaaactgtacttaacaaagaacagctcaaaactaaggctaaatttaagaaaggaaaaggagttttgggggtggggaggaaagaaaaggaaaatatatagaacacttcttcaggccatattccaaattgc

SEQ ID NO: 5371 - DNA, 548 bp, Homo sapiens
  MAP TO AC005222.1; EXPRESSED IN ADULT LIVER, SIGNAL = 0.54; NT HIT: gi13375689, EVALUE 9.00e-43; SWISSPROT HIT: P57737, EVALUE 7.00e-12; EST_HUMAN HIT: BG750448.1, EVALUE 1.00e-42
ggaatctgccagttttcagcagccgtcagtcccctgaggctctgagacccggcagcacagccaggccgtatatggacaggcctggaactggccctcagtcccccgcctcccattggtttcgtccccgcccaaagggctggacatgtccccacctggccgtgccctgctcctccaggaggaaccccctacctggttgaatccagtagacacaaggtgctcccaggtgcccatccatgccagccggctatccctgctgttctcatgggcctgcgtgctctgcaggaggcaagaggtggacctgagcccccagggccctgctggtgggcggggccccctggaatgggcctgagctggggaacttctgctgcccacctgcctgaaagcctcacagagggtgggaagggctgggtccttctccacgtccccactgggaccaagggtggtctccgaagcaccccggggatcagccccgcctccgccccagttgagggcagctctgcacccagaggccaacctggctgctcctcccgagtgtccctcctaccaag

SEQ ID NO: 5372 - DNA, 593 bp, Homo sapiens
  MAP TO AC022517.1; EXPRESSED IN PLACENTA, SIGNAL = 9.1; EXPRESSED IN ADULT LIVER, SIGNAL = 6.5; EXPRESSED IN HEART, SIGNAL = 7.8; EXPRESSED IN LUNG, SIGNAL = 8.5; NT HIT: AB020683.2, EVALUE 1.00e-106; SWISSPROT HIT: P39956, EVALUE 1.00e-16; EST_HUMAN HIT: BF856729.1, EVALUE 2.00e-91
ctcaggaggctcaagaccacgctcctggccatggggacacctggggccgctcacagctcaatggggggcactccggggtacaaagcgcaagctctaggggcctgggagcttcggctctgggggtgcacatcccccaccccaaagctggtgggtgaccccaggcggtccggaagatctccagccgtcataggccgacctttgcggcctcacctggtggggcccctgccacggcgcccagccgtgtacccgggattgactccctcccgaggggctctcggtccggccggcggcagggccagtgtagacactcaccaggacttaggctccccaaagtgcaggtagttgatgctgtacaggtccatgtcctcggtgtgccaggcgaaggtggtcttccacatgccgaagtacaggtagggcgtgttcacgccctcgatgatggtgccgcactcgcgctccaccatgtccaggatggtccggaggctcccgatgttccactgggccacgtcctgtggggcggcagagcagcgtcggcaaccgcccggccaccccccagaacctgcgagccctggggtgcaggctaattctccccagag

SEQ ID NO: 5373 - DNA, 598 bp, Homo sapiens
  MAP TO AC000395.1; EXPRESSED IN BRAIN, SIGNAL =   3; EXPRESSED IN BONE MARROW, SIGNAL = 0.93; EXPRESSED IN PLACENTA, SIGNAL = 2.2; EXPRESSED IN ADULT LIVER, SIGNAL = 1.9; EXPRESSED IN HEART, SIGNAL =   1; SWISSPROT HIT: Q12967, EVALUE 2.00e-34; EST_HUMAN HIT: BE312028.1, EVALUE 0.00e+00; NT HIT: gi14734851, EVALUE 0.00e+00
gtgtgtagcagcagagctgggatttgaccagaacatcagctctggatcagcaaatggtaggtctgggacagcagatgctgccagaaggcaggcccacccctgccctgccaagctgagctgctcaccgcatccatcagtgtaaactgctctgccaccagatctggagggaacaccaagaggtgaggcttctcctcactcagcccgttctctgcaaccacaggtgaaggccaggaaggctgtaatgatggaactggtgctggagctggctccagctctagagtttgtgagggagctggatcctgttctggagctggctctagttccagagctggcgctggagccgattctagtcccacagctggctctggagcctgctggagctccggagctggtgctggagctacttctagctctgaacctggagctggtgttggagctggctctggctccggggctggagccggcactgggctgggtgctcgagctggtgttagagctagctcgagctctggagttggttttagagctggcactggtgacagagctgcaagaggagaaaagttcaacaacatgccagcctttcctgtgcctttccaaa

SEQ ID NO: 5374 - DNA, 539 bp, Homo sapiens
  MAP TO AC020728.4; EXPRESSED IN LUNG, SIGNAL = 1.9; EXPRESSED IN BONE MARROW, SIGNAL = 1.5; EXPRESSED IN ADULT LIVER, SIGNAL = 1.3; EXPRESSED IN HEART, SIGNAL = 1.9; SWISSPROT HIT: P89659, EVALUE 2.30e+00; EST_HUMAN HIT: R25801.1, EVALUE 1.00e-127; NT HIT: gi15616630, EVALUE 8.00e+00
ccctacaaagaagcaaacgcattttaaaaaaataaagttgacaaagtcagataaaaaaaactcagaattccattaacattaaactcaagtttgttaattatttaaatatttccatggaaggcattattagataatgataatctatcagacaataaacctgagatgtagaattgagagcttcctaaatgtctgcttacctcacagggaacaaaaagatttccaccttaaatttttctaaagttcattcagttaattaaaaacaacaacaacaaaaaacatacctacatttccagtatctacctactggaactttttcaaaggaaggatttggactcttgggaagattcttcctgacccaatcaatcagaaattgtttgggagattttccagtccaacttcgagcagtatagtcaaaatttcttacatcatgaggttctttctttttatctaaaatggtaaacaaagattggttctttaaaaatggtcaagcattctcttttcagtgatcaaagtcctctcttgctttggagaacagcact

SEQ ID NO: 5375 - DNA, 532 bp, Homo sapiens
  MAP TO AC005257.1; EXPRESSED IN BRAIN, SIGNAL = 1.3; EXPRESSED IN BONE MARROW, SIGNAL = 1.2; EXPRESSED IN ADULT LIVER, SIGNAL = 1.3; EXPRESSED IN LUNG, SIGNAL = 0.98; SWISSPROT HIT: P55194, EVALUE 4.40e-01; EST_HUMAN HIT: BI049229.1, EVALUE 5.00e-45; NT HIT: AL163284.2, EVALUE 3.00e-05
gtgcagtcgtcaccattgtctaattccagaacgttctaatcaccccaaaaggaaacgctgccgcctcagcagtcagtgctggtctcccctagcgtcctggagcgtttttccctgcatggaggcccacgagtcccgcgctttcctccttccctgtcacgctgtggctttaggaggcccacgagtcccgcgctttcctccttccctgtcacgctgtggctttggcctcaggctagagggtcggtgtctgtcagcctgtgctcagacgagggcgaggagagttctggtcagcgcgtccagcctccctcctgtgttgctttgctgctggaaaaagagggtcctgatgcagaccccaagagaggagagaactcgaggtgagccgcggatcacagtgagagcagccaccaagccgcttccttacacagcgggcctccctgacagagcagggcgtcctcggggagcaggcagagggtgcctgctcttccttagcgcctccgtctgtgagaaacggccagggttgcgagtaaacctggaa

SEQ ID NO: 5376 - DNA, 557 bp, Homo sapiens
  MAP TO AL049856.1; EXPRESSED IN BRAIN, SIGNAL = 4.4; EXPRESSED IN HELA, SIGNAL = 3.3; EXPRESSED IN BONE MARROW, SIGNAL = 3.9; EXPRESSED IN PLACENTA, SIGNAL = 2.8; EXPRESSED IN ADULT LIVER, SIGNAL = 3.3; SWISSPROT HIT: Q28640, EVALUE 2.10e-01; EST_HUMAN HIT: BF766948.1, EVALUE 6.00e-17; NT HIT: AE006045.1, EVALUE 2.10e+00
tgctctgctctgcacatctccagacccgcacatctccggacccccacatctctggacccccgcatctcctgaccccccaacatctcctgatccacacatctccgctctgcacatttccggacccgcgcatctccgattcgcccatctcctgatctgcgcatctccggacccacgcatctcctagccctccacatctccgatccgcacatctcgggactggcacttctcctgatccgcacatttcctccggacccccacatttccgatctgcacctctgggtacgcgcacatctccggacccacacatcggacccgcacatctcgggcccgcacatctccgctgcacacatctccagacctgcacatctatgggcccgcgccttgccataccgcccatacctcaccctgcaggactccccatgcccccgcactgacagtgccacgcagaactcgttttgtttgcttcctttcttccagttcttccgcaattgttaactcagtaaatggcaccagaatacagtataaaaatctgtgtgggcaacaccaaatgcacaatc

SEQ ID NO: 5377 - DNA, 537 bp, Homo sapiens
  MAP TO AL121825.19; EXPRESSED IN PLACENTA, SIGNAL = 0.91; EXPRESSED IN ADULT LIVER, SIGNAL = 0.95; EXPRESSED IN BRAIN, SIGNAL = 0.98; EXPRESSED IN FETAL LIVER, SIGNAL = 0.91; SWISSPROT HIT: P31948, EVALUE 5.00e-09; EST_HUMAN HIT: BG311161.1, EVALUE 3.00e-80
cgctagtgtaccagctcaaggaagtcattttatattttgctgaagtacagattattaaaatattagtaagtacactaaatcaacaaaatattacattaaagtaagaagccaggacaaaagattctatgaaaataaatcttcataggtaaaaatttctacctttggccacttgggattgagaagtcgagctttgattgcatcatccagtgccttgtcatactgctggattttcatgtaggctgcagatctattgctgtataagatgcagttctgagggtcaacagccagggcttcattatacagaacaatagctgtgtggaaatctccatcatgacaggcctgattactctgacgaactttctcaacaaattcagctttgctcagtaccggtccatcaggacttctctggccaatagtgtcagcaccaaagagaggaatctacaaacaaagaaactttatcagaaaaagttcagataatccagatgggttccccatctgctaagatttggatgtctgtcccctccagttgcacattaa

SEQ ID NO: 5378 - DNA, 577 bp, Homo sapiens
  MAP TO AC005932.1; EXPRESSED IN PLACENTA, SIGNAL = 0.8; EXPRESSED IN ADULT LIVER, SIGNAL = 0.92; EXPRESSED IN BRAIN, SIGNAL =   1; NT HIT: gi4885402, EVALUE 2.20e+00; EST_HUMAN HIT: BF511074.1, EVALUE 2.00e-90; SWISSPROT HIT: P13866, EVALUE 1.70e-01
cctgagtgtctctcaagggctgagaccagggcccatgtttccctagagtttgtcatcttccagcatagtgtggacgcatgggggtcaggcaaagggggagtttgatgactcagtactattggtgattttgcatcacttgaaggagaccctgccttaaattcagaacttgacttctgcccacggctaaagttaattcattcaacaaccccccatgaagcaatggagccaggctccctcaggcccaggcaagaaagggtcgtggagttggggtcgccagcactggtttatggatttgaggacctaggaccagagtgagttggggatgggaggaggcagtgcttgaggcccctctgagcagcaaacctggacccgaggttcagttcccgcagacctaattaccctaatttgccacatgcactaattacctcctgggtgccaggtggctgggcggggctgccccaatttccggaggtaggtcggggcccgattatttttggctgtggcgtccttgaagcctccgccatcagcagcgcttgaagggcagaaagtggggcggagaaattgaggccacatcagg

SEQ ID NO: 5379 - DNA, 541 bp, Homo sapiens
  MAP TO AC011525.4; EXPRESSED IN BRAIN, SIGNAL = 1.2; EXPRESSED IN PLACENTA, SIGNAL = 0.79; EXPRESSED IN ADULT LIVER, SIGNAL = 0.61; EST_HUMAN HIT: BF831098.1, EVALUE 3.00e+00
gtccccacagacatgtaccccaatgcccttaacttgttcctaaatgagtaaacaaagcttcggtaacatataaacatgatttatgaaaacaaatctctccccaaatctgcttagagaagcagtgtcacataactgtaagcaaagatgaaagaccacgattaacagggtccacatctgttcgggggaggatgcagcttgagtctctgccagcctctacctcaaagaatgtgtgcgctaggtcaataatgaaactcgtggcccatctgtccttccggtgtgccctgcactgtgctaagaacttcccatccactggatctcacggaggttcacagtcatctgaagagggggtcctgtgttcacctgcatcttgcaggtgagtggacagaagtgcggaaagcatgagagctagtgcagagaagagctggggcaccagcagtaggactggaggcaggacattgtctttggttactacctggatggacaaactacatagatgaagattaaaaaaacaaacaaacaaacctgggcctgatttatcaaa

SEQ ID NO: 5380 - DNA, 564 bp, Homo sapiens
  MAP TO AC000058.1; EXPRESSED IN ADULT LIVER, SIGNAL = 0.68; EXPRESSED IN HEART, SIGNAL = 1.1; EXPRESSED IN HELA, SIGNAL = 0.93; EXPRESSED IN FETAL LIVER, SIGNAL = 0.58; EXPRESSED IN PLACENTA, SIGNAL = 0.62; SWISSPROT HIT: Q23489, EVALUE 1.10e+00; EST_HUMAN HIT: AW849931.1, EVALUE 2.00e-01; NT HIT: Z99123.1, EVALUE 1.40e-01
ttgaatttccaatgcagcagaggaaatggcttctaaaatattaaaatcctgttttcattgactttctttacgctttgtgaccacatttctattcagatcaggttgcacagcttttaacttctccaagtctaaacttaaagttagagcaacttcatggtactccttaagtggatatctcttataacaagggagaacgcagtctggaaacttcagagcatccaggccaatgggatgactcttaaaaaaaaaaaaaaaagagatttttattccagttttctgattttttgaaatggtcttgaactacaactgcattttgaaacaggggctcctttggagcaagacaccaatctggtaaagtttccaagagaacaaacttgcctgggttcacatggctgaaaaagaaagtctcagccatgtccccagtactcaccctatgatttctctcctgacctccaatcttgcattctctaaatctcaattttctacacaggaattcttcttattgttctcatattatcccttttgcatattgcttggcctccctgaaggccaagaaatgcagtc

SEQ ID NO: 5381 - DNA, 579 bp, Homo sapiens
  MAP TO AC006261.1; EXPRESSED IN BRAIN, SIGNAL = 1.3; EXPRESSED IN PLACENTA, SIGNAL = 1.4; EXPRESSED IN ADULT LIVER, SIGNAL = 1.4; SWISSPROT HIT: P03186, EVALUE 3.70e-01; EST_HUMAN HIT: AW249240.1, EVALUE 0.00e+00
tttcatcttcaaaggggtggggtggcaggaaggcttggggagctctgctggagctggagggaagacctgaggtgcaagcttagggcccgagaagtcactgtcactgtcactgtcagctgctgcagttactgttacagctgtgacttaggccctgggcttgtgggttcctggggtccaggctgtggagacccctcccacactgaggtcttagggtcaggctgatctggggtccccccggggctccgccacctgctgcctgagcaatgacagcctgccccaaggcccctctgtaacacaggaaggacagcatcatcctgacaatgacactcgccagacctggtggtggcccagagctgggcccgtaactgtcactgcctccttcatgtcagggacacctagcacagtggccagagagtggtgaggggtgagggttccagatcctctagccttcctgggtgaggttcccagcgtggaaatgcaagtgtctcagtgcagaccaagcatggggatctgggccagcaggtgggtctaggtgtgccaatgggagtgggcacatacccaggccacaggaaatcaaat

SEQ ID NO: 5382 - DNA, 527 bp, Homo sapiens
  MAP TO AC026796.2; EXPRESSED IN ADULT LIVER, SIGNAL = 0.9; EXPRESSED IN LUNG, SIGNAL =   1; EXPRESSED IN BRAIN, SIGNAL = 0.86; EXPRESSED IN PLACENTA, SIGNAL = 0.92; NT HIT: AE006509.1, EVALUE 5.00e-01; SWISSPROT HIT: Q57852, EVALUE 6.40e+00; EST_HUMAN HIT: N63232.1, EVALUE 4.70e-02
tagccaatggtgtgctcaagctggctcagagggattttcagagtcaacatacagatcttttcccaactcccaattcagtgacatcacactggaagcttgacgttggccacagtggagtatttacactatggcagttggccaacagtataagtcagagcttttgactttctgataatttttttttaattaccagaaaatcactggatttcttcatgcccattggctcattattattgctggaccacttactattgattgttgaaaacacctaaaataaaataaaaattcagtgtaaaaaaggcaaagtgaaactatatactctataaaattttgtaaaagattgaaaattgtaagacattgatgaaagtgatattgagctgctgttcaaaacacacatagccattgacaaataaagataccagagaattttgtaagttaccaactaaagaaggaaaattggccaaatacacacttgaatgtaatgtattacatataaaaatatgaagaggccctactgaaaacttgtg

SEQ ID NO: 5383 - DNA, 545 bp, Homo sapiens
  MAP TO AF205588.1; EXPRESSED IN BONE MARROW, SIGNAL = 0.99; EXPRESSED IN ADULT LIVER, SIGNAL =   1; EXPRESSED IN HEART, SIGNAL =   2; EXPRESSED IN FETAL LIVER, SIGNAL = 1.1; EXPRESSED IN BRAIN, SIGNAL = 1.2; SWISSPROT HIT: Q06730, EVALUE 2.00e-16; NT HIT: gi15299302, EVALUE 7.00e-56; EST_HUMAN HIT: BG494561.1, EVALUE 1.00e-67
gctctaggcacatgtaggcactaaatatttttgcattaagtaataaattaatgcaccaacaggatatttctactatgattttttactcacaatatgtaacataaaacaacatatatcataggggccctttataacagtttctatttaattttcaacaataaaaatggtaagaattagtccctaaacatcttttttcacgtcaactgattcttatcacttcagactgagcaaaattgtgattttccagggatcagtgtcgtttagggatgtgactgtgggcttcactcaagaggagtggcagcatctggaccctgctcagaggaccctgtacagggatgtgatgctggagaactacagccaccttgtctcagtaggtaggtaggaattgtttcccatgtagaaggccagaatgcatgtcctttcttatcaatagaaacttgtggaacttttgtaaaatataataatatttaggtttgagattcagaggtcaaggacaatttatcccttttggataccagaaagaatgttttcctctgcctccatga

SEQ ID NO: 5384 - DNA, 574 bp, Homo sapiens
  MAP TO AC010200.7; EXPRESSED IN FETAL LIVER, SIGNAL = 0.8; EXPRESSED IN BRAIN, SIGNAL = 1.4; EXPRESSED IN PLACENTA, SIGNAL = 0.91; EXPRESSED IN HEART, SIGNAL = 1.1; EXPRESSED IN ADULT LIVER, SIGNAL = 1.4; SWISSPROT HIT: P03921, EVALUE 1.40e+00; NT HIT: AL163278.2, EVALUE 2.00e-31; EST_HUMAN HIT: AI082641.1, EVALUE 3.00e-31
aaatcaaggtgtcagcagggttagctcttcctgaaggctgtgggtggaggatgtgctccagggctctctccttggcccacagatggccatctccgtctcctctctgtgtgttcacatcaacttccctctctgtgtttctgtctctgtaaccaaatttccagtttttataaggatacaagtcatattggatcttcattttaatttgattttctctgtaatgaccctatcaacaattaaggtcacattctgaggtactggggtttaaggcttcaacatatatacatcctcatcttacaatggttcaacctactatgtttagactttacaatggtgtgaaatagacacttttagcatagttttcaataaattgcatgagatattcagttctttattacaaaaaaggctttgtgctagatgattttgtcttacatggtggtaggcatgtcttacatggtggtagggaagacagaatgagagccaagcaaaaggggaaaccccttataaaaccatcagatcttgtgagacttactcactaccacgagaacagtgtgggggaaaccaaccccatgattca

SEQ ID NO: 5385 - DNA, 529 bp, Homo sapiens
  MAP TO AC008455.5; EXPRESSED IN BRAIN, SIGNAL = 0.98; EXPRESSED IN LUNG, SIGNAL = 1.3; EXPRESSED IN HELA, SIGNAL = 1.2; EXPRESSED IN HEART, SIGNAL = 1.1; EXPRESSED IN ADULT LIVER, SIGNAL =   1; SWISSPROT HIT: P17301, EVALUE 2.00e-22; NT HIT: gi6006008, EVALUE 5.00e-81
ttggaagggtgagcattttctaactcataagcttccatttttgacttttaccactctctcgtctttaggaagaaataaagtcaaaagggatgttcctgaggccttacctgtatataaatgatgtgctcggggcaactctgtgcttgatttactaccatattcttctgcaggcacctttcattgttttctttaaataaccccctggaggttactctggatgaaaatccatctgcatcaagtgtgatgttatatacaatggctatgataaaaaaaatcataaagaaatgttatttcaaatcaacttataggaaaaagcatctttgctttattgtgtcttcttggacaaagtatctcacatcaagaaaatatggaaatagtcttcatattggtggcttgtgaaccatagctagcaccacaaagcatttgtcattctagctctgatgtgacgtaggtgactgtgcatacaaagaaatgtgattcagagaaatgtggctgggagcagtggaaaggaaactagacttgccgccag

SEQ ID NO: 5386 - DNA, 563 bp, Homo sapiens
  MAP TO AC016398.5; EXPRESSED IN LUNG, SIGNAL = 0.85; EXPRESSED IN ADULT LIVER, SIGNAL = 0.73; SWISSPROT HIT: Q60803, EVALUE 4.00e-12; NT HIT: gi4759253, EVALUE 0.00e+00; EST_HUMAN HIT: AL544165.1, EVALUE 0.00e+00
tgcaaacaaccttcatttggacacttcactatcagagaaataatctcacgttttgcaaaattgtctggaaatagttaattttccagcagtatttcattgtcaactggatatttgtgacctgcatcccttattgattttatgatgcaggctttgcagaacctatggctgcatggcgtttgcactgcttctcgtaatgccatcaagcagatggggcattcatacttgctttccaggggtgggccaaactctacatcatatccctggatctcctccataaaggagctgaagaggttccccgtgctggcagttctgcccacactatcattttttgttgctgcgctacaggagctggccatggccacacagtagtcactttgagactggctggatccacacctgttttcacagtttagcagacttatagtaacttgattatcacttgctcgctcaagtgcacggggcgggcggccgaaccaggcgggcaggcgcacgactctgctcagccaaggcgctggtagaggacggacacagaggctgcttggacgtcaaactctgcaaccaaa

SEQ ID NO: 5387 - DNA, 597 bp, Homo sapiens
  MAP TO AC004186.1; EXPRESSED IN PLACENTA, SIGNAL = 0.8; EXPRESSED IN ADULT LIVER, SIGNAL = 0.57; EST_HUMAN HIT: AI765855.1, EVALUE 0.00e+00; SWISSPROT HIT: P19474, EVALUE 1.00e-29; NT HIT: gi4508004, EVALUE 0.00e+00
ctcaccagtgaacggagacctctctgaactaaggataccatggccacgtcagccccactacggagcctggaagaggaggtgacctgctccatctgtcttgattacctgcgggaccctgtgaccattgactgtggccacgtcttctgccgcagctgcaccacagacgtccgccccatctcagggagccgccccgtctgcccactctgcaagaagccttttaagaaggagaacatccgacccgtgtggcaactggccagcctggtggagaacattgagcggctgaaggtggacaagggcaggcagccgggagaggtgacccgggagcagcaggatgcaaagttgtgcgagcgacaccgagagaagctgcactactactgtgaggacgacgggaagctgctgtgcgtgatgtgccgggagtcccgggagcacaggccccacacggccgtcctcatggagaaggccgcccagccccacagggtaagccctcttcacccccgagggtgccttgccaccttctctggatgctccaccttgcagtcctcagaggactcagcctgagtctcccttcctgccccagcccagagcatccacctgttg

SEQ ID NO: 5388 - DNA, 572 bp, Homo sapiens
  MAP TO AC011890.4; EXPRESSED IN ADULT LIVER, SIGNAL = 7.9; EST_HUMAN HIT: AU117648.1, EVALUE 1.00e-76; SWISSPROT HIT: Q03146, EVALUE 1.10e+00; NT HIT: AL163227.2, EVALUE 7.00e-99
atgcaagaccgaaatccaacaggggagtcattaaaccttaaagtttcaaaatgatctcctttgactccatgtgttacatccagggcacactgatgcaagaggttggctctcatggtcttgggcagctccaccctgtggctttgcagggtacagccccacttccagttgctttcatgggctggcattgtctgcagcttttccaggtgcacggtgtaagctattggtggatctaccattctggcgtctggaggattgtgaccctcttctcacagctccaccaggccatgccccagtggggactctgtgtgggggcaccaaccccacatttctcttctgcactgccctagtagaggttctccatgagggttccatccctgcagcaaacttctgcctgtacatccaggtgtttccatacatcctctgaaatctaggcagagattcctaaacctcaattcttgacttctatgcacccacaggcccaacaccatgtgtaagctgccaaggcttggggcttgcactctctgaagcaatggcctgaattatatgttggccccttttagccacagctggag

SEQ ID NO: 5389 - DNA, 600 bp, Homo sapiens
  MAP TO AC022143.6; EXPRESSED IN ADULT LIVER, SIGNAL =   1; EST_HUMAN HIT: AI654705.1, EVALUE 3.00e-77; SWISSPROT HIT: P21416, EVALUE 4.00e-30; NT HIT: M32788.1, EVALUE 0.00e+00
gctattcctctgtgatgggggcccttactttttggcttcctggatggccaccactaagatttttgcttgtcttttggatgctttatcagcagctttttcagctgcctcagctgcctgttttcgtttttcagactctcgattgtcaaaaactttctgggctacttctaaaagctggctattgttcattccagcaaatccctccggcttttgtaattttcttttactatcagtagctgcctgagccacaaacaccaaattaatagcacggctattcttgggagctgccgggtcaaaaggggtgtaagtttgataggcctcctggagactttctaaaagtgttccaggttcatcaggcccctggacaacttcagttgtctcagacagatttatgggtttttgagcggctcccttgaggcccacaaggagataccggtgaaaatcatctaaagccctcctcccacccgaggagttaggatcccaattaggccgggtagagggaaaaacctccttaacgaggttttgggcttccccctctggtctatcagctgatgtaaggaaatactttctggcttctcttcggatacaattcctctcttcaga

SEQ ID NO: 5390 - DNA, 563 bp, Homo sapiens
  MAP TO AC005744.2; EXPRESSED IN ADULT LIVER, SIGNAL = 0.45; EXPRESSED IN LUNG, SIGNAL = 0.5; EXPRESSED IN BRAIN, SIGNAL = 0.56; EXPRESSED IN HELA, SIGNAL = 0.43; EXPRESSED IN PLACENTA, SIGNAL = 0.66; EST_HUMAN HIT: C18885.1, EVALUE 2.00e-01; SWISSPROT HIT: Q9RR76, EVALUE 5.40e+00; NT HIT: gi15314944, EVALUE 8.40e+00
tgccagggaggttaatgttctcactcaggctcctgcaataatttgatataaaacatgtgtctggattctgggcatcctcactggttctaccactgcactacatggaactgattttatttgagtgttttcaacaccccattgactgacagccatgtctctttaatccttcatttttttttttttttacttcctcagtttccagggattgtgggatatagagatgcatcaggcacttccctctcctccaggactcagtgggaagagactgtccactgtgggaggccactgagctcctggtttgattatccaaagtcaggggtgtttgttagagtcatgcatgggggagcagctgcagcagcccccaaggacgactcgccccagcccccagcccctttgcgggggctgccttggctggtgacactccctgtaaggtaggagcctactgggcttctgtatacacaactgattctacatgagaccatgctcacacatgtgtttttattcacacagatccagagggtctgcagaagcacgtcctcccctggtgtaggggctaaagaggc

SEQ ID NO: 5391 - DNA, 549 bp, Homo sapiens
  MAP TO AC027274.2; EXPRESSED IN ADULT LIVER, SIGNAL = 2.9; EXPRESSED IN BRAIN, SIGNAL = 2.7; EXPRESSED IN FETAL LIVER, SIGNAL = 3.6; EXPRESSED IN BONE MARROW, SIGNAL = 2.8; EXPRESSED IN PLACENTA, SIGNAL = 3.3; NT HIT: AL163303.2, EVALUE 1.00e-23; EST_HUMAN HIT: AL521707.1, EVALUE 1.00e-21; SWISSPROT HIT: P01124, EVALUE 6.80e+00
ctaatcagggtggtggttgctgaaggttggggtggctgtggcaatttcttaaaataagactgcaatgatgcttgccacatcgattgactcttcctttcgcacaagatttatttgcagtgtgtgatgctgtttgatagcatgttaccatgatataacttctttcaaaatcaaaatcaactttttcaaaactctgccactacattatcaactaagtttatgtaatattctacttcgttattatttcaacaatgttcacaacattttcactaggggtagcttccatctcaagaaaccactttctcagctcattcataagcagcaattccttatccattcatattggactgatcatgagcttgcagcaatttagtcacatcttcagagtccacctctgattttagttctattaatatttccacgcatttgcagttacttcctccactgtagtcttgaaccccttaaagtcgtccatgaggattggaatcaactttgtcccaacacctcttattgttggtataataactctcttccatgaatcacaagtgctcc

SEQ ID NO: 5392 - DNA, 545 bp, Homo sapiens
  MAP TO AF222684.1; EXPRESSED IN BRAIN, SIGNAL = 0.96; EXPRESSED IN PLACENTA, SIGNAL = 1.6; EXPRESSED IN HEART, SIGNAL = 0.96; EXPRESSED IN ADULT LIVER, SIGNAL = 1.2; EXPRESSED IN FETAL LIVER, SIGNAL = 1.4; SWISSPROT HIT: P19484, EVALUE 3.90e+00; NT HIT: AL163208.2, EVALUE 0.00e+00
tcacctttgcttgcactttgttaaacctacctggagcaggtggcaagattctgggatcgagaggcaggtggaggagttggaagggtcaattcccgtgttctgcctggggtaactgagactgaatttggaggccatgtctgcagccctggctgtcctgagtgtgctgccaaagcatccgactgcattgctttcagggcaaaggtaattatgtgttctggagaagccctactacttttcagattgagcaaatcctgaacaggtgcagccctaatccaaggctttgggaggagctgctggagacccagctgcgggtgctggcacgcttccagaggaaagcaggaagcaagaagactgttgcgggaagagccaaaagtgcaacgtttcagtaccaaaaagatcgttggcacagaaacaatgaaatgcatggcctggccttttttgtctccctgccatcttgctgtaaaatgaggtggtccctggaaagcccagcacaggaaagctagatatatagagtctgtggatcatccagtgatgacgctgaacat

SEQ ID NO: 5393 - DNA, 557 bp, Homo sapiens
  MAP TO AF207953.2; EXPRESSED IN BONE MARROW, SIGNAL = 0.88; EXPRESSED IN ADULT LIVER, SIGNAL = 0.9; EXPRESSED IN FETAL LIVER, SIGNAL = 1.1; EXPRESSED IN BRAIN, SIGNAL = 0.85; EST_HUMAN HIT: AW363667.1, EVALUE 1.00e-67; SWISSPROT HIT: Q14541, EVALUE 4.00e-25; NT HIT: AF133496.1, EVALUE 0.00e+00
gccaggggttaaaaggaaagcaccagtgtggggtctccaagaagccaatgaatggagtgttatgagcctataaataattagtaggacaatttagtcaggaaatagtactaactctaactgtaatcttccttttttattgacagatagttctgccccagagacaagtatgaataccacagacaacggtgtcaactgtctgtgtgctatctgtggggacagagcaacaggaaaacactatggggcatccagctgtgatgggtgcaagggtttcttcagacgcagcattcgtaagagtcacgtttattcttgcaggtactttaaatgcccttttaggcaagttatctttacagatgtttcagtttggcacgcaaaaagtaagagaagaaaattcagagttttcgtatatctgtaagtctataaatacaatctctaaactgcggtacaagtaagaacgtgtgggtatgtacacaggatgtattcacataggtgttcttttttatgaaacattttagacttacagaaggtatataaaaaatccacctacctaccacccagct

SEQ ID NO: 5394 - DNA, 563 bp, Homo sapiens
  MAP TO AL022069.1; EXPRESSED IN HEART, SIGNAL = 1.5; EXPRESSED IN BONE MARROW, SIGNAL = 1.2; EXPRESSED IN PLACENTA, SIGNAL = 0.76; EXPRESSED IN ADULT LIVER, SIGNAL = 0.97; SWISSPROT HIT: Q15349, EVALUE 6.00e-21; NT HIT: gi13642626, EVALUE 5.00e-72; EST_HUMAN HIT: F06080.1, EVALUE 1.00e-67
tctctgacccagcacaaatgatccaaccatccccccgactctcatgaccttccctggcaggacgtcgtgtccaagatgctccacgtggaccctcatcagcgcctgacggcgatgcaagtgctcaaacacccgtgggtggtcaacagagagtacctgtccccaaaccagctcagccgacaggacgtgcacctggtgaaggtaccggcaggcgacagtgaggacagagtggtgggaatgggaaacccagaaaagagcctgataccttgcaatcactccgaagaaaccacagagtgcagagaaagagcccatagcagccccaaactgcaccgccggcccacctaccttcgtgcacttcaccagacacgtgcagtattgcacagggctcctacctgagtaggtggcagcctctgctgacgtggtggcagctggtgtggctgttccactcaagttcaaagcctctattctaggccacacatgcaaaaaaagtccccttcataagtgacttacattcaggcagcagtagcctctcaggcaccccatcctctgggtgggactccttttct

SEQ ID NO: 5395 - DNA, 529 bp, Homo sapiens
  MAP TO AC016545.4; EXPRESSED IN PLACENTA, SIGNAL = 2.5; EXPRESSED IN ADULT LIVER, SIGNAL = 2.3; EXPRESSED IN HEART, SIGNAL = 2.5; EXPRESSED IN FETAL LIVER, SIGNAL = 2.2; EST_HUMAN HIT: AI926297.1, EVALUE 4.70e-02; NT HIT: AF007544.1, EVALUE 1.30e-01
tagcagtatgtgctgccctggcccctttcaggctgaagatactgtagctggcagtcctagtgtggggaagtgccaagtcaagttggaaagcaagacttttagacaagatgaccagcaaaggtggggccacagagctgggctcgaccagactgctgtgctccgtgtttatagcacggagcccatctccaaattaaatctcctggacttgtcacttggggtaaggtgagggagagcaaatcaacagaacacagaagcaagggaacatgagcccttttcctaatctcgatagctggaggcccaaggaatcccgagaacattagttctaagtttaaccagtagggtccataaagaagttttctcccaccattaagcaaaacggtatagtggggaagtgtttgggctctgaattgatcaaggcagttcaagtcctctgccgccatttgctagctgcgtggtggtgggcaagtttattagtctttaaacctcaattttctcatctgtaacatagagacaacaatggaacctgcct

SEQ ID NO: 5396 - DNA, 566 bp, Homo sapiens
  MAP TO AF035396.1; EXPRESSED IN PLACENTA, SIGNAL = 1.3; EXPRESSED IN ADULT LIVER, SIGNAL = 1.1; EXPRESSED IN HEART, SIGNAL =   2; EXPRESSED IN BRAIN, SIGNAL = 1.2; EXPRESSED IN FETAL LIVER, SIGNAL = 1.4; EST_HUMAN HIT: AA983371.1, EVALUE 0.00e+00; NT HIT: AF045451.1, EVALUE 0.00e+00; SWISSPROT HIT: Q13506, EVALUE 2.00e-47
tctcgagaaacctgcctagccaaggcaaagagcattatccttcacacagagttgagcagccgcttcattaacagtgagctcatgaagcatgagatgttttccatccttcctctttgagtcaaatctgccatatattcactgtatttccaaatttcctcctctttgcgtggatcattatcgttcatctcaaagatgtgaccaagcattttggccaacgtcttgttggtttttagcagctttttcacttcgttcaagtcacttttcggcagtgtgggggccatccgctccacacactctgccacagagagcacagcagcagcatccagtgcctcgctgctctcctttggggacgtgtgggagcccaggtctgctggggagaggctgtgctcgctcttggtggcatggtggccttgccagagtctggactcaccagcactctgcagtgctaggctcccgaccacatctgacttcccctgtcccaagctctgcacacaggtggtggcaaaattggggaaattgggtggtaaattgggtggtaaaaaagttgggtggtaaaattggggatt

SEQ ID NO: 5397 - DNA, 596 bp, Homo sapiens
  MAP TO AL117337.25; EXPRESSED IN ADULT LIVER, SIGNAL = 0.81; EXPRESSED IN BRAIN, SIGNAL = 1.8; EXPRESSED IN HELA, SIGNAL = 1.5; EXPRESSED IN PLACENTA, SIGNAL = 0.89; EST_HUMAN HIT: AW390297.1, EVALUE 0.00e+00; NT HIT: M19441.1, EVALUE 6.00e-78; SWISSPROT HIT: P51523, EVALUE 3.00e-45
ggggagaaaccctttgaatgtaataaatgtgggaaaacattttactataaatcagacctcactaaacatcagagaaaacacacaggggagaagccctatgaatgcacagaatgtggcaaatcttttgctgtgaattcagtcctcagattacatcaaaggactcacacaggagagaagccctatgcatgcaaggaatgtgggaagtccttttctcagaagtcacattttattatacatcagagaaaacacacaggggagaagccctatgagtgtcaggagtgtggggaaacctttatccagaagtcacaactcactgcacatcagaagacacacacaaagaagaggaatgctgagaagtaagatgagttgggaaattctcttgactgaattaatccttcaaaacaatcagataattcacacaagaggtacaccttatgaatcgcatcaatagagggaaattttcagctacaatctttgctctctctgtgtatcagcaaatacatagagagattctgtacatttatttgggagaaaattttatcatattttaggcttttctaaatattagataatatagatggcagaagtcatgcaaa

SEQ ID NO: 5398 - DNA, 567 bp, Homo sapiens
  MAP TO AF044083.1; EXPRESSED IN PLACENTA, SIGNAL = 2.1; EXPRESSED IN BONE MARROW, SIGNAL = 3.3; EXPRESSED IN ADULT LIVER, SIGNAL = 1.8; EXPRESSED IN LUNG, SIGNAL = 2.9; EXPRESSED IN BRAIN, SIGNAL = 2.4; EST_HUMAN HIT: BI544608.1, EVALUE 2.00e-51; SWISSPROT HIT: Q08828, EVALUE 1.10e+00; NT HIT: AF044083.1, EVALUE 0.00e+00
tgtgtggagtcttggcagagcagctgctcagacacacacagagacccacgagctttacatactctggcccagggcggagcgcaggaagggccccaaaacagatcatatcacaactgttgttctgggagaaagtaaaagtcaaaaaagcattgcatttagttcaggtttcagccaaactgcgagataccacgttatttaagaggcaggcggaggaaggaaacctaccgctttggaagaggcggaggaaatcgctttcttccctgtgactcagccctggaggaatttcccttttgaaatcttgcggtgttgagtaggaccgccaggccggcaagcaggaggcggcctcctcgtaaccgccaggcggcgacacctagggcggcgcggccaggaggcgggaccccttctcccctcgctgttccccctcgcgccccttctcccctcgcggttccccctcgcgccccttctcctctcacatttccccctcacaagccttctcccctcctggttccccctcaagcgccttctctcctcaaatctccctcagcttccttctctccctcccatttc

SEQ ID NO: 5399 - DNA, 556 bp, Homo sapiens
  MAP TO AF044083.1; EXPRESSED IN PLACENTA, SIGNAL = 1.7; EXPRESSED IN ADULT LIVER, SIGNAL =   1; EXPRESSED IN BRAIN, SIGNAL = 1.2; EST_HUMAN HIT: BE139127.1, EVALUE 0.00e+00; SWISSPROT HIT: P96069, EVALUE 9.00e+00; NT HIT: AF044083.1, EVALUE 0.00e+00
atatgagccaatgcccagaggtaggacagcatgaagggtctaacgagagtgagtggacaggccttgctggactataagtgaaaagtagtatcagaaatgatatcagaaaagtagattggggcccaattgagaagtcccttgaatgccatagtaaataaagctttaattatttatcttacagacaatgtggagcccttggttttaaagaagagcatcaaaattaaatttcttctttcaaaattttattctccccagattaacgaatattattcaagttataccttcagtttcaccaaaggtcatgtctcaatccttctcctctacaggaaagcaattctaaaaaaaaaaaaaaaagggaaaagaaaaacctcagataaaactggttttggtaggactactctcaggcaggacagcataagatacaagaatcaaatgactggcaatagaagacttattaagattaaaactgtactggtcatcagataagtgactagatctgatttgttcaaattagagtttgtaatttattttgaatacaaagcaaggcatggtcatt

SEQ ID NO: 5400 - DNA, 527 bp, Homo sapiens
  MAP TO AC034211.3; EXPRESSED IN LUNG, SIGNAL = 3.1; EXPRESSED IN BRAIN, SIGNAL = 2.8; EXPRESSED IN BONE MARROW, SIGNAL = 2.4; EXPRESSED IN PLACENTA, SIGNAL = 2.6; EXPRESSED IN ADULT LIVER, SIGNAL = 2.2; EXPRESSED IN HEART, SIGNAL = 2.8; EST_HUMAN HIT: AW302996.1, EVALUE 8.00e-10; SWISSPROT HIT: Q51463, EVALUE 3.70e+00; NT HIT: AJ243213.1, EVALUE 3.00e-05
  unsure 380
cataccaccacaccaacaggactccagtattataacagtggactgcagttgaaagagctgaagatgcagactatctctgagaagaatttaggaaagccaaaatttcacagcagagacaaaagcaaggacaacaggagggagtttgaagcttctgacacctacagctacaacaaacattaaatatagcacaattacttacccaaatgaacatcttcacactaaaagtctattctcttcagttcctatcacctgatacatgtccagctttacaacaagaaaattacaaaggtataccaagaaagcaaaggaataaaaacataagattaaaataagtaagacaacacacgacatcacacacaccactcacatacaacactaangcacaacaagagtagttacacagatacaatcaagaacacgagtacaagctcatatatgactctaatatattaaagatactaatggaaaaagtagactatatgcaagaacagatgggtaatgtaagtagacacagggaaactccagga

SEQ ID NO: 5401 - DNA, 575 bp, Homo sapiens
  MAP TO AC010209.13; EXPRESSED IN BRAIN, SIGNAL = 1.1; EXPRESSED IN BONE MARROW, SIGNAL =   1; EXPRESSED IN PLACENTA, SIGNAL = 0.81; EXPRESSED IN HEART, SIGNAL = 1.3; EXPRESSED IN ADULT LIVER, SIGNAL =   1; SWISSPROT HIT: O43903, EVALUE 4.00e-17; NT HIT: AJ006345.1, EVALUE 3.00e-21; EST_HUMAN HIT: AW937747.1, EVALUE 0.00e+00
agggttcaagctcctgtgagaatctgatgccatcgctgatctgacaggcagagctcaggtggtaatgcttgcttacccactactcacctcctgctgtgtggcctgattgctaacaggccacagaccggtaccagtctgtggcccaggggttggggacctctgctttaaagtaaaataaaatagttttcaaaactatcttttttctctaaaattgtgtactttttggttacaggtgatggattgaacatttatttagcaatatcaaaatgaatgtttaatgaaagtatccttgatacatttttgaaattattcttttgtcttttccagaattttccaatgagaaaagtgccctgtaagaaagatgctgcatcaggttcattctttgctcgggacaataccgcaaacttccttcactggtgtagggacattggggttgatgaaacttacctctttgaatctgaaggtttaggtaagtgatgttcttgtcattcttgtttttaatgcttactaggatgttttaatatccttcacctctaatttttctttccaaataaggactcaaatgcctcatctca

SEQ ID NO: 5402 - DNA, 503 bp, Homo sapiens
  MAP TO AC004264.1; EXPRESSED IN BRAIN, SIGNAL = 1.4; EXPRESSED IN PLACENTA, SIGNAL = 1.8; EXPRESSED IN ADULT LIVER, SIGNAL = 1.6; EST_HUMAN HIT: BG333052.1, EVALUE 3.00e-74; SWISSPROT HIT: P13725, EVALUE 5.00e-15; NT HIT: M27287.1, EVALUE 1.00e-81
caagagggctggactctgtcttgctcactgctacgtcccagtgcctagaccagagcctggcaggtgtgcaggaaacacactgagtaagcaggtgagcatggtgatggtgtccggagtcccgccccgggaccacagagctaggaaagctggagggccagccttagctcctcagggttaaggctggaataacatagcgactcagttccccgacctggccatatggagtggggctaggcctgtcctccctgcttctcactcccttcctaaccccatagttctctgagactcagatgccacaagggcccaggtgcttacataggggtccaggagtctgctggtgtcctgcatgagatctgtctgcttctggagctggccaaggagcacgcggtactctttcgagcagctgcctatagccgccatgctcgccatgcttggaaacaggagtgcaaggaccagacctaaggcagagaagaggggtgtcacctgacttggtgaggaaagcc

SEQ ID NO: 5403 - DNA, 552 bp, Homo sapiens
  MAP TO AC034103.5; EXPRESSED IN BRAIN, SIGNAL = 1.8; EXPRESSED IN LUNG, SIGNAL = 1.4; EXPRESSED IN FETAL LIVER, SIGNAL = 1.5; EXPRESSED IN PLACENTA, SIGNAL = 1.4; EXPRESSED IN ADULT LIVER, SIGNAL = 1.7; EST_HUMAN HIT: BG288236.1, EVALUE 4.00e-52; SWISSPROT HIT: Q49430, EVALUE 7.90e-01; NT HIT: AF224669.1, EVALUE 7.00e-28
tggccaataggagacaggactaacgtgcagctcccacttggatggacagaacagtgtgtggagattcattttgtgaacttctgcttcaaggaccactgcaagaacataccagaaaaaccgaaaaaattcacagaccctttgaaagaagcagcttgctactgcaaatgctgcaagacaactggaaaactgtgaagacaaaggacgtaaactcttgggagctctatgaccctgcccattgcctgagaaacccaagtacttatcctggccaacttagggtaagattatatcccccttctattactggagctggtgctctcttgaaagtgccacttcctggctggaggccaaccaactccagccattacagccactcataacagaacaaccctgctccaatgaaggagaagacaacagctaattctactgccagcaataacctggctaatcagaggtcctgagtctgttgaagtgacagcttcactgctagcataaccagcattcaagaaaaccagcacactaaacaaaactacaaccaaggactcccacagagtc

SEQ ID NO: 5404 - DNA, 596 bp, Homo sapiens
  MAP TO AF052656.1; EXPRESSED IN ADULT LIVER, SIGNAL =   1; EXPRESSED IN HEART, SIGNAL = 1.1; EXPRESSED IN LUNG, SIGNAL = 1.4; EXPRESSED IN BRAIN, SIGNAL = 0.99; EXPRESSED IN HELA, SIGNAL = 1.3; EST_HUMAN HIT: BG222050.1, EVALUE 0.00e+00; SWISSPROT HIT: P52958, EVALUE 3.40e+00; NT HIT: AL163267.2, EVALUE 0.00e+00
tgcatgaaagtcagcaggaggtggaggggcctgatgttgagtgtgaggagacccaagatagcctggcaccatcatgaccctctgaaatccatttaatcataactgccctccattgtgcttttgcttttcatctgttctgttccacctcagcatctgaattataaattcctgaaaggactggctgtgttttcttcgtcttgccctcaggatctctgcagttgacatgaacacacctgcacatgcccacacctgcgcccagggcctcacatgcaggaggacttcgtaaactctggtacacaggaagaaaattattgcagggtcgttggacccagaaaagcatcacgggcggaggatgttgaagcttctgaccaggacagagttcttcagttgatagctgtccagaagtttcggcaagacgtttgaaggaaccacaacccagtctaaccaaaggggtggttggtggaaggtgaaggagtcacacacaagtggaaactccagcagagatccaagaaagcaggagtgatgcattttcccccattacgtttttttttttttggtttttgtattaaatatccaccctccctcaaactgttgaa

SEQ ID NO: 5405 - DNA, 517 bp, Homo sapiens
  MAP TO AC005257.1; EXPRESSED IN ADULT LIVER, SIGNAL = 0.41; EXPRESSED IN PLACENTA, SIGNAL = 1.5; EXPRESSED IN LUNG, SIGNAL = 0.79; EXPRESSED IN BONE MARROW, SIGNAL = 0.69; EST_HUMAN HIT: BF988120.1, EVALUE 1.00e-67; SWISSPROT HIT: P14404, EVALUE 4.80e+00
aaagaattccaagtcccaacagtaactgagtcaggaaaggggacgcgccggcgaagtggtccatcctgcccaggataagttactatccacaatcaccatcacttcgaattcaaacagaaaagccaccaaaccccagaaccccagaagcagcatgaaaggagcttctcctgcggagcgctctgctctttcaacagcccgggacaccgtcctgctttattctcttgttgtggacaggctcaacgccctctgcacccaggagcagagcggccgcggccaccctgaggcagcatggaaccgaggcccccacaccgggacctacctccactcccacaactgaggctggtgcagcacactaacacgcaacagggcagaaaccagaaacagccccatccaggaccagaccccggccagccctgcctagtccagccccagcccgtctctgtgctcagtcctgtaacttgcggcccctcagctcagcctggatgtctgtggggtggcacggtcaccattaaaaccc

SEQ ID NO: 5406 - DNA, 500 bp, Homo sapiens
  MAP TO AC000087.2; EXPRESSED IN BONE MARROW, SIGNAL = 1.1; EXPRESSED IN ADULT LIVER, SIGNAL =   1; EXPRESSED IN HELA, SIGNAL = 1.5; EST_HUMAN HIT: AW376112.1, EVALUE 1.00e-67; NT HIT: gi5032208, EVALUE 2.00e-65; SWISSPROT HIT: Q92890, EVALUE 8.00e-13
tactgtgcatcctggctttgtgccaggtgacacagaccaactgaaagaagggcttcattgtggtctccatgaagtgtctggaaagtgacagaggtggcccagacagcacccagtgcacttggccagggccacgcagatgtgctagctgaaccccattattctcaaatcacaacttgaatcacaaatgtgtgatccccaaagcaggcacagattcaatacagtacatgatgtttaacaaccgccagcacactctcctttgtctagaagaactccgcttatttgaaaaagatacacggctttggggttggtgatgtccaggaagtcagggctctgaggttggaatttggagtaggtggccacttgaaggttgacgctctccacctggaccaggccgccttcttccaagagtaagttctgcatcatctgaaaggaagaagaggctacatgagactcctagagatgaagcagcctccacaaccactgctccctatacactgggc

SEQ ID NO: 5407 - DNA, 501 bp, Homo sapiens
  MAP TO AC000007.8; EXPRESSED IN BONE MARROW, SIGNAL = 1.4; EXPRESSED IN PLACENTA, SIGNAL = 4.7; EXPRESSED IN ADULT LIVER, SIGNAL =   2; EXPRESSED IN HELA, SIGNAL = 6.1; EXPRESSED IN FETAL LIVER, SIGNAL = 8.2; NT HIT: gi16162115, EVALUE 7.00e-68; EST_HUMAN HIT: BG940264.1, EVALUE 1.00e-67; SWISSPROT HIT: P42568, EVALUE 4.10e-01
tcaacagtcagtcctgccacttggcatacttttccaaggacaaggacatctaatgtgactttttcctataaaaatttttagaggaaaagcctctttctgagaaaaaggagaaacagttccctgtaaagtgtgtgtaggcataccaaggagaccctgcatcaaatgaatgtgaccatctactgccgtttttggtgtttcacacctttgctgtgattatcccagcagggcttgtgaaagagtctgacttcatcacaggcaacccctttccttccaagatactcacctgcgacttcggctgcctcctctatttacaggcctctccatttcagagtcattgtcgttatcctccacttcatctgattcctcctcattgtcatcagaatgcagatctttcattatagacctcaaaggacctgagtaatgacaatgaaccacaggcaatcaaacatatactcaaacacacttagccatattagaaacagggggatgcttaccagcact

SEQ ID NO: 5408 - DNA, 573 bp, Homo sapiens
  MAP TO AC010267.5; EXPRESSED IN BONE MARROW, SIGNAL = 1.6; EXPRESSED IN HELA, SIGNAL = 1.3; EXPRESSED IN BRAIN, SIGNAL = 1.5; EXPRESSED IN PLACENTA, SIGNAL = 0.99; EXPRESSED IN ADULT LIVER, SIGNAL = 1.7; EXPRESSED IN FETAL LIVER, SIGNAL = 0.9; SWISSPROT HIT: Q21313, EVALUE 5.50e+00
aaatgcttcaggacaggcactatgtcccttattttaggattcctgcttcagttagttcattagagttgagataatccatgctaagagcccaggattagaaatttagcccattaaaaaatactaagccatgaggataaaaaatattatatgtgtgttacctacttacatctttatacttattccaatgccttgttgaataaaaggacagccttctttcttctttttcatatcaggattgacattaatcatggcatctacttgtcctccattcactttattatgaaaatcattgggatggaggaggaaaagtcagtcttccataatcagcctggctgtttctgacatttttaggagaaacaaaaggaatgtaattactattattatctattttttcagaaatgcaagataatttttaatttatcctctatgacacccttcttgttttctctgccttctgaagagttgacatcagtggggaactacatttgaagtccagcaaatcaatcttttattgagatttcaggatccaaacttgcataaactgcttcattcagacagcttttctgcctttgc

SEQ ID NO: 5409 - DNA, 566 bp, Homo sapiens
  MAP TO AC010615.5; EXPRESSED IN PLACENTA, SIGNAL = 1.6; EXPRESSED IN HEART, SIGNAL = 1.8; EXPRESSED IN ADULT LIVER, SIGNAL = 1.8; EXPRESSED IN BRAIN, SIGNAL = 1.7; EXPRESSED IN FETAL LIVER, SIGNAL = 1.4; SWISSPROT HIT: P11930, EVALUE 3.00e-25; NT HIT: gi14861847, EVALUE 3.00e-27; EST_HUMAN HIT: BF742321.1, EVALUE 1.00e-116
ttcctgtctctacgttgggcaatacagccatgcagcccagggcactgaatgtgaatactaacaaaagcaccgatgcttcactggtttacctggtaaaagatggaccatcccatcagcagttaacaagatgatcggcagccacctttccagtccttctaatgcacgacccaaacaaaatttgtgcaagtcagagagagaggcaaagtttgcaagtcttctcacttcgtagaactgtgggggtggcaaccaaatttcttttgataagaaactttcagttgcctctgatggagatgaccactgtgaaagacaaaggcagggtttcttaaggtttatgccatagacaatgtgagacttgagacagtcagaccagtacctaaggtagaactgaatgtgtaaaatgaattcattaatgcgccctgtgagatccctcaaagacaacatgaaaagattcagtgaagaaagctgggttgatcctcttaagaggttgcttattaggacactgatcctcagaactagtaaataaaccagggcagacccctgaggcttgacctgggagagctgttcag

SEQ ID NO: 5410 - DNA, 536 bp, Homo sapiens
  MAP TO AC040163.3; EXPRESSED IN BONE MARROW, SIGNAL = 4.9; EXPRESSED IN PLACENTA, SIGNAL = 4.6; EXPRESSED IN ADULT LIVER, SIGNAL = 4.7; EXPRESSED IN HEART, SIGNAL = 2.9; NT HIT: AL163303.2, EVALUE 1.00e-44; EST_HUMAN HIT: AL521707.1, EVALUE 3.00e-83
tgggaatttggaagaggttgattccaatcctcatggatggctttgaggggttcaaaacttcagtaggggaaataattacagatgtggtggaaatatcaagagaactggaattaaaagtggagcctgaagatgtgactgaactgctgcaatctcatgattaaacttgaaaggttgaggagttgcttctcatgatgaatttaaaaagttgtttcttgaggtggaatctactactggtgaagatgctgtgaacgtcatggaaatgacaatgaaagatttagaatattacataaacttagttgagaaagtagtggcagggtttgagagaaatgactccaattttgaaggaatttctaccatgggtaaaaatgctgtcaaacagcatgggatgctatagagaaatctttcatgaaaggaaaacttaaagcagcaaactttattgttgtcttaagaaattgccacagccacatcagccctcagcaaccactgtcctgatcagtcaacaaccatcagccaccaccttgatcagtcaacagcca

SEQ ID NO: 5411 - DNA, 578 bp, Homo sapiens
  MAP TO AC012310.4; EXPRESSED IN FETAL LIVER, SIGNAL = 1.8; EXPRESSED IN BRAIN, SIGNAL = 1.5; EXPRESSED IN HELA, SIGNAL = 1.6; EXPRESSED IN BONE MARROW, SIGNAL = 1.4; EXPRESSED IN ADULT LIVER, SIGNAL = 1.7; EXPRESSED IN PLACENTA, SIGNAL = 1.9; EXPRESSED IN HEART, SIGNAL = 1.6; EST_HUMAN HIT: AA830006.1, EVALUE 2.10e-01; NT HIT: AB018543.1, EVALUE 2.20e+00; SWISSPROT HIT: P29315, EVALUE 4.00e-06
tatctaccaccccagccttgaggccttgttctatctctgctagaagctcacatatgagttgaccaaaaaattcattacttcctggggtcctcgtggaaattaagtttcttggcaaaagctccagagacgggatcaacaaatccaggatgctactctgaatctgttttagagcaattcctggcacatagtaattactcaatgaatgttactttttaataatataaatagatatcaaatgaagaaaccattgttctagatatctgtgcccatagagtcatatctagaaatggaagtagggaaaacttactccagtctctctaaggcacacttggggtgagtcagggccgcacacaatagctttatgccatcatcttggagccgattaaatcccaggcacaatcgagttacgtgttggatgctggtgagaaacaaggctaggtcctgacagctggctgccgacaagttgcatttctccaggctgtggaaggtgcaggtgcaaggtgagcctcagccatgatgcccaggttcctctacctttctctctcaaccccttaacccccgagacccaaacattatgg

SEQ ID NO: 5412 - DNA, 501 bp, Homo sapiens
  MAP TO AF238375.1; EXPRESSED IN PLACENTA, SIGNAL = 2.1; EXPRESSED IN ADULT LIVER, SIGNAL =   1; EXPRESSED IN FETAL LIVER, SIGNAL = 1.9; EXPRESSED IN BRAIN, SIGNAL = 0.94; EST_HUMAN HIT: AA535990.1, EVALUE 1.00e-113; NT HIT: gi5730038, EVALUE 1.00e-109; SWISSPROT HIT: P41997, EVALUE 8.00e-17
cctgtgtaaacaattcccacacttgacttaaacacacacactcaggcgcacagacacacacacacaaatgtattttccctctttttaacctcttttatttagtcatatatcaaaataagaataagaacatttcatctatttttcagtttgtgtatctcctaatatattagataggtgcaaagttaattgcggttttggaccataaattttaaatcattataactaggctcaaacacatttttattaatcaaaataggaatgattacaatcgacccatttttgccaatgagaaataagtttgtttattcctgtagcgtaaaaatccgtgctttgggatttgatgaactcttggaaagcattttctgcatcctgctggttgtggaagcattttccctgcaaaaagttgtcaagatgcttgaagaagtggtagtcggttggcaagaggtcagctgaatatggtggatgaggcaaaacttcatagcccaattcattcaacttttt

SEQ ID NO: 5413 - DNA, 575 bp, Homo sapiens
  MAP TO AC016606.6; EXPRESSED IN PLACENTA, SIGNAL = 8.6; EXPRESSED IN BONE MARROW, SIGNAL = 6.9; EXPRESSED IN ADULT LIVER, SIGNAL = 8.4; EXPRESSED IN HEART, SIGNAL = 5.1; EXPRESSED IN BRAIN, SIGNAL = 6.1; EXPRESSED IN FETAL LIVER, SIGNAL =  10; EST_HUMAN HIT: BF980091.1, EVALUE 2.00e-69; NT HIT: AF273763.1, EVALUE 0.00e+00; SWISSPROT HIT: P04035, EVALUE 7.00e-28
cctcaatcatagcctctgtggtagtctttaatacctacaaaacagagctgtgtacatttagatgttcctccagaaggttcaggggaatgttacccaaatctatctttctgaacctccagaaaacaaagtttagatgtggccccatttaagccctgtcctccattaaaaaataaaaaaaattaaaaaaaatcagtaaagtttgttcctatggatgatacacacagacagatgggcaaggtacaacagtcatctttgatggaaaacactgtcccatatatttaactttatttaaaatgttaatactcctttcccccatttttaaatacaattaaagattacaaaataaaaaagataaattatccatccagtcactcacttctctgacaaccttggctggaatgacagcttcacaaacaacagattttcctcttccctctatccaatttatagcagcaggtttcttgtcagtacaatagttaccactaacggctagaatctgcatttcagggaaatactcgtgaagttttgaaagtgctttctctgtaccctgttaacaagaacccaaaacacacaca

SEQ ID NO: 5414 - DNA, 549 bp, Homo sapiens
  MAP TO AC000354.1; EXPRESSED IN HEART, SIGNAL = 1.1; EXPRESSED IN ADULT LIVER, SIGNAL = 0.79; EXPRESSED IN BRAIN, SIGNAL = 0.88; EXPRESSED IN BONE MARROW, SIGNAL = 0.57; EXPRESSED IN PLACENTA, SIGNAL = 1.1; NT HIT: gi13095658, EVALUE 3.30e-02
aactgaggggtttccaggtccagatcttggctcatgacattctagataccctggcgaagctatggcactcagacctgagtagatgctagaattcatgttcaattaattcttctagatagtttaccttaattttactcaagacttaagccagaatattgctttatctagtcagataatccaaaaaattgttgaggattagaaaatgtacagaaacaggatccccagtcctacttcacaatgaacctaacatttgaatacattatcctttttactctcacatattttctcaggaaatgaaagactttcacagttgtcacacctatcaaaacacttaattgcatcaatttctctacctcatctccttccttcttcatagctacagtgagcataaaatttaggtacagatacctcaaaaataaaaataaaaagaatgtaaaagtgttaaaatccattaataatttaatttcagcatctgtatggagaagaaatatgctcattgtggagagaactttataacaggttactgtttgcaatcctctgcctttatgg

SEQ ID NO: 5415 - DNA, 570 bp, Homo sapiens
  MAP TO AC005525.1; EXPRESSED IN FETAL LIVER, SIGNAL = 2.1; EXPRESSED IN ADULT LIVER, SIGNAL = 1.9; EST_HUMAN HIT: BG121932.1, EVALUE 1.00e-113; NT HIT: AF320902.1, EVALUE 3.50e-02; SWISSPROT HIT: Q08170, EVALUE 1.00e-07
cgaggagagagatcacagccgatctagaagccccaataagcagagtggttacagtcgacctagagcctccagcaaggagaaagctcatagccgatctagaacccccagcaaagaaggaaatcatagccaatctagaacctctagcaaggagagcgaccccagtcaatctacagtccccagaagtcccgactggaagagatcccctactaggacaagcagtctcagtcagaatagaacccctagcaagacaagcagccactccccatcaacatttcccagtgggggccaaaccctaagccaggatgacagtcaagccgacgccaccacctctaaggccaccttacctggggaaaggtcttcatcatcttcttccaagctggcgtagcccccagtctcagctggctcacgggtctctgtcatgaccgggggaggggacaggagacaggagcagagcagcagctgagcagcgtccctccccggccagctctccacagccacacctccggccacaagttctctaatacaggatgttggcaggtagagagggatgctggatagggggaaaggaaa

SEQ ID NO: 5416 - DNA, 518 bp, Homo sapiens
  MAP TO AF107045.1; EXPRESSED IN ADULT LIVER, SIGNAL = 1.4; EXPRESSED IN BRAIN, SIGNAL = 1.5; EXPRESSED IN LUNG, SIGNAL = 1.1; EXPRESSED IN BONE MARROW, SIGNAL = 2.1; EXPRESSED IN PLACENTA, SIGNAL = 1.4; EST_HUMAN HIT: AU125774.1, EVALUE 2.00e-75; NT HIT: AF107045.1, EVALUE 0.00e+00; SWISSPROT HIT: P07742, EVALUE 8.00e-21
atagcacgtttgcagtctggtgaaaatgtaagccaatattttagacttatctataagacttcctactaggcttatttacttactatctaggggaggcagcaagatgattttaaaatgatatttcgatatgttttattgtgtcatgtacagtaaagtgggttttcttctttgaaaatcatttaggaactttctaaacttcaactcttttttttttttttgccttagtgtctttgtgttgagtaatcatttttgtgactctgcttcatttccttgctctaagttgagacattttttcccccgtagctgttttcttctgagtatgaaagatgacagcattgaaggcatttatgacactctaaagcaatgtgcattgatttctaagtctgctggaggaattggtgttgctgtgagttgtattcgggctactggcagctacattgctggggtaggtttctgccatttgacttttaaagggggattcaagtctaaaagcaaacagattcatggttgagagggca

SEQ ID NO: 5417 - DNA, 556 bp, Homo sapiens
  MAP TO AC026736.3; EXPRESSED IN PLACENTA, SIGNAL = 0.83; EXPRESSED IN ADULT LIVER, SIGNAL = 0.84; EXPRESSED IN HEART, SIGNAL = 0.94; EXPRESSED IN BRAIN, SIGNAL = 0.92; EXPRESSED IN LUNG, SIGNAL = 0.81; NT HIT: AJ271736.1, EVALUE 9.00e-06; SWISSPROT HIT: P13852, EVALUE 5.30e-02; EST_HUMAN HIT: AA804983.1, EVALUE 7.80e-01
agccaatgtcattttctgccattgtgcttcaaagaattgcttggctcctcaatggagatctgactgaagaggaccaggatggaggcaggaggggcaagcaagaagccactgcaacaatcaaggccagaaatggcagcagctgggacagatggtctcagtggaccaggtgagctctgctcatgctagtgaaatgtgctttgaaggcggagtcttccccgctctctaatggctggatgtgggatgaataaagaggaggcatttggcctgaacaactaggaggatggcagggacattttctggggtggggatattgtcggggaggatcctggcttgagggaaaagatggcgacctggttctggacatggcaggtgtaagatcccggatagatatcactggcattggattatgctgcctcccctcaaatagactggagatataaaccccagtacctatgaatgtgaccttctttggaaacagtatctttccagatatagatagttaagctaaattgaagccatccatgctgggttagggtggggcctaaatcctgtgaat

SEQ ID NO: 5418 - DNA, 555 bp, Homo sapiens
  MAP TO AC012315.4; EXPRESSED IN LUNG, SIGNAL = 1.3; EXPRESSED IN FETAL LIVER, SIGNAL =   2; EXPRESSED IN BRAIN, SIGNAL = 1.4; EXPRESSED IN PLACENTA, SIGNAL = 1.8; EXPRESSED IN ADULT LIVER, SIGNAL = 1.4; EXPRESSED IN HEART, SIGNAL = 1.4; NT HIT: U34830.1, EVALUE 8.30e+00; SWISSPROT HIT: Q9Y6J3, EVALUE 6.90e+00
accacctcctgaccagtgtccctgcttcagcctgttttgcacccctcagcagagtgaggctgctccagtctaggtggcattaggtcacttctttgctcagaatacttcagtaacttctgattttccccaaaatgaaattgaaggtctttataataatctactattttttcctgtggcctctcagattcagctcctactcctcctcctctggtccagtcactctggtctccttccattcccacaactatccaagcaaagtcctgcttcaggtacttcatgttctcaagtccttcagccagaacttgcatcagcctgatatgccattgttttctttcctcacctctttccatcctttatttggatatcttcagagtgaggctatccttttattttgtttttaataattatatcttcaccatgcctgttcctggcattccccatcccctcttctttttaaattgttctccctgcaaactgttatcatataatccttatatagatttcactttttctttttgtttatttttcatctctcctaccacgactcaagagccc

SEQ ID NO: 5419 - DNA, 593 bp, Homo sapiens
  MAP TO AC016620.5; EXPRESSED IN ADULT LIVER, SIGNAL = 2.7; EXPRESSED IN HEART, SIGNAL = 2.8; EXPRESSED IN BRAIN, SIGNAL = 2.4; EXPRESSED IN LUNG, SIGNAL = 2.2; EXPRESSED IN HELA, SIGNAL = 3.3; EXPRESSED IN FETAL LIVER, SIGNAL = 4.5; EXPRESSED IN PLACENTA, SIGNAL = 3.5; EST_HUMAN HIT: BF214073.1, EVALUE 0.00e+00; NT HIT: gi15295679, EVALUE 0.00e+00; SWISSPROT HIT: O88342, EVALUE 6.00e-04
ttcaagaaaaggcataaaataaagcatttttagaaaagtaaagtacggttaaatttaaattacacttacgcttagtgattcatcaaagactctcatgagttttccagttacaaatctgaaaattctaacttttctatcagaaccaatagtagctattttcttcccatctggtgaaaaacatacgctggttggataagccttacacttggcaaattcatataaatcagtgtcagttttatattcccagttcacatttttggggaatttatattcatgaggaggcccagtccagtattcaatcatcccagatttgtcagaagacactactgctttgtaaactgggtttagccgtatctgagtaagaggtgatgtatggagtttgtcaaaaatatgaagtggctggttatctcctcggccatcataaatgaaaatttttcctgtactcttttcggaagcagcaactgaagaaattgcatcccctgggcaatagatccactcacactgtccaggaaaatagctaaaatcgtaaagaattgagagggaaaaaaaaaggtcagcacaacaagcaagcatccctccctatcccactacca

SEQ ID NO: 5420 - DNA, 505 bp, Homo sapiens
  MAP TO AC012331.9; EXPRESSED IN LUNG, SIGNAL = 1.8; EXPRESSED IN BRAIN, SIGNAL =   2; EXPRESSED IN PLACENTA, SIGNAL = 2.3; EXPRESSED IN ADULT LIVER, SIGNAL = 2.2; EXPRESSED IN HEART, SIGNAL = 2.1; EST_HUMAN HIT: BI906112.1, EVALUE 3.00e-31; NT HIT: Z73645.1, EVALUE 0.00e+00; SWISSPROT HIT: P01714, EVALUE 6.00e-30
caggaaaactgagccagacctgcccatggctgtgtccacagtcctgctggggccggaggaagtgagtgacacagacagaaaaagggtttgtgtctcacttttccatctgcctgtgtcactgtgagttgagtagcatggttgtctatcaactgatagtaataatcagcctcatcctcagcctgggccccagtgatggtcagggtggttgtgttgcctgatttggagccagagaatcgctcagggatccttgagggccggtcactgctatcatagatgaccagcacgggggcctggcctggcttctgctggtaccagtgttcataagagccttccatgctgtctccctggcaggtgatcctggccatttgtcccaaggccacagacactgcaggcacctgagttggcccagaggaaataacggagcccacaagagaggacaggagaggtgagtctgaggatgagggcctcattcccagaaccccacaccctgcatcactccctatgt

SEQ ID NO: 5421 - DNA, 515 bp, Homo sapiens
  MAP TO AC000068.2; EXPRESSED IN PLACENTA, SIGNAL = 0.62; EXPRESSED IN ADULT LIVER, SIGNAL = 0.76; SWISSPROT HIT: P70362, EVALUE 1.00e-07; EST_HUMAN HIT: AA707209.1, EVALUE 4.00e-33; NT HIT: gi14777015, EVALUE 3.00e-33
cactcctcaacgggtcagagctaaccatggcagcactggcagcaaactctgttgccccaactggccctgagatagatcacaaggtcacagtctcctcatgatgttctgacagcatcttcctcctctttacccagagtcccaggggctgtttgatgccctcctgacaccctggcctgcagtggtcaccaactgcccatcctcccagggcccaggctcactgtaactggacagagccactcacgttcatgtcacactcaatgatggacactgccttgtcgggtttggtctccatcacacgcagttcgtagatctgtggggcaaacacagaaatcagttggatggtttcctggcagcactggagctgtcgctgtccatgttactgtggctctactggctcctgcgaatgacacagcattcatgcccatgacacaacctacagctgcacttcttgctgtgacaacactgccataagggacaggctgccctgtgcccatcgctgaagagatgctgttccc

SEQ ID NO: 5422 - DNA, 533 bp, Homo sapiens
  MAP TO AF238380.1; EXPRESSED IN BONE MARROW, SIGNAL = 1.3; EXPRESSED IN HEART, SIGNAL = 0.94; EXPRESSED IN ADULT LIVER, SIGNAL = 2.3; SWISSPROT HIT: O60829, EVALUE 2.00e-19; EST_HUMAN HIT: BG620603.1, EVALUE 2.00e-66; NT HIT: gi5901985, EVALUE 1.00e-66
ttactggggcttgctaggtgccgggtaatgtactaagtgctgaggatataaatgagataatgatttctgccttgagctcacaatctaatcagggaaattcatgtaaacaaataactgctgtaatgagtgatttacagtaacagaagtatatgtagattgtgaaagtgacaactaagttgtcttaaacagtcgtaggaaaagaaaacttcatagtagagataatattcttccccattttctagtagaaaattccaatgcccattgcactcatgcatcacatttgttagaatacaagcctacagagctttatttaataacactaatttataatttactgcttacttatatcaataacttttttatttatataagaacgtaaagtagaaggtgattgccaggaaatggatctggaaaagactcggagtgagcgtggagatggctctgatgtaaaagagaagactccacctaatcctaagcatgctaagactaaagaagcaggtacgttattcattcggaatggaagtcatggggtt

SEQ ID NO: 5423 - DNA, 599 bp, Homo sapiens
  MAP TO AF205588.1; EXPRESSED IN BRAIN, SIGNAL = 0.76; EXPRESSED IN BONE MARROW, SIGNAL = 0.91; EXPRESSED IN PLACENTA, SIGNAL = 0.77; EXPRESSED IN ADULT LIVER, SIGNAL = 0.91; NT HIT: Z70664.1, EVALUE 0.00e+00; SWISSPROT HIT: P03360, EVALUE 2.00e-41; EST_HUMAN HIT: AW237002.1, EVALUE 0.00e+00
tgaagctgtttggcttcctccgcaggtggctgtaattcactgcaaatgtcatcaaacagaaggcatggctattgcctgtggtaaccaaaaagcaggctctgcagctcgagaggcagcttggctcccagtcacgcctttgaccctgctgcccactgtgtcctttccgcaacctgacctaccagaccacccacaatactccccagaggaagaaaaacaagcttcagatctttgggccagtaaatatcaggaaggttggtggattcttcctgattccagaatctttatgccccaagcccctggggaaactttaatcaatcatctgcattctgccacccatttgggaggaataaaactggcccagcttcttaggagccatttcaacatcccccaccttcaggacttaactaaccaagcagctctctggtgtatggcttgtgctcaggtaaacaccaaacaaggtcctaagcccagctcagtccaccgcctccagggaggctctccccgagaaaggtgggaagttgactttacagaaataaaaccacactgggcagggtataaatacctcctagtgctaatagacaccttttcgggatggacta

SEQ ID NO: 5424 - DNA, 501 bp, Homo sapiens
  MAP TO AF015724.1; EXPRESSED IN ADULT LIVER, SIGNAL = 1.4; EXPRESSED IN FETAL LIVER, SIGNAL = 2.1; EXPRESSED IN LUNG, SIGNAL = 1.8; EXPRESSED IN BONE MARROW, SIGNAL =   2; EXPRESSED IN PLACENTA, SIGNAL = 1.5; NT HIT: AJ229043.1, EVALUE 0.00e+00; EST_HUMAN HIT: AA761191.1, EVALUE 7.00e-01
caccctcactcccagtaagcatattgtgctgtaaggacaatcagatcttgctgattcatgaaagtcacctgcatttttacacttccacataattggaaataaactcatcttgccttacattatttttctttttagctcttgtctctatttgacatcataatacagaagtatatttcatttatttttcatttatctatttacttactttttcattcattaatttgattttactctgtgccttccctgtggggatataggcatcatgaattaggaacttggtttttttcaaaatgatatcccgagtattcaaaatgatatccccattattcagaatactacctggcacataatagacatttcaataaatacttcttgaataaatattgcacttactggttgaaattccctctcactttttgcccaaggcagcctgctaaaggcatactcagaaccagctcaactgttttctttgggaattcctctcagcatcctctcacctcc

SEQ ID NO: 5425 - DNA, 537 bp, Homo sapiens
  MAP TO AC026745.3; EXPRESSED IN BONE MARROW, SIGNAL = 2.7; EXPRESSED IN PLACENTA, SIGNAL = 3.1; EXPRESSED IN ADULT LIVER, SIGNAL = 2.6; EXPRESSED IN HEART, SIGNAL = 2.5; EXPRESSED IN LUNG, SIGNAL = 2.5; SWISSPROT HIT: P00691, EVALUE 4.40e-01; NT HIT: AL163282.2, EVALUE 1.00e-04; EST_HUMAN HIT: AW978317.1, EVALUE 3.00e-03
gacaagggtcagcagagaccagcatcccatgcagccagcactgaaccccacttgagtgatggacctctgctctggtttgaatgtttgtgtgtctccaatatccatctgttggaacctaacatccaatgtgatagcattaagaggtggtgcctttggggaactagtgaagtcagagcactccaccctcttaaatgagattagtgccagcataaaagggactacaggaagcaccatggtcctttttcctttctgcttcttgtcatgggaggatgcaacagtgaggtgtcacactggaaacagagagcaaacgtcaccaggggccaagacagcaggcaccttgatctcagacttcccaatttccaaaactatgattgataaattacccattctaagttgtttttatagcaacctgaatgcaatgagataatcacatatgttaattttcccagcactccatgtttccatttctgaagaatcttggatttaaggggacatgaactacatgtaatgcagagatgaagaaaggcaatctcgcac

SEQ ID NO: 5426 - DNA, 505 bp, Homo sapiens
  MAP TO AF022141.1; EXPRESSED IN FETAL LIVER, SIGNAL = 0.71; EXPRESSED IN HELA, SIGNAL = 0.82; EXPRESSED IN BONE MARROW, SIGNAL = 0.66; EXPRESSED IN PLACENTA, SIGNAL = 0.72; EXPRESSED IN ADULT LIVER, SIGNAL = 0.77; EST_HUMAN HIT: AJ003658.1, EVALUE 2.00e-26; SWISSPROT HIT: P26049, EVALUE 2.70e+00; NT HIT: AJ229041.1, EVALUE 0.00e+00
tgatttcaaaagcggagaggacaccccatgaaattcctctggctccccagtatactgtcccttagttttttcagaatttgtgcctcttgggtgccaaggagacccccacccttgtacaggcagctgtatttggctgcacagctgcccagatggggacggctgccttccccatctgtgtgagagatggtttgtgggcccggcaccgtctgtgtgaagctgacagtgagagaatggaatgtggtgtctggcctcaaaatgcccattacctgtacctctgcctggcgctggatagatgggaagttctcatcatcatggaccgacagggtgttagagtgggaaaaccttagggtgtcatttccttttattttacaggtgagggcattgagtccctgggaggttaaattgcttattggaagtcacgggagcactgggtgtggaacgtgactttcctgatgcgcctggggctcttgcccctatgctgtggtgctctaccagatgccaggtc

SEQ ID NO: 5427 - DNA, 531 bp, Homo sapiens
  MAP TO AC011751.2; EXPRESSED IN BRAIN, SIGNAL = 2.4; EXPRESSED IN HELA, SIGNAL = 2.6; EXPRESSED IN PLACENTA, SIGNAL = 2.8; EXPRESSED IN BONE MARROW, SIGNAL = 2.1; EXPRESSED IN ADULT LIVER, SIGNAL = 2.8; EXPRESSED IN HEART, SIGNAL = 2.8; EXPRESSED IN FETAL LIVER, SIGNAL = 3.3; EST_HUMAN HIT: AA456946.1, EVALUE 4.00e-98; SWISSPROT HIT: P26661, EVALUE 8.50e+00; NT HIT: gi16159560, EVALUE 2.00e-03
tcctgttgatctagggggtgtattctaacagggaactgccaagcctctaaatcctctaaatcaccctctcagctagcttgctgaatttctgcctgaatagaactgagagtggtcactcaaggcactgctcaaacagcaattgagcaactacatttcacccagtgtcctccagaaaaggaagatctggagggtcaggccactctttttcttcaaaataatgaggaggtgcagaagggtagggatgaacctcttcctcctttgctactttagcttcagctggcaaacaaaactgctctgttgcttctgttacttcattatactctccttcctcctcatcattagtgtgaaaaggtttcaaggtggaatgaaccagagcccacccttgtcccattgttacccttgtgtttctgagctccccttcttactcactacagggattgctttaagaatacttgggtgtcctccagcttagtaccacattctcctaccgttactctggtgacccttcaacctgggttcaagtcccatgtt

SEQ ID NO: 5428 - DNA, 533 bp, Homo sapiens
  MAP TO AC000072.2; EXPRESSED IN PLACENTA, SIGNAL = 0.63; EXPRESSED IN ADULT LIVER, SIGNAL = 0.83; EXPRESSED IN HEART, SIGNAL = 0.93; SWISSPROT HIT: P53675, EVALUE 2.00e-30; EST_HUMAN HIT: AA888986.1, EVALUE 1.00e-115; NT HIT: L77569.1, EVALUE 0.00e+00
cctagggagaggggactcacttactgctcctgctggctgactgaacaacttccaggtaagaggaagggtcgtcccctctgatataggagttgatggcttccttcaccaaatctttctggagctgggcttgggccagctgactccacacagcaggctcattgcatctctccgcaaactcatatgcccggtccaggtttccaatgtgctcgatcaggacctaggggttatgagaggacttccattctctgcaacatctagtcagctccaaaaaacagacacatttttgtttggtttcctgttctgcctaaagctgcatgaccatttcacttcagtcagaagcaatcaggtactaagcatttctcagatggacaggttgagggaagagacaagagctattatatgagaagggggatgccgaacaaagaagagacactccaataaagaggcacagagatggagatagccaggttaagctttctgggccgggggtaggacatgggacttgctcctgaccttgggaggaaagacagtgc

SEQ ID NO: 5429 - DNA, 548 bp, Homo sapiens
  MAP TO AC007759.1; EXPRESSED IN FETAL LIVER, SIGNAL = 0.71; EXPRESSED IN BONE MARROW, SIGNAL = 0.87; EXPRESSED IN ADULT LIVER, SIGNAL = 0.96; NT HIT: Y12525.1, EVALUE 2.10e+00; SWISSPROT HIT: P50331, EVALUE 1.30e+00; EST_HUMAN HIT: BE964308.2, EVALUE 1.90e-01
agtagcacacccttcatggctgctctccctctccttctccccgcccccatgtccccattcctgcctcctgggattgcccccgacatagatgacctgcaaccaggttcttactccaggatctgcttgtcgaggtactcaaagacagtgccagaggagtgtaactgaggctggagtatgagctgagtgattagaaacggcttcaaggaccaggagacgtttgaaccagcaaaggctttgctggacaagcagagagggaagtgaggagagacacattccaaggggaggcccagcgcaagcggcagagagaaggcacccagccggtaaaaggattggtaagttgttccctttgtccagatcatgggctgcatgatcaaccctggaaaatgagatgggaaaatagggtgagctgggactcccatgggctcagatgtgccactgtggagtatgagcttcattctgtcagtggtgaggatggtgtgatttggagaagcagttgagcggggaataagggattggatgacagattcggacgaagactgtctggggaa

SEQ ID NO: 5430 - DNA, 550 bp, Homo sapiens
  MAP TO AF198098.1; EXPRESSED IN PLACENTA, SIGNAL = 0.95; EXPRESSED IN HEART, SIGNAL = 1.6; EXPRESSED IN ADULT LIVER, SIGNAL = 1.4; EXPRESSED IN LUNG, SIGNAL = 1.2; SWISSPROT HIT: O74770, EVALUE 4.00e+00; NT HIT: AL163206.2, EVALUE 0.00e+00; EST_HUMAN HIT: BF507516.1, EVALUE 1.00e-107
tttgggaaaatgcaaagtcagctgaactaaatttagcaattaccttttagctgacagggccttctgatgtgggaatcattcttatgcttgctgtgttcctgccagattttgtcattcacagtttttccttctaaagtgaagcagataattggttagcagaattcatagtaacatttgtccagtaagtataagacatttgaaatcaaaacaagttcagcacaggatttgcaacttggtaagtggtatcttaagagagctctagttctaggtgatgcaggaagtcagggaccccgaacggagggaccggctgaagccatggcagaagaacataaattgtgaagatttcatggacatttattagttccccaaattaatacttttataatttcttacacctggcctgtctttactgcaatctctgaacataaattgtgaagatttcatagacacttatcacttccccaatcaatattcttgtgatttcctatgcctgtctttactttaatctcttaatcctgtcatcttcataaggtgaggatgtatgtcgcct

SEQ ID NO: 5431 - DNA, 552 bp, Homo sapiens
  MAP TO AL008727.2; EXPRESSED IN FETAL LIVER, SIGNAL = 1.2; EXPRESSED IN LUNG, SIGNAL = 1.8; EXPRESSED IN HELA, SIGNAL = 1.7; EXPRESSED IN BONE MARROW, SIGNAL = 1.5; EXPRESSED IN PLACENTA, SIGNAL = 1.2; EXPRESSED IN HEART, SIGNAL =   1; EXPRESSED IN ADULT LIVER, SIGNAL = 1.4; SWISSPROT HIT: Q02926, EVALUE 1.40e+00; NT HIT: L19268.1, EVALUE 8.20e+00
accaggatggggaaagaaaggggaaattattttttaaaatagcgtcattaaaggccatctgttgccttcaacgctgtgacttgatggccacgccattgatcacgtcctgagtgaaagagaccttcactttgacacgactgaaataaactcatttaaagcagaaaacctggccgaaacacgggggaaatgctccagggctccaggagaagccgtctgtgcgtgcagccccggtgggatgtaggctggagacagccctgagtcaggaagtccggcgaggccatctgggtccacgtggctttttggtgctgtccccgcagcttgaggcaaggaaggtggagaggcgccgcctgccccgcctgtgtctgcaaggaaccgtgctgactccatgatggctctggcccagccccaggaagccatgacccgcacaacctgaggatccacgaagcccagccagggccggccccgaaccgggtggagagcagtggggggtggggtgggggtggttcttgtttcagtgcagtcaggtggcagccaacccacacatacagccag

SEQ ID NO: 5432 - DNA, 592 bp, Homo sapiens
  MAP TO AC004501.1; EXPRESSED IN PLACENTA, SIGNAL = 0.94; EXPRESSED IN ADULT LIVER, SIGNAL = 0.89; EXPRESSED IN HEART, SIGNAL = 1.7; SWISSPROT HIT: O75363, EVALUE 7.00e-07; NT HIT: AF041260.1, EVALUE 1.00e-32; EST_HUMAN HIT: AU098652.1, EVALUE 3.00e-28
acacgttctccctgatgacccgcagaaggaaccaattctgctgacaactttattttgaacttttggccttcagcactgtgagacaatacatttctgttgcttaagccaccagggcatggtagcccaaggaacaaacgcaagtattttcaaactgagcctgcggcttcgaccctttcatttttttttttttttcaccgtaaacagcatctgcagaccccccttccccacgagagggtagatgcccttcccagagtagcactgaccttcctctaagtgctgaactgtgtgggtcgacaccaccactggaaccccgttcagagcagacgcgttgtcctgaaacagagcacgtggcattgtgagacaaatcttcgggggaaaatcagaagaactcaaggaagaacctctaagatacaagggtgtctcacaaaaaattaaacttaacttaaaggctgtgtttctagaaactccccagttttctatcatgccttggagaaccaaaataactcactccaagagtggactccagttattatgagagcacaccatggtgcctcagctcaggggaccccacactcacaggaagctctgaccc

SEQ ID NO: 5433 - DNA, 540 bp, Homo sapiens
  MAP TO AC026805.3; EXPRESSED IN BONE MARROW, SIGNAL = 1.9; EXPRESSED IN PLACENTA, SIGNAL = 1.5; EXPRESSED IN ADULT LIVER, SIGNAL = 1.6; EXPRESSED IN BRAIN, SIGNAL = 2.4; EXPRESSED IN LUNG, SIGNAL =   2; EXPRESSED IN HELA, SIGNAL = 1.3; EST_HUMAN HIT: BF217767.1, EVALUE 7.60e-01; SWISSPROT HIT: P97445, EVALUE 3.00e-20; NT HIT: Z80133.1, EVALUE 0.00e+00
tttgctaaacagggcatgtgaatgtcttctctcaccgaggtcccctctgccttcttggggttccaggacccagagagggcccccacctggaggagtttaatagtttgttgtgtaggaggccttgggggttggagatctcagtagtggtaggtaacatgagattatggaagaaaagggtttgtgagcctgtggtctgagtggacctctgcacgcccatctgtctccaacagccttcgccgcctgtgccattacatcctgaacctgcgctactttgagatgtgcatcctcatggtcattgccatgagcagcatcgccctggccgccgaggaccctgtgcagcccaacgcacctcggaacaacgtgagtcccacagagcacaccccttcctagcctggctgctctgcctcaggccactttctcctgcatccaaaatgctcataggtagggtgggatgttggggtcacccctaggcatagcccttatggctgctggttgagaggggaagctctgattccttggggatgctcttgggagcaagac

SEQ ID NO: 5434 - DNA, 597 bp, Homo sapiens
  MAP TO AC004800.1; EXPRESSED IN PLACENTA, SIGNAL = 0.74; EXPRESSED IN ADULT LIVER, SIGNAL = 0.6; EXPRESSED IN HEART, SIGNAL = 1.9; EST_HUMAN HIT: AA873651.1, EVALUE 1.00e-86; SWISSPROT HIT: P34413, EVALUE 1.10e+00; NT HIT: gi14749514, EVALUE 9.00e-03
cctgaatggtcccatatttccaagtggcctagattattaaaagtaattgatttgtaataatagtaattattatgggtcatatagtatgttaaacactcttctccgattatctcatttaaccatcatcaataactctataagatagaggctatttttttttttaacagacaaaaaaacaagtgaggaaggtagattagcaaaagttacagtaaaaaaaataaaataagttgactgtttctgtgcaaaaattttgagtttcagattttaaaaaaacctagagcaaaaactcatattagtaaagaaggaaaaaggaaacattcataccgctttttccatgaagtcaaattcgggagcacaggtgtatattaaagtatcaaaatctgtataccttaagattctggctgctataagatcactcaggcgaatctgggagaaaataaagtaaaatgaattaaaattacacaaatgattatagcctacagccagtaatactttattgatgtaagaataacaaagtttatagagcagataaatccaatgtatttagacatccctctaagaaaaaaactacagtgaaccaaatataccatgtgctga

SEQ ID NO: 5435 - DNA, 568 bp, Homo sapiens
  MAP TO AC005782.1; EXPRESSED IN LUNG, SIGNAL = 2.2; EXPRESSED IN BONE MARROW, SIGNAL = 1.6; EXPRESSED IN ADULT LIVER, SIGNAL = 1.6; EXPRESSED IN PLACENTA, SIGNAL = 1.3; SWISSPROT HIT: Q91187, EVALUE 2.40e+00; NT HIT: gi15305434, EVALUE 6.00e-87; EST_HUMAN HIT: BI011307.1, EVALUE 0.00e+00
tgcacatcaaaacttgtgggtacagctaaggctgtatttagagggaaatacatagccttcggtacatacatttaaaaagaaagggaaaggacaagatccacaggaaggtataagacagcaagatggaacagactggcccaactcacctcatcacctcaatgtagcccttggcagcagccacgtgcagggcagaggcgcctgtgcgggggtgccgggcctctggcatggcgcccccattcagccagcacctcgtgtcatgaaggagcaattcctcttctgcccgcttggctgcttccacatccacacctaggaggataagaggcacgaggtaggactcacaccccatgacctgaaatacccagggtcatacactgggctggccagggttcagcccagtgacttgcccagagctcttccccctgctcccctctgagactcaggaggcccagactagcccagttgtttcccaactgtactccatgcagtcgtgtgtcccactcagggtctctgagtcagcgctaagcactgggaaaacggagatcacaggcctttccccatttcaaccaga

SEQ ID NO: 5436 - DNA, 552 bp, Homo sapiens
  MAP TO AF031075.1; EXPRESSED IN BRAIN, SIGNAL = 1.2; EXPRESSED IN LUNG, SIGNAL = 0.76; EXPRESSED IN HELA, SIGNAL = 1.8; EXPRESSED IN BONE MARROW, SIGNAL =   1; EXPRESSED IN PLACENTA, SIGNAL = 1.3; EXPRESSED IN ADULT LIVER, SIGNAL = 0.91; EXPRESSED IN HEART, SIGNAL = 1.3; NT HIT: X94628.1, EVALUE 0.00e+00; SWISSPROT HIT: P51608, EVALUE 1.00e-34; EST_HUMAN HIT: BI857780.1, EVALUE 0.00e+00
cacggtcatttcaagcacacctggtctcagtgttcattgtttatgttccccccgaccccaccctgggcacatacattttcctgctccatgagggatccttgtccctgccctccctgccctgtagagataggagttgctcttacttacttgatcaaatacacatcatacttcccagcagagcggccagatttcctttgcttaagcttccgtgtccagccttcaggcagggtggggtcatcatacatgggtccccggtcacggatgatggagcgccgctgtttgggggaggcagaagcttccggcacagccggggcggagcctgacccttctgatgtctctgctttgcctgcctctgcgggctcagcagagtggtgggctgatggctgcacgggctcatgcttgccctctttctcttctttcttatctttcttcacctttttaaacttgaggggtttgtccttgaggccctggaggtcctggtcttctgacttttcttccctgaagtgttaaacaagtatgtaagtatcacagagaacatgccagtctgcagaa

SEQ ID NO: 5437 - DNA, 571 bp, Homo sapiens
  MAP TO AC025458.3; EXPRESSED IN LUNG, SIGNAL = 1.9; EXPRESSED IN BRAIN, SIGNAL = 1.9; EXPRESSED IN PLACENTA, SIGNAL = 2.4; EXPRESSED IN HEART, SIGNAL = 1.8; EXPRESSED IN ADULT LIVER, SIGNAL = 2.5; NT HIT: U24578.1, EVALUE 8.50e+00; EST_HUMAN HIT: AA651688.1, EVALUE 2.00e-01
tgtccttgaaaggaacctgcttctgttgatatgtttatgtggtttccggaggtggggggttgggggggcaggggcaggagtggggagtgatatgtgtattgcctggaaatttacaagtcagtttgagcctgatttattgagactttatgaaaagttaaaaaaaaagtcacctatccagtttcctgacaatcctaggttaaagattgatgaaaacaggcttttctgtttcaaacactgaccctgatggctgactctactgctatcacaacatgtttcatggtagttttgaacatctttttctaaaatccaaacctctctctccctttgtcttgtctgtctgctaatttagacaagctgcgtcgtatatttttgtcattctggatatttgtcgcttgtgtcatctattccagcagtggtggcaatggggccaagtttggtgtctattaacttgctttatcagccaccatgggaagttggggacgtgcctgcattccaccttgccagtgcatgctatggaggagaaaatgtgagtggttctatgcacatctatccacattgcctgaagtgcaat

SEQ ID NO: 5438 - DNA, 543 bp, Homo sapiens
  MAP TO AC002497.1; EXPRESSED IN ADULT LIVER, SIGNAL = 5.1; EXPRESSED IN HEART, SIGNAL = 4.8; EXPRESSED IN BONE MARROW, SIGNAL = 2.3; SWISSPROT HIT: P23960, EVALUE 2.00e-05; NT HIT: AF240786.1, EVALUE 3.00e-76; EST_HUMAN HIT: AW962073.1, EVALUE 6.00e-88
atgttgcccagtctggtctcaaactcttgggctcaagcaatcctccagccttggccccccagcgtgctgagattataggcttaagccaccacacctggccaccaaagcacctctttcttatgttggctgttaccaaagcctatcagacattccctctattaaccctacaaccacagaccctgtccttacctgcaaattcacgaacacttcctcaggcccaggaagaactggacgacttctgtctacctatactaccagcaaatgattaagtcagactgtcaggacgtctacaaccctcttattatatgtttcctatattctttcaactctgatcagttgttgggggaagtcagggaccccgaatggagggactggttgaagccatggcagaagaatgtgaattgtgaagatttcatggacatttattagttccccaaattaatacttttataatttcttatgcctgtctttactgcaatctctaaacataaattgtgaagatttcatggacacttatcacttccccaatcaatatccttgtga

SEQ ID NO: 5439 - DNA, 564 bp, Homo sapiens
  MAP TO AC004184.1; EXPRESSED IN BONE MARROW, SIGNAL = 1.1; EXPRESSED IN ADULT LIVER, SIGNAL = 0.56; NT HIT: AB031010.1, EVALUE 0.00e+00; EST_HUMAN HIT: AI379535.1, EVALUE 9.00e-10
caaaaggtcacagaaagctatggtaactaattattaattagttattaattgttaataaataaataataaaattattagttaattattaataagttaatttattattaaagaaagaaaatgttaaaatcaatttagtgtagcctaagtttataaagtctaagtagtgtacagtaatgccctagccttcacattcactcaccactcactcactcactcacccagggcacttctagtcctgcaagctccattcatggtaagtgtcctagacagatacgccattttaaagatctttttattaatcacatttttactgtaccttttctctgtttacacatgcttagatccacaaatacttaccattgtgttagaattggctgcaatgttccatacggtaacatgctatataatttgtagcctagaagcaatgggcttatcacgtagcctaggtgtgaagtaggttataccatctaggttcatgtaaggacactctatgatgtccacacatgacaaaatcacctaaggactcatttctcagaagctatctcaccattgagcgaagaatga

SEQ ID NO: 5440 - DNA, 519 bp, Homo sapiens
  MAP TO AL021366.1; EXPRESSED IN LUNG, SIGNAL = 2.3; EXPRESSED IN PLACENTA, SIGNAL = 1.3; EXPRESSED IN ADULT LIVER, SIGNAL = 1.5; EST_HUMAN HIT: BI759891.1, EVALUE 0.00e+00; SWISSPROT HIT: O43189, EVALUE 8.00e-19; NT HIT: gi14782851, EVALUE 0.00e+00
tctccatttctgcccatttcttacaattgccttctctccctaggtcacccctggaacttcacattggtttccccacagacatccctaaaagtgccccccactcgatgactgcctcatcttcctcagtttcatccccatccccaggtcttcctagacgctcagcacccccttctcccctgtgccgtagtttgtctcctgggactgggggaggagtccgaggtggggttggttacctgtcccgaggggaccctgtccgggtccttgctcggagagtacggcctgatggctctgtgcagtacctggttgagtggggaggagggggcatcttctgaacagcctgcctctgcccagctccccattcacacacaccggcactttcataccctgacctctgacctcacctacagctgggatgtacctggagagatagggggtagttctccctactgcccaggctggaatccaagagtggggagtggggaagaggccctcttctctaccctccttcatgattcctga

SEQ ID NO: 5441 - DNA, 565 bp, Homo sapiens
  MAP TO AF037222.1; EXPRESSED IN LUNG, SIGNAL = 1.8; EXPRESSED IN PLACENTA, SIGNAL = 1.8; EXPRESSED IN ADULT LIVER, SIGNAL = 1.6; EXPRESSED IN HEART, SIGNAL = 1.9; NT HIT: gi14746550, EVALUE 1.00e-117; EST_HUMAN HIT: BF883474.1, EVALUE 0.00e+00; SWISSPROT HIT: O15315, EVALUE 1.00e-03
agggaaccagttgtgtgagcctgaagcttctatagttggggcctctttgagaaaaatacagaattgggctcagagtatggggactacagagtatgggcactgtgagccccaggtgggtaggaaggttttcagacggtcgagtgacagtccaaacggggtctggtcacctggggcggggacttgctgaccagcatagacaatgacagctgtccccacaggacaccttgttggagtgtgtgaataagaaggtccccgtactgctgtctcggggcatggctcgcctggtggtcatcgactcggtggcagccccattccgctgtgaatttgacagccaggcctccgcccccagggccaggcatctgcagtccctgggggccatgctgcgtgagctgagcagtgccttccagagccctgtgctgtgcatcaaccaggtgagcaccaaggcagggttgcacccctgagctcgtatttttagccaggatgcggaagcagagccggtctggaggtggggcgggtggcagtgaggtggcctccggctcctgcgggtagcagcctgtgcctaacc

SEQ ID NO: 5442 - DNA, 523 bp, Homo sapiens
  MAP TO AC004058.1; EXPRESSED IN ADULT LIVER, SIGNAL = 0.42; EXPRESSED IN BONE MARROW, SIGNAL = 0.51; NT HIT: U50912.1, EVALUE 8.00e-03; EST_HUMAN HIT: BI031033.1, EVALUE 5.00e-08; SWISSPROT HIT: P78559, EVALUE 7.30e-01
aagtgccaaaatggctaacgagaagcagctagtgtgcagcgctctcatggagaggagatagaatggctaggaaacaccagctctacaactggatcatccaggtggacatgggattcatcaaagaaacaatgcaacccaaaagaacagagaagagtgaagcaggacagctgtccacccaggactggcatgcagcaaggagaggctccacactatgggaaaatggtagtgagtgagaggccccagggacacatacttatgctacaaacctttgcaaccctgggctcaggagattcctcttatcccctcccaccccgcaaccggggcctccagacagaaatggagagcttcctggagtctggacagagcttccactcaggcatatatggagtcttgggggccttggatttctgggcaccctggcaccagtggctgtagctccagaaaggggggaggccaggcttcctcgcacacctccaggaccggggccaaatccatggggctgaggagcagatggactacaggc

SEQ ID NO: 5443 - DNA, 522 bp, Homo sapiens
  MAP TO AC012055.8; EXPRESSED IN BONE MARROW, SIGNAL = 1.9; EXPRESSED IN PLACENTA, SIGNAL = 1.9; EXPRESSED IN ADULT LIVER, SIGNAL =   2; EXPRESSED IN HEART, SIGNAL = 1.5; EXPRESSED IN HELA, SIGNAL = 1.9; EXPRESSED IN BRAIN, SIGNAL = 1.8; NT HIT: AE007841.1, EVALUE 5.00e-01; EST_HUMAN HIT: BF935824.1, EVALUE 7.30e-01
tgttggaagaagtgcagtggggtttttttttcttctgtttttgtttttgtttttgttttctccaattttaagcaggctgtcttcagtggccaaagatcaacgccctcacccattattcccaggctccaattgctgcttcctgctaggtttgctgtaaaaccagaaggatggacaagtaggattggcagcaccctggtgtcctcttgttgctcctctatctggggctgagccacattattcttagagacttcctacaggaaatgctcaaaattttaggagagccaagacatccacacataactctgccctctgttttgattatatagaatttgttttctgaacttcagaacctagttcaagagattgcttcaagtcatgcacgtaaaggctgaattctcttcataaaagccttttcagtttttctttgtgaagctttaggctagggattaccattcaggccacactctctctctccatgtgctcatttttcctactcacagagcagaagcaaattttcctgca

SEQ ID NO: 5444 - DNA, 512 bp, Homo sapiens
  MAP TO AL118503.12; EXPRESSED IN PLACENTA, SIGNAL = 4.1; EXPRESSED IN ADULT LIVER, SIGNAL = 2.9; EXPRESSED IN HEART, SIGNAL = 5.5; EXPRESSED IN BRAIN, SIGNAL = 4.1; EXPRESSED IN LUNG, SIGNAL =   5; EXPRESSED IN BONE MARROW, SIGNAL = 3.1; SWISSPROT HIT: P22544, EVALUE 8.20e+00; NT HIT: AF048728.1, EVALUE 8.00e-03; EST_HUMAN HIT: T80135.1, EVALUE 1.80e-01
taagtcagccttcctgcaccccaagcttcctgtggtcccagggagcactggccaacctgaggaggcttcatctgttctgtttgaggaagattcagagtatggcatgacagaaacctcagcagatgcaaatgggaatgtaggacaatgaccaaaggacaaccaatgtcagaatagaaagtcaatgaccggtgtccagatgctccaaggcactgtgcccttccattttggaacttatgatgatgatgttgttgatcaccgtgatagtaacaggaagaggaagagaagcagcagcagctgctatcatttatcacgtgcttattatgttgtcagcactatgcgatatatatatatataaaatatatatatatacaatttcatgtaattcaatactcacagtgatcttttgagaaaggtattattaaatctatttcatcaatgagatatggaggcacaaatatataaaacaagttgctcaagacacactattattaagtgatagagctgctccctgg

SEQ ID NO: 5445 - DNA, 519 bp, Homo sapiens
  MAP TO AF230666.1; EXPRESSED IN ADULT LIVER, SIGNAL = 0.56; EXPRESSED IN BRAIN, SIGNAL = 0.68; EXPRESSED IN FETAL LIVER, SIGNAL = 0.65; EST_HUMAN HIT: BG998588.1, EVALUE 3.00e-77; SWISSPROT HIT: P01266, EVALUE 5.00e-18; NT HIT: X06065.1, EVALUE 0.00e+00
tgcacattggaaagaagtgccccgctctgggcagatgcagccccgaaattggcgagtggagcacaggatggatttaatctcttattctataagcactgctcctttgtttctatgaacagcctgcacaaccatccacagcagctctgactttggaaactgttaaagtgttgttcagacttattgcctaatgatgctggtgaaggctgtctctctcagtatctgtttgcacaacaaggtcagggcttcctttctgaatgagaccatctctgaaagtcttgctgtctttgctcaggtttggagttgttactggatgaaatttatgacaccatttttgctggcctggaccttccttccaccttcactgaaaccaccctgtaccggatactgcagagacggttcctcgcagttcaatcagtcatctctggcagattccgatgtaagtaataaactgccaacaatgtgcgtgtttccattagggggacgcctcttgggtttcaaagttgctatggtgtgtgtggc

SEQ ID NO: 5446 - DNA, 578 bp, Homo sapiens
  MAP TO AC007292.1; EXPRESSED IN PLACENTA, SIGNAL = 1.1; EXPRESSED IN ADULT LIVER, SIGNAL = 1.2; EXPRESSED IN BRAIN, SIGNAL = 1.2; EXPRESSED IN HELA, SIGNAL = 1.3; EXPRESSED IN BONE MARROW, SIGNAL = 1.1; EXPRESSED IN FETAL LIVER, SIGNAL = 1.1; SWISSPROT HIT: Q01149, EVALUE 1.00e-04; NT HIT: AF099144.1, EVALUE 8.60e+00
tcagcagtccttggaaacgcatgccgaggacgcaccctgcctggcccagctccacatgggtgtgggggaggctgcgggctgcgcctggtggccgtatggggcctaggctggccagtgctgcccaatggtgggggctccctcaccgcccgtctggcagaagccatgggccacacgctgtcccagcacatggtggcagggcggtgacctgggctcggctctaatgaccggcagccctggggctcccatcaccactaccagtctgcccaggaggcagcagagcactgagcccgacctgctcccctcgggcacctacgagacccacctgcccctccatgcgtgggggagaaggggtgccctctgctgtggaaagctgggacctactgtctgtggtgcgaggctgaccccacagagctccaggacaaccccgagaggagtggacagagccagccgggccctccagcccccacctggcccagctgccgcctctgggcagatgtctccacttgataaacaggacagctaagggcctaggagagacatgcctggcccaaggccagacagcaggagtggctaggaag

SEQ ID NO: 5447 - DNA, 510 bp, Homo sapiens
  MAP TO AC025811.1; EXPRESSED IN BONE MARROW, SIGNAL = 1.9; EXPRESSED IN PLACENTA, SIGNAL = 1.7; EXPRESSED IN HEART, SIGNAL = 2.9; EXPRESSED IN ADULT LIVER, SIGNAL = 1.6; NT HIT: AF022789.1, EVALUE 1.20e-01; EST_HUMAN HIT: BG911141.1, EVALUE 2.80e+00; SWISSPROT HIT: P05142, EVALUE 1.00e-03
caccttttcccacctagtcgcccttgccagtccccgcgtcgcctgcagggccgcccctcctccgcccgctggtccctccccacccgcagctctccagtcccgcgcggctcggtggccagggctccaaggcggggccgcccacgacagccactggcagggatagcgggggcaaatttcccagagcgggaagcctgccccagccggccctacggcaaagatggctctgaatccgagcccccgacacccggcccaacccacccctacagcaccctgcgtggctggctgccagcccgtcgggtacctgctcggtccctcgagctgggggccccggcagggcgggagcgatccaaggccaccgcgcggggccagagcccaaaccccaatcccagaccgcagggaccccgcccaccaggtaccgagacaggacggcctggcaggtggctggggaccggggtgtgtacctgtgggggggtcaaacaactggtcaaaagtggctttttgatttcccaa

SEQ ID NO: 5448 - DNA, 558 bp, Homo sapiens
  MAP TO AL022069.1; EXPRESSED IN LUNG, SIGNAL = 1.3; EXPRESSED IN ADULT LIVER, SIGNAL = 0.77; NT HIT: AF109906.1, EVALUE 8.30e+00; EST_HUMAN HIT: BF878752.1, EVALUE 5.00e-02; SWISSPROT HIT: P14893, EVALUE 3.10e+00
atttcgtttgcccatcagacgcttttttacttggcatcatcaaattcctctctaatccaatagtaaatcataatccagccactggtaagcagcaccaacagctgttcccgtgttcatgtaaaagggctgaaagagaaggagtcaggggctctgattccaattctgctgttgacatctcagtgcaacttcatgcagtgagcgtggaggtgatgattgtagagatgatggtggaggtaatggcgggaatgatgatggaggtgatggtgtagggatggcagaagtggtggcagaggtggcgacagcgatgatggaggtgatggtgaaggcatggtggagggaatgattgtggaaatgatggtggagataatggcaggagtgatgatggaggtgattgtggagggatggtggaggtgacgattgtggagatgatggtggaggtaatggtgggagcagggatggagctgatggtggaggtaatggtgggagcagggatggagctgatggtggagggatgacagaagtggtggcagaggtggcgggagtgatcgtggaggtgat

SEQ ID NO: 5449 - DNA, 598 bp, Homo sapiens
  MAP TO AL022343.6; EXPRESSED IN BRAIN, SIGNAL = 2.3; EXPRESSED IN FETAL LIVER, SIGNAL = 2.7; EXPRESSED IN BONE MARROW, SIGNAL = 2.6; EXPRESSED IN PLACENTA, SIGNAL = 2.4; EXPRESSED IN ADULT LIVER, SIGNAL =   2; NT HIT: gi9631294, EVALUE 8.90e+00; SWISSPROT HIT: P41251, EVALUE 5.80e+00
tgaggtggagaggagcagagactaaagatatagcaatctcgagaaaagttttttgaaattaagcaaagcaaaattattattatcctgggttgaaaagtaggtaatccttttttccaaagttagattgattatagtttgtacattataatttagagtctgtaataactttcagtgttttagaattcatttattacatttggaataatattttatgttttttatgacccatagttgtgttggagtttatgttccatcagttactgtgtttttcaaagatactttcaaaagtataaaatttatcagttattttagtcttcagttgaatgtagctaaaaccatgatattaccctatgcttttctcacttttctggttttcttgacggatatgagagctgggacaggcagaggcacacctggcagcctgccatacctgctctgacatcggtggtaagcaagaaccatggtgaagtcagcaacaagaaaacagtgctcctcctctctgctgcagcccttctctaccctctctgggcagtgctctagcatggctgtgttggccccgttttttctatggctaagaagcaggtctctttttcttgcc

SEQ ID NO: 5450 - DNA, 562 bp, Homo sapiens
  MAP TO AC005788.1; EXPRESSED IN BONE MARROW, SIGNAL = 5.2; EXPRESSED IN PLACENTA, SIGNAL = 9.6; EXPRESSED IN ADULT LIVER, SIGNAL = 7.8; EXPRESSED IN FETAL LIVER, SIGNAL = 9.9; EXPRESSED IN BRAIN, SIGNAL = 7.9; NT HIT: gi14765215, EVALUE 3.00e-95; EST_HUMAN HIT: BF314504.1, EVALUE 1.00e-92; SWISSPROT HIT: P16621, EVALUE 4.00e-35
agtcagcctgggtagacacgctccgctttctctctgtcccatggggagctccctgggtagaagctggggccctctgcctcccttccaacacattcctccaccctcagcccccagccccagcctgggccccaccttgtgcagagagaatgtcctgacgcagaatgtggccagctcgatggtatctagcaacgtgacctggatgaagccgtaggtctccgtgcctctgttgggccaatactgatcacacttgatctgtatcgggcaagagaacaggtgtcagcagggacaggctgactggcaggggcttgagggccgtggggtccaaggctcacccgtgacttctcctccagccgcgtcatcatgacgatggtcgccgaccgctgctcccacaccatacgccagaagtccccaaaggtctcaggcagcggcccctgcgtggcaatgtacgcgttctgacaccggtagccgtccacgtagttggcattgatgtaatcactgcccatgatgcctgcagccagggcgagaggccagggatctgtgggggctgtcttgctagtttggc

SEQ ID NO: 5451 - DNA, 516 bp, Homo sapiens
  MAP TO AC012085.4; EXPRESSED IN BONE MARROW, SIGNAL =   2; EXPRESSED IN PLACENTA, SIGNAL = 1.7; EXPRESSED IN ADULT LIVER, SIGNAL = 2.2; EXPRESSED IN FETAL LIVER, SIGNAL = 1.7; EXPRESSED IN HELA, SIGNAL = 1.7; EXPRESSED IN BRAIN, SIGNAL = 1.9; NT HIT: AF195953.1, EVALUE 1.00e-13; EST_HUMAN HIT: AI168290.1, EVALUE 0.00e+00
ttatctccatgaagccagggcattgtctgccttattaattattgtatcctgagcacctagagtagtgcctggcatcattggtgcccaacaaaatatggttgaatgtatgaatgagtaaatgaatgcagaatcttgaaacagggtgtgctttttgggctgatagaacaaagtagtgtaaactgggtagcttataaacaatagaaatttaattcccacagttctagaagctgggaagtccaagatcaaggcaccagcagattaggtgtctggtgagggcccatttcctggttcatagacggtaccttgttgtgtcttcacatggtaggagggtcaagatagctctctcgggcttcttttatatgggtaccaatcttgttcatgaaggctctgccaaaggtaagatttagcaaagtggagaatagatgatattgctggatgcctgcaaggcagagtgaaagagaagcagaaagttacataatatattcatagatcatgtgcatcagctctctgacacca

SEQ ID NO: 5452 - DNA, 541 bp, Homo sapiens
  MAP TO AC016597.4; EXPRESSED IN LUNG, SIGNAL =   1; EXPRESSED IN HELA, SIGNAL = 1.2; EXPRESSED IN ADULT LIVER, SIGNAL = 0.72; SWISSPROT HIT: P28284, EVALUE 3.90e+00; NT HIT: gi15318237, EVALUE 1.00e-113; EST_HUMAN HIT: BG819708.1, EVALUE 1.00e-103
gctcatttctcctggctttgattagaatttgaatactttctttacttcggttaaaaaaaaataaaaaaataaaaataattagagaatgaaatatgacatagaggacaaaaaaacaaagtagaaagatgggaaatgtcaacacagtggcaccagcagcttaaaggatatccatcttaattctccctgctctactctgagttaggggaagaaacctatctgggggtccccccacagccccccagctccagtcctacccgttcatcagcccccaagccagcctgggtgaagggccgctcatccccctcgccgtcggccgtgctgggcctcctcattgcctcttcatcctgcaggctgtccaggctccccacatccaggtcaaacatctcatcagaatagaatatggcctcgagaatgtcatcatcggttgtgaataagatcgtgtctccaaagtgctctggggctaatgggttatcaagatgacagaaaggtcaactcacttcacatcccagagatttgtagatcaagagcctaaacccatcca

SEQ ID NO: 5453 - DNA, 515 bp, Homo sapiens
  MAP TO AC012262.14; EXPRESSED IN BONE MARROW, SIGNAL = 1.2; EXPRESSED IN ADULT LIVER, SIGNAL = 1.6; EXPRESSED IN HEART, SIGNAL = 1.4; EXPRESSED IN PLACENTA, SIGNAL = 1.4; SWISSPROT HIT: Q15303, EVALUE 1.90e-01; EST_HUMAN HIT: AI133522.1, EVALUE 1.20e-02; NT HIT: gi14750500, EVALUE 1.90e+00
gccaaggaggaagaaactccttagagccatagaagagacaatatattatctagaattaagtgggctctctgaagcctggttgggacgctgagttttatacacacagggaataatctacaacaacataatcatatgctgaagtatttgagcaacactatataggctctgtgagagcaggaaggtgaaggacataatctggaggtcttagaagtagggacaagtataaggtataacttcagcatgagctttacaaaagaggggaaggaaagtttgcaagggaccaccatgattaaaatcattgaggaaagactaatgccccttgggaacgtaagtaaactaagaggtgagggtatttacaaacttgtttatgcataaatttaaatcctctctcctaatctaactgtgaaaacagataagagacaaccatgtaactacaagggctagtcctgaaataactacttacagaaacaaccaaagtgaaagtgtttgattttagtgaccgtagttgcagagca

SEQ ID NO: 5454 - DNA, 560 bp, Homo sapiens
  MAP TO AL118557.2; EXPRESSED IN ADULT LIVER, SIGNAL = 1.4; EXPRESSED IN BRAIN, SIGNAL =   2; EXPRESSED IN LUNG, SIGNAL =   6; EXPRESSED IN BONE MARROW, SIGNAL = 1.4; NT HIT: gi4504746, EVALUE 3.00e-76; SWISSPROT HIT: P26006, EVALUE 2.00e-58; EST_HUMAN HIT: AU140320.1, EVALUE 2.00e-78
cactctggaggctaacagggaccgccgcccaccccggctgcgctttgccggcagtgagtcagctgtcttccacggcttcttctccatgcccgagatatgctgccctagctggagttgctccagatggacaacctccgtgacaaactccatcccatcatcatctccatgaactactctttacctatacggatgccggatcgcctgcagccggggctctggtccctggacgcccaccaggcacgggctttggagaaccatactgaggtccagttccagaaggagtgcgggcctgacaataagtgcgagagcaacttgcagatacgggcagccttcatgtcggagcagcagcagaagccgggcaggctccagtacagcagagacgtctggaaactgctcctgagcatcaacgtgacgaacacccggaccaacacattagtccagaccattgctgtccggtagaaatgtaatgcgagcaacgtatacaatttcaatcttctgatagctactgcaagtagtaggtctagtccacaacccattagtccagaccattactgcccagt

SEQ ID NO: 5455 - DNA, 595 bp, Homo sapiens
  MAP TO AC026404.4; EXPRESSED IN LUNG, SIGNAL = 2.1; EXPRESSED IN PLACENTA, SIGNAL =  24; EXPRESSED IN HEART, SIGNAL = 6.1; EXPRESSED IN ADULT LIVER, SIGNAL = 3.6; NT HIT: AB040292.1, EVALUE 2.20e+00; SWISSPROT HIT: P10225, EVALUE 5.80e+00
tttgagggaatgaatgaggggcaggaatggtgaagtgggtcaatccaggggccactgtctggctgcgcgttcctggaaaaaaccttatctctctgaacctcattttttcatctgtaggaggagaataactatactgacctcaaagggtcacattgagccttaaatgagataatccatgaacagtgcaaaatcaggcacaagaaataaatgatggctgttggcagtacttgtaataagtcacaagagaagaaagccaagagttccaggaagttttctgctctgcaggagacttggaggtcctggggaaaagccacatttgagcagaggagaatatactgtgctggagtcaccctccaggtctccccccatttggtgctccagccttttccaccagaggacttggtgctcggagcctgcccctggccctggctgcttgtggatgcctctggctctcagaaaaggccatgtaaatcagagctgaagggaagggatggagaaattcaggccaggccatgattcaaaaggcagcaggaaatgaatacatttgttggaacacagggccaaaaggacttgaagcgtctggagtgagtcatca

SEQ ID NO: 5456 - DNA, 535 bp, Homo sapiens
  MAP TO AC016830.5; EXPRESSED IN PLACENTA, SIGNAL =   1; EXPRESSED IN ADULT LIVER, SIGNAL = 0.66; EXPRESSED IN BRAIN, SIGNAL = 1.1; EXPRESSED IN LUNG, SIGNAL = 0.59; EXPRESSED IN BONE MARROW, SIGNAL = 0.8; EST_HUMAN HIT: AA352021.1, EVALUE 1.00e-121; NT HIT: gi16166973, EVALUE 1.00e-123; SWISSPROT HIT: Q9NY65, EVALUE 2.00e-39
tgcttcatctttgcaaccaccctccttttttctttcctggtataaaaggtcaaccctgggaagcaacctttagagcaaagcacaaaacagctgtgtcttctttggatctaagtcctggtccagctgctatagagctggggcacctgcagcctcaacgccaactggcaatggggggctggggcctggctggcctgcaaggtgaatgttatggggatgtagggcaaaggcatgctgggggcccagactctctgacctcgttgcttccctctccccacagcgggaatgcatatcagtccacgtgggccaagcgggagttcagattggcaatgcctgctgggagctcttctgcctggaacacggcatccaggcagacggcacttttgatgctcaagctagcaagatcaacgatgatgactccttcaccacctttttcagcgagactggcaatgggaagcatgtgccccgggccgtcatgatagatctggagcctactgtagtgggtgagtgggggcggagttcccctccacagagaaca

SEQ ID NO: 5457 - DNA, 597 bp, Homo sapiens
  MAP TO AC008524.5; EXPRESSED IN BRAIN, SIGNAL = 1.6; EXPRESSED IN HELA, SIGNAL = 1.2; EXPRESSED IN FETAL LIVER, SIGNAL = 1.1; EXPRESSED IN ADULT LIVER, SIGNAL = 1.2; EXPRESSED IN PLACENTA, SIGNAL = 1.8; EXPRESSED IN LUNG, SIGNAL = 1.1; EST_HUMAN HIT: AI571889.1, EVALUE 0.00e+00; NT HIT: gi13643762, EVALUE 1.00e-120; SWISSPROT HIT: O35464, EVALUE 9.00e-37
gaggtcaacacagctagggcatgattacctgttataaggtgtagaaaacgttgccaggacaacatcacgcccgttgatacgaatcacatctgtaactgcctggagaatgttgaaataaaaatgagagtctccaggaactgagcagttcaagcgcgccttcaggaacgacgtccactgtttctccaggactctttgagatcctcccatatcattcttacaaacctgagccactcttgggaaaactacctgcagaggaaaaacacatagggaaaattaaatgcattcattttgcaaggagatcttagtagaatctgcattccttgaaaacagaaacaaaacaacaaggtgcttaatactgtttctaaaatcagtaacaaaaaaaaaaaagaaagaaaagaaaaaaagaggaaaactcagcattagagtagcatgttttaaaagataaggctgtggcatttaatacagagtcataaatccttcagggaatcagctccgagccacataaagtcatttccatacagactgcttagctttttatttcctcaaacaaaagcacactttgtatgcacaatctctgccatcctcactagctgcctc

SEQ ID NO: 5458 - DNA, 502 bp, Homo sapiens
  MAP TO AC022103.4; EXPRESSED IN HEART, SIGNAL = 1.2; EXPRESSED IN ADULT LIVER, SIGNAL = 1.6; EXPRESSED IN LUNG, SIGNAL = 1.2; EXPRESSED IN PLACENTA, SIGNAL =   3; EST_HUMAN HIT: BF983020.1, EVALUE 1.00e-88; NT HIT: AL163246.2, EVALUE 0.00e+00; SWISSPROT HIT: P03360, EVALUE 4.00e-06
atagggtgacccgttctgtggacaccactcagtctctttccccagccacccctatcatcgccccatgagaccatgaacaaagtggccgtggtggcagggatggaggttacacatgggctcagcaacatggacttccactcaccaagggtgacctggttatggccactgctcagtgcccaatttgccagcagcagagaccaacaccaagccctcgatatggcaccattccttggggtgatcagtcagctacctggtggcagcttgattatattgaacctcttctatcatggaaagggcagaggtttgtcctcactgaaatagatacttactccagatatgggtttgcctatcctgcacgcaatgcttctgccaagactaccatccatggactcacagaatgctttatccaccatcatgatattccacacagcattgcctctgaccaaagcactcacttttcggctaaagaagtgaagcagtaggctcatgctcatggaattca

SEQ ID NO: 5459 - DNA, 525 bp, Homo sapiens
  MAP TO AC005793.1; EXPRESSED IN PLACENTA, SIGNAL = 6.4; EXPRESSED IN ADULT LIVER, SIGNAL = 3.9; EXPRESSED IN FETAL LIVER, SIGNAL = 7.2; EXPRESSED IN BRAIN, SIGNAL = 5.6; SWISSPROT HIT: P22612, EVALUE 1.00e-15; EST_HUMAN HIT: BI827497.1, EVALUE 0.00e+00; NT HIT: AB011133.1, EVALUE 6.00e-90
gagcacactcctaacctgcccacagtctgctcatcacctcgcttggccacatcaagctcacggacttcggcctgtccaagatcggcctcatgagcatggccaccaacctctatgagggccacatcgagaaggacgcccgagagttcatcgacaagcaggtgggcgggcaggtgggtgggcagccccgggatgcctcctcctctctcctgggacctctcttgggctgggggctggcctcagtttccccgttctccctggcccaggtgtgtgggacgccggagtacatagcccccgaggtgatcttccgccagggctatgggaagccagtggactggtgggccatgggcgtcgtcctctatgagtttctggtgggctgcgtgcctttctttggagatacccccgaggaactcttcggtcaggtggtcagcggtgcgtttcctccacgggcctgggtttgagctgcagccccaccagagctctgggcagcggtcctccacccgcatgtcagggagagaagcaggaaga

SEQ ID NO: 5460 - DNA, 548 bp, Homo sapiens
  MAP TO AC016604.4; EXPRESSED IN LUNG, SIGNAL =  15; EXPRESSED IN HELA, SIGNAL =  15; EXPRESSED IN BONE MARROW, SIGNAL =  19; EXPRESSED IN PLACENTA, SIGNAL =  22; EXPRESSED IN ADULT LIVER, SIGNAL =  21; EXPRESSED IN FETAL LIVER, SIGNAL =  30; EXPRESSED IN BRAIN, SIGNAL =  16; EXPRESSED IN HEART, SIGNAL =  14; SWISSPROT HIT: P39188, EVALUE 4.00e-04; EST_HUMAN HIT: AI380609.1, EVALUE 2.00e-26; NT HIT: AJ271736.1, EVALUE 4.00e-20
ggtctcaaactcatgggctcaagcgatcctctcgcctcagcctctcaaagtgctaggattacaggcatgagccactgaacccagtccctaatgtggtacttaaaatatttcttgtttcatctcattgtgcattacagtttgcacagaaaatgggaacatagttaaaagaaaaacctttttcaattattggaaatagcagcgaaacaccctgcatttattccatttcacttctaacacaggggttatcccaaaaatgcagttccaagtgaaggcaaacataaattcataaataaaatacttgaacagggataaaagtaatccagttatcatgggctaccacctccccctccaccaagtgtacatcatttgcttcaaattaagacctctccagagggctgaagacatagtcaaaatgatgagagaaaagtataatgaacaacaggaaattgggaatttcctaatattggaatgagataaatgacagagaagctgcctctaattcacagtttaacacacaccctgatgtctgcaccttgattttgggactc

SEQ ID NO: 5461 - DNA, 596 bp, Homo sapiens
  MAP TO AL008711.1; EXPRESSED IN FETAL LIVER, SIGNAL = 1.2; EXPRESSED IN BONE MARROW, SIGNAL = 0.92; EXPRESSED IN ADULT LIVER, SIGNAL = 1.1; EXPRESSED IN HEART, SIGNAL = 1.1; EXPRESSED IN BRAIN, SIGNAL = 0.93; EXPRESSED IN HELA, SIGNAL = 0.57; NT HIT: gi16159284, EVALUE 8.90e+00; SWISSPROT HIT: Q24322, EVALUE 5.80e+00; EST_HUMAN HIT: AA676430.1, EVALUE 1.00e-55
ggctgggaaagtagaaagggcttcatatgtggacttttattcaaccttattagggaataaggggccactgaatgttcttgagctagggtgacaagactagagaggtgctttagcaggaggaagctgatgcaggcctgtggaacggcagctgggggagcaatgcaacaaatcatgcagagcagtgaggagaacagggtcacaccggggagccttttgaggcctgtgctcatgacagcagtgggcatggctgaggagagggtgaagggggtcaagcccacgagaaccggcaatggcgctgacattgggagtcagggataaagggcccaggctctcagcattgaggctgcacgcttgtgcgttcatgttcaagaggccagttttgccccctcaaactcctccaaagaagcaattccattcttcacgtgggcttaggacaaagccagctctctatgagtgaggggtcagaagagctgagtaaagaagggactcagggaagcggtcccaggatccttcctcaggttgctgtttctggcttaggaatcataacaaagcctccccttccaggtctacttgggcctcctgggtgaacctcagac

SEQ ID NO: 5462 - DNA, 516 bp, Homo sapiens
  MAP TO AF196970.1; EXPRESSED IN BONE MARROW, SIGNAL = 3.1; EXPRESSED IN ADULT LIVER, SIGNAL =   2; EXPRESSED IN PLACENTA, SIGNAL = 1.6; EXPRESSED IN HEART, SIGNAL = 1.8; EXPRESSED IN FETAL LIVER, SIGNAL = 1.8; EXPRESSED IN BRAIN, SIGNAL = 1.7; NT HIT: AF115549.2, EVALUE 0.00e+00; SWISSPROT HIT: P42768, EVALUE 2.00e-27; EST_HUMAN HIT: AW403203.1, EVALUE 2.00e-50
tatgaggctcccaaatccagacaccctgctccctgcccagctaacaaaagcctgccacccccggcgtgcctcagtgccactgtgcctcccaccctacacctctccaggctggtcggctgctctgggaacaggagctgtactcacagcttgtctactccacccccacccccttcttccacaccttcgctggagatgtaagtgatcaaccagccctcgggcctcacttggggtgtggagaggagatgggaaagttgcgggggacctgggaggcggctgaccccaaggtatgtgcaggactgccaagcggggctgaactttgcagacgaggacgaggcccaggccttccgggccctcgtgcaggagaagatacaaaaaaggaatcagaggcaaagtggaggtgaggaggccacaggggaggaaaggaagttgggcagaggtgagtgcaagcctggggaactagaaaagtcccctctcatggtcctggctcccaatccatctatccacagacagacgcca

SEQ ID NO: 5463 - DNA, 516 bp, Homo sapiens
  MAP TO AC007570.23; EXPRESSED IN ADULT LIVER, SIGNAL = 3.5; EXPRESSED IN HEART, SIGNAL = 2.6; EXPRESSED IN BRAIN, SIGNAL = 3.3; EXPRESSED IN BONE MARROW, SIGNAL = 1.9; EXPRESSED IN PLACENTA, SIGNAL = 3.1; NT HIT: AF005664.1, EVALUE 1.20e-01; SWISSPROT HIT: P41760, EVALUE 3.60e+00; EST_HUMAN HIT: AW866884.1, EVALUE 1.20e-02
cagtatttcctgcctgcctcccaaagtgagacccttgccagaaccagggaaattctctgagaacttcaggctgcagaccctgggagcggctccagcttatgacctgaaaggcactgctgttcccctcgcaaagaaggtgtcagtgctatgtgaccgcctctttgcagaggaagcagggaggtgggaaagccggtgggccttaggtgtgtttctccaacagcgacccaaggggtctcaacctaggggctttggaccatctgggcagggcgccttgagccagctctgtgcaccattctgaagttttggggctctggaagacacccttatctctcagcataagacagttataataatgagtatttattgagcacttaccgtgtgccacgcactgtgtcaagggccttctgtatattttctcattgatccccacgaaacctccataaggtgggtattagtgaatcccactttcccgatgaggaagctgtggcctccagaggtaagctgtcttgcccaagg

SEQ ID NO: 5464 - DNA, 540 bp, Homo sapiens
  MAP TO AC022143.6; EXPRESSED IN HEART, SIGNAL =   2; EXPRESSED IN FETAL LIVER, SIGNAL =   2; EXPRESSED IN BONE MARROW, SIGNAL = 1.7; EXPRESSED IN PLACENTA, SIGNAL =   2; EXPRESSED IN ADULT LIVER, SIGNAL = 2.2; EST_HUMAN HIT: BG484725.1, EVALUE 3.00e+00; SWISSPROT HIT: P53971, EVALUE 2.30e+00
ggggtcctctgagggtagagagggccaggaggcttcctgaggacctgaggcccctctgggcctcccagggcttggagcatgtccctcccagtggctgatctgcattgccctgggagggacatgctcagtgatggggtttgtgcagctgtcactcaatcacctgcctgtgcccagccactcacctgtgactcccatcagccccaccacatgtgggtcctcaagtgccatgagaggaagttcctgcctgtgtcacatgcatccatcccacccaccacactgcaggttacaggactgccccacaagagccaccatgcccacctgaggttacctggcacacaggtatcctcacctgcatgacatgaccagatcgtgcactttctatgccagggccagggcaagcttgcacttttagccctggggacattgggggtggtggtggctggaggccagggaagtcaccaggctggagacatcatctacctccctagagggtttgatatcagacatctcccgtgcaccactttcagccatctcagcctc

SEQ ID NO: 5465 - DNA, 515 bp, Homo sapiens
  MAP TO AC016651.5; EXPRESSED IN BRAIN, SIGNAL = 1.3; EXPRESSED IN FETAL LIVER, SIGNAL = 2.1; EXPRESSED IN BONE MARROW, SIGNAL = 1.2; EXPRESSED IN PLACENTA, SIGNAL = 1.8; EXPRESSED IN HEART, SIGNAL = 2.7; EXPRESSED IN ADULT LIVER, SIGNAL = 1.4; NT HIT: AL163206.2, EVALUE 5.00e-04; SWISSPROT HIT: P20792, EVALUE 2.80e+00
ctctctctctccctccccactcacttgggacaaactatctgccatgtcctggggacacttaggcagaagtcctgtggaaaggcccgctttgtgaagaactgaaatctccagcccatagccatgaagtctgctaacaactgcaggagccatcttggaggctgattccccagcaccaggagaaacagggatgacagcagcctctgttggcagctcagttgcaacctcatgctggaccctgaggcagagccaaccagctgagccactctgggattcctgattcttaggaactatgtgagataatgaatatttgttttcgttagctgggaagctttgggtagcttgttacacagcaatagagaacgaatacaggcaagtactattattatcctcattacagatgagcagataaagcagaggaaggtagagtcacttgtcctggacacgtggctgggaagtggtggagggcagacccacactgtctgacttctgagctcacattctgaacccctgtggtt

SEQ ID NO: 5466 - DNA, 573 bp, Homo sapiens
  MAP TO AL023753.1; EXPRESSED IN BONE MARROW, SIGNAL = 0.45; EXPRESSED IN ADULT LIVER, SIGNAL = 0.39; EXPRESSED IN BRAIN, SIGNAL = 0.46; EXPRESSED IN FETAL LIVER, SIGNAL = 0.73; EST_HUMAN HIT: BE671665.1, EVALUE 0.00e+00; NT HIT: M30520.1, EVALUE 1.00e-118; SWISSPROT HIT: P10266, EVALUE 1.00e-62
atgatccccaaagattggcctttaattataattgatctgaaggattgcttttttaccattcctctagcaaaacaggattttgaaaaatttgcttttactataccagccataaataataaagaaccagccaccaggtttcagtggaaagtgttgcccagggaatgcttaatagtccaactatttgtcagatttttgtagctgaagctcttcaaccagttagagacaagttttcagactacgtctttcattatgttgatgatcttttgtgtgctgcagaaacgagagacacattaattgactgttacacatttctgcagacagaggttgcaaacgcaggactgacaatagcatctgataagattcaaacctctactcctgtccattacttgggaatgcaggtagaggaaagaaaatttaaacaacaaaaaatagaaataagaaaagacacattaaaaacattaaacgactttcataaattgctaggagatattaattggatttggccaactctaggcatccttacttatgccatgtcaaatttgttctctatcttgagtggggatccagaattga

SEQ ID NO: 5467 - DNA, 513 bp, Homo sapiens
  MAP TO AC008536.5; EXPRESSED IN BONE MARROW, SIGNAL = 0.47; EXPRESSED IN PLACENTA, SIGNAL = 0.52; EXPRESSED IN ADULT LIVER, SIGNAL = 0.75; EXPRESSED IN BRAIN, SIGNAL = 0.62; SWISSPROT HIT: P09132, EVALUE 2.00e-08; EST_HUMAN HIT: AA411960.1, EVALUE 1.00e-103; NT HIT: gi4507212, EVALUE 8.00e-37
ttcaccaacactgaggaacgcaccccaattcttggctgtgttctcaagccctaaataaatgcagtgaagagaaccccctgcggctctaacaagattacgtggcccgaccaggatgacaccccccattccctcgaggatcaaggtgccagccatcttgcttaccttacttatggggattcgccttccctctgcgatggtcttcttattatttaaataagcaggatagatacaaataaacctgccatagacaatagcataagtggtatcactagagcagtaagaggcaggagaaaagggtcgggtggcagggaaccaaaggccaattcatgctgcctagatatcagatgggtactcccttttcaacccctttttctgcgtggcagttgaaaaatcaaagtacctcggagtggtcccctcgagcaaccaatcagactggccgcgggcctactcctcattctgattgatccccctccctcaaccaatcagactggcacaggtcaatgggaaacgtct

SEQ ID NO: 5468 - DNA, 579 bp, Homo sapiens
  MAP TO AL022345.2; EXPRESSED IN PLACENTA, SIGNAL = 0.88; EXPRESSED IN ADULT LIVER, SIGNAL = 0.88; EXPRESSED IN FETAL LIVER, SIGNAL =   1; EXPRESSED IN LUNG, SIGNAL = 0.85; SWISSPROT HIT: Q06732, EVALUE 2.00e-48; EST_HUMAN HIT: BG536481.1, EVALUE 0.00e+00; NT HIT: gi15299299, EVALUE 0.00e+00
tcccacatgcattaaattcgtcagacttttttcctaaatagtttatcttactgataaccaattctgaaacagtgttgaaactcattccacgtgagtcatactgacagaacatttttctggaaggaaaagaacttacgtccatgttaaatggtattcctattacattaccttgttccttagtcagcatttcattattgatgaatacaacttcccacaaatgtttagattgattttcttggctcctctctttcaggtgatcagctgtccagacttctacaaacaaacaaaattaatcttaccatataaataccaaaacatctcttagggaatgaaatctctacacaaatgccctatgttgtagctgactctggttttttggccaatttccagagatgaacataattgcaagtgcatatttttttgtatttcatgagtttggagtgaaaaaacaaaaacaaaaaccagaaacaaaaggcctaggctagtggaaaaacagagaggaaattaactatctgaatgcacacacttggtttctaatgtaagaagaataatagcaactgcttacatctgcatttcccc

SEQ ID NO: 5469 - DNA, 574 bp, Homo sapiens
  MAP TO AC006178.1; EXPRESSED IN LUNG, SIGNAL = 1.3; EXPRESSED IN FETAL LIVER, SIGNAL = 1.3; EXPRESSED IN HELA, SIGNAL = 2.1; EXPRESSED IN PLACENTA, SIGNAL = 1.7; EXPRESSED IN ADULT LIVER, SIGNAL =   1; EXPRESSED IN HEART, SIGNAL = 2.9; EST_HUMAN HIT: R49304.1, EVALUE 2.00e-01; NT HIT: M96145.1, EVALUE 9.00e-03
gagcaaaggcttcagtccactgagcagtacatggtagcacagaagaaggcctggtacaccaacagcaaattgcatttccttctcagaaccctcagctctggtctggtacccccaggcaacaacagcctagcgggcagacaggacaggaggcctgggagctgtgcgtcactcaaagccagactggagagtgacaattgcctcgcagctcccagcgggtttcgagaaggtaacatgaccagggagcagttctgcctcccttctgtcacctctgaacctcaccttggcccatggcccctcaaccttgactgatgctaagtaagtagtctcctcctccttattccctggccaacctgcccagctcacagtgggggcctcagccaagggttgtcaactgcagcctgagaaagtctttctcactgacttgccccaagaagggattccactcagctgacaattatgaagctctggctggtccctggtcctgggcaggggcaaagctgcaaaacagcccacagggagctcacagtgcctgtggtaatgatgatgacgatgatggtgatgatgctgacaatgg

SEQ ID NO: 5470 - DNA, 574 bp, Homo sapiens
  MAP TO AJ251973.1; EXPRESSED IN PLACENTA, SIGNAL = 1.5; EXPRESSED IN HEART, SIGNAL = 2.5; EXPRESSED IN ADULT LIVER, SIGNAL = 1.5; EXPRESSED IN BRAIN, SIGNAL = 1.3; SWISSPROT HIT: P11260, EVALUE 1.00e-09; EST_HUMAN HIT: BG004080.1, EVALUE 7.00e-29; NT HIT: AJ251973.1, EVALUE 0.00e+00
cttctgtcctccgtggtttccaatgagaaatctactgtcatttgaaccctttccacctgtagattaaggtttcctgtttctcttcctgctttcaagattgtttctttgtctttaactcgcagatgcttaatttgtgatttctttaggtctatcttgtttggcatttgctcagattcttgaatctgtgggtttatgtctcttgccaactttgcaaagttttcaactattttttcttggagtactttttcagcaccatcctctttcttttctcttaccagaacttcaataacacgaaagttagatcttttgttatagtcccacaggcccctaagaatctgctctgctttttgttttggtctattttctttctgttgttcatattggttaatttctattgttctatcttccagttctctgattgttctccttaattctactgttgatcccatccactgagatcaacacttcagttactgtatttttcagtttaaaattttccatttggttcttctttatagcttctgttctttgttcttcattacccctgggctaggggtaggagttccagctccct

SEQ ID NO: 5471 - DNA, 555 bp, Homo sapiens
  MAP TO AC061958.9; EXPRESSED IN BRAIN, SIGNAL = 1.1; EXPRESSED IN BONE MARROW, SIGNAL = 1.1; EXPRESSED IN PLACENTA, SIGNAL = 0.77; EXPRESSED IN ADULT LIVER, SIGNAL = 0.48; NT HIT: AY053503.1, EVALUE 0.00e+00; SWISSPROT HIT: Q9Z812, EVALUE 1.80e+00; EST_HUMAN HIT: BI546808.1, EVALUE 1.00e-124
gatccagcttctggaaaacgttctgtcacctcagcagccatcacggttttgctctttgcacagcacctctgtgtgtccctccagggagagcttacagaccagaacgagctggagtgcacaccagccttgcctacacttgcaaacaggcggggctgcttatacccaagcacaactttgtagcagtaatatcacctcagacatttggagtgtggatccctcctctgtggggagcagcccccaacgaactggagctcatgagcaaaatcctgcagacagtgaactttatcattctccaagccttgattattcaccttcccactaccaggttgtccaagaaggtcatttgcaatttttaaggtgcatctctccacattcagattctacgttgacgcctctgcagtccatttcagcaactctctcatcttctgtctgctcctcttcggaaacatctttgcacctagttctcccaagcagatcagaggagggcagcttcagtcagggaactgtgagttccttcagtctggaaaacttaccaggatcttggaaccaggaagg

SEQ ID NO: 5472 - DNA, 586 bp, Homo sapiens
  MAP TO AC016619.5; EXPRESSED IN BONE MARROW, SIGNAL =   1; EXPRESSED IN PLACENTA, SIGNAL =   2; EXPRESSED IN ADULT LIVER, SIGNAL = 1.4; EXPRESSED IN LUNG, SIGNAL =   1; NT HIT: gi16157985, EVALUE 6.00e-75; SWISSPROT HIT: P17301, EVALUE 1.00e-20; EST_HUMAN HIT: AA630448.1, EVALUE 2.00e-91
gattagttggctttgctggcgtgcatcatcttggcagcagcaacaaccatagttgcaaagctcaggctaagctttgggactcaaatgtctcagagcaagtgcaccacatctgtgcagaatgcagcagcctcatcacactgatagctcaagaagagttatgggagtgtctggctactgctgccaagtctcaggataagggaaaaactgacccaagctgtcaagcagaatctagatatagagccagactatgttctcatgcagtttaactagtcggaagccacaaagttcagattgatcatgttgagggttaaggtgcttctttaaacaactcagaggacatagagaagacagtgatctataagtaggaagcatggtggaagtaagtacagggtctcatcacataccggcagggagaatgatgcaaaaaacaagttttctgaaaaatcaacaacaattccagtgttgtatgcactttcccttttatttttcagcgttactgaaaatgttaaccttttgttttggttgctgacaataaagggttgttctctgttaaaagtaaaaaggaggggggaaaagccattactgt

SEQ ID NO: 5473 - DNA, 544 bp, Homo sapiens
  MAP TO AL031730.1; EXPRESSED IN BRAIN, SIGNAL = 0.42; EXPRESSED IN PLACENTA, SIGNAL = 0.6; EXPRESSED IN ADULT LIVER, SIGNAL = 0.52; NT HIT: AL049846.1, EVALUE 7.00e-96; EST_HUMAN HIT: AA534786.1, EVALUE 1.00e-95
aagccatgtctgcctttcagctccttctgcacagagttcatggcaggcctggtgcagtggctggagttgtctgaagctgtcttgccaaccatgactgcttttgcgagcggcctgggaggtgaaggagcagatgtgtttgttcaaattttactgaaggaccccatcttgaaggacgacccgacggtgatcactcaggtacacccaacacctggtggtggctgctggggacagtagaacaaatcattttctttcaatgttagcctaaaaaatcacttctagtggggtggagcagttggaagataaaatatgtcatcataatatcatatcatgatcatagctgatgttgaattatcattattgaatatttactcttaatgctgattacgtgctggttccttttcaaaaactaactcatctaattcttgaagtgactttatgaggtaagtggtagggccatccccatttcatagttgaggaaactgagacacagagaggttaagtaacttgcccaaggtcacacagctgataagtggtggagccagga

SEQ ID NO: 5474 - DNA, 522 bp, Homo sapiens
  MAP TO AC007619.22; EXPRESSED IN BRAIN, SIGNAL = 0.89; EXPRESSED IN BONE MARROW, SIGNAL = 0.77; EXPRESSED IN PLACENTA, SIGNAL = 0.67; EXPRESSED IN FETAL LIVER, SIGNAL = 0.44; EXPRESSED IN ADULT LIVER, SIGNAL = 0.92; EST_HUMAN HIT: BI755201.1, EVALUE 5.00e-85; NT HIT: AY037865.1, EVALUE 4.00e-85; SWISSPROT HIT: P38285, EVALUE 3.70e+00
tacctcactttccagggcagctgtgaatacgaaaaatcgtgcacaagaagcacttagcaaaagtgcttggcacataacagatgccccataaataataattgcaacgattgtcattaacatataacaaaagatgcaagattaaattgaagtcttaccctgtcttcagtgaacttgttaaactactttattcacaagtttattagcagtaattttaatttcatttcatttttttctcctttgaagggctattgagtggccagacttccccaacaaatgccaaattggagaaactggactctcagcaggtgttgcagctctgcctccgatatcaagatcacctgcatcagtgtgcagaggccgttgcttttgaccagaatgctttggttaaacgaatcaaagaggtaatgtgctgcgggaaaataacattgctgactggttgttgtgattctctgcaactctggatgccatcttaagacttgacatttgtcactattgctttgaggagattgctttttcccagca

SEQ ID NO: 5475 - DNA, 555 bp, Homo sapiens
  MAP TO AC064878.7; EXPRESSED IN BRAIN, SIGNAL = 2.9; EXPRESSED IN LUNG, SIGNAL = 1.9; EXPRESSED IN BONE MARROW, SIGNAL = 2.8; EXPRESSED IN ADULT LIVER, SIGNAL = 3.1; EXPRESSED IN PLACENTA, SIGNAL = 3.3; EXPRESSED IN HEART, SIGNAL = 2.3; EXPRESSED IN FETAL LIVER, SIGNAL =   4; EST_HUMAN HIT: BF739117.1, EVALUE 9.00e-87; NT HIT: gi13937343, EVALUE 1.00e-106; SWISSPROT HIT: P03341, EVALUE 7.00e-13
tgtctcacagtggaggcaaggaattgcaacttgtttctattattgtacaccttgaaggcgaggttaattaaatcctgttgtggggtttgagggccggaatttaatttttggagttttatttaatgtcgggagcagattggataataaaatgtatattaagaataaggcggccttctggcccctctgggtctagggtggtaaagcgtctaagggttgccgctaagcgggccatgaactgggctgggttttcatctttacctcgggtagtttcttgaagcttgtcataattaacagctttgtaagctgcctttttaagcctttcaactaggcaggaaaccatgtaatctcgcctagctatacctggggaatttgcctggtagttcctttggggatcttcttggggaactgctctaatgccttcctggaggtctggctcatgaagccagcggttatcagcgtgagattgggctagggaaaaaactctttcctgttcatctggggagagggtagaagtcaggatgatatttaagtcactccaggttaaattgcaggaca

SEQ ID NO: 5476 - DNA, 594 bp, Homo sapiens
  MAP TO AC008509.5; EXPRESSED IN PLACENTA, SIGNAL = 0.91; EXPRESSED IN ADULT LIVER, SIGNAL = 0.99; EXPRESSED IN HEART, SIGNAL = 1.1; EXPRESSED IN LUNG, SIGNAL = 0.56; EXPRESSED IN HELA, SIGNAL = 0.89; EXPRESSED IN FETAL LIVER, SIGNAL = 0.61; EST_HUMAN HIT: AW070267.1, EVALUE 6.00e-08; NT HIT: AF240786.1, EVALUE 3.00e-15; SWISSPROT HIT: P11369, EVALUE 5.00e-24
gcagtgcttagaaggcaaggtctgtgttagaaaagaataaaagcctcaaaacagtaatcccaacttccactttaagtaactaggaaaaagaagagcaagttaaacctaaaataagcagagaaaagaaaatagcaatgatcagagctgaaatcaatgaaatagaaaacagaaaaacaattgagaaaatcaatgaaaccaaaatctggttatttgagaagatcaacaaaattgatacacttttatgtatactaattggcataaaaagaatgaaaatacaaattaaaaatatcagaaaggagaaaggtacatacttagatgtcctatagatattcaaagaataataaaggataattattatgaacaatttaatgccaatacatttgacaacttggaagaaatgaacaaattccttgagagatacaaactaccaaagtttgccactcatgaagaaatagatcacctgcatagtactatatttattttaaaaattgaatttttagcttgaaatattcccataaaaaattttcactggtaaattttatctaaaatttaagaaagaaagaataccaatacaaagtcatctggaaatccaaa

SEQ ID NO: 5477 - DNA, 563 bp, Homo sapiens
  MAP TO AL022309.1; EXPRESSED IN LUNG, SIGNAL = 0.92; EXPRESSED IN FETAL LIVER, SIGNAL = 1.7; EXPRESSED IN BONE MARROW, SIGNAL = 1.3; EXPRESSED IN PLACENTA, SIGNAL = 1.2; EXPRESSED IN ADULT LIVER, SIGNAL = 1.2; EXPRESSED IN HEART, SIGNAL = 1.2; SWISSPROT HIT: P29818, EVALUE 4.10e+00; NT HIT: gi13357558, EVALUE 2.10e+00; EST_HUMAN HIT: AL119942.1, EVALUE 2.00e-01
ggacttgaggctgaagatggttatcttggcttttttggtttcttcttggctctaatctccccacaactgctagcaccatgccagagacataatagttactccatctgctttgccgattagacccaaactacaacataacagatggacttttgtctattttttgtatattctggtaaatgtatgacattttaaagacattattgattttcaaattgttttcaaacaaaatccattttttaattaaatatctaaagtactaaattgttctgttctaccataagctctgtgagacagagaatgatgtctcttccctggaatataatgaacagtttcacaaaatcttgcttaatgaatgacagaaaaaaacggatggctattcttttaatgtcattacatactacctcagttgatgactgatatccatgaaagacaagctctagcattttaattgccccatagcactgatctaaaattattattaagtgatgttaattctgaatagccttttgtactacctgagaacttacagctttgtaaggactccaacaccatgttcgacatcc

SEQ ID NO: 5478 - DNA, 561 bp, Homo sapiens
  MAP TO AC018846.2; EXPRESSED IN PLACENTA, SIGNAL = 0.79; EXPRESSED IN ADULT LIVER, SIGNAL =   1; EXPRESSED IN HEART, SIGNAL = 1.2; EXPRESSED IN FETAL LIVER, SIGNAL = 0.81; EXPRESSED IN LUNG, SIGNAL = 0.97; SWISSPROT HIT: P31916, EVALUE 1.40e+00; NT HIT: AJ271735.1, EVALUE 7.00e-56; EST_HUMAN HIT: AW995263.1, EVALUE 1.00e-104
tctacctcctccttaaagccagtaagtcttagatttgctcttttgaggctattttctagattctgtaggcatgcttcattgttttttattcctttttattttatctcctctgtgtactttcaaatagccttcttcaacctcactaattatttctcctgctcaatcagttctgctattaaaaaactctgatgcatccttcagtattccaattgcatctttcagcttcagaaattctgcttgattctttttaattattttaatgtctttgttacatttatctgatagaattctgaattccttctctgtgctatcttgagcttcgttgagtttcttcaacacagctattttgaattctttgtctgaaaggtcacatatttctgtttctccaggattggtccctggtggcttattcagttcatttggtgaggtcatgttttcctggatggtgatgatgcttgtagatgttctttggtatctgggcattgaagagttaggtatttactatagtctttactgtctgactgtctgggcttatttgtaccccttcttcttgggaaagct

SEQ ID NO: 5479 - DNA, 566 bp, Homo sapiens
  MAP TO AC025445.3; EXPRESSED IN BONE MARROW, SIGNAL = 2.2; EXPRESSED IN PLACENTA, SIGNAL = 3.5; EXPRESSED IN HEART, SIGNAL = 2.5; EXPRESSED IN ADULT LIVER, SIGNAL = 2.5; EXPRESSED IN FETAL LIVER, SIGNAL = 3.2; EST_HUMAN HIT: BF910502.1, EVALUE 2.00e-01; NT HIT: AL161564.2, EVALUE 1.40e-01; SWISSPROT HIT: P19021, EVALUE 7.10e+00
ttggcaaattctgcttttggttgattggacatatttactcaacctgttatgtatttaggggaaaatgcttacttcccacagatgttgtcatctttgcatttgtgaattgggtcaatctaaacaaacaggatttaaagacattatctaagaagcagaaattaaaattgggtgtggttgttgatcagactaaggccactctttggtcaactcaagcaatggtgacagcacagatggcaggtcttccagataagagaatctattctaatcaacagaatccaaaagtgcagctttcttggctgcctgggcacactggaaacaaggcccaaggctaccgctgctggtgcttcctccacacttgtgtgtgcctccaccatagtgttcatttctaagtgctttgtagaaatatgtcttagaaggagtttgctcagagcattttattttgttgtttgtttgtttttaccatagtgatgaggtatatttggtttattgaacccaaggaaggttttctttgattgaaaagaccataggcaaagtgaaatccttgactgaaaagaccacaggcaaag

SEQ ID NO: 5480 - DNA, 534 bp, Homo sapiens
  MAP TO AC004475.1; EXPRESSED IN BONE MARROW, SIGNAL = 0.6; EXPRESSED IN ADULT LIVER, SIGNAL = 0.91; EST_HUMAN HIT: BE745790.1, EVALUE 0.00e+00; NT HIT: gi14767776, EVALUE 0.00e+00; SWISSPROT HIT: Q29040, EVALUE 2.20e+00
acccttccaacacagggagggggagagggtctgcccacctgacagaggcgagggagaggcatccacgtccctctgcaccagttcagcaggtgggagctctaccttatcctcttcaggcccccaccggctcttccgcttcctcttcacggtggctgcggaggctggcttcccgggggcagctggagcagggatgatagtgggcgcaggcgtggacgaggcggggcaggtggtggctgggggtaaggaccctgacagggcctcaggaggggacttgcgcttcaggccgggatcaggtgctgtgaagctgcctgtggagctggccttggctttccggaactcctccagcttctgtcggtagtacttgtacccttggctattgggctcatacagaaagctgcaaaggagagttggggggtgcagtgtcagctgggcccgaggccctgtccctgattctgggcaggagcagttctggccttgtgtgcccacgttggccagggtcactatatggtcatgtcatagtcacggtctccacca

SEQ ID NO: 5481 - DNA, 584 bp, Homo sapiens
  MAP TO AC008524.5; EXPRESSED IN PLACENTA, SIGNAL = 2.4; EXPRESSED IN ADULT LIVER, SIGNAL = 1.6; EXPRESSED IN HEART, SIGNAL = 2.7; EXPRESSED IN BRAIN, SIGNAL = 1.8; EXPRESSED IN LUNG, SIGNAL = 6.7; EST_HUMAN HIT: AL543344.1, EVALUE 0.00e+00; NT HIT: gi11991659, EVALUE 1.00e-88; SWISSPROT HIT: O35464, EVALUE 4.00e-16
aaatgctgccaaaattcagctggaagcagttacacagtcctccccacttttccctccctctcccccgagaggaagaggcatttccaaggccttacccttcttgtcttggtgattatgggaagacactgcccccaaagggtctgtgctgtcaggtgagtcaagcagatgcttccagtccagcattcctcccctagactcatacccctcttgagccgtcgaatctgatgtggttgtgctgggcaagagggaactggaatgccctgttttcatcacaaatacagttaggaaaacatcaccagagagacccacattccctttgcgcagaggcctggaggtgggacacccaagctggctgtaagactgagaggagatggccctagaaatgacacggcttagtggtggtggtggtggtggtggtggtggtggtgtggggtgtgttcagcagaaagcccattgaacttgtagttagaaaatgaagggccagatcctatctctcatacttgctgggtgggcctcagggaatcacttaacctcttcctgtgcacccagtggggataaagatacctctcggtgttgggaggata

SEQ ID NO: 5482 - DNA, 549 bp, Homo sapiens
  MAP TO AC005907.1; EXPRESSED IN ADULT LIVER, SIGNAL = 1.1; EXPRESSED IN BRAIN, SIGNAL = 0.98; EXPRESSED IN FETAL LIVER, SIGNAL = 1.2; EXPRESSED IN PLACENTA, SIGNAL = 1.6; EST_HUMAN HIT: BE969977.1, EVALUE 0.00e+00; NT HIT: gi14767718, EVALUE 5.00e-29; SWISSPROT HIT: O15145, EVALUE 8.00e-07
aaactcatcggaaacatggcactgttgcctatcagaagtcaattcaaaggacctgcccccagagagagtaagtctaaacccattattttcaaattttggtacgaaatgcctaacaatcttctgaaatgatcaaatcagaaaaattcttagctcagtcttctctctcaaattgcccttgtactttgcttggtagatactgtggtctagacctttcaagatagtggttatatgttgcatttaataggaaattgtattatttcttctgacttctccaggaaactcttttgagaaaatggaggaaatgtgcttaattctggacactgtttatcagttctttcaaacaaatctaatgctgttacgtctagaatgccacatgcccatcctttctgtcatcaacctggaaaagaacaacaacaaatattttaacctcttcctcgtctaaatctacttcctttattcattcttcaagatcttcatttttagcaatacctcaatcttaaatctgaagtgtactatgtaacattacttacgtctattcccgcttttctg

SEQ ID NO: 5483 - DNA, 522 bp, Homo sapiens
  MAP TO AL031008.1; EXPRESSED IN ADULT LIVER, SIGNAL = 0.96; EXPRESSED IN FETAL LIVER, SIGNAL = 1.1; EST_HUMAN HIT: BF975123.1, EVALUE 1.00e-103; SWISSPROT HIT: P29966, EVALUE 3.00e-03
cagtttgagccccaagtgtcccccgcctgggaaggtggggagaggaacctactgctcatggtgtggcgtctccaccatcaggccagtcctggcgcaaggtgcctgggggtttcggtccacggggcagtccgaggctgtgagggagccaggccgggacctgtttcctgagggcggagcctctgcttcccagggcttcaggcccttccctgcctgagacgtgcagatgctggctggctgctctcctctgtcatgcccgagtgggatgaaggcccccacccccatctcccctggagcagggtagcgggcaggtctctctgctgagccctgtataaggtcccgcctgacccctggtgaccaggcctggtttaggccatactgggtcttggtccctggctggcaagccctcactggactctcggaggactgggcattttctcctgggggtgggacgaagccccctcatgtccagggttgctcggctgccccggaggaggaggcgccaggaggaattgtcaccgtcac

SEQ ID NO: 5484 - DNA, 513 bp, Homo sapiens
  MAP TO AC012384.16; EXPRESSED IN BRAIN, SIGNAL = 1.2; EXPRESSED IN PLACENTA, SIGNAL = 1.6; EXPRESSED IN ADULT LIVER, SIGNAL = 1.4; SWISSPROT HIT: P54655, EVALUE 2.40e-01; NT HIT: AF323488.1, EVALUE 1.00e-13; EST_HUMAN HIT: BI004254.1, EVALUE 7.20e-01
aacacctgcctcatagggtgactgggagtgtaaaaaggcttgatcggtgtctggcactggtcaagtcctcaacaaatattcgcgtgcattgtttatgtggtaggtgctaagtaggatgcgttaagtgggctaaggaaggaatgatgaggatgaaagatctggctgccgaaagggatctgggaccaggttcccgtgtccagtcctggggacgggcaggttggagggctggcgtggcttggggagatgaggcacattaagcgggtgcttccagaggtcgggacgcacccccaggagctggcctaagctccccctcccgcccgagttctctgttcctctttgcaggcttctagccaccaccagcgatgatgaccttcccggggacctgcagtcgctgtcgtggctcacggcggtggatgtgcctcggctgcagcagatggcaagtggccgcgtggacctgggtggcccctgcgtgccacatccacacccaggtaggctcagggacaaggtaggcag

SEQ ID NO: 5485 - DNA, 553 bp, Homo sapiens
  MAP TO AF246928.1; EXPRESSED IN HEART, SIGNAL = 0.95; EXPRESSED IN ADULT LIVER, SIGNAL = 0.93; EXPRESSED IN FETAL LIVER, SIGNAL = 1.6; SWISSPROT HIT: P21243, EVALUE 5.20e+00; NT HIT: AL163208.2, EVALUE 0.00e+00
ttccagaaaaatgcacaaacagaatcttatatacattaatatggaagaatttctcaaaacagtgaaaaaagaaagtgatccaggtggctactagcataaagcaagtctttcaaactcaagactaatggtagagatcttccaaaatatttgaaatcctggtatgttctaactcttacagtatactaatgagaaacattttaggagctcgcttccagattacatgcaccagctactttggaggaagttcataagaattgcaattagtgagaagcgaagcactgatgggaaccaagcaagaaaacagaagagtaatgaaatgaagagagctttaatgaacaagaaaaacaggcaggagcaggcaagtcaggccctgaaaatgaatggtgggagaggcactgttttccctcagattaatgtcacactcaaggctgccttatttgactactgaatgagtcatgtctaaggtatttcagccagatagaagcaaaacctcctccttcatagattctatcttttccaagagtcccagggagcctcacattcccattccatt

SEQ ID NO: 5486 - DNA, 581 bp, Homo sapiens
  MAP TO AC026774.4; EXPRESSED IN ADULT LIVER, SIGNAL = 1.1; EXPRESSED IN FETAL LIVER, SIGNAL = 0.78; EXPRESSED IN BONE MARROW, SIGNAL = 1.3; EXPRESSED IN PLACENTA, SIGNAL = 1.3; SWISSPROT HIT: Q27571, EVALUE 1.10e+00; NT HIT: X99133.1, EVALUE 2.20e+00; EST_HUMAN HIT: BE439466.1, EVALUE 0.00e+00
ctgcatagtggcacaaatcgaactggaaagcccaagctaacaacaccgccctgggcgaaccgcctgtctccaccggctcctctgggcaggaggctccagcctgggggtgcctgacagctctccttccccggcgcctgtattatacatgtaacatttatatttctatccacacagcgttcattcagccatccattcaatcacccaggcatatttacacggatggaacacattcgcggagagatgtgtgtgtttgagttccaatcactgcagcccgtattggcgcggcgctttgtctcgctttgggtcaccaccacaggagcaacgatttcggggacggcacacgcctgtgtgaccgcttcccactccacttgggttccgtgagcgcgcggagccggaggagtcagggacgtgaggatgccctacttcccgcagcatccggatggcagggtctgcgtcggaaggcccgggagggcgacgccctccactgctgccgcggggtgggtgcgccaggcctgggtgtggcctcacgggagcgagtttctctccagccgcctggcccaccgctttggaacagtgaagct

SEQ ID NO: 5487 - DNA, 580 bp, Homo sapiens
  MAP TO AC008563.4; EXPRESSED IN ADULT LIVER, SIGNAL = 1.2; EXPRESSED IN BRAIN, SIGNAL = 1.2; EXPRESSED IN PLACENTA, SIGNAL = 1.1; EST_HUMAN HIT: BF326588.1, EVALUE 8.20e-01; SWISSPROT HIT: Q09013, EVALUE 1.90e+00
attagcaccaccacctcgactccagacacaaccttggaagtcacccctaagtcatcttcaacactatctgaattttatttgcctgacactttctaggtatgccttacctaggaagagatccccttctctcaactctcattaccagtaccttagctggagccaatatcatttctatactgggttgttaacaacagtattctaacaatgtcactaactctaagctttgtactccagccactgccacaccaattgatttacatagagtagatcaatctttctataattcggatcatttctgccacccactgttatcctcagaataaaactctgcatgacagcaatggtcctccttgtaacacaccctttccagatggcattctggatgctgttaggtctgatggaagggaaggaggtgctcttctagctaacaaatctatcagagtctatgttagtcaagggtgtctaatctgagggagtaaagtggggtctggaggagggattttggaaatgtggttctaggcacaaagccaagttcagggtttcaggctttcagttaggctctgcactatccctgttgggt

SEQ ID NO: 5488 - DNA, 561 bp, Homo sapiens
  MAP TO AF207955.1; EXPRESSED IN BRAIN, SIGNAL = 1.6; EXPRESSED IN FETAL LIVER, SIGNAL = 2.3; EXPRESSED IN BONE MARROW, SIGNAL = 1.6; EXPRESSED IN PLACENTA, SIGNAL = 1.5; EXPRESSED IN ADULT LIVER, SIGNAL = 1.7; EXPRESSED IN HEART, SIGNAL = 1.6; NT HIT: AL163248.2, EVALUE 0.00e+00; EST_HUMAN HIT: AI918738.1, EVALUE 2.00e-07; SWISSPROT HIT: P07986, EVALUE 3.10e+00
gacacacttttcctcacccgcagagtggacagtaaaagtaatccagaatgttgcatctgtgttagctcttcttagaagggcctggagctgctacaggaagtttctcatttggaattatgaagttctttcttctcttgggccactttctcttgcaagtccagctgggcattaccctgccccgtggaatttactccaacacagaatccttcatgcttaaccccaattccactgtctgggccttcggagtcagagccaaagctcagcagcagataaagtacaaaagctagcaaggtagaatttgaagcaaactgccctggtgtatggtttttagggctgccataacaaactaccacagactgggtggcttcaactacagaaatttattgtttaacaattctggaggctgaaatcctgatatcaaggtgtcaacaaggttgatttctcctgaggcctctgtctttagctggtagattcctgtgtctacacatggtagtccctctgtgtgtgtctacgttctaatctcctcattttgtgaagacaccagtcagcttggattagggc

SEQ ID NO: 5489 - DNA, 513 bp, Homo sapiens
  MAP TO AC002522.2; EXPRESSED IN BONE MARROW, SIGNAL = 0.51; EXPRESSED IN ADULT LIVER, SIGNAL = 0.71; NT HIT: L77570.1, EVALUE 0.00e+00; EST_HUMAN HIT: BG988629.1, EVALUE 1.00e-110; SWISSPROT HIT: P98153, EVALUE 8.00e-40
cactgaggaagcaaagggacgcccagcctccagccccaaatagggaggctgacttgggacgtcctatcaagagtctcacctgggtccagacacatgaacttgcagcactctttggggtccttgcggtactgttggcagccctggggcctctcacagagagcagccacacacatctcaggctcccctccatggcaggtgcagctcaggcatgggtcgtcccccttaggggtgaagtagaacccttcatccaccacgttgtccttgatgtcaacacatgtttgacctgcaatgagcatacattgtgtacagatgtatacaatgccaaaaaaggtagcctccccgtgtgggccacactgccaaaaaaggtagcctccccgtgtgggcctgtgaatgctacctgttaccttagaatgggaaggaggcagctggagggggcatgtgagacatgcccactagagtaatggcatcaaagcctctaagacagctctgtgagcaaacactgccatcactgct

SEQ ID NO: 5490 - DNA, 575 bp, Homo sapiens
  MAP TO AC006124.1; EXPRESSED IN HEART, SIGNAL = 1.8; EXPRESSED IN ADULT LIVER, SIGNAL = 0.99; EXPRESSED IN BRAIN, SIGNAL = 1.2; SWISSPROT HIT: Q31125, EVALUE 1.60e-01; NT HIT: X66401.1, EVALUE 2.00e-06
cgtcatatttcagcgtgtggatggccataccatagccacgtcatatttcagtgtgtggatggccacgccatggctgtgccgtatttcagcgtgtggatggccacgccgtggccacatcatatttcagcgtgtggatggccacgccgtggccacgtcgtattttagcgtgtggatggccataccatagccacatcatatttcagtgtgtggatggccacgccatggctgtgctgtatttcagcgtgtggatggccataccatagccacgtcatatttcagcgtgtggatggccacaccgtggctgtgctgtatttcagcatgtggatggccacgctgtggccacatcatatttcagcgtgtggatggccacgccgtggctgtgccgtatttcagcgtgtggatggccacgccgtggccacgtcgtatttcagcatgtggatggccatgctgtgttgatccactcatccatcaacagacacctggactgtttccacctttgggctgctgggagttatgctgctgtggccgtgagtgtacaaacatcccctcaagtccctgctctccatttctgggag

SEQ ID NO: 5491 - DNA, 512 bp, Homo sapiens
  MAP TO AL031186.8; EXPRESSED IN ADULT LIVER, SIGNAL = 0.86; EXPRESSED IN FETAL LIVER, SIGNAL = 1.4; EXPRESSED IN HELA, SIGNAL = 0.98; SWISSPROT HIT: P08125, EVALUE 1.00e-03; EST_HUMAN HIT: BI771771.1, EVALUE 3.00e-37; NT HIT: AJ416090.1, EVALUE 5.00e-38
accagggtttctatgaggggttttgggggtttgggagccccaaggaaggaagactcagcctggacgaggtggagaactaggtgctgtgctcatccccctgttagactaccaggcagcctaggcctgtggactccggggccctctctcatgcccactgctccaggctgccttgtcctgtcgctcaaggccaccctgggcctccttgcctcctgtatacccacaaatccgtgtgattccattgcaggtccacagggccccccagggagccctggccgggctggagctgtgggcacccctggagagaggggacctcctgggccaccagggcctcctggcccccctgggcccccagcccctgttgggccaccccatgcccggatctcccagcatggtgagtccccctgggatcccagcaggtggaggtgggggtggagtagccatcagcacagtgcccgctaccatctgccacgtgccttctgtgtgccagccctgctcacgataggccacatgtg

SEQ ID NO: 5492 - DNA, 552 bp, Homo sapiens
  MAP TO AC018557.5; EXPRESSED IN FETAL LIVER, SIGNAL = 1.2; EXPRESSED IN BRAIN, SIGNAL =   2; EXPRESSED IN HELA, SIGNAL = 2.6; EXPRESSED IN BONE MARROW, SIGNAL = 1.6; EXPRESSED IN PLACENTA, SIGNAL = 1.3; EXPRESSED IN ADULT LIVER, SIGNAL = 1.6; SWISSPROT HIT: O43237, EVALUE 8.00e-28; EST_HUMAN HIT: BG253127.1, EVALUE 2.00e-91; NT HIT: gi14785654, EVALUE 2.00e-93
caactgcctgtgttttgtgcttattattgccttcttttcagtgttctaaagctaacatgtatttttatttatgtgcatgtgattttttttcctctttttcccccagttgtgaaagattttcaagactatatggaacctgaagaaggttgtcaaggttccccacagagaagaggccctctgacctcaggctccgatgaagaaaatgttgccctgcctctgggtgacaatgtgctgactcataacctggggatcccggtgttggtggtgtgcacaaaggtgtgtgccagggggttgttggcttggctgggttcgggtggtgaacagtcaccatctgaaagtttgagaaactgttgacgtttttttcccaagggagacttgggcttatttgagattcattaaggtacattgaatatgtcaagacagaaaaaattatcatgtaaattggaagtttaaatgcaggaaacatgactagtcagtttgctcatggcctagggttaatgtctctgaagcactgttgactttcaaacttagaactcacagcagttggccagt

SEQ ID NO: 5493 - DNA, 590 bp, Homo sapiens
  MAP TO AC069278.1; EXPRESSED IN ADULT LIVER, SIGNAL = 1.1; EXPRESSED IN HEART, SIGNAL = 1.4; EXPRESSED IN LUNG, SIGNAL = 1.9; EXPRESSED IN HELA, SIGNAL =   1; EXPRESSED IN BRAIN, SIGNAL = 1.3; EXPRESSED IN BONE MARROW, SIGNAL = 1.2; EXPRESSED IN PLACENTA, SIGNAL =   1; SWISSPROT HIT: Q62656, EVALUE 9.80e+00
acccagagatggcaaatacgtttcattttgtctttggttaactctaacccatcagtagagggcactcgaggcactctactgagatatgttatgaggctggatttggattcagcaggaaggagtgttgtggttgattcattctgtctacaacaatcagttaaaaaagtcttctgagattgagaaaggagagaattccagcctgttgtcctgcttttgccgggactgttggaacaggcagaacccatcagagggcttgactccaatctcatccaaattccagatgggaacacagaggctcagagtggacagggcttgccctgatcatacagtgacctggtggcaaagctgggagcccccagcaccagcctcttccccagccctcacccctgccccaggcatcagccaccatagagtcacttaccggaactgggctctgtggggtgctcctccttcgggatgggttgtgaggtctcatgactggggtccttctgttgttttccttgagggcctgaaaccccaaagccctcattattctgtgcctctagtccttgcccatctccacaggttctgcccatatcccatgtccattc

SEQ ID NO: 5494 - DNA, 559 bp, Homo sapiens
  MAP TO AC022143.6; EXPRESSED IN ADULT LIVER, SIGNAL = 4.4; EXPRESSED IN HEART, SIGNAL = 3.9; EXPRESSED IN FETAL LIVER, SIGNAL =   7; EXPRESSED IN PLACENTA, SIGNAL = 5.9; SWISSPROT HIT: P48725, EVALUE 8.00e-01; NT HIT: gi14766692, EVALUE 7.00e-62; EST_HUMAN HIT: AW956796.1, EVALUE 4.00e-58
agtgtggtgaggagaggtgctctggttaacggctgctccacttttattagaattcaagagtttctttccaccattgagtctctcattttttacaactgacttttttggtaaattcttctttaatatattgtatttgtgtgaattccctttagcagaatttttttatggttcagaaagagtagactttgaatgaaaggtgattctaaatgtgtcatatttgtaactgtccccagtggggctttctctagaggtgagagttgctggtctgaaatgttctacatgaattccaggcttcccttccaacttttctatgtgttccaaattcttggtagaatttgaaaattcataactttgttttaaaactttttctattgttactgtttggagtgaatcttccttataaatatccttctttgttgataattccttgttttcccatcttgattcccaacctgaaatatataaagaaagcaaagtactgtttttttctttttttttactccttgaaaagaaacttctatggtggaattaggagaaatggataagaattgaagccccc

SEQ ID NO: 5495 - DNA, 555 bp, Homo sapiens
  MAP TO AC004190.1; EXPRESSED IN ADULT LIVER, SIGNAL = 0.55; EXPRESSED IN BRAIN, SIGNAL = 0.91; EXPRESSED IN FETAL LIVER, SIGNAL = 0.37; EXPRESSED IN PLACENTA, SIGNAL = 0.62; NT HIT: U60822.1, EVALUE 7.00e-19; EST_HUMAN HIT: BG676953.1, EVALUE 0.00e+00; SWISSPROT HIT: Q9ULJ8, EVALUE 2.30e+00
cctggctgcttctggtagtctgtgctcatatttgtgagcaaagacatgacaagaaactggaacttatatttaaaaaggaagcagagtgtaaaagtttggagaatttgcagcctggccatgttgtagaaaagaaaaaaaccattttctggagaggaattcaagctagctgcagaaaattgcaagtaacaaggagcaaaatgttgatagccaagatagtgggaaaaacaccttgaaggcatttcagataccttgggggcagcctctcccatcacaggcccaaaggcctaggagggaaggatggtttcctgggccaggctcagggtcctgctgccctgcacaacctcaggaaactgctctccaaatcccagctgctccagctccagcttcagctcaaagggccccaggtatagctcaggctgctgctccataggatgcaagttataagccttagtggctcccgtgtggtgttaaattaagcctgtaggtgcacagagtgcaagaattgaggcttgggagcctccaactagatttcagagtatgtgtgggaaagcctgg

SEQ ID NO: 5496 - DNA, 556 bp, Homo sapiens
  MAP TO AC007758.1; EXPRESSED IN LUNG, SIGNAL = 0.8; EXPRESSED IN BONE MARROW, SIGNAL = 0.83; EXPRESSED IN PLACENTA, SIGNAL = 1.2; EXPRESSED IN ADULT LIVER, SIGNAL = 1.1; EXPRESSED IN HEART, SIGNAL = 1.1; EXPRESSED IN BRAIN, SIGNAL = 1.1; SWISSPROT HIT: P13584, EVALUE 1.00e+00; NT HIT: AF082869.1, EVALUE 5.30e-01; EST_HUMAN HIT: AI584105.1, EVALUE 7.80e-01
ggacagaggctgaattttcggcaatctgctctttctcgcgactctgggttcaatggctgtgacttatttggtgattctggtaacagactcctcaagcgcaggggctgcatccaccttgctccctgatttcccccacaccagtacagtgcctgacacctcatcagctctctccttacctctttcttaagtgacagaataaaagaataaattactgggtagtgaaggtcttttgggaaaagctgggtggggcttacaatttagtacaatgtccttagctatcatttttggcgtggaagagagtttgatggattctgcaataatgagattgacgagacagatggtcgctgccaggaattcagcagaggccagggtgatggagaagcaacggctctgtgtcagaagcaggggcgggagcgggaggtgttggaagctcagtggtggtttcatacccctggggaagaagcgatctgcaggccgggtggtgaatgggatgcatgcaagcctgaaacgggagtgctgagctcacaaagcagagtcatctgggatatttgggtgg

SEQ ID NO: 5497 - DNA, 577 bp, Homo sapiens
  MAP TO AF235097.1; EXPRESSED IN ADULT LIVER, SIGNAL = 1.2; EXPRESSED IN HEART, SIGNAL = 1.2; EXPRESSED IN BONE MARROW, SIGNAL = 1.6; EXPRESSED IN PLACENTA, SIGNAL = 1.5; SWISSPROT HIT: O60840, EVALUE 4.00e-19; NT HIT: AJ006216.1, EVALUE 0.00e+00
ttatctccaccctgacccagcttgtgcccactaggacacccctgggagtgtcccctcagctcctagctcccagccaaaggctcacatggttgcggaaggagtgggctcggatggggtcctcagcggccagggacacactgctgaggatgatgaacaccaggataagattggtgaagacatgatggtggatgagggtgtggcagcccttcctcagcctgtggagagggagtgggccatggtcagaactcaggaccacagaattgttcagggattccaagggatacagttctggccctgacacaacacccatgcccccactcccaccttggctgctcctccatgctcctccacctgccctagcccctcctgcctcaccccctgccacttccggcactcacgggttggtttggctgaggcagaagaaggcgctgccctcagggatgggtaccaccttctccttgggtacaacttcctgcaggagttccacaccccctgcaccctcttcctcttcttcctcttcttcctcttcttcctcctcctcctcctcctccatgtctggcaccagagaaaagcaaaa

SEQ ID NO: 5498 - DNA, 588 bp, Homo sapiens
  MAP TO AC009286.31; EXPRESSED IN ADULT LIVER, SIGNAL =   2; EXPRESSED IN FETAL LIVER, SIGNAL = 0.62; EXPRESSED IN BRAIN, SIGNAL = 0.63; EXPRESSED IN PLACENTA, SIGNAL = 0.62; SWISSPROT HIT: P04208, EVALUE 7.00e-37; EST_HUMAN HIT: BG686011.1, EVALUE 0.00e+00; NT HIT: X59707.1, EVALUE 0.00e+00
tttcctggatgtcctgttcctgactctgaggactgaaggggaggaggagcctccactctcaggcagggccctggatgcccctggacccatgaaggaagctgcagcagcagaagccacaggccaggcttgagcagcagctgctggggctcaccctcctgacagaggaggaagggggttcttgtctcagttccccattggcctggagcactgtgggaccattcaggctgtcatcccatgctgcacagtaataatcagcctcatcctcagactggagcccactgatggccagggaggctgaggtgccagacttggagccagagaatcggtcagggacccctgagggccgctgattattactatagatgaggagtttgggggccgttcctgggagctgctggtaccagtttacagtattacttccgatgttggagctgcttccagaacaagagatggtgaccctctgcccgggggtcccagacgctgagggtggctgagtcagcacagactgggcccaggaccctggaagtgagagagacacagacatggtgattgacaagagacaaaaggagacaagaggagaaagcaggg

SEQ ID NO: 5499 - DNA, 534 bp, Homo sapiens
  MAP TO AC007782.20; EXPRESSED IN LUNG, SIGNAL = 1.1; EXPRESSED IN BONE MARROW, SIGNAL =   1; EXPRESSED IN PLACENTA, SIGNAL = 2.5; EXPRESSED IN ADULT LIVER, SIGNAL = 1.3; EXPRESSED IN BRAIN, SIGNAL = 1.4; EXPRESSED IN FETAL LIVER, SIGNAL =   1; SWISSPROT HIT: P25059, EVALUE 3.00e-05; EST_HUMAN HIT: BG007849.1, EVALUE 1.00e-100; NT HIT: AL163246.2, EVALUE 0.00e+00
agtggataaggcattccgtgagtccatggatggtagtcttggcagaagcattgcacacaggataggcaaacccatatccagagtaagtgtctattccaaggaggacaaacctctgccctttccatgatggaagaggtccaatataatcaacctgccaccaggtagctggctgatcaccccaaagaatggtgccatatcaagggctcagtgttggtctctgctgctggcaaattgggcactcagcagtggctgtagccaggtcagccttggtgagtggaagtccatggtgctgagcccatgtataacctccatccctgccaccatggccactttgttcatgggaccattgggcaatcactggagtggctggggaaagaagctgagtggcgtccacagaacaggtcatcctatctacttgattattaaactcctcctccgctgaggtcacctgttggtgagcactcacatggcatacaaatatcttcacagtttttgatcactcagaggggtccacccacatacctcttccccaga

SEQ ID NO: 5500 - DNA, 586 bp, Homo sapiens
  MAP TO AC012472.5; EXPRESSED IN BONE MARROW, SIGNAL = 1.3; EXPRESSED IN ADULT LIVER, SIGNAL = 1.2; EXPRESSED IN FETAL LIVER, SIGNAL =   1; SWISSPROT HIT: P03161, EVALUE 5.70e+00; EST_HUMAN HIT: BF688699.1, EVALUE 2.10e-01; NT HIT: AY048213.1, EVALUE 5.60e-01
tttccataaagcatctgggccataggctttccaaatggacagatgtaatgtaaatttgctatagtgctggagaaaattcaattctgcttaataggacaagaaactatgatcaataagacaggaaaatacatgggatagatgaagctcataaaatgtgttaagcatagataagtaatgaaacctattaggtaaagcaagcagaacacgtatgcatgaacacagaagaagacggaaggaccaagaagcttctaaaattcatgaggcactaaatatgcatgaggcacctgaggcactaaatattcatgctgcacaaattatatatgagacatacgtggcactcaatattcatgaggctttaattaggccacccacagtaaagaacattcttatcctcagcacaggacacacaaaacccatagctgtcagcaggctaactaatccctgtgtctctcccatagagaacaaatgggcaaacgaggccagagaagaacctggctacaagttcataatattggttgatgcctgattcctgaaatcaccctcagttcaatgagctcattgatttacacgcacttgcagacacata

SEQ ID NO: 5501 - DNA, 533 bp, Homo sapiens
  MAP TO AC005524.1; EXPRESSED IN PLACENTA, SIGNAL = 0.57; EXPRESSED IN ADULT LIVER, SIGNAL = 0.42; SWISSPROT HIT: P40596, EVALUE 1.50e-01; EST_HUMAN HIT: BG988510.1, EVALUE 6.00e-17; NT HIT: AL163227.2, EVALUE 2.00e-15
ggcctaggagggaagaattgtttgggtggccaggacaaggttcccaaagcctgcacaacctcaggacagtgctccccacattctggctgctctggctccagctgtggctcaaagagttgcagatactgcttgtgcctccaatccagagtgggtaagccaccataggctttggcagcttccacatggtgttaagcctgtgagtgcacagagcgtaagagtgaatgaggcttgctactctctacatagatttcagaggacatacagaaaagcctggatgtccagacagaagcctgctgtaggggaagagccctcatggagaacctctactaaggcagtgcctacaggaaatgtggggatggaactcctagagtccccactggagcattgcctagtggagctgtgagaagcaggtgaccaaactccagatctgagaatggtagatccaccatcagcttgcaccctgagcctggaaaagccacaggcactcaacagccagtgagagcagctgcaggagctgaactctggaaaggcac

SEQ ID NO: 5502 - DNA, 541 bp, Homo sapiens
  MAP TO AC020663.1; EXPRESSED IN ADULT LIVER, SIGNAL = 0.65; EXPRESSED IN BRAIN, SIGNAL = 0.75; EXPRESSED IN HELA, SIGNAL = 0.51; EXPRESSED IN BONE MARROW, SIGNAL = 0.67; EXPRESSED IN PLACENTA, SIGNAL = 0.73; NT HIT: AL114102.1, EVALUE 2.00e+00; SWISSPROT HIT: Q9ULJ7, EVALUE 4.00e-09; EST_HUMAN HIT: AL530843.1, EVALUE 1.00e-103
ttacggcctcatctcctctgcgtggggcgggcgccctccaggcggccatgctgcaagaatcagaagtgattacacgagcacacacgaacaccgtggcctgcagtggttcgcatctctgtcagggtggccacggagcccctcaggtttctgggcctgagttccctcgtagctcacctggagaagaaagtaggcgatgctctcgttgccacagctggaggccagcatcagtggagtctgcccttctggggtcggcacattcacactcacccccgcctcaagcagcaggtgcacgattgtgtcgtggccaatgtaggaggcatacatcagcggggtccagccaccaccattcttcttattcaaatctaactctctcctaaacaaacgcaagatatgctagacatggccagccgcctcgcatgtggggttcaccaaagctggtggcgaggctaggccaggcgggatgagttgacaggaagcagaagttatctgccaccctggacgttgtggggattggaggcaggcaggcagaaaaatgctgaca

SEQ ID NO: 5503 - DNA, 526 bp, Homo sapiens
  MAP TO AF178030.1; EXPRESSED IN ADULT LIVER, SIGNAL = 1.2; EXPRESSED IN HEART, SIGNAL = 1.2; SWISSPROT HIT: P35269, EVALUE 3.70e+00; EST_HUMAN HIT: BG504805.1, EVALUE 1.90e-01
gaagaaggtggagggaaaggacaagaaaaaaagcaagatataactttttttggttcccctcttttaatattttttctaaaattcatactaataaatacaatcatttaaaaatgcaggtatctaaaattacatataaactggtccttcgagtaagtcagagaatgctatttgctcattgttaactgtatttttagtatcttccaaacaaaattctctttatcaaaattatcatttgcagcttttctaggtagtttccaaagtggatgcacgcttatggttggaaaggatccttcttgacaaagctttcacactcagaaactactatcaaatgcagtcaagcacaggaagaaagaatacactgatgaccgagtatgctgaaataaagaaacataaggtgctgctgtctgaattcacactggagtttcttccactggtgtcagtgtggtaacctatctaattaaactgcacgaattatacttttccttcctctattcagtagcatttttcactggatggtggaagacgt

SEQ ID NO: 5504 - DNA, 554 bp, Homo sapiens
  MAP TO AF037338.1; EXPRESSED IN ADULT LIVER, SIGNAL = 2.1; EXPRESSED IN PLACENTA, SIGNAL = 2.4; SWISSPROT HIT: P34314, EVALUE 3.10e+00; NT HIT: AF037338.1, EVALUE 0.00e+00; EST_HUMAN HIT: BI769723.1, EVALUE 0.00e+00
aaggcaccctttagctcctcatggtgtggcctagaaatgtcccctgtcctccagtctctgtagaggggccctgttgggtctctccagacatctgaggcctgcgggtaccctggcctcctgcccgggccaaatggtgcccctgccccacgtgctgcagatgtgaagttcgacgccgtgagcggtgactactatcccatcatctacttcaatgactactggaacctgcagaaggactactaccccatcaacgagagcctggccagcctgccgctccgcgtctccttctgcccactctcgctttggcgctggcagctctatgctgcccagagcaccaagtcgccctggaacttcctgggtgatgagttgtacgagcagtcagatgaggagcaggactcggtgaaggtgagtgcggccggtgtgggcgggacttcccggtgccttcctgggcgcaagaggccaagaggaagtgtgccaggcctgggctgtgggacctcccgcctggtgctcctctgcccacagtttcacaacctcccaggtcccttctccacagtgaa

SEQ ID NO: 5505 - DNA, 566 bp, Homo sapiens
  MAP TO AC022469.4; EXPRESSED IN BONE MARROW, SIGNAL = 0.76; EXPRESSED IN ADULT LIVER, SIGNAL = 1.1; EXPRESSED IN PLACENTA, SIGNAL = 1.1; EXPRESSED IN HELA, SIGNAL = 1.4; SWISSPROT HIT: P13773, EVALUE 4.10e+00; NT HIT: AY051788.1, EVALUE 1.40e-01
cttcgtgcaaatacccacagttaatatagcatagaaacagaaatttaagctctgttgttagaaggctggagttatgaaccaaaccatagtaactaaaattcatgcatattacaaccaagcaaaatgcagactacctgtgtgtatatgtacatttagcatttttttgtttgtttgtttttaactttgtagcttcagcacaccatgccacaaactttgtgccttataataccttggctgaatatcttctcagaggatgatcattcacttttacctttgtttgccaacttattccactgcggctctttttgtcttgcaatgcattctgtgtactggtgaagaagttttgaccacgaatagctgacaaatatgtgcaggtggtcatgcacagaagcagaaagaaaattcctctgtggttgttaacgtgaaggttttccaggggcttggggcactggttaaggaaacagattaatgagtagcaaacaggaattgatgggagtcctctgacattttgaggatatccctacacatcactgcagcctgagggaagcttggctgaaagaaactgg

SEQ ID NO: 5506 - DNA, 510 bp, Homo sapiens
  MAP TO AC023818.3; EXPRESSED IN BONE MARROW, SIGNAL = 2.2; EXPRESSED IN PLACENTA, SIGNAL = 1.6; EXPRESSED IN ADULT LIVER, SIGNAL = 1.8; EXPRESSED IN BRAIN, SIGNAL = 1.6; EST_HUMAN HIT: AA227789.1, EVALUE 0.00e+00
tgttacccaaagaccccttgtatcaaaataagctggatttttttattgaaaattattaactctagaaattttagtttaaactagacttagggatatgtgtattttaccggtattccacgttttatgcatgggtttttaaaacttctcaagtattaaaactaaaagctttaggtgctttgcttatcaagaaatcctacactgtccactggagacatccatgtttttacttggctctgcccctttagtggtccctgtgaaccttacctcaaaccatgcatctggggcagagatccttacttgcttggtggttacaaatgcaaatacagtgaagaatgtcatctttgtgattgttcctgaaatagttcacgagaaatccatgaccgtaaagtactgtgatagtgatgtctaccactgtgagcttccagtactaggtgattggtctgcattcacagtgaccaaaatcagctatgtggccaggtaattcactgctgagggctttggattttcctt

SEQ ID NO: 5507 - DNA, 569 bp, Homo sapiens
  MAP TO AC006339.3; EXPRESSED IN ADULT LIVER, SIGNAL =   2; EXPRESSED IN HEART, SIGNAL = 5.3; EXPRESSED IN PLACENTA, SIGNAL =   3; SWISSPROT HIT: P00358, EVALUE 1.90e+00; EST_HUMAN HIT: BG324444.1, EVALUE 2.00e-01
cccacatacacagcaccaagatggacagaaggatgccttaaactgactgcagaaaaagagcatgtatgataaaaggcaaatgagaaaagtatcttaacatgtttccacatattacattcatttcctgtatatatgcataacagcgggttaagtgggaccttccctatagccctggaattgactgctatcatcaaaactatggacgacatggctctaattacctcactttcttcattttccaaaaagagacaccaatgagtcagaaacctctctcggagtttattgaggtgactatgctctattactgcaaccaccttactaccctctcctcaatccccctaataccagactacacagtggaagaataagggagaaagagcaaaacaaacaaaattactggagttggaagagtcatcagaagtgcaggctccatgggtaagagggaatgtttatcccctaagcaaagtcaatcaattgtatctccttctttctggtccagaggtagacaatgctcccatacaaattgcaagatataggaatgaaaaagaggggtatttgagcagatcaca

SEQ ID NO: 5508 - DNA, 564 bp, Homo sapiens
  MAP TO AC025432.3; EXPRESSED IN BONE MARROW, SIGNAL = 1.6; EXPRESSED IN PLACENTA, SIGNAL = 1.9; EXPRESSED IN ADULT LIVER, SIGNAL = 1.8; EXPRESSED IN HELA, SIGNAL = 2.1; SWISSPROT HIT: P39188, EVALUE 2.10e-01; NT HIT: L44140.1, EVALUE 1.00e-07; EST_HUMAN HIT: BE173391.1, EVALUE 4.00e-09
gagggcagcacttttgtttcttttattctttgctgtgtctccaatacttggaaaaatgcccaaaacattttttgtgattgatgtacatggtgcaatgatgaggtaggtacaagtttgaaggatacatctaaaggtcatggaagaatgagctacaggaatggtctttacactgcagtatgcttatctcaaaagagtttacaaagactttccatggatgtgtgggcatggatagctttgggggaatcaatttccagatccagaacttccacatgaacaatttcccaaagttgatctgtctgaatgtccactgagagagttgtcctgtcggcttctttcccctcttaactttctacacttgctctcctctcacttaaagaactaatgaatttttttttctagtcttactgagatgcattctctcaggtggtaaaaagaaacagaagaaacccttggtggtataggtacaggcttgggtcagtaaatggctataatgactggctaataagatcctgccactgcactccagcctaggtgacagaccgagcccctgttgcaaaagaaaaa

SEQ ID NO: 5509 - DNA, 532 bp, Homo sapiens
  MAP TO AL022159.1; EXPRESSED IN LUNG, SIGNAL = 1.1; EXPRESSED IN ADULT LIVER, SIGNAL = 2.2; EXPRESSED IN BRAIN, SIGNAL = 2.1; EXPRESSED IN HELA, SIGNAL = 1.6; EXPRESSED IN BONE MARROW, SIGNAL = 2.3; EXPRESSED IN PLACENTA, SIGNAL = 2.2; NT HIT: AF181897.1, EVALUE 1.00e-66; EST_HUMAN HIT: BF035327.1, EVALUE 6.00e-94; SWISSPROT HIT: O14423, EVALUE 1.50e-01
ctaggcctcttgtgccaaacagtttgtcaagttgtgattgatcaggaagagttcttgaaggaaattaaaagtgccactctggtgaacccacaaatgataagaaagcaaaacagccttattgcggatatggagaacattttagtggtctggatagatcaaaacagccacaaaattcccttaagccaaagcctgatccagagcaaggctctaactctcttcaattctgtaaaggctaagagtgctgaggaagctgcagaacacaagttggaagctagcagaggttggttcatgaggtttaaggaaataagctgtctccagaacataaaagttcaaagtgaaacagcaagtactgagttaaaagctatagccagttatccagaagacacaggtaagatcatttatgaaggtggctatgccaaacaacagattttcaatgtagattaatcagacttatattggaagtaaatgccatctagggctttcatagctagagagaaatctatatttggcttcaaagcttcaacgaacagca

SEQ ID NO: 5510 - DNA, 586 bp, Homo sapiens
  MAP TO AC004199.1; EXPRESSED IN PLACENTA, SIGNAL = 1.2; EXPRESSED IN ADULT LIVER, SIGNAL = 0.73; EXPRESSED IN HEART, SIGNAL = 2.2; SWISSPROT HIT: P10393, EVALUE 1.10e+00; NT HIT: U53588.1, EVALUE 0.00e+00; EST_HUMAN HIT: BI827073.1, EVALUE 0.00e+00
ctcaggctagaccagggatgacacataaaagatgatagttttcatttgtgttgccatcagcctcctctataaataaacccagagtaaccacaaattgccatcctgaggggttcaacagggaatagtctcataatggatttagagtgaaggatgattggcattgttagtcaggcaagcagagggctgagcagtcaaataacagaatttcagaacaaaagattagagggcagaaatgctgtatgtgctgatagagtcagagagggcccggatcaagaaactgcaggaagagaaaactagaaacctagaatcgtctagaaaactagaacctacaatcgtctcagaacacaaaggaggcttgaggactgagcagactgacatagatgtacttggacaacacctcaccaaggagcatgtctcttcccactcacaatccccaatacgagattcacagtggttcacgctgagtccacaggaaaagtatgcttgttcatatgaaaggaaagatcctcttattaaaagagcattcattattttctaccataggaatgcagtggtttcccatgggggaaatggccctgctgtagtc

SEQ ID NO: 5511 - DNA, 552 bp, Homo sapiens
  MAP TO AL031708.3; EXPRESSED IN HEART, SIGNAL = 1.5; EXPRESSED IN ADULT LIVER, SIGNAL = 1.3; EXPRESSED IN BRAIN, SIGNAL = 1.6; EXPRESSED IN PLACENTA, SIGNAL = 1.4; SWISSPROT HIT: O43516, EVALUE 4.60e-01; NT HIT: AE001250.1, EVALUE 1.30e-01; EST_HUMAN HIT: AA523827.1, EVALUE 1.00e-42
gctctccttgcctctgtttgcaaggccatctgctcacagctgatttcactggtttttctggcccagcccttggttttctaccttaaggttgggctgcactaaactttcatggttcttctgcattgcaggcttgagtgatgaagaggaccagaagccagtgcgcctgcctctgaaagtccctatagagctacagccgcggaacaaccacgcctgggcccgtgtgcagagccttgcccagaacccacgcctcaggtaacatggcccttggcacgcagaggggtcccaactgcttgagcaggactggaagcaacgtgtgtgagtttccctcaaggaacttccaggagaagcaggtccacccctatgctctgtcatcacacgaggacgcagcagtgtggaggcgactggagtccagggagcactgggctgcagtcctgtatctgggcagggatcgcccaacctgtgttcaggccgtggaggggatgtcgcggtgagaagaggagctgcagagccttcctttcgtcccccactaaggcccatacagttcctctccca

SEQ ID NO: 5512 - DNA, 533 bp, Homo sapiens
  MAP TO AF196968.1; EXPRESSED IN ADULT LIVER, SIGNAL = 3.1; EXPRESSED IN HEART, SIGNAL = 2.6; EXPRESSED IN LUNG, SIGNAL = 4.5; EXPRESSED IN BRAIN, SIGNAL =   3; SWISSPROT HIT: P44326, EVALUE 3.80e+00; NT HIT: AB051897.1, EVALUE 2.00e-03; EST_HUMAN HIT: AW408268.1, EVALUE 3.00e-03
ctctgagtctctgccccatcagctcagccgctactctcatgtctgaacggctcacaatctcacatgttctggcaatgcattaacggatgggactttgggctaaggtgggcccattcaggccacggatgccacaggaagctgatgagtggcctttagtgtctttaggttctcaaggcccaagagtaaagcctcgaaaccccaccaggctgtcagccttgcttcctttgggagcaacactttccctggagggagttggtgacaattgtgatgaccgtgatgatgatgtcggcagcagtaatgacagcaactaacattgactgagcacttgccccatgtgggcaccacactgaggggctcccaggtagggacacggtccctccacaagctgcagggcaagtaggcgcaggcatgctggcttcagtcacttgcctgccatcacccagccagcaggtggcagagctgggatttgaacctggacgggccgtcatggcaacagccccaggagagacaaatgcaagctccttccttgacac

SEQ ID NO: 5513 - DNA, 599 bp, Homo sapiens
  MAP TO AC020893.4; EXPRESSED IN FETAL LIVER, SIGNAL =   1; EXPRESSED IN BRAIN, SIGNAL = 1.1; EXPRESSED IN HELA, SIGNAL = 3.2; EXPRESSED IN PLACENTA, SIGNAL = 6.9; EXPRESSED IN ADULT LIVER, SIGNAL = 1.3; SWISSPROT HIT: Q43316, EVALUE 2.00e+00; NT HIT: AF153201.1, EVALUE 6.00e-81; EST_HUMAN HIT: BE148853.1, EVALUE 1.00e-107
tgccaacagatagtcccctcattagatatttttgattttgtggacttacatgttcaagtgtccatgtcattaacatgacttcttaacttttcaggccaaaaacaattgtttgttcttttctctttaaaggtatcatcaaatggtattcagtccactcctctgaatcttgcaacatactggaaatgtagtgctagcaccacagatcttagagtggattataaatacaatccagaagctatggtggcacctagtgtgctttccaacatacaggtggtggtaccagtggatggaggagtaacgaacatgcagtcccttccccctgcaatatggtaaattaaacatacgtttctgaattcccactaaatttttgttgcaatccccaacttctagaacccaagttctgtaagttttcttagaagtttgaaaaatttttgtgcctttttccatagaaaccacgctgtaaaagatgcagttcattttactagtcaaaccatagtaaccttaatcaaaaataaacaaaactagttttgctctaagtaccacccagacttcaatgattccatactaactttaccattaggcagagtgcttgacctctc

SEQ ID NO: 5514 - DNA, 593 bp, Homo sapiens
  MAP TO AJ012008.1; EXPRESSED IN BRAIN, SIGNAL = 0.93; EXPRESSED IN PLACENTA, SIGNAL = 1.4; EXPRESSED IN ADULT LIVER, SIGNAL = 0.91; EXPRESSED IN FETAL LIVER, SIGNAL = 1.1; SWISSPROT HIT: P30754, EVALUE 2.30e-01; NT HIT: AJ012008.1, EVALUE 0.00e+00; EST_HUMAN HIT: BG109342.1, EVALUE 3.30e+00
aggtcaggggtttgacgagggacagccagcagtcccgctcaagaacccccagccaaggccctcttccctcctccgggtatgtgtcggagttaagtacccttgtgcgcacaggcctgcacctaccatgggtaggcccgggggccttgcaataggtcctgtcccccagcacgtgaagcactgtacggctctcgtcctcgtggcggcccttgcagaaaaaagtgcccgagtcccccgcgctcaagaggagctccagccgccggataccagagtccagggagcgtaggcggccgacgaaaggctggaggggaggcacggtgggggtcccgctcgaagaggcccacaggatcggtcggcgtcctttggacaggcccttgcaggccgggaagctgggtgcccagacccagcggatgggatgagagactcctccgcaggagagattcacccggtccccagggcggccgtccagagaagctaggagaggccggaggctgtggttagggcacgtccacagggcaagacgaccctccatcccgtctcctctttctcttctctgttctgcactccagccatcctggatcttcccacacacaacc

SEQ ID NO: 5515 - DNA, 594 bp, Homo sapiens
  MAP TO AC008831.7; EXPRESSED IN PLACENTA, SIGNAL = 1.1; EXPRESSED IN ADULT LIVER, SIGNAL = 1.1; EXPRESSED IN BRAIN, SIGNAL = 1.1; EXPRESSED IN HELA, SIGNAL = 1.2; EXPRESSED IN FETAL LIVER, SIGNAL = 1.4; SWISSPROT HIT: P36022, EVALUE 3.40e+00; NT HIT: D29637.1, EVALUE 2.20e+00
attgccatctctttggcttcataaaatagtaaatccacgtaactgctggtaataaacaacctgaaatgtgaagcatagaacaataattctaaagacaaaagactagaataattacatatggataaagaaaaaacatcaaagaacaaagggcattttgaatctctccattcttcctagagtaccgtctcagattgtaattcattttaagggtactgtgcttcaaatgcatttactctatcaaaggcattcaattcataattctttaaaatctgcaagtagatcttgtagtgcaaccattcaggcttatagtaagtagcttgaattatatgttgtgggacaaagtgatcttcacaagtcaggaatgctataaatcctctcctaagtgaatagtctttattttaaaacatttctagaaaagctagccctaaaacttaactgttgtatgagtacctgctcttctttgttatattgtgtgttctccaagagttatataagggtttatttatctttcttcccccagtatccactatgcttgactcattcattcattcatatgaggcatcgagtgcctaatgtgttaggcactgtgatggg

SEQ ID NO: 5516 - DNA, 587 bp, Homo sapiens
  MAP TO AC004202.1; EXPRESSED IN LUNG, SIGNAL = 2.6; EXPRESSED IN PLACENTA, SIGNAL = 3.8; EXPRESSED IN ADULT LIVER, SIGNAL = 2.8; EXPRESSED IN HEART, SIGNAL = 2.9; SWISSPROT HIT: Q02473, EVALUE 1.90e+00; EST_HUMAN HIT: AW206410.1, EVALUE 1.00e-128; NT HIT: AF230386.1, EVALUE 1.00e-128
ttttcctgtgtgcgtgaaaggaataaaatctatatgaaagattataaactgaaaagccttctggaattgtattagacagttccttgaaggcaagtggtaaaccataaattaataatttcgcttaaagctgagcacgtagtaggtgcttttagaagtttgttctcctctcctttcctttcttccaggtctgccctggcacattgctctggttgggaattccacacaaacttaataaaattaatggctgaataaagtgggctagaaggaccttcgaggccatcctctcaccctctgcctgtccctgtttcttaggaccaggtagaacatgagaagcaaaggatcctcacagaatttgaactcctgcatcaagtcctagaggaggagaagaatttcctgctatcacggatttactggctgggtcatgagggaacggaagcggggaaacactatgttgcctccactgagccacagttgaacgatctcaagaagctcgttgattccctgaagaccaagcagaacatgccacccaggcagctgctggaggtgagtcccttgggggcagaattgcagagaggtagcagcccatc

SEQ ID NO: 5517 - DNA, 508 bp, Homo sapiens
  MAP TO AC008599.5; EXPRESSED IN HEART, SIGNAL = 1.2; EXPRESSED IN LUNG, SIGNAL = 1.6; EXPRESSED IN FETAL LIVER, SIGNAL = 1.2; EXPRESSED IN PLACENTA, SIGNAL = 1.2; EXPRESSED IN ADULT LIVER, SIGNAL = 1.5; SWISSPROT HIT: P39962, EVALUE 6.10e+00; EST_HUMAN HIT: AL520054.1, EVALUE 4.00e-30; NT HIT: gi14249175, EVALUE 3.00e-11
aggtatctccagcccagacctaaatattccctacttctgaaccttaaagatggacatttctgagacccatacccaaatttcttacatctgtaaacaacctactgctgcattcttcttcttcttcctcttcttcttcttcttcttttcttcttcttcttcttcttcttcttcttcttcttcttcttcttcttcttcttcttcttcttcctcttcctcttcttcttctttcctcttcctcttcttcttctttggcttctaaatagattttaattacttagaaacaacacaatttcgtaccaaatgtttaacaagcatctttgctaaaatgtgaaatcagcattatttgcatccaatcagctacacaaaactcaccaatttttcatctgacaaaaggtagtcaaaatcccaaagaataagggaaagactactcattaaaggtcatgttcactaatctagcaccgtaattccagtcttagaacctcccaaacggctgaaaggaagatgtgga

SEQ ID NO: 5518 - DNA, 568 bp, Homo sapiens
  MAP TO AC020908.5; EXPRESSED IN LUNG, SIGNAL = 1.1; EXPRESSED IN BRAIN, SIGNAL = 0.94; EXPRESSED IN PLACENTA, SIGNAL = 0.91; EXPRESSED IN ADULT LIVER, SIGNAL = 0.91; NT HIT: AF213884.1, EVALUE 1.40e-01; SWISSPROT HIT: Q9NZU6, EVALUE 5.40e+00; EST_HUMAN HIT: BE071172.1, EVALUE 0.00e+00
gagaggcgtggaacagattctcacagccctccgaaggcacgaaccctgccaacaccttgatcttgaatgtgatcttaaacgtctggcctctagaactgcaagccaatatacttctgtcgttctggccacccagcgtgcggttctgttacagcagccctagcaaactcaggcacccagcaacaacagtcatgaaacacccctagcggggctccttctcttgcacatacagccctgtgcagcagggcagagatgggttttaaacaagtgagtcagacaaggatatcttattcatcactccgacgaacccatgggctgaacccttgaatcactactttatttatcatcgggctcgggctcagaaagtctcgctgaggaaatgagtagaacccaaactcgtcagctgcatttctgaaacatgcctaatctctgaggctctttcccagccacgatagaaattgaaagggaacggggctctgggctgcggcggtgggctggtgtggagacagagccctttgttctgccactccagggaccacgagggcagaagagaagggcttgtcttgctttg

SEQ ID NO: 5519 - DNA, 519 bp, Homo sapiens
  MAP TO AC022085.4; EXPRESSED IN ADULT LIVER, SIGNAL = 0.99; EXPRESSED IN FETAL LIVER, SIGNAL = 1.1; EXPRESSED IN PLACENTA, SIGNAL = 0.94; SWISSPROT HIT: Q9NQ30, EVALUE 8.20e+00; EST_HUMAN HIT: BF574793.1, EVALUE 0.00e+00; NT HIT: gi11968022, EVALUE 0.00e+00
agtttaaatgccatgggctgaccagtacaaagatataaaatatattctctgctgtgttctgttatagataggctttttttaaaaaatcaattacttaccgactttgttctttcctttgttttattaactgaatgagttccttgtcaaaataatcttcttcctcttcctctccttttccatcatcttctctttcctgggcatcaacgttatctttgtgcaactggccagaaatgtgctttgcatatgcagaaagacccacttctgtgaccccgcacactcggcactcatgactaatgtccctagggaaagagggagatgagggacattcaattctccccactggcatggcacactcaccagatctgttattgtttcctctgaaggacactgcacactttggcacagtgaaaaattagtgctaattaatttcaatgctcctttcatcacttttaataagtttgtttataagttacttttgaaatgattttaagattcttttccagcaatcaagaggcaata

SEQ ID NO: 5520 - DNA, 500 bp, Homo sapiens
  MAP TO AL031713.6; EXPRESSED IN ADULT LIVER, SIGNAL =   1; EXPRESSED IN PLACENTA, SIGNAL = 1.1; SWISSPROT HIT: Q09886, EVALUE 3.50e+00; NT HIT: AJ294797.1, EVALUE 4.70e-01; EST_HUMAN HIT: BG718927.1, EVALUE 5.00e-05
ccagcttctgtggttaaggggccagatttcgggactcaagggtcttgtgtgcctgtagcagccacgtagcttgtccacatgaacggccaggctgctcctctccgtggctgcacgtcctggccaccccgaggccgcagcactttcagcagctccgtctccacgtagtcgcccacgaggtaagggtgccagcattgctcgtggtactgcaggttgttggtggcgatggagaagggcacggtcatggtgtccgaggcatgacacagctgcggctccggggccagcagcaggcgggtctcagcggcggtgctaccacctcccactcaggctccaacttccagccgcgcgtgtcctacggctgccgcccaccctgtgtgtgtggagtccctttgtgtgcactgtgccgcggcctcggtctccgctgcccactgctggctctcatgctgctgctatgccaacggttcgaaggtgatggtggccggcgtcatggttctggagccact

SEQ ID NO: 5521 - DNA, 595 bp, Homo sapiens
  MAP TO AC008696.5; EXPRESSED IN ADULT LIVER, SIGNAL = 2.2; EXPRESSED IN FETAL LIVER, SIGNAL = 1.7; EXPRESSED IN HELA, SIGNAL =   9; SWISSPROT HIT: P39429, EVALUE 6.00e-21; NT HIT: gi4759251, EVALUE 0.00e+00; EST_HUMAN HIT: AL546722.1, EVALUE 0.00e+00
aagactccagctgcaagcactggcgccctaagctggcaatggcacggcatgtggaggacagtgtgaagccacatctggccatgatgtgtgctctgttgagttggcaatggcaggagctgcaggaccttcagcaagagctggaggagctatcagtgggcagtgatggtatgctcatctggaagattggcagctatggtcggtggctacagaaggccaaggccaagcccaaccttgagtgcttcagcccagccttctacacacataagtatggttacaagctgcaggtgtctgcattcctcaatggcaatggcagtggcgagggcacacacctctcactgtacgttggcttgctgcctggtgcctttgacaatctccttgagtggccctttgcccactgtgtcaccttctccctgctggatcagagcaaccctgggctggctaaaccacagcatgtcactgagaccttccacccctgcctaaactggaagccgggcacttggagtgggggctccctggatgagagatcttcctaagttcatctcccaccaggacatccgaaagcaaaatactatgtacagtgtggggaacaggtctt

SEQ ID NO: 5522 - DNA, 523 bp, Homo sapiens
  MAP TO AC005203.1; EXPRESSED IN BONE MARROW, SIGNAL = 0.65; EXPRESSED IN ADULT LIVER, SIGNAL = 0.45; EXPRESSED IN FETAL LIVER, SIGNAL = 0.37; EXPRESSED IN LUNG, SIGNAL = 0.55; SWISSPROT HIT: Q12931, EVALUE 3.00e-18; NT HIT: gi14778058, EVALUE 5.00e-75; EST_HUMAN HIT: BE207686.1, EVALUE 5.00e-76
ctggatgatggggtgatttcaaattttcttcttttctgcttacctgcttttccaaaattttctataatgaatgagtgctactgtaacactaaattatagccagagttatcctggtggtacggacggccagtacgtccctgggacccgagacatcactagaaggcggatcctgtccttgctgcatggccgggcctgccacacgcctggacactgagggaggtacctggatggtgatggtgcctttctcggcattggtctgcaagtgaatctccatttctggcagtgcttggccgtcagacaccagtttgtgacgcagtttttccaaggcatcgctggcattggagatcagctcccgtataaacacctacaggaatagaaatgggaggcacagacaatgaaggacactcatcctgcaggatctatctggtcagctgcacttccaataactgttaaaaggtagaggagaatagtcaattctcaaagcataaagagtttctgctttagtcaaaggcagttcctctgg

SEQ ID NO: 5523 - DNA, 526 bp, Homo sapiens
  MAP TO AJ250235.1; EXPRESSED IN BRAIN, SIGNAL = 0.61; EXPRESSED IN HELA, SIGNAL = 0.81; EXPRESSED IN ADULT LIVER, SIGNAL = 0.81; SWISSPROT HIT: P22830, EVALUE 3.00e-26; NT HIT: AJ250235.1, EVALUE 0.00e+00; EST_HUMAN HIT: T87808.1, EVALUE 1.00e-88
gtaaagagtggctcttgccgcatgggcagtgcgtgtgcccaggggggcaaacaggggtactacagaccgtcaggaggcatagtccacttacgcattcgtctatctttcgcataggttggtccgatgccctggttgggtcctcaaacagacgaatctatcaaagggctttgtgagagggggaggaagaatatcctcttggttccgatagcatttaccagtgaccatattgaaacgctgtatgagctggacatcgagtactctcaagttttagccaaggaggtaaatgcacccatctgcctttttcccatcatgacttgttttaaaaggaaattttttctgcaactaactaatgtatcattcagaaatattgtttactgtatttgtttgcatgtacggtgtcctcattctcctgaataatacttcatctgagtaataatctcaacacattgagttaattccatgcagtgggaggggaaacctgtgctttccttaaaccaggtgcccagggatcactgtggctgacatc

SEQ ID NO: 5524 - DNA, 582 bp, Homo sapiens
  MAP TO AC006167.1; EXPRESSED IN ADULT LIVER, SIGNAL = 1.5; EXPRESSED IN HEART, SIGNAL = 3.2; EXPRESSED IN BRAIN, SIGNAL = 1.5; EXPRESSED IN PLACENTA, SIGNAL =   2; SWISSPROT HIT: Q13437, EVALUE 1.50e+00; NT HIT: AL163246.2, EVALUE 1.00e-78; EST_HUMAN HIT: H92951.1, EVALUE 0.00e+00
tgaatcacaggggtggtttcccctatactgttttcatggtagtgaataagtctcatgagatctgatggttttataaggggaaacccctttcacttagtctctcattctgttcttgtctgccaccatgtaagacatggcttttgccttcaattgtgattgtgaggcctccccagccatgtggaactgtgagtccattaaatctcttctttttctttataaattacccagtcttgggtatgtttttatcagtagcatgaaaagggactaatacagtacattggtaatgggagtgagatgctgctgtaaagtaacccaaaaatgtggaagcaactttggaactgggtaacaggtagcaactggaacagtttggagggctcagaagacaggaaagtgtgggaaagtatggaacttcctagagacttgttgaatggctttgaccaaaatcctgataatgatatggacaatgaaatacaggctgaggtggtctcaaatggagatgaggaacttgttgggaactggagtaaaggtgactcttgctatgttttaccacaaagactggtggcattttgcccctgacctaga

SEQ ID NO: 5525 - DNA, 584 bp, Homo sapiens
  MAP TO AF260011.1; EXPRESSED IN ADULT LIVER, SIGNAL = 1.1; EXPRESSED IN PLACENTA, SIGNAL = 1.3; EXPRESSED IN HEART, SIGNAL = 0.93; EXPRESSED IN FETAL LIVER, SIGNAL = 1.6; EXPRESSED IN HELA, SIGNAL = 0.88; SWISSPROT HIT: O94822, EVALUE 2.00e-31; EST_HUMAN HIT: AF150217.1, EVALUE 1.00e-125; NT HIT: AL163249.2, EVALUE 0.00e+00
cattcccctacaatcccaagtaaaagagctgtcattatgcttataacccttaaatacttaaaaaaaaaaaatagattcagaatgattccagaacttacacttgtaatttcatccttacaaaatgctatggcttcaggttgcttgcttggaggaaaagccgcttcaaatgcatcttttgctgcaaacgcagctggtgtgtaagtatcacactgagccattagccaatatcccattaaactttttaagtagggagccaactgtttctttactttaaggataagtttttcaaaagcttgttgtgtggcttctcggacgcgacggtcatgatcctattaaaaatataaatgtgatttaaaatagctctagcccataaaaacaatcacagacatttctggatatgctataatgacccattaccaagaattcacctatgtattaagctaaactgaaatcattttttttaaatcaataatttggaggtttttaaatcagaaactatgtaaaataatttattaatttttctttctccccttctcccaatgagataggattgtattcaagacagattcaaagttgggccttga

SEQ ID NO: 5526 - DNA, 591 bp, Homo sapiens
  MAP TO AC005524.1; EXPRESSED IN LUNG, SIGNAL = 0.7; EXPRESSED IN FETAL LIVER, SIGNAL = 0.37; EXPRESSED IN ADULT LIVER, SIGNAL = 0.44; SWISSPROT HIT: Q99743, EVALUE 1.90e+00; EST_HUMAN HIT: T57199.1, EVALUE 3.00e-28; NT HIT: gi16174379, EVALUE 8.00e-25
ccttttaagcttccaatgcctttaatgtttcaaggcaattcaataattcatttgaagtgaaataggttgaaatcacattcttggagctttgacaagaacagtcatttattgtttacttaatcatgtcatgcatgagagtttggttgtgtcttccatacccaccttccaactcaatggagtcaacactgcactccattatgccacataccacaaaatggtcaggacaaacgataacagtgtcaccttcatagcaggcatttataacagataatggatcaccgaagaactagaaaacaacaacatatttgcaaatatacacccacatatggtgtggatctctgtccccaaccaagtctcatgtctcatgttcaattgtaatccccagtgttggatgtggagcctagtgggaggtgactgggtaatggggacagtttctaatggtttagtaccatccccctagtgctgtctcatgacagagttctcatgagatctggttgtttaaaagtatgtagcacctaccctcattctctttcttcctcctcctccagccatttaagccatgcctgcttccccttcaccttctgccatgat

SEQ ID NO: 5527 - DNA, 533 bp, Homo sapiens
  MAP TO AF001551.1; EXPRESSED IN HEART, SIGNAL = 4.4; EXPRESSED IN BRAIN, SIGNAL = 5.7; EXPRESSED IN FETAL LIVER, SIGNAL = 5.3; EXPRESSED IN ADULT LIVER, SIGNAL = 4.9; EXPRESSED IN PLACENTA, SIGNAL = 5.7; NT HIT: AJ400877.1, EVALUE 3.20e-02; SWISSPROT HIT: Q9SS45, EVALUE 8.60e+00; EST_HUMAN HIT: AL045000.1, EVALUE 6.00e-26
gggtaaatttcaggcacgtcttgatccagggacttatttgaggaccctcttatttatctctttctcttgtctctgctgtctgtttggctggcttctgtgtcaggatccatgtttgccccctggctaataattgctagcaatactttcagaaatgactttgcagctctttctcaatattattagcaaagtttccttgtatctcactgattctcattaggttacatgatcatccctgaaccaatgactgtggacaggcaaatcttcattgcctctaacacgcagaactcctcatcacctccttacagccagactggagcttccaaggacattcaagttggcaaagactgtgagcatcctgaacatttaaaagagtccctctaataggcaacatttgttcttcaacatggtttcctaatttggtgaccacctatgcatcacctctctcatatcttgaagcttggacaaactggaacaaagtctctttgtccaggtcccaggtcacaagcctccagggttggggtgtggttgaaagt

SEQ ID NO: 5528 - DNA, 597 bp, Homo sapiens
  MAP TO AC040163.3; EXPRESSED IN BONE MARROW, SIGNAL =   4; EXPRESSED IN PLACENTA, SIGNAL = 2.5; EXPRESSED IN ADULT LIVER, SIGNAL = 3.1; EST_HUMAN HIT: AW352134.1, EVALUE 8.40e-01; SWISSPROT HIT: Q59121, EVALUE 2.60e+00
cctctttctcctgccctttctgccctcctcctcctgttccttttcttcttctcctttttctctacttcttctttcccttgttgtcttttttctcttcctccacctcttagttttcattttaattttttattattaaatttaatttttattattatacttattttgttgttgcataagatgaattcttattattgctccctataacaaattttgcctcacaaaaaagtactttgcaaaatgccagttgagctgagtgattctagagactccttactttcgaaatcgagacctcattgtctgtgtccttattggcataatcaggttcttctggtctgtgaagtggcactgtaattccattacagtctctcttcttttggaatggaaggaaaaaggtgttcattttatagaacattactgataataatatcactgagttctcattgttagagaaagagatatgtaatcacttatgctttactcaataaactctatacattttctaaaactactaagactttttgtttattctatgtattgtcattggttagctgtataacatcacttaggttacctacttcttgagccacaatttcctca

SEQ ID NO: 5529 - DNA, 504 bp, Homo sapiens
  MAP TO AC018725.1; EXPRESSED IN PLACENTA, SIGNAL = 1.2; EXPRESSED IN ADULT LIVER, SIGNAL = 1.3; SWISSPROT HIT: P12647, EVALUE 3.10e-01; NT HIT: M67508.1, EVALUE 1.00e-13; EST_HUMAN HIT: AL043679.1, EVALUE 0.00e+00
ttacaacccctttctggctggtggtcctgttccctcccttccaccctgacatctattttcccccgagcagccaaaatgatccttgggaaatgcaagtcagttttccactccttggtccaaaagcctttatggtttattaatgttattaaagttacaacctctttattggcttttagagaccctgaggtttgttcttcatcccctgctgcctcttgactacatctgtcctctcgcccttgcatcatcttttccagccacgttgtcctccctgctgttactctgtcctgtcatggacactgtattccctgttgctggtaacaaataacagacttcacagattaaacaacacttttgttctttctgacatggggaggacggtctcccacccctcaccctcgaaaggagtggccagccacaaccctaaatcatattgtttcactatccagagtgatccagagttggcaccctaacaaacaaagacactgtcctcccgcatgatatgtc

SEQ ID NO: 5530 - DNA, 556 bp, Homo sapiens
  MAP TO AL031592.1; EXPRESSED IN BRAIN, SIGNAL = 1.9; EXPRESSED IN HELA, SIGNAL = 2.5; EXPRESSED IN PLACENTA, SIGNAL = 2.3; EXPRESSED IN ADULT LIVER, SIGNAL = 1.8; SWISSPROT HIT: P23811, EVALUE 2.30e+00; NT HIT: AL163248.2, EVALUE 1.00e-04; EST_HUMAN HIT: AW805040.1, EVALUE 3.10e+00
ttatacccagctcctggcacacagtaggtattcaaaaatacttatcaccaaaattttttatattttacagatgaatggataccctcacacattaagcaacttgccttctgaaactgcattgccagggcctccagactgtgacaaggaggatgttttcaggcagagagcaggggaaaggctcaacctaagtttccaggaacaaaagcacaggtgagaatagggctatggggccaatggaatggtgaggtgtcgtttgtagctgggacatggagtatatggaagcacataatagaaggcaaaggttgctgggagaccagttcatgaagattttgagtgccctgtgaaggaacgtgaatatcattctacagcatattagtcttctattgctgccataaaagttatcacaaatttaatgccttcaaacaacacaaacttattatctcactgctatataggtcagaagtccaggttagcttggttggtttctctgttctgtgttgcacatggcccaaatcaaggtgttggccagctgggctcttattgcaaggctctggga

SEQ ID NO: 5531 - DNA, 519 bp, Homo sapiens
  MAP TO AC006942.1; EXPRESSED IN FETAL LIVER, SIGNAL = 2.4; EXPRESSED IN BONE MARROW, SIGNAL =   4; EXPRESSED IN PLACENTA, SIGNAL = 3.4; EXPRESSED IN ADULT LIVER, SIGNAL = 3.3; EXPRESSED IN HEART, SIGNAL = 4.6; SWISSPROT HIT: P02463, EVALUE 4.20e-01; NT HIT: AF289221.1, EVALUE 0.00e+00
agatgccattgctgtgtgtcccatggtggcgactgggctcattgctgccttgtggtgtattttagcttgttcctctatctggtgaattttcctgcggaaaattctgcagaaaaatctgcggaaccattttttgctggaacgcttgacagctcttgcatacacttgaaaacacgtcacattctaggaaacgtggtgattggtgctcctgtgagctgctggctggcatctgtcagtggtggagagctctggggggtgagggggcacctggttgagccttgtctcctttggcctcccagcctctaggccaggaggatggcaccgagtgtgcctgcagtggcctcttgctgaatggacacttgggtgggtggcttgtgcatttttgtcaggggctgctcagcactcacaccagtccttgggaaggcctgggtttgggggcacctctggggaaggttcctggagcttcctttgctctgtgagaaacctaaggagcctcagagctgcagatgaggaaactgaggc

SEQ ID NO: 5532 - DNA, 572 bp, Homo sapiens
  MAP TO AC018555.4; EXPRESSED IN ADULT LIVER, SIGNAL = 1.1; EXPRESSED IN FETAL LIVER, SIGNAL = 0.98; EXPRESSED IN BRAIN, SIGNAL = 0.89; SWISSPROT HIT: Q9ES18, EVALUE 1.40e+00; EST_HUMAN HIT: BG542649.1, EVALUE 8.00e-04; NT HIT: X71604.1, EVALUE 6.00e-04
tcccgtgactatagaaggcggggggaagagtgggaaggactttatattgtggttagagtgccaacatagctgaaatgaaatcaaacatcagttgagtttctaagattattgactcaaatttctggctcccagatagcatctctagactcccccagggcccagggcaacttgctacactgaagggaaggatgcaaacctagctggctttatcacctgcagattgcagagccttacaggcttgagtgaacataagtggtagccaggtagcagttacagtgcagtgggccttgggcaaaacccagtgctgttatggcttttgttccaacccagcacagttcctgtggtcatggaaacaagagtacttgcaacaccacacccccagttccaggaggttcagcacaaagagagagtccctttgtttgggaaaaagcaagggaaaataacaagaaatctcttcctggggaaccagatcctattcaagaccaccaaggcagtgcatctacgagtctgcaaaaacccaagtccctttgaatacttggaaatccttgtcaagaaggaagggcacaaacaaa

SEQ ID NO: 5533 - DNA, 573 bp, Homo sapiens
  MAP TO AL096870.3; EXPRESSED IN LUNG, SIGNAL = 1.7; EXPRESSED IN BONE MARROW, SIGNAL = 2.1; EXPRESSED IN PLACENTA, SIGNAL = 2.8; EXPRESSED IN ADULT LIVER, SIGNAL = 1.8; EXPRESSED IN HEART, SIGNAL = 2.2; SWISSPROT HIT: Q14934, EVALUE 2.00e-31; EST_HUMAN HIT: BE260545.1, EVALUE 0.00e+00; NT HIT: gi14750679, EVALUE 1.00e-109
ctagcataggcccagtggagaaagctagtacaaagcctgcggactgaggggaagttgcatgggacttacttggccgccatgttgttctcaggcagcagagtcatctccaacaccttggtgccactgactacggcttcatagctggccgtggccaccatcttgcctgtgatacggtgcacctgatagaaggcatgaggccgcaggttcctttcatctgcagtgccgatgaacatctgtagggtcagtggcttctcactgtagcctaggagctggcagagggagagagcggccacctcattgaaatccccaccgtctcatcctttattcatccctagattttcagtctaccatgggatgggaatggtgaaagataaaggatatcctgcaagggaatcccttggggaactgggcacccgttgtggagaaaacatggcctggagttcacagtgtttttcttggaataaagcccaaagtgggctgggcaaaggcagaagagcctccaaagagactggcccaactcaatacagagaaaacttaactcccagtgacttttgtcctcagcctaaaccctcc

SEQ ID NO: 5534 - DNA, 538 bp, Homo sapiens
  MAP TO AL031845.6; EXPRESSED IN BRAIN, SIGNAL = 0.74; EXPRESSED IN PLACENTA, SIGNAL = 0.61; EXPRESSED IN HEART, SIGNAL =   1; EXPRESSED IN ADULT LIVER, SIGNAL = 0.8; NT HIT: Z47735.1, EVALUE 1.00e-72; EST_HUMAN HIT: BF035327.1, EVALUE 1.00e-103; SWISSPROT HIT: P22293, EVALUE 3.80e+00
aaggcatgtcataagcccagacaagctgaaagctaggcctcttaagtcaaacagttagccaagatatgaatgcaaagggaaagttattaagggaagttaaaagtgctactctctatgaatgataagaaagtgaaatatatttgctgatatggagaaactttgagcagtctggatagatcaaaccagacacaacattcccttaagccaaagcctaatccagagtaaggccctaactctcttcaattgtatgaaggctaagagaggtgaggaagctgcagaagaaaagctggaagctagcagaggttggttcatgaggtttaagaaagaagctgtctccataacagaaaagtgcaaggtgaaggggcaagtgctgatggagaagctgcaacaaatcatccagaagatctggttaagatcattgatgaaggtggccacactaaacaacaaattttcaaggtagatgcaacagctttctattggaagaagatgccatctaggattttcatagcaagagaggtcaatggttggcttcaaagct

SEQ ID NO: 5535 - DNA, 600 bp, Homo sapiens
  MAP TO AC026733.3; EXPRESSED IN BONE MARROW, SIGNAL = 5.9; EXPRESSED IN PLACENTA, SIGNAL = 3.4; EXPRESSED IN ADULT LIVER, SIGNAL = 4.4; EXPRESSED IN BRAIN, SIGNAL = 3.8; SWISSPROT HIT: Q10979, EVALUE 1.00e-01; NT HIT: AL163202.2, EVALUE 9.00e-03; EST_HUMAN HIT: AV732244.1, EVALUE 6.00e-05
atttcaggcatttggagtgccaccttgcctagatcagcagcctgagatacccactctttctgtgcatagattatggtgcattgcaaccctctctgctccacacccaggcagatttctaggcattcagagcacctgcctgcctgggcctgcagcatgagctcctatccttcctgggcatagatcccgctgaagcaggaccctccctgttccacatccacacagaactccagacattcggagtgctcccttgcctggatcagcagcctgagacacccaccgtttctgtgcatggatcatggtgcagagggaccctctctgttccacatccaggcacatctccaggcatttggagtattcactcacatgaactagcagtctgagtcaccctacccttcctgtgcagagatcctgttacagagggtccctctcaacttcaagcccagacaaatctccaggcacttggagcacctgctcaactggctctgcagcctgagccacctcaccctcgccatgcggacactgtggtgcactgaatctttatccactccacacttaggcagatctccagccagtcagagcacccactcactcagatcagca

SEQ ID NO: 5536 - DNA, 558 bp, Homo sapiens
  MAP TO AC008959.4; EXPRESSED IN ADULT LIVER, SIGNAL = 0.54; EXPRESSED IN LUNG, SIGNAL = 0.79; EXPRESSED IN BRAIN, SIGNAL = 0.42; EST_HUMAN HIT: AW243540.1, EVALUE 2.00e-01; SWISSPROT HIT: Q9Y585, EVALUE 5.30e+00
atatggccaccaactgaaggtcagatacgtattatacacacagatttaaatgtatttatgaaggcatttattcaagagtgcccactgcagccttgattgtattaaaaagattggaaataatctaaaggcccatcaatagaggacaggttatatcacctagtaaaggttacaacatctatgtaaaagcacttaggattcaacttcacatttcataggactgaagatgacatattttgggggtctgacagctcagtttctggcaagcttggtaccataccctcctgactcaccatcattcccagacttacagggaaacaatctgaagtcacttcatcatacagggaaggtaagaaatatatctggatggaaatagagtcatcttctaccagtatattccatctaatctacttttccatagtgtgacattgtgatcaaagaatatacagtatttgaaaaggagtagatttgaacacctttttgacataatgagtaagtcactaaagtatattttagcatatatacatttcaaaaataggaagctctgaggcaatagggaca

SEQ ID NO: 5537 - DNA, 577 bp, Homo sapiens
  MAP TO AC006189.1; EXPRESSED IN HELA, SIGNAL = 0.6; EXPRESSED IN PLACENTA, SIGNAL = 0.9; EXPRESSED IN ADULT LIVER, SIGNAL = 0.86; EST_HUMAN HIT: AW600301.1, EVALUE 3.00e-99; SWISSPROT HIT: P27227, EVALUE 1.90e+00; NT HIT: AF217403.1, EVALUE 3.50e-02
tcattattcctgctttcccgataaggatacagaagctcagagagggcagacatttgacctggagtagaactagggcaagaatacaggccactgtgtgccccctcctcccacgctctgtttctctctgaagatgacctggggacagcataatacaaagtggatggaatgggctgagaaaggagaggggttagattttccatttaaccatgaggaggtggtgtgtgagctgggtttggaggagaaagatttagataaaggaagaatgtgggaaagagcacagcaggctggagaatggcgtgagccaaacaaaggagtagatgctagcagctgggtaaggcctggggtcttgcagtctctgagagcagtggccaaatggtaatgtgtgaggacaaaaagaaaaagggaaagaaggggtgtgcggaggctacccagatcctccacggagccaggcactgggtatttctgaatgttcatccacaggcaatgaccccattcccagcctttctgtcccagactctctctcccaggcagaccaagaactgcagacccaatccccagaaccatagctgctggggta

SEQ ID NO: 5538 - DNA, 530 bp, Homo sapiens
  MAP TO AC006997.3; EXPRESSED IN BRAIN, SIGNAL = 1.9; EXPRESSED IN FETAL LIVER, SIGNAL = 1.3; EXPRESSED IN PLACENTA, SIGNAL = 2.5; EXPRESSED IN ADULT LIVER, SIGNAL = 1.8; EXPRESSED IN HEART, SIGNAL = 2.6; EST_HUMAN HIT: BF674956.1, EVALUE 5.00e-05; SWISSPROT HIT: Q58367, EVALUE 2.20e+00; NT HIT: AF213884.1, EVALUE 1.00e-07
tgttcacctctcccttccacttgccagctaccagaaaatcaaatgaactaaatttcttatctagttaaaatttggtctagtctaatagtttcatagatccttccaataatacttcatttctctctaggaaaaaaaagtttggttcttcaaatagcccccctcatgatattggtggggaggagtccattggccttcatgatgatcctgtatgtgtgctagctctttgctactcaaagtgtgatctgtggaccagcaccaccaatgtctcctggcaggctgttggagatgcaggctaaactccagccctactgaatcagaatctgcattttaacaaaatccttaggtgattcataagtctgagaagcactgaagatctgatatctattcaatgtgcccctgagtactacttgcactgctgacattgaaagctgtgatctatggttggtaacatttttgtggaggtttggatggttgattgccttaatgtggggattttttgttttttggccccattggtttgctgagagcct

SEQ ID NO: 5539 - DNA, 599 bp, Homo sapiens
  MAP TO AC009757.8; EXPRESSED IN BRAIN, SIGNAL = 0.52; EXPRESSED IN PLACENTA, SIGNAL = 0.39; EXPRESSED IN ADULT LIVER, SIGNAL = 0.56; EXPRESSED IN HEART, SIGNAL = 1.3; NT HIT: gi10946749, EVALUE 5.70e-01; EST_HUMAN HIT: AI091735.1, EVALUE 0.00e+00; SWISSPROT HIT: P75166, EVALUE 2.60e+00
ttcaatatttgggcaggaggaaagaaatttccgataaaaattctgaggtagattaaacaataaaaaaacaataaaagtgggacatatggataatggttaataagccttgactattaaaatcagtatatttaaaatagaggaatttaaaatacagaatcaataacatggtattttgaaggaaagatggtaacagagtccaagtgtttagatatccttttattcagaagatatcaggtagggtagcacagttattacagaaacgaatgaagacacatgttgttattctgacagtcacagtggggtcagtaattccgcagtataaagtaacttcaaaattttgcttgcttgacaaatggaaagtttgcatttcgtgtacatgtcctacgtagatcattagatcaatctgcccttggagtgactcagggatgtgagataatggaggcttgttgacatgagcatctgtgatcaccagagctgtgggaagtgcaagcagtaaattattaattggcttttaaagattcggttccaaagtgagccatatcactcctgattataccacaatgattataccacaatggccaaagcaagtcatatggcca

SEQ ID NO: 5540 - DNA, 502 bp, Homo sapiens
  MAP TO AC025172.2; EXPRESSED IN BRAIN, SIGNAL =   1; EXPRESSED IN ADULT LIVER, SIGNAL =   1; SWISSPROT HIT: P28946, EVALUE 1.80e-01; NT HIT: gi16176547, EVALUE 4.80e-01; EST_HUMAN HIT: AI906093.1, EVALUE 0.00e+00
cttcaatcctgcccagagtccctggagactgttgtcattaaaccccactcctgtttaggaaaccccagggccagaccccactgccggaacgggaccctctcgtgcctgcagatggcaaagctcctgagggcctgatggaccctccaatgtcccacggccacagtttccaccttgacgccgaagccctgggatggcccctctgcaacgcccagtgctccatcatgacctggccccaggacgctgactgagggagcggaggggatcgggaccagggggaagcagccccccagtaaatccgaagcacaggcacggcacagccccaagggagaccttgtaggcgcctggccagcagggctgaggagaaagtctccactgcagggcgcctcctgggcccacgccgtgtggtcctggccccaagctgcccactgggcattcagcctggacagctctcggtgctggagacccagaggacaaggggacagcaacatcaaagaccacagcg

SEQ ID NO: 5541 - DNA, 575 bp, Homo sapiens
  MAP TO AL024494.1; EXPRESSED IN ADULT LIVER, SIGNAL = 1.2; EXPRESSED IN BRAIN, SIGNAL = 1.6; EXPRESSED IN LUNG, SIGNAL = 1.3; NT HIT: M97620.1, EVALUE 5.50e-01
atgcttttctgccttctcccaccttgttcccttatttgtaactctctgtggtctgtaacccaagcatcagctttcctggcaacccctcacagcctcctcttttcctgtaggaaagttgaagtgctgaccttcatcattcctgagctgcccccttggacactgctctaacctcatttccatgactccaggctgaattctatctgtctctcccaacactgctcttggccttctgattgggtctttccagtcataattcctcaccagtatgaattttaggcacccctccttattccaagagaggccactaaaactgtgagacacaagcacaacatcatcatcatcatcatcatcatcatcatcacctctcaaggacaaacatttatcctgagaatgtgtagttcaaagctaatgagaaaacatatttttctcaccaggctatgacttggcaggcagcccctcccccatgaagtcagcagtcaggttgttttgcagagcagagtttagatcctttccttcttcaccccacctctaaattaccttcttccagtactcttgggaacaggaaaaagccatca

SEQ ID NO: 5542 - DNA, 596 bp, Homo sapiens
  MAP TO AC008719.5; EXPRESSED IN ADULT LIVER, SIGNAL = 0.53; EXPRESSED IN HELA, SIGNAL = 0.42; EXPRESSED IN BONE MARROW, SIGNAL = 0.56; SWISSPROT HIT: Q9QXT8, EVALUE 5.00e-08; EST_HUMAN HIT: AL538404.1, EVALUE 1.00e-52; NT HIT: gi14723010, EVALUE 7.00e-53
tgcttttatgtccctgctccaggagatgatggacattgtcaaagccatctatgacatgatggggaaatacacatatcctgtgctcaaagaggacactccaaggcagcatgtggacgtcttcttccaggtaagtgcacacaccctgcacatgagctgtaagcccagcctagatcaagtcaacccacgagcatctgagcaaatgatttgtgtccaaccctgtactaagcatggttggtaacagaaaagaattataagatacattgtcctcaagaaacagatgatctccttaagctgcaagtgtacatgacagaagagaacaagaaagtatattattaaacgctagtggtatagtatgaactctaaatccataaaaatttggggatcagggtaaacacgaaagacttcattaattacaactgtggaggtgttaagcatttgtgtctgggaagtaaggggaaataagattggaaactaggatagggccagattatgagacctttaaatggaagagtttggccttgctctggtacaggatgggcagctagtgctgatccttgactaagggagtggtataatcattggggcattttaggaaa

SEQ ID NO: 5543 - DNA, 569 bp, Homo sapiens
  MAP TO AC026745.3; EXPRESSED IN HEART, SIGNAL =   1; EXPRESSED IN ADULT LIVER, SIGNAL = 0.92; EXPRESSED IN BRAIN, SIGNAL =   1; EXPRESSED IN FETAL LIVER, SIGNAL = 1.4; EXPRESSED IN HELA, SIGNAL = 1.6; EXPRESSED IN PLACENTA, SIGNAL = 1.4; SWISSPROT HIT: P75304, EVALUE 5.50e+00; NT HIT: AL163249.2, EVALUE 4.00e-05; EST_HUMAN HIT: AI264325.1, EVALUE 2.00e-16
tttctgtgtggttgctctggattcttctgtctttgcagaaccatcccagaagaaggaacatcatcacaaaggatgtgtgtggcagagaagggggtgagccaggggctggggggctgcagcctctggtacagagagctgactccaaaacagtctttaaaaggcctggttctacaggttctgctgaactaaatggtgcaaacgtttccagtgactactgccctgcctatctgacacagctagaaggtggctgtcttcaagccaagaagagagccctcatcagaaaccgaatggtgtttgacttgatcttgcacttccagcctccagatctgtgagaagtaaatgtctgttgtgtggtaataacaaagtattacattgagcaaagtgtgcaatctagtgtttcatgacaatctagtgcaatctagtgttgtatcatttgctcagtgtaatactttgttaaagattgacataatactttgtaatactttgttaaagattgacataatactttgtaatactttgttatgtcctgaaaattcatgtgttggaaatgcagtctccatgcaacagtg

SEQ ID NO: 5544 - DNA, 509 bp, Homo sapiens
  MAP TO AC005328.1; EXPRESSED IN BONE MARROW, SIGNAL = 0.91; EXPRESSED IN PLACENTA, SIGNAL = 0.6; EXPRESSED IN ADULT LIVER, SIGNAL = 0.63; EST_HUMAN HIT: BF998198.1, EVALUE 0.00e+00; SWISSPROT HIT: P43563, EVALUE 3.00e-16; NT HIT: gi13639766, EVALUE 8.00e-03
catttgttccgtgggagaacgcaggatccctcccagctacctcaccacttgtcccatcagcagggtccccggggcccaactccagccggggccgccagctgctgggccgaccgcaagcagtcagggtcctggccccggaagggttcctctgccacgggccaccagccccaccgtaaccgcacgccctcagccccaagcccgcgcaccagtggctccagctccttggtgtcgatgaggccgaactccttgacgaaatagtagaagtgcttgtagcaggtgttcacgtgggcctcggagcccatctgcgcgatgcggtcaaagtggtggatgtagacgtgcacgaacacgcggaacagccgcgacaggatcttccgcaccgtctgcaggaagttcttgggaaacggagtgcctgcagggagaggggtgggacgggtccacggactcagccaagtccatgtccagaaccctttgctcctggatgtgacaaggggcttccagacagaaattgc

SEQ ID NO: 5545 - DNA, 549 bp, Homo sapiens
  MAP TO AF020803.1; EXPRESSED IN BRAIN, SIGNAL = 2.2; EXPRESSED IN FETAL LIVER, SIGNAL = 2.6; EXPRESSED IN BONE MARROW, SIGNAL = 2.2; EXPRESSED IN PLACENTA, SIGNAL = 2.5; EXPRESSED IN HEART, SIGNAL = 2.3; EXPRESSED IN ADULT LIVER, SIGNAL = 2.5; EST_HUMAN HIT: AA524544.1, EVALUE 6.00e-94; SWISSPROT HIT: P08547, EVALUE 8.00e-53; NT HIT: AJ229041.1, EVALUE 0.00e+00
gtgaatacatctggccctgggctttctttgttggtaatttttaaattaccatttcaatctcactgcttgttattagtctgtttggggtatctaattcttcctgatttaggctaggagggttgtatttttccaggaatttgtccatctcttttaggtttgctagtttatgtccgtaaaggtgttcatagtagccttgaaagatcttttgtatttccatggtgttagttgtaatatctcctgtttcatttcttaatgaggttatttggattttctctcttcttttcttggttaatcttcctaatggcctatcaattttatttatcttttcaaataaccagcatttttgttttatttatcttttttggtttcaatttcatttaattctgctctgatcttaattatttcctttcttctgctgggtttgggtttggtttgttcttgtttctctagttccttgacttgtgaccttagaatgtcagtttgtgctctttcagtttttttgatgtagacgtttagggctatgaactttcctcttagcattgcctttgc

SEQ ID NO: 5546 - DNA, 597 bp, Homo sapiens
  MAP TO AC022336.12; EXPRESSED IN FETAL LIVER, SIGNAL = 1.4; EXPRESSED IN LUNG, SIGNAL = 0.57; EXPRESSED IN HELA, SIGNAL = 0.78; EXPRESSED IN PLACENTA, SIGNAL = 1.1; EXPRESSED IN ADULT LIVER, SIGNAL = 0.83; EST_HUMAN HIT: R19772.1, EVALUE 1.00e-113; SWISSPROT HIT: O75962, EVALUE 7.00e-60; NT HIT: gi14729830, EVALUE 0.00e+00
cctgcttccttggatctctgcagcctgaaaacctgctcattgacctacggattccagtgcctcgagtgaagctcattgacttggaggatgctgtccagatctcgggtcacttccacattcaccacctgctggggaaccctgagtttgctgccccagaagtcattcaaggcatccccgtctccctggggacagacatctggagcatcggggttctgacatatgtcatgctgagtggggtctcccccttcttggatgagagcaaagaggagacatgtatcaacgtatgcagggtggatttcagcttcccccatgaatacttctgtggtgtgagcaatgctgccagagatttcatcaatgtgatcttacaggaagattttcggaggcggcccacagcagccacatgcttgcagcatccatggctgcagccccataatggcagctactctaagatccccctggacacctcccgcctagcatgcttcatagaacgtcgcaagcaccagaatgatgtgcggcctattcccaatgtcaagagctacattgtcaaccgggtgaaccaagggacgtagccatctcccagcccctatggtttcacat

SEQ ID NO: 5547 - DNA, 591 bp, Homo sapiens
  MAP TO AC026736.3; EXPRESSED IN BONE MARROW, SIGNAL =   1; EXPRESSED IN PLACENTA, SIGNAL =   2; EXPRESSED IN ADULT LIVER, SIGNAL = 1.3; EXPRESSED IN HEART, SIGNAL = 2.8; EXPRESSED IN FETAL LIVER, SIGNAL = 2.9; SWISSPROT HIT: Q9UKP4, EVALUE 1.90e+00; EST_HUMAN HIT: AA504366.1, EVALUE 2.10e-01; NT HIT: AB029330.1, EVALUE 1.40e-01
aggtgtggtatgcccttcacactgttcccaaattaaaacatgaaaaactatgagctagaaaagtatgacaaattagttataaaggaacaagaatacatcaaatgatcccaatgcctggaagcagacctccccgaactgtgctgggaagatgctcttccttacagcctctggggccgctggctgccagcctgctgcagcatctggggcaatgaacatccttggaagccccttccccaagctgactctcctcttacttgtctttccctttgtttcttccttcctacttgtgcctgggttattgcaacagtgtccaggtgtcccatctgttcttgcttcaagagacctgcaggtgacagacacacatttgtttgctctcaaacaaatctttcccatttaaattgctgtccagttgtcatagaaagtctaactcacagggcttgtcttgtgagatcctctaaaacttttttacctaagccacccttgctgctcaagattgtctgggattatctgagtggactatgaatgtaatcacagtgtcttcataaaagagaggggtgacaccagtgggggagaggcaatgatggacagaca

SEQ ID NO: 5548 - DNA, 557 bp, Homo sapiens
  MAP TO AL078589.8; EXPRESSED IN BRAIN, SIGNAL = 2.9; EXPRESSED IN PLACENTA, SIGNAL = 2.2; EXPRESSED IN HEART, SIGNAL = 2.6; EXPRESSED IN ADULT LIVER, SIGNAL = 2.1; EXPRESSED IN LUNG, SIGNAL = 4.2; SWISSPROT HIT: Q9P2K6, EVALUE 8.00e-01; EST_HUMAN HIT: BG181952.1, EVALUE 1.00e-120; NT HIT: AB067487.1, EVALUE 1.00e-120
actagccctcccatttctcccaccactgtgatgaaaaccttagtgagtcaatctgaatttcttgcctgctctttctcggatttatttctaagagatcttttttcatttttattttttggcacccaggaattaaatagctttaattacttggatctgtacagacttgctgacctctttaacctcactttgttggagaaggcagtgatcgatttcttagtgaaacatctctctgaactcctgaagagccgcccagaagaagttctaacgcttccctattgcctgcttcaggaggtgctgaagagcgaccgcctgacctccctgagtgaagagcagatctggcaggtaagggcgctgtgcacggtcgcttttggcactgaaaaagcatgccgtgattggaagttaaaggactgaggaacaattaccactattttagtggctttggtcctcatggagttgttttagaagtcatgcttccttgatggacaagtgattggagaacactggcccttgaggctcagagccctcagcggactctgccgcttaactcagggaattgc

SEQ ID NO: 5549 - DNA, 571 bp, Homo sapiens
  MAP TO AC012467.9; EXPRESSED IN BONE MARROW, SIGNAL = 0.69; EXPRESSED IN PLACENTA, SIGNAL = 0.54; EXPRESSED IN ADULT LIVER, SIGNAL = 0.65; NT HIT: D43742.1, EVALUE 0.00e+00; SWISSPROT HIT: Q01668, EVALUE 8.00e-65; EST_HUMAN HIT: BE175413.1, EVALUE 0.00e+00
cagagcacagagcacagacccgccttgctccttgggactagacgcaacacgggcagacaccacatgagcaagtccaaacacattgtcaaggttaccttttcacactggaccttctctgaggctcccggtcatgcttgtgggaagaatgatgcccattttcagacacatgctcaaggttcccaatgctgggccgctttccatgggcagctttggacatattggcattattgagattggcatttgttgaggtgggaacttgctttcctatggaattatggttatgatggttatgacacaccgaatttcctgctggaggaaacagcggtttctcagtatcacttgcaggtggaattgaaggcctttggacatgcaggggacggtgggtggtattggtctgctgaagggaatctctcctatcactattaacatgattgacatggtttccaagcagggcaccatttctctgcaaaataatgggagacaacaccaggtaatttaacaagtatttgatgcagactagctatgttaggtaactttttctacatgaaaaacaaattctaggcaagctccg

SEQ ID NO: 5550 - DNA, 522 bp, Homo sapiens
  MAP TO AL117187.3; EXPRESSED IN HEART, SIGNAL = 1.2; EXPRESSED IN ADULT LIVER, SIGNAL = 0.92; EXPRESSED IN FETAL LIVER, SIGNAL = 0.94; SWISSPROT HIT: P31695, EVALUE 3.70e-02; EST_HUMAN HIT: AW971153.1, EVALUE 7.30e-01
ggcattcttgaggagtttgcagtatagtgggtgtaacagacatacagaagtcctagaagcaaaagtgtgtggacagggcgttgccaaattcctcagccagctgccaggtactgctaattccactgcctgaacagctggagaatccatctccatgaccaccactccggcgaaggccgccactgcctgacacctgtatcaccgaggccagcagggccgcctgacagcctgcctcactcctctgatcacttctccacaccacaactaaagggacaatctgatccctgtttaagtcctccaaaagctccttgatgtcctttcgataaggtctaaaaagcagaggcaggctacactgtagagagttggactccctcctcacaggtggattctgggtcttgttcacagttgggtgctagcacagggccagaccctgggtgaccaatgattccagggggtctttatgatacagtgcagtctggtgacatcataatgcaagccccctgcccaggagaggtttttggtcca

SEQ ID NO: 5551 - DNA, 562 bp, Homo sapiens
  MAP TO AC008772.5; EXPRESSED IN ADULT LIVER, SIGNAL = 0.39; EXPRESSED IN BONE MARROW, SIGNAL = 0.5; SWISSPROT HIT: Q62377, EVALUE 4.10e+00; NT HIT: AF278739.1, EVALUE 5.40e-01; EST_HUMAN HIT: AA626133.1, EVALUE 3.10e+00
gtaccttcgactgacctcgctgctgaatacttattgtgatttttgtgctgcagcacattccaagttcaaagtaagatgtatctgccttagtaatacatgttggagaaaaatcaatttctatgataaatggcgtggatcctgtcttgtcttggggcactgttggcagtgcagtctgagcacagtgtgttcattcctgagagaccacagctctctgtgcaccatgaagcacttgctatgtctgaatgttttaggctaaagctgcagtgtgcagggaaggaaaccacggctaaccatttgatcatatctgagggaactcttcgtgggccttgaaggaaaggtggaatttgcacttgtatgaatgggattggaggcagtggggcacagagaacattccaagctgagaaggcaaggtcaggaaaggaagccgcgtgggaggagcagagtgtggagcacagagtctgccatcaacagaagagacaggaacacaggttgaagcaactgatggggcctgaattaggactctttcaacgtaagtaactgacgcccgattcaaattaggtga

SEQ ID NO: 5552 - DNA, 542 bp, Homo sapiens
  MAP TO AL049753.1; EXPRESSED IN ADULT LIVER, SIGNAL =  12; EXPRESSED IN HEART, SIGNAL =  12; EXPRESSED IN BONE MARROW, SIGNAL =  12; EXPRESSED IN BRAIN, SIGNAL =  11; EXPRESSED IN PLACENTA, SIGNAL =  15; EST_HUMAN HIT: BF941024.1, EVALUE 2.00e-13; SWISSPROT HIT: P39188, EVALUE 4.00e-04; NT HIT: U62293.1, EVALUE 1.00e-17
tcttaaggcataggggcttgcattggaatcaaatataatacagaattgacctcataaaacatagtctaactaaataaaaacaggaagataccctatacttcttccatcagtaatgacaacttccacaaaacagatcattggaaggtctgtgtatagttcgatgtagggatcaggatagaagcagcacaggctgaacagattggcaattgcactattttctaggacattacctccatacaaaggattcactctgtgaaggagtagggataagaaacatattgttgccaagacattgtaggaaatgtagtttttaaaatattctgataatgtagagcattgaagaaactggacatgctctgcagctcacacctgtaatcccaggacattgggaggctgaggcaggaggattgcttgaggccaggagttccaagactagcctgtgcaggatcctgtctctataaaaaaattaaaaaaaaattagccaggcatggtgtgcacacctgcagtcatagttacttgggaggctgaggtgaggagttcaa

SEQ ID NO: 5553 - DNA, 521 bp, Homo sapiens
  MAP TO AF031075.1; EXPRESSED IN BONE MARROW, SIGNAL = 2.8; EXPRESSED IN PLACENTA, SIGNAL = 2.6; EXPRESSED IN ADULT LIVER, SIGNAL = 2.4; EXPRESSED IN BRAIN, SIGNAL = 2.1; EST_HUMAN HIT: BF880349.1, EVALUE 1.00e-128; SWISSPROT HIT: P51617, EVALUE 3.00e-33; NT HIT: gi14768302, EVALUE 1.00e-103
aggaagctctgcttcactgcagtccactccaggtcagcgttctgcagcccccagggtgcggtgggggaaggggcagggaagacgggcagcgtgaggctctcgaagcgaaggccttcgggccaccagtgccacctacccgaggcccagaaccaccaaggggccagggaccctacgccagaatgagggctgaaggagttgtgtggggaagcgagggggaaaggctggagaagtggtgagggttatctgatggccttccagggtccctgccagggtgcgacactcacctccttcagcctcttcacagcatacaccgtgttcctcatcaccgcccggtacacgcacccaaagccaccctccccgatcttgagctcctccgagaagttgtgggtgccccgggaaatctcacagaggggccagcaaaacggaaaggggcgggctccctgcaggagggacactgagctctctgggcctggctgtgggaagagagcctggatcaggtggggtccctgtctcttcccttc

SEQ ID NO: 5554 - DNA, 502 bp, Homo sapiens
  MAP TO AC006277.1; EXPRESSED IN BONE MARROW, SIGNAL = 1.3; EXPRESSED IN PLACENTA, SIGNAL = 1.7; EXPRESSED IN ADULT LIVER, SIGNAL = 1.5; EXPRESSED IN HEART, SIGNAL = 1.8; EXPRESSED IN BRAIN, SIGNAL = 1.5; EST_HUMAN HIT: BF811305.1, EVALUE 2.80e+00; SWISSPROT HIT: P22579, EVALUE 9.10e-01; NT HIT: AE007657.1, EVALUE 1.20e-01
cgcagctcaatcatcaactgtccccatgcccctgttgcttatacccccaccccactgcaatagaacctcaagcctctggcattactctcctgcctctaatccaactaacccttctccctattgcaacagccccttctccccctcccccaatacctcgcaataatcctttttcataaaagtttccttactacgtttgggtttacacaagcttgaccacatgttcgcagcctcccgtttcttccccaaactttactcagccttctgtcctctccgcaggcccctgaactttggcccccccgagtctgagcaagcagtaagtgtggagtcccctgtcacctcccctgagctagctgaccacgaggaggtacatttactgtcaacctcctttctgcttgtcccctaaaacgttcctccaaaccttttcttgtgtatgaaagtaaagccttttcctggttgattttgagacctggcaggtttcggaggctggggcttatccctattt

SEQ ID NO: 5555 - DNA, 500 bp, Homo sapiens
  MAP TO AL109825.23; EXPRESSED IN BRAIN, SIGNAL = 1.6; EXPRESSED IN PLACENTA, SIGNAL = 2.9; EXPRESSED IN ADULT LIVER, SIGNAL =   2; EXPRESSED IN HEART, SIGNAL =   2; EST_HUMAN HIT: AI685151.1, EVALUE 5.00e-05; SWISSPROT HIT: P57529, EVALUE 2.70e+00; NT HIT: M13792.1, EVALUE 2.00e-06
tgagaacatggagccacttggttagctctctttgagagttgtccaacaggtaaagcaggggcatccaccagtatctgtttttaattgcttctgtctttacccaaggtcagaaatgaacattgggatttgactgaggagttactttccatttcttacttatgttttctttattcagttatagggacagggtggccatggggatggtgagggaagtttggactttgagaccattttgatcagggcctttactctttataaatgggaagtgacttgcaggcattaataggctcatcaggttctcacctttggtgcatctcccccatggtcagtgccagcctagtcatggatctcgacctgatcagtggacttttctccataaactttccctaacacctggagagatacttcagctgcaatgtcacctcctcagagaggccttccttgattgcattatctagaggagattcccacccagccctgcccagcagtcaccctctatg

SEQ ID NO: 5556 - DNA, 569 bp, Homo sapiens
  MAP TO AL118556.2; EXPRESSED IN PLACENTA, SIGNAL = 2.6; EXPRESSED IN ADULT LIVER, SIGNAL =   2; EST_HUMAN HIT: BF917548.1, EVALUE 0.00e+00; SWISSPROT HIT: P14078, EVALUE 2.00e-13
gcctgtacacttgccctagcccaggcaggcaacgaagatgaaataatactgcctaccaggggaagattctgagatcacccaaacaatccagaagttacataaggtacagataggccagaacccctataacagccctgtgtggcctgtgaaaaagccaaatggcacttggaaaatgatggtagactaccatgagctaaatgaggtggtgctgcttgtatctgctgccgtacccaatattactcaactgccacagcaagtagtccttaagctgggaagtgtccgtgctatgattgacttggattatgccttttccagtattcctttagtggaagatttacaagaccagtttgccttcacttgggagggccaataatggactttccaggtactaccaaaaggatacctgcacaaccccaccatctatcacagtatagttgcatagtacctatctagactctctttgcctgcctcagtctctgtgtttcactgtattaatgatatcatgctaacctcagagtctcttgcagatgtggagactaccctacaaaccaccttggatggcctaaaga

SEQ ID NO: 5557 - DNA, 591 bp, Homo sapiens
  MAP TO AC003004.1; EXPRESSED IN ADULT LIVER, SIGNAL = 1.3; EXPRESSED IN BONE MARROW, SIGNAL = 1.4; NT HIT: D55649.1, EVALUE 1.00e-57; EST_HUMAN HIT: BI910195.1, EVALUE 0.00e+00; SWISSPROT HIT: P49641, EVALUE 1.00e-17
aacaacaggatgggttctggttttctatttctggtgttttccactttgcttgatagaggtccctgctcagggaacaaaagttctcaagcgatctaccttgtctggaactccccctgccaggcctccggagctctgaaaacatgtctacagcttccccccttctctccagaaagccctggagtgacactttcttctcccagcctgtcaccgaatctcagcccagtcttaccaagctcatgcctgccattcctaggtgctctgtttccccaccctactcaccttgccttggcttgtggtgcagttgaagcccaagttcttggcctccaggccgcagtcaaaacccttgcggtgtaagatgagtgcggtctccgccgagggtagggtgtcctcctggatgacagacagtgcccagggaagtgggcgcagggctttcagagatcggagatgcagcagcgcctctgcccagaggcagtgctggcacagggaggcgtgtgggtaaggaaaggccaaaacctggtcctggaggtttggagccgaatacctgctaaggggtctggacctcatcctggaggctaaggaaggagctgagca

SEQ ID NO: 5558 - DNA, 556 bp, Homo sapiens
  MAP TO AC005947.1; EXPRESSED IN HELA, SIGNAL = 0.71; EXPRESSED IN FETAL LIVER, SIGNAL = 0.49; EXPRESSED IN BRAIN, SIGNAL = 0.7; EXPRESSED IN ADULT LIVER, SIGNAL = 0.66; SWISSPROT HIT: Q00887, EVALUE 2.30e+00; NT HIT: U04325.1, EVALUE 6.00e-78; EST_HUMAN HIT: BG623707.1, EVALUE 0.00e+00
caaaaatgacatcacggctgctacgttggattattgaaagcaaaagttcctaatcctggaggagctgtcatggaaagaaaagaaaagaaggaatgaaggtgatgttattttacatgggggagcgtcaggaacaagcatgtaacatgagatactgtataattgtttcttcaaggactacattatttctgttggaaaattgatgggagatgattatattcttgcagttttttttccctctcaccatgtttctcagttggtgatcagtcctctgtcaattctctactgcactcaggtattttggaaggctttcagacgtgagaaaggctgattgctattttctatgtcattggaacttgtcacctttgcaccttttcatggttgcatctttttctcagtgtctctgttgtggcagtcatgaatgagactctgtcagatctccatggcagggacctgattgacagaaggcccaggtcagtgcatttcaaattcaccacctcctttgcacagaaagcttctttcctacaggctcccaggaagggtgtgaaagcaagcctag

SEQ ID NO: 5559 - DNA, 597 bp, Homo sapiens
  MAP TO AC012601.5; EXPRESSED IN BONE MARROW, SIGNAL = 0.52; EXPRESSED IN ADULT LIVER, SIGNAL = 0.56; NT HIT: AF260225.1, EVALUE 4.00e-73; EST_HUMAN HIT: AA677469.1, EVALUE 2.00e-75; SWISSPROT HIT: P34056, EVALUE 2.00e+00
gtcacttccacattttgggggatcataatagcactgcccaactctacctatactaatttactgtattagttcattttcatactgctatgaagaaatacgagaatgggtaatttataaagaaaaagagctttaatgaactcacagttccacatggccggggaggccttacaatcacggcagaaggcaaaggaggagcaaaggcatatcttacatagcagcaggcaagagagcatgtgcaggggaactctcctttataaaaccatcagatctcatgagacttatgcactatcatgagaacagcacaggaaaatccacccccattattcaattacctctgaccaggtccctcctacaacacatggagattatgcgagttacaattccagatgagattttgatgaggagacagccaaacagtatcaaaaggtatcatgtcttttgcaagaacatgtatgtagctggaggtcattatctttaggaaactacatgagaacagaaaaccagatgccacatgttctcacttgttagtaggagctagataacgagaacacatggacataaagagcagaacaatagacactggagcctacttgaggg

SEQ ID NO: 5560 - DNA, 560 bp, Homo sapiens
  MAP TO AC006291.1; EXPRESSED IN ADULT LIVER, SIGNAL = 0.43; EXPRESSED IN FETAL LIVER, SIGNAL = 0.4; EST_HUMAN HIT: AL559045.1, EVALUE 0.00e+00; NT HIT: gi15308270, EVALUE 0.00e+00; SWISSPROT HIT: Q05921, EVALUE 4.00e-05
gtccagccatccacagtcactgcatgagcatctgccccctgtgaaatgatctcctagacaatatctacgtgtccactgtaggctgcacgatgaagaggggtatactcatcttcatccctagtgttcacatgagcagccttttcagaaagtagtctctgtactgtagtaagccgatttttttcagcagcccaaagaagcaatttgcttgggtctttttccattgttttttcttgcaattgataccactcttcatttttttcatcttgctcttcgtcttcttcagaattgcctacccaaagactttgagcaccagtaggaataaggtgtccatgtgtttccaaaaattcaagttggttaaagtgttcggaaaaatccaagaaattcccttggtctggtattccatcatcatttcctttttctttttccatttttactactattctaaataaaaagcatttcaaatgccagggtataaataatctttctagagatgaattatgattgctttattcatcaagatctgacagaagggaaaatagccaacatgcatctcacttccg

SEQ ID NO: 5561 - DNA, 569 bp, Homo sapiens
  MAP TO AC008705.4; EXPRESSED IN HELA, SIGNAL = 0.58; EXPRESSED IN ADULT LIVER, SIGNAL = 0.66; EST_HUMAN HIT: BE890342.1, EVALUE 8.00e-01; SWISSPROT HIT: Q07432, EVALUE 3.20e+00
atgaaccccacaaccaactccgagatgctggtaggcagttaatttctccattttgccagaagataaagtttaagcttaaacaaagacagctcttctgttgcccaacagtggaagtgcagaggccggaaagtacgaggtgtagaagagggagctatgagaaagagcagatgggaagatggggacggaacagaagaaagctattatgtcaagaagaaagtgacgggagaaggggggcctgaagagtcaaatgacatcaacgatgaagggcaaaaatggcataaagatcgatgaagtcagtctctattttgtactcctgacatatgaaacctctttctcaaatagccacaactgaaaaaacagttgggataattattgagccaatgaagcccctttattctcaggaaggtgacccacattgaccaagagatgccaatcctaggctaagtgcaagaaaatgggccttgagcatcccaacggggcagcctgctttccttgtaatacttctttctttccccagtacaaattaaatagccacagatgttattcaaaggtgatctgctagccacaca

SEQ ID NO: 5562 - DNA, 561 bp, Homo sapiens
  MAP TO AC008455.5; EXPRESSED IN PLACENTA, SIGNAL = 0.39; EXPRESSED IN ADULT LIVER, SIGNAL = 0.89; NT HIT: AL163246.2, EVALUE 3.00e-15; EST_HUMAN HIT: AI813704.1, EVALUE 7.00e-26; SWISSPROT HIT: P03371, EVALUE 1.60e-01
tggcattgcttctgactgacaaactcactttgctgcaaagtaagtgcagcagtgggcccaggctcatagacttcactagtcttaccatgttctccaccatactgaagcagctggtctgatgaaacagtggaatgtccttctgaagactcagctatagcaccagctaggtggcagtacatcagagggcatggacaagattctctacaaggctgaatatactctgaatcactgtccagtatatggtgctgtttctccaataactaggattcatgagtccaggaatcaaaggtggaaataggagtgactccactcactattacccgcagggacccactaacaaaatttttgctttctgttctcataaccttatgctctggtggcctagggatctcagttcctaagggaagaatgctcccaccaggagacacaaaaatgattccattgaactggaaattaagattgccacctggcccctttgagcttctcatgactctgaatcaataggcaaagaagtgagttataatattatactgggtgaggtggctgatcctcgctacagaa

SEQ ID NO: 5563 - DNA, 522 bp, Homo sapiens
  MAP TO AC007207.22; EXPRESSED IN PLACENTA, SIGNAL = 1.9; EXPRESSED IN ADULT LIVER, SIGNAL = 2.7; NT HIT: AL163284.2, EVALUE 1.00e-105; EST_HUMAN HIT: BI835093.1, EVALUE 0.00e+00; SWISSPROT HIT: P22983, EVALUE 3.70e+00
tggtctcttcacacagacgcgcatgaaatttggtgctgtgactcggattgggggacctcccttgggagatcaatcccctgtactcctgttctttgctccgtgagaaagatccacctatgatctcaggtcctcagaccgaccagcccaaggaacatctcaccaattttaaatcaggtaagcggcctcttcttactctcttctccaacctctctcactgtccctcaaccactttctcctttccactcttcaatctctcccttctcttaatttcaattcctttcattttctggtagagacaaaggagacacgttttatccgtggacccaaaactccggcgccagtcacggactgggaaggcagccttcccttggtgtttaatcagtgcagggacgcctctctgattatacacccacgtttcaagggtgtcagaccacgcagggacgcctgccttggtccttcaacctcagcggcaagtcccgcttttctggggtaggggcaagtagctcaaccccttctctcctt

SEQ ID NO: 5564 - DNA, 547 bp, Homo sapiens
  MAP TO AF045450.1; EXPRESSED IN PLACENTA, SIGNAL = 2.5; EXPRESSED IN HEART, SIGNAL = 1.5; EXPRESSED IN ADULT LIVER, SIGNAL = 1.5; EXPRESSED IN BONE MARROW, SIGNAL = 1.2; SWISSPROT HIT: O79403, EVALUE 5.10e+00; EST_HUMAN HIT: R77331.1, EVALUE 4.00e-86; NT HIT: AL163280.2, EVALUE 0.00e+00
tcgattaggatgaacccaggcacttagccatgcaggaacaatggcgagcctttagcctgattggaagtggcaatgggcgcctcactggatcaggagcacagcagatactctgccggatctggaggaatggaagtcagcggcgggtctgcgatggtggcaaacagcagtggtggacggtgagtgaaagctcagctcgagccgtaacaaacacggaccagaagagtgcagttgcaagatttaatagagtgaaatagagtgaaaacagagctcccatacaaagggaggggtcccaaagggggttgcccccatccctctttttctatctctactttttctcaattatcttcagctcaaaataatttatatgccaaaatggcatattttggggtggcatatcctaatccctttcagcatagaggtttatttttttgaatcaataactgaggaataattattcttactaaaactcaataattcaactcagaagggtcttccaaagaagttggtctcccagcatgctctgggttctgtttgcttgctgatggaa

SEQ ID NO: 5565 - DNA, 514 bp, Homo sapiens
  MAP TO AC010163.7; EXPRESSED IN PLACENTA, SIGNAL = 0.39; EXPRESSED IN ADULT LIVER, SIGNAL = 0.49; EXPRESSED IN LUNG, SIGNAL = 0.61; EXPRESSED IN FETAL LIVER, SIGNAL = 0.53; EXPRESSED IN BRAIN, SIGNAL = 0.7; NT HIT: gi11036651, EVALUE 7.60e+00; SWISSPROT HIT: Q28343, EVALUE 9.40e-01; EST_HUMAN HIT: AA586587.1, EVALUE 4.60e-02
ctgtttcttctcaggcccaggctcaacccagccctggagatagcccagacatgggccttcagcatggaacatcaaccccattcacacgtggtcttaagattagttacaaagaccaaggccagggtgagcctggagcaaccatgtattcaacgctcctactgctgtaagtcttgctgtttgggacctgttttctccaggtgctccacatacatcacccacacccactgcttggaacacagcatgtttgccctgctggttcccttccaagatgacaaccataaactctgcagtctgaaggagaccctctgtttctggagggttaccagaaggttgtgctgcccatccatctcccagaagagcctgtgcctttccttcatttgaagtcagaccatcccctaccttgccgtgtgttctgttccaggtagcattgccttgccacctagctccacttaggtgtggtaccctgggcttgtattgaaggcaggatgttgggagaagcagcccctaagaagct

SEQ ID NO: 5566 - DNA, 510 bp, Homo sapiens
  MAP TO AC010219.4; EXPRESSED IN BONE MARROW, SIGNAL = 1.2; EXPRESSED IN ADULT LIVER, SIGNAL = 1.2; EXPRESSED IN PLACENTA, SIGNAL = 1.1; EXPRESSED IN HEART, SIGNAL = 1.6; NT HIT: AL163283.2, EVALUE 1.00e-16; SWISSPROT HIT: P07026, EVALUE 4.70e+00; EST_HUMAN HIT: BI917761.1, EVALUE 2.00e-10
atgaatggcttagcgctctcctcttggtgatgagtgagttcacatgagatctggttttttaaaactctgtggacctcccctgacttgttctcttgttcctgcttttgccatgtaatgtgcctgctcctgctttgcatttcaccatgattgtaagcttcctgaggccctcaccagaagctgagcagatgttggtgtcatgactatacagcctgtagaagcatgagccaattaaacttctattctttatcaattacccagcctcaggtatttctttatatcaatgcaagaatgacctaatacaaaaaattggaactaaggagtagaggtttgctgtaaagatagctgatggggaagtaacttcagaactgggtaatgggcagaggctggaagagttttgagggctcagaagaagacaggatgataagggaatgtttggaacttaaactggctaaatagttgtgactaaaatgctgatagtgatgtggatggtgaaatccaggctgatgaagc

SEQ ID NO: 5567 - DNA, 589 bp, Homo sapiens
  MAP TO AC009007.4; EXPRESSED IN ADULT LIVER, SIGNAL = 2.4; EXPRESSED IN HEART, SIGNAL = 3.3; EXPRESSED IN FETAL LIVER, SIGNAL = 2.7; EXPRESSED IN PLACENTA, SIGNAL = 1.6; EST_HUMAN HIT: BG180936.1, EVALUE 1.00e-129; NT HIT: gi7706042, EVALUE 1.00e-116; SWISSPROT HIT: P13904, EVALUE 8.60e-01
gttctcccccgatctctctctcaggcttttgctcctctctgccccactcctaatcttgggggttcatggatgggggttcctgcactcaggtcaaggttcacacctggctcagggattccctagacctttgtcacatttggaatctcaagctcctggagaggcagggtgacctcagaagctctcttccacccacggccatagacagaggcagccagggagccccgtgccccacaagccaggggccaaatccttggccctgctgctcccagcggcagagctcgagacgcgtgctgcacaaccacagccactcaccagcgtccagaggacatagatggtgaagagggcgatggtgagggcaatgagacccacggcctccagctggctgtggagccggaggtggtcctgggccccgcgcaggcacaaccagcctgagatggcggccagcggtgtgatgaacaggaaacacaccatgtcgcagcacagtgtccgcttctccgtccgcggccccgggtccttcagccactgcaggggagaggatagggggcagaggagagggggcagagaaggggctactgagggggaggggtaa

SEQ ID NO: 5568 - DNA, 520 bp, Homo sapiens
  MAP TO AL121868.11; EXPRESSED IN ADULT LIVER, SIGNAL = 0.81; EXPRESSED IN BRAIN, SIGNAL = 0.74; EXPRESSED IN HELA, SIGNAL = 1.2; EST_HUMAN HIT: BF825372.1, EVALUE 8.00e-07; NT HIT: AJ229041.1, EVALUE 5.00e-07
ttggctcatgcaatatggaggctgagaagccccatgatctgctgtctgcaagttggagatctaggcaagttggtgctgtacttcagcctgagtgtgagtctgaaggcttgagcaccagggaagctgatgttataaattccagtctgagtacaagagaagactggtgtcccagctcaatatcccagtcaggctgagaagggatagattctccttttctctctgccttttgttccttggtcattgttgtcgtcatctttgttgtcatcatctccattgtggctgcctcctccttctcttcctctgtctctctgtttctgtgtctgagtctgtccctctctcttactctcctcactcccttggagggatcatatgatatcattattttgtgaagtgctgtgaagttcaaaaatatttatctatgaccctgagaatttaccacaaatttcagtttttactttctaaaactttagttcaacattaacatatctaaatctaaacttcattcgtcctgctgaatcac

SEQ ID NO: 5569 - DNA, 500 bp, Homo sapiens
  MAP TO AC008509.5; EXPRESSED IN PLACENTA, SIGNAL = 0.39; EXPRESSED IN ADULT LIVER, SIGNAL = 0.65; EXPRESSED IN HELA, SIGNAL = 0.46; EST_HUMAN HIT: AW300337.1, EVALUE 2.00e-87; NT HIT: gi7662117, EVALUE 1.00e-87
acaacctttcccaatgaactgaaaatttgggcatgtaaaatagaaagatgtgtctactagcctggattctgaactattttttagtaattttttcattgtatttgttgtctgttggttacacacacacacacacatacatatatatatttatacatttattaaacatttgtgaaaggtttatacagtgggtccagattatgcccatgctgaagctcgaaaatctccagcacttgatggcaaggtggaacgagacagtgaaggaaaagaagtaagataccctgttattctcaatgcacgagagaaattaattgcttggaaagtctgccttgcttttaaggtaagatgttatacaggcctatagatccttataaaggtaaattctaattttcttttttgactaagacattattggtgcttataattggagaagtaaaccgagaaagtaattaatacatctgaatggttcatgtacttttcaagggattcttgtggtgccaata

SEQ ID NO: 5570 - DNA, 588 bp, Homo sapiens
  MAP TO AL118558.2; EXPRESSED IN LUNG, SIGNAL = 8.6; EXPRESSED IN BONE MARROW, SIGNAL = 4.6; EXPRESSED IN PLACENTA, SIGNAL = 4.3; EXPRESSED IN ADULT LIVER, SIGNAL = 4.4; SWISSPROT HIT: Q9JHU4, EVALUE 1.00e-39; EST_HUMAN HIT: BF947324.1, EVALUE 1.00e-129; NT HIT: gi9506548, EVALUE 1.00e-72
cgtctacttcagctccctgggagaacgagagctttgtctgttgttttagagacattttagaatgcattttgttttttttttttaacatttctagtcttaacgctatcatctcattctcagcctctgcccccattacttgtgagctgctgaacaaacaagtcaaggtgagcccggacatggccatcttcatcaccatgaaccctgcgtacgcgggccggtctaaccttcctgacaacttgaagaagctgttccggagcttggccatgaccaagcccgaccggcagttaatcgcccaggtcatgctgtactcacagggtttccgcactgctgaagtgcttgccaacaaaatcgtcccgttttttaagtaagtagcctagaattcttcataatcatgtttcttgcatatgttaaatgtgtccatttaaccttaaaatttttatatgtaatgatggtacgtctttcaaaatatccatctctggtttcttgacacttgaccctattattgcttaaagtatactgttattaaagatagcctttttttcttcttttctagactatgcgatgagcagctctcttcccaaagccatt

SEQ ID NO: 5571 - DNA, 564 bp, Homo sapiens
  MAP TO AL109767.3; EXPRESSED IN ADULT LIVER, SIGNAL = 3.3; EXPRESSED IN FETAL LIVER, SIGNAL = 2.7; EXPRESSED IN LUNG, SIGNAL = 2.5; EXPRESSED IN BRAIN, SIGNAL =   3; EXPRESSED IN BONE MARROW, SIGNAL = 3.4; EXPRESSED IN PLACENTA, SIGNAL = 2.5; EXPRESSED IN HEART, SIGNAL = 1.5; SWISSPROT HIT: Q01642, EVALUE 1.10e+00; EST_HUMAN HIT: AI702777.1, EVALUE 1.00e-11; NT HIT: gi14754508, EVALUE 0.00e+00
tatcttctctgccccttccctttcttctttctgtctccagcagaggctgaccatgtggaggccgccatcctcgaagaagacgagggtctggagatagaggagccaagtggcctggggctgatggtgggtggccccgaccctgacctgctcacctgtggccagtgtcaaatgaacttccccttgggggacatcctggtttttatagagcacaaaaggaagcagtgtggcggcagcttgggtgcctgctatgacaaggccctggacaaggacagcccgccaccctcctcacgctccgagctcaggaaagtgtccgagccggtggagatcgggatccaagtcacccccgacgaagatgaccacctgctctcacccacgaaaggcatctgtcccaagcaggagaacattgcaggtatgggatgctgcgcttgcctggttgctgtggaagccacctcctgggtcccatgccctctgcctgagtgtgctggtgcaggggaaggcccaggggcttccaggatggcctctgggccaccagccggggctccccctttctgagggtccaccatc

SEQ ID NO: 5572 - DNA, 514 bp, Homo sapiens
  MAP TO AC010271.5; EXPRESSED IN PLACENTA, SIGNAL = 1.6; EXPRESSED IN ADULT LIVER, SIGNAL = 1.6; EXPRESSED IN HEART, SIGNAL =   2; SWISSPROT HIT: Q63425, EVALUE 7.00e-33; EST_HUMAN HIT: AA069154.1, EVALUE 2.80e+00; NT HIT: gi14787060, EVALUE 0.00e+00
gggactagcgtaactgcgacttaatcctgcgctggggattggagaaactaaaatttggggcgggtcctcaccgcgagggctccgtgcaagtgggcagaactaggcccgggcggagccgggagatgcccacgtgctgcgcacctccacctcgcccgcaggggaccagctgctgagtgcccgagtgttcttcgagaacttcaagtacgaggacgcactacgcctgctgcaatgcgccgagccttacaaagtctccttctgcctgaagcgcactgtgcccaccggggacctggctctgcggcccgggaccgtgtctggctacgagatcaagggcccgcgggccaaggtggccaagctggtacgcgtgcttagcccggccccggccctggactgccccagcgatccggtctctgcgccgtgagccccattccccgccatcgtgggccagccttgccctctgtcttgtcactaacccaagctaattccaccctctgccccttcctctctgccccaaact

SEQ ID NO: 5573 - DNA, 563 bp, Homo sapiens
  MAP TO AC018427.3; EXPRESSED IN BONE MARROW, SIGNAL = 2.4; EXPRESSED IN PLACENTA, SIGNAL = 2.5; EXPRESSED IN ADULT LIVER, SIGNAL = 2.5; EXPRESSED IN HEART, SIGNAL =  11; EXPRESSED IN BRAIN, SIGNAL = 3.3; EXPRESSED IN LUNG, SIGNAL = 4.1; EXPRESSED IN FETAL LIVER, SIGNAL = 2.2; NT HIT: U24241.2, EVALUE 5.40e-01; SWISSPROT HIT: P04706, EVALUE 1.10e+00
tgacaaccttccctctcaccctggataattccggcttccattctagagtcaaccatttctgcctcctccctgcccctcactcctcctgacttgttctcccctgcctaggtgaatggcctgctcctcacgtctcttagcaaaggagagcaggcagaagagagcaccttcgtctccctgccaccagccctccaggcccctctcctcggctcccggcctcccgctcctatgggtgagctcctgcctcctaactaagcgcagctcccttgggtgctgtgattcaggagtgatgctatgtccaggtttgcacagatgtttcaggtttatgtctgtttccacgagtaccccctttcgttctcaagagtgtcctgtttaaaaaaaaatatgctgtaaagaacattattagataattgatggaacttttaatatgaattagaaataagttttcgcattgcatcgatgatcgtttcctgaatttaaaaattgtcctgtggttgtgcacaaatcaatagaaagtagacactgaggtgtgtatatatcgagatggcagaggtgtcggagttctc

SEQ ID NO: 5574 - DNA, 527 bp, Homo sapiens
  MAP TO AC009123.6; EXPRESSED IN PLACENTA, SIGNAL = 1.1; EXPRESSED IN ADULT LIVER, SIGNAL =   1; EXPRESSED IN HEART, SIGNAL =   1; EXPRESSED IN BRAIN, SIGNAL = 1.3; NT HIT: gi13627310, EVALUE 0.00e+00; SWISSPROT HIT: P14728, EVALUE 7.40e-01; EST_HUMAN HIT: BI767277.1, EVALUE 1.00e-128
tactttctccctggacggtgcatgtcaccacttgccggacaggtccctggagctggatgcgtccaggtttcccaaggaattggggattgtcacctggggtcagaacgacctcttggaaatctgggcctctcactaaggatcagtgcacgagctatgatcactgcaagccccccaaattcctgcccttctctggaccatgccaagagcacctcctctaccagaggcgagcccgctggaatctcctgtctcgcaagaaaggatacgcagcctgtcctgggcgcctccagcagggtagaccagctgcccgaactggggtgtccttccaggaacccaggccagcgcgcccccagtgcaggcctcatccagaagcagctgctcccaccgcagcaccagctcctcgtgcagcagctctgccaagtggctcgccaccgacgtgcccaggatggggcccccgaggatagagaagcggcgctgtcggttgctgaggtaagcccagggacacctggggaccagagaacagcaggagg

SEQ ID NO: 5575 - DNA, 580 bp, Homo sapiens
  MAP TO AC008427.5; EXPRESSED IN LUNG, SIGNAL = 0.87; EXPRESSED IN BRAIN, SIGNAL = 3.3; EXPRESSED IN HELA, SIGNAL = 2.4; EXPRESSED IN HEART, SIGNAL = 2.8; EXPRESSED IN ADULT LIVER, SIGNAL = 2.3; NT HIT: U39186.1, EVALUE 0.00e+00; SWISSPROT HIT: Q28263, EVALUE 2.00e-12; EST_HUMAN HIT: AI221148.1, EVALUE 2.00e-78
tgcttggagaatgcaagatggtcaagggcaggaggacactgggtcatggagtttgaaagccatagtaaggggttttcacttcatgctgaaggacaggggcgccacaggaggcttctaagcaggtgaggcatgggctggtgtagaccggaggccctgcagtatcagcacggtggcgggaggcctgctactccgaagcagctcattccagtgttggacgtttccagctgtgccacccgcttgagcccagaccctgtggcctggcccttgcaccagaggcacatactctctcttctaggaattctcccgtttccacgaggagatcaccccaatgttggacgggatcaccaacaatcgcaaggagtggaaggcgcttgctgatgagtacgatgccaagatgaaggtgcaggaggagaagaagcagaaacagcagtcggccaagtcaggtttgtggaagggggaagcagggactcccaccaccccactccctgagcactcagtgtctgcgtcctgcctcagagactcttacacggagtctcattcaggcctcctgatggccaatactgtccccattctgtgtgtg

SEQ ID NO: 5576 - DNA, 527 bp, Homo sapiens
  MAP TO AC012398.4; EXPRESSED IN LUNG, SIGNAL = 1.2; EXPRESSED IN BRAIN, SIGNAL = 0.73; EXPRESSED IN FETAL LIVER, SIGNAL = 0.44; EXPRESSED IN ADULT LIVER, SIGNAL = 0.73; EST_HUMAN HIT: BG163926.1, EVALUE 6.00e-20; NT HIT: AL163201.2, EVALUE 2.00e-86
aacagaggttgcaggactggcagttgctctgatgagtcagtgagtacttggtgagtgaatgcgaaggcctaggatattactgtacataactacagactttatatgcactgtacacttaggctacactaaatgtatttaaaattttctttctttaacaagttcatcttagcttatcataactttataaacttttaatttttttaattttttgattcattgataataacacatcttaaaacaaaaacacattgaacagctgtacagaaatactttatatccttatttgataagcttcatttattttgattttttatgttttaaacatttttgttaaaaactaagatacaaacacacacactagcttagccctgtaagggtcaggataatcaatatcactgtcttccatctcgaaatcttgtccaagtgaaaggtcttcagggtcttcagtggcaataacatacatgcagctgtcattttctatgataacaaggctttcttctggaagaactcgtggaagaccttcctga

SEQ ID NO: 5577 - DNA, 569 bp, Homo sapiens
  MAP TO AC005797.1; EXPRESSED IN ADULT LIVER, SIGNAL = 1.1; EXPRESSED IN FETAL LIVER, SIGNAL = 0.72; EXPRESSED IN PLACENTA, SIGNAL = 1.3; SWISSPROT HIT: P15063, EVALUE 4.20e+00; EST_HUMAN HIT: BF878207.1, EVALUE 3.00e-28; NT HIT: X89405.1, EVALUE 2.10e+00
ccaggtgatgtgtgcataggtgaagagtcagatctccataagtcagacactcttcccccttttcagctccctgaccctcactactgtgtgctctggtctggccccagctgccaggccattagtattggtctaagaaagcaagaccaggacgggcagctgagaggaaagtcagaggccaccaagcatgaaaagagagagatgaggctgtcattgctcaaagtcacccactctgggtgtgttttatgactgtttctggattttggaatattctcccctttgtgatcattccagggactcaccctcctcctatttccttctcattgcactttctgtccccagtgcaccctttttatggccagagactggctgtatgactagatgacaattcagtgaaagttacttgttgtgaggactgagagccaggcccaccctgctttttcccagaagagactggaggttcataaaagccagctttaatgcagggctgtgcaggtgtgagtgtggtgttagggaacaggtgcaaaagtgaagagtgagacagaaaaaaaagatgctggctgttcatcaaa

SEQ ID NO: 5578 - DNA, 524 bp, Homo sapiens
  MAP TO AC008518.3; EXPRESSED IN PLACENTA, SIGNAL = 3.1; EXPRESSED IN ADULT LIVER, SIGNAL = 2.5; EXPRESSED IN BRAIN, SIGNAL = 2.1; EXPRESSED IN FETAL LIVER, SIGNAL = 2.5; SWISSPROT HIT: Q9NXH9, EVALUE 7.40e-01; NT HIT: AB018249.1, EVALUE 5.00e-01
gaatagcctgctgccttcacttggcaaatgtatgcttaccctgctagactcagcttggtcatcttctcctccatagaggctttcctgagctccccgcctgaatttagtgtcctctccagggctacaattgcattatctctaggttagcattcatctcactatttaggaattacctgtttacatgcctgtctttgacaatactctgtaacttcccaggactgcctcctagaggtgctcttgcttctggcactggtgtccatgggacaccactgcagttctctgctcctggaagctcagtgtgtcttggccactctccactactatttccagctgcttcctcatggttttctccacaaattgaagtcatgagcaggtatgtttaaaagcagaatctaggtcagatgccaacgttactcaggaagcaggctactgagttctggtttttactttaggaaggaagtactcataacctgggactcaatgtggaaggatttacaaaacctactgggcaaaggagtgttcat

SEQ ID NO: 5579 - DNA, 500 bp, Homo sapiens
  MAP TO AC009087.4; EXPRESSED IN HELA, SIGNAL = 0.46; EXPRESSED IN ADULT LIVER, SIGNAL = 0.77; SWISSPROT HIT: P16720, EVALUE 1.20e+00; EST_HUMAN HIT: BG199846.1, EVALUE 4.50e-02; NT HIT: AJ000993.1, EVALUE 7.40e+00
cccctccttagcactctgtctgactagaatcaacgtcttgattctaattccaggttgggccacagagcacaattctgaggacacagtgtctctgtaaccacctgaccttctttgccagcgacttctttgtcgtgcccaggaccgtgaatgttgaagacacgatcaaactgttccttcgcgtgaccaacaatcctgttggggtgtcactgctggccagccttttaggattttatgtgatcacagttgtgtgggctcggaaaaaggatcaagcagatatgcagaaggtaatgagactttgatttcaacagatttgccatgatgttttgagtaattaaataagatgaaggaaaaaacaccttcgtcaaaagcagcaggaagcctggtactgggaggcatagaaattcaagtgaaacttttcttaaatttatcttcgtgtctgctgactcaagacctgagaactttttctctctatttttttttcctttggttccaagattgga

SEQ ID NO: 5580 - DNA, 590 bp, Homo sapiens
  MAP TO AC007343.4; EXPRESSED IN LUNG, SIGNAL = 0.54; EXPRESSED IN FETAL LIVER, SIGNAL = 0.78; EXPRESSED IN PLACENTA, SIGNAL =   1; EXPRESSED IN BONE MARROW, SIGNAL = 0.61; EXPRESSED IN ADULT LIVER, SIGNAL = 1.2; NT HIT: AF288742.1, EVALUE 3.00e-15; SWISSPROT HIT: P39188, EVALUE 4.00e-05; EST_HUMAN HIT: AA587826.1, EVALUE 2.00e-17
tcaggcacagctgtaagcacgcttcatgcattttttaaaattttcccaatagttttacaatgatatcatctctgtctcacagatgggtaaacccaggctagtcatttgccccaagacacccaaccagttaagttgctgttcaccccaaggtttgtgtaaccccagagttcagtttcttgacagcaacagtcccgtactcctcgctgaagcttttcctcactcctagcatgtagctatgtcccttgtaaacgcagagcctccttctggggccttcaccactgtcgtctaccacatcgaccttccaggttcgagtgatcttcctgcctcagcctctcgggtagctaggagtacaggtgtgcatcaccacacccagctaatttctcatattattatttacttgttcttttgtttaagtgtctgtttatttgttatgctggttaggaaactccctggtgtcagggattgtttgtgacccatattcatagcccagtgtctggcttaggactggcatatagtaggtgcttaataaatgtttgaagaatgaatgcatcttaaattgtaataactcagctggatgcctgggtatctgt

SEQ ID NO: 5581 - DNA, 598 bp, Homo sapiens
  MAP TO AC010598.5; EXPRESSED IN ADULT LIVER, SIGNAL = 0.65; EXPRESSED IN LUNG, SIGNAL = 0.77; EXPRESSED IN BRAIN, SIGNAL = 0.42; EST_HUMAN HIT: BI826707.1, EVALUE 1.40e-02
aattttcccctttggtggagcttcatctctgccttactgtggagtatgacatgaatttttatatctttcaaagctatgttgaagacaatatattgaataatgacattttttgttgtgaaaaatctactctttcctttttatttctaatggccacattcagaacattattcttaaacttactctgaattatttgtactctctctagtcttcattttaggagttaaaaaatgttagtgaaaccgtgcacaataaggataaaggtgactccagcgtgcttgcactagagttagatagtgctggtgaaatatctcatgctgttattggctcatgaaaactaatagcccctgagaaatttaatttagaaagctgcacattttgagtaatatatagattacttgacatgtgggttattattcaattgagagattttatatgaaaatgtcaaattaaatgctactggcagttgctaaagattgtactttttaattattctatttttcacctaatgtctcttcttcttttgtcattgacactttagattactgacagaacattccattagcttaaatgtgtattatcattccaagtgatacaggca

SEQ ID NO: 5582 - DNA, 599 bp, Homo sapiens
  MAP TO AC011088.8; EXPRESSED IN FETAL LIVER, SIGNAL = 2.2; EXPRESSED IN HELA, SIGNAL = 4.8; EXPRESSED IN BRAIN, SIGNAL = 2.3; EXPRESSED IN PLACENTA, SIGNAL = 1.7; EXPRESSED IN HEART, SIGNAL = 2.1; EXPRESSED IN ADULT LIVER, SIGNAL = 2.7; EST_HUMAN HIT: T69860.1, EVALUE 2.10e-01
aactaggggcaaccttggaggaagggaaaactggctgtttctaccattttcccccaagtcacctaatgactaccctatatttagaactttaagaagaactcaaaacaaagatagaaaatgcaggcaaagagaaaagatgagagatttagttgttgctgttgtttgatttttttttcttgtgaaagaaaaataaactcttagttctgatctattagactcacgtctaccagttaaaggtgtttggcgatatttttatattgatcagagtttgtttcccagatctttgcaaaaccatacagatgattggtgcctcctcattccaccagttcaccttggaaaagagatacttataaagactgctggaatcaatcatctttcccaagcaaggtatattgttgcacaaattggtctatgttagagggaacagagacataagaaaaacctgaggacccctagacatggctattgggctgcttgaggttgataatcccatgataaatccaaaaagaggcaccaattcttccaacttgcttggtactattagtctcaggaatatcagggttgtaggcgtcgcaaactccaagacccatggaacaagt

SEQ ID NO: 5583 - DNA, 572 bp, Homo sapiens
  MAP TO AL117190.3; EXPRESSED IN BONE MARROW, SIGNAL = 4.4; EXPRESSED IN PLACENTA, SIGNAL = 3.9; EXPRESSED IN ADULT LIVER, SIGNAL = 3.9; EXPRESSED IN BRAIN, SIGNAL = 3.5; NT HIT: Z34268.1, EVALUE 1.40e-01; SWISSPROT HIT: Q01842, EVALUE 3.20e+00
gcctagatgggctctgactgtcaacatgaccttcctctcccaggtcctcagtttccccatgtctgcagggagggtttcggtggtggtcttctcactgtgctcctgtagctctggggttcctaagaggtgcctgcgggggtccctgggaaacagtaatgagaggaggtggctggcccaacaggtggagctcagggacacccattgctgccttagttccaccagctgctcctataaattggggtcgtcgtattatttcatttaaacagaggttgccagatctgagcaatggttgaaagcacagactatgtggtctcttctaatggcttgtcttgattttccaacctgggctgggaggggtgtaagagtggaacctgctcatctctggtgggctctctactctcacccagtgggctgcatggacaagcccaggtggctgcaggcctaggagtggagctgttcttagagtaggaaggtgaagactttgaggcaaacaaggagggccccacctcagggcctggtggaactagaatgagggcagaaggcagatgagaggctggctaaccttgcagaac

SEQ ID NO: 5584 - DNA, 552 bp, Homo sapiens
  MAP TO AC010320.7; EXPRESSED IN HELA, SIGNAL = 2.2; EXPRESSED IN BONE MARROW, SIGNAL = 1.6; EXPRESSED IN PLACENTA, SIGNAL =   2; EXPRESSED IN ADULT LIVER, SIGNAL = 1.5; EXPRESSED IN HEART, SIGNAL = 2.8; EST_HUMAN HIT: AA021398.1, EVALUE 1.00e-48; NT HIT: AF114156.1, EVALUE 2.00e-53; SWISSPROT HIT: P20768, EVALUE 3.00e+00
cctttgcgcctgatgttaagatttctcctcacttgttctcagagttctacgtctagcattccttcctccaggaaccatgggctttgtactccgttattgaccacactagtttttaattccttcaacaacttaaattctagtggggtgtgttcatgaataaactgctgtggattatatggatcaggtcttacggaaataggaaaagtgcaaggtcctaagggctctccagctatgacagcagagcataaaattctttgtattagggtctcttatttctgccaccgaaggtggtggtacaaatgtttctgcaattggaggaggctgtatagcccaatttttatcctccttctcctgttttttattttcagttggagctgtgggtagagcaacatattctttcagatttttagattcagcttgctgtcccacagaataagaagatgataatggcagaaatacagtacaaactgaactccaagtggaaaaaactgaagaatcaactttaaaacctttttgatgagcctgtttcaatccatctcctgctctatccca

SEQ ID NO: 5585 - DNA, 548 bp, Homo sapiens
  MAP TO AC007559.3; EXPRESSED IN PLACENTA, SIGNAL = 1.4; EXPRESSED IN ADULT LIVER, SIGNAL = 1.2; EXPRESSED IN HEART, SIGNAL = 5.8; EST_HUMAN HIT: BI667180.1, EVALUE 1.00e-130; NT HIT: AB016243.1, EVALUE 1.30e-01; SWISSPROT HIT: P31695, EVALUE 6.00e-05
ccatcgtacacacaaatgcagacaggaataagtttagggagatattttgcttcgtgatttaacttaaaatgctttcatttttaattgctgatactagaaccgctggagtcactttaagatttctggtttctaatgtaaaaatgcacatgatataacgttctcacctccacttgatcccatttcatttctacaactttctgccctgttttcggctgccaggtaggcagtgtcaccgttgcctgagagcgaggcaggattttgtcaggctcctgagtagcaggaacaggctgaagctgtcggggtgccatggattcggtccagccagtggctgggagactgggaagtgcctgttcacagttgggaccttcatagccttcattgcaaatgcagaggtagccatcgctgctgctgctgctgctgctgctgcagttgccatggtgacaagggttgctggcacaaggatctgcaacaagctgaaacgagaccataaatgggtcaattattccctcataagaaaagtggtgccatcgctgggaaattagctctgt

SEQ ID NO: 5586 - DNA, 583 bp, Homo sapiens
  MAP TO AC024561.4; EXPRESSED IN ADULT LIVER, SIGNAL = 0.76; EXPRESSED IN FETAL LIVER, SIGNAL = 2.3; EXPRESSED IN BRAIN, SIGNAL = 0.52; SWISSPROT HIT: P57682, EVALUE 8.00e-36; EST_HUMAN HIT: BI090772.1, EVALUE 3.00e-56; NT HIT: AF285837.1, EVALUE 3.00e-70
ctccttctgctgggaatttgcacccctctctcaagttcctatcctcacaccagagagcctcgcctgggttgagcatgccttcttccagcccaccaatgaaaatactcatccccttctccaggctggcagccttttgacgtgccacttgtccatgccgcagatgatggcagctgccctctcctggcacagaatatggagcctggggatcttgctggtcatccagccggtggtggtgcagcccatcccctttatgtacatgagtcacctccaggagcctctcatggtctccttgaggaggaggaggaggaagaggtcttccatggaggagatgaaaaattccagtagtagcatgcaagtacctgtaattgaatcataagaaaatcctgtaccagagaaaaaaattaaaatagaacctgggattgaaccacagaggacggattatcctgaagaaatgtcaccccccccttaatgaactcagtgttcccccccacaagcattgttgcaagagaatcaccctttggtcatcttgcagcctgggaagagacctttacctgtggaatccccggatactcgaagtggagga

SEQ ID NO: 5587 - DNA, 541 bp, Homo sapiens
  MAP TO AC010339.6; EXPRESSED IN ADULT LIVER, SIGNAL = 0.46; EXPRESSED IN FETAL LIVER, SIGNAL =   1; EXPRESSED IN HELA, SIGNAL = 0.61; EXPRESSED IN PLACENTA, SIGNAL = 0.69; SWISSPROT HIT: Q16587, EVALUE 5.80e-01; EST_HUMAN HIT: F03972.1, EVALUE 3.00e+00; NT HIT: AF112974.1, EVALUE 6.00e-07
cttcacctgtctcagagccctcagggatccagcaccatggggtttactttcccaggttctctctgccccaagttcagtcactccagcccagtgtgggggcagagatgtggcagaatgagggcaccttatggccccttgattcggagggactcagtgtgtgaccttggcaagcacctgatcctccttgggcctcggtttttccgcgaatgcgacgggaataagaacagtgtctgctgcaggggtctcatggggtatctagtggaaggtgcactgcatttgctggcactgagcttggtgctgagtaaaggcttcatggatgtttgcagtaattcctgaaattaatgttcaggttgtaagtttgctgtaacaccagttaacccttcactctttacccctagctggtagaatagtgcctggtacatagtaggtgctcagtaaatattttttgctgaatgaacaaatgaaccattgacctgctgactggagctactgctgacatactgggtgactttgggctggtccagtcctctcaccgagcttc

SEQ ID NO: 5588 - DNA, 537 bp, Homo sapiens
  MAP TO AC009265.5; EXPRESSED IN ADULT LIVER, SIGNAL = 0.99; EXPRESSED IN HEART, SIGNAL = 0.97; EXPRESSED IN PLACENTA, SIGNAL = 1.3; SWISSPROT HIT: Q01459, EVALUE 6.00e-35; EST_HUMAN HIT: BG764545.1, EVALUE 1.00e-117; NT HIT: AF085702.1, EVALUE 1.00e-125
tacaaggcaagtagtgggggtaatcccagtgttgtattttgctgtgaatagagaatagatttagggctttaaaattccttaaataagaacaccaaaggctccagaaaaattttttaggaaataagtgctgaaactctttcccattgcattactataaaacaaagattatattagttataccctcatgagtatattctgatatggaaaatatgaggtttccaaaaaataaatgagtttttacctgtgatccctcaatttcacgatggaaagagtctgtagtttctttgactaaagcagttaatgcatcatattcaggtgataaacaattaacttcttgctctatatctatattaattccatccatatattgtgttttggccaaattaagtttttgagctatccaggatgctctgaaagcaggatcaatgatatcctttaaggatacatctcctgtggaagaagtatatatcttttgaacatgtatgcaaaaacatttcattattttggaagactaagcccttaactgaagttttccaa

SEQ ID NO: 5589 - DNA, 526 bp, Homo sapiens
  MAP TO AL117259.3; EXPRESSED IN PLACENTA, SIGNAL = 3.2; EXPRESSED IN ADULT LIVER, SIGNAL = 3.1; EXPRESSED IN HELA, SIGNAL = 1.9; EXPRESSED IN BRAIN, SIGNAL =   3; NT HIT: AF224669.1, EVALUE 9.00e-09; SWISSPROT HIT: P08548, EVALUE 4.00e-36; EST_HUMAN HIT: AW976597.1, EVALUE 3.00e-06
gggaatgcttctggttcctcactactgtgatgttatctgtaggttttttgtagatgttccctatcaagttgaggaagttctctattcctagcttactgatggtttttatcatgaataggtgttgggttttgtcaaatgtcttttcttcatgtattaccatgatcatgtgatttttcttccttggcctgttagtgtgatgtattacattaagggttcttcaaatggtgaattagtcttctataactgttataaatcctactcagttttggtgtataattctttttatatattgttggatgtgatttgctaatttttttgataattttcacatttgtgatcttgagagatgttggtatgtattattcttttcttggaatgactttggtagttgggtaatgctgacctcacagaatgagttagggtgtattcccgttgcttctatcttgtgaaagagattgtagataattggtaaaatttattcctcaaatatttggtagaatttatcagtgaacccatctgggctaga

SEQ ID NO: 5590 - DNA, 551 bp, Homo sapiens
  MAP TO AC016943.7; EXPRESSED IN PLACENTA, SIGNAL = 0.99; EXPRESSED IN ADULT LIVER, SIGNAL = 0.7; EXPRESSED IN LUNG, SIGNAL = 0.86; EXPRESSED IN HELA, SIGNAL = 0.52; NT HIT: L33847.1, EVALUE 3.40e-02
gcattgactcttggaagttggactctatttgtagcttcaatcacttcttaatatatttgaaagaggtgctagattaaaagaagagaaaaagatatgtaagagtccttctagttaattaaaaggaaatgtaatctagtcttaaattggatcataatgcatgacaagttaatttataatgaaattttgcaatggtattgatgcagtatcactccaaaatactgcactttggaagtcagtaagtcttgaagatcacctgcagtacttttattctcaaagaagaagaagaagaagaagaagaagaagaagaagaagaagaagaagaggaagaggaagaggaagaggaaggaggaggaggaggaggaggagaaggagaagaagaaaagaagaagaagaagaagaagaagaagaagaagaagaagaagaagaagaagaagaagaagaagaagaagaagaagaagaagaaggagaagaagaagaaagaagaaagtcataaagtaagtgagaacacaaatttccctctcaggaaattcacaatgtccctccctcagaaa

SEQ ID NO: 5591 - DNA, 509 bp, Homo sapiens
  MAP TO AC009123.6; EXPRESSED IN FETAL LIVER, SIGNAL = 1.7; EXPRESSED IN ADULT LIVER, SIGNAL = 1.1; EXPRESSED IN HEART, SIGNAL = 1.5; NT HIT: gi16164368, EVALUE 1.20e-01; SWISSPROT HIT: O14181, EVALUE 8.10e+00; EST_HUMAN HIT: BF741040.1, EVALUE 1.00e-108
tttgagtttcttaaggcagtagaggaagagacagtatttaaagatgggggaggatggcaggtcggattgccgagccccttcctcctccctggtcctaagtgacagcggggagagctgtaagccgaggaagaagggccgtccatcctgcggcactcagcagaggtaagcgggcactccccatcctttcccttagtcactgctgcttctctgtctagcggctgtgtgcgttttggtaaaatggatcctggctgggaagaaaagaaaacaatcaattaggcagagattcatttcagtaaaagaggttgggtagcaaaactaatataatcaactgcactcagaaaaagcctcaggaaatgttttccagtattgttctggagggacgatgagatctaagatctgaagttcatgtggaagaaagggctgctgaatgatctagacagctctgatagcgtgagagcaatggaaaccttccgatttctcccatcaagtcaccaggacaggatattggc

SEQ ID NO: 5592 - DNA, 534 bp, Homo sapiens
  MAP TO AC001456.1; EXPRESSED IN ADULT LIVER, SIGNAL = 0.47; EXPRESSED IN HELA, SIGNAL = 0.65; NT HIT: M24441.1, EVALUE 3.30e-02; SWISSPROT HIT: Q65730, EVALUE 7.50e-01
gctgggaaggaagggtattctctaatgtactcgttaaaccttagtcttggcagtctctatgagcttgtggagtgtggcctttgcaatcattctcatccctcttctagctgtagtactgggactagcaagtattcctgccccgcctccacgtagagcttttaattttattttttaaattcccttttcctagttgcaaggggtttctagtgccttaaggtgacaattgttctttctgtttcccctgaagattatggcttttttctttaaggaagattggtgagatgggtctgtttggaatttctaagaggggcaattgttcctctcccccaggtgactttgctagggaagctttctcaggatttcccttaatcttcaccttgaacacgtgctgggattcagggaggacaagctgcagctcccagaagctacacattctgatgccagccatgtttggtctttggcaatttgttagaacattttcactgcatcttcttattacattatatagcatctggttgtgtatgcgccaggtaa

SEQ ID NO: 5593 - DNA, 535 bp, Homo sapiens
  MAP TO AC010615.5; EXPRESSED IN HEART, SIGNAL = 1.9; EXPRESSED IN ADULT LIVER, SIGNAL = 1.4; EXPRESSED IN LUNG, SIGNAL = 2.2; EXPRESSED IN FETAL LIVER, SIGNAL = 0.95; EXPRESSED IN BRAIN, SIGNAL = 1.4; EXPRESSED IN PLACENTA, SIGNAL = 1.1; NT HIT: AJ278581.1, EVALUE 0.00e+00; SWISSPROT HIT: P12382, EVALUE 1.70e+00; EST_HUMAN HIT: AA663213.1, EVALUE 2.00e-81
cctccatatcctagcctccctatagctccccttcctattaatgataatcctcctctaatgtccgctgcccagaaggaaataagcaaagaaatctccaaaggatcacaaacgcccccttcccgggctatcggttatgtccccttcaagctgtagggggagcggaatttggcccaacctaggtacatgttcccttctccctctctgattttaagcagatcaaggcagaccttgggaagctttcagatgatcttgataggtatacagatgtcctacagggtcgagggcaaaccttctatctcacttggagagatgtcatgctagtgttagatcaaaccctggcctttaatgaaaagaatgtggctttagctgcagcccaagagtttggagatacctggtatcttagtccagtaaatgatagaatgacagttgaagaaagggacaaattccttactagtcagcaagccgtatgtcagtaagtcagtatggatccccactgggacctcgactcagatcatggggactggagtcgtaaaca

SEQ ID NO: 5594 - DNA, 513 bp, Homo sapiens
  MAP TO AC009265.5; EXPRESSED IN PLACENTA, SIGNAL = 0.95; EXPRESSED IN ADULT LIVER, SIGNAL = 1.5; EXPRESSED IN BRAIN, SIGNAL = 1.2; EST_HUMAN HIT: BE694886.1, EVALUE 0.00e+00; NT HIT: gi14723835, EVALUE 3.00e-98; SWISSPROT HIT: Q40554, EVALUE 1.20e+00
attccccggaaaatcatctccagcatttttcaggaaatgtctgaaaacacataggaacagtcttttcagttgtcacagtaattgaaagtagcatagcagttgagtgtcctattcaaaataccaatagtgtccccattgagaatgcctaccacatattttaattattcttattagcaatctgaagactgtattagagaggaaagagccacttacagttcctgtactatcatctactctttctctaggtttcttcttttggggagaaagaagagaaatcatttcctttttcatttgttgaagaaccttcttaagttctgcattttccattaggatttgtttctgacgatattcataatcattcaagagaattttatacatttcatcttcattcctgagaaagaaactgtcagtatgaaaatgcaggatagaaggaagtctgattacatttatcaatttaaactggactttacctggcttcagttttaccagtcctccaggagcctctttttccat

SEQ ID NO: 5595 - DNA, 550 bp, Homo sapiens
  MAP TO AC010643.5; EXPRESSED IN BONE MARROW, SIGNAL = 0.91; EXPRESSED IN PLACENTA, SIGNAL = 0.77; EXPRESSED IN ADULT LIVER, SIGNAL = 1.2; EXPRESSED IN HEART, SIGNAL = 1.5; EXPRESSED IN BRAIN, SIGNAL = 0.81; SWISSPROT HIT: Q9UK85, EVALUE 2.00e-54; EST_HUMAN HIT: AI200822.1, EVALUE 0.00e+00; NT HIT: AB047818.1, EVALUE 0.00e+00
aacccacaaagcatcctgtcatctgcaaagtgggctgaataggtcagtggggactgaccatcctggggtgctgtttggagtatgagagggtctccttgttcttcctccccaggtacccaggatggaggagaaggaggccctggtacccatccagaaggccacggacagcttccacacagaactccatccccgggtggccttctggatcattaagctgccacggcggaggtcccaccaggatgccctggagggcggccactggctcagcgagaagcgacaccgcctgcaggccatccgggatggactccgcaaggggacccacaaggacgtcctagaagaggggaccgagagctcctcccactccaggctgtccccccgaaagacccacttactgtacatcctcaggccctctcggcagctgtaggggtggggaccggggagcacctgcctgtagcccccatcagaccctgccccaagcaccatatggaaataaagttctttcttacatctaacaacaccatctcctttcactatttatccccaaccgcct

SEQ ID NO: 5596 - DNA, 539 bp, Homo sapiens
  MAP TO AC010327.5; EXPRESSED IN FETAL LIVER, SIGNAL = 1.5; EXPRESSED IN BONE MARROW, SIGNAL = 0.89; EXPRESSED IN PLACENTA, SIGNAL = 0.97; EXPRESSED IN ADULT LIVER, SIGNAL = 1.3; EXPRESSED IN HELA, SIGNAL = 0.59; NT HIT: AF275134.1, EVALUE 0.00e+00; SWISSPROT HIT: P54755, EVALUE 1.00e-04; EST_HUMAN HIT: AI672964.1, EVALUE 1.00e-115
gtggatcttccactaacggctcatctcatttcacaaaagccacctcacggtgctcaacactcacgtggaactcgtggctgccacactggacagtgcagagctgggcctccctgcctctacctgctggatgcaacggttaaggaagggctggaaagtttgagggccagaaactacaactgattttccctcctgtgctggttttcagctcccaacccagtgaggaacctgagagtggaggctcagaccaacagctccatcgccctgacctgggaggtccccgacggcccagacccacagaactccacctacggggttgagtacactggagatggtggcagagcagggactcgaagcacagcacacactaacatcaccgtggatggacttgaacccgggtgtttgtatgcgttttccatgtgggtgggaaagaatggaatcaacagctcccgggagactcgaaatgccaccacaggtgagaggcagtcgccatttgttttgctcttacttgtttaaggggcagtaggcaggagaacgtagcg

SEQ ID NO: 5597 - DNA, 582 bp, Homo sapiens
  MAP TO AC010371.5; EXPRESSED IN ADULT LIVER, SIGNAL =   2; EXPRESSED IN HELA, SIGNAL = 1.6; EXPRESSED IN BRAIN, SIGNAL = 1.6; EXPRESSED IN BONE MARROW, SIGNAL = 1.3; EXPRESSED IN PLACENTA, SIGNAL = 2.6; NT HIT: AJ278986.2, EVALUE 5.60e-01; SWISSPROT HIT: P48032, EVALUE 9.60e+00; EST_HUMAN HIT: BE072253.1, EVALUE 2.10e-01
ggactgtccttcctgacagcctactctgtagatcagacaatgagtctctctctctttctctctgtccttctctctctctctctctctcttcacactcacacatgcacacacaaacacacacacactggcacacaaacacacacatacactcacacaaacactcacacacggtactgtttctttaatgaaaccccaactgatacagattttatttatttttcatttcttaaataaactttttattttgaaataactgtatacttaaggaaatgttaaaggatagtccacagaattttcatatatgccctttgctcaatttccccatgttacataatcttgatacttttgtcaaagaaaattagaaattaacattagtacattcctattaactaaactaaggcatcatttacctttcattaatttttgattccgattttatatgtgtggtagatttcttagtttctaggagctgctgtaagaaatcagcatgaacttggttgcctaaaacaaccaaaatttattccattaattttttcagagttctggatgccagaattccaaagtcactgtcgctggactgaa

SEQ ID NO: 5598 - DNA, 598 bp, Homo sapiens
  MAP TO AC005329.1; EXPRESSED IN ADULT LIVER, SIGNAL = 0.81; EXPRESSED IN BRAIN, SIGNAL = 1.1; NT HIT: gi14764834, EVALUE 0.00e+00; SWISSPROT HIT: Q9ZIG2, EVALUE 1.10e+00; EST_HUMAN HIT: BF528066.1, EVALUE 0.00e+00
agctgctttctccccactggctgggctgcatctggccctggctggaggccttgctttgaggggctgtgaccctcttcccccaggccctccccagccgacgacagccaccggagaggagatcggaacacgattgtctcagatgcagggcgctgtgcgggacgaagccgcaaggactctcgtatcgggcccttgggactcgggaggtgccagaggcggcggctgctctggacctcggtgttcactgacctttgtttcacttgcctctgctcgactccgagagcaggaaacccggccgtggcctggcagctccgcctcccatgcccgcacgctggggtctgtcttgtctggagcagtggggcacaccccggaggaggcgggggtcagggctgtcggccttggccccctgctggtcgctgtttcggggactcggggcggccagtaccaccgcctgaggcggggctcagcagcgttgcatgtacgggcctcgtactgcctcatggaaaatcctccggagccgccctccattgtgggttcctgagagtaggacacattgccatggttttgtgggaatcacgcgcccctgatggaacttttctgc

SEQ ID NO: 5599 - DNA, 525 bp, Homo sapiens
  MAP TO AC008993.3; EXPRESSED IN ADULT LIVER, SIGNAL =   1; NT HIT: gi14741172, EVALUE 0.00e+00; SWISSPROT HIT: P34474, EVALUE 1.90e-01; EST_HUMAN HIT: BI015914.1, EVALUE 0.00e+00
tcattcactcagcaggcatcagcagagtcccatctatgcgctcctggcctctcagcaaatgctctgtcccctactcccctatctgtgcaggctgaagctatgtgcatagttgggatgagggctgtgttgtctcaacaccacgctgccctgtggtgggggcgtgccggtggtcgtgggtggctctgacgctccggctccgacccacaggcaccatgactcctgtgaggatgcagcactccctggcaggtcagacctatgccgtgcccttcatccagccagacctgcggcgagaggaggccgtccagcagatggcggatgccctgcagtacctgcagaaggtctctggagacatcttcagcaggtgggtgctgccactcacccccacctgatgagagggccatccctgtcctgggcaatcccagcaacacaccctctgggagcagcccccttggggaatcccggtcctggggaacccatctggcttccctgtgtgggaggggctgaagtgagagcccaacttggaag

SEQ ID NO: 5600 - DNA, 545 bp, Homo sapiens
  MAP TO AC000077.2; EXPRESSED IN ADULT LIVER, SIGNAL = 0.84; NT HIT: U20141.1, EVALUE 8.10e+00; SWISSPROT HIT: P02461, EVALUE 1.80e-02
atgtcaggtcccaggttgacatataggccccagtggaacaccaggccccacttgccagtttccaagtggatatccagaccccaggtaaatatcagcgtcaaggtgaacaggaggccccaggtggacaacaggcctcagctagatgcctaggcccctggtgaactccagccccctgatgaacattaggccccaggtggacaccctggccccacgggaacatctagttccaggtggacatcagacccaaggtaaatacccatccccaggtaaacgccagaccccaggcagattacaggtcccagaaaaacacccaggtcccatgaagaaatcagaccctaggtgaactctggtctgcagggggacatgaggctgggtatccacctgggacctggtgttcatggggtgggggccgatgtccaccttgggcctgttgttcatctgtggcctggtattcacctgggccctgagagtcaacctggtgcctgatagccacctggggcctacatagccacctgggggcctggtggtcacttgaagcctggtgt

SEQ ID NO: 5601 - DNA, 522 bp, Homo sapiens
  MAP TO AL031186.8; EXPRESSED IN ADULT LIVER, SIGNAL = 2.3; EXPRESSED IN LUNG, SIGNAL = 0.96; EXPRESSED IN FETAL LIVER, SIGNAL = 3.2; EXPRESSED IN PLACENTA, SIGNAL = 2.6; SWISSPROT HIT: P17589, EVALUE 3.70e+00
tttaccacccagtccaggaggggtgggagagattgggcagtcctgtcccttcatgagaatccccggcaggatgccctggccaccctagaccagtccttgaacccagaaccacctgtgggctccccgcaagaggtagcagggcccctgcccacccaccttcctgcccctcttctacctgcacttctgcccctgcttgctgcttgcctgggaggggacccactgggctgggggctgcatgaagctttgggggctgggggaacagctctgttggggacaggtgggaatgaggttcagtgctggcaaggtccccgagggctcctatgtacacttcaccaaccaactcccttagtgcagcttgcagatgcgttctggctgtggcccagcagtgacacctggtggtcatgatagtgcactgcaggaactggagtgactgtgctgggcctgcccacctggatcaaagctctcaccccttattcagacagggaaactgaggcccgactcggcagagagaatccttggcag

SEQ ID NO: 5602 - DNA, 557 bp, Homo sapiens
  MAP TO AL080273.10; EXPRESSED IN BRAIN, SIGNAL = 1.6; EXPRESSED IN BONE MARROW, SIGNAL = 1.2; EXPRESSED IN ADULT LIVER, SIGNAL = 1.6; EXPRESSED IN PLACENTA, SIGNAL = 1.5; NT HIT: AF323786.1, EVALUE 1.00e-04; EST_HUMAN HIT: BG566982.1, EVALUE 2.00e-04; SWISSPROT HIT: Q10578, EVALUE 5.30e+00
gtagcagacagtcttcggggcctacctctgggccaggcattgggctaagagtttagagtgaattatttcatttaatcctcacatctccctagaagggtgggtattattattctcctccattttataaatttgaaatccaaaatgatgtggctggcccagaatcacagtgtaagcaaattacacatctggctttgaacgaggtcttcctgctcctaggcctctctttgaccaccaggataccctttcttatgcatcagaagggcatcaccagcatagtcttggcttcagctctccactcctgcataaaatgtgtatgttcccctgcctctggaacctttattgttggtggtactgctgctgctgctgatgatgatgatatttagttggtttttttgactgtccctagacccttatttaggctgttccttttacccccctacttgcaatgtcctttctcaacgttttcacctatttgcattaaaagtcctagaagaaaagatatcagggctcttgacttcattttttaaacccacagtgccgagctcattgcttgtaca

SEQ ID NO: 5603 - DNA, 600 bp, Homo sapiens
  MAP TO AC010203.13; EXPRESSED IN HEART, SIGNAL = 6.2; EXPRESSED IN BRAIN, SIGNAL =   5; EXPRESSED IN PLACENTA, SIGNAL = 5.9; EXPRESSED IN ADULT LIVER, SIGNAL = 4.3; NT HIT: AL163282.2, EVALUE 3.00e-95; SWISSPROT HIT: P08121, EVALUE 2.00e+00; EST_HUMAN HIT: BF203746.1, EVALUE 1.00e-101
taggctgcacatagcacagggagcctgggcctggcccatgaaaccactttttccttctaggcctctgggcctataatgggaggggctgccgtgaagacctctgacattccctgggagatattttcccccattgtcttggggattaacattaggcttctctttacttacgcaaatttctgtagctggcttgaattcttcctcagaaaatggggttttcttttctatcgcattgtcaggctgcaaattttttgaacttttatactctccttgccttataaaatgaaatgcctttaagaacacccaagtcacccttgaatgcattgctgcttagaaatttcttccacaagataacctaaatcatctctcaagttcagagttccacagatctctagggcaggggcaaaatgctgcccgtctgctaaaacataacaagagtcacctttcttccagttcccaacaagttcctcatctccatctgagaccacctcagcccggaccttactgttcatatcactttcagcatttttgtcaaagccattcaacaagtctcaggaaattccaaactttcccaaattttcctgtcatcttctgacccctcca

SEQ ID NO: 5604 - DNA, 597 bp, Homo sapiens
  MAP TO AC010506.6; EXPRESSED IN LUNG, SIGNAL = 1.1; EXPRESSED IN BONE MARROW, SIGNAL = 0.7; EXPRESSED IN PLACENTA, SIGNAL = 0.71; EXPRESSED IN ADULT LIVER, SIGNAL = 0.78; NT HIT: AF114156.1, EVALUE 5.00e-94; SWISSPROT HIT: P31622, EVALUE 5.00e-09; EST_HUMAN HIT: BG540272.1, EVALUE 7.00e-54
gtctgcacacatttcttgccaatttaaattccatgtcaggtatacactagcagacaaacaagtgcaagccaaatgctttacatcaaagggtagaaggtgcatagcaccaaatacagattctagcaatcctaaagtgaatgggctctgtattccattattaagtacactagctcttaattccttcaacaacttaaactctagtggggtgtgttgatgaataagctgctgtgggctatttgtatcgggccttatggagataggaaaagcacagggtcctaagagctctccagctatggcagcagagcataaaattctctctattggggtttctatttctgctaccgaaggaggcggtacagatgtttctgcaattggagggggcggtacaggccaatttttatactccctctcctgttttttattttcaactggtgctgtgggtgggacaacagattctttcagatttttagactcagaacatgactccttctgtccagcagaataagaaggagataatggcagaaggacagtatgaacaaaactccaagtggagaaaacagatgatcaactttaaggcctgcttgatgagcccatttt

SEQ ID NO: 5605 - DNA, 519 bp, Homo sapiens
  MAP TO AC000095.3; EXPRESSED IN ADULT LIVER, SIGNAL = 0.64; EXPRESSED IN LUNG, SIGNAL = 0.99; NT HIT: gi14776963, EVALUE 0.00e+00; SWISSPROT HIT: Q9Y2N3, EVALUE 1.00e-17; EST_HUMAN HIT: BG913391.1, EVALUE 0.00e+00
atccatgctgggtgctttacatacaacaggcagacaagaagtccctgttgcaagtgaggacaaagtgtgggaaggccgtgagggtctgcagtcccagatggccttggcctcaccccgcagtgcgcttttgcaccagagtgccaccttcttctccaggtccaggtcttcagcagtgaccccagaccccagctgtaagggaggtggcagcatcagaggctccccttgcctgagtggcagcagaggaaacttgcatctatggggcctagaggcctgggatgtgggggagccattcctgggggcaagtgtctgccctggtgctgcatctgctgccttttcacactgggtgagaccccaagagacagcctgaggccggtcctcactcactgtctttgaggacctgaggggcagctgacagtgggatgaggctggccccctcctctttggtgacaggaagcctcccatggaactgtaggagctcacgatggcattttgtttggtgcacgaactcatccaggaggt

SEQ ID NO: 5606 - DNA, 600 bp, Homo sapiens
  MAP TO AC008999.5; EXPRESSED IN PLACENTA, SIGNAL = 1.8; EXPRESSED IN ADULT LIVER, SIGNAL = 1.4; EXPRESSED IN HEART, SIGNAL = 1.6; EXPRESSED IN BRAIN, SIGNAL = 1.4; NT HIT: M59262.1, EVALUE 2.00e-90; SWISSPROT HIT: P06731, EVALUE 1.00e-07; EST_HUMAN HIT: AW852410.1, EVALUE 0.00e+00
atcaagtccctgccacagagacccaacagacttatttatgcctaccacaactgagacactgagaaaaagatgcaaccatgaaaagatagaaagttctaatgacacgcaaaaatagcaatcagactttctcaaatttcaaagccttcagaaatagctgagtgcagacaggccagggtggaattgacagaagactgatcaccaactagcaacacagtgagagagaaaaaattgcaactttcccacaaaactaatgcattccttgaagcaacaagtagagactgcttcatgctgagagctggaacctggggcaccccactgtaaaataacatcacattcattccttctcttttctttccatgacggacgattcagcatctggaacttctcctggtctctcagctggggccactgtcggcatcatgattggagtgctggttggggttgctctgatatagcagccctggtgtagtttcttcatttcaggaagactggtaggtataatggcctttcctcttgttctgtttcctgcagtgctgactgccatgcttgggagagggaagggatttcttcacctgtatctgggactggatctcttcctcc

SEQ ID NO: 5607 - DNA, 524 bp, Homo sapiens
  MAP TO AC010077.1; EXPRESSED IN ADULT LIVER, SIGNAL = 0.77; EXPRESSED IN FETAL LIVER, SIGNAL = 1.1; EXPRESSED IN LUNG, SIGNAL = 0.56; NT HIT: AF202559.1, EVALUE 1.00e-112; EST_HUMAN HIT: BI019291.1, EVALUE 1.00e-121; SWISSPROT HIT: P26358, EVALUE 4.00e-10
tcactaggcatccagcacaggcatccagccacaaatcccggcccccaaaaggaggaaaaggtgaccttcccagagtctggatggccccatggagcctgggtggatggggctggacttgaacccagagccccaccctgcgcactcccgcccaagcaaacaggagcagaagaatgagggggagttcagaaacaaataacccgcctttactttctcgtctccatcttcgtcctcgtcagcctgcacgcctgccctggcttctctgtccggctcctccttcagtttctgtttgggtgttctgtcacagaagacaacacacacacaggctggtcagctcggggggggccctgcaccggggccaacagctcctaagggctgacacaagctcctccccaggttcagaggacaggctgcctctcctgtcttcactgcaggaagcccagagggcatttactactccaggactcaaggtcttcaggaacaccatcaataccccatctgaatgttggtcagagatgccagtggtt

SEQ ID NO: 5608 - DNA, 515 bp, Homo sapiens
  MAP TO AC010422.6; EXPRESSED IN LUNG, SIGNAL = 1.9; EXPRESSED IN FETAL LIVER, SIGNAL = 1.1; EXPRESSED IN HELA, SIGNAL = 0.63; EXPRESSED IN PLACENTA, SIGNAL = 0.96; EXPRESSED IN ADULT LIVER, SIGNAL =   1; SWISSPROT HIT: O00754, EVALUE 8.00e-23; NT HIT: gi14759627, EVALUE 0.00e+00; EST_HUMAN HIT: T16846.1, EVALUE 4.00e-98
acacctccatttcctttccccatctcaggactcttttccttccttgagttttttgtctccatgcatgtatagctttccatgggtactcttgactcagtttccctcctcctttatccgaggtggtaatatttcccagctcagacagccaggcgcaccctccggagctgctgttctcagcctcactgcccgccctgggcttcagcacctattcagtagcccaggtgcctcgctggaagccccaggcccgcgcaccacagcccatccccagaagatcctggtcccctgctttaaccatcgaaaatgaggtgagaccccatttcaatcccctttcctgctcctgtgacaaatttgaagtgtcatggtgagctgtgtggactctgggtcagcaggtccctaggcttatgacctcctgtcacaactcccctcattgtgtgtccttgagcaagtgacctttgtctgagcctcagtgtcctttcctgggactgttatgaggacccagtgtgatcatgggtgac

SEQ ID NO: 5609 - DNA, 587 bp, Homo sapiens
  MAP TO AC009024.6; EXPRESSED IN ADULT LIVER, SIGNAL = 1.2; EXPRESSED IN BRAIN, SIGNAL = 1.4; EXPRESSED IN HELA, SIGNAL = 1.4; EXPRESSED IN BONE MARROW, SIGNAL = 0.46; SWISSPROT HIT: P31237, EVALUE 5.70e+00; NT HIT: D13045.1, EVALUE 5.60e-01
ccatgctctccctggtattgcagataatttttcatgcccatagcaaaaacttggcatataatggtcagcaagtcatgaattgctggcgaattctctaatgttttccaaagaacatgctaattagtgtcgagagcagctacataggacaatgaagggtacacaggctacggaatcagacaggctagagtttaagtcttggctatgatactttctagtgggtagtcctgggtgaagtcactcaatccttctggagcctgtgctttcatgtctgtaaaatagggggtgggggacagtctagataccaaagctgctaagtgaaaaaagaaactgtcatcaggaataccataaatgctcatttccttcctcccttccaccttttcctttcatttttcctctttcctctcccaactctctacctcccagtttcctgcctctgcatcttatgaatgtcaccaccaggactgtgctccatctcctgcctgttcttgtgtttttggtgggagtctggtgtggacccattcattagtttgacctcatctctctggagggatataataaattcttcagcaacaaggaccagagccttc

SEQ ID NO: 5610 - DNA, 579 bp, Homo sapiens
  MAP TO AC011471.5; EXPRESSED IN BONE MARROW, SIGNAL = 0.92; EXPRESSED IN PLACENTA, SIGNAL = 1.8; EXPRESSED IN HEART, SIGNAL = 1.6; EXPRESSED IN ADULT LIVER, SIGNAL = 1.1; EXPRESSED IN FETAL LIVER, SIGNAL = 2.1; EXPRESSED IN HELA, SIGNAL = 2.3; NT HIT: gi14767595, EVALUE 8.00e-99; EST_HUMAN HIT: BF748184.1, EVALUE 5.00e-36; SWISSPROT HIT: Q03111, EVALUE 2.00e-32
agtgaagacagatgggtccgtgctgtgggcactcagggcttgaggccactcaccgcgtctgggcttggggaagctgtcgtgcagccagaagaccaccttctccacgaagtgctggatgtcacattgctcggggccgcggacaaacaccatccagtcgtgagtgaacccctccgtggtgggcttcttgcgcagttgggcgcgatgccccagctctaacctcacctggacggtgcactggaggagagagaggtggggagatgaagtcagcacacgcctccaagcaggggactgtccccttacccacagagaactttcgataaagacccccagcagtgcaatacgctctcaacccagtgagcagcacacagacggcttcctatcgcgccagcaccttgccgcagacgtcccgtgccttctcccctccgtactcccacacagaccccgtgtctcctctcatccaccgcctcatcctcaattccacccgcacagcctcctcaccggtccccagctcagcccagctcactcctgcctcggggccaccacactggcctaggatcctctgctcctgagacttcccac

SEQ ID NO: 5611 - DNA, 548 bp, Homo sapiens
  MAP TO AC010444.4; EXPRESSED IN BRAIN, SIGNAL = 1.7; EXPRESSED IN HELA, SIGNAL = 1.7; EXPRESSED IN PLACENTA, SIGNAL = 3.1; EXPRESSED IN HEART, SIGNAL = 2.2; EXPRESSED IN ADULT LIVER, SIGNAL = 2.2; NT HIT: AF332583.1, EVALUE 4.00e-08; EST_HUMAN HIT: AI807089.1, EVALUE 5.00e-05; SWISSPROT HIT: O50163, EVALUE 6.80e+00
aaaactgccctccatgattggctagatggtatatttaacattctcattacttgcaggatcaggagctgccaatttgagtcctatcactgtgatgttgtaactactgatgctccattttccagataaaaaatagaaaaatattttgaaaaatgtgtagagctatctataaacaagaagctgacctaggacacatagcttttgaccccttaatggattatttaatttatttatttcactactgtcctctctagcccatttgactgctgctaatttggacatggaagccagtgactttaccactgacagccagcaggacaggcttcatgggcatgtgacctgtgtagtaacccatggccccatccttgaaagcagcccatatctggtttaatgctttgctgcgggtgtcttgaaattcttaatactttttgaaaaaaggggcttgcattttcattttgcaatgggcccccaaaattgtgtagctagttctgatggccagacttacccctgttcatttgcctggctaggtggcgattcctttcttccttccc

SEQ ID NO: 5612 - DNA, 524 bp, Homo sapiens
  MAP TO AL118557.2; EXPRESSED IN LUNG, SIGNAL = 0.66; EXPRESSED IN PLACENTA, SIGNAL =   2; EXPRESSED IN HEART, SIGNAL =   2; EXPRESSED IN ADULT LIVER, SIGNAL = 1.1; EXPRESSED IN BRAIN, SIGNAL =   1; EXPRESSED IN FETAL LIVER, SIGNAL = 1.6; NT HIT: gi6679055, EVALUE 1.00e-129; EST_HUMAN HIT: N32450.1, EVALUE 1.00e-112; SWISSPROT HIT: Q14112, EVALUE 2.00e-28
tggtctgggcaggaattatgatctacctaccaccagtgccattctgcttcttgagccccaggcctaagctcacctggtgatggtccacagtgaggcggggtggagccaggtggagtctgggtaccaggaacttcatgaccatcagggtccacgcaccagcagaaaccagtgctgccatgacactgtaggggcaggaagttgccctgctcgtcgcattgggggatgtggaaccgggccccagggtaggcatactgggcctgggcatggcgctgctgttgttcacagggtgtcaggcttgaggtggagtcttccaggatcaaggcagaggaagacacaaaagagaaatagaaggcattgcaacccatccacttcaccagcccacagcgtggcatggaaaagcgctgggattttggagcccgagattcttattttataataccttgccactatttacctcatttctctccagttcttctagttcatcctataggtccctagctggctctaagtgtaaagcagcccgg

SEQ ID NO: 5613 - DNA, 532 bp, Homo sapiens
  MAP TO AC002055.2; EXPRESSED IN LUNG, SIGNAL = 0.72; EXPRESSED IN PLACENTA, SIGNAL = 0.95; EXPRESSED IN ADULT LIVER, SIGNAL = 0.93; NT HIT: AL365511.1, EVALUE 1.00e-63; EST_HUMAN HIT: AA868289.1, EVALUE 7.00e-72; SWISSPROT HIT: P26808, EVALUE 3.80e+00
tctccaaagcagggaatcagatatgcacctatcttagtgaggagataggtgacttggaatagaaagggaggcaggtttgccctgagcagttcccagcttgacttttcctttagcttagtaattttgggtccccaaaattttcctttcagagagcctacgactagatttgcatctttacgtcctgcgcggaggctgctacacacatgcagaagtcatgctggtggcctggacagtgaagggagagaagtggatttgggagacatttaggaggtaagattgctaggaccttggtgatagcttggacatggagggtggaggaggaggggtgtctagcagataatgctcttaggttaccacctgggatattagggagagtgagcaggctgttttttgtttcttaggcagaacttggttttgcggtgcagtagggtgcctggagccgaaagcctgacttcctcatacaggccagaccccacatgtgactgccaggccactttgaggctgagagagatggttttgtctggcctctgtc

SEQ ID NO: 5614 - DNA, 512 bp, Homo sapiens
  MAP TO AC010513.5; EXPRESSED IN LUNG, SIGNAL = 3.1; EXPRESSED IN BRAIN, SIGNAL = 1.7; EXPRESSED IN BONE MARROW, SIGNAL = 1.3; EXPRESSED IN PLACENTA, SIGNAL = 0.96; EXPRESSED IN ADULT LIVER, SIGNAL = 2.1; NT HIT: gi14769146, EVALUE 0.00e+00; EST_HUMAN HIT: BE383485.1, EVALUE 0.00e+00; SWISSPROT HIT: P42226, EVALUE 4.80e+00
taaacctttgccctccacactggctggcggagcaggcgtggcaccggctgagcccgctgcagcccgctcatgaatgtgcctgctcatggtgatggtggtgtgcactcagtgggaacttaagtaaggccatcgcttatgaataagacccactaattgaacgattccatgttttctagggggggctgtcggggggctgttaggtgcctggatgacaagtggacagtttaagccggttcctcagatcctaatggagctgccccctgccgagcaacagaggctctttaacgaagccgcagccatcatcaggcacctggagtggacggacgccgtgcagctgaccgcgctggtcatgggcagcgaggccctgcagcagcagctgctggccatgctggtgaactacgtcaccaaggagctgcgggccgagatccagtatgatgactaggccgcacctccggggaggtggggggcccctttaaatgactctgtgattctgaagaggtggcttgggagtt

SEQ ID NO: 5615 - DNA, 582 bp, Homo sapiens
  MAP TO AC004826.3; EXPRESSED IN BRAIN, SIGNAL = 1.8; EXPRESSED IN BONE MARROW, SIGNAL = 1.4; EXPRESSED IN PLACENTA, SIGNAL = 2.3; EXPRESSED IN ADULT LIVER, SIGNAL = 1.8; NT HIT: gi14781173, EVALUE 1.00e-106; EST_HUMAN HIT: BI858221.1, EVALUE 1.00e-106; SWISSPROT HIT: O95235, EVALUE 5.00e-51
ggtatgtaccgtgactgggctctgccaaaaaatagtaggaactcactccctgttcctaatagctgccaggagtacagaccagaggttgcaatctaaggtctgccttccaaggcccctgcaggccaaaagagaggtgaactgctctaggttgatgccctatacattggcttcttctccagaaacaagtcatcgatgggcacagccagacactgccccactacctgtcccggcaaacattcgcttctccatctggatctcattctttgagatctacaacgaactgctttatgacctattagaaccgcctagccaacagcgcaagaggcagactttgcggctatgcgaggatcaaaatggcaatccctatgtgaaaggtaaaggaacatggggaaagctggcatgaaccctggagggcaactggggagagactggcaaaagagttggatgttcccatcttacacccctctcctttggccccagatctcaactggattcatgtgcaagatgctgaggaggcctggaagctcctaaaagtgggtcgtaagaaccagagctttgccagcacccacctcaaccagaact

SEQ ID NO: 5616 - DNA, 531 bp, Homo sapiens
  MAP TO AC000087.2; EXPRESSED IN PLACENTA, SIGNAL =   9; EXPRESSED IN ADULT LIVER, SIGNAL =  10; EXPRESSED IN HEART, SIGNAL = 6.4; EXPRESSED IN LUNG, SIGNAL = 7.2; NT HIT: AB042297.1, EVALUE 8.00e-03; EST_HUMAN HIT: BG216695.1, EVALUE 2.00e-72; SWISSPROT HIT: Q51404, EVALUE 9.80e-01
aggtgtactgagggcagtgggaagtggaaaagttagcaggcatggatgctgaccctgggctctgctgtcccctggttatgtggcctcaggcaggttactggacttccctaaatagtggcttatctgtccaataggatcctgtcagaagaaatgaaatttaggacagctcagctctgcggctagatagcaaaaaaataatgtagagaagcaataaatagtgtaacccccaccccttccttttctactgtcttctagcatcacttactatgcagtcactgcagaggagcaatgtgggtctgcatcccttggccaggcccagtcccagacaattactgcaggggaggtatcttgtatgtgaagataccagtggttttcaccatgtggaccttgggtctgagctgcttagtgatctggggctgggcccagtggcctacccaacactacggcttctgcaagatgtaaaatgacaggcagaaggtggttgttcccatagcacggagggccacgtgatgcttttgaagatggcctctg

SEQ ID NO: 5617 - DNA, 599 bp, Homo sapiens
  MAP TO AC006332.3; EXPRESSED IN PLACENTA, SIGNAL = 1.8; EXPRESSED IN ADULT LIVER, SIGNAL =   2; EXPRESSED IN HEART, SIGNAL = 2.6; EXPRESSED IN LUNG, SIGNAL = 1.3; EXPRESSED IN FETAL LIVER, SIGNAL = 1.4; EXPRESSED IN BRAIN, SIGNAL = 2.1; SWISSPROT HIT: P33113, EVALUE 7.70e+00; NT HIT: gi5835037, EVALUE 8.90e+00; EST_HUMAN HIT: AI372871.1, EVALUE 3.30e+00
ggctttgcaagggtctacagattcctttcttttcccaaccctcccaagtatttcttcctggatttcaagctttaagtggtacttctctgcaaattgaatccaaatgtgtctgtcccaagcataggccaggttttcccagaggtattatgtagaattacagtatttataaactcttagcaacagacttcattattgctgactgaactttgatttggtgagcaagttctcaacatgctgattttgaatccattttaagggtccaaacccttgtgacaatgcagtgtatgagactcctcagacttacctggcttcacctttggcaagtttcctaacatctatgagaatggtactaatcttcaagtggggataaatggctttacagtagaattgtttgaaaatttgttcagataacataggtaaaatggctagcatagagtggacatacagtcagttgtagctgtgactgtttcctgcattcaagactttctctagctggatcctccaccaagaattttgtgtctcttaccttatcatcagaaatcctatattgccttgacattgtggtatatatctcaatcccacctcctccgtaaaacagc

SEQ ID NO: 5618 - DNA, 578 bp, Homo sapiens
  MAP TO AC006505.1; EXPRESSED IN FETAL LIVER, SIGNAL = 1.7; EXPRESSED IN BRAIN, SIGNAL = 3.5; EXPRESSED IN BONE MARROW, SIGNAL = 2.4; EXPRESSED IN PLACENTA, SIGNAL = 2.7; EXPRESSED IN HEART, SIGNAL = 4.2; EXPRESSED IN ADULT LIVER, SIGNAL = 3.2; SWISSPROT HIT: P11369, EVALUE 3.00e-04; NT HIT: gi16163263, EVALUE 9.00e-40; EST_HUMAN HIT: BG702991.1, EVALUE 1.00e-39
ttccttccttttcttggctgaataatattccgttgcgtggatgcaccaggttgtgtagatctatgcatctgtggatggaagcttgggttgcttccacctagtggccactgtgggtggtgctgctgtgaccatgggtgtgcccgtgctctcttaacacccccgtttctctcccttccaggctgtgccttcctcacctactgtgccagggattccgccatcaaagctcagactgccctgcacgagcagaagaccttgcccggagtgagtcctgtgtggtgtctggggaggaggggacaggggatggctctcagcctggggtgggagccaaggctcttcctgagattggctgtgaattctgtgtgtctcgggactcagaaagaggtatgaggagcagaggtatagaaatcatcataatagtgtgcatttattgagtgcctactgtgtgccgtgctctatatttcataccagagtggttgtgtgtggttgtgcaggttgtatactgcacaagggcacctggcccagtgtgtcgttgtctttgggttgagacctgaaggataaggaagcattagcaggcagag

SEQ ID NO: 5619 - DNA, 571 bp, Homo sapiens
  MAP TO AC004858.2; EXPRESSED IN FETAL LIVER, SIGNAL = 2.3; EXPRESSED IN BONE MARROW, SIGNAL =   2; EXPRESSED IN PLACENTA, SIGNAL =   2; EXPRESSED IN ADULT LIVER, SIGNAL = 2.4; EST_HUMAN HIT: AA340620.1, EVALUE 1.00e-109; NT HIT: AF029701.2, EVALUE 0.00e+00
tcccaaatagccagaaaacggcacttttgatttctccatcctacaagatctagataatttttgtcgaaaaatgggcaaatggtctgaggtgcctgacatccaggcattctttcacacattggtccctccctagtctctgctcccaatgcaactcgttccaaatctttcttctttctctcctgtgtgttccttcagtctccaccccaagctctgagtcctttaaatcctccttttctacggacccatctgacctctccccttctccccaggctgctcctcaccaggccgagccaggtcccaattcttcctcggcctccactcccccaccctataatccttctatcacctcccctcctcatacctggtctggcttacagttttgtttcgtgactagccctcccccacctgcccaacaatttcctcctaaagaggtggctggagctgaaggcacagtcaaggttaatgctcctttttctttatctgacctctcccaaatcagttagtgcttaggctccttttcatcaaatataaaaacccagcccagttcatggcccatttggcaacaactctt

SEQ ID NO: 5620 - DNA, 544 bp, Homo sapiens
  MAP TO AC011519.6; EXPRESSED IN HEART, SIGNAL =   1; EXPRESSED IN ADULT LIVER, SIGNAL = 0.84; EXPRESSED IN LUNG, SIGNAL = 0.57; EXPRESSED IN HELA, SIGNAL = 0.52; EXPRESSED IN BRAIN, SIGNAL = 0.56; EXPRESSED IN PLACENTA, SIGNAL =   1; EST_HUMAN HIT: BI764941.1, EVALUE 4.90e-02; SWISSPROT HIT: P47902, EVALUE 5.00e-04
tattcatggagcctgggaagagcagcccggctgccagccccgcagccacactttacagaactgcttacggctccttggctgagcccggatgggggccgggggtatcctcatctaaaagtggagggaacactggggaaggtgaggcccctaatgcagcacctgacccccgggtgggggctcgcccagcaccttccccttctgcacagtgagaggatggtggaggtcccaggccccacacccagggcatggaagctgcctgtggggcagggtgtgtcaggagggggctgggcctgggtgtggggtaaccggtggagcctggtcaggaggctaggctcatctaaagcttgaggccagagcagctgcctgtggctgcatggaagtgactgcacagcacccatgtggggccaagggcaccgaggagccaggcccggtgcctgcaggctgagcctcttagtgcctgagacgcaagacctcaccccaggaggaaagtacccacactcagtttctgtccacctaacctcccccttcacaaccacaccagcac

SEQ ID NO: 5621 - DNA, 581 bp, Homo sapiens
  MAP TO AC006479.2; EXPRESSED IN ADULT LIVER, SIGNAL = 6.7; EXPRESSED IN HEART, SIGNAL =  11; EXPRESSED IN LUNG, SIGNAL = 3.4; EXPRESSED IN BRAIN, SIGNAL = 5.8; EXPRESSED IN FETAL LIVER, SIGNAL =  10; EXPRESSED IN BONE MARROW, SIGNAL = 5.1; EXPRESSED IN PLACENTA, SIGNAL = 9.4; EST_HUMAN HIT: BG619581.1, EVALUE 0.00e+00; SWISSPROT HIT: P54120, EVALUE 4.90e-01; NT HIT: gi16196212, EVALUE 0.00e+00
ggaaattactgtgattcacccactaaatgatagtgagtaaataataactgggatctgtaactataacctaggagtcttgcgttctagtctaataactgttctcaaaaatatcattaactttttgggtataataaacagcaaactgcagaataaattgcacatactaaagagtaagcaacaaaacaaattgcacatgctgtgcagtatgcaaagccacagaattatcaatctgagaaacaactgaatacaaaataaaacacacagttgtgttttgattaaggctccttttaggcagtttgcttcagccaaggctgtgtaacttctttgagtttccatgtactttataaggctctgtttgaattcctttactctttcatctgatcccacaggtccacatttagacctctgtattaggctgtacaacccattggtatagtgatcaccatttttctccatcaacagatcctcaatacagtccattagttccttcacttggtcatcctgattgctcccttcagcacggttattaaaggcacagattcgcccaccacatgctgccaccagcttgcttagggctttgt

SEQ ID NO: 5622 - DNA, 549 bp, Homo sapiens
  MAP TO AC011539.5; EXPRESSED IN ADULT LIVER, SIGNAL = 0.98; EXPRESSED IN LUNG, SIGNAL = 2.3; EXPRESSED IN FETAL LIVER, SIGNAL = 0.8; EXPRESSED IN BRAIN, SIGNAL = 1.6; EXPRESSED IN PLACENTA, SIGNAL = 0.78; NT HIT: gi13430867, EVALUE 1.00e-35; SWISSPROT HIT: Q20799, EVALUE 1.00e-14; EST_HUMAN HIT: BF526089.1, EVALUE 2.00e-35
tcgtggatagcgtcacagacgacagactgaccaggccactggggtcccccatatccctgcctgacttcacccagaagcactggagcatctgcaagagaagggggccaggagaaagctcactaggagcctgggctccggccagccctgccaccccctctgcaggacccatacctcatagacagccaggtcggtgcaggcataggggatgatgccgagcatattgggcaggtagccgcggtaaagggcgcgggtgccctctcgctgcaagatctgcctggcgcagtccagcagccccttgtactggcccgtccgacgcaaggtcaaccgcgtcttcagcacctgaggatggcggggaacaaggcagctcatttgattgaatcctgtcaatgaccctcggggtagccattgtccccaccctacaaacaaggaaaatgaggctcaggaaggcaaagagctgggtttcagacccggatctgtcagattccatggaatgctctctgaattttgagttctgaagcacaaatgctggcaaaggccaagagagtgagg

SEQ ID NO: 5623 - DNA, 569 bp, Homo sapiens
  MAP TO AC006167.1; EXPRESSED IN BRAIN, SIGNAL = 0.5; EXPRESSED IN PLACENTA, SIGNAL = 0.92; EXPRESSED IN ADULT LIVER, SIGNAL = 0.64; NT HIT: U08988.1, EVALUE 1.00e-44; SWISSPROT HIT: P32896, EVALUE 2.40e+00; EST_HUMAN HIT: AL046939.1, EVALUE 3.00e-71
gaggaaaagtcaatgcctgcctggcttcaaagcttcaaaggacagtctgactctcttgttagaggctaatatagctgatggctttaagttgaagctaatcctcatttaccactctgaaaaccctctggctcttaagaattatgctaaatctactctgcctgtgttttataaatggaacaacaaagcttggatgacagcatatctgtttacagcatggtttgttgaatattttaagcccactgttgagagacctactgctcaggaaaaaaaagatttctttcaaaatattactgctcattgacaatgtagttggccacccaagagctctgatgcagagatacaaggagataaatgttgttttcatgcttggtaacacagtgtccattctgcagcctatggatcaaggagtgatttcaactttcaagtcttattatttaagaataaattttgtaaggttatagctgcaatggatagtgatttttctgacatatctgggcaaaatacattgaaaatcttttggaaagcattcatcattctagatgccattaagaacacttgtgagctgagca

SEQ ID NO: 5624 - DNA, 500 bp, Homo sapiens
  MAP TO AC006573.1; EXPRESSED IN BRAIN, SIGNAL = 1.1; EXPRESSED IN PLACENTA, SIGNAL = 1.4; EXPRESSED IN HEART, SIGNAL = 1.9; EXPRESSED IN ADULT LIVER, SIGNAL = 1.1; SWISSPROT HIT: P12977, EVALUE 4.10e-01; EST_HUMAN HIT: AI246772.1, EVALUE 3.00e-06; NT HIT: AJ251973.1, EVALUE 3.00e-05
gtcagagcaacaatcatgggcaaactacaaacattgctttcccagtcagttgaatcagaggacggagtatatatttattagtcagggttctccagagaaacagaaccaatagtatacacagagatgtacaagaggggatttattatgcgaattgactcatggcatcgtggaggctgagaaagttccaggatgggccctctgcacactggaaaaccaggagcctgatgggataattcagtccaagtctgaaggcctgagggaccaagggagtgaattaatggtgaaattctcagtccaaggccaaaagcctgagaaactgggctgcaaacctgaagtccgaaggctggagaacctggagctctgatgtctgagggcataagagaaaatggatgtcagctgcagatgagaaggagggaatatgccctttcttcaccttttgttttatttgagacctgaaaggattggatgattcctatccatgttggtgagggtgatcgtct

SEQ ID NO: 5625 - DNA, 544 bp, Homo sapiens
  MAP TO AC012315.4; EXPRESSED IN BRAIN, SIGNAL = 0.98; EXPRESSED IN HELA, SIGNAL = 0.58; EXPRESSED IN ADULT LIVER, SIGNAL = 1.1; EST_HUMAN HIT: BF855288.1, EVALUE 6.00e-97; NT HIT: AL163218.2, EVALUE 1.30e-01
agtacgccaaatgtggttggcgtatttgagggaggggggaagttatagaaaatgaggtaggagccacagaaaggcatcagatcacatagtgctttgagcctgtagtaaagacttgggtcattccttggtgatgactgtgatgtattgaagcaaaaagtgttagtagtaggaatgtctgtgttaggaagggacacagtctatcataagttttggaagaatcatcccggctcctgtgtagaaagtaaagatgtggggaaaatggaagcagagaccagttaaactattgaagtaacccaggtaacatgtattggcagtgtggactagagaaatagaggtaaaagtagttaaaaaaaaaaaaaaaaaaaaggtcataattctgtctaccatttgaagacacagccaacagaatttgtggatgcattggatgtgaagagtgagaaagaagaatcaagaataactcttaagtttgtggacttagcaacaggtagaatgtagttgtcatttgtcaagctgaggaagattgtggaaggagcatttttagggg

SEQ ID NO: 5626 - DNA, 519 bp, Homo sapiens
  MAP TO AC004091.1; EXPRESSED IN ADULT LIVER, SIGNAL = 1.1; EXPRESSED IN HEART, SIGNAL =   2; EST_HUMAN HIT: AI884381.1, EVALUE 1.00e-24; NT HIT: AL163248.2, EVALUE 7.00e-62
ttagtcagcgttcgctagagggataggactgattagatagatgtatatatgaggaggattttattaaggaacattgacttacacgatcacaaggtgaagtcccacgataggctgtctgcaagttgaggagcaaggaagccagtctgagcccctaaacctcaaaagtagggaagtgaacagtgcagccttcagtcgatagctgatggcctgagggcccctagcaaaccactgatgtaagtccgagagtccaaaagacgaagaactttgagtcttatgtttgagggtaggaatcatccagcatgagagaaagatgaagaccagaagactcagcaagttgatgtctcccacgcacctttttctgcctgctttattcaagctgcgatggaagctgatcggatggtgcccatccacactgaaggtgggtctgcctctctgagtccactgactcaaatgttaatcttttttggcaacaacctcacaggcacacccaagaacaattctttgcatccttcaatgcaa

SEQ ID NO: 5627 - DNA, 566 bp, Homo sapiens
  MAP TO AC011749.2; EXPRESSED IN HELA, SIGNAL = 1.8; EXPRESSED IN BONE MARROW, SIGNAL = 2.4; EXPRESSED IN PLACENTA, SIGNAL = 1.4; EXPRESSED IN ADULT LIVER, SIGNAL = 2.2; EXPRESSED IN FETAL LIVER, SIGNAL = 1.6; NT HIT: AJ278581.1, EVALUE 1.00e-57; SWISSPROT HIT: P26808, EVALUE 2.00e-40; EST_HUMAN HIT: BF823210.1, EVALUE 1.00e-55
ctgaaggaaactcctgcctggcagcaattttggcctcagactctgtttggtactttccttctgcttcttctccttcacctttctgatggccccagcagtgtaaaactgccacctctttaggtttttgcactgtgtgcattaattccatgatttatctgtggtatttaataggtgttcctccggaggttaagaactctctttctttccatattgcagcatgtgcatgtaagactagaaaagcatacttgctatctgtgtatacatttatgctttcttcttctcccagttctaaggctcagattagcacaatgaattctgctaactgagcactggtccctagaggaagaagtttattttcaagtactgctgtatcactaactatggcatagcctgccttttgtacccaattttctacaaatgaacttccatcagagtacagattaaggtcagggttagttaaggggacttctaagagatcttttcgggtggcaaaagtatgagctaaaatttgttggcagtcatactcaattggttcctcaccctctgggagaaaagtggcaggattg

SEQ ID NO: 5628 - DNA, 574 bp, Homo sapiens
  MAP TO AC010598.5; EXPRESSED IN FETAL LIVER, SIGNAL =   1; EXPRESSED IN PLACENTA, SIGNAL = 1.1; EXPRESSED IN ADULT LIVER, SIGNAL = 1.2; NT HIT: AL114129.1, EVALUE 5.50e-01; SWISSPROT HIT: P56079, EVALUE 5.50e+00; EST_HUMAN HIT: AW629089.1, EVALUE 1.30e-02
tgaatttgggggagagacagacagagagagagagaaagtaagaataaatatgaattgactttaaagggatgaattcttcaccttcttccactaaagaagttaaatacgtataactcactctaagatgctactctatattacatataaacaatataccatagtgatccatctgagtcatagctagaagttagtatcagacttaggttcacactagagaatgttagcataattctccaaatgtttgtttttgcatttgctctaatggagtcaagtattcccgttccctctagaagcatttataatgttgaccaccagagaccgccagagagccatccatcacccggtaggcacagagacactccttaatgtacctgccattgtggaaatcggcaaggaaggcaccaggctgtctgtaaagggctttggcatcggttaaggcagcagaggccatagccagtagccctgttacaaccacattctctgtcacataatgaggtcaaggccattttgattttgagaccattcgtggcttgcctacaaagcagcagctagatggacttggaatctgcttgga

SEQ ID NO: 5629 - DNA, 536 bp, Homo sapiens
  MAP TO AC005791.1; EXPRESSED IN HELA, SIGNAL = 0.55; EXPRESSED IN FETAL LIVER, SIGNAL = 1.4; EXPRESSED IN PLACENTA, SIGNAL =   1; EXPRESSED IN ADULT LIVER, SIGNAL = 0.78; NT HIT: AF288162.1, EVALUE 9.00e-12; SWISSPROT HIT: Q04545, EVALUE 2.90e+00; EST_HUMAN HIT: AW071408.1, EVALUE 6.00e-23
ttctgtgcctgtgtttctgctgaggtatggtgcatgctctgtatttgcctgtgggtctctccaatatgtgggccagttagcactgagaccttgcttccagagaaatctaaacgagttgttgatttttcagtttgttcagctttttacttcttgttagaactgagtgaaaatttttaagctacttacatacctgatggaaattcgaagtctctagggcatgactggaggatatcagccccacagcaggttgaggatggagtcatgagtgaaatgggtgaaatgagcccatgggctttggaaactgcagatctgtccttctgcctctgaccccctggtgagtccatgtagaaagagaaaccaccattgcaaagcatatgatggtgagaggaagctagcttggctgcccgcatctcacctctagtctcaaactggctctcttctctgattcctgggcataggccagggtaagcatgggaggaatttatagtttaactttaaagcaaggatgataatagtccctccctaaaatcagctcc

SEQ ID NO: 5630 - DNA, 592 bp, Homo sapiens
  MAP TO AC008507.6; EXPRESSED IN BONE MARROW, SIGNAL = 0.47; EXPRESSED IN PLACENTA, SIGNAL = 0.7; EXPRESSED IN ADULT LIVER, SIGNAL = 1.1; NT HIT: K02819.1, EVALUE 9.00e-03; SWISSPROT HIT: Q05538, EVALUE 5.00e-01
agccctcatttcagaacgtggcccttcctgaagccgctttagctggctgggggaggggtggggttggaggggtggagacggtagcggttctccaccttccctctgccccgctgtgccgcccagcagatggggagttagcacgtcacaggtgcagctccactttggtcacctggaggctctgcttgcaaatgtggggctggtgcttggaattcaagatgcccaataaaggatccatccacagcggctgcccacgggagccatctctctgtggctcccaggagccaggagggcctggagctggggacagggggaagttctgattttaaattggggaattctgacatcagcccagtctcgttccccagaaagaaactggtcccgtctgccgtctttccagatagttccttctggagcagaagtagtccaaattccaaacctctgattactgacatttgcggttagttttttggtattatttttatacaggaaaacttgttctgaataatgcaactttacacagacactctcaccactgggcctcaccaagtcctgattttcaaaacactcagagcccttcctgagctcacctgag

SEQ ID NO: 5631 - DNA, 584 bp, Homo sapiens
  MAP TO AC024126.1; EXPRESSED IN ADULT LIVER, SIGNAL = 3.1; EXPRESSED IN HEART, SIGNAL = 4.4; EXPRESSED IN BRAIN, SIGNAL = 2.4; EXPRESSED IN LUNG, SIGNAL = 1.7; EXPRESSED IN BONE MARROW, SIGNAL = 2.5; NT HIT: AF283320.1, EVALUE 0.00e+00; SWISSPROT HIT: Q07954, EVALUE 2.00e-18; EST_HUMAN HIT: BF445906.1, EVALUE 1.00e-109
atccacaagaagggaaggtgcccagaatttactgttaactgagaacaagttggaaatagtatattttgattgcccagcttaaggcaggaatacctgaaaccatacctgttggttatttccgatgggtgagattttagggcaagttcactgtctgttgtttcatgtctgcatctatgcagacaaaaacaaaaaacagatctgtgttagctgcttctcttgccctgcccccgtcacaggtacatgtactggacagactggggtgagacgccccggattgagcgggcagggatggatggcagcacccggaagatcattgtggactcggacatttactggcccaatggactgaccatcgacctggaggagcagaagctctactgggctgacgccaagctcagcttcatccaccgtgccaacctggacggctcgttccggtaggtacccacgcagtcctggggcacccctttcccctttgtccccagggcttttgaaggcgttccttcttaactcaggcctacagactcttctctgaaactctggggccctgaggaatgcaggacttctcagaacttggaacagcgtca

SEQ ID NO: 5632 - DNA, 508 bp, Homo sapiens
  MAP TO AC012331.9; EXPRESSED IN ADULT LIVER, SIGNAL = 0.92; EXPRESSED IN FETAL LIVER, SIGNAL = 0.59; EXPRESSED IN BRAIN, SIGNAL = 0.88; NT HIT: X71967.1, EVALUE 0.00e+00; SWISSPROT HIT: P01717, EVALUE 2.00e-25; EST_HUMAN HIT: BG755759.1, EVALUE 4.00e-55
tcattgcttggtccacagtcttccgggtgctggaggaagaacacaacacagatgaaaaaggagtttgtgtctcacttccccatctgcctgtgtcactgagggattgtcctcatccccagacaaacagtaatagtcagcctcgtcttcggtcaggaccctgctgatggtcagggtggtcgtgttccctgaggtggacccagagaatcgttcagggattccagggtaccgctcactatcttcgtatatcaccaactcaggggcctggcctggcttctgctggtaccagtcagcataattttcccccagtacatctccagagcaggtgatcctggctgtctgtcctggggacactgacaccgagggtagctgtgtcagctcataggaggcaacagagcctgcaagagaggacaagagagggggcttgaagataacaaacccattccagtagtatcgccctgaggctatgcctgggctgagctcagggttcagggtaagaccaggggcttag

SEQ ID NO: 5633 - DNA, 506 bp, Homo sapiens
  MAP TO AC016629.5; EXPRESSED IN ADULT LIVER, SIGNAL = 1.5; EXPRESSED IN BRAIN, SIGNAL = 1.7; EXPRESSED IN PLACENTA, SIGNAL = 1.1; EST_HUMAN HIT: BI160932.1, EVALUE 2.80e+00; NT HIT: gi6677606, EVALUE 5.00e-04; SWISSPROT HIT: Q07230, EVALUE 2.00e-03
gcgtcacagcttctaggtcctcctccccaagacagggatattgagggcctaggcagacggagggagacactcagggcccaaggtcatgagctgtgatccctcatagattcccctatccctctggccaacccctggacccctgtggctcaccagtcttcaacatctgggtgaagtcctccaccagcgccatagcctcctcactgctctcagggcactggggctccacccagacacagatggcaggtggcaggacacccaggtacatcctgcagggccgtccctaattggtaccaccaccgtggagtacccaatgatagaaggggatgatggttctccataccagatcaagaatgattcagtgaaactaagtcagatcctgacctctgttggagccctcccaggccttcaagtaaaagccacagtcctcactgcctcctttgtaagactcaaagcctcctcctctactctgctcactcctgaccacatcttccagacagagcaaaggg

SEQ ID NO: 5634 - DNA, 565 bp, Homo sapiens
  MAP TO AC006189.1; EXPRESSED IN HELA, SIGNAL = 0.97; EXPRESSED IN BRAIN, SIGNAL = 0.79; EXPRESSED IN PLACENTA, SIGNAL = 0.88; EXPRESSED IN ADULT LIVER, SIGNAL = 0.92; EXPRESSED IN FETAL LIVER, SIGNAL = 0.65; NT HIT: gi15299933, EVALUE 8.00e-71; SWISSPROT HIT: P54317, EVALUE 6.00e-20; EST_HUMAN HIT: BG661239.1, EVALUE 1.00e-104
atgcctatctctggggtgtgcacctgggggctgtttataaattgatttctctcccttgtttgtcttccccagaaaatgtttgaagtggagaaggtgaactgcatctgtgtggactggaggcacgggtcccgggcaatgtacacccaagccgtgcaaaacattcgggttgttggggcggagacagctttcttaatacaagcactgtcggtaaaaccctgcctgggccctgtcctgtgggtaggggtcagagaggggcagggaggtaccacgtggcatggagaggcagcctggggacccgtgggcatgggtaggggccggcagctagtagcccagattgcaatcaagaagggcaattcccaagatgaagctctgcaaccttcctctttgcctgctgtcctgaagacaccttgccctatcactgtctagctgtgggcctgaggcaaactaagccttggtttccccttttgaaatagaccttccttgcaggctgttctgcaagggtcagagagcaggctggctgccccgcagctcccagtgcagaagatgagttttcatccttcgccag

SEQ ID NO: 5635 - DNA, 570 bp, Homo sapiens
  MAP TO AC040171.3; EXPRESSED IN BONE MARROW, SIGNAL =   1; EXPRESSED IN ADULT LIVER, SIGNAL = 0.92; NT HIT: D11078.1, EVALUE 0.00e+00; SWISSPROT HIT: P21414, EVALUE 3.00e-31; EST_HUMAN HIT: BF920079.1, EVALUE 0.00e+00
tggccttcccacctctatacagtctgataacgggccagcctttactagtcaaatcacccaagcagtttctcaggctcttggtattcagtggaaccttcatatcgcttaccatcctcagtcttcaggaaaggtagaatggactaatggtcttttaaagacacacctcaccaagctcagcctccaacttaaaaaggactggacagtacttttacctcttgcccttctcagaattagagcctgtcctcgagatgctacagggtacagtccatttgaacttttatatggacgcactttcttgcttgggcccaacctcttcacagacaccagccctctaggtgactatcttccagtcctccaacaggctagacaggaaattccccagactgctaatcttctcttgcttactccagatccccagccatatgaagacaccctagctggatgatcagttcttgttaagaatctgaccccttaaactctacaacctcgatggaccggaccctacttagtcatctatagtaccccaactgctgtctgccttcagggtcctccccactaggttcaccattc

SEQ ID NO: 5636 - DNA, 552 bp, Homo sapiens
  MAP TO AC004170.1; EXPRESSED IN ADULT LIVER, SIGNAL = 0.55; EXPRESSED IN HELA, SIGNAL = 0.57; NT HIT: AF055066.1, EVALUE 0.00e+00; SWISSPROT HIT: Q09690, EVALUE 1.80e+00; EST_HUMAN HIT: AA233203.1, EVALUE 4.00e-18
ctgcaacctctggcctctactgtcagcctgattgttctcagtcttcctggctgccaagcttctggttcccagcagcctcctctctcacccttcacctcttctgactggggtcattggccacttgacaggcagtgccctccttgtcagtcagcctgtctacctggtttcctctcagggtgtgtggcttgactgggttaaccatccccagccccagcagaaacagggagaagtgactcagcaaatcccccaagagcagcgggatccctacatgtgagatggggcaaagccatcattctagtccctcccatacctgagaacttcttgcacatcacaagtccaaggaccatagcaggaagtagctctaagccagagacaagaacagagcagtgacaagaggctggtgtgaatggagaccagcaagctctattgagagtagtgggatgaggccacagatgccctgtgttgaggggctagtaggaaatggtgggagactgggatttcattgcactaagaaaggaagaggatggagtgtctgtgggatgtgatggtgag

SEQ ID NO: 5637 - DNA, 540 bp, Homo sapiens
  MAP TO AC016543.5; EXPRESSED IN HEART, SIGNAL = 2.4; EXPRESSED IN FETAL LIVER, SIGNAL = 3.1; EXPRESSED IN BRAIN, SIGNAL = 3.7; EXPRESSED IN ADULT LIVER, SIGNAL =   4; NT HIT: AY007685.2, EVALUE 2.00e+00; SWISSPROT HIT: P23069, EVALUE 1.70e+00; EST_HUMAN HIT: BG432899.1, EVALUE 7.60e-01
ctcgggaaaggacatgaaaggggccctgggcttcattccatggtggaccatgaccctggaaaataccatctggcttttctgtgtgtcttctgacaccaattcccctagtcgggacacatcaaagagagtgcgcctggtgacatttctcattgttattcctttggcagggccttcggattcaggtcacagatagacttgcacctccagaggctgcctgtggggcctgagccccccatcttacagatgcctcaggagggggcttgtagaggtgacccaggaccccctagcggccaagaccccagtcaacggcacccagcaggccagtcccccagggccagtctgggcagcagaacctcctggagtgaccgctctgactttccttctctgccctctgatgctacccacgcaaaacagccaaagcgccaggtaccccatccagggtgtcagtaatgtgtggagtttgaccttaccctgggaatcccagcttcagtcacagagtcatattttctttacggaggctgggcttgctggctttaaagt

SEQ ID NO: 5638 - DNA, 520 bp, Homo sapiens
  MAP TO AC013737.4; EXPRESSED IN HEART, SIGNAL = 1.6; EXPRESSED IN FETAL LIVER, SIGNAL = 0.95; EXPRESSED IN LUNG, SIGNAL = 1.2; EXPRESSED IN PLACENTA, SIGNAL =   1; EXPRESSED IN ADULT LIVER, SIGNAL = 0.78; NT HIT: AL163252.2, EVALUE 3.00e-21; SWISSPROT HIT: P43824, EVALUE 1.60e+00; EST_HUMAN HIT: BF829144.1, EVALUE 2.00e-13
gctctgtgcagccttaggacatggcatcctatgtccctgccactctagctccagccatggctaaaatgtacagttcaggccattgcttcagaggtgcaagccccatgccttggtggcttacatgtggtgttgggcctgcaggtacatagaagacaagagttgagctttgggaacctccaccttggtttcagaggatgtgtgaaaatgccagcatgtccaggcagatatctgctgcaggggtggagccctcatggaaaacatctactagcataatgcagagggaaaaagtggaattggagtccccacttgggactgcctagtggagctgtgaaaagagtcccactgtctcctccagatcctagaatgatagatccacagacagcttgcatcatgtgcttggaaaaaccacaagcactcaatgccagcctgagaaggcagctgcaggggcagtaccctgcagagccacagggacatagctgcccaaggccttggaagcttaccctttgcattaatgtgccct

SEQ ID NO: 5639 - DNA, 502 bp, Homo sapiens
  MAP TO AC010320.7; EXPRESSED IN PLACENTA, SIGNAL = 1.9; EXPRESSED IN ADULT LIVER, SIGNAL = 1.9; EXPRESSED IN BRAIN, SIGNAL = 1.5; EST_HUMAN HIT: BF306258.1, EVALUE 4.00e-67; NT HIT: gi15301350, EVALUE 1.00e-66; SWISSPROT HIT: P39188, EVALUE 2.10e-02
aaggacatggtgacaggtgggggtaaagaaagatttctcttaagaactcacaggttttaaactcttatttctccacacaattctcccacttataaacacgatttaatagtgtggctctggtaggcaaggggcacatgcctataatcacatcactttgggaggccaaagcaggaggactgttgaagcccaggagttcaaagctgcagtgagctatgatggccaatgcactccagtgtggggaacagagactgtctcaaaaaaaaaaaaaaaagtgtggctttcactctgtccatctgagctcttacctgtgttgatatctttgataccttcccacctatctggattttttgctactttcatttcattctccacagtccagggctctgtcctttgcttcatcatggagataatactcaggtcaggaagacagattcctgtttataaaagaaagaatcaagatgtgctgtgatgtctccaaaatccaagccctctgtttaggcag

SEQ ID NO: 5640 - DNA, 532 bp, Homo sapiens
  MAP TO AC016778.2; EXPRESSED IN PLACENTA, SIGNAL =   6; EXPRESSED IN ADULT LIVER, SIGNAL = 5.7; EXPRESSED IN BRAIN, SIGNAL = 5.9; SWISSPROT HIT: P80252, EVALUE 4.40e-01; EST_HUMAN HIT: BE420422.1, EVALUE 2.00e-93; NT HIT: AL163227.2, EVALUE 4.00e-94
attttctgaggtgtgcagcctagggacttggtgccctgtgtcccagcttctccggtgtggctgaaagggaccaatgtagagctcgggctgtggcttcagagggtgcaagcctcaagccttggcagcttccacatggtgttgagcctgtgggtgcacagaagtcaagaactggggtttgggaacctccgcctagatttcagaggatgtatggaaatgcctggatgtctaggcagaagtatgctgtaggggcagggctctcatggagaacctctgctaaggcagtgtggaagggaaatgtggggtcacagcccccatacagagttcctactggggcactgcctagtggagctgtgagaagaggccaccctccagacaccagaaatgacagatccattgacagcttgcactgtgtgcctggaaaagccacaaacactcaatgtcagccaatgaaagcagctgggaggtaggctgtattctgcaaagccacaggagcagagctgtccaagccatgggaacccaccttttgcatcag

SEQ ID NO: 5641 - DNA, 577 bp, Homo sapiens
  MAP TO AC005947.1; EXPRESSED IN BRAIN, SIGNAL = 2.5; EXPRESSED IN PLACENTA, SIGNAL =   2; EXPRESSED IN ADULT LIVER, SIGNAL =   2; EXPRESSED IN LUNG, SIGNAL =   2; EXPRESSED IN FETAL LIVER, SIGNAL = 1.2; SWISSPROT HIT: P05156, EVALUE 6.40e-01
tgaaggatgagggtaggtggggtggctgctcaggacagtggaggccacatcacgcaaccttcgaggcctctcttagctgctggagcacatcccagggacttgggagctctggaaagaggagcaggagagggccatggccggaggaggcctgaaaaagatcatctctgccacagagaagaagctggctcagatgcttgtggccactgtggagacagggagacccagggagacaacagtattcactcaaggaggaatgggtggtgatgcaaacttgggtggaggccacagggtgcagaagacaggacacagcagagagtgatgtaggacatggaagggacagaaaggagtgaccaccggacataaaggggcaaggaaagtggaagcatgagaacatctgctgggcatctggtggagggatcaggttcccagggtgcccatccctaagggagaacccaggataggagcagattcagagaaaaccacccagctcactccagcaagaagcagaaaagggactggttaaaggacagggtaggaaggtcaccaagctccaagggccctcatgaatccagcttgt

SEQ ID NO: 5642 - DNA, 534 bp, Homo sapiens
  MAP TO AC008455.5; EXPRESSED IN ADULT LIVER, SIGNAL = 1.5; EXPRESSED IN BONE MARROW, SIGNAL = 0.47; EXPRESSED IN BRAIN, SIGNAL = 1.3; NT HIT: U35243.1, EVALUE 3.30e-02; SWISSPROT HIT: P35123, EVALUE 7.50e-01; EST_HUMAN HIT: BE160491.1, EVALUE 1.00e-126
agaccttgtctctcctcccctgccagtgcatgctcatcctaccatacccccagctgatgtgtgggcagcctgctatgctggcatgaatgcacacaggaatactggcaacctcatccccactggtgccctgcccctgctgtactgctaccatgcaccgccagcaggttgctgccaccctgctccttctggagccccaccccagctgacacatgggcacacggccatgctgccacagctgctgtcacataaaagtgacgatggatcctgctgccaccaccccaacaaagagctttggctggcattcccccatcggagtgttgtggacaatatagagcatgaacactttggcccctccagtgcagcagatgcctaaccttgaaagaccagagaacaaagcgggggggcccaatgccagttcctcagagttagagtatgaagcctaggagtgcagggctgagcctttgctccctataatcttacagagacaatgccagttcactaaacaccacaatcacatcctccaagtgcatcaaa

SEQ ID NO: 5643 - DNA, 529 bp, Homo sapiens
  MAP TO AC009003.7; EXPRESSED IN BONE MARROW, SIGNAL = 1.7; EXPRESSED IN PLACENTA, SIGNAL = 1.6; EXPRESSED IN ADULT LIVER, SIGNAL = 1.6; EXPRESSED IN FETAL LIVER, SIGNAL = 2.5; EXPRESSED IN BRAIN, SIGNAL = 2.1; NT HIT: gi14757758, EVALUE 1.00e-114; SWISSPROT HIT: Q9U969, EVALUE 8.00e-05; EST_HUMAN HIT: AL121522.1, EVALUE 1.00e-109
gtccgggttctgtgttcatcacatcccctgcccgcacaggacgtgagcctgcacttcgtgctctggggctgcctgcacgtgtaccagcgcatgatcgacaaggcggaggacgtgtgcctgttcgtagcgcagcccggggaactggtggggcagctggcggtgctcactggcgaacctctcatcttcacactgcgagcccaacgcgactgcaccttcctgcggatctccaagtccgacttctatgagtatgacagcccgaagttggagtgtgggtggcactcggaggaccccaacccgtgggagtggccagaaccccatccctcaacctcactcctggaagagcagaagggagcccccagatctggcctcccagcgccggtgtaggacggttttgaggccttcctctttcatcccaagtctgttcctgcaggatcatgcgcgcacagcccagtgtggtgctgagtgcggcgcacacggtggcagccaggatgtcgcccttcgtgcgccagatggacttcgccatcgactg

SEQ ID NO: 5644 - DNA, 523 bp, Homo sapiens
  MAP TO AC010219.4; EXPRESSED IN HELA, SIGNAL = 1.2; EXPRESSED IN BONE MARROW, SIGNAL = 1.6; EXPRESSED IN BRAIN, SIGNAL = 1.3; EXPRESSED IN PLACENTA, SIGNAL = 1.3; EXPRESSED IN ADULT LIVER, SIGNAL =   1; NT HIT: AL163281.2, EVALUE 8.00e-03; SWISSPROT HIT: P22807, EVALUE 1.10e-01; EST_HUMAN HIT: AA516330.1, EVALUE 1.90e-01
ctacacgtatgcacccatgcacacacatgtgcacgcatccccgtctgtcccaccgtctctgctcatgactcccagggccagcaccaacgtgagctttgaacccatgggattcagcccactcgggcccagaggagtcttgcgtgcctgtctgggaatgctgagcacagaataggctgttccgccctaggcctgaggaccccacacccagctgtgtgttctgggagcccccagattcagtccagggtgagtccttggtggctttggagactgggtccttaggagctccaggagtcacatcttggggaccgggagcggtatcttcagtgtcctggggctaggtctagacagcctcagagggcagcgtcctcaccgctttctggggaggtctcttctgtggctcctcagacagtggctcccccgatagctcctccgaggggcctcccatgtgtctctgaaggaacctgagcccccacaggctcttgcagcagctcaggaggttgctggagcacgtagtgcaggacag

SEQ ID NO: 5645 - DNA, 552 bp, Homo sapiens
  MAP TO AL118556.2; EXPRESSED IN BRAIN, SIGNAL = 2.7; EXPRESSED IN ADULT LIVER, SIGNAL =   2; NT HIT: AJ290452.1, EVALUE 1.30e-01; SWISSPROT HIT: O60583, EVALUE 1.80e+00; EST_HUMAN HIT: AW972064.1, EVALUE 2.00e-01
cagaagggtcagaaagccagatctggagactacacagttagaaacataacaaaactgttctgcaggactgcctcagccagactttagagctgccgctgctgctgctggcactatacttggctctgctaatgctggatgctatacccacgactctgcatcattcctacccacaaaggccagactcctctccaccatccaagccagaacaatggttcaggacagcacgtacttccttgtgctgctctctttcagactgagacttgtgtgcgtaagtctggttggaggagtctgcaccgtagctgctaggtgttgggaaagggagttgggcttcttctttggagacacgagagtcacaaggcgggaaattactctaatattggaagggtcttcaaagacaaacataaagcatgagaagtatctgctgtatttttctattctacttataaatagggataattatagctgcctcactgactcattttgaagatgagatgcgatctctcatgtaaaatgtttaacacagtgcctggcccagagcaggtgccaataatg

SEQ ID NO: 5646 - DNA, 505 bp, Homo sapiens
  MAP TO AC007782.20; EXPRESSED IN LUNG, SIGNAL = 1.1; EXPRESSED IN HELA, SIGNAL = 0.79; EXPRESSED IN FETAL LIVER, SIGNAL = 0.41; EXPRESSED IN BONE MARROW, SIGNAL = 0.52; EXPRESSED IN PLACENTA, SIGNAL = 0.91; EXPRESSED IN ADULT LIVER, SIGNAL = 0.76; NT HIT: AL163209.2, EVALUE 0.00e+00; SWISSPROT HIT: P70213, EVALUE 2.00e-20; EST_HUMAN HIT: BF803473.1, EVALUE 1.00e-104
ttcattggttttgggctttctgggattggctgcttaatatgattagacctaaaaatgctaagaactctacttctaatattatagagaacactgatagtccctgatgtgtactgttttgggagttatgcaaaataaatgcatctgacactcctgattcactgctcgtgagaggagtttggtgactctgtacatcataccatggaccatatgtggagaaccaatgaacataatgaagctgatcagttgctcctaaggtcagtggacaaagtgatgaaagaaaatgataaactcagggattctgtctcccagcttcagaagcagatactgagcctcaaatctgctaagattgccatgagtgagagtcttatctcccacagagaaagagctgaaattgtggaaaaactgacacaagctcttatcatgccagtgtctgacctgcaatgaaatacacatgcacagtctcaccaggtgtctactgttaaagtgagggcattgattggaaaag

SEQ ID NO: 5647 - DNA, 590 bp, Homo sapiens
  MAP TO AC016940.7; EXPRESSED IN PLACENTA, SIGNAL =  10; EXPRESSED IN ADULT LIVER, SIGNAL = 9.7; EXPRESSED IN BRAIN, SIGNAL = 9.3; EXPRESSED IN BONE MARROW, SIGNAL = 6.9; EST_HUMAN HIT: AW801156.1, EVALUE 0.00e+00; NT HIT: AF139982.1, EVALUE 0.00e+00; SWISSPROT HIT: Q61572, EVALUE 1.00e-01
tccatccttgtgacttgcagtttccttttgtttatttaaactttgacttatagttagagttctactgccatccttactttcaaagagactcccctcacctcctcgtgaggatgaagagaagagtgggtgtcaagtctgcaccaagacatcaggaggaggacaagccagaagctgctggatcctgtctggcaccagcagacactgagcaacaagatcacacgtctccgaatgagaatgaccaggtcacaccgcaacaccgggaaccggccggtcccaacacccaaatcaggagtggctctgctccaccagcaactcctgtgatggtgcctgattccgccgtggcgagtgacaacagtccagtgacccagccggccggcgagtggtcagagggcagccaggctcacgtcactccggtggccgctgtccctgggcctgcagcgctgcccttcctctatgtccctggatctcccactcagatgaattcttacgggcctgtggtggcccttcccacagcgtcccgtagtacccttgccatggacaccacaggacttcctgcacctggcatgctgcccttttgccatctctgggta

SEQ ID NO: 5648 - DNA, 568 bp, Homo sapiens
  MAP TO AC002321.1; EXPRESSED IN PLACENTA, SIGNAL = 1.9; EXPRESSED IN ADULT LIVER, SIGNAL = 2.1; EXPRESSED IN HEART, SIGNAL = 3.2; EXPRESSED IN HELA, SIGNAL = 2.5; EXPRESSED IN FETAL LIVER, SIGNAL = 2.6; SWISSPROT HIT: O53304, EVALUE 4.60e-01; EST_HUMAN HIT: BI517515.1, EVALUE 0.00e+00; NT HIT: gi7662201, EVALUE 0.00e+00
ctgggagcttcttggttcagcttggtgtttctggccccctcgtccaggtcccctccccagggcagcccttgcccccagggctcggatgtgcccacggttgagccacctgtctcctctccagaccgcaacgtcacggggactcctctcaccggggacaaggatgacgaagaggttgacacccacttcgcctcccaggagttcttctcggctaacgccatctctgaccagctgctgggcgcaggctctgacttgaaggacttcaccctcaatgagactgtgaacagcatctttgcacagggcgccccaaggagctccctggccgagagcttcttcgtggattatgaggagaacgagggggctggcccttacctgctcaacgggtcctacctggagctgagcagcgacagggttgccaacagctcctccgaggccccattccccaacgttagcaccagcctgctcacctcggccgggaacaggactcacaaggccaggtaggaggcactttcctgagccctgtccagggccctcagggggcaggatggggccgaggccaggtagaaagtga

SEQ ID NO: 5649 - DNA, 536 bp, Homo sapiens
  MAP TO AC008821.4; EXPRESSED IN BONE MARROW, SIGNAL = 1.6; EXPRESSED IN ADULT LIVER, SIGNAL = 1.4; EXPRESSED IN FETAL LIVER, SIGNAL = 1.7; EXPRESSED IN HELA, SIGNAL =   2; SWISSPROT HIT: O00472, EVALUE 7.00e-22; EST_HUMAN HIT: BI494288.1, EVALUE 0.00e+00; NT HIT: gi13646934, EVALUE 3.00e-61
tgccacacacaaaagaagttgttctcttctgatttctaatatttaattttgtagaatgttcatgaagaagtcttacaagaatatcagaagataaagcaggtaggtatcatcactgttgattttctgacctgtggttgaaaaatgttgtaaattctgcaatctcattcctcttttttttttttttttttcatctgcagtctagtcccaattaccatgaagaaaaatacagatgtgaatatcttcataacaagctggctcacatcaaaaggctaataggtgaatttgaccaacagcaagcagagtcatggtcctagaactctgcttggaccagaagatgtgaataaacttaagcttatttatttaaaattccaaatgagttgctctagattctaaaaaggtgaaactttggctgttgaaagtttcagtattagtaaacttgagttactttttcttttccattttactttgcttccctgcatttcgaagctgctctttctggtcctccccaccaccccacccccaagacttgtgtttgt

SEQ ID NO: 5650 - DNA, 543 bp, Homo sapiens
  MAP TO AC007206.1; EXPRESSED IN PLACENTA, SIGNAL = 0.65; EXPRESSED IN ADULT LIVER, SIGNAL = 0.98; SWISSPROT HIT: Q62865, EVALUE 3.40e-01; EST_HUMAN HIT: BG336067.1, EVALUE 7.60e-01; NT HIT: AL163301.2, EVALUE 8.10e+00
tctgcccttgaagtttgaccccgacaagattaatccggttcctcggagtgtctgaggacctggtgaaaacaagcagggccttttgtcaggtctctcctcacacctgtgaaggtctctgttcatgactatggggcatgacagcattcacagcacaaaacacttcatcaacattctaagtatacccttgcagctcaaaattgtcagcacttgaaggttttcctcttcagagatggtcttatcacaacagcactgtgtggtcattctcctgagtgctgctgccctgcagataggtccaaagcccaacttgcagagtcacttcttcacgttgcggcccaagatgcacaggacttctgaggtgctgaggttgaggaaagaccggatacaagaacacctcaagaattttgtacccagagggcagagcccagacataaatgttttaaaagaaagacgattttccatgatcttggaaatttctaggtcagactgctttcacacctattttggaaaaggggcctactccatccctgcatcaaccatagcaaa

SEQ ID NO: 5651 - DNA, 563 bp, Homo sapiens
  MAP TO AC010168.6; EXPRESSED IN HELA, SIGNAL = 4.5; EXPRESSED IN BONE MARROW, SIGNAL = 0.91; EXPRESSED IN PLACENTA, SIGNAL = 0.46; EXPRESSED IN ADULT LIVER, SIGNAL = 0.56; NT HIT: X02218.1, EVALUE 7.00e-62; SWISSPROT HIT: P02304, EVALUE 2.00e-40; EST_HUMAN HIT: BG436099.1, EVALUE 0.00e+00
gtttcgctgactgcttcctggacttaacaactatagcatgtctccagaggtggggcctagagctccgcccacttttttgatgttttcaaacaggtccgcatcgagagactataagccctggtctgcgactggcaatcacagtgggcagcccgattttctgctgagtaggcgctgtgatttcagaatgtctgggcgaggtaaaggtggcaaggggctgggtaagggaggcgccaagcgccaccggaaggtgctgcgggacaatatccaaggcattacaaagccggcgattcgccgtctcgcccgacgtgggggcgtcaagcgcatttctggtctcatctacgaggagacccggggagtcctcaaagtcttcctggagaacgtgatccgtgacgcggtgacttacacggagcacgccaagcgcaagaccgtcacggccatggatgtggtgtacgcgctgaaacgccagggtcgcaccctttatggtttcggcggttgagctgtccccacagcttctctacagactccaaaaggcccttttcagggcccccaaactgtcacagaaa

SEQ ID NO: 5652 - DNA, 537 bp, Homo sapiens
  MAP TO AC016597.4; EXPRESSED IN BRAIN, SIGNAL = 0.65; EXPRESSED IN PLACENTA, SIGNAL = 0.7; EXPRESSED IN ADULT LIVER, SIGNAL = 0.87; EXPRESSED IN FETAL LIVER, SIGNAL = 0.58; EXPRESSED IN HELA, SIGNAL = 0.67; NT HIT: AB011128.2, EVALUE 3.00e-70; SWISSPROT HIT: O35181, EVALUE 5.80e-01; EST_HUMAN HIT: BE888977.1, EVALUE 5.00e-70
cccaacctctctgcattctctccctgtacagggactatgtgctagtgacccttagaagtcagaccccagcctcaccgacccctggtcaccgggtgcctctgaatgctgacctctagcccaaggtctgctcatcaaactgtgtgaaatgaacgcaagagtgaaggaacacagcggcgagtgaaggacagaataaataactgtcagaaagtgccccgaggggccactgcagcaccgagcctcgccgtccttcaggtgtcccgagcacaaggccaaggccatccctacctgcggacgatcctcagaagtgttgtttgcctggagagtcacatccccacacagctcaaaatcatcagaatagtccacaggaggttcgatgtggagccgtgggccagcttctgttctgatctgcacagatttctgtacaaaaatgcaggccatttcagataaggtggaatgaggtcttcattcctctgcggggcagggactggcactggagaggttcagccaggatctatgggcatagataccatggggtgg

SEQ ID NO: 5653 - DNA, 571 bp, Homo sapiens
  MAP TO AC012156.14; EXPRESSED IN ADULT LIVER, SIGNAL = 1.2; EXPRESSED IN HEART, SIGNAL = 1.2; EXPRESSED IN FETAL LIVER, SIGNAL = 1.5; EXPRESSED IN BRAIN, SIGNAL = 1.3; EXPRESSED IN HELA, SIGNAL = 1.3; EXPRESSED IN PLACENTA, SIGNAL = 1.4; SWISSPROT HIT: P20740, EVALUE 3.00e-08; EST_HUMAN HIT: BF675879.1, EVALUE 2.00e-01
tatgggttgtggtgtcatggccttttccctcctttcttaaaaatagataccagttatataagttttatcatttatgttaactttgagcttcctcgtggcatataggtacagggatttcattaggttcaaagaagttttaaagaaaagaagcaattttgattgtggaagaatattttcagctcataccaaataattgaagtctgctgtgtaggttttgtcttcaaagtcttccatattgagaatgcagtgcactagcaccctcttctgctggttgcatctcagttcttccatctcttggacaatctttaggaagctattcatcttggagtaaaatcgatatgcaaagtactcgggctgagggtattgaggcaacacccagccatgagcctggcaattttcattggccttgtaggctgcctagacaaaaaatcaaaattacgggtattttaggataaagagaaaggatgagtgaaagaatatttgataagatggtttatcatcatgctgctttatctctgcaagaaaattttatagccattctacattaaatctaacccaattccccattttc

SEQ ID NO: 5654 - DNA, 513 bp, Homo sapiens
  MAP TO AC004189.1; EXPRESSED IN ADULT LIVER, SIGNAL = 1.2; EXPRESSED IN HEART, SIGNAL = 1.2; EXPRESSED IN BRAIN, SIGNAL = 1.3; EXPRESSED IN LUNG, SIGNAL = 0.56; NT HIT: Y07829.2, EVALUE 0.00e+00; SWISSPROT HIT: Q62191, EVALUE 1.00e-12; EST_HUMAN HIT: BG386415.1, EVALUE 0.00e+00
tccaagtggagccctatctgccttcagtctgggaatgcctcgaaagtccctgtaaccttagggttccctgatgtggaagcctttcatccagatccccgcccgatttcctcccctcataacaggacatcatcctgccccaaacaggccctaggtaaagctacacttcttacccggtagggctgaatggcctcgtccaggaaccccacggtgtgcgcctggtgcgtgggaccctccctgcagaacacacagaggaactcggcatcgttctcgcagaagaagtagatcttctcgccgtgctcctcgcagtaagtttctcccagcgggcccaggggcacaggggccatgggagtctctgcctgctcctcctcttggcagagcgggcagagcaggatcttgcccgaggattgggcccccatctgggagagcgcggggaggcagagccggcagaaggtgtgtccacagggaatggtcaccgcatcctccagcggccccgcacatagggtacaggcaggc

SEQ ID NO: 5655 - DNA, 575 bp, Homo sapiens
  MAP TO AC004202.1; EXPRESSED IN ADULT LIVER, SIGNAL = 0.75; EXPRESSED IN HEART, SIGNAL = 1.1; EXPRESSED IN HELA, SIGNAL = 0.81; SWISSPROT HIT: Q14155, EVALUE 6.40e-01; EST_HUMAN HIT: BG287658.1, EVALUE 0.00e+00; NT HIT: AF230387.1, EVALUE 0.00e+00
ttgagtttcacctccatccctcctgctgtatgtagagctcagctgtgctgtctggcaatggaggattgctgccgaggtgctcccgctgacctcttttctcctttccttctcccgcaaaggcggcagaactacatcggggccaccaaatcaccactcttcagccccatcccactccctgtttcgggcctcgtctgctgggaaagtcacttttccagtatgtctcctggcctcttatgatgagatttctggtcaaggagcgagctctcaggatacgaagacatttgacgttgcgctgtccgaggagctccatgcggcactgagtgagtggctgacagcgatccgggcttggttttgtgaggttccttcaagctaagccagctcagagaacacggggagcggtggtgctacacggacttcggagcatagagtggcgctgagtgagtggctgagaccgaccacggttcttgacttagtggaattgggtcgaaggagtggagaatgggagggctcgggctactgagagtggagatgggggcgggggtggtggtgaagagagttggagaaggaatggacga

SEQ ID NO: 5656 - DNA, 515 bp, Homo sapiens
  MAP TO AC006334.3; EXPRESSED IN LUNG, SIGNAL = 2.6; EXPRESSED IN BRAIN, SIGNAL = 1.1; EXPRESSED IN ADULT LIVER, SIGNAL = 1.5; SWISSPROT HIT: P25345, EVALUE 6.20e+00; EST_HUMAN HIT: AI025306.1, EVALUE 5.00e-11; NT HIT: U93163.1, EVALUE 5.00e-10
ccaatcaacaaccccaattctccagccccttgcctttcatgattcccttaaaatctcaagcccagaactccttggggagatggatttgagggttcttcctgtctcctcactcggcttctctgcactcattaaactctttctctgctgcaaactctgctgtctccatgtaattggtctgttgctgtccagtgggcctatgaccctagtggtcctgtagcagttctgatgttgcagctcctgggaccacacttggaaaacctccaagttatctgtgggattttgagtaccagcagtacctaaatgataagaaaaattagaacaattttcctgaattttttaaatagccttgcaccagccacatttcattgtccagtagcacagggaatcaaatgagaacaatataagccactcaaagctagattctgaagaaccttgagagggtggatctccctcaagcactttccataccaccctccctcaacttcaatgagagcactcgtgaagcctacagaccc

SEQ ID NO: 5657 - DNA, 585 bp, Homo sapiens
  MAP TO AL109839.11; EXPRESSED IN HEART, SIGNAL =  14; EXPRESSED IN ADULT LIVER, SIGNAL =  17; EXPRESSED IN FETAL LIVER, SIGNAL =  14; EXPRESSED IN LUNG, SIGNAL =  21; EXPRESSED IN HELA, SIGNAL =  13; EXPRESSED IN BRAIN, SIGNAL =  18; EXPRESSED IN BONE MARROW, SIGNAL =  17; EXPRESSED IN PLACENTA, SIGNAL =  22; SWISSPROT HIT: Q13043, EVALUE 2.00e-29; EST_HUMAN HIT: BF758985.1, EVALUE 0.00e+00; NT HIT: gi13653714, EVALUE 1.00e-104
gaaaatggctgctctggttcaaaagcaaaattctttctcactgttgatgctttcttgactttgactccacaggccagctttccccctcaccaaacctcctgtccccatcgcaaacttccaagttttctactcctttggttgtgacaaaagaaagaacccaaggctaagcctgcatgaaccatgagaatctgtcttctctgaaatatgtatgcttggtctaagaagtcagtgaatttactcagagccttacttttcatagttccttcctcttcctcatcctctgcattgatcaccatggtgcccagttgtgatggcaacgtgtcatcgtgctcaatcatagtattggctccatcagtcatggtgctggctactcggacagtgcccatctcatcacccactgctcgaaccatcgtgccagaatccatttcatcctcttcctgtaaaaggatacaatctcaaattggggctaatttgacaaaagactttgagttttctgaataactactacctgtcttagtgaaaatatttcgagatttaacacttattcaggtcctaaactcaccttccagaaatgaaagcgctgtt

SEQ ID NO: 5658 - DNA, 501 bp, Homo sapiens
  MAP TO AC012313.5; EXPRESSED IN FETAL LIVER, SIGNAL = 1.3; EXPRESSED IN HELA, SIGNAL = 1.2; EXPRESSED IN BONE MARROW, SIGNAL = 0.88; EXPRESSED IN BRAIN, SIGNAL = 1.5; EXPRESSED IN LUNG, SIGNAL = 0.94; EXPRESSED IN PLACENTA, SIGNAL = 1.3; EXPRESSED IN ADULT LIVER, SIGNAL = 1.3; NT HIT: gi14755555, EVALUE 3.00e-39; EST_HUMAN HIT: BI520241.1, EVALUE 2.00e-65; SWISSPROT HIT: P21506, EVALUE 3.00e-09
cccaacagagagcaggagtcagggcttcatggaaatagacagtaatctgtgcaactgggagaatctaaagatagcacagggcaaggggctcataggaatagctcatgtgtccccagagcagcaactgtgcccagagcaccaaagcaacgggactgagcccaggcatgagagaggccacagctggacagggcggcaaggagtggctgacccaaccaaactttgtgtctacaggaccagacccttgttccacgtggccctggccagatttgatcctgctcatcaaccaggagggaagtgaagaggcagtcctgattgtcaccaagtgcacttttcatggagcacccagggccttaccaagtgaggtcacaagtgtgaagttttccagcatcacgtggcggtacagggccctctgcgctgtgtccaggagcccccactcctcctgggagaagtacacggccacatcctcgaaggtcatcaggtcctaaaacagcagggaggtgg

SEQ ID NO: 5659 - DNA, 576 bp, Homo sapiens
  MAP TO AC016613.5; EXPRESSED IN PLACENTA, SIGNAL = 1.6; EXPRESSED IN ADULT LIVER, SIGNAL = 1.5; EXPRESSED IN BRAIN, SIGNAL = 1.5; EXPRESSED IN FETAL LIVER, SIGNAL = 0.84; EXPRESSED IN LUNG, SIGNAL = 1.5; EXPRESSED IN HELA, SIGNAL =   1; NT HIT: AJ277892.1, EVALUE 4.00e-11; EST_HUMAN HIT: BF794461.1, EVALUE 2.00e-16; SWISSPROT HIT: Q9Y5R2, EVALUE 7.30e+00
tgatggatgtgttcactggcttgatttaattattccacattgtattcataaatcataacattattttatacccacaaatttacacaattataaactgtttcatttataatacaaaaaaatcctgaaggtgaggaaaatataatcagaagacagaaaaagatctgacaggcggtgcgcatttttcacccaaggatactgaaactgagggaggcccactgacttgctcctagtcactatggcaggaccagacctgggtgctcatcatctttccatagaatcacactactctttgtttgaaggatggcaaattggcaatgaatttgcagacggagaccaggaggacccatgagagagcacaggacatccatctggacattttcttggtatgtgaactgatggatgctggtccacaccagctgtgaaaggaaagagaagaaagagggtctccattaatatcatcagaactttagaggaatccttcctggatagttagaggagatggaattaggactggtcctggatacctttgcgatctgggtaaaacttgcctttcctgctttcaggactatgcgctcc

SEQ ID NO: 5660 - DNA, 540 bp, Homo sapiens
  MAP TO AL109940.18; EXPRESSED IN FETAL LIVER, SIGNAL = 2.3; EXPRESSED IN BRAIN, SIGNAL = 4.4; EXPRESSED IN PLACENTA, SIGNAL = 2.9; EXPRESSED IN HEART, SIGNAL =   3; EXPRESSED IN ADULT LIVER, SIGNAL = 2.3; NT HIT: AF214568.1, EVALUE 5.10e-01; EST_HUMAN HIT: BG949013.1, EVALUE 5.00e-85; SWISSPROT HIT: Q06093, EVALUE 3.00e+00
atgacatccgaagagggttgagcaagagaaggggagactgaagtaggaggagagggaactctgaatgctggaggtgttttgtacttggtgttggcgggtctcctgttgactcgggtggaaggacagcattcacgcgtggaacctgacggggtccctcacggaggtgttctagggtctccgcgtggtcatgccccgtgttcttgcactcattttctccaacaccttctctcggccctgctacttgccccggtgattctgtagggaccccgggtggctacgcgaatgtggctctgaagacaacactcttcactgagctgcagctctggccagacactgctggactccaaggccatgtgggtgcacaagcttctctaccccccgaggaggtaccgtccatgggctcaggagcactgggcttagagtccatgcccatgcattccgtgtctacaagggtactgcttcacagtggccgccgaggacgcacacgagtgcttcacactcatccaggggcatctcgattctcactgggaccctggataa

SEQ ID NO: 5661 - DNA, 554 bp, Homo sapiens
  MAP TO AC012319.5; EXPRESSED IN FETAL LIVER, SIGNAL = 2.4; EXPRESSED IN BRAIN, SIGNAL = 2.7; EXPRESSED IN BONE MARROW, SIGNAL = 1.9; EXPRESSED IN LUNG, SIGNAL = 2.1; EXPRESSED IN PLACENTA, SIGNAL = 2.6; EXPRESSED IN ADULT LIVER, SIGNAL = 2.1; EXPRESSED IN HEART, SIGNAL = 2.5; SWISSPROT HIT: Q25113, EVALUE 9.00e+00; NT HIT: AY028079.1, EVALUE 2.00e-03
accatcctcatcaggtccagccccttgaggtgttcactgctatagtcattgggtccagcccaggtgttcatagccgtcctaatgtggacaggcccaggtgttcacagctgttctcatctgggacagccaggtattcactcctattcacattgggtcaacctcacgtgtttacagctgtcctctttggacccaggaaattgttcattgccattctcattggagcttcccagatattcaaagccattctcatcaaggcatatctggtttttaaagctgtctgcattggccctgacaaagtattcacagcttttaaaatattggccagtgcaggtgttcacagctgtcctcattagagccagcacaggttcttacagccatcctcatccgagccagcccaggaattttcagtccttcacatggggacccagtccagtgtttaatagttgtcctcactgggctgagcccagatgttcacagccatccaaatactcattagggcaagtccagatgttcagggccatcctattcggccctgccctggtgttcagagacat

SEQ ID NO: 5662 - DNA, 565 bp, Homo sapiens
  MAP TO AC016627.5; EXPRESSED IN PLACENTA, SIGNAL = 3.1; EXPRESSED IN ADULT LIVER, SIGNAL = 2.3; EXPRESSED IN HEART, SIGNAL = 2.5; EXPRESSED IN BRAIN, SIGNAL = 4.4; EXPRESSED IN FETAL LIVER, SIGNAL = 3.5; EXPRESSED IN BONE MARROW, SIGNAL =   2; EXPRESSED IN LUNG, SIGNAL = 2.1; SWISSPROT HIT: P48634, EVALUE 1.10e+00; EST_HUMAN HIT: BE183274.1, EVALUE 4.00e-58
cttcctcccactccttcctcagcaccttggcagctatgggaagctggaggaggaggaaaaagggaagacgccatgctccattagctctgggttcacactctcacagctctgatggacacaacttagtcattcattctctcaataaatatataagatggggatgcctgatatgcaccaagcacaaagagctgggaacactactggaaagagaatgagcaagtccctgctctcgccagggcgacattctaatggggaagacaacaggcaatgaacagatatgcaaggccgggtgctgctgggaaaggaacacagacggatgggaaggaaaaggctcctcaaggaaatgaccgagggcaaagggagagctaccctgtcccctcccctactaaggggcaaagttctgaggaatggctgaaggcctgaaggagggcccccagatcaagaacaggatgctctctgacaaggccatcacccctggggagaatgaggtggaggaagccctcttgctgtggggtggcagtaaggagggcagaaccctgctgtaggaaggagtgggggaagagac

SEQ ID NO: 5663 - DNA, 542 bp, Homo sapiens
  MAP TO AC012384.16; EXPRESSED IN BRAIN, SIGNAL = 1.1; EXPRESSED IN FETAL LIVER, SIGNAL = 1.4; EXPRESSED IN BONE MARROW, SIGNAL = 0.96; EXPRESSED IN PLACENTA, SIGNAL = 1.3; EXPRESSED IN LUNG, SIGNAL = 0.95; EXPRESSED IN ADULT LIVER, SIGNAL = 1.2; EXPRESSED IN HEART, SIGNAL =   1; EST_HUMAN HIT: W95843.1, EVALUE 3.00e+00; SWISSPROT HIT: Q9WTI7, EVALUE 3.00e-11; NT HIT: M60562.1, EVALUE 1.30e-01
tccagcacaccatttctgagatgctacagatgatctcacattgtctaggtcccagtagctcctctggcaggtcatgcgtacatgggaacagtgaaagaatccaggcacacggacgttaggtgccccctctggttccctctttgttttgctagcaaggaggcccatctgctaaatcagtttagtgcggaagtttcctttataacttcatttcctcccaccggcagcaccatagctcttctaaagaattaagagctgcatttacatcgagtagatgaagcataaatctcgcaaatctccataaatccctaggaatcgagtctccaggctctagatggatacggatcaatgcacaaaaccctttgatgtcaagggaagagaccatttggtggtcttctggtcacttacttgcctaacttgtattcctcgggtttgtagccgatgtacttgatcagccgttccacgccctctgctggaggcccgtgccagtgcggccaggtgtctgggcataaggacttgtacctaggagaggagatggacatgga

SEQ ID NO: 5664 - DNA, 593 bp, Homo sapiens
  MAP TO AC004826.3; EXPRESSED IN BRAIN, SIGNAL =   4; EXPRESSED IN LUNG, SIGNAL = 2.6; EXPRESSED IN ADULT LIVER, SIGNAL = 3.6; EXPRESSED IN PLACENTA, SIGNAL = 3.4; NT HIT: gi14781173, EVALUE 4.00e-45; EST_HUMAN HIT: BI222954.1, EVALUE 6.00e-45; SWISSPROT HIT: O95235, EVALUE 2.00e-10
gcagatgaggaaactgaggccaagaatttcaagaactcataattcaaggtctcatagttactaagtcatggaattgggactcaaattcaagtgtttgcctctgctttgctttaatatcacatactaattttcataccagtcaataaattcgaactcagatcatcggtgtggcaagccacatttgcaggataatgacgagacagggaagggtgacaaagtagtaaaaatgtccatgtgggttggaatgattgtggaaccaaagagtagctgcacagagacatttgaggtgaaatggggtagtgttatcatagttcctagaaactactgtttgcccatttgctcagaggtaactgctgaaattaatctgtggttctgggctgggattctgccacaggttccatctgaggacagtatggagaaggtgaaagtatacttgagggttaggcccttgttaccttcagagttggaacgacaggaagatcaggtaagtgtctgagaagggaggattcaaggtgaaatgatgcagtacaaaagattcccaggaatgccttctgtgacaactgtattttctcccttctcagggttgtgtccgt

SEQ ID NO: 5665 - DNA, 542 bp, Homo sapiens
  MAP TO AC006997.3; EXPRESSED IN PLACENTA, SIGNAL = 3.7; EXPRESSED IN ADULT LIVER, SIGNAL =   3; EXPRESSED IN FETAL LIVER, SIGNAL =   2; EXPRESSED IN BRAIN, SIGNAL = 4.4; NT HIT: AL163282.2, EVALUE 3.00e-79; EST_HUMAN HIT: BE420422.1, EVALUE 1.00e-123
ctctaaagccacagcccaagctgtaccttggccccttttagtcatggctggagcagctgggatgcagggcaccaagtccctagacagcacacagcacagtgactctaggcctagcccacaaaaccattttttcctcctaggctgctgggcctgtgatgggacaggctgctgtgaagacttctgacatgccctgaagacattttccctattttcttggggcttaacatttggctcctcactacttacgcaaatttctgcagcaggcttgaatttctcctcagaaaatgggattttcttttctactgcactgtcaggctgcagattttccaaacttttatgctctgctccccttacaaaactgaatgcctttaacagcacccaaatcatctcttgaatgctttgctgcttaaaaatttcttcctccagataccttaaatcatctctctcaagttcagagttccacaaatctctagggcagggcaaaatgccaccagtctctttgctaaaacataacaagagtcacttctgctccagttcccaac

SEQ ID NO: 5666 - DNA, 594 bp, Homo sapiens
  MAP TO AL049175.11; EXPRESSED IN ADULT LIVER, SIGNAL = 1.1; EXPRESSED IN LUNG, SIGNAL = 1.5; EXPRESSED IN FETAL LIVER, SIGNAL = 0.88; EXPRESSED IN BONE MARROW, SIGNAL = 1.4; EXPRESSED IN PLACENTA, SIGNAL =   1; SWISSPROT HIT: Q10655, EVALUE 2.60e+00; NT HIT: AF210357.1, EVALUE 5.70e-01
tggctgcaattttctcaatgtcctagactacagtagtttgttgctgtggttatgtagttttgttgttagtgggggcactggactgattgtcagtcacgtgtgattgtggcatgccagtgggttgtgtataggtctgtcctgaatggtaaggtcactgttgagctggctgttgggctgggggcatgtatacatgaattgggtagctgagaaagatttctatcttgttgggtaggacaacttccagatcttctttaaagctggggctgggaatgttcaggcacagaggctgtgtgggacactgtggtggtctggggttgtctctggttggatataaaaacaggagtaggtgcacactgactcaatggatgaaaaaggcctttctgctgttcaggtctgcctgtttctctggatgatcaggttccttgtgagtttgggcattgacattccagtcattcatttgggcctgggctttaggcagctggactattggtgctgtaatcacctatgtaaatgtagtgaaatgaaagtggtgctttacacagagtggtttggtggctactgcccccctctgcccccccacaggtagaatgcact

SEQ ID NO: 5667 - DNA, 508 bp, Homo sapiens
  MAP TO AC000028.1; EXPRESSED IN BONE MARROW, SIGNAL = 1.9; EXPRESSED IN ADULT LIVER, SIGNAL = 1.6; EXPRESSED IN HEART, SIGNAL = 1.5; EXPRESSED IN BRAIN, SIGNAL = 1.9; SWISSPROT HIT: P39801, EVALUE 4.10e-01; NT HIT: U01160.1, EVALUE 6.00e-90; EST_HUMAN HIT: AW005868.1, EVALUE 2.00e-90
cctgagggttcatcttttgcattcatactaccatccctgccaccccctccccgccatcctagccattctaacctttgggagtgcctagggatgctcccggtgcggatagcaccatccccagctcccattcacacactattccattattccttccccctgccccgctcccaagtcctcttgtatggccttgggctgtgccgcatgctagaattgttgagatgtatcctgctctttcttcgtagctggtgagcttgttgctcattggagtggctgcttggggcaagggcctgggtctggtgtccagcatccacatcatcggcggagtcattgctgtgggagtcttccttctccttattgcagtggctggactggtgggtgctgtcaaccaccaccaagtcctgctgttctttgtatcctgacctgaagtgatgggggcaaccgggggcttgggagggctgtcatctaaggaagatgttagaagggtaggggacctcagggatcttggaca

SEQ ID NO: 5668 - DNA, 505 bp, Homo sapiens
  MAP TO AC018846.2; EXPRESSED IN ADULT LIVER, SIGNAL = 1.1; EXPRESSED IN HEART, SIGNAL = 1.6; EXPRESSED IN LUNG, SIGNAL = 0.86; EXPRESSED IN BRAIN, SIGNAL = 1.2; EXPRESSED IN FETAL LIVER, SIGNAL = 1.8; NT HIT: AF198490.1, EVALUE 8.00e-06; EST_HUMAN HIT: N33785.1, EVALUE 3.00e-09
tgcaccatgagatcgctaagagacggggagctcacaggtgagacccattgcttagatatctatctatgggaaatttctcatcatatagggataatgtctgagcaggacactgctgtattctgagctgagaacgtggagatcagagatggggcagctgagtctgagaggtgtatgttacagactgaacatttgtgtcctcccgtattagtctgtttctgctactataacataaataccttagactcgctggtttataaacaacaggaatttatttctcatatttctggagtttgggaagttgaagatcaaggcaccgaaaagtttggtgttggcgagggcctgttcctcattgatgacacgttctatgtgggcttacacagcagaagggtcaatgaagctcccttcaacctcttttataagggcacttaatcacttcccacaaggtttcttctcttaatcttagcactttgagcattgtattccaacatttgaattttgggggaca

SEQ ID NO: 5669 - DNA, 546 bp, Homo sapiens
  MAP TO AC004181.1; EXPRESSED IN BONE MARROW, SIGNAL = 1.9; EXPRESSED IN ADULT LIVER, SIGNAL = 1.6; EXPRESSED IN HEART, SIGNAL = 3.3; EXPRESSED IN FETAL LIVER, SIGNAL = 2.8; EST_HUMAN HIT: AL596519.1, EVALUE 0.00e+00; SWISSPROT HIT: P23246, EVALUE 2.00e-01; NT HIT: AF029062.1, EVALUE 0.00e+00
ggcatgtccaaaagaagagcatcagcacaaatgaatcctccccttccccacctccaggggtgggggcctttggcacctcaatccccgataccctactccttcccacccacatctccttgcacccatctggaacctcggttgatgtgagccggcaacagagaagcaccgtggcgcggcgagggaatgcagacggcacccagcggtggatggcggcagcggaggccgcggggaaacctgaccaggaagctgaggaccaaaccagcctctttttccgttcccggtttttttcctgaacccaacgcgtgccgtgccccgtttcccccaatatgtgttggggaggggtgtcctgaatggggtggtagattttttttcttaaaaaaatttttttgttttttttaatactcagaggagagggacataggaaaggtaaagtggatgtaatcgggtggttgttagggtttggggctaggtggggccaattgcataagcagtggagtgtgttcttcccctccctgcagtgttcttcccgtgggatgatcactcttt

SEQ ID NO: 5670 - DNA, 537 bp, Homo sapiens
  MAP TO AL049753.1; EXPRESSED IN ADULT LIVER, SIGNAL = 5.1; EXPRESSED IN BRAIN, SIGNAL = 2.1; EXPRESSED IN FETAL LIVER, SIGNAL = 6.6; EXPRESSED IN PLACENTA, SIGNAL = 2.6; NT HIT: Y15421.1, EVALUE 5.10e-01; EST_HUMAN HIT: AA134738.1, EVALUE 7.50e-01; SWISSPROT HIT: Q12558, EVALUE 1.70e+00
gacctcacgtgtcagaatgcaaaaacagctacatcagtgagctatgagcagttgctgacaggtgttagaaagaaacagtggcgattttcttgagtttaaatagaatatttttggaaaatgacactgcagcaatgtaacaggcatgctgaggcatctttgtaactcatgctatttccatacattttgatctttaatggcaataaagtacaaaattttacaaagttataaaatcttagggttacagggcaggttttaaaaaaatattgtccatgtcccttaatatttagtgataaaaaatttagagacactggttctgaagcgaatgagctctaggtataaagtcgacttgcccaaacgctgagcaagcattagcggagagtcatgggcattttccagaagcttctgcttgttctcctgagaatcaaccactttgcctgcatgaagattgtcctcaagggttatcagagccgttttcttccagctttcctgaaagccaaaaatatttcttcaactactccttctccagtccgctttttg

SEQ ID NO: 5671 - DNA, 570 bp, Homo sapiens
  MAP TO AC007162.1; EXPRESSED IN HEART, SIGNAL = 1.8; EXPRESSED IN ADULT LIVER, SIGNAL = 1.2; EXPRESSED IN FETAL LIVER, SIGNAL = 0.83; EXPRESSED IN BRAIN, SIGNAL = 2.1; NT HIT: gi14776777, EVALUE 1.00e-107; EST_HUMAN HIT: BE251915.1, EVALUE 1.00e-107; SWISSPROT HIT: Q99758, EVALUE 1.00e-32
tcagcatctggtgcagagtctgcccgtgagccacactgagcatgggtatcaggaacagcctgatcggagagccaatgccttcctgtctgcacaagcctttggcaccccaagccctatctgaggtcccgccctctccacagcatggaggagtgtgaggccctgtgcacccggctggccatcatggtgcaggggcagttcaagtgcctgggcagcccccagcacctcaagagcaagttcggcagcggctactccctgcgggccaaggtgcagagtgaagggcaacaggaggcgctggaggagttcaaggccttcgtggacctgacctttccaggtgtgtgccggccccggcagcccccactgggtgggccctgggcccctacctaggcctctcccatctgctgtgcggagcgtctgtgcctcgccccgccaagtcccatctccccaatccctgggacgaggactccagtgctgagcacccaggcaccctccccgatcctccagcccggcgctcacagcaacaccgtctctcctttgtgcaggcagcgtcctggaagatgagcaccaaggcat

SEQ ID NO: 5672 - DNA, 599 bp, Homo sapiens
  MAP TO AL109753.9; EXPRESSED IN HEART, SIGNAL = 1.1; EXPRESSED IN ADULT LIVER, SIGNAL = 0.73; EXPRESSED IN BONE MARROW, SIGNAL = 0.94; NT HIT: U97088.1, EVALUE 0.00e+00; EST_HUMAN HIT: AV752564.1, EVALUE 1.00e-125; SWISSPROT HIT: P46100, EVALUE 1.00e-28
aattctgaacagctggcgacattaagggtgattttattctattgaaatactaagaattttctaaaaggcaaaaacctgaaggataaccacaacaaagaccagatacttagtagctgtgcaattactatttgttaaaatataaacacattttttattcaacttgcttctttatgtcactgtctattaataccttacctggatcaaccaaagctttgttaaatatttctttaagtttccgactcttcacattccttccttgagcaagatttctatacatctcatagcctatgatcataacaccaccatcttcttgccacctctgcagcatgtagcttctctcctgaggacgtttcacagttgctaattcagaaaccttttgtggggaaataaagatttttttaagtagctactaaaaacatgtgaatattaaatattcccactgaaatatgcatcactggttaaaaaacattaaaaattaaaaaaaattaaaaatagtttactatatgaatttcatgtgactattttaataatagaaaacatttaaaataagttacctcaagcttctcatcatcttttaatccctcttgccacttctcaaa

SEQ ID NO: 5673 - DNA, 502 bp, Homo sapiens
  MAP TO AL035658.7; EXPRESSED IN BONE MARROW, SIGNAL = 4.1; EXPRESSED IN PLACENTA, SIGNAL =   4; EXPRESSED IN ADULT LIVER, SIGNAL = 4.5; EXPRESSED IN FETAL LIVER, SIGNAL = 4.2; EXPRESSED IN BRAIN, SIGNAL = 4.3; EST_HUMAN HIT: AA889875.1, EVALUE 2.00e-38
ctagggtggccgagtgagaccctcctgggctgttacagcacatcaatctatgaaatgggtccagtgtgctagcagtgccccaggtgctgtcattcacttcgcttactgactcctcaataacagccccactcaacaaatgaaaaacaagctcaggtgaaataaggtcctcaagatcacatagccagtaaaaggcttaccaggacaatggcctgttggactccaaagccattcctttccatgtcctttatctcctttacagcagagaagccccactggtggctgcaaattaaccagcagatgtgtcatagggacactcaagcagactcaaaatacagactaaacactgaaaagtggaggggaaggggacaactaaggaagcataaaaataatctccctaggcttctcattttacaaccaaggaaacatctccagacagtattatgttcatgatgaggtcatcctacttaaagacagaggacaaaggctggcatcaaaaagaaaa

SEQ ID NO: 5674 - DNA, 536 bp, Homo sapiens
  MAP TO AC005781.1; EXPRESSED IN ADULT LIVER, SIGNAL = 6.1; EXPRESSED IN FETAL LIVER, SIGNAL =  11; NT HIT: M21493.1, EVALUE 1.00e-115; EST_HUMAN HIT: AA112810.1, EVALUE 1.00e-104; SWISSPROT HIT: P06732, EVALUE 1.00e-33
aaatgcaagctcacagagggtcagcccttgccggatccccagaactcgcagggatgtcgcacctctccttgcatccctgcaaagggccctcgctccccctccgtcgtggtgcaaaggatgtgggagccgtacctgtacccctcttctgcagacgcaggcgggtgaggatctcctcgaacttggggtgcttgctcaggtgcgccagcttcacatgcacgcctccacgcagcccagtgcccaggttggatgggcaggtgagcacgtagcccaggtgctggttccacatgaaggggtggccagctttcttaaagatctcctcaatctgaggttcagagagaggaccaggggtcagcgccggcaggcacccccaaatgcacccgcaacatggacagggtccggagggacagggcgtgggaacgtggtggaggtgggattctgaggggaacagggaggtaggagattccgagggtgctggctagacaatggggaccaaggcaggattttgaggggcggggactaagaacgctttgaaggcg

SEQ ID NO: 5675 - DNA, 593 bp, Homo sapiens
  MAP TO AC005321.1; EXPRESSED IN ADULT LIVER, SIGNAL = 0.44; EXPRESSED IN HELA, SIGNAL = 0.56; SWISSPROT HIT: P06924, EVALUE 4.50e-02
acatgctcccagcttctgaggaggatcccgagtgggggagaaaatgcttctggggcaccacagagcccttccttgttggggggctgacgagatcccgcaaagcctcccacttcgatctgcctctaatgtctggcgatggggggtgggacagcagggccctgtggcccgcccgcgagcagacaaacctgaggctgaagagaatgtgagtggagaccacacaccaccctaagagtgggggtccccacagcacctaaagtggcaggacgtgccctcgggtagaggcacagtgaggctgtgcgggcaacacaggcaacctcctccgccagaaccggggacgcctcgcaacctcctccaccagcacgggggacaacctcctccgccagaaccggggacaactggcaacctcctccaccagaagcggggacaacctcctccaccagaaccagggacaagctcctcccccagaaccaggggcgcctcgcaacctcctccaccagaaccgaggacgcctggcaacctcctccaccagaaccgaggacgcctggcaacctcctccaccagaaccggggatgcctggcaacctcctctaccag

SEQ ID NO: 5676 - DNA, 528 bp, Homo sapiens
  MAP TO AC005081.2; EXPRESSED IN PLACENTA, SIGNAL = 0.8; EXPRESSED IN ADULT LIVER, SIGNAL = 0.92; EXPRESSED IN BRAIN, SIGNAL = 1.1; EXPRESSED IN HELA, SIGNAL = 0.64; SWISSPROT HIT: O88573, EVALUE 1.30e-02; NT HIT: AF289667.1, EVALUE 4.00e-11; EST_HUMAN HIT: BF512792.1, EVALUE 3.00e-03
aggaccgagtctacatcccccagcccaccccgaccagggaggggtccgtctgaaactcacctctctcctgtggccaccccaggcccagcctctgcagcatccagccctaaagaagggttcctccctccagcagcccacaccgtcctgaatcccaggctctgctgggcattcttcctgaaccaaatggaactccaaaccccacttctgtgccccctcctcccaaaccaggagaacagagtctctgctcagcagaggcggccggggaacccagggcaagagcggcccggatggcttaccctggaaagaacagagccagctccccatggagaagcccgtggccaggccaccaggcaggcagacaggtgctggcagccggacccccgccccgtcagatcgatcctggaccacgtcagggacattaggaggcagccctgcccccacccccaccagccacagaagagcgggcttggcttccccgtcctgatgccattaaaaagtttaggatgtggtcagtggagagccgagaag

SEQ ID NO: 5677 - DNA, 593 bp, Homo sapiens
  MAP TO AC022336.12; EXPRESSED IN FETAL LIVER, SIGNAL = 0.71; EXPRESSED IN BRAIN, SIGNAL = 1.2; EXPRESSED IN BONE MARROW, SIGNAL = 1.3; EXPRESSED IN PLACENTA, SIGNAL = 0.75; EXPRESSED IN ADULT LIVER, SIGNAL =   1; EST_HUMAN HIT: BE739153.1, EVALUE 3.00e-93; SWISSPROT HIT: O75962, EVALUE 5.00e-05; NT HIT: gi5902139, EVALUE 3.00e-98
ttggcaaactctcccttttgtttttccagaggccgtttctctatagtaaagaaatgcattcacaaagctacccgcaaagatgtggctgtgaaatttgttagcaaaaaaatgaagaagaaagaacaggctgcccacgaggctgccctgcttcagcacctacagcacccccagtacatcactctccatgacacctatgagtcccccacatcctacatcctgatcttggaactgtaagtacagacgccatctctctaaagtcgcctgcatccatttaggttagcttttgcccacaattaatggaaaagacagttacattttatacaaggtcctatcatttgcaaagtgctgcatataacatgcactctctcccccattttataatcaatgtcatttccatttcaaagattaaaaaatcataataggaataagggaagtccttaaaactagctccttaagactaggaatggagaagctgggacttgaacccatatctctctcacttccatgcttattttctttctattatggactcttgggctgggcaggagtttgggaagagcttgtcgacagtaggctgattgacagggtggagt

SEQ ID NO: 5678 - DNA, 600 bp, Homo sapiens
  MAP TO AL109835.13; EXPRESSED IN PLACENTA, SIGNAL = 3.9; EXPRESSED IN HEART, SIGNAL = 3.5; EXPRESSED IN ADULT LIVER, SIGNAL = 3.5; EXPRESSED IN BRAIN, SIGNAL = 2.6; EXPRESSED IN FETAL LIVER, SIGNAL = 5.1; EXPRESSED IN BONE MARROW, SIGNAL = 3.3; EST_HUMAN HIT: AI190698.1, EVALUE 1.40e-02; SWISSPROT HIT: P24499, EVALUE 4.50e+00
caaaaatttgggcagtttggatcttggctctttttctgaagaatattgtgactatgagtgatggctctgcacctgctgagattaaaaagagtaaatgggcacctcctttccttctcatgaggatgtacagaagagcagtggttgaacagaggcatctcatttttatgcttctaggggcttctgcttgtcctacctctggcccacatggtgctcccaatcaaggtaatatgaaaaacaaatgtttaaaaaattgtttaacactttaggacaacttttttttattacaagagagaatgggattttatagacgtattttgtttagtttcattctttctgttgcttcttttaattttttctataaaaagcagattttaggaactaaacaagggtcagatgtatctttaatttttttagagcatcattctcatgttttattgccctctttttcatttctttaaattctaccttcttgcttgtattgttttgttattttatgtttctttgcacttagatatcagaggcacctaagtaaagattgttttttctagaacttgttcatatgaaatagttgtaatattagcacaggccctttattctttt

SEQ ID NO: 5679 - DNA, 552 bp, Homo sapiens
  MAP TO AC005785.1; EXPRESSED IN LUNG, SIGNAL = 3.4; EXPRESSED IN FETAL LIVER, SIGNAL = 1.7; EXPRESSED IN ADULT LIVER, SIGNAL = 1.4; NT HIT: gi14761769, EVALUE 0.00e+00; EST_HUMAN HIT: BI223474.1, EVALUE 0.00e+00; SWISSPROT HIT: O43823, EVALUE 5.00e-70
gaaagaccaacgcatccatcatcccaacgccttccctggaacagggaaatgagcatcattctgtgggaacagcgtctttagactctgcatcagtttgttccacttcagcatccgcggcagctggggcaggagcaactctggtttgggcactttctgcctctgctgccattgtctcggcgccatttccagcctctgcagcctcacttctggccttggggacgcccttctcatgtgccgttccacagggcacctgctcttccagcagctgttcggcttgaggatcactaccggcctccgctgtgtccgtggggccttcgtcctcagccggctccccgctgctctctggagcgggcgctccttccccatctacggccctcactgctgctgtaatcacctctgctaagacgtccgcggccacctcctcaggtgtctctttcttatcctcacctcctaaattgtcatctccttccatttctggatcaacagtttcactggtgaaagggtcctcaccctggccaaagaggaaacaccggtcagcgtggtgtaagcaga

SEQ ID NO: 5680 - DNA, 500 bp, Homo sapiens
  MAP TO AL023880.1; EXPRESSED IN BONE MARROW, SIGNAL =   2; EXPRESSED IN ADULT LIVER, SIGNAL = 1.9; EXPRESSED IN PLACENTA, SIGNAL = 2.3; EXPRESSED IN BRAIN, SIGNAL = 1.8; SWISSPROT HIT: P16861, EVALUE 7.90e+00; NT HIT: gi15791399, EVALUE 7.40e+00; EST_HUMAN HIT: BI561156.1, EVALUE 3.00e-68
acacagatcaccagggaagggagcaagggggcaacctgttaccacttcagtttgaaattcatagaagcatgttatagaatatacatctgaaagaacattttgtactatgtatttgagtatttttattatcataatcaatagttatttgattaaacaaataatcatttgtttataattgaaatgaaacttttcatgtaacacttatcaaaaggcagagaagcgattgaaactcttcatttgaaaaatgaaagcattggttttcccttagatattggatcagaaaggtacactttcagcttcaccattcgggattcaccagcacattttgtaaatgcagcttcctggggcaatgaagattacatcaagtctctttctgacagctttagggttggtgactgtggtaagttggcattgattcttaaactttttccatcatagtgttattcctgtggtatgtttatggtaactatactgaaggagttgaaatgagacacagttcg

SEQ ID NO: 5681 - DNA, 562 bp, Homo sapiens
  MAP TO AC020663.1; EXPRESSED IN ADULT LIVER, SIGNAL = 1.6; EXPRESSED IN FETAL LIVER, SIGNAL = 1.3; EXPRESSED IN HELA, SIGNAL = 1.7; EXPRESSED IN BRAIN, SIGNAL = 1.4; SWISSPROT HIT: O95416, EVALUE 6.20e-01; NT HIT: AF108454.1, EVALUE 0.00e+00; EST_HUMAN HIT: AI141460.1, EVALUE 0.00e+00
cacccgctaagacttgttggtagccatgtcggagccccacagggtccagttcacctctctcccaggttccctgaatcctgcgtttttgaagaagtcccggaaggaggaggctggggcaggagaacagcatcaggactgtgagccggctgcagcagctgttcggattacactcaccctctttgaaccagatcacaaacgctgcccagagttcttctacccagagctggtgaagaatatccgagggaaggtaaaaggccttcagcctggagataaggtacacccctttgttcccagaggcgctgcaggtttaacgcacaggggtcagtgcatgcatgtggggcttccgtagcggggaagcaagacttaactgaggttttggctgccccaagatcctgtcactcactcaaggcaagcacaagatttgcttctcttacctctgtgcgcaaagggagaggccaatttgaattatgactaattaacataaattttaaaaacaatacatttttctctgccaaggttataaacgttatgtgtaaatgaaaccagtccctgacagttccag

SEQ ID NO: 5682 - DNA, 584 bp, Homo sapiens
  MAP TO AC020893.4; EXPRESSED IN ADULT LIVER, SIGNAL = 0.88; EXPRESSED IN LUNG, SIGNAL = 1.1; EXPRESSED IN HELA, SIGNAL = 1.1; EXPRESSED IN BRAIN, SIGNAL = 0.91; EXPRESSED IN PLACENTA, SIGNAL = 1.3; SWISSPROT HIT: P54497, EVALUE 3.80e-01; NT HIT: gi16159662, EVALUE 1.00e-82; EST_HUMAN HIT: BE817819.1, EVALUE 1.00e-128
gaacatttgcaccagtatgggatgtattcaaaacatctacagagaaattagcaaattgtcacttggatcttgttagaaaattacaagaattaataaaggaagttcagaagtatggagaagaacaagtaaagtctcataaaaaggtatcagtttttttcttgttaaataattgattggtcagatattgaatactttatagttcagtcattttgatggatcatttcatactaaacagactaaagaagaagttgcaggaactctggaagctgtccaaaccattcagagcataactcaggccctccagaaatccaaggaaaattacaatgccaagtgtgtagaacaggagcgtttgaaaaaggaaggagctacacaaagagaaatagaaaaggtaatcataataaaaattacatatctgtggtttcaaagcaccttgacatacaaaattgcatttaacatttagatcaaactgaaaattatctcattttaaagatgaagacactgtgccttacagtcctagtgattacccaagtaaaacacaggagatttgtaaagtatgttatctgtggtaaataggttagcgagca

SEQ ID NO: 5683 - DNA, 545 bp, Homo sapiens
  MAP TO AC000392.1; EXPRESSED IN BRAIN, SIGNAL = 0.61; EXPRESSED IN BONE MARROW, SIGNAL = 0.59; EXPRESSED IN ADULT LIVER, SIGNAL = 0.51; EST_HUMAN HIT: AW069362.1, EVALUE 8.00e-38; SWISSPROT HIT: Q9V8M5, EVALUE 4.00e-02
gtggacttcactcctcgctccctgccttggtgcccaggcctgccacgtaattcttttccctgcctcttcgccagatgcacagagggcttccatggtgctgtgaaagagaaaaagagttactgccgttaaaagagtcaaagcagaggggctgcaagcgggtttcctgttctctaggacctgggtttattatcctcatatcctctctttccagctctgacctatgtccaaagcaaccatcgtactaatgccccgttcaccccgagggtgctgctgctcgggcctgtgggcagtgggaaaagtctgcaggccgccctcctggcccagaaatacaggcttgtcaatggtgagtgccccaggtgctgggctgcccagcttcgagagcctttccctgcctcctgcccctcctccccagctctcattttatggggggtggtgttgggggggaagggtcagtatcacttctctttctggctctttgttcttaaccattttctgttagtccatctttgcaggaattttcttcctcccgaggaatattgccataa

SEQ ID NO: 5684 - DNA, 505 bp, Homo sapiens
  MAP TO AC008536.5; EXPRESSED IN ADULT LIVER, SIGNAL =   1; EXPRESSED IN BRAIN, SIGNAL = 0.97; EXPRESSED IN BONE MARROW, SIGNAL = 0.66; EST_HUMAN HIT: AW183081.1, EVALUE 2.00e-81; SWISSPROT HIT: O51229, EVALUE 9.20e-01
ttgttaggtgccaaaccaagtttggatttgggggtcatatcatttctatgacaaggcaatttctcaatagagaaccactcaatgttctgaaacacagaagaaaataattcatttagttaatttttatcaaggagcttataaaaggatttccctacttattcatttgggatactgtccagtaacctgaaaatactcttgttacatacccgaatttctcttctagtttttgggttaaattttgtgtcttttggaattcctggaatgatgtacaaacgagcaagctggtcattgattcgaagttcaatgtaatcatccttacaaatatagtctttgatatcaaaaccagtttcttcaaagacctggaaacaacaaatttggatgaaattttcattttagttcttaggcctctagttcattaaaatttattcccaagacaaaaactcagaaaaaggggacatgacttgtatttactatttctagaaatgacaggctggtacagaaatgc

SEQ ID NO: 5685 - DNA, 564 bp, Homo sapiens
  MAP TO AC004213.1; EXPRESSED IN PLACENTA, SIGNAL = 0.49; EXPRESSED IN ADULT LIVER, SIGNAL = 0.5; EXPRESSED IN BRAIN, SIGNAL = 0.93; EXPRESSED IN LUNG, SIGNAL = 1.5; EST_HUMAN HIT: BG977301.1, EVALUE 3.10e+00; SWISSPROT HIT: P20423, EVALUE 7.00e+00; NT HIT: AF389851.1, EVALUE 5.40e-01
tcccacctctccattagacgtgtcttctccacatgcagaaaatgtggtctcgtagcttcccttctcagtgctggattgctggcatttcttttctttatcagagacatgaatatcttttttctttatggatttctaagacttcagggtttttcagggagaagttgcttaaggaggctcctgcgtggaccgagtccttcctgagggtttgctggatgcccccggacactgtgcagctgtgtcctccggggtccctaaagctggcacgttctgctgtgtacccagaggtggggacagatgctgccagctccaccttacagctgctacatgaaatttgaggtcagagaattctcttgtctttaagggcacccacatttgccttcttcgatgtttcaggaaatcataactgaatttagaaaggttcccttttcagtttactctctggaaggaaatatactgaaaattcagtttattttcaggtattgaatagaattgaaaagtcaaactgtcagtttgcttgcagtgcacacagagaaattgagtgttccaagccattgggacatttct

SEQ ID NO: 5686 - DNA, 560 bp, Homo sapiens
  MAP TO AC024077.2; EXPRESSED IN PLACENTA, SIGNAL = 1.5e+02; EXPRESSED IN ADULT LIVER, SIGNAL = 0.65; EXPRESSED IN FETAL LIVER, SIGNAL = 0.6; EXPRESSED IN LUNG, SIGNAL = 0.62; EXPRESSED IN HELA, SIGNAL = 0.58; EST_HUMAN HIT: BE930990.1, EVALUE 0.00e+00; SWISSPROT HIT: P11465, EVALUE 7.00e-45; NT HIT: U04324.1, EVALUE 0.00e+00
tgaatacttcagggttcggctcagtgaacatagagggggttttgctgggacttgaggatgtgtcttgtctcagagggtcactgtgtccctttaagagaccaggagcatccccttccctcagatggcatcacctgtggctttattctctttgctccagatggtccagacctccccagaattcacccttcatacaccaattaccgttcaggagataacctctacttgtcttgcttcgcgaactctaacccaccggcacagtattcttggacaattaatgggaagtttcagcaatcaggacaaaatctgtttatcccccaaattactacaaagcatagcgggctctatgtttgctctgttcgtaactcagccactggcgaggaaagctccacatcgttgacagtcaaagtctctggtaagtggatcccagcatccttggcagtagggttttaggtggagtctatctggctttcagagaagagtcaggaaaacatttttattcccagcctgtgtcccatgggcaaaagcaaatcccaaattctcctcctgaaccctcccaattt

SEQ ID NO: 5687 - DNA, 556 bp, Homo sapiens
  MAP TO AC020908.5; EXPRESSED IN HEART, SIGNAL = 0.98; EXPRESSED IN BRAIN, SIGNAL = 0.66; EXPRESSED IN PLACENTA, SIGNAL =   1; EXPRESSED IN BONE MARROW, SIGNAL = 0.69; EXPRESSED IN ADULT LIVER, SIGNAL = 0.99; SWISSPROT HIT: P17984, EVALUE 3.50e-01; NT HIT: gi15302735, EVALUE 1.00e-127
agattgggtatgccaccaagtgacccctggccctccaagcagctgaagagtcttgcacctcaggtgtgtgtttcagggacatccctcaaagacactccaaccctgagtgagcacgggctgtgtttttcctccctccagatcctcggctcccgggacttcgacatctgcgtgagggacatgatcccagcggacgtccctgagcacttccggggcagggtcagcatctgggccatggtgaccagtgtggacgggagccagcaggtcgcgttcgatgactccacccccgtgcagaggcagctggtggacatccggtactccaaggacacgaggaagcagttcaagccgggcctggcctacgtggggaaggtaacttgggggtgactgtgctgcctcccgcccaaggaccaccgtgaaaccaccaccactagccactagctctgcagtggtgactcagctgaaaacggatcccctgacataacctttgcggagagtggagagggctggtgttccaggtgaggggcaggggacattttcctccacgggaaaggacaatcta

SEQ ID NO: 5688 - DNA, 500 bp, Homo sapiens
  MAP TO AC004754.1; EXPRESSED IN ADULT LIVER, SIGNAL = 4.1; EXPRESSED IN HEART, SIGNAL = 2.7; EXPRESSED IN BRAIN, SIGNAL = 3.2; NT HIT: AY052369.1, EVALUE 2.00e-18; EST_HUMAN HIT: T12197.1, EVALUE 8.00e-50; SWISSPROT HIT: P39188, EVALUE 1.00e-03
acacctggcctcaagtcatcctcctgcctcagcctcccaaagcactaggattataggcgtgaaccaccctgcccggccatgaagttaaatttttggttattagcttgttgagttctgttttctgtttttttaaatagccacatggcctgactctctgtggtcaatggtatggatgctaaagtagagcaaggacagtgccctgctcaagtctctctgacctgggtccatggggattttctctgccagtcaggttcctgaagctctggctacggctcctggtatttttaatgaccgcagtagagaaaaacattggtatcttcttgctgttgatgagcaaatctttggacctgtctcatggtgtctttatttgcaaactggttgaatcatgaactgcctggctttggctgccttgccgttgtggcttttaataactacccctatttctggtggctcagtcaagtttccaaaaaggaagtcttacctggagatcctgtgaagga

SEQ ID NO: 5689 - DNA, 568 bp, Homo sapiens
  MAP TO AL035450.1; EXPRESSED IN BRAIN, SIGNAL =  10; EXPRESSED IN LUNG, SIGNAL =  18; EXPRESSED IN FETAL LIVER, SIGNAL = 9.2; EXPRESSED IN PLACENTA, SIGNAL = 8.6; EXPRESSED IN ADULT LIVER, SIGNAL =  12; EXPRESSED IN HELA, SIGNAL = 7.3; EXPRESSED IN BONE MARROW, SIGNAL =  14; EXPRESSED IN HEART, SIGNAL = 4.5; SWISSPROT HIT: P40051, EVALUE 7.00e-07; NT HIT: gi14779131, EVALUE 2.00e-99; EST_HUMAN HIT: BE788822.1, EVALUE 7.00e-97
ttgaaggattgttgcccttcctactgagcacctaggacatgattgagctcctggccatattgatagattggtacttattaaacatcaacagtgccccagcaacagcagcatcttggggtttttctaatcaaacttagtagcaaacttcttagaatatcagattatctaagttcaggttctttggttttcccgtccccaggttcaccgcacctcaggcagaactctatgaagccgttctagagatccaaagagattgtttggccctctgcttccctgggacaagcttggagaacatctacagcatgatgctgaccctgataggacagaagcttaaagacttggggatcatgaagaacattaaggaaaataatgccttcaaggtacttcacttctcttgaccccagttctcaagaacacctagcatgctgctaggtttttaccctatataaagctaattagacttagaaatgggacagatgtagtgattcatgcctgtaatcccagtagtttaggaggctgaggcaggaggattgcttgaagccagcctgggcaacatagcaagacccat

SEQ ID NO: 5690 - DNA, 504 bp, Homo sapiens
  MAP TO AC024561.4; EXPRESSED IN ADULT LIVER, SIGNAL = 0.36; NT HIT: AJ278337.1, EVALUE 1.90e+00; EST_HUMAN HIT: AI024830.1, EVALUE 9.00e-96
catgccacattttggatctgtacttacattgtcacctgtaatgtcaaagtcacggaagagatctttgagttcctgtttttgaatattgaagagaaatctgtacatttcgaagttttttgcaccaattctcagatcccctttcaggtcaagcaggtcaaagacaggccgggaatgacgatacataaactgtccttccaaatggttctattgcgagagaaataggtgagatgagcaacagtgttgtcgatgctgctttctaaacttgtttcctcaagacatatcttcaccagccccttccctagagagctaaaagcaaaagagaaaatcagaagctcagggctgaaagggttctatcagcaaatgcagcaagtcccacttcagcatctgcattcaaaaggaacttgaattctgcctcttgtaataatcaattctgctagacggaaccctagttactataatgcatttccttaccttcagtgaaagtcttgtgaaacatcatggcgt

SEQ ID NO: 5691 - DNA, 570 bp, Homo sapiens
  MAP TO AC018725.1; EXPRESSED IN FETAL LIVER, SIGNAL = 2.7; EXPRESSED IN BRAIN, SIGNAL = 1.9; EXPRESSED IN HELA, SIGNAL = 3.2; EXPRESSED IN PLACENTA, SIGNAL = 1.9; EXPRESSED IN BONE MARROW, SIGNAL = 1.8; EXPRESSED IN ADULT LIVER, SIGNAL = 1.8; EST_HUMAN HIT: AA324611.1, EVALUE 0.00e+00; SWISSPROT HIT: Q12901, EVALUE 1.00e-120; NT HIT: gi7706778, EVALUE 0.00e+00
agagccattccatggttcacacaggagaaaaaccatttaggtgtgatacatgtgataagagctttcatcagagatcagcacttaataggcattgcatggtccacacaggagagaaaccgtacagatgtgagcagtgtggaaaaggctttattggtaggctagatttttataagcatcaggtggtccacacaggagagaaaccatataattgtaaagaatgtgggaagagcttcagatggtcctcatgccttttgaaccatcagcgagtccacagtggagaaaaaagcttcaaatgtgaagaatgtgggaagggattttatacaaattcacaactgtcttcccatcagagatcccacagtggtgaaaagccatataaatgtgaggagtgtgggaagggctatgttactaagtttaatcttgacttgcaccagagggtccacacgggagagagaccttataattgtaaggaatgtgggaagaactttagccgggcctcaagtattttgaatcataagagactccactgccagaaaaaaccattcaaatgtgaggactgtggaaagaggcttg

SEQ ID NO: 5692 - DNA, 589 bp, Homo sapiens
  MAP TO AC005266.1; EXPRESSED IN LUNG, SIGNAL = 0.6; EXPRESSED IN FETAL LIVER, SIGNAL = 0.55; EXPRESSED IN BONE MARROW, SIGNAL = 0.6; EXPRESSED IN ADULT LIVER, SIGNAL = 0.84; SWISSPROT HIT: P48054, EVALUE 9.80e+00; NT HIT: AB013592.1, EVALUE 8.80e+00
atctagggctccctctctgctcctgcaaggtaggggaactcctctattgactcttgaatatctccacgttcatagggggctgttggagaccttggagaaggacaagttcagctgtcctcaggcctgagagcagaacctgctcaattgtcattcctgagcttcccccatgagctcacgctacagatgggtgcacatcagaaccgcacatcagaggcatgcaaagtcatccactgaggctagcaggggtaaacacataaaaaatgttcacagggccttcaggaaggcacggatgaaacaaatctcaaattgcaggagaactttccaaagcataaccatccaaaggatgtggtgtgtacatggccatctcagaaaatttcaacagaaaaggaggtatcatttaaattagaagggggtacccaaagaaaatgttcacagggcatgtttcattgactctgtacttggcagtggaccttagagagactctgacaataacaatgcacattgcatggttttcatttcagattagctattggatacctcacaacccaaagcttagtcttctcagagaacctccatagccaacagcaat

SEQ ID NO: 5693 - DNA, 513 bp, Homo sapiens
  MAP TO AC008981.4; EXPRESSED IN BRAIN, SIGNAL = 0.57; EXPRESSED IN BONE MARROW, SIGNAL = 0.79; EXPRESSED IN ADULT LIVER, SIGNAL = 0.79; EST_HUMAN HIT: BE069002.1, EVALUE 6.00e-17; SWISSPROT HIT: P03341, EVALUE 3.00e-15; NT HIT: K02917.1, EVALUE 5.00e-04
gcgcctgcaaaggtactaagaagcacagctgcaatgattgagggaaggtggaaaaaaggcaatcaatataaggaaggtctctgaagtactccagcgaattgatgggagccctagccagttttatgagagactctgtgaggcattttagttttacactccatttgaccctgaggctgctgaaaatcagtgcatgatgaatgcagcatttgtaaggcaagcccagggtgacatcagagagaagctgcaaaagctagagggttttgcaggcatgaatgccacccagcttatagaagtggccaccgaggtgtacattaactgtgaccaagaggcaaaaaaggaaacagagcagaggcttaggaaaaaggccaacctgttagcggcagccctcacaaaaaggaaaattaacattgtaaagggacgcgaatgttcacatgggtgtgggcatggaagaggccaagttgaacagcgagccaagagatggctgaggctaaggggaggtcaatgtgtgcagtg

SEQ ID NO: 5694 - DNA, 596 bp, Homo sapiens
  MAP TO AC016627.5; EXPRESSED IN BRAIN, SIGNAL = 0.88; EXPRESSED IN LUNG, SIGNAL = 1.3; EXPRESSED IN PLACENTA, SIGNAL = 1.2; EXPRESSED IN ADULT LIVER, SIGNAL = 0.85; EST_HUMAN HIT: AI264333.1, EVALUE 0.00e+00; SWISSPROT HIT: O15063, EVALUE 5.00e-88; NT HIT: gi7662075, EVALUE 0.00e+00
tgactggcccatgttaaagcccgagagaaaatctatcacctcttgcatttcctgatcagttggtaagttcatacccttctcatccttgccgtcatctccatgcaggaagttctcacgcctctccatgagaaagccattggccactgtattactggaattctgagctgactgtgaagggtctgtagtcctggggaaattaccaatgttcaaaatgctttgtaaccttgtatcaatattgccaggcattttggccttctcttcggaacatccagctatgaagatgtttttggaaggggtattttggatggaataatttgtgctgctgctggagctggtacatgaagctttcttggtgaaccgggatgtcagtttggagaatgtcttctgcaggccacctgaagatttgtttccatttccagaaggcaggtcagcctggttgccaaaatcacagatctccctttgcagctggatctgtatgcagggtaaagcttgctccctatttaaacagaaatttgtttaaaaaaaaaaaagacaaatatataaaataataaaatggacctctttgtatttaagaatggcgttgagagcaagaaaaa

SEQ ID NO: 5695 - DNA, 550 bp, Homo sapiens
  MAP TO AC000958.1; EXPRESSED IN BONE MARROW, SIGNAL = 1.5; EXPRESSED IN PLACENTA, SIGNAL = 1.3; EXPRESSED IN ADULT LIVER, SIGNAL = 1.3; EXPRESSED IN BRAIN, SIGNAL = 1.3; EXPRESSED IN FETAL LIVER, SIGNAL = 1.1; EST_HUMAN HIT: R81466.1, EVALUE 1.00e-124; SWISSPROT HIT: P42566, EVALUE 5.30e-02; NT HIT: gi14781188, EVALUE 1.00e-113
acctctcatccagcagcaaccattgggcatattttctttcacttgtctttctgtgcgtatatttatttacctgattgacagtataaatgtaatttttttcacttaccattatgtcataggcattttacaagttattaaaaactcattgtaactgtaatcttagtgacagcataatatcccactgtatgaatatataccataatttactttgccagaaatttgatttttgtttcatatcttcaaagatacattaaagccttagaaacacttcggcaggtacgtcagacacaaggtcagaaagtaaaagaatatcaaatggaactaaaatatctgaagcaatataaggaaaaagcttgtgagattcgtgatcagattacaagtaaggaagcccagttaacatcttcaaaggaaattgtcaaatcctatgagaatgaacttgatccattgaaggtaacttgattttatttttaattgacaaaaattgtatatctttatggtatacagcatgatgttttgatataagtatacatcgtggactggctaaatcaag

SEQ ID NO: 5696 - DNA, 534 bp, Homo sapiens
  MAP TO AC005626.1; EXPRESSED IN ADULT LIVER, SIGNAL = 3.4; EXPRESSED IN FETAL LIVER, SIGNAL = 4.4; EXPRESSED IN BONE MARROW, SIGNAL = 5.8; EXPRESSED IN BRAIN, SIGNAL = 3.3; EXPRESSED IN PLACENTA, SIGNAL = 4.3; NT HIT: gi15302284, EVALUE 0.00e+00; EST_HUMAN HIT: AW175952.1, EVALUE 0.00e+00; SWISSPROT HIT: P16573, EVALUE 2.00e-25
tctctctgctcctccctgtccttcatctttctcctttattcacaggagaatgttctaaatttgactctgagatctctgaggatgcagcatggccccaagacactttctgttggtcactctatccacagagtcagtggctcagccctccatccaagccagcagcaccacagtcacagagaagggctccgtggtcctgacctgccacacaaataacactggaacctctttccagtggattttcaacaaccagcgtctgcaggtcacgaagaggatgaagctgtcctggtttaaccatatgctcaccatagaccccatcaggcaggaggacgctggggagtatcagtgtgaggtctccaacccagtcagctccaacaggagcgaccccctcaagctgactgtaaaatgtgagtgaccctcggcccctctcactcctttccttgtatattttcctaggagggagggggggtgtaaaatgatacacggaatgagaaggatgagattccttcagagcctggggagcaatgtgggtaagaa

SEQ ID NO: 5697 - DNA, 524 bp, Homo sapiens
  MAP TO AC003987.1; EXPRESSED IN HEART, SIGNAL = 1.2; EXPRESSED IN PLACENTA, SIGNAL = 0.87; EXPRESSED IN ADULT LIVER, SIGNAL = 0.88; NT HIT: AF361252.1, EVALUE 3.00e-05; EST_HUMAN HIT: AW817477.1, EVALUE 7.30e-01
ttagttgctgacgtgatgccccattaccctcaaatacgtcagtgtgcatttccaacaaacaaagacattcccctacctaaccacagtgcaaccatgaaaaccaggacactgacagcaagcacgacctcaccgccccccacaactcatgcaagtttctccaattgtcctaatactgtctttcagggcaaaaggatctacttcagaatcacacagagcattcagtagtcatgtgccttcacttttcttcactttgaaaccaacccccagtctttcttgatcttcaaattcttaacattttttgaagattcaggatcagttatttggtagcatgtttctcagtttgggcctgtctgatatttcctcatgattagattcaagttttgtgtctttctcaggacaatcccaaaagtaatctgtgttcttctccatgcgtgctatcaggtaacatacattttcaatttgcagaattcctggcaatgaagactgaccacttgattaaggtgtctctgccaggtgtctcttcc

SEQ ID NO: 5698 - DNA, 536 bp, Homo sapiens
  MAP TO AC016545.4; EXPRESSED IN BONE MARROW, SIGNAL = 3.2; EXPRESSED IN PLACENTA, SIGNAL = 1.6; EXPRESSED IN ADULT LIVER, SIGNAL = 2.3; EXPRESSED IN BRAIN, SIGNAL = 2.4; EXPRESSED IN LUNG, SIGNAL = 1.9; EXPRESSED IN FETAL LIVER, SIGNAL = 1.6; NT HIT: AJ229042.1, EVALUE 1.00e-10; EST_HUMAN HIT: T82953.1, EVALUE 5.00e-11
cttcttgccgtccaagctaccttctgtctgctggggggtggcaggcttgggtcatgttctcccactgtctagtttgagcttggcaagtttttcagctgcagtgaagctcaattttttgatctgtaaactgcccatgtagtgatagttcctcccttgtcagtattaggggtaggttaatgtaagtaaagcaattacaaaattgctggcacctggtaggcatagcgagactgtcgaatgaagagacaataatttaaggtcattactgtttatagttataatttacctgagtgcttctcatatgctgggcctttgctgagctcttccaaaccaccctttggataatggtttgaaagggctctggctaggatatccaccctatgaggtattagaatggtgcaaaagtaactgctgtttcttccattactttcaatggcaaagggcacaattacttttgcaccaacttaatagaaagtctaacaagtttctactgttatgagaactctggaacttttatttccccattcctgtcttgtttg

SEQ ID NO: 5699 - DNA, 549 bp, Homo sapiens
  MAP TO AC000354.1; EXPRESSED IN FETAL LIVER, SIGNAL = 0.45; EXPRESSED IN BRAIN, SIGNAL = 0.79; EXPRESSED IN ADULT LIVER, SIGNAL = 0.6; EXPRESSED IN PLACENTA, SIGNAL = 0.8; SWISSPROT HIT: P22758, EVALUE 4.00e+00; NT HIT: AF217490.1, EVALUE 2.00e-03; EST_HUMAN HIT: AW058082.1, EVALUE 1.20e-02
atccactaggaaacctgcccaccaagtaccaggtttaccactcactcttaccaaagtcatctgtctttatctgaaagatcccttcaatggtagtaattattgtaatactaattattgtaaactttccaagcacttttatgtatactataacttttgcaactatcttataaagcagatatcattatctctactttataggtaagaaaactgagacttgaaagttagggtcctttgcttacaaacagctaatgaataacggtaaggtttaagccagaatctgtcagattccaaagaccacattctttctgtgatactatatagtttccctaggaataagcagggaaaaaaatgttccctgtcatattcactgcttcctttatatctaccttctgaatttgttcttctccagtcagcttttggatggcagctgccacagcagaaggcccagcaaacaactgaacaatagctaatatctgattacaacagggaagaaaactgacaggacaaaaaacaaaaccacatgaattaaggtcctatggcaactgcatt

SEQ ID NO: 5700 - DNA, 565 bp, Homo sapiens
  MAP TO AB023060.1; EXPRESSED IN PLACENTA, SIGNAL =   1; EXPRESSED IN ADULT LIVER, SIGNAL = 0.82; EXPRESSED IN BRAIN, SIGNAL = 0.82; SWISSPROT HIT: Q99715, EVALUE 6.20e-01; EST_HUMAN HIT: BF513178.1, EVALUE 0.00e+00; NT HIT: gi15304354, EVALUE 0.00e+00
ccccctctctttgaagatcctccgcctacccgccccagtcgtccctggagagacctgcctgaaactggagtctggccccctgaaccgcctagaacggatcctcctcaacctccccggcctgacgacccttggccggcaggaccccagcccccagaaaacccctggcctcctgcccctgaggtggacaaccgacctcaggaggagccagacctagacccaccccgggaagagtacagataatggagtcccctcagccgttctgttcccaggcatctccaggcacccacgccctctccaccctctgattccccgtgaattcttcccaatttagcctatctccttaaacctcttcctcattccctcggttttattctgaacccgtaaggtggtgttctcaatatttcctgtcccctcctgagatccatacttagtcctcacatcgcccgttttttcctctgacagcctaagcctactctcctacctcgcctccaggcctcggccccacctacctcccacccggtcttcctgcccgcgcgatcgctggggcagggctacggtactgtgt

SEQ ID NO: 5701 - DNA, 590 bp, Homo sapiens
  MAP TO AC020939.5; EXPRESSED IN HELA, SIGNAL = 1.1; EXPRESSED IN BONE MARROW, SIGNAL = 1.6; EXPRESSED IN ADULT LIVER, SIGNAL = 1.3; EXPRESSED IN FETAL LIVER, SIGNAL =   1; EST_HUMAN HIT: AL521707.1, EVALUE 1.00e-89; NT HIT: AF375663.1, EVALUE 4.00e-42
cccgtagtcgagtccatctcaagaaaccactttctttgctcatccgtcagaagcaacttctcatccattctagttttatcatgagattgcagcaattcagtcacatcttcaggctccacttctaactctagttacattgctaattccaccacatctactgttactttcttgaccgaagtcttcaacccctcaaagtcatacataagagttggaatcgtcttattctaaattcctgttaatgcttatctttcacttcctcccataaatcagaaatgttcttaatgacatctagaatgatgaatctttcagaaaaggttttcaatttactttgcacagatccatcagaaatatcactatctttggcagctataaccttattaagcatatttcttaaataataatacatgaaagtcaaacttactccttgatctgtgggctgcagaatagatgctgtgttagcaagaataaaagcaacattaatctcctcaaacatctccatcagagctcttatgactaggttcattgtcaatgaggagcaatattttgaaagaaatcttttttttctgagcagcaggtctcacagtgggatt

SEQ ID NO: 5702 - DNA, 536 bp, Homo sapiens
  MAP TO AC006183.1; EXPRESSED IN ADULT LIVER, SIGNAL = 2.5; EXPRESSED IN FETAL LIVER, SIGNAL = 1.1; EXPRESSED IN LUNG, SIGNAL = 0.58; EXPRESSED IN HELA, SIGNAL = 0.64; EXPRESSED IN BRAIN, SIGNAL = 1.6; SWISSPROT HIT: P29503, EVALUE 2.00e-15; EST_HUMAN HIT: AI016795.1, EVALUE 0.00e+00; NT HIT: AF029729.1, EVALUE 0.00e+00
  unsure 244
tctctgcagttcatgccaaggttcccagggctgccccggttccccttggcaccagtcagagaggggtccctacgcctgatgggattgaacagtgccaggctgcagtgcccagaggctgaggggtgtcccctgcaccaaggggccggaggggcaggcactcaccaagcagctggagccccgcgtgaggccgtagacgtccaccagggcccagagcgggtcggccgtcggaccccgctgaagaacngcataacagccgagtcgttgatgcggtggaagacacggcccttcttgtccacccagaatgcgatgatgttgccctcattggcaaactcctcaggcagcgccttggcccagaagccactctgggacaccaggtcggggcaggcgtacttgggcagcgagtcagggtggatgcgggacgggtccttgctggtgaagcccagccgcagggccccgctccagcagcactgcttcttggtgatctgggtggcagggggtggcctcagcccaccctctcccacttggtcaatcagacc

SEQ ID NO: 5703 - DNA, 504 bp, Homo sapiens
  MAP TO AC000358.1; EXPRESSED IN BRAIN, SIGNAL = 0.46; EXPRESSED IN ADULT LIVER, SIGNAL = 0.54; SWISSPROT HIT: P42584, EVALUE 3.50e+00; EST_HUMAN HIT: BE615665.1, EVALUE 7.00e-01; NT HIT: AY036109.1, EVALUE 4.80e-01
tgacttttctcagcccatcccagaggaaatgttttacgttaccacaagaaaataaattgctggaaaacaatgatgacaccatttctttcagcaaaacaaaacatgctaggattcaggtcgaattccgcgatgatccgcctgctgcaagcccaggttcttacaggaacgctgaccgggctgtctgctggtcgcgtggtgtgctgtttgttttagtctcacctgggggtctgaaggtgggggagaaggttggggtgagccaagctggagtttggatttcttagggactctccattagtttcctaggcagggtttgcagcgtctgtcaccactgaagatggtgcagcggcgcgctgcagccggcatgctgcaccgaagctgtacccttcaacggctacttttgtgtgctgagaacattttactgaggagggaacggctgcacaaaggtagggctacagggcatgtgcagcaagatgtgcaactgcctcttcagggactgagcaggac

SEQ ID NO: 5704 - DNA, 549 bp, Homo sapiens
  MAP TO AC005574.1; EXPRESSED IN BRAIN, SIGNAL = 0.87; EXPRESSED IN BONE MARROW, SIGNAL = 0.46; EXPRESSED IN ADULT LIVER, SIGNAL = 0.75; NT HIT: AL163203.2, EVALUE 1.00e-88; EST_HUMAN HIT: AI745010.1, EVALUE 3.00e-59
gcggaccactaaagagcaagaatgaattgccaacaggtttttgcaatttcctaaaaccatacattcattttactagagggacagccctcccccatcagctaacccagtgtaattctacacaggttattatctcaaaccctcaagttctcccccttttctaagccagttcccttcttctatgggggctgaggtttcagggacagaccctattagattatttgaaatgcgtttctttgatcccccgccacctgcaccttcctctaagccttcttccaaaacttctcacaagggaacaattgctccttctccatctaatgacacgactgagatagctatcgtagaagttaaagacttaaaacaaactttggcaattaagacaggataccaagatgcaaatgcctggttggaatggatcaaatattccattcacacgttaaacaaaagcaattgttatgcttgtgcgcacagcaggccagaggcccagactgtcccctttccactagggtggtcctccagtcaaccgggcatgggctgcatggtagctctttc

SEQ ID NO: 5705 - DNA, 521 bp, Homo sapiens
  MAP TO AC004826.3; EXPRESSED IN BONE MARROW, SIGNAL = 0.97; EXPRESSED IN ADULT LIVER, SIGNAL = 1.4; EXPRESSED IN HEART, SIGNAL = 1.1; EXPRESSED IN BRAIN, SIGNAL = 1.1; NT HIT: gi15295188, EVALUE 0.00e+00; SWISSPROT HIT: P47393, EVALUE 2.80e+00; EST_HUMAN HIT: AI803465.1, EVALUE 0.00e+00
aactgcaagaatttaccacgcttgacaaatacaagctatgctaatagttgatcaacctaaatcataagatctgaaatctgcattgctccaaaacccaaaactttttcagcaccaatgacactcaaagcaccaatgacactcactgcagcattttttatttcaaccagtaagtataatgcaaatataccaaaatctgaaaaaaatctgaaatctgaaacacttttggtcccaagcacttcaaataagggatactcaacctgtactaggaaatgagaagtacataaaatgtttttttaatcaatttatatagataacaactaagaaaaagtaggaaagtaaattcataatgtttcaaagtaaaataataaattgtacttattattcaatacagtattaagttggtttacttgcattgtcctttacagtcatactttttaatagccatgaaagaaaaacaataaatatactataaacatgataaatgaatttataaatttaaaagtcagcccaggctttttaac

SEQ ID NO: 5706 - DNA, 527 bp, Homo sapiens
  MAP TO AC005321.1; EXPRESSED IN ADULT LIVER, SIGNAL = 3.5; EXPRESSED IN HEART, SIGNAL = 2.4; EXPRESSED IN HELA, SIGNAL =   4; EXPRESSED IN BRAIN, SIGNAL =   4; EXPRESSED IN FETAL LIVER, SIGNAL = 4.1; EXPRESSED IN BONE MARROW, SIGNAL = 5.3; EXPRESSED IN PLACENTA, SIGNAL = 3.4; NT HIT: gi14769683, EVALUE 0.00e+00; SWISSPROT HIT: P08122, EVALUE 1.30e-02; EST_HUMAN HIT: BI906508.1, EVALUE 4.00e-89
gaactcctacgcctccttcccagcgggcacaggccagcccggctgacccctccccgggaagcaggaggagccctgcagaaatcccagggaggaagtggggtctggaacggcctccctgcctctacgctcaggcggggaagcctagttgcagagtgccgtgccagggagtccgggccacgtcccctgcacctccccgcagctgctcccaggacgggcagaggcttcggctgtccacaccctctgggtgaacgctggggacttgcctggcgctgtgcgtgcactgaccatgccaaggcccacgtctgcacatctgtgcacagcagagggaccgcaccaggccaggcactcacctccgagtcccggtcccaggaatgtggatgaagagaggctgctgtgcgactcagtgaagtgggtgccctcgctgaaggtctaggggagatggggtggggatgagaggtgctggggcttcacaggccccccctccaccccgcattacagctggagaggcaggactcaaacccatgtcc

SEQ ID NO: 5707 - DNA, 595 bp, Homo sapiens
  MAP TO AL109800.25; EXPRESSED IN BRAIN, SIGNAL =   2; EXPRESSED IN BONE MARROW, SIGNAL = 2.6; EXPRESSED IN PLACENTA, SIGNAL = 1.6; EXPRESSED IN ADULT LIVER, SIGNAL = 1.9; EST_HUMAN HIT: BI010126.1, EVALUE 5.40e-02; NT HIT: AJ298054.1, EVALUE 5.70e-01
ggccaatgaacttttgaagctccacatttttctttgagattatttgaatgctcctagcatttgaaatggttgatcactccctcctccttgaaaagttctcttcccttggcttctagcataaaatttccatgcttttctggtaaaataataataataataataataataataataataattaaaaaaaagagagtttctttgtttgaagcagaggtagaagtgggggttgctaagtcctgccctgagtttcctacttaccttcccttacccagagtggacttatagtaattcaatataatccccaaagtcttctagactttaaaaagtgtgaactataagaaaactgttctaagaactgttctgggtgataaactgtatttgcattttagatcactcagggctcaactaaattctgttacagtaatcagatgactatcactaatcaaagacttaggtgtgttttatacatagacacacacaaatttgtgcaacaagttaggaagcatgtatttccattaggagaagcaagcaataataacagtaaaagcaactatcatttattgagtgaacactatgcatcagacaccatgacagg

SEQ ID NO: 5708 - DNA, 517 bp, Homo sapiens
  MAP TO AC010649.5; EXPRESSED IN HEART, SIGNAL = 1.2; EXPRESSED IN HELA, SIGNAL = 1.2; EXPRESSED IN BONE MARROW, SIGNAL = 1.1; EXPRESSED IN ADULT LIVER, SIGNAL = 0.81; EST_HUMAN HIT: BE258336.1, EVALUE 3.00e-77; NT HIT: gi16163263, EVALUE 8.00e-77; SWISSPROT HIT: P28659, EVALUE 1.10e-01
actggcattacacccctcacccaggaggcctgagctaacatgaatccagggaccccagagtccttgctacctcccagcccgtttccctccctgctcgccgctgcccctgcagggagcctcctccagcctggtggtcaagttcgccgacacggacaaggagcggacgctccggcgcatgcagcagatggtgggccagctgggcatcctgacgccgtccctcacattgcccttcagcccctacagtgcctacgcccaggctgtgagtgacccagtgacagcttcggggctccggctccgtctctctcagtctctgtctactctctgtcgggctcctgcctctccctccatctccctgactcagggtcctctcctggcgtggctgaaccccaactccaaattgagaccaagctcagaccgagcccctaaatccagaagactgagccctaatctcacagtaacacccaatcttggaccgagccccagaacctggctatgctccacgtctaaattaggccca

SEQ ID NO: 5709 - DNA, 576 bp, Homo sapiens
  MAP TO AL121902.13; EXPRESSED IN ADULT LIVER, SIGNAL = 0.67; EXPRESSED IN FETAL LIVER, SIGNAL = 0.5; EXPRESSED IN BONE MARROW, SIGNAL = 0.71; EXPRESSED IN PLACENTA, SIGNAL = 0.78; SWISSPROT HIT: P18357, EVALUE 2.50e+00; EST_HUMAN HIT: BF948084.1, EVALUE 4.00e-09; NT HIT: AJ229043.1, EVALUE 4.00e-08
tcaggaccctgtatggaacctctagaaagaagagtactattggtttcctaggactgctgtaagaagtaccacaaacacttctttttgttaagagcaacttaacaaaaaattattatctcactgttttggaggccagaagtccaaaatcaagatgttggcaggccatggtttccctgaagacactggagaaggctctattccaggccactcacctagctagttggagttcattggcttgtggcagcataactctatctttacatggctttctcccagggcccccggacatggctgagtccaaatttatcctttttacaaggacatcagtcatgttggatcatagactcagcatactccagtatactccagtatactccagtatgactgcatcttaaccactcacaactgcaatgactccattttcaaataacaacacattctggggtattgggtgtcaggactcaggaatctggggagaaccacagtgtaacccataacagagaggttctcattacacaggatttaaagttgataatagataagtctgatgcttctggggattctagatgggggaga

SEQ ID NO: 5710 - DNA, 521 bp, Homo sapiens
  MAP TO AC010593.4; EXPRESSED IN BRAIN, SIGNAL =   2; EXPRESSED IN LUNG, SIGNAL = 1.8; EXPRESSED IN HELA, SIGNAL = 4.9; EXPRESSED IN FETAL LIVER, SIGNAL = 5.6; EXPRESSED IN BONE MARROW, SIGNAL = 2.8; EXPRESSED IN ADULT LIVER, SIGNAL = 1.6; SWISSPROT HIT: P47961, EVALUE 4.00e-66; EST_HUMAN HIT: AI885773.1, EVALUE 1.00e-108; NT HIT: AB015610.1, EVALUE 1.00e-108
cggatgtcatcagcattcacaagacgggagagaatttctgtctcatctgtggcatcaatggtcgctttgctgtacattgtattacactggaggaggccaagtacaagttgtgcaaagtaagaaaaatctttgtgggcacaaaaggaatccctcacctggttccacgatgctcacaccatccactaccttgactccttcgtcaaggtgaatgacactgtttagactggcaagatcactgatttcatcaagtttgacactggtaacctgtgtatggtgattggagatactaacctgggaagaattggtgtgatcaccaacagaaagaagcaccgtggatcttttgatgtggttcatgtgaaagatgccaatggcaacagatttgccccttggctttccaacatttttgttactggcaagtgcaacaaaccatggatttctcttccccgaggaaagggtatccgcctcaccattgctgaagggagagacaagagactggtggtgggtgaaatggtgggtgaaac

SEQ ID NO: 5711 - DNA, 512 bp, Homo sapiens
  MAP TO AL031393.1; EXPRESSED IN BONE MARROW, SIGNAL = 1.9; EXPRESSED IN PLACENTA, SIGNAL = 2.1; EXPRESSED IN ADULT LIVER, SIGNAL = 2.4; EXPRESSED IN HEART, SIGNAL = 4.1; EXPRESSED IN FETAL LIVER, SIGNAL = 1.8; NT HIT: AL163227.2, EVALUE 2.00e-77; SWISSPROT HIT: O14074, EVALUE 7.20e-01; EST_HUMAN HIT: BG957082.1, EVALUE 1.00e-103
gccaccatgtgaagaaggacatgtttgcttctccttctgccatgattgtaagtttcctgaggctttcccagccatgtggaactgcaagttaattcctttataaattacctttataaattacctttataaattacccagtctcgggtatttcttcataacagcgtgaaaatggactaacacagtaaattggtaccaggagtgaggtgctgctataaggacacctgaaaaggtggaagcagctttggaactgggtaacagaggttggaacagtttggagtgttcagaagaagacaggaaaatgtgggaaagtttggaacttcctagagacttggagggctcagaagacaggaagatgtgggaaagtttggaacttcctagagacttgttgaatggctttgaccaaaatgctgatagtgatatggacaatgaagtccaggctgaagtggtctcagatggagatgcagaacttgttgggaactggagcaaaggtgactcttgctatgctttagcaa

SEQ ID NO: 5712 - DNA, 536 bp, Homo sapiens
  MAP TO AF187320.1; EXPRESSED IN BRAIN, SIGNAL = 2.3; EXPRESSED IN ADULT LIVER, SIGNAL = 2.6; EXPRESSED IN PLACENTA, SIGNAL = 5.4; EXPRESSED IN HEART, SIGNAL = 2.9; EST_HUMAN HIT: BE933035.1, EVALUE 0.00e+00; NT HIT: AF187320.1, EVALUE 0.00e+00; SWISSPROT HIT: P02786, EVALUE 6.00e-37
aagggtggaactgtcgtcactgttacctcgatggcgaagccagaatgtgaggctcttgctcttagaactcacgtgagtaccatagcctcgcattgtctcacaggacacagattatccttatttgggtaccaccatggacacctataaggaactgattgagaggattcctgagttgaacaaagtggcacgagcagctgcagaggtcgctggtcagttcgtgattaaactaacccatgatgttgaattgaacctggactatgagaggtacaacagccaactgctttcatttgtgagggatctgaaccaatacagagcagacataaaggtgagcactgattccaattacgtttttattttgctgaatgtcaagtattttgaaatgtgatgtgttcctgtgtgttcctgttggaagggtgattgtagccatagtacattttaaagtgaactgaggtataattgtatgtagaattggtaacttgtttgagagaagtcgggaggctgtggattagagacctaggacagagctcagcaggtgt

SEQ ID NO: 5713 - DNA, 556 bp, Homo sapiens
  MAP TO AC025182.2; EXPRESSED IN FETAL LIVER, SIGNAL = 1.4; EXPRESSED IN ADULT LIVER, SIGNAL = 1.9; EXPRESSED IN PLACENTA, SIGNAL = 1.2; EST_HUMAN HIT: AW662695.1, EVALUE 3.10e+00; NT HIT: AE001207.1, EVALUE 5.30e-01; SWISSPROT HIT: P25425, EVALUE 4.60e-01
agtggggaaatattggagggaaattaccagttttcaaaagtactgtatatctacatttcttatctagaaaaatagttactaaaagcttttaatcctacaaaagtactatttctttccctgatggcccttccacaccccttctacccacttgccccacccaccctactatgtttcggatctggatccagaatgtgttcttccatgacagtagctcccataggcaaagcagcatctggctctgtgggctctccaaatttgtgtaggtaagtctggctggaattattgcctccctcacctggaggttgctgcctcttctcccaggaggttctccatatttccaggacaggcttgttgccgccaggctgctcagccacctgtgttagcagagcttcccactgggataatcctgtgttgggcctcagataatgggtattgagcaactcattgcttaagacagcaagtaatgtaggctgattccccacatggaactgcggccatacattcctcctgagagtcaaggagaattctctgagcagctcatgtttaactccaggga

SEQ ID NO: 5714 - DNA, 533 bp, Homo sapiens
  MAP TO AC013294.3; EXPRESSED IN ADULT LIVER, SIGNAL = 0.68; EST_HUMAN HIT: AA403053.1, EVALUE 9.00e-93; NT HIT: AL163246.2, EVALUE 1.00e-121; SWISSPROT HIT: P23074, EVALUE 9.00e-19
ggaagcaaaatgtgatcaaggtctctccgaataagattatgtcacaaacccggagagttgatatacccctgaggtaggaaagtaaaagtatattgctggccttgccagctgaaggcaaattgcttctggtgagctttatagacaggaatggagaaaaagacatttaccaagtcaatggccgcataccaggtaccaggagatgtgttaatttgctcaagcaatgaaaccacatctggtacagcagctgcaattggagtctccacttggttaagcttatgataattcactgtcattctccaagatccatctgtcttctgcaaaggccaaatgcttgatttgaatggggatgtggtgagaatcaccacccctgtttctttcaagtcctcaatggtggcactaatctctgtaatagctccagggatgtgatattgtttttgaattactatttttctaggtggaggctgctctaatggcttccatttggcctttcccaccataatttccctcaccctaccagtcagtgagccaatgtg

SEQ ID NO: 5715 - DNA, 590 bp, Homo sapiens
  MAP TO AC016613.5; EXPRESSED IN HEART, SIGNAL = 6.9; EXPRESSED IN ADULT LIVER, SIGNAL = 8.7; EXPRESSED IN LUNG, SIGNAL = 8.2; EXPRESSED IN BONE MARROW, SIGNAL = 7.3; EXPRESSED IN PLACENTA, SIGNAL = 9.4; SWISSPROT HIT: P23960, EVALUE 1.50e-02; EST_HUMAN HIT: AA970162.1, EVALUE 6.00e-11; NT HIT: gi14277708, EVALUE 4.00e-05
atgaggaccaggaacagtggctcacatctcaaatcccaacactttaggaggctgagaaaggaggactgcttgaggtcataagttcaagatcagaatctctacaaaaagatttaaaaagaaaaaatagaggaggaggaggaggaagaggaggaggaggggaagaggaagaagaagaggaaggagaagaagaagaaggaggagaaggagaagaagaaagcagggaggatagggagtgctggttgggagctctgaacatttttggttgtgtggtcagggaaggaccttctagaaggtgacatcagaagtgtacatgtacctgggggtgggggatgagggcagaatttgagggcagagaccgtgaaataacatttgaatcatcctctcctgggcctaaagcaacacaagctctctcttagacccctgaatttttctgagtttatatttcagatgaatgtgaaaaacatttttaaaaacattcctatattgccacaaaacctccagataaagctgcaggtgtatagctgatgagagatggacttacttaaagctcctgctctgtcctcggaggagctgaatcacgggcagttaca

SEQ ID NO: 5716 - DNA, 579 bp, Homo sapiens
  MAP TO AC000047.6; EXPRESSED IN BONE MARROW, SIGNAL = 1.9; EXPRESSED IN PLACENTA, SIGNAL =   3; EXPRESSED IN HEART, SIGNAL = 2.5; EXPRESSED IN ADULT LIVER, SIGNAL = 3.1; EXPRESSED IN BRAIN, SIGNAL = 2.6; EXPRESSED IN LUNG, SIGNAL = 3.5; EXPRESSED IN FETAL LIVER, SIGNAL = 1.6; SWISSPROT HIT: P26372, EVALUE 3.70e-01; EST_HUMAN HIT: BE733905.1, EVALUE 3.00e-28; NT HIT: U82618.1, EVALUE 1.00e-41
agtgggcatgagttacagggtgctcttttagtttagctgtctgtaggcggcttgtgttagctcaagtagaccccctttcttatcacaaggacagaggatttctgtatcccgggttcttgccttgatgtactggaagaatcacacgtggacttggagaattagtgcaaggttttattaagtagaagtagctctcagcagatgggggagccagaaaggagaatggttttccccttgggtcaggccactcggcagcctgggcggcctgggctgtcctccgactgccctggccaaactccaaggcgttctgctggtcagtggcctgccagtgtgctggtgcctgctgatgtgctcctctcaacatccagctgcctgtgtgttcctctgctgatgtggtcctctccacgttcagccgcctgtgtatctgcctgcgagggtgtcaggcacaggattagaggtatggcaggccagggtggtcttgggaaatgcaacatttgcgcaggaaaacaaaaatgcctgtcctcgcccaggtcattggggtggagccctagccagggaccacgacctcctcctctacccagc

SEQ ID NO: 5717 - DNA, 522 bp, Homo sapiens
  MAP TO AL109827.8; EXPRESSED IN BONE MARROW, SIGNAL =   2; EXPRESSED IN PLACENTA, SIGNAL = 1.1; EXPRESSED IN HEART, SIGNAL = 1.5; EXPRESSED IN ADULT LIVER, SIGNAL = 1.3; NT HIT: gi14772997, EVALUE 1.00e-87; SWISSPROT HIT: Q9Y697, EVALUE 3.00e-24; EST_HUMAN HIT: BG105831.1, EVALUE 2.00e-84
gaagttgtgggagggaactgctctccccatacctccatctcttgctgtgccacctcacacgcagcccccagccccaccactaagggtgtgggcactgtcccagaccgcataccccgctcctgcccccctccactctgcagggcctccacacgcacacggggccggcgacggatgtagatggcaccaacccctgggaaacaaaatttgttacaaaaaacagaaagagagaaaagtagataaaacaaaatatttctttccaaagggatcaaaatattacttcaacttttctgtaagcatgaaatttttctaaataaaaaacgttaaggaaaagaagaaacagcagtaaaagcatagtatttagtaaaatatttaacatctggaagataaatgccagaaggagtaatgatcaaaatggtttaaagtagctccctatgctatatgaaatgccatcatacattacagtattattcataatagcaaaaatactgggaacaacttagatgtccatcatcagggtaatgg

SEQ ID NO: 5718 - DNA, 566 bp, Homo sapiens
  MAP TO AL117259.3; EXPRESSED IN HEART, SIGNAL = 3.7; EXPRESSED IN ADULT LIVER, SIGNAL = 2.8; EXPRESSED IN LUNG, SIGNAL = 1.9; EXPRESSED IN BONE MARROW, SIGNAL = 2.3; EXPRESSED IN PLACENTA, SIGNAL = 3.1; NT HIT: M19684.1, EVALUE 0.00e+00; SWISSPROT HIT: P20848, EVALUE 8.00e-50; EST_HUMAN HIT: AI694412.1, EVALUE 1.30e-02
aatgcttcttctgtggcaccaggattttgccaattagttcaagtatatagaaactctggattcttctttatcttcaggtgattctcacaaaagctctccagcagccagatagttccatttgaatcccattttacagatgataaagctgaagcagagggaagtgtcctgccaaaggggctcagggctcctttcattcacacacttccacccttttatcccacacctggctgatgcccaccttccttttcttccaggcaagtggaaagataaattcaaggctgagcgcattatggtagagggcttccatgtggatgataagaccatcatcagagtgcctatgataaaccacctgggtagatttgacatccaccgggacagggagttatccagctgggtgctggcacagcactatgtggggaacgccactgccttcttcatcctgcccgatccaaagaagatgtggcagttggaagaaaaattgacctacagccaccttgaaaatatccagagagcctttgacataaggtgatttccagttcaggggctgagtcagaagctgcccagac

SEQ ID NO: 5719 - DNA, 561 bp, Homo sapiens
  MAP TO AC010613.5; EXPRESSED IN BRAIN, SIGNAL = 0.81; EXPRESSED IN BONE MARROW, SIGNAL = 0.93; EXPRESSED IN PLACENTA, SIGNAL = 0.56; EXPRESSED IN ADULT LIVER, SIGNAL = 0.87; EXPRESSED IN HEART, SIGNAL =   1; EXPRESSED IN HELA, SIGNAL = 0.87; EST_HUMAN HIT: T92244.1, EVALUE 3.10e+00; NT HIT: gi13384817, EVALUE 2.00e-03; SWISSPROT HIT: P26027, EVALUE 5.30e+00
taatgctcagggcgagaaagcttaggattgtgtcaccatctgttctaagtaaatatcaccactggccttgatttagcattttcttttcctgggatctccatgttcgggtttagagaaggataccaggacacagggcagtcagccaaggtcaactggggaagagctaaagaaaaaaatcaatcccatccacagtctctcatgaaaccacagagcctgttgaacacacaggcacttgggtttggaaagaccctagagaacacaattcctcaattcctgctgcagagaaatacagtttggatatttaaatccaggcatctcttgcccgtgggctatgtttccaaaggcaaatattgtcgaaggaatcatttcgtcatgctgtgccgtgggtggcagcaggctgagggcactgggaacagagccaagactggggaatatagcacaagggagacgtgggttgtagggtgtggaggagtgatggggtcagaagccaggcagttaagtcacaaatgttacagggtagagcaatgtaggatggccagagctcatgcaaatgtgaaccca

SEQ ID NO: 5720 - DNA, 537 bp, Homo sapiens
  MAP TO AL049779.5; EXPRESSED IN ADULT LIVER, SIGNAL = 0.96; EXPRESSED IN BRAIN, SIGNAL = 1.3; EXPRESSED IN PLACENTA, SIGNAL = 0.85; EXPRESSED IN BONE MARROW, SIGNAL = 1.8; EST_HUMAN HIT: BE883034.1, EVALUE 0.00e+00; NT HIT: gi14784202, EVALUE 0.00e+00; SWISSPROT HIT: P78540, EVALUE 1.00e-31
aattcatggccaagaggatgaggtgcaaggggcttcctaaaaataggtattttctactataaaatggactcttgtttttactttggcttgttctccctgtcccagtgggatgaccctcactgagagtagcagcaagggaacctgaggttttgtcacactttgttcttccagggttgctatcagcactggatcttgttgaagtcaatcctcagttggccacctcagaggaagaggcgaagactacagctaacctggcagtagatgtgattgcttcaagctttggtcagacaagagaaggagggcatattgtctatgaccaacttcctactcccagttcaccagatgaatcagaaaatcaagcacgtgtgagaatttaggagacactgtgcactgacatgtttcacaacaggcattccagaattatgaggcattgaggggatagatgaatactaaatggttgtctgggtcaatactgccttaatgagaacatttacacattctcacaattgtaaagtttcccctctattttggtgacca

SEQ ID NO: 5721 - DNA, 554 bp, Homo sapiens
  MAP TO AL109865.36; EXPRESSED IN BRAIN, SIGNAL = 1.9; EXPRESSED IN PLACENTA, SIGNAL = 1.1; EXPRESSED IN BONE MARROW, SIGNAL = 1.5; EXPRESSED IN ADULT LIVER, SIGNAL = 1.2; EST_HUMAN HIT: AL042584.1, EVALUE 0.00e+00; NT HIT: AF112374.1, EVALUE 1.00e-04; SWISSPROT HIT: P17588, EVALUE 9.00e+00
ctgcagaacaaatgtgtgggctaggtattattcagcagtatgtgaaagccaatcatttactctgcaaaggcctgatgccattactgatagtaaaacaaattgattaacataatggtaggactgggaaatgtgagaattatatcacatttattacattatattattcatttctgaccctccttttctcactgggcattactactgtcctcattttcataggagaaactgaaggcagccagttgacaagtccaaaatctccagagaatccaacttcagattcagcgagtcctcaggaaattatcgtgcctgttttccaaaggtgaaagctccatttatttattttttattgtatgccttacttcccaaatataaatattttatttgataatgaagaagttgcataaaggtatcattttatttaaagttagcttaaagtggctgcaaaggctgctttgggctattcataaattccatattaggtgttgctaacatttaggtgacttttaatttctggattaagctatttataatctaccatctcacccactgaaaat

SEQ ID NO: 5722 - DNA, 586 bp, Homo sapiens
  MAP TO AF196968.1; EXPRESSED IN HELA, SIGNAL = 1.4; EXPRESSED IN BRAIN, SIGNAL = 5.8; EXPRESSED IN ADULT LIVER, SIGNAL =  49; EXPRESSED IN PLACENTA, SIGNAL = 2.2; EXPRESSED IN HEART, SIGNAL = 1.8; SWISSPROT HIT: P25304, EVALUE 3.80e-01; EST_HUMAN HIT: BG236178.1, EVALUE 2.10e-01; NT HIT: AK024477.1, EVALUE 1.40e-01
atgaacccaaaccccaggatgcagtgggggcgggcggccatgaccctgggggcaacactgctcctcatggcttcccgtggagacactctcccagggccaggctggccctttctcaccaagcgccagctccacacaaaggcacaatgggctgcaggctgccgggtcctggcttgggctggggtaatcagggaagaatgcgggaagcacaactgtttcccaagccctagccatggtgccgccctgacatggccatcaaaggccggcaaattgcctccaattgctggcgttgctttcatgttgggggccagactggaagaggggtctccacgctggtgggtggcttgcatgccccagtgggaactgaacccttgcaagcagcttggggtcactggcccctttgtggccctgtggggctggggccgctctagtcactccagcactacccactgctgtaaacaagcagttttggagagggttggaagagagccagagccaggggcaggggatctctttggggtcagcatcctggtgatgactgacagctgggagcctaaatggcaggtggggctgatatatgggatggcca

SEQ ID NO: 5723 - DNA, 591 bp, Homo sapiens
  MAP TO AC004700.1; EXPRESSED IN ADULT LIVER, SIGNAL = 0.94; EXPRESSED IN HEART, SIGNAL = 1.1; EXPRESSED IN LUNG, SIGNAL = 0.7; EXPRESSED IN BRAIN, SIGNAL = 0.97; EXPRESSED IN BONE MARROW, SIGNAL = 0.69; NT HIT: AF325262.1, EVALUE 5.60e-01; SWISSPROT HIT: P36376, EVALUE 4.40e+00; EST_HUMAN HIT: AI991015.1, EVALUE 0.00e+00
atggttgggttaggaggaggaatactaaccattccaatcgtaaaacagagaattttgggtttctttcatgagttcatcacctctgaccttcacaggtaagggaccatcacacagacatctgccattttcatataactctctatccaaacaaaggctgaaaattcagcatggaggaactctcccagcacccgtggtcagccccttggcctgcaaccccaccctgggcactggtgtgggggtgggattctttatgaacttgggccccaattctgcttcccctggaaagctggacccacacaacatcaccttcatatgcagaccctcatgtgtgggcacctgtgcctcctcggagctggcggtcagctctagaagctggttcaggacaggatactcccatccaatctgtgcccaccatagaaaagagtcagccaagtgcctgctaccacagggctcttcacacatggaaaagctgccctgtggaagtgtcccaggaaaggtcagggggacaaaaaaaggtcacagtgatttgcctccagacactggacactcttccctggagagtacagggcatgctgctctccaaacctgatc

SEQ ID NO: 5724 - DNA, 506 bp, Homo sapiens
  MAP TO AC004416.1; EXPRESSED IN BRAIN, SIGNAL = 0.42; EXPRESSED IN ADULT LIVER, SIGNAL = 0.49; EXPRESSED IN HEART, SIGNAL = 0.97; NT HIT: U19348.1, EVALUE 1.00e-130; SWISSPROT HIT: P08581, EVALUE 2.00e-39; EST_HUMAN HIT: BF695365.1, EVALUE 1.00e-100
agctcttcctgtttcagtccccattaaatgaggttttactgttgttctttaataattttccttcatcttacagatcagtttcctaattcatctcagaacggttcatgccgacaagtgcagtatcctctgacagacatgtcccccatcctaactagtggggactctgatatatccagtccattactgcaaaatactgtccacattgacctcagtgctctaaatccagagctggtccaggcagtgcagcatgtagtgattgggcccagtagcctgattgtgcatttcaatgaagtcataggaagaggtaagtatttccactcagctttttgttaaatacgattttccagtaagcattttatctttggcctttgcagattaggaacttagacaatggtgaaagcaactgacagagcagtgataacaagtgtacttgatttctgttctatagaaatgtagccctgtaaatcatatccgtggggatttgcccttgtgcatggaagcaattg

SEQ ID NO: 5725 - DNA, 575 bp, Homo sapiens
  MAP TO AC025458.3; EXPRESSED IN FETAL LIVER, SIGNAL = 1.4; EXPRESSED IN BRAIN, SIGNAL = 1.1; EXPRESSED IN ADULT LIVER, SIGNAL = 0.92; EXPRESSED IN HEART, SIGNAL = 1.5; EST_HUMAN HIT: BE967577.1, EVALUE 8.10e-01; NT HIT: AF290095.1, EVALUE 1.40e-01; SWISSPROT HIT: Q9UKG9, EVALUE 8.40e-01
cacaggtgttggccttgacaagattagcattgcattggtagaatgctccaaaatggcctcattaaagcatcattacatcatacttgctgaagtaatcaatgattctcatggaacaagagcacaggaggtgagagagcactgtttcctaatgcagacggccttcaggatcacttcctggctgaatgacctagagaaggggacgcgagtacacccgtttcattttctcatctctgaagtcgggggagaacacctgccagccgtgccgtttattgtgggggtgaaaccagtgttcctgaagctcatggcctggcacagaagggtgctcctgggtgtcatttctccctcttcatgtcacctctttgaaacccagccctagttgaagctcagatgatatttctctagtttttatacagaacactgtggttttggtaaaattcacattttgggaagcattcccaccacctccccgtctccaacctccatttacttgaagggaaatggaatctatctggttttgattcatttacactccacttgttagcattggtttgtaagcatcagccaacatccgagta

SEQ ID NO: 5726 - DNA, 567 bp, Homo sapiens
  MAP TO AC010393.4; EXPRESSED IN ADULT LIVER, SIGNAL = 0.95; EXPRESSED IN BRAIN, SIGNAL = 1.2; EXPRESSED IN LUNG, SIGNAL = 0.72; EXPRESSED IN FETAL LIVER, SIGNAL = 0.99; EXPRESSED IN BONE MARROW, SIGNAL = 0.82; EXPRESSED IN PLACENTA, SIGNAL = 1.1; NT HIT: gi15314650, EVALUE 1.40e-01; SWISSPROT HIT: Q28943, EVALUE 6.20e-01
gtacccttctcaaacggcagtgtgaatccaaagggtctaatatagactgtgtttgatgaaactttaaaaaagtctgactttatttatttatacagcaagttactatatttcttgaagttgaaagcacacctagaaattaagccccaccatcaaatactgaaaagtagagatgaacacaggggctgtttgagagtttgtcgcaatgcatgacaagcttctcaggttcaggctgccaagaggctctatctgcagtaagtccccatttgttaaagggacaggcgtggagctccacaccggtcctgggattaaagggaagcaagaaaaggaggaaagggagaaacaaggaaagtgggacaataggaagcaggaggagcctggggagcaggtggaaggcatcacacgctccatcttgacttacaacggagctgtgtcccaggggccccctccaagcatccaccggccccacaagtcctgagcatccaccgcagcactgatccccagtctggcaggaccctgaacacaacagcaggaaatggtctcttcagttgaggcaagtccaggtgagag

SEQ ID NO: 5727 - DNA, 600 bp, Homo sapiens
  MAP TO AF270510.1; EXPRESSED IN ADULT LIVER, SIGNAL = 3.9; EXPRESSED IN HEART, SIGNAL = 3.1; EXPRESSED IN BRAIN, SIGNAL =   3; EXPRESSED IN LUNG, SIGNAL = 3.6; EXPRESSED IN FETAL LIVER, SIGNAL = 3.6; EXPRESSED IN BONE MARROW, SIGNAL = 4.3; EXPRESSED IN PLACENTA, SIGNAL = 4.6; EST_HUMAN HIT: AL521707.1, EVALUE 2.00e-72; NT HIT: AL163303.2, EVALUE 6.00e-35; SWISSPROT HIT: P15095, EVALUE 1.50e+00
ccgaaaacagtgattcctctgatggatctaggtgaagtaaattgaaaatctcaaggatagaattcacccttctagatgccattatgaacatttgtgattaattttaaaatatcaacattaccaggagtttggaagaagtggattccaatcctcatggatgaggggttcaagattttagtgaaggaagcaactgcagatgtggtggaaacagcaatagaactagaattagaagtggagcctgaagatgtgattaaattgctgcaatctcataataaaactagaacaagtgaggagctgcttcatatagttgagcaaagaaagtgatggaatctactcctggcgaagatgctgtgaacactgtagaaatgacagcaaaggatttacaatagtacataatcttagttgacaaagcagctgtatggtttgagaggatcaacttaacttttgagagaaattctactgtagataaaatgctatcaaacagtataacatgctacagagaagtcttttgtgaaaaaagaagtctattaatgcagcaaatttcattgtcttattttaagaaactgctacagccaccccagccttcagtagccaccacat

SEQ ID NO: 5728 - DNA, 584 bp, Homo sapiens
  MAP TO AC012384.16; EXPRESSED IN PLACENTA, SIGNAL = 0.93; EXPRESSED IN HEART, SIGNAL = 1.4; EXPRESSED IN ADULT LIVER, SIGNAL = 1.1; EXPRESSED IN BRAIN, SIGNAL =   1; EXPRESSED IN HELA, SIGNAL = 0.6; SWISSPROT HIT: P53104, EVALUE 4.40e-02; EST_HUMAN HIT: BF803217.1, EVALUE 1.00e-11; NT HIT: U52111.2, EVALUE 1.00e-08
tgctgatctgacaggaggtggagctcaggcacctgctactcacctccttctgtgcagcccggttcgtaacaggccacggaccagtactggtcctcagcctggaggttgttgacctctgtaatagagcacacttcttcagccagggagaaaaggacagggttgttgtggccaacccagtctctggaggtggatctcctggttccacagctccctggctgggtgaccctagacaggcctgttcctctctggcctcagtgttctcgtctggcaaatgggaaggtggtgacgataacaatccctgcctgatcaggctcttgcaaggatgatgtgagatccagtgagaaagtggctttagctcagggctgggcgcacaccaggggcttgtccaccccatgccacatccatggggggacagctgaccccaggggagtgtgggtggagcaaccagaatgctgggtctgtttgctcatctgtgttcatctgtgggtacttgtagagcagcctttgtgtgcccggccctgtgctgggcactgggagtttggctcctcccctgggggcatgagggtccttgcttcagcatcagg

SEQ ID NO: 5729 - DNA, 599 bp, Homo sapiens
  MAP TO AC003064.2; EXPRESSED IN LUNG, SIGNAL = 0.83; EXPRESSED IN FETAL LIVER, SIGNAL = 0.35; EXPRESSED IN BRAIN, SIGNAL = 0.9; EXPRESSED IN BONE MARROW, SIGNAL = 0.67; EXPRESSED IN ADULT LIVER, SIGNAL = 0.7; SWISSPROT HIT: Q9UGI0, EVALUE 1.30e-01; EST_HUMAN HIT: BG990032.1, EVALUE 1.00e-18; NT HIT: gi16165974, EVALUE 1.00e-35
ttttatcccctccccaattcatgaaatttgaaaaagtcagagactatcacaacaaaaaagaaacaagatacacaaatagtcaccccctaagttttgttaagaataagacaatcctgcccctcacgcctggctcagtcaccagcaggaggagggcaccctccacagattgcaggagaaggggaaggactcctcctttccctaggtgcacctccactgctgccaccaaggcctggtacagtacccgcaggttcctccccatccccaggtcgggctgggccctgcagcgctcctactcccccttcccagcccccagacttaatgctgataccaccactagcaccgatgccaatacaaccgctgtcgccctcaatgcagcagcccaccctacaaggctcctaccaccttgcccccgcgggcaccctcctaccactccagtcgagctgcagtctccgtcgctgccaccaatctcgtgagaccagctgcagagccatatgcaggctccagtttaccacaggtgactcttccttgtcctcctcctccatcctggcttggagcagctgggagggcaaaaccagaaaagcctagaatgggatgcagag

SEQ ID NO: 5730 - DNA, 557 bp, Homo sapiens
  MAP TO AC022153.3; EXPRESSED IN PLACENTA, SIGNAL = 1.8; EXPRESSED IN ADULT LIVER, SIGNAL = 1.9; EXPRESSED IN LUNG, SIGNAL = 3.9; EXPRESSED IN FETAL LIVER, SIGNAL =   2; NT HIT: AJ298105.1, EVALUE 1.00e-127; SWISSPROT HIT: Q28992, EVALUE 4.70e-01; EST_HUMAN HIT: AL603245.1, EVALUE 1.00e-125
aaaatggaccaatcagcaggaggtgggtggggccaagtaagggaataaacactgggcacccaagccagcagaggcaacgcactggggtccccttccacgctgtggaagctttgttcttttggtcttcacaataaatcttgctgctgctcactctttgggttcgcactagctttatgagctataacactcaccgcgagggtatgcagcttcattcctgaagtcagtgagaccacaaacccaccgggaggaacaaacaactccagactgccatgtttaagagctgtaacactcactgcgaacgtctgcagcttcactcctgaagtcagcgagaccacagacccaccagatggaagaaactccagatacatctgaacatctgaaggaatgaactccggacacaccatctttaagaactgtaacactcactgcaagggtccgcagcttcattcttgaagtcagcaagaccaataacccactgggaggaaccaatgtcagacacagagggactgccaagtaaagatgtcagaacgtgggcttcattgaaccccagttcagct

SEQ ID NO: 5731 - DNA, 543 bp, Homo sapiens
  MAP TO AL049840.4; EXPRESSED IN HEART, SIGNAL =  10; EXPRESSED IN ADULT LIVER, SIGNAL = 5.2; EXPRESSED IN LUNG, SIGNAL = 7.5; EXPRESSED IN BRAIN, SIGNAL = 6.5; EXPRESSED IN BONE MARROW, SIGNAL = 6.3; EXPRESSED IN PLACENTA, SIGNAL =   5; NT HIT: gi14746510, EVALUE 1.00e-106; SWISSPROT HIT: Q13625, EVALUE 4.00e-06; EST_HUMAN HIT: AI792614.1, EVALUE 1.00e-106
acagtgatgcacgagagaggcttggatggccctgccttcacaaaacctttggtctcagagatttctaagtcacttgaacaaactagcttatggactgattaccctaaagaatagtcgggaattaatgcaaatataattgtttgctttatgagtaatcagatacatgtgtcccaaaggctttttgaaatgtgttgtggattctgcatatcacagctttctccacggtctggcactaaatgatactagaattaagttcagtgtatagaaatgaaaaaaaaaaaggatcaactaaatcttttattcttttcttgtgtggtcaattatagctgctgaaatagaaaggttcagtgccatgttccaggaaaagaagcaggaagtacagactgcaattttaagggttgatcagcttagtcagcaattggaagatttaaagaaaggaaaactgaatgggttccagtcttacaatggcaaattgacgggaccagcggcggtggagttaaaaagactgtaccaagaactacaggtaactcctgggtctggcaa

SEQ ID NO: 5732 - DNA, 567 bp, Homo sapiens
  MAP TO AC002100.1; EXPRESSED IN BONE MARROW, SIGNAL = 0.44; EXPRESSED IN ADULT LIVER, SIGNAL = 0.66; EXPRESSED IN LUNG, SIGNAL = 0.78; EST_HUMAN HIT: AW960853.1, EVALUE 5.10e-02; NT HIT: gi7662201, EVALUE 5.00e-38; SWISSPROT HIT: Q09472, EVALUE 2.40e-02
gctgcctttccaatcaagaggggctcactgtcatccgtttgcctccaggttactctctggtgacccacatcccggctggtgcccgagacatccagattgtagagaggaagaagtccgctgacgtgctaggtgggtacgcagtgtctggcagctgcctcactgagcttttggttgtggagcgttgtgcgtggcagagaaggggcacttgaccctggaccccttcctccaggacagggatggaccagtgctgtgggcatggctgcaggagccagaacttgagccagctgtgtgggtgtggctggggtgctcataggggagccagctttacccctgtgcatggcaggaccttgaactcagagctgctggacaatgggagggtggtgatgttgggtggtgagctccctgtcactcgagagcctggcacaggcagaagctgggggccgctgcagatgagatccctgtggggttcgaggagtgagtctcaggagatgacaaggtcaaggtagcactgagaggaagtcggtgcagaggtaggattccgactcaggtctggggtctcatgctgat

SEQ ID NO: 5733 - DNA, 572 bp, Homo sapiens
  MAP TO AC016951.9; EXPRESSED IN HEART, SIGNAL = 0.99; EXPRESSED IN ADULT LIVER, SIGNAL = 0.9; EXPRESSED IN FETAL LIVER, SIGNAL = 1.1; EXPRESSED IN PLACENTA, SIGNAL = 0.99; SWISSPROT HIT: P54424, EVALUE 4.80e-01
ggcagtttcttttctggcacagagagctcctgatgatggcattacactctagtgggggctgaataaaagtgatttgagcaggtttacatctccctggagaggaagagcgcactcatttgcatttataaagcatattgagagttctggcagaaagttatggtggaagcacaattaaatatttaccatcacttctgctctcagacagtggcacggggaccaacccagctggaagtgcgtgtggtgctgtgagatctggggattcctgcagaggacacgactctgggacccatgcccaccaccctctgggagcacgtactcagtgcccaaggggagatcgccgggaagggcacacgcatggtggagagagtgctggtgtgggcagaccaggtcccaagtcccatcttcactacctagaagagatatgaccttgctcgtgtcatacaacctcccccgtccctctgccctccctctgtctctctccatctctctctccacctgtgctcctcatctgcaggatgggcctagagctaactagtaggcaggattatgaggggagaaggtgaggctgagtg

SEQ ID NO: 5734 - DNA, 592 bp, Homo sapiens
  MAP TO AL109944.19; EXPRESSED IN BRAIN, SIGNAL = 0.81; EXPRESSED IN PLACENTA, SIGNAL = 0.68; EXPRESSED IN BONE MARROW, SIGNAL = 0.69; EXPRESSED IN ADULT LIVER, SIGNAL = 0.59; EXPRESSED IN FETAL LIVER, SIGNAL = 0.64; SWISSPROT HIT: P33479, EVALUE 3.30e+00; EST_HUMAN HIT: BE044577.1, EVALUE 0.00e+00; NT HIT: X83230.1, EVALUE 8.80e+00
tcatgctatccactgccaaggaagtgggatgtttgatgtttattgagttcctactttgtgcttcgcatattaggagatgtgatatatgtatatagatagttatctccagtagttcacatgcaatgatgagcaggatatgagtacatccttgtgacacagcgtgagcactgctgtagaagaggaataaacaggacctgtagaatatcagaagaggagcatctcatccaagctgagaacattagggaaggcttcttggtggaggtaatacctgacctgaatcctgcaggaaaactaggaattagccaaaaggaagagagggagaaagcagcagcaggtatgcagagatagtggggaggggcagcaagttgccccactctgtgcaccatggatggaacatctgctgcagacactgcctcccagggctccaacatggacagtgaattcctgccagaaggtgaagcgatacagcaaacaggcatcggagcagatgtgacaagtgcacagggttaatcaagcattctgcagccagcaagagaaataaatgtccccagagcaatactggcagcagctggcaggagatggcactgactca

SEQ ID NO: 5735 - DNA, 593 bp, Homo sapiens
  MAP TO AC000081.2; EXPRESSED IN BONE MARROW, SIGNAL = 1.3; EXPRESSED IN PLACENTA, SIGNAL = 1.2; EXPRESSED IN ADULT LIVER, SIGNAL =   1; EXPRESSED IN HEART, SIGNAL = 1.3; EXPRESSED IN FETAL LIVER, SIGNAL = 0.48; SWISSPROT HIT: P53675, EVALUE 4.00e-43; EST_HUMAN HIT: AA897278.1, EVALUE 0.00e+00; NT HIT: L77569.1, EVALUE 0.00e+00
gagcaagttcccaaaagctgtgagaatcacaaggaaataatctcatgacctgccatctccaggtgcacagaaagccctgatcagctccccacaggcacacctttgaaagcttccctgggagcccagggttacatgggcagctcagcacatctgctacccaccttgatgagctcaaggtcacactgcccccgctcataggcaacacaggccagatgggggtctcgcttctcacagtagcggcccaccacgctgctgtcatagtaggcattctctctcaggaagcactcggggctgttgttgctgtcgatgtagattttagccagtgcattgtgagtggcaggctcctcacagccttcctgaatctgggactccagccagggaagcagcagcttgagcctttgaaagaaggaaggtgctgtaaagtctcaaggctaccactggaagtcttgagggcaactccagggctctgacagatgtttcctgaaacaaaaaatctcagagtccattgacttcaggttgctctagggaccaagatggacctggtttccaaactgatttctactgttaggttttcccccaaggtcttcacagta

SEQ ID NO: 5736 - DNA, 523 bp, Homo sapiens
  MAP TO AL121928.13; EXPRESSED IN FETAL LIVER, SIGNAL =   1; EXPRESSED IN BRAIN, SIGNAL = 0.92; EXPRESSED IN BONE MARROW, SIGNAL = 0.86; EXPRESSED IN PLACENTA, SIGNAL =   1; EXPRESSED IN ADULT LIVER, SIGNAL = 0.78; NT HIT: M13792.1, EVALUE 3.20e-02; SWISSPROT HIT: Q63410, EVALUE 2.80e+00; EST_HUMAN HIT: AW827576.1, EVALUE 5.00e-51
acctcctcagagagcccttccctgactaacctatggcaagtaagtcttctccatgccccttaaccctacatagcacttactaccattaacattattttgtgcttatttgcctattgtctgtctgcccccataaaatggaagctccaaagcaaggtggggatgagggggacactctgtcttattcatgagtgtaaccctagcacctagaaaaatgcccatactggctaggtgctgaatacatacctgttgacatgctccattcccatctacatgcttttgactcccaaaagtctgtttgggagtcaggagcatatgggtggtaatgaatggctccagacccataggtccaaatgccagctcatcatcccactcagaaggctccgaggcaccaccagttccacgcacctcacactcatcatagactactgatctgcgcacatccccctccaaacacacatctgcttcatcagctgacaccactcactcagctgccaaagctgaaacctggggattacccttgatt

SEQ ID NO: 5737 - DNA, 554 bp, Homo sapiens
  MAP TO AC022336.12; EXPRESSED IN ADULT LIVER, SIGNAL = 2.2; EXPRESSED IN FETAL LIVER, SIGNAL = 1.5; EXPRESSED IN LUNG, SIGNAL = 2.7; EXPRESSED IN HELA, SIGNAL = 2.7; EXPRESSED IN BONE MARROW, SIGNAL = 2.2; EXPRESSED IN PLACENTA, SIGNAL = 1.8; NT HIT: gi4504772, EVALUE 1.00e-91; SWISSPROT HIT: P18084, EVALUE 2.00e-26; EST_HUMAN HIT: AW961311.1, EVALUE 2.00e-91
gggctgtgcaattctctctctccagaactgggcacagcgtttctggtgttgattcttttgtttttaatgccaaagacattagtgagcctctattgctaacataccgctgaactcaaccacgcctctgagcttgaagtctcctctgcttcccatttcccacgtgcttaccatttcatagcgggccctggatcgctcgctctgaaactttgcaaactccctccggtcgtggatggtgacaagcagcttccagatagccaggagtgcaagcccaacaaggaggatgctaccgaccacagccaggaggatggtcatggcgttgggggtgtttccacactctggggggaccagaagcatggtaagcaaagccactagcatcaccatgcccctctcacgcaactgcaggcatttctgagatgaaagttgcaccccttccaaaggccttctcctcggctctcccttagatcctcaggagggtttccccaatgtacaaaaaatgaaagattcaaaagggacagtgactgttctaaagtcacacagcaagtgtggcaaagtct

SEQ ID NO: 5738 - DNA, 585 bp, Homo sapiens
  MAP TO AC010206.8; EXPRESSED IN HEART, SIGNAL = 1.2; EXPRESSED IN BRAIN, SIGNAL =   1; EXPRESSED IN BONE MARROW, SIGNAL = 0.82; EXPRESSED IN PLACENTA, SIGNAL = 1.5; EXPRESSED IN ADULT LIVER, SIGNAL = 1.2; NT HIT: gi15305446, EVALUE 0.00e+00; SWISSPROT HIT: Q9NWB1, EVALUE 3.00e-06; EST_HUMAN HIT: AU122296.1, EVALUE 0.00e+00
tcacaaaagacttctcggggtggtgcttgcccctccgagtctggtgagggagtaagtgtcacatgcagctgtcacagcactttcacttcacacctctgttcaagctccctgaagagaagtaacagttaaccatggctacttttcttttgaaaacctgtagagcagccttccaaacgcagaagggtcgagaacagcatccctgcagctggagaaacacaaaatgtagaagtagcagcagggcccgctgggaaatgtgctgccgtagatgtggagcccccttcgaagcagaaggagaaggcagcctccctgaagagggacatgcccaaggtgctgcacgacagcagcaaggacagcatcaccgtctttgtcagcaacctgccctacagcatgcaggagccggacacgaagctcaggccactcttcgaggcctgtggggaggtggtccagatccgacccatcttcagcaaccgtggggatttccgaggttactgctacgtggagtttaaagaagagaaatcagcccttcaggcactggagatggaccggaaaagtgtagaagggaggccaatgtttgtttccccctgt

SEQ ID NO: 5739 - DNA, 567 bp, Homo sapiens
  MAP TO AC010276.5; EXPRESSED IN PLACENTA, SIGNAL =   3; EXPRESSED IN ADULT LIVER, SIGNAL = 3.1; EXPRESSED IN HEART, SIGNAL = 3.1; EXPRESSED IN HELA, SIGNAL = 2.2; EXPRESSED IN FETAL LIVER, SIGNAL = 2.6; EXPRESSED IN BRAIN, SIGNAL = 2.7; EXPRESSED IN BONE MARROW, SIGNAL = 2.5; NT HIT: AF111168.2, EVALUE 3.00e-15; SWISSPROT HIT: P39188, EVALUE 4.00e-04; EST_HUMAN HIT: AV720656.1, EVALUE 3.00e-19
tttacaacctgggcaacaaagttaagaccccatatatataaaaaataaaaattaaaaaaatagccaagcatattggcatgtgcctgtagttccagctactcaagaagctgaggtgggaggatagcttgagcacaggagtttggggctgcagtgaattatgatcataacactgcactccagattgagcagcagagcaagactctgtctctagaagaagaaaaaaaaagagaaagatttaaaaggcttaaataaatggaatgatataccacattcatagactaaaagactccttattgtaaatatctaccaagctgttgtttaaaatttatatcgtggtataaatcacagtaaaatgtttgaacaatattttagaggaaattttgcatatgtataccaggaaagacataatgttcgtaacagtattgttcatagaattgaaaaaaacagaaatgatgcattgactagaatgtgggtaaagaaattttgcaataatcacggtggtatattatgaaagaatgagaagaataaattgcaactacataaaacgacacggataaatgtgagaaa

SEQ ID NO: 5740 - DNA, 566 bp, Homo sapiens
  MAP TO AD000864.1; EXPRESSED IN PLACENTA, SIGNAL = 2.6; EXPRESSED IN ADULT LIVER, SIGNAL = 2.3; EXPRESSED IN HEART, SIGNAL = 2.2; EXPRESSED IN FETAL LIVER, SIGNAL = 1.7; EXPRESSED IN BRAIN, SIGNAL = 2.5; EXPRESSED IN HELA, SIGNAL = 1.8; SWISSPROT HIT: Q06527, EVALUE 4.20e-02; EST_HUMAN HIT: BF981107.1, EVALUE 0.00e+00; NT HIT: gi14767177, EVALUE 1.00e-78
acacaatctcccagggtctgaccgcccacatccccgctcacctggctggtgtgattagcacccatttgcagcaacatgtggacacaatccagcctgtctcgggcctgtgtgctcagcacccggggacagaggtcggaagggcgcatagcaacgttaagggccaggatggccgtgtggagcggggtgaggcctgcagaatggagacagtgagggacccgcatctgcacccacctcgcccagccacaccaaccacaccagccctgcccacacccaacttaccctcgaagtctctggcttccaggtcaacctggaccccagagttaagcacagcctgggaggaagagaaggcagactgctgggtaagggtatcccctggcctcctggccctggaagccaaaatctgggcaaccagtctaccccccagacaaacccctgcctgccagctggccataccaagagaactcctgggagcccgtaggtagcggccacgtgcaagaccgaacgtccctgatggtcagcggcattgggctctgctcccaggttcaacagatcctccacaatcaggg

SEQ ID NO: 5741 - DNA, 598 bp, Homo sapiens
  MAP TO AC004754.1; EXPRESSED IN LUNG, SIGNAL = 1.3; EXPRESSED IN BRAIN, SIGNAL = 0.83; EXPRESSED IN FETAL LIVER, SIGNAL = 0.85; EXPRESSED IN PLACENTA, SIGNAL = 0.64; EXPRESSED IN ADULT LIVER, SIGNAL = 0.72; SWISSPROT HIT: P52591, EVALUE 1.10e+00; EST_HUMAN HIT: BF435056.1, EVALUE 0.00e+00; NT HIT: gi15317796, EVALUE 1.00e-105
tttctggaacccatctcgtcatccttcctggcagaccagaaagaggcctggaagcccagtcccagcactgccctggcccctgagccccgtggggtcagcattagagccccgggagcctgcaagatacaggagatccacctggcgggaggggctgtggcctaggagaggtgtgaggaaaacagacctggaacagcacatgctggggctggccggcctgcctgcccagatggtgcaacagtgaggtgccggtgtctctccctacaggcttttcctctccctgcacctttgcagctgctgtgtcgggggccaacggcagcacgctctgggagagacctgtggcccaagacgtggccctcgtggagtgtgctgtgccccagccaagaggcagtgaggcaccttctgcctgcatcctggtgggcagacccagttctttcattgcagtcaacttgttcacaggtaggccagccaggcagcggggttctcactgagggcctctcacctgagccacctcaccctgagggctaatgccaggaggccgcgacgaggctcagccctgtgatcttgagggtggctggatgggaaggaaggttatggggag

SEQ ID NO: 5742 - DNA, 560 bp, Homo sapiens
  MAP TO AF002991.1; EXPRESSED IN ADULT LIVER, SIGNAL = 0.9; EXPRESSED IN PLACENTA, SIGNAL = 1.2; EXPRESSED IN HEART, SIGNAL = 1.1; EXPRESSED IN FETAL LIVER, SIGNAL =   1; EXPRESSED IN HELA, SIGNAL = 1.2; EXPRESSED IN BRAIN, SIGNAL =   1; SWISSPROT HIT: P08547, EVALUE 2.00e-14; EST_HUMAN HIT: BF507473.1, EVALUE 9.00e-10; NT HIT: AF048728.1, EVALUE 1.00e-07
tcagaacatcatgcaatccccacctctatctagtaccacaaccttctcagtacccaaaaggtgaccctgtaccctttaagcagtcactcccattcccctccccctttcccgggaagctccaatgtgctttctattctgtgtttttgacaccacatggcatgattctgcacaatgtgctttctgtctctctggatttgcctcttctggacacgtttatgtaatggaatcctccaatatttgtcctttgatgtccgatttctgtcactgagcatgatgtcttcaaggttcttccacacttcagccagtgtcagagctttgttctttttcatggctgtataatattccactgtctggatggaccatattctgtttaccctttcaactgccaatggactcctgggttgtttccagctttgggtcattgtgagtcatgctgctatgaacatttgtgtctaggtttttgtttgaacatccgttttcagttctttttggtacgtacccaggagttgaatggccggctttagggtagcttcatgtttagccttttgagaaaccaccaa

SEQ ID NO: 5743 - DNA, 563 bp, Homo sapiens
  MAP TO AC000391.1; EXPRESSED IN BRAIN, SIGNAL = 0.56; EXPRESSED IN ADULT LIVER, SIGNAL = 0.74; NT HIT: gi16159281, EVALUE 1.40e-01; SWISSPROT HIT: P02812, EVALUE 8.00e-05; EST_HUMAN HIT: BI868740.1, EVALUE 2.00e-01
tgtccttgcatgagtgaagctgtggcctgcgggaggcatgactctcatgcctgcgcatgggctgtggtgggaagcactcggtagacgacggccttgctaagctctcagcacaaaccatctcttcacagcgaggtcagctgggggtggagagccgggctgtgaatcctggtgtgccgacaccgcgggcgctccatgcctccctctcgcagggcttctgtgtcgggtgtgcagaccccaggggggccccttaccgcctttctgcatgggcctctgtgtctggtgtgtggaccccgtgggggccctgcaatcagccctttcagagtctccactggaccttgggttctggaggggccttgtggctggcggctggccctgccctgggctgcctttgtgtccttgctggccgttgagggtgggggaagcaggagcgcctcgttctttaacttcccagggtcttcttgctgtgtggccgcctgcaggttgaggagcctgggacaggaagcccagggtcttgatcctgggctgtgcctccactgccgactgctgagtgctttgtgtcccaa

SEQ ID NO: 5744 - DNA, 597 bp, Homo sapiens
  MAP TO AC025754.2; EXPRESSED IN BRAIN, SIGNAL = 2.8; EXPRESSED IN PLACENTA, SIGNAL = 2.5; EXPRESSED IN ADULT LIVER, SIGNAL = 1.4; EXPRESSED IN FETAL LIVER, SIGNAL = 1.8; SWISSPROT HIT: Q02817, EVALUE 1.00e-01; EST_HUMAN HIT: BG034340.1, EVALUE 3.30e+00
gagggctgatgatccagaagaagacagctaacacttgaattagagacataaggtcttgagtactgaactcacatggttctggctgacagtgcactggtttttggtgtccattggccaagggtaatgggagccagggaaaatgctgtaaaggaagggagggagccacgatttgggaaggtttggaggtaactgttgatcagtgctgatttctcaccttcagggctagcagctgtgatgggtagagatggagcccctctccctccaatgccctcagggctgcttggggtctcaggtggagcaggaacctggcagttcttgagtcctgtttttgccttctggggctactcatctcttgggagaagagcattgttggtggtgaaaaagccactgaggtagacaggcatgtcaacatggcgctcatgactagattggaagacacacagcattgcatgcatctgtcctttcttcctcctttccctcaactccctctcttctggctttttgttgttgtgtgttttggtttttgtactggcttctttagaattagcccaggagtcgagccagaagtctgcagttagcctgagctctgtgacttcc

SEQ ID NO: 5745 - DNA, 575 bp, Homo sapiens
  MAP TO AC004778.1; EXPRESSED IN BRAIN, SIGNAL = 0.43; EXPRESSED IN ADULT LIVER, SIGNAL = 0.51; NT HIT: AF287263.1, EVALUE 2.20e+00; SWISSPROT HIT: Q12967, EVALUE 1.10e+00
acgggtggttggtaacagaggggcgcttgtctcctcacagggaggcgagaaggagggctgcagagcccaccaccccagccagagctgcacacgagcaacaaggaggagaagccggaggagaagctctgtggggtccctggcctaggaagcagatgggagtggtgagcgagaatatctgccgccacccagccaaggagcaagcatgatagggagggaagttagcacacagcggagagatgagggaaagaggtcaggagccaagatgtgacctttgggtggggtggtatttaccggggtggcacaattctgaaggggaaatcacccagtaggaaggactgtcatgatgggggcgtgaggaagccaccttgtgggttagaacctgccggtggatgcaggaggaggcctattctggggtatacagtccacagtggggcagagtcctgataaaatccaccacagtggatgaaacccacagcccaagtgctgagcaggagcagggacagagggaagctttacgccggaggttgggccaggggcagacgcacgctgtgggacccaggaaggaaagacagcag

SEQ ID NO: 5746 - DNA, 535 bp, Homo sapiens
  MAP TO AC004755.1; EXPRESSED IN ADULT LIVER, SIGNAL = 1.3; EXPRESSED IN HEART, SIGNAL = 1.2; EXPRESSED IN BRAIN, SIGNAL = 1.4; EXPRESSED IN BONE MARROW, SIGNAL = 1.2; EST_HUMAN HIT: AI638803.1, EVALUE 0.00e+00; SWISSPROT HIT: P98089, EVALUE 5.80e-01
tggttgacttgcagcagaactggctggagcttcttcttcccaggaaggacatcttcctgatatgccagcgtgactcctttgggctcgaagatgcctcttcatcagatgggtctagggattcagatgctacgtcactgctgaaccctggtcccctccgcagagggcaatgactgctcctctgggggcaaggatagctgctcctccccgggcaccagcagccactccatggatgatgatgactgcttctccgcgggccacagctccacctccataggctgctcgctcgtggacgtggacgattcttccagacttggtggcagagtctccacctgagatttgtgggtcttgtctggaagtggcaccgtcccctccttgggggtgtgaggctccttttgccagctcttccggaacggtgtggagggcttcaaaaatgctgacttctcctccgaggagtctggctggctctccaacgtcagctggcctgaaagaaatgactggctccccagaggctgtggctggctctcaaatgacgaca

SEQ ID NO: 5747 - DNA, 537 bp, Homo sapiens
  MAP TO AC010451.5; EXPRESSED IN HEART, SIGNAL = 1.2; EXPRESSED IN BRAIN, SIGNAL = 1.3; EXPRESSED IN BONE MARROW, SIGNAL = 1.1; EXPRESSED IN PLACENTA, SIGNAL = 0.89; EXPRESSED IN ADULT LIVER, SIGNAL = 1.3; NT HIT: AL163248.2, EVALUE 3.30e-02; EST_HUMAN HIT: AA746086.1, EVALUE 0.00e+00
tacaccaccccgtcctctacagttccccttttattattaacaacgtgcatgagtgtggtatatttgcaacaactgaggaatcaatattgatgaggcagtttgagtagagcctctgacctggacacctaagagttccctgcagaatggctgacttaggatctgaatctgggttcaccttcttttgcatctatgggaatgatagtctaccttgttttatttgactttcttcaaattgaagccttcttctaaagcaaactcatggaggttgtctgcaggcagaaggtggctgaagaagctcttctcgcagtccacttccaggaaagacactaaaggagaggaagaaccagggctcccctttttattactctcatatcctcagcaaaggcttggtgtgaaatccggaactgggtgctgtgaaggcaactatgaattactgggaaagagtacaaactattttgtaaatgcatttacacacctttttttttttttttaacaaaaatacatagtttgaaacatgccaattcaacccagcagaat

SEQ ID NO: 5748 - DNA, 526 bp, Homo sapiens
  MAP TO AC004471.2; EXPRESSED IN ADULT LIVER, SIGNAL = 0.39; EXPRESSED IN HEART, SIGNAL = 2.3; EXPRESSED IN BRAIN, SIGNAL = 0.4; NT HIT: L77570.1, EVALUE 0.00e+00; SWISSPROT HIT: Q12263, EVALUE 2.00e-15; EST_HUMAN HIT: AI991174.1, EVALUE 0.00e+00
aaacaatggccacactctccagtgctgcccctgctgcttgtactgtcctcagagcagccaccagtgctcagggtggcatccagtccccgcctttagcccccagccccagatctgccctgggagcccagccaggggcagaaaaaaaactagttcattgagtgccagggagccctgcccaaggacatggcgtgcaagatgttccaccaactctcctcagccattaaatactgccacgacctggacatcatgcaccagaacctcaagtgttagaaccttctcctcgacaaggacttcaacatcaagctgttctacttcaggttctccaagctctgcctgcgggatgacagtggccaacagagattaagcaagaacttctgcgggttggtggcatatgcagcccccgagctgctgcagggcatcccctaccagcccatggtgtatgacatctggagcctgggcatgatcctctacatcatggtctgcagctccatgccttacgactccaacatcaggaagatgctgcgta

SEQ ID NO: 5749 - DNA, 508 bp, Homo sapiens
  MAP TO AC022143.6; EXPRESSED IN FETAL LIVER, SIGNAL = 1.8; EXPRESSED IN PLACENTA, SIGNAL = 1.1; EXPRESSED IN HEART, SIGNAL = 1.3; EXPRESSED IN ADULT LIVER, SIGNAL = 0.59; SWISSPROT HIT: Q05890, EVALUE 9.30e-01; EST_HUMAN HIT: BF854737.1, EVALUE 0.00e+00; NT HIT: AJ400879.1, EVALUE 4.80e-01
tgtgggaaacttatccaggccagcatgggactctggatctttgccctaaacctgctcctccccaggcttcaccttctcagcagtggcatcacatccagccagctgctccagcccaaatgtgatgagatcattttgattccccttctctccacatcctctccccatattcaattcaacagcaggtgctgtcagtgctgccccagcctctgtctccctcgtgtctctccagggctgcactgtgacaaggccacggtgtctacctggacggccacagggactcccagttggtcttcctgcctctactgccgcccccgttgctctattccaacagggaaagtgtgacctcgtaagtcctgctcatcccctcccaggatttttcactgcacatggaaaggatccacctttctgcaaggtcctgcgtgacctggcacttgcctcgttttctgacgtgacctccttccctgctgccccttgttccagctgcactggccatttctccaacacaaca

SEQ ID NO: 5750 - DNA, 577 bp, Homo sapiens
  MAP TO AC018427.3; EXPRESSED IN BONE MARROW, SIGNAL = 2.8; EXPRESSED IN BRAIN, SIGNAL = 0.6; EXPRESSED IN ADULT LIVER, SIGNAL = 0.87; EXPRESSED IN HELA, SIGNAL = 0.52; SWISSPROT HIT: Q02297, EVALUE 2.50e+00; NT HIT: J04694.1, EVALUE 3.50e-02
cctctggtcagcagctaaggccccaagggcagttggcaccagcatactgaggcgctggaaccccagtacaactgtaggtctcggaggtcgtatttctgttcttctcatgcacacttgggcaaataccccagagggaaatgttaaggggataagcacagagagaggcatgctcctgcctggatatgacacagctcagaagctgggatccagagagctctgtgggtgggaccgaggcggggctctccagaatggcagggacctggccacgggagtgctcccgtgacctgagacatggccgttccccgcccctttcctgcagttagcacaggacactgctggcagctcacccatctcacaggaatgaactgcgaggaagaaccagtgaaggctggaaagccttttgatcgtcatgaaagattgttgccagatggagaaacagaactgttagaatataacgaagctgcactcaagataatcgccatcttgttcaacttttccctgcaactccatattagaggagagatttgtcatgtgctgtgatgtggggggaggctgtggaaggggcttactttttggg

SEQ ID NO: 5751 - DNA, 512 bp, Homo sapiens
  MAP TO AF196968.1; EXPRESSED IN LUNG, SIGNAL = 1.3; EXPRESSED IN BONE MARROW, SIGNAL = 1.1; EXPRESSED IN PLACENTA, SIGNAL = 1.3; EXPRESSED IN HEART, SIGNAL = 1.1; EXPRESSED IN ADULT LIVER, SIGNAL = 1.3; EST_HUMAN HIT: AA461613.1, EVALUE 1.20e-02; SWISSPROT HIT: P16609, EVALUE 1.90e-01
gaaggctttgggggaagtagcagctcctctcctccctccacaggccctggcttacccccatggggatatgggagaggggtaggatatccctagatctggctccagagagtcagctctgcctcactgctgccagaccggggcctttactgtaacttcccaagggacctgctggtgcccctcctcccaggccacagaggcatcctgcatggggcacagctgctgagctatgataccggtggtgagtgtgggccgctgcactccctccacacagctatctctgggcctgggctctgtcttcatcacctcattgaacctcctaacaaccaccttcactagtggtcaaacctagcattgcctatgatgggcagacatccggataggacacactaaggccccgaaatcacctctgtagaattccttccaaaaatgcacagcctgaacccagtcatgaagaaatatcagacagacccaaagagtgcactgggaaacaaccaacctgggctcttcaaaaa

SEQ ID NO: 5752 - DNA, 500 bp, Homo sapiens
  MAP TO AC017019.3; EXPRESSED IN HEART, SIGNAL = 1.8; EXPRESSED IN ADULT LIVER, SIGNAL = 2.2; EXPRESSED IN FETAL LIVER, SIGNAL =   2; EXPRESSED IN BRAIN, SIGNAL = 1.3; EXPRESSED IN PLACENTA, SIGNAL = 1.1; EST_HUMAN HIT: AA663213.1, EVALUE 8.00e-84; SWISSPROT HIT: P26805, EVALUE 3.60e-02; NT HIT: AB008681.1, EVALUE 0.00e+00
gggttccatactggggatgacttgcttatgggtagggaatttgtccctttcttcagctgtcattctgtcatttacttgactaagataccaggtatctccaaactcctgggcagcagctaaagccacattcttttcattaaaggccaggatttgatctaacaatagcatggcatctgtccaagtgaggtcaaagttttgccctggaccctgcaggacatctatgtacctatcaggatcatctgaaaacttccccagctctgccttgattggctttaaatcagggagggagaaggggacttgtacccaggttgggccaaattctcctccccctacagcctgaaggggacagaatcgatagcccagggttttttgtggtcctttgcagatttctttgcttgtttccttctgggaggaggagattagaggaggcttactaataggaaggggagctatatggaggctaggatatgggggtaagctgaaaggtcctcctgtgggat

SEQ ID NO: 5753 - DNA, 571 bp, Homo sapiens
  MAP TO AC009003.7; EXPRESSED IN BONE MARROW, SIGNAL = 1.1; EXPRESSED IN ADULT LIVER, SIGNAL = 1.3; EXPRESSED IN BRAIN, SIGNAL = 1.5; SWISSPROT HIT: P54366, EVALUE 3.20e-02; EST_HUMAN HIT: BF983931.1, EVALUE 0.00e+00; NT HIT: gi14757758, EVALUE 4.00e-42
tcgactccttgatttcccaggactccgggctaccagatcggccgtccagctggaatcaaccgatggaggctccgctgcaaactggaatggtaaggggtggggcggagaccgggtaggtgccggcgtggggcgccaagaggactacaactcccggcgtgctcagcgcgcattacgtggtctggcgataacgcgctgcgtccgctcgggcggaactacgtttcccggcatgcactgcgggccgccgggcctcagggaagagtcgcgcccccggggagggagcagcactggcccattctgcagatggggacatcgagtcacgggctggctacgaactcctcgggggcgaaggtggcggagagggatgggttccaggacgtcctggcgcccggggaaggctcggcgggacggatttgcggtgcgcagccagtgccgttcgtccctcaggtgcttggcgtgatgatcggggccggagtggcggtggtggtcacggccgtgctcatcctcctggtggtgcggaggctgcgagtgccaagtgagcacccgaggggcccctcttgggaggctgtatggt

SEQ ID NO: 5754 - DNA, 588 bp, Homo sapiens
  MAP TO AC010238.4; EXPRESSED IN BRAIN, SIGNAL = 1.8; EXPRESSED IN LUNG, SIGNAL = 1.3; EXPRESSED IN BONE MARROW, SIGNAL = 1.7; EXPRESSED IN PLACENTA, SIGNAL =   2; EXPRESSED IN ADULT LIVER, SIGNAL = 1.9; EXPRESSED IN HEART, SIGNAL =  15; NT HIT: AE008684.1, EVALUE 2.20e+00; EST_HUMAN HIT: AA568197.1, EVALUE 3.00e-03; SWISSPROT HIT: P16801, EVALUE 6.60e-01
tcacgtgaactcagagcaccatatcggttttccaccttaagtaagaggattaaaaacatttcataatgcagggcctgagttaggagcccaggccccagagccttgtcacattgtgtaattggaagtaattgccagtgtggggtttgagaaaggcgcccgattgggtggtgggggctggtgaaacctcttttgagcccttgttaaatggggagggcagattaagctgagcaagtgggttgaatggacagactgatgtactcacccctctcagacctcagcatcttacctgggtgtcctttgaggggaacatagggctgctttgggggtgctgcaggtgtgtgggggagatgagagcaaagctgtctctgtgtacagcaaggcctgtgcctcttcctggctgctgcctcttcattctggggacaggagcaatgcagggacctgttgtatcttacagaagaccctcagtctctctgagctgacccctgcaatatcaccaatcagatgatatccaggttatctcttggggaaattggaaccataggttggggtgggagggctcacgttccagggggtgtagctcttccaaca

SEQ ID NO: 5755 - DNA, 550 bp, Homo sapiens
  MAP TO AC012310.4; EXPRESSED IN HELA, SIGNAL = 0.88; EXPRESSED IN BRAIN, SIGNAL = 1.2; EXPRESSED IN FETAL LIVER, SIGNAL = 0.83; EXPRESSED IN BONE MARROW, SIGNAL =   1; EXPRESSED IN ADULT LIVER, SIGNAL = 1.2; EXPRESSED IN HEART, SIGNAL = 0.99; NT HIT: AF031169.1, EVALUE 8.20e+00; EST_HUMAN HIT: BG178158.1, EVALUE 1.30e-02; SWISSPROT HIT: P13489, EVALUE 1.00e-08
ttgctgatctgccttgtgtcctttcaccctgatgaagtgtagcatgaatacgactatgggctggatcccgagtcctcccagtgaaacatcaaacccgggggctggtctcgaggtcccccagacacacacacattcacggtcctcccactttccccatcccacacccccgacaaaaccagaagctcctccatggcaaagagcttgtccacgcctcattcaaaccccatcaggaactcaggcattggtgggtcaattcccatggctctcctccatctgccaactcagagggagccaagaaaacttacttcaggctctgcaggttaccatctgggcgacccaaggcctcacacaggaacttgactccctcgtctctcaggctgttcttgctcagattcaggtgtgtcaggctcctgttctgcaggagagcatctgacaagtgcttgcaagcgggtgctgccagctggcaaaaccagagcctgcagggtgaaagccacagagatggacactcagggaagcagcccagacccaggctcctggaacagagcctcag

SEQ ID NO: 5756 - DNA, 534 bp, Homo sapiens
  MAP TO AC022078.12; EXPRESSED IN LUNG, SIGNAL = 0.77; EXPRESSED IN ADULT LIVER, SIGNAL = 0.46; EST_HUMAN HIT: BE671342.1, EVALUE 9.00e-50; SWISSPROT HIT: P36140, EVALUE 2.60e-01; NT HIT: gi15893298, EVALUE 3.30e-02
atggattccgtctgtgttccttgtgtttatgttgagtttgtagctaatgcagtttttttcttttttcttttgttttacaggctaaacatatttttgactggtatgaacccattctactttcatgcagtaaatataattttacactgcttagtgactcttgtgctgatgtacacctgtgataaaactgtcttcaagaatcgtggacttgcttttgtaacggcattgctttttgctgtacatcctattcatactgaggcggtaagtgtaattggatctcagtgaaataacgaatatgaatgtgtgtatgtatacgtgtatacgtgtatacacacacatatatatacatgtaaatatgtgtgtatatgtagatatgtgtgtgtatatagatatatacatgtaaactaagctgatcttttttccttttcaaaaacatatgagttcactctattaaagtgtttatgtttatatataaagcattttggttgacaacttttccttttgaatgttcaaattggttttcttgcacctcctgga

SEQ ID NO: 5757 - DNA, 522 bp, Homo sapiens
  MAP TO AC018757.4; EXPRESSED IN HEART, SIGNAL =   5; EXPRESSED IN ADULT LIVER, SIGNAL = 8.2; EXPRESSED IN HELA, SIGNAL = 3.4; EXPRESSED IN FETAL LIVER, SIGNAL = 5.3; EXPRESSED IN BRAIN, SIGNAL = 4.1; EXPRESSED IN BONE MARROW, SIGNAL = 3.4; EXPRESSED IN PLACENTA, SIGNAL =   5; NT HIT: AF154912.1, EVALUE 1.30e-01; SWISSPROT HIT: Q36426, EVALUE 7.30e-01; EST_HUMAN HIT: BE719513.1, EVALUE 4.70e-02
tcctgccattacagtctcccagcaagactgtaggtgctatgaaggcggccctgtctaccctgtatcctcagggcctagcacagtatcacaaacatggcagccactcgacaaccatgtgctgtggaataactgtttcagaatgccaagagcagagggctggggtacagagaccatggtgggcggctggtggggggtgctctgaagaatctcatcccagtgccaccactaacctgttgggcaccccagaacaaggcctccaccccttggtgcctcaccttggtctcttttcagaagccagagcctttgttcataacacagtgctgcctgcagaagcccacttttccttgcagagacagcacaatgagaccattttctttttgctgagtttcccacacacagaaatcttgcaggtgcagcctgactttggagcccttcatttattattcatttatttccttgtaataccatttctgccgcactcaaaggacaagccctagaacaggcttcccacctgcaagttaa

SEQ ID NO: 5758 - DNA, 577 bp, Homo sapiens
  MAP TO AC016027.15; EXPRESSED IN ADULT LIVER, SIGNAL = 0.8; EXPRESSED IN HELA, SIGNAL = 0.54; EXPRESSED IN LUNG, SIGNAL = 1.1; EXPRESSED IN BRAIN, SIGNAL = 0.9; EXPRESSED IN FETAL LIVER, SIGNAL = 0.74; EXPRESSED IN PLACENTA, SIGNAL = 0.65; NT HIT: AB003138.1, EVALUE 5.50e-01; SWISSPROT HIT: P13776, EVALUE 8.40e-01; EST_HUMAN HIT: BF956934.1, EVALUE 0.00e+00
agacttccttctgggccttccccaaaggcagacaaaggttggtttgcttcctaatctcagtctccaggacattacaaacaaaggattcaaaatggtgttactactggagctggaattccgtgttctaacaagaatgaagaaaagagccaatcaagacccaaaaaatctgcctctcctcagctcaagaggaagaaggccagcctgctgttgccctctgtccctgcattccacagcaccaggctcttccctcacatccctctcctcacattcttaccttatatgattgaggccaaatatgcaaagccccgtctcccagccatgtacacagtagctgctggctgaggacactgctgccaacgccacaggccccagcgaacagccctgactcttatgtgatgatctgcttttgggtcctgtcactatctgcgcacacagcacacgtccacatgtatcactgaccaaccctaacagggcaagggtggggatgtcagagattagctccacaggacttggaccctacgtgaagattaaaaatttaaaatcaaactcgggcatttctgccatctgtaacccacct

SEQ ID NO: 5759 - DNA, 557 bp, Homo sapiens
  MAP TO AC004176.1; EXPRESSED IN PLACENTA, SIGNAL = 1.7; EXPRESSED IN HEART, SIGNAL = 1.6; EXPRESSED IN ADULT LIVER, SIGNAL = 1.9; EXPRESSED IN BONE MARROW, SIGNAL = 1.4; EXPRESSED IN BRAIN, SIGNAL =   2; NT HIT: AF336797.2, EVALUE 4.00e-14; SWISSPROT HIT: P04929, EVALUE 6.90e+00; EST_HUMAN HIT: AA557606.1, EVALUE 5.00e-02
acatttgcctacagttgggcaaaatcacttaacacaaatccccttgtatgataaagtgttgactatctcatgtaactggttgcatacagtacagtatagagtacagtatcagttgttaccatcataattgtgtggctgatgggagctgcagctcactactgctgtccagcaccgtcacagagtatcatactctctaacccaggaaaatatcaaaattcaaagtacagtttatactgaatgtgtgttgctttcacatcatcataaagttgaaaaactgtaagttgagccatcgtaaatcagggaccatctgcaccactatgtagggattatgctgttgtaattgaagtcccaagacaattgaccataaaacaggttatctggttgggcctgatctaaccacatgaactccttaaggggcagaaaaaacaaagatcaaagagaagttgggaagattcaaagcaaaagaagtattcagtgtaccatggctgtgtttcaagatggaggtggccatgagcaaaagaatgcaggtaacttccagaagctgagagcaacccttg

SEQ ID NO: 5760 - DNA, 508 bp, Homo sapiens
  MAP TO AL096870.3; EXPRESSED IN BONE MARROW, SIGNAL = 2.6; EXPRESSED IN PLACENTA, SIGNAL = 1.7; EXPRESSED IN ADULT LIVER, SIGNAL =   2; EXPRESSED IN FETAL LIVER, SIGNAL = 1.7; EXPRESSED IN BRAIN, SIGNAL = 1.7; EXPRESSED IN HELA, SIGNAL = 1.7; NT HIT: gi11434029, EVALUE 0.00e+00; EST_HUMAN HIT: AW875084.1, EVALUE 0.00e+00; SWISSPROT HIT: Q13546, EVALUE 1.00e-10
taggaagtggggctacgatgtggcggtcaagatcgtaaactcgtgagtgaccccggttgaccccagccgcaatctggccaaaaaggtggagccactgtgctctggggcctgaatggcgaagggagggattttcccacgaccccggtgcgactccagctctctcctggagtgtaggaaggcgatatccagggaggtcaaggccatggcaagtctggataacgaattcgtgctgcgcctagaaggggttatcgagaaggtgaactgggaccaagatcccaagccggctctggtgactaaattcatggagaacggctccttgtcggggctgctgcagtcccagtgccctcggccctggccgctcctttgccgcctgctgaaagaagtggtgcttgggatgttttacctgcacgaccagaacccggtgctcctgcaccgggacctcaagccatccaacgtcctgctggacccagagctgcacgtcaaggtcagctggtctacacccctctca

SEQ ID NO: 5761 - DNA, 564 bp, Homo sapiens
  MAP TO AC004493.1; EXPRESSED IN ADULT LIVER, SIGNAL = 1.5; EXPRESSED IN HEART, SIGNAL = 2.8; EXPRESSED IN FETAL LIVER, SIGNAL = 2.4; EXPRESSED IN LUNG, SIGNAL =   1; EST_HUMAN HIT: BG028717.1, EVALUE 0.00e+00; SWISSPROT HIT: P12111, EVALUE 9.40e-02; NT HIT: gi14777912, EVALUE 0.00e+00
ccagctctgcactcattcagtgcttgactctcccccagctctccctcacccctgctcttccatcatctcctccagctcgaggcatcgcagctcgacgcgccgcttgcgctcgtggtccaggatgtcaggattaggccgcttcaccagggcagcctccaggcgccgcagttcctcctctcccttgtagtcaggccgctcaccccggcggccccgcaccagggacaggttgcgctggacgtagccgttggtgccgctgccccggggcgtcggcagcccgatcccgttgtacatggccccgtgcccggggggggcaccaccgctcctgagggggagcggggagacacgggtcaggcccctggccccaaactaaccacttaccgccccacacccaagtccctgctctccttcatccctaattcaacattgatcttcacactaagtcttcgctgtataatgctccaccatcctcctggtctcccaagaaaaccacttctttgcccttccaaatttcctttctaccaaatcacagcccagttcttacagcctttctctcaatgcccttgc

SEQ ID NO: 5762 - DNA, 595 bp, Homo sapiens
  MAP TO AC005546.1; EXPRESSED IN ADULT LIVER, SIGNAL = 2.1; EXPRESSED IN BRAIN, SIGNAL = 2.2; EXPRESSED IN BONE MARROW, SIGNAL = 2.4; EXPRESSED IN PLACENTA, SIGNAL = 1.3; EST_HUMAN HIT: BI756406.1, EVALUE 0.00e+00; SWISSPROT HIT: Q9NXH9, EVALUE 6.00e-50; NT HIT: gi14763525, EVALUE 0.00e+00
gtcccctctgagaaacctccccttaatctccaaaatatcgtccctgaaatccctgcggaaaggctgaaggagcagaacccagggcctgctatgtggctgaagcccctctggatttgggcggcagaagagcccaggcagggagataaacttgtgtgacccccgcccaccagaagcctggacctccactcactctggattcctttggccccaagctgaatgcgagcaaactcggtgatcacagcacatctggtgggagacagaggactagctcataccccgcccccgccatccacactgacccactagccgatgccaggctaacgtctgacccctgctcacgtcaggtcccgattgaattcctgcaccgggttataaaagacctcgttggcactgggaaaggcgattttggcagccccctcggtgactgtcgtctcctggacttcacgtggacgttcttctccgtagggcccggtgccgttctccatcgctgctgtattcggcagccctggagactgccactcgaaaaaccgggctctagagagcacccgggcggagcggaaagtgaggcttagccacagagacgatccttgcatga

SEQ ID NO: 5763 - DNA, 503 bp, Homo sapiens
  MAP TO AC004212.1; EXPRESSED IN BRAIN, SIGNAL = 1.2; EXPRESSED IN PLACENTA, SIGNAL = 1.3; EXPRESSED IN HEART, SIGNAL = 1.2; EXPRESSED IN ADULT LIVER, SIGNAL = 1.1; EST_HUMAN HIT: BF355912.1, EVALUE 3.00e-03; SWISSPROT HIT: P34810, EVALUE 4.10e-01; NT HIT: S74425.1, EVALUE 1.20e-01
aaaaacaaacaaggggaggggtagcaggagaaaatttaaaaagaagaagaagaaaaacaaaaacaggaaagccgttgtttccctaaaagccccatcaagccgacttctaccggtgactcattacccagtcatgtggccacgcctggattcaaggcagtctgaggaggtgagtgtttcaaagaggcacatggatgccacagacaaaatcaagtttccatggttgaaggagaagaggacgatagagtttggggaggcagcaggctacgtctgccacagaagatataaagatatggagccacacgagaagatgggggaggctgccaaaaaagtccactgggtacagatgaggagcaggtgacattggagttgctccatctgaggagcccgcacctgcaatggcttgtgctcctgctcctgtgggtataggcacaaggctgatgccgagagagtgagttgtttctgttggggttcagaacacaataccccaaagtatggcgatgagt

SEQ ID NO: 5764 - DNA, 544 bp, Homo sapiens
  MAP TO AC010422.6; EXPRESSED IN LUNG, SIGNAL = 1.7; EXPRESSED IN BONE MARROW, SIGNAL = 1.2; EXPRESSED IN ADULT LIVER, SIGNAL = 1.2; EXPRESSED IN PLACENTA, SIGNAL = 1.3; EXPRESSED IN HEART, SIGNAL = 1.6; NT HIT: M63709.1, EVALUE 1.30e-01; SWISSPROT HIT: Q04605, EVALUE 8.80e+00; EST_HUMAN HIT: BI042037.1, EVALUE 7.60e-01
gtgggtgggttaggtggacaaaactggatcctagtgcctatgcgcccctttaaaacgaataaaaagacgtagttctcaaccagggacgtccttggtgatgctctgctggtcctgcagcctgagggctttttccagacgctttgacctgtgcacttctgcccccacgcggccaatgcctgaactgcagcaacgtcctgcagacccagtttccttttttggtaccaggcatatgcagggcgtggacagatcctacaatggaaccagccagagactgccctagagaaactcatatgccgggatttggatgtttgtaggataacatcatgagcagcagctttgcaggaccacacatgttccagggagattctcagaggagggatctttgggcagtgtctccaaagaccagtaagaatatttcaggaagacacaacaagaaaaaatattctaggcaaagtgaaaactgacattgataccccgaccccaacccctcttaactgctacttccgacctgggtcgtggagctaccattcaagccctataccca

SEQ ID NO: 5765 - DNA, 552 bp, Homo sapiens
  MAP TO AF196971.1; EXPRESSED IN BRAIN, SIGNAL = 2.3; EXPRESSED IN FETAL LIVER, SIGNAL = 3.7; EXPRESSED IN PLACENTA, SIGNAL = 2.7; EXPRESSED IN HEART, SIGNAL = 3.2; EXPRESSED IN ADULT LIVER, SIGNAL = 2.2; EXPRESSED IN LUNG, SIGNAL = 2.4; NT HIT: gi14760233, EVALUE 6.00e-90; SWISSPROT HIT: Q9UBN7, EVALUE 7.00e-15; EST_HUMAN HIT: AW806812.1, EVALUE 2.00e-87
ggcttcagtttcctgtgctctggaagcccttgagcccttctgggaggttcttgtgagatcaagtaggaagtggggtgtgggcctggtgtggggtggacgtgggatgagccctgggggagactgtcttcagacttcctctgactttactgggctgccttggtgggagagggtcaggccctctctctctccctgggccctggtttcaggcctcccacccctttttctgtttgggtcacctgagttccagagtatgacggggattcagattgagagggtaggacaaacgtggcctcccccttttagctgagaccgtggagagggacaacatggaggaggacaatgtagaggagagcgaggaggaaggaccctgggagccccctgtgctcccaatcctgacatggccagtgctacagtctcgcacagggctggtctatgaccaaaatatgatgaatcactgcaacttgtgggacaggtaggcatttggagggctggatgagtaggtgttgggggtccctccccctcaggcactaagcctctacctctcgtttcccc

SEQ ID NO: 5766 - DNA, 598 bp, Homo sapiens
  MAP TO AC018359.7; EXPRESSED IN FETAL LIVER, SIGNAL = 3.5; EXPRESSED IN BRAIN, SIGNAL = 2.9; EXPRESSED IN BONE MARROW, SIGNAL = 2.3; EXPRESSED IN PLACENTA, SIGNAL = 2.8; EXPRESSED IN HEART, SIGNAL = 4.7; EXPRESSED IN ADULT LIVER, SIGNAL = 2.8; NT HIT: AF045453.1, EVALUE 1.40e-01; SWISSPROT HIT: P27315, EVALUE 1.50e+00; EST_HUMAN HIT: BG720112.1, EVALUE 4.00e-06
tgaaaaaggaatacccaaaaattgaatacaaaaagaaactaattaacctaatgcatactacactgatagaaaaaggcacagagattaattgacctacttttaaacatagtaacctgactgtacagtcttaatggcatataagaacaacaaataagtaaataaatcttgaacttgaattagtagattcgttgttagtgatggtattgatgtatttctgaaactggaacgcattataggaaagagaaaatatattgctgttgttgaaattctgctaatagttggtattgatgttgtatttctgaaactggaacacattataggaaagagaaaatatattgctgttgttgaaattctgctgataattgggagaaggaaattaataatacagaatgtgagaaggataggaaaaagttgtgatgttagaattgaagttgaggtattataaactcaatattttttaaagtggccacaatttatgcaaacttatgtgtaacaggttttttaaaatatatttttaacttttattttaaatttagggggtatgtgtacaggtttgttacctgggtatattgcatgaacgctgacatttgggatacaa

SEQ ID NO: 5767 - DNA, 525 bp, Homo sapiens
  MAP TO AC009086.5; EXPRESSED IN PLACENTA, SIGNAL = 2.4; EXPRESSED IN ADULT LIVER, SIGNAL = 1.3; EXPRESSED IN BRAIN, SIGNAL = 1.6; EXPRESSED IN BONE MARROW, SIGNAL = 1.6; NT HIT: gi14775898, EVALUE 1.00e-111; SWISSPROT HIT: P07954, EVALUE 1.70e+00; EST_HUMAN HIT: BF819829.1, EVALUE 0.00e+00
gggcctgaataaaccaacacattaaaaaggaaaagaataattcacataccagcgtgagtaaattcaagactgagatgatataattggtaccacaagtctggcaattctccagttggtctaatccatatgtaatgaccatgtcacaatgtatagtcatgctaggatccaagctgccgagcaaaacaccaacacactcattagcagctgtcaacacagcctcagaaaaaaacacctggtttgcagccgtcacacatctcattactctgtacagaacctgtaaatggggaaaacaagcagctttttacaaaaattcacgtgcttccacaaagcaagaaaatactttttatttaatgcaatttcaactgaaaattaactgcttgccttgccagcagtctcttaatattctagttctcagtagctgaataataatgatccctttactacaatatgtaaacatgatcttggctaaaaaatcctaaagtgctactatgacaggaaatggaacctgccatcctctatttccca

SEQ ID NO: 5768 - DNA, 503 bp, Homo sapiens
  MAP TO AC016605.4; EXPRESSED IN PLACENTA, SIGNAL = 0.97; EXPRESSED IN ADULT LIVER, SIGNAL = 0.91; EXPRESSED IN HEART, SIGNAL = 0.98; EXPRESSED IN FETAL LIVER, SIGNAL =   1; EXPRESSED IN HELA, SIGNAL =   1; EXPRESSED IN BRAIN, SIGNAL = 0.85; EXPRESSED IN BONE MARROW, SIGNAL = 0.61; SWISSPROT HIT: O13815, EVALUE 4.60e+00; EST_HUMAN HIT: AA459457.1, EVALUE 0.00e+00; NT HIT: gi7705936, EVALUE 1.00e-105
cctcattatatgatgtgcctcaagaagagttatgataatgtaaaactgagtgaacatagactccacactaaggttcaaactgctaaatgattattagtaaagttataattggagtgattatattccaatatgaatttggggaaaatacattttaatttttatttatttatttttctacagcttttggacttcttggatcagcatcctttttcatttactcctctaattcagagatcactggaattttctgtaagctatgtttttacagaagttggtgaaggcgttacatttgaacgattcattgtccaatgtatgaatcttattaagatgattgtcaaaaattatgcttataagccatccaaaaattttgaaggtaattcctttattggcagtttaaaagaattattttaatcttaagtgtgatataattgctataattacaaactttttaaaaaatgtcattttagtctgaaaaataaattgttgctgggacatgaaaaaga

SEQ ID NO: 5769 - DNA, 586 bp, Homo sapiens
  MAP TO AC005204.1; EXPRESSED IN BRAIN, SIGNAL = 0.79; EXPRESSED IN LUNG, SIGNAL = 0.85; EXPRESSED IN FETAL LIVER, SIGNAL = 0.66; EXPRESSED IN PLACENTA, SIGNAL = 0.77; EXPRESSED IN ADULT LIVER, SIGNAL = 0.69; SWISSPROT HIT: P13688, EVALUE 4.00e-28; EST_HUMAN HIT: AW375748.1, EVALUE 2.00e-84; NT HIT: U06673.1, EVALUE 0.00e+00
ttaaagagttgggtgggctgagaggtgggagatgccaactctgattgaaagatgcccatgggggaatcaaaggtgccacgcagggcaatcttctgttatctgcacagcagagctgtccaagccctccgtcaccagcaacaactccaaccccatggaggacaaggatgctgtggccttaacttgtgaacctgagacccagggcacaacctacctgtggtgggtaaatggtcagagcctcccggccagttccaggctgcagctgtccaataacaacaggaccctcactgtactcaatgtcacaaggaattacacaggaccctataagtgtgaaatctggaatcgagtgagtgtcagtcacagttaccctgtcaccctggatgtcctctgtagcccaggctgccaacccaaattgacatggccagaatccaggcctctcagtccttctcaggtccaagaacagagactctcagccctggatatcaaagctgtccatgactgcctgccccaggcaaattttggtaggcccagccttaaccaagaataagagaggaatgggatgctcctgtcacaggagacttgaggtccc

SEQ ID NO: 5770 - DNA, 516 bp, Homo sapiens
  MAP TO AC004790.1; EXPRESSED IN HEART, SIGNAL = 1.6; EXPRESSED IN BRAIN, SIGNAL =   3; EXPRESSED IN LUNG, SIGNAL = 1.6; EXPRESSED IN FETAL LIVER, SIGNAL = 1.3; EXPRESSED IN ADULT LIVER, SIGNAL = 2.8; SWISSPROT HIT: P23323, EVALUE 1.60e+00; EST_HUMAN HIT: AA889338.1, EVALUE 4.00e-98; NT HIT: gi15296404, EVALUE 1.00e-04
tctcattggagaatccaggcaagatcttgaagcaggtgcatgaggtcctgagcctgtgcagcaaacagcactcatctggggttggcacgaaggggtctacagagccacggccaccgcagcctcttcccggccccatctgtgcagtgcaagtgatccacgcctgctcctaaacccagcccagcaagcagcagcagcccgggcccccaagcccgccaggccaatgtgctgcccagaggcttcgaggccctgcccgctgtacctcccaccacctggaagctgcctcctgacgccttccagccactgctgcagccgcaacaggtgtcgcggccagtgcaggctttccagacggtggcagcgcccagcagccgttgcctcagctctttggtggcagccaggccaacaagggcagcaacgatgactaggatgatgagtgagcaaacagctccacactggtggacaggctgggtgcgcacccggtggtcctcaaaggctcgctgggcctgtaccaccgttata

SEQ ID NO: 5771 - DNA, 551 bp, Homo sapiens
  MAP TO AC005262.1; EXPRESSED IN BRAIN, SIGNAL =   4; EXPRESSED IN LUNG, SIGNAL = 6.5; EXPRESSED IN BONE MARROW, SIGNAL = 4.5; EXPRESSED IN PLACENTA, SIGNAL = 2.4; EXPRESSED IN ADULT LIVER, SIGNAL = 3.2; EXPRESSED IN HEART, SIGNAL = 2.4; SWISSPROT HIT: P29992, EVALUE 1.00e-29; EST_HUMAN HIT: AW296533.1, EVALUE 1.00e-100; NT HIT: gi13632721, EVALUE 1.00e-100
tggttccagtaagaccctggcttggtggaagatgggaagggcgctttgtaaactctttccgaggagtcaggaggccgtggcgtctggtggagagacggtcagcctcacgtgccttggtttcctgtgctgggtgctgcagcacggcagggtctgggtaagagggggcagcagcacgagagtcaggccccggctgccgcccgccctcacgtgccccgtcccccaggcacgggcgagagcgggaagagcacgttcatcaagcagatgcgcatcatccacggcgccggctactcggaggaggacaagcgcggcttcaccaagctcgtctaccagaacatcttcaccgccatgcaggccatgatccgggccatggagacgctcaagatcctctacaagtacgagcagaacaaggtgagcccgcgggcgcctggggaggggagcgcctgggcagctgtgggcttggtggtgagcatggtggccgcgctgccagggtggggccatgccgggggtcccggccggcccaggctacccctggtcatccatccgttcctgtc

SEQ ID NO: 5772 - DNA, 506 bp, Homo sapiens
  MAP TO AJ250235.1; EXPRESSED IN LUNG, SIGNAL = 0.5; EXPRESSED IN PLACENTA, SIGNAL = 0.51; EXPRESSED IN ADULT LIVER, SIGNAL = 0.48; NT HIT: AJ250235.1, EVALUE 0.00e+00; SWISSPROT HIT: P22830, EVALUE 2.00e-06; EST_HUMAN HIT: BF372259.1, EVALUE 6.00e-94
aactggaggccacagatgtccccgaataggtatctgtgtgacggcagtgaaaagagccatagtatttacctttgtatggaacagattagagtttgctggctgaaccaagagtccaccctggaagaaaataagaagtgtgacaaatcaaccgttgtattttattttatataggaagccgaaaactggaatattaatgctaaacatgggaggccctgaaactcttggagatgttcacgacttccttctgagactcttcttggaccaagacctcatgacacttcctattcagaagtgagatatatataaacacctcgattataaccttggcactacattgacatgtgtctctcaattctgtagtttcaaaccagtaaatagttttaatgcgtatctggtaatggttaaacagcagcattgttttctgttggatatcagaaggatatgatatcagaaaattgcagggggagagagcaaataagttagtggggattctccttgagcccttt

SEQ ID NO: 5773 - DNA, 599 bp, Homo sapiens
  MAP TO AF004877.1; EXPRESSED IN ADULT LIVER, SIGNAL = 2.1; EXPRESSED IN LUNG, SIGNAL = 4.3; EXPRESSED IN FETAL LIVER, SIGNAL = 5.9; EXPRESSED IN BRAIN, SIGNAL = 2.1; NT HIT: AF004877.1, EVALUE 0.00e+00; SWISSPROT HIT: Q01149, EVALUE 5.00e-04; EST_HUMAN HIT: AI751985.1, EVALUE 7.00e-54
tcagttttgtcccttcgaccaataataccattcccctgtactcaatttaaatatgaacagggtacatttcctagagaacttgagcttctctttaccttgacccacaaatattctaagagatttgtctgcaagagagtttcaacaaatgtttgtcctttgaccactgttctgtattgaaccctagggtgagcctggtccagctggctccaaaggagagagcggtaacaagggtgagcccgtaagtagctctatcatcacacttttataaagttaattgtttttctcattccagtttctccagctggacatagtattaaaattattttttttactccctcttcttttgttcttttcattaaacagggctctgctgggccccaaggtcctcctggtcccagtggtgaagaaggaaagagaggccctaatggggaagctggatctgccggccctccaggacctcctgggctgagagtaggtttcaaatgctcccaacaccctaacacaccagaggcagattatgataccccttcattgggaattggtcaaaattactgactgtgttttcttaggcaaaaaaagcatctgctttccatctgcct

SEQ ID NO: 5774 - DNA, 552 bp, Homo sapiens
  MAP TO AC010252.3; EXPRESSED IN LUNG, SIGNAL = 0.58; EXPRESSED IN BONE MARROW, SIGNAL = 0.96; EXPRESSED IN ADULT LIVER, SIGNAL =   1; EXPRESSED IN BRAIN, SIGNAL = 0.79; NT HIT: gi14764080, EVALUE 2.10e+00; SWISSPROT HIT: P20293, EVALUE 2.30e+00
tgccatccaattagatttcctctagtttgggatgtgtatatttgatttttgaaaccttgatcatgagactttcatttcttcttgtgaaatttcagctttctcagttctggcatgtttggcctgtccagatagttttgaattctgacctggtcgtctgtcttgtcagccttccctctgggccacaagtcattctttgatacatgcagcccgtcagccactcaggttctttgagtcattaactggtgctgctctgttagcctccccttgtcattctcctccagtcctcttagtaaccaagggtgcgtcagcctttgcaggcggccggagggcagagggttggagtctgtgccaagatacagaggaagctaatcatacccgtgacctcgacctcattaacattgtgctggaaccaaagagccagcattccatggtattgtttgactttggattgtctctgctgatttacgatcacgaggtctatagtcctgccctcgaagggaggcagatgttagagccagatgagaatgtgagacacaatcagaacttactgcc

SEQ ID NO: 5775 - DNA, 552 bp, Homo sapiens
  MAP TO AC004173.1; EXPRESSED IN ADULT LIVER, SIGNAL = 0.76; EXPRESSED IN BRAIN, SIGNAL = 0.71; EXPRESSED IN PLACENTA, SIGNAL = 0.57; EST_HUMAN HIT: AI346483.1, EVALUE 3.00e-59; NT HIT: AF055066.1, EVALUE 0.00e+00
caagtgctgggtatatgggggacccagtgtgactgacacaaacagggaaagggcatgaggagctcagtcctggtggactcgaggcagacgatggtgctgaggctgtgggagatgaaggaggaggagcaggggtggctgtcacctgggctctctccatggaggtgaagacagtgaggtggttgggtcttagtgctgtgtggaccttctgatgactggatggagtgtctgagggaggaggggtcttagaggattcactcgtgaccctgagggagggtatgttctcacttcaggtctcaggtgtgccctgacacctttctttgtggcttagggctccctactgtaaattattggggattagtaccttttggaatttgtaacttaaagcagaaactcagatggtcgaaatgtcattttcatgaaggtttgttattagcgtatcatttagattgtcttgcaaaagtctcattttttgttgtttttctaaagggctgtcgatcttgttttaaatttacaaatattgataatttatctccactgttaattggttggggg

SEQ ID NO: 5776 - DNA, 535 bp, Homo sapiens
  MAP TO AC010327.5; EXPRESSED IN FETAL LIVER, SIGNAL = 1.7; EXPRESSED IN BRAIN, SIGNAL = 1.6; EXPRESSED IN PLACENTA, SIGNAL = 1.9; EXPRESSED IN HEART, SIGNAL =   2; EXPRESSED IN ADULT LIVER, SIGNAL = 1.8; SWISSPROT HIT: P23467, EVALUE 2.00e-08; EST_HUMAN HIT: BF675639.1, EVALUE 4.80e-02; NT HIT: AF275148.1, EVALUE 0.00e+00
agtgatggagaactggacggtgcgggaactgctgctcctccaggtgcgtgtgtccagccccgtcctggccctcagccttcccctgtgacatatgccatgcatccaggaccctccaccaactccaaccttccacccactcctctgaggagctgcagtgtgccccagggaacccgctcctggtgctagaagccaggtcctccctacattcatctccagagcctgtgagtgctccctccttccaggtggaggagcagaagacactgtctgtgcgccaattccactaccaggcctggccggatcacggcgttccctcctccccagacaccttgctggctttctggaggatgcttcggcagtggctggatcagaccatggagggaggcccacccattgtgcactgcaggtggggaccagcccaggaccctctcccttgagagaaccgctcccttggggctcagacagttgtgttagacgggaccctgggaacgtacaggggaggtgaagagggagagaaggaggaggtggatgtggaaga

SEQ ID NO: 5777 - DNA, 506 bp, Homo sapiens
  MAP TO AC067969.1; EXPRESSED IN HEART, SIGNAL = 2.2; EXPRESSED IN FETAL LIVER, SIGNAL = 1.8; EXPRESSED IN PLACENTA, SIGNAL = 1.8; EXPRESSED IN ADULT LIVER, SIGNAL = 1.8; SWISSPROT HIT: P21817, EVALUE 1.00e-39; EST_HUMAN HIT: BI549601.1, EVALUE 1.00e-125; NT HIT: U48484.1, EVALUE 0.00e+00
aggttggagatgctgtttgggagtcgggctgggaacggagtttggggcctgtgtcagaggccggaggtggcatcagagcccatcgcacccctgcagtgttcgcacagcccattgtgagccgtgcacggccggagctcctgcagtcccacttcatcccaactatcgggcggctgcgcaagagggcagggaaggtggtgtccgaggaggagcagctgcgcctggaggccaaggcggaggcccaggagggcgagctgctggtgcgggacgagttctctgtgctctgccgggacctctacgccctgtatccgctgctcatccgctacgtggacaacaacaggtcagcggggccccgctgtccccatgccctccgccccgacctcccacgtcctccagccccatctgatctccgcctcctgactggctagaaacttcttccaatgctctggccccaccaaccttctgactcttcctcctggtttcttctggctttgagcacattggtccaa

SEQ ID NO: 5778 - DNA, 566 bp, Homo sapiens
  MAP TO AC026404.4; EXPRESSED IN BONE MARROW, SIGNAL = 1.1; EXPRESSED IN ADULT LIVER, SIGNAL = 0.93; EXPRESSED IN PLACENTA, SIGNAL = 2.4; EXPRESSED IN FETAL LIVER, SIGNAL = 0.8; NT HIT: M37818.1, EVALUE 5.40e-01; SWISSPROT HIT: O93375, EVALUE 1.10e+00; EST_HUMAN HIT: BG696618.1, EVALUE 2.00e-01
agtgggtgcaaagtgaaaccacatggcctacttacaaataagtgaggtgcgagtggcaggcccttgtaccttctccttccttctcctgcccccgctcctctccctgcaggctgaggggaaagcccctggactcacacgtcgggtggtatggttgtggtttccgcacagtgctttgttaggtggagaagagggaagggcaaaaggcatccctgagcctgttgcctggcaggtcttgaaagtggggtcgtgtagggggatgtgccttctaccttgttaccagagccagaatcctgagaggagctgagaacagtgagtggaagtggatcctttgagaagaggcccaaagaactgaaggctgtttgcttcaggaagcctggagaccctttgcacacatacttgatgaatccatctgaccagtgggttcggaattttgaagaaaaatgcatcctaatgctttcaagatatcgagccctccattggtatccaattttgctctccatttgctctacgagaaaactgaggccccggtgtgccaacatcatagaggcagagccaggataggaatg

SEQ ID NO: 5779 - DNA, 576 bp, Homo sapiens
  MAP TO AC018452.11; EXPRESSED IN LUNG, SIGNAL =  13; EXPRESSED IN FETAL LIVER, SIGNAL = 9.4; EXPRESSED IN BRAIN, SIGNAL = 7.7; EXPRESSED IN BONE MARROW, SIGNAL = 5.3; EXPRESSED IN ADULT LIVER, SIGNAL = 6.6; NT HIT: gi14730556, EVALUE 1.00e-82; SWISSPROT HIT: Q12774, EVALUE 4.90e-01; EST_HUMAN HIT: AU125271.1, EVALUE 1.00e-82
tagagttgctccccaacctgttctcaactggaccaacttttttctgttttacacaaaaattttatggtagaaggagtctgaaaaacacagaatgagaataaaaacagtgctaccttctcagggatatcataagaattgaatgatataaatgtgtaaaatgcttagaacagtggctcaatagaggttggcaagaattatgatgcagataatgattcgtctgaaactacataagcaatttaaagaaaatgaaccatagatgcaattatgattcagtatgtagaaactatacttccaacatttctagcttttaaaggatgatcaccctaacaggcatctgaattacagaactttaaaactggaatgtctagtcagcaacaccagataaagacttacctcttcttcttggtgataatgagcacatcgttaaagagaaagaagtagacttgctgtttggatgtccttcttgagaaaagcacagtgtcttcaacataggctgtcaattcacctctttttaccaaccaccgggaagaggagactaaaggaaaaggctacaaaaggagaaaaacccagtgacca

SEQ ID NO: 5780 - DNA, 542 bp, Homo sapiens
  MAP TO AC004794.1; EXPRESSED IN BRAIN, SIGNAL = 0.74; EXPRESSED IN FETAL LIVER, SIGNAL = 0.47; EXPRESSED IN BONE MARROW, SIGNAL = 0.83; EXPRESSED IN ADULT LIVER, SIGNAL = 0.63; NT HIT: AF415235.1, EVALUE 8.10e+00; SWISSPROT HIT: P45481, EVALUE 6.80e-02; EST_HUMAN HIT: AL120991.1, EVALUE 0.00e+00
ctcactccccttgctctctgccaggccacccagcccagcgcccagagcccagccctccagagccagagccccaggctcccgaagggtcccaggccggagcagaggggccctccagccccgaggcatcaaggagccctgcacggggagcctacctgcaaagcctggagcccagtagccgccgatgggtgctgggtggggccaagccagctgaggacacctctttagggcctggggtacctggcactggggagcccgccggcgagatctggtacaaccccatccctgaggaagaccccagacctccagcacctgagcccccggggccacagcctggctcagctgagtcagagggcctggccccccaaggtaagaacaagcttcccatccccttccccaaggtgagcaccagctccacatcccttcccttcagggtagcaccagcctcacactccctcctcccagaggagcaccaacctcacactccttcccttcaggggagcaccagcctcacatccccaccccgtcagatgctcccagaggag

SEQ ID NO: 5781 - DNA, 510 bp, Homo sapiens
  MAP TO AL021182.1; EXPRESSED IN BRAIN, SIGNAL = 1.2; EXPRESSED IN FETAL LIVER, SIGNAL = 1.5; EXPRESSED IN PLACENTA, SIGNAL = 1.1; EXPRESSED IN HELA, SIGNAL = 0.72; EXPRESSED IN BONE MARROW, SIGNAL = 1.4; EXPRESSED IN HEART, SIGNAL = 1.1; EXPRESSED IN ADULT LIVER, SIGNAL =   1; NT HIT: AF213884.1, EVALUE 5.00e-04; SWISSPROT HIT: P29704, EVALUE 1.20e+00; EST_HUMAN HIT: AI079530.1, EVALUE 3.00e-03
agaattcccccaaccttgacacctaatcaagttcctcttccccaaacccttgataactaagttccttttagaaattctctatccactgactccctcaccctgtgtactggctagaaatcctcagctgttcctgttggattcggagttgcatttcatatctttcccttttgcaatagccttgaataaagtcttccttactgattcaacttcatccagtgctatctttctcaaattttatgagtcatgacacagttccaggggcatgacttggatagaataggattcattcctggatcaccagacgtttcacccaggtaaggtcttgggttttctccagggtacacacctttgaagcgtttttcttcacttctgacttattcatccaagattcgttagtaagtctgacttctgatccagtgctctgaatgatagtttgttgatgcatggtaatgacagattttgatttttaggattctgagtatagttctgagtctgggttagagtgccagc

SEQ ID NO: 5782 - DNA, 549 bp, Homo sapiens
  MAP TO AC022103.4; EXPRESSED IN FETAL LIVER, SIGNAL = 0.48; EXPRESSED IN BRAIN, SIGNAL = 0.59; EXPRESSED IN HELA, SIGNAL = 0.57; EXPRESSED IN PLACENTA, SIGNAL = 0.66; EXPRESSED IN ADULT LIVER, SIGNAL = 0.6; EST_HUMAN HIT: AI991025.1, EVALUE 0.00e+00; NT HIT: gi14784508, EVALUE 7.00e-19; SWISSPROT HIT: Q98943, EVALUE 1.80e+00
attccagaaaatgcccagtggggagaaagacattgctgcgcgagctagtcccgcccaggtgcttcagctcaaagactacttgtagccagatggaaatgttttttctgtttgattagggaactggtcgaggtgcctggcttgagagaacaccagacaaccaaaggccacatgtggaattagcaatccactggtcccccaccaatgtacagcggcgggtgctggtgcaggtggatattggcaaagattgcagccttgtttacgggaacccggataagtttctgggcaaggttgcatagacagctctgaaggccagtcagtgaaagtgaaacctgtatctcgcacctaggcattggccgtttggctccccacttatgcactgtgcatgtctctcccatacctgaatacatcctgggggtggatattttggacggcttggcagctgtgccgtttatcatggacttgatggaccgcttgacagaactgggccagtaccagtgtgtggtggacttggctaatgcattattttctggagagccaggaacagtttgc

SEQ ID NO: 5783 - DNA, 542 bp, Homo sapiens
  MAP TO AC011749.2; EXPRESSED IN BRAIN, SIGNAL = 1.1; EXPRESSED IN FETAL LIVER, SIGNAL = 0.82; EXPRESSED IN BONE MARROW, SIGNAL = 1.1; EXPRESSED IN PLACENTA, SIGNAL = 0.75; EXPRESSED IN ADULT LIVER, SIGNAL =   1; EST_HUMAN HIT: AW237002.1, EVALUE 2.00e-87; NT HIT: Z70664.1, EVALUE 1.00e-97; SWISSPROT HIT: P10272, EVALUE 8.00e-28
ggctgattagttgccctcactcaagcttccgatagggcaaaaataaatgcattaacatctacactgacagcagatatacgtttgctactgtccatgtacacagagccatctatcaggagcatgggctactcacctcagaaggaaaaactatcaaaaataaagaagaaattttggccttgcttgaagctgtttggttccctcaacaggtggctgtaattcactgcgaaggacaacaaaaagaagatatggtcattgcttgtggtaaccaaagagcagattctgcagctaaaaagacagctcagtttccagtcatgcctttgactctgctgccctctatatcctttctgcagcctgactttcgagaccacccagaatactccctagaggaggaaaaagaggcttcagatcttcaggccagtaaaaatcaggaaggttggtgaattcttcctgatcccagaatcttcatgccccaagtcctcggggaaactttaaccagtcatctgcattctaccacacatttgagagcaataaaactggcccag

SEQ ID NO: 5784 - DNA, 523 bp, Homo sapiens
  MAP TO AC004224.1; EXPRESSED IN HELA, SIGNAL = 0.64; EXPRESSED IN FETAL LIVER, SIGNAL = 0.4; EXPRESSED IN PLACENTA, SIGNAL = 0.81; EXPRESSED IN ADULT LIVER, SIGNAL = 0.66; SWISSPROT HIT: P08547, EVALUE 4.00e-03; EST_HUMAN HIT: AI435988.1, EVALUE 6.00e-97; NT HIT: gi14778034, EVALUE 4.00e-97
gaaaagcagcggagctgtagcagactccttccacttcagagctcaagaaatcaacgctccatcgcccactacaaggcttttgttgtccttacctttgagccaagatcaaacttgaacttgttgacatcttcctctactatttcagagccctccatccccttggtcttcatagcattataaaggacagatgtgatcttcagcagctcttttaccgcatacccatctgcttgataaagcttcttagtgttgagttttatatgtgccttggtggcctatttttagaccaaaaaaaaaaaaagttgaaggccctttccatgtaatgtctaaactaaatcccatgtaggtgagttgaaaatgcctctgctgacaactgggatataacctaataaaagcaaagcattcaagtgactcaaacattgtgagtggttgtataaactgggacaatcttgatggagagcaatttggtaaaagacatcaaaattacaaatgcacatatcttttgacccagcaatcccaaatctaa

SEQ ID NO: 5785 - DNA, 542 bp, Homo sapiens
  MAP TO AC018514.6; EXPRESSED IN FETAL LIVER, SIGNAL = 1.6; EXPRESSED IN LUNG, SIGNAL = 0.69; EXPRESSED IN BRAIN, SIGNAL = 1.3; EXPRESSED IN BONE MARROW, SIGNAL = 1.2; EXPRESSED IN HEART, SIGNAL = 1.9; EXPRESSED IN ADULT LIVER, SIGNAL = 1.6; NT HIT: AB044709.1, EVALUE 5.00e-04; SWISSPROT HIT: P04778, EVALUE 1.70e+00; EST_HUMAN HIT: BG611763.1, EVALUE 4.90e-02
ccaactcctcgcttcacttcacctgtgcctccctggtccgcgcacttcgcaggcgcccgcccgcctctcggccacctctgcagcctgccaggcacctcctcttgcgctctcgctgatttcgcccacccacctccctccaccccgtgccacgttggtttgggtggctgctccgcaccgggttcctcctcctctcctctttccctccagtccttcttattctcttcctctggctgcggtggctgctgctgctgctggttttcatccagttgggaaacccaggaagccggcggctgctccgtggcgctagtccagcacgcccagggttaaaagcctcgcgcccttccgcggagactcccaggaacacccgaagaactcttccacctgcagcccccttttgcctggcagttctgcattgcatctcatggaagtggaaacaggaaaataaaaatgttcaaactccttggatgttgggataaactcacctgaacccacttgggttcgggctgcctccttctcttccttcattgccacctttcctctgt

SEQ ID NO: 5786 - DNA, 548 bp, Homo sapiens
  MAP TO AL035532.1; EXPRESSED IN BONE MARROW, SIGNAL = 1.4; EXPRESSED IN PLACENTA, SIGNAL =   1; EXPRESSED IN ADULT LIVER, SIGNAL = 1.1; NT HIT: gi14737280, EVALUE 6.00e-13; SWISSPROT HIT: Q9EXD5, EVALUE 8.90e+00; EST_HUMAN HIT: AW792964.1, EVALUE 2.00e-16
agcctgacctccaatgtgactgtattttgaaatagggcctataaggatgtaataagagttaagtgaggtcatgaaggtaagatcttaatcccatcggagtggtgtctttataagcaaagaaagagagtctaagtgtttttctctctccttgtttgcagagaagagactacgcaaggacatagtgagagggcagccatctgcgagccacaaacagaggcctcaccagaaaccaaccctgcaggcaccttgatcttggacttccagcttgcagactgtgagaatatacatttctgttgggtaagccatccagtctgtagtactttattatgacagcccttatcagactactacatagagtattcgggcatttgtaggcacttacctgccatgctggctagtttcaattgcgagtgcttgggagaaacatgagctttacttttcttttcttttttttttttttcactccatctgcctctgtgtttagaattctctgtttttctaattatggagctaacctctcaactccttgaatgaagaggctgaatgcc

SEQ ID NO: 5787 - DNA, 571 bp, Homo sapiens
  MAP TO AC019209.3; EXPRESSED IN HEART, SIGNAL = 1.6; EXPRESSED IN ADULT LIVER, SIGNAL = 2.2; EXPRESSED IN BRAIN, SIGNAL = 2.5; EXPRESSED IN HELA, SIGNAL =   3; EXPRESSED IN FETAL LIVER, SIGNAL = 2.3; EXPRESSED IN BONE MARROW, SIGNAL = 1.8; EXPRESSED IN PLACENTA, SIGNAL = 2.2; NT HIT: AE001127.1, EVALUE 5.40e-01; SWISSPROT HIT: Q9PK66, EVALUE 6.30e-01
aattatgaagggggacagccatcggttttcttgttattcaatgattagacacagtgcagtagactaaagaatgcccccgcgacatgggcacggtggagggcagttcccattaccgcagcttccacaagccctccactcggcagaagcagatgaagggctgtgcttgctcctccctcgactatttcctctctttgttttccttctctccctcccttattggttgcattcacattgcccgttgcacagtattcattatactcctgagcccgctcggttctatttactgaggagcctccattcattgtgggtgtaaacagaatacatccgattttgtccaataaataactgcctccaaatatttctgtggatcttctcctttcctccttgctgatcaacttcttaagaacgttttcagctgtttttttgttattaaaacagtctaatgagtgtttaagacatggtaatatttgttttaaaaatttcagtgccgctggattcaagcatttattccttttctgtccttggctcaggcaaactcaccgtaagtgcatgtgtgtggtggacacagagg

SEQ ID NO: 5788 - DNA, 558 bp, Homo sapiens
  MAP TO AC020939.5; EXPRESSED IN HELA, SIGNAL = 0.63; EXPRESSED IN BRAIN, SIGNAL = 0.51; EXPRESSED IN ADULT LIVER, SIGNAL = 0.76; NT HIT: U72057.1, EVALUE 5.30e-01; SWISSPROT HIT: Q22127, EVALUE 4.00e+00; EST_HUMAN HIT: BG436476.1, EVALUE 2.00e-01
tccagatccttcccattgagcaacagaatacaggggctccctcttctatgctgtagtagctatccattctctttcttttcctcagaacccagcacccaagtttttctctggaatattacccctcatcaaattgtagtacatttgggtctggtattgttgattgctactatctccaggggtgggcctatgattcaaacatgaacacatagcactcccaagaccgtagttattatttcaggaaagagcacaaagcctaattcaggccagcaattttactttgaattgttgagcaagagaaacactcattgtttcagtgatcttggaggtagagatcctctgaccaccatcttgcccatgggaagcaagagtctctctggaaatggagccaacatacactaaggaagaagagaaagaaagagtgactgggtcctgaaatatacagccaaatatgaaagcagattacttcctgcacttttcagttgtataagtaatgcattcttttattttccaccttaattttgcttgggctgcatttactgtcacttgcagccaaaacaa

SEQ ID NO: 5789 - DNA, 508 bp, Homo sapiens
  MAP TO AC004185.1; EXPRESSED IN HEART, SIGNAL = 1.1; EXPRESSED IN ADULT LIVER, SIGNAL = 0.95; EXPRESSED IN FETAL LIVER, SIGNAL = 0.73; EXPRESSED IN BRAIN, SIGNAL = 1.1; EXPRESSED IN PLACENTA, SIGNAL = 0.99; NT HIT: AL161574.2, EVALUE 4.80e-01; SWISSPROT HIT: P26808, EVALUE 2.10e-02; EST_HUMAN HIT: BG285887.1, EVALUE 7.10e-01
acacaccaaaggcctacacccctaagttttactgcagcagaagttggtcagctgcatggtagagtgaaaatcctagtctggagtttgctattaacaccaatgacagtgtcgtgtttggtagacagaggcccagggcagacagtgagaactgacaggccagcctctgtctttaaaaggatattgatatttttgcctgtcatgtccagggtcatccgaggctccattgctgtgactggggctgattgccacataggagctgttttttgcctttggtctctttagtctttagccagggacaataaggaattaggagtccctcctcccttcagagttggagacagtccttcttccattgcccttctttgtcacattgatgacaggctccagagggtttgcaagcctgaaggcctttgttacttacttagctccggtgtccaggctttttataagtgcaggaatagcccttgggttccactcaggatgacctggaggtgggagttttcgcata

SEQ ID NO: 5790 - DNA, 529 bp, Homo sapiens
  MAP TO AC003966.1; EXPRESSED IN BONE MARROW, SIGNAL = 0.64; EXPRESSED IN PLACENTA, SIGNAL = 0.58; EXPRESSED IN ADULT LIVER, SIGNAL = 0.5; EXPRESSED IN LUNG, SIGNAL = 0.65; EST_HUMAN HIT: AL560231.1, EVALUE 0.00e+00; NT HIT: gi14781591, EVALUE 0.00e+00; SWISSPROT HIT: P14148, EVALUE 1.00e-31
ctgggtctagttcagctggcagatgagctgattgatgcattcaccccaatagccagatgtgcccatctccttgaggaagcccactgtatttttggtagcatgatggaccactgagaggtggaaagggcaaaagaaccatgagatctcctggaaatgcttcactgggaggcaatttcatgaatgaggtcttccaagcaaatgacaccaaacttccccaggtgctcctcaatcactgtgttgtctgtcagagggatggtgttcttattgaccttggcttgtccatgtttcagaatgaattcccggacagacttcagatttggaaatccccagatcacataaggttccactatacgcagcatttttaggttctggggggtgacttttacaaagacaccactaaaaattttcttaagatgaagtcttgcaatggctgtctgcaccagtagactcacgccaacaatccttttgctgcatacaacaaaggccaaggaatgtttatctggcaattccaaggcacgaggtttcattt

SEQ ID NO: 5791 - DNA, 540 bp, Homo sapiens
  MAP TO AC012467.9; EXPRESSED IN PLACENTA, SIGNAL = 3.7; EXPRESSED IN HEART, SIGNAL = 3.5; EXPRESSED IN ADULT LIVER, SIGNAL = 4.5; EXPRESSED IN BRAIN, SIGNAL = 4.8; EXPRESSED IN LUNG, SIGNAL = 3.3; EXPRESSED IN FETAL LIVER, SIGNAL = 3.8; EXPRESSED IN BONE MARROW, SIGNAL = 5.1; SWISSPROT HIT: Q01668, EVALUE 3.00e-22; EST_HUMAN HIT: AA927640.1, EVALUE 5.00e-36; NT HIT: D43729.1, EVALUE 0.00e+00
ggaaacctaacgctcagcagtgatgactcaaatgggctgagggtgtgcttagaacagggccctagccccagggacagacagtatgtgggtgcccttctctgggtatgggggaaatcagtcaataaagaaggcactccgctcctgaccaagggacagaagccaaaacagtgtgtgactttaacctgatttttgtccagctcacagttcttatactctttttctccttgttcctgaaatgtaacgatgacaaagcccacaaagatgttcatcatgaagaaagctacaatgatgatgtagatgatgaagaagatggagatctccacgcggtggttgtagattgggccgatgttctctccattcgagtcgatggctttatacagcaacctagagagagaaaaaccaagtgaggacctgccaagccccccagcccacacggcccagcccgctgccttcccaggtcctccctctccagaactcctctcatgagcactcgctgggaacccaccccaaggctgctggacacaaccaggtctctcccat

SEQ ID NO: 5792 - DNA, 597 bp, Homo sapiens
  MAP TO AC008282.2; EXPRESSED IN HEART, SIGNAL = 6.2; EXPRESSED IN BRAIN, SIGNAL = 4.5; EXPRESSED IN LUNG, SIGNAL = 6.9; EXPRESSED IN FETAL LIVER, SIGNAL = 4.3; EXPRESSED IN PLACENTA, SIGNAL = 4.4; EXPRESSED IN ADULT LIVER, SIGNAL =   4; EXPRESSED IN HELA, SIGNAL = 4.1; EXPRESSED IN BONE MARROW, SIGNAL = 4.1; SWISSPROT HIT: P29130, EVALUE 1.10e+00; EST_HUMAN HIT: AI807824.1, EVALUE 8.40e-01; NT HIT: gi15893298, EVALUE 8.90e+00
ggaaaaggaaagatgcaacctttctgacagctgtagatgtgttcttgtatgtttttaagtgatagcagtagatatcaaatcacatatgttgtatacaaatagagctatgttacagttttactttaaatgtgaatatttaaaatgtgctggaaactatgccttcctttgtaatcatttaaaattataaaatttttagatatcaagtgtgtgagaggtaatcaggtgattttaatttagctacatgagtaaaaaaggttcaagttcacagctttgtagcactgttttcctaaagtgtgattttcagaccacctgtattgaaattacctaagtgcaacctcaaaaaagcaaattccctggctcttatcaggcttactgactcaatccgtgggtttgggaaagacatcggcattcgtggaaagaaaccagtatcttgcatgagcatttcctggttaattctaatagcaaagaaagtgtgcagctctggagcctttaagcttctgagtgacccaaccaactggccaatggtgagtttaggaggtgaatggaggtgggtcctgggacttgaaacaaaggtacagtgaggtggtcactgcaaga

SEQ ID NO: 5793 - DNA, 590 bp, Homo sapiens
  MAP TO AF207550.1; EXPRESSED IN ADULT LIVER, SIGNAL = 1.6; EXPRESSED IN LUNG, SIGNAL = 3.4; EXPRESSED IN HELA, SIGNAL = 2.3; EXPRESSED IN PLACENTA, SIGNAL = 1.2; NT HIT: AF207550.1, EVALUE 0.00e+00; SWISSPROT HIT: Q03211, EVALUE 6.60e-01; EST_HUMAN HIT: BF919301.1, EVALUE 0.00e+00
agaggagaggagagaagccgcagcacagaatggagagggagggccaggtgaaggctggaccagggctgagggccggggaggggacactgaccgatccggctgtccatgacgtaggtctcaatgatggcgctcttccggcagaggtcctctgccatggaagcactgctcacttccaggtgcttcacctgcaagatggcccagcccacctgagacccctctactgtacatgttcacacatgaggcgggcccgggcagaccccacacccacaagggcacttcaagtggggatgggcaggcaggcaggcaggcagcaccttctcctccagcatccatttctcctgctgtgtctctgccagccgctgaaagagctcagccacttcctcatctgacagctctgctggccgagggggctgggcttgagggctgctggataaggactgcaggaaagagaaggggagaggccagccccgggctcagcaccaccgaccccagacaggtgtcagggactggggaggagaaccaggccagaggtgggtgagagaacatgggccctgaagctgggactgttggcccatcttggtaccctcaga

SEQ ID NO: 5794 - DNA, 555 bp, Homo sapiens
  MAP TO AC012467.9; EXPRESSED IN ADULT LIVER, SIGNAL = 0.99; EXPRESSED IN FETAL LIVER, SIGNAL = 0.87; EXPRESSED IN BRAIN, SIGNAL = 1.2; EXPRESSED IN BONE MARROW, SIGNAL = 1.4; EXPRESSED IN PLACENTA, SIGNAL = 0.64; NT HIT: gi14735870, EVALUE 5.00e-75; SWISSPROT HIT: O19132, EVALUE 4.00e+00; EST_HUMAN HIT: AV709899.1, EVALUE 8.00e-75
ggagtgagcagatttcgaggcttccagcaaagcagctttgcttcccaaaaggactcctttcactagaccatgtgtaaagaagggctcatttcctgcttcggagacttccttctttctatggtttgaggttcacagtgacacctctcaggatgcccacagggacttgtttttatctgttgaattcatcaaagtagcccagcacgtttggacaacactgtccccattttccttcaacacactaaggaaagctggaggacgaggtgaaggggacgaagagaaaaagtacctcaaacacctgagaaaacccgatgatagtgctgtgttggataagagccatgtatctgtttcccaggggagtggttgtgaagttcacttctactgtctcctcattcttcttacaagcagtgatgttcggatcccacaggcttcctgtgagttgagagagaaccatgtagatgaacttgctaactcttccctcatttaagttccccacagggctttatggaaacaaacccaagttctcaggaacaatgtccaagagatagggacgctgct

SEQ ID NO: 5795 - DNA, 548 bp, Homo sapiens
  MAP TO AC016651.5; EXPRESSED IN BRAIN, SIGNAL = 1.9; EXPRESSED IN BONE MARROW, SIGNAL =   1; EXPRESSED IN ADULT LIVER, SIGNAL = 0.85; EXPRESSED IN LUNG, SIGNAL = 1.7; NT HIT: AE001143.1, EVALUE 8.10e+00; SWISSPROT HIT: P16734, EVALUE 6.80e+00
atggagaggtccatgcagtcctccactggaatcacaaggcagtctctcacctgaagtgctgcaagagcctctggctggtctctctgaagccactctgactcttattttccccagagttgccagagtagtattttgaaaatgtaatatttttcatatcacacccctgcttcaatgacttcttactgttgttgtcagataaagccatcagggcatccccagattgaatctgatgttaccttaatatctaaaaattgtggttctaaaagatagaaagaatacgataaaaattgaggatgaatggaaacagtaactagatttgttaacttcaatcaagtggagaagccacctgggtgggaggtagagactaaactgacatgcaaattagtcaatgctgtgactttgatcttagctacaaaaaggactacaaaatgcgatttggcttggcagtcagagtgggaagaagaattgcccttggatgtgtgtagctgcagctagtatcacacccagagatgaagtctgattattaagcagtttcagcatgccaagaa

SEQ ID NO: 5796 - DNA, 564 bp, Homo sapiens
  MAP TO AC004818.1; EXPRESSED IN BRAIN, SIGNAL = 0.44; EXPRESSED IN ADULT LIVER, SIGNAL = 0.51; NT HIT: AF111167.2, EVALUE 2.00e-10; EST_HUMAN HIT: AA535992.1, EVALUE 1.00e-15
taccttcttgggcccttttctcattaaaaaaaattaaaatggtattttacaactacattggtataaaggtgaatatattaatattatatattaaaacattttatttgatcctaaagttcattttttcttctgattttaaaagaaattaaaactatttcatgagatcctaatagtattgtgggccctaggtgctgtgcctaccgtgctaatggttaagccagcccaggccttatggccctgggaacaaagtgtggcatagagtgagttagggaggaggccattctttcagcctctgcatgaaattcaggtttactctgatatcctcatgataaaaagcctcaggaagttccagagatagcacctgtgacatggactttggcattcatgtgatgggtggtggcacagataaggctgccctaagtggttctgagaccaacacacatgatcgagtgggaactgaagcagaagaggagaatcaggatggagaattcatgacgactgtggtgacagactgagtttttcatattttgacatattattcaaggcgtttgcctcctgtaagtc

SEQ ID NO: 5797 - DNA, 599 bp, Homo sapiens
  MAP TO AC020923.4; EXPRESSED IN FETAL LIVER, SIGNAL = 1.7; EXPRESSED IN BRAIN, SIGNAL = 1.3; EXPRESSED IN ADULT LIVER, SIGNAL = 1.5; EXPRESSED IN PLACENTA, SIGNAL = 2.4; SWISSPROT HIT: Q07075, EVALUE 5.00e-12; EST_HUMAN HIT: BG724358.1, EVALUE 0.00e+00; NT HIT: AF183569.1, EVALUE 0.00e+00
gcaaagggaattttaaaagacaatcaatctgaaataatgaatttagcgtgggcagcacttgcagtttaaaagaaaaagagaaaaaaaaatacctcagttccccttccttggttctgtaggtgcttttgtaaaatccgtggaaagtctccgaaagattgccagcatagtgaatgacaactgtgtacgggagcccgacaaggaggggctcgggagccagcagtgcaatttgctcctgacgggggtgttccaggacctgcaggggttcttccgatagcctctctccagctcccttcctgagggtggccctagatatctgcaggtggtgactatgcaggatgatggtgctggtgggctgactggctgtgatttctactttcgtggttccccagaaggtcagcgtggtaaggtttgcatggatcaagagatcataatgaactgggatgacgtactcaggaagtcgtattttattccaaggaaatggtgtcccatcactacgttttggagatgcttcagtgctctgacaccatgaaggagtggacacagttaagagagccaacagtgaggaaagtagaaatgacatggttgcaagggaccatttg

SEQ ID NO: 5798 - DNA, 547 bp, Homo sapiens
  MAP TO AC016639.5; EXPRESSED IN PLACENTA, SIGNAL = 1.8; EXPRESSED IN ADULT LIVER, SIGNAL = 1.8; EXPRESSED IN FETAL LIVER, SIGNAL = 1.8; EXPRESSED IN BRAIN, SIGNAL = 1.9; SWISSPROT HIT: Q9HNF0, EVALUE 5.10e+00; EST_HUMAN HIT: BE619944.1, EVALUE 3.00e-03; NT HIT: D63340.1, EVALUE 3.30e-02
tgttgttgttgctgctgttgttttgtgagaacaattctgtaagattctacattaactacaacaaggacgttttgtgttctgcttttgtaatatagattttacgttgaagattacttatagttatatttgtggaaaatgtcttgcttattctaggtcatagaacgctgagttcagactttggcttagaatgtagaaaactgcaagagaatgtatgtcacttctacactaacaacaaaagccagattacgtacacatatagtttggtggcctgtgttcctcttagtagtcatgctccaaagagggtgactacagggtacattgagggtggccaggtcttgggaacaggagctctcagccttgacaaagactccctgccccaggatggcacagcagcagcaaggctactggccccgaaagcactgcctatggagctgagagcaccacaactaacttggaagtaagcagtgtggacaggcaattgataactgaagagtttcccgagggctttggtggtgctcatgaccctggaacctcagcacaagcatga

SEQ ID NO: 5799 - DNA, 597 bp, Homo sapiens
  MAP TO AC004511.1; EXPRESSED IN ADULT LIVER, SIGNAL = 1.9; EXPRESSED IN HEART, SIGNAL = 4.4; EXPRESSED IN PLACENTA, SIGNAL = 2.4; SWISSPROT HIT: P09192, EVALUE 2.60e+00; EST_HUMAN HIT: BI835858.1, EVALUE 8.40e-01; NT HIT: gi13631558, EVALUE 8.90e+00
ctcaaaggaagctgcaggagggagggaagcccagctctctgggaatgtgtcacacttcctccagttaggcctggggcagccccaagctctcctgatggaggccctggctcctatccaggcctcttcctctaccagactggataagggtgaggtcatgtgctggggaagggaggccagggaagcagcaactgggttggagccagtcagaaacaacacaataacaggataactcatagtctcccctctccccttacactccaggaagctgtccctgagtgaactccatacccctcaggtcccttctcccactgggacctctctggggcagattctgtgggtgcctcttagtcctcaactgaaatggaagctctctctcttctcagggctaggggcagcactgtgaatcagacagaccctaatgcctcctctcaccaatccagtcctggacatgggcagcaaccagtgttggaacccaggtggaaataagaggaagctgccagagcctcgagccataccctgggccatggtcacaccaaaggttcttgtgcctatggggctgagggacagagatatgcagccttgggctctgagatcaaa

SEQ ID NO: 5800 - DNA, 547 bp, Homo sapiens
  MAP TO AC004012.1; EXPRESSED IN PLACENTA, SIGNAL = 0.45; EXPRESSED IN ADULT LIVER, SIGNAL = 0.45; EXPRESSED IN HELA, SIGNAL = 0.52; NT HIT: AF181897.1, EVALUE 1.00e-04; SWISSPROT HIT: P08548, EVALUE 2.00e-05; EST_HUMAN HIT: BF433702.1, EVALUE 0.00e+00
atactttgcccagattccccccagtgataatattctccaaaacatagtataattttacaaccatgatattgacattaataaaacccattgatattatgtagatttttctggttttacttgtactcattgcatgtgtacttgtgtgtgtgtattaaatattaaacaattttgtcacctttgtaggttcctgtatccaccatcacagtcaagataccgaacagttccaataccacagagaacccttctgttgcccttttataaccaacccaccatcctctcatctcccctttccctaacctctttctctttgacatgtaaattatttagacatagggtgcttgattttcaagtgtttggagacttttctgatatctttctattgtggtattctagtttgattccattatgatcagagaatatactttttatgatctcaattattttgaatttgttaaggtttattttataatctaagacctggaatcttgtgaatatctcatgcatacttaaaaagaatgtgtattcagctgttgttgggtgaagtgtt

SEQ ID NO: 5801 - DNA, 511 bp, Homo sapiens
  MAP TO AC025172.2; EXPRESSED IN PLACENTA, SIGNAL =   2; EXPRESSED IN ADULT LIVER, SIGNAL = 1.7; EXPRESSED IN HEART, SIGNAL = 1.9; NT HIT: gi16157036, EVALUE 0.00e+00; SWISSPROT HIT: Q27957, EVALUE 7.00e-31; EST_HUMAN HIT: BI598149.1, EVALUE 0.00e+00
cacgttcaggctcccatatcagggctgcttctgagaagggcggggtcttgaagcacaaccccctccactccccatggcccgctccccacagaacccacccaggggctcagggccgcagacccccgtaagtcaggtccctcggcccgtgagcccagcgcactcacttgatcttgctgaagacgatgtccacgtcagtgacggtcacgttcctgccgtcgatcacctggcagtccttgcacagcttcgaccagttcttgccgtgcatctccctcccggtggccctggcgtccccgtgcacggcaaagcgccggaaggcctcctccagggcactgagctcaggggatgcggctgccccctcaccggcaccctccgattccagcgacagcctcttggctgcccggtccttcgaggggtcccccggggacttggggggcgtcctgttggcagctttggcaggcttggccttgtcagccatgttgctatggaggaaggagaggagaaaggtgtcacc

SEQ ID NO: 5802 - DNA, 573 bp, Homo sapiens
  MAP TO AC025467.3; EXPRESSED IN BRAIN, SIGNAL = 1.4; EXPRESSED IN HELA, SIGNAL = 1.4; EXPRESSED IN PLACENTA, SIGNAL = 1.7; EXPRESSED IN HEART, SIGNAL = 2.1; EXPRESSED IN ADULT LIVER, SIGNAL = 1.1; NT HIT: AB032016.1, EVALUE 9.00e-03; SWISSPROT HIT: O88516, EVALUE 9.40e+00; EST_HUMAN HIT: BG488868.1, EVALUE 5.00e-70
caggttgccttcttctgtccccaccaaaaaggaagtgcaattttaattcactttgtgatctaactgatctaaactaaaggtggaggggaaatcagatactgtaacatcggaaagcaatcagtttgaaatgttatgtccgcagggatttgactatacctctgcctgtgactcccccacacccacatccgggcctctgctggttcctgggtccatccatcccagcgcagccggcagggaggctccgagcagtgtgagatgcagccaaaagcctcctggtttcattttgatgagtctgttgaagaaatgacaaatgctgagaataaaacattatgagatggatataataagtcacagtgagttagtatgtgttccccagaatcagataagcctgggtttaaatcctggcaccaaacttctgttctaccttggagaggttatattacttctgagccttagtttacttatttctaaaatggcaataatatgtacctcgaaaggcttttgtgaggattgaaggagttagtgtcaggcatagagtaagaactctataaatgctgttacgtggaaacccat

SEQ ID NO: 5803 - DNA, 552 bp, Homo sapiens
  MAP TO AC016698.2; EXPRESSED IN BONE MARROW, SIGNAL = 0.76; EXPRESSED IN PLACENTA, SIGNAL = 0.55; EXPRESSED IN ADULT LIVER, SIGNAL = 0.76; EXPRESSED IN HELA, SIGNAL = 0.56; EXPRESSED IN BRAIN, SIGNAL = 0.65; NT HIT: U64311.1, EVALUE 3.40e-02; EST_HUMAN HIT: BG674773.1, EVALUE 3.00e-09
gctgggttcagacaggagacccattattatgcctgtgatctgggtccagaaaatagtcaccatctcacctatagcaagatccacatatgacagtcaaaatttcaactttgtactttatttacttatactcaggactttaacagctgactttgtaaatatgggatgctgaaaagttttgcactcacctgtatgtgtaatcaagagtcatgatcttaatctctggctgggcccaagcagtttttagaatatgagttagcgttgtaagctgctgtgagctttctgccactatgcaactcacaactttaagtattgccctgcgtggagaggtgataggcaaatgttactattggtggaaaacaaatataactttgatcatcatgcctctgaattgaatcatgtaaatttcataatcccatttgtaggaaaaaagaaaaaactagccaggagagtagcacaacgtaggtgctttgccaggcaatatgtcacaatgccttctctaggtagggttctagaaatgagggttacattaactgggtgctggacctagcaata

SEQ ID NO: 5804 - DNA, 596 bp, Homo sapiens
  MAP TO AC016552.5; EXPRESSED IN ADULT LIVER, SIGNAL = 3.1; EXPRESSED IN HEART, SIGNAL = 3.6; EXPRESSED IN HELA, SIGNAL = 4.5; EXPRESSED IN FETAL LIVER, SIGNAL = 3.5; EXPRESSED IN PLACENTA, SIGNAL = 3.1; SWISSPROT HIT: P24881, EVALUE 1.00e+01; NT HIT: Z78792.1, EVALUE 2.00e-87
ttttatggcaggattcgtggcactgcttttaaaagttcagtttcaaatgaagtctctttttttttctagaaattctttgaaacaggcttattttaataaactgagtaatcagccagagtggacttctgctgcttgcaactaagagacttaaataagggatcagcatggagatttttattaatagtgtagttgtttgaacagtggaaatttattttatagacatcaatttatagcatttaaataacttaaccaagacatatcatccacttcttatttggtttccataacatatacagtttaagagaacccaaattaactgaatggcttacatgtgatggtttttccagcataatctctgtaattaattttatggaaactatgaaaaacaaagatcagttcactactttgaactgtcttcctataactataatgaaaaaaattggggttgcaataattacaaaacataaaataacacaaataaaacaatgctctttctacctgaaatgtcctttctgttctaatttaccaggcttatctcagtcacctttccagatatcactcgcataattaccaattctggggtgccctcttaagat

SEQ ID NO: 5805 - DNA, 512 bp, Homo sapiens
  MAP TO AF241734.1; EXPRESSED IN LUNG, SIGNAL = 0.85; EXPRESSED IN BRAIN, SIGNAL = 0.39; EXPRESSED IN BONE MARROW, SIGNAL = 0.45; EXPRESSED IN HEART, SIGNAL = 0.96; EXPRESSED IN ADULT LIVER, SIGNAL = 0.88; SWISSPROT HIT: P76252, EVALUE 9.40e-01; NT HIT: AF199417.1, EVALUE 1.90e+00; EST_HUMAN HIT: AI216714.1, EVALUE 3.00e-03
tggatggttcttacttggggtctctcaggcagctgcagctgcagtcatctgcaggctggactgggctgggtgtccaagacggtgcatgcacgtggctggtggatgattctggctgttgaccggtagctcagctggggctgaaaactggagcaccttcatgtggcttgggcttctcacagcatggtggtggattctgagaggatgtgtccctgtcccaaaatcaagagtttcgagaggcaggaagaggaagccaccaggccaattaagggctacaccaggaacaagtatagattcatttccatcatactccattggtcaaaagagtcacagggcctcaccagattcaaaggagtgaagacagacttgatggatgagtggcaggtcacattgcagaagaccatgtgagaaggcagctatatttatagccatctttgtaaagtatacaccttccttgcccacatttcttgctcccagttgtaggtccaagagggccaaaaacatccctccacgtc

SEQ ID NO: 5806 - DNA, 528 bp, Homo sapiens
  MAP TO AL110118.3; EXPRESSED IN FETAL LIVER, SIGNAL =   9; EXPRESSED IN LUNG, SIGNAL = 8.3; EXPRESSED IN ADULT LIVER, SIGNAL = 8.6; SWISSPROT HIT: Q03350, EVALUE 3.30e-01; NT HIT: AL163249.2, EVALUE 0.00e+00; EST_HUMAN HIT: BG755539.1, EVALUE 0.00e+00
gatttctcacggggcattagctgcctccccgccgggcagggctcgggacctgcagcccgccatgcctgagcctcccaccccctccatggactcctgtgcagccccagcctccccgacgagtgccaccccctgctccacggcgcccagtcccatcgaccacccaagggctgaggagtgcgagcgcacggcagcgagggactggcaggcagctccacctgcagccctggtgccagttccgctgggtgaagccagctgggctcctgagtctggtggggatgtggagaatctttatgcctagctcagggattgtaaatactccaatgggcactctgtatctaactcaaggtttgtaaacacaccaatcagcaccctatgtctagctcagggtttgtgagtgcacgaatcaacactctgtatctagctgctctggtggggccttggagaacctttatgtctagctcagggattgtaaatacaccaatcagcgccctgtcaaaacaggccactcggctctaccaatcagcagga

SEQ ID NO: 5807 - DNA, 596 bp, Homo sapiens
  MAP TO AC010332.6; EXPRESSED IN BRAIN, SIGNAL = 3.1; EXPRESSED IN LUNG, SIGNAL =  11; EXPRESSED IN FETAL LIVER, SIGNAL = 5.6; EXPRESSED IN BONE MARROW, SIGNAL = 3.5; EXPRESSED IN PLACENTA, SIGNAL = 3.6; EXPRESSED IN ADULT LIVER, SIGNAL = 5.1; EXPRESSED IN HEART, SIGNAL =   2; EST_HUMAN HIT: BI033469.1, EVALUE 4.00e-83; SWISSPROT HIT: P51522, EVALUE 2.00e-82; NT HIT: gi14754647, EVALUE 0.00e+00
catcatagaatgcacacgggagagcaaccttacaaatgtaatgaatgtggcaaagcatttagagactgttcaggccttactgcccatctactaattcacactggagagaaaccttacaaatgtaaagaatgtgccaaggtcttcaggcatagattatccctaagcaatcatcagagatttcatactggagagaaaccttacagatgtgatgaatgtggcaaggacttcactcgaaattcaaaccttgcaaatcatcacagaatccatactggagagaaaccttacaaatgcagtgaatgtcacaaagtctttagtcacaattcacaccttgcacgacataggcaaattcatactggagagaagtcttacaaatgcaatgaatgtggcaaggtcttcagccacaagttatacctaaaaaaacatgagagaattcatactggggagaaaccgtacagatgtcatgaatgtggtaaggacttcactcgaaattcaaacctggcaaatcatcacagaatccatactggagagaaaccgtacagatgaaatgtgtgtggtaagatctttagtaataattcacaccttgcacagcatgagat

SEQ ID NO: 5808 - DNA, 508 bp, Homo sapiens
  MAP TO AC008747.4; EXPRESSED IN PLACENTA, SIGNAL =   1; EXPRESSED IN ADULT LIVER, SIGNAL = 0.88; EXPRESSED IN BRAIN, SIGNAL = 1.2; EXPRESSED IN LUNG, SIGNAL = 1.3; EXPRESSED IN FETAL LIVER, SIGNAL =   1; EST_HUMAN HIT: BI756748.1, EVALUE 0.00e+00; SWISSPROT HIT: O27186, EVALUE 1.60e+00; NT HIT: gi14766761, EVALUE 0.00e+00
tctcaacctcagcagcacacatcctcacctttgggaaagcaactgatccatggcaatgccttctctctgctgatagtccctcagaaggctgtgggcatgatccaggttgacaaagtccctgtaatcatcctcatctgcaacacagatgtagtagggcaggaagagcggcagcccaggaggcacaggatgggcagcacccaggacagcatcctgcaggcggaggtcttggagccgagcagtccagtctacgtctttggcactgctggcatcattcccaaaatccaaggtaaactgtggtgaaggcccctcctcagtatcacttccccagtcatcagcaccttcacaccagtcctcagctgcaaggctgtttccctgtttctggaaaaatactcagtgaatgaggtccgagcacatttgggaggtttattctaatccttcggctccagccacccaccgccgcgccttccagagggagccttcacaccatccccttcccctctggtacact

SEQ ID NO: 5809 - DNA, 598 bp, Homo sapiens
  MAP TO AL049869.5; EXPRESSED IN BONE MARROW, SIGNAL = 4.9; EXPRESSED IN PLACENTA, SIGNAL = 3.4; EXPRESSED IN ADULT LIVER, SIGNAL =   4; EXPRESSED IN HEART, SIGNAL = 3.7; EXPRESSED IN HELA, SIGNAL = 2.5; EXPRESSED IN FETAL LIVER, SIGNAL = 3.7; EXPRESSED IN LUNG, SIGNAL = 3.7; EST_HUMAN HIT: AA044938.1, EVALUE 8.00e-38; SWISSPROT HIT: P16752, EVALUE 1.30e-01; NT HIT: AJ298105.1, EVALUE 7.00e-22
ttgaaatagcctcaggcaggtttttcaggagctattccagaataaggcactgttatcacaggagatgacagctccatgcatgttattgcccctaaagaccttccagtggtacatgtggaggtggaagatggtgatactgatgatcctgaccctaggcaggcctaggcttatgtgggtgagtgtgtctttgtttttaacaaaaaatttttaaagtaaaaaaaaattataaaaatagaaaaaagctatttttataattaagatataaagaaaaaagcagctgtacaatatgttcatattttaagctgttattacaaaagtcaaaagtttttaaaaattaaaaagtttataaagtaaaaaagtcacagaatgctaaggttaatttattattgaagaaataaatttttaatataaatttagtatagcctaagtgtacagtgtttaaaagtctatagtagtggaatgtcctgggccttcacattcactcaccacgcactcactgactcacccatagcaactccagtcctgcaagctccatttatggtaagtgccctatataggtgtaccattttttatctttcatgctgtattttcctatacc

SEQ ID NO: 5810 - DNA, 507 bp, Homo sapiens
  MAP TO AC004826.3; EXPRESSED IN BONE MARROW, SIGNAL = 0.58; EXPRESSED IN ADULT LIVER, SIGNAL = 0.43; SWISSPROT HIT: P72689, EVALUE 5.40e-01; NT HIT: gi14781185, EVALUE 4.00e-97; EST_HUMAN HIT: BF699226.1, EVALUE 1.00e-105
ttgaatgcctgaattccctctacaaacatttctgctaagcagtttgctctcctccagtgacagggcactcagtggctcttgaggcacacccctgggttgatggggagcgctcactgtaaacatgtccttacctctgtaataggcggaggcggttgcagctcggccagaggcaatgcagggagagagaaagccaactccgccgacctggaacacccacacaaactagatcagctcgacaagccccccaaggccaaggatccaagccccgtcccttcccactccaacatctcaccatttgctactgtgtagtaggccccgctcccgggtaaggcccgcaataagcagcagttgctttttaatttcccgcaaatctgagaaatcgctgtttatggacaggacaggcgccactgccgccgtcacagccaccgggaccatggaggtactcgcagccattttcccgactcgggccactccagccaatcatcggcgataatactggctgcccat

SEQ ID NO: 5811 - DNA, 580 bp, Homo sapiens
  MAP TO AC016698.2; EXPRESSED IN BONE MARROW, SIGNAL = 0.96; EXPRESSED IN PLACENTA, SIGNAL = 1.4; EXPRESSED IN ADULT LIVER, SIGNAL = 1.5; EXPRESSED IN FETAL LIVER, SIGNAL = 1.9; EXPRESSED IN BRAIN, SIGNAL = 1.3; EXPRESSED IN HELA, SIGNAL = 2.8; NT HIT: L41825.1, EVALUE 0.00e+00; EST_HUMAN HIT: AA618338.1, EVALUE 5.00e-79; SWISSPROT HIT: P10264, EVALUE 4.00e-22
tcatttcagttcctcaaccggtctgcatcattgtgtacctctcaatcttacctttttaaaagaatttaaggatgcttgtactcagtatgaccctacttctccttatgttaaaatggtattacaaacttttgtacagaggtcattttccttcctttagactgggaccttttggcaatagctgttctaacccatctcagcatttacagttttgtacctggtggtcagagaaggcctatttgcaggctcagctaaatttgactaatggcattctaactactcaggctcagctcacagggtctgataatttctctgatacttatgcccaattaaactttgatgctcttaccacagaacaagtagcaaaggtgtgtatgagagcttgggataaattacgcaccctaggccaagctcctgcttcttttactactgttaaacaaggtcacactgaattataccctgattttttagctaaattacaagatgctgttgaaaaatctgtctctaattatcatgttcaaggtgttctcctttgtatgttagcttttgaaaatgtgaaccatgagtgtaagatggccatgca

SEQ ID NO: 5812 - DNA, 567 bp, Homo sapiens
  MAP TO AC008985.5; EXPRESSED IN PLACENTA, SIGNAL = 5.8; EXPRESSED IN ADULT LIVER, SIGNAL = 4.5; EXPRESSED IN HEART, SIGNAL = 5.6; EXPRESSED IN FETAL LIVER, SIGNAL = 6.2; EXPRESSED IN BONE MARROW, SIGNAL = 3.8; NT HIT: AB013139.1, EVALUE 2.00e-13; EST_HUMAN HIT: W85758.1, EVALUE 2.00e-16; SWISSPROT HIT: P39188, EVALUE 7.20e-02
aaacatcccagaacctgtggatgtggccatccttatttggaaaaaagggtctttgtagacataattagattaacaatgttgagatgagactgtcctggattatctgggtaggctcaaaatcctatgataaatgtcctcttaacagcaaaggagaagtcacagaagaacagaaggccatgtgaagaaggaggcaaagcttaatgtcacgtggctacgagccaaggaccacctagagctccgggggctggaccaggcgaagaaggctctaggctcttccctagagcctcctgagggagcacagctctgacaaccccagtggccctgctaacaccctcattttggacttagggcctctggaactatacgagaatagttttctgttttaagatcctgcatctgtggtatttgttacagcgacaatgggaaactaatgtacatgtaagtttctaagacagagacgcatacaatacgtacagagtatagaagatatatatgtagcctgggcaacacagtgagaccccatctctacaaaaaattttacaaattagccaggtatgctagtgtgca

SEQ ID NO: 5813 - DNA, 552 bp, Homo sapiens
  MAP TO AC013248.5; EXPRESSED IN BONE MARROW, SIGNAL = 1.1; EXPRESSED IN ADULT LIVER, SIGNAL = 0.53; SWISSPROT HIT: Q09523, EVALUE 1.20e-01; NT HIT: AF364606.1, EVALUE 1.00e-04; EST_HUMAN HIT: AV756880.1, EVALUE 4.00e-18
cccactcctctgagctgttctaatactaaataaaatttttgttcatccttcagttgtctgcctacctcattcttcctgaacgcaggacaaaaaactcgggcaaaggcactgtggccacagaggtttctggccagaaaaatcgacatcccagagatcccataacatctccacttggctcccctgctggccctgttcagaaaccttagttgtgttattattgattgagagaaggggagtgagaactcaattccctctgccagatttgatcccagactctttccctgtgaaccgatgaaatccacagctggtagtaatctctcctgcctcaaaactcccctgacattttatctgtaaccctcctaaaccacttatttcctaggtttcactataattattcattgtgtgcctcatctcccctgctgttctatggccttctcatagacaatgacagggtcttaatcatctctgtgcatgccccaaatttagaacacagcctcagatgctgaatgaatgaaagaaagaatgaataatacaaacgggaagaaagcaaag

SEQ ID NO: 5814 - DNA, 536 bp, Homo sapiens
  MAP TO AC025760.2; EXPRESSED IN FETAL LIVER, SIGNAL = 2.5; EXPRESSED IN BONE MARROW, SIGNAL = 1.8; EXPRESSED IN PLACENTA, SIGNAL = 2.4; EXPRESSED IN HEART, SIGNAL = 2.7; EXPRESSED IN ADULT LIVER, SIGNAL =   2; EXPRESSED IN BRAIN, SIGNAL = 2.2; EXPRESSED IN LUNG, SIGNAL = 2.3; SWISSPROT HIT: P28481, EVALUE 9.90e-01; EST_HUMAN HIT: AW383250.1, EVALUE 0.00e+00
agacgtgtttcacctccctgatggtctggaccagtctggaagagatggagacgctgtggccaagtgcagtctctctcggggtctctccccgcccgggtggacacggcgctccctcctctgtccctggggtttagcagccgctctgggcagccatgccgccctcgcctgcgtcctgcggccgtcccgaggtgtcacgctgtcaacaacacaaagtcgtagttgacgtcgaccatgagcacttagcaggagggcacgcacagggacttgtgcccggcggggtccagctcctgcaccttcagctgccactccatcctctgcacagcgttcagggccgcagcctcgtgctgctgccgcatgaggaggaaggtcttcctgcagtcatacttgtcatccaggtcctggagccaagagatgaactggcgggcgttgaactggtcgagcactgacttgttctggtcgccctgactctattattaaggcaatatagattatttttatacattaattattgtattgcttgcattcgttggaattca

SEQ ID NO: 5815 - DNA, 561 bp, Homo sapiens
  MAP TO AC016830.5; EXPRESSED IN ADULT LIVER, SIGNAL = 1.6; EXPRESSED IN BRAIN, SIGNAL = 1.7; EXPRESSED IN BONE MARROW, SIGNAL = 1.2; NT HIT: L27134.1, EVALUE 5.30e-01; SWISSPROT HIT: Q40284, EVALUE 6.20e-01; EST_HUMAN HIT: AA988270.1, EVALUE 2.00e-01
ttatggggtggagatgatggctgtcaatcagtggataatgatgatggcaggtgtgatcttgagcacatccccattctcagcttctctggaagaaaagtgtctggggcttggagagaggccaatggattatgaggacttgcaggagaccctgccactgggttcttcccaggagacaaggggtcccctgcaaagacggaagtcaaaagacggaaagtagaaacaggttgagcttcaaatgctacaccagagcaacagctgtcattgttcataaaattcaggcagttctcaatttgagaagtaactgccacatgctttccatatgccactcttgggatacaggaactgagaagcgaagaagaaaaatgtatttttactatactgtgaggttagctgtttggttgaccttcacagggtatacataaagctcattagaatcactgacgaactttaaaactacaccaatgttcaggccccatccagacccatccaatcagaatctgtgatggcctggggcaggcgtggtcaatcgctccctcccacccccattctaaagtgcctcca

SEQ ID NO: 5816 - DNA, 501 bp, Homo sapiens
  MAP TO AC005081.2; EXPRESSED IN BONE MARROW, SIGNAL = 0.57; EXPRESSED IN ADULT LIVER, SIGNAL = 0.48; EXPRESSED IN BRAIN, SIGNAL = 0.7; NT HIT: AF289664.1, EVALUE 7.40e+00; SWISSPROT HIT: Q69154, EVALUE 1.60e+00
ggtcctcatcaaggatctgctcctggggaggggcccatcctgttcccgttcccctgcaggctgtcactggttgtaggcaaagcatcctccacacaggagacccacaggatgaggaataaataaaggaccccgggattcccgctcgactccccccccccccccaggcctgtgctaaaagtgcaagaacccataacacgcaagatgtttccaaaatatacccgacccctcacgatcctcttggccccagcctccttggtggaggccgggctgtgcctcccactcccgggccccattgctgcccaccccaccggaccccacagaggacgcctggtctccacaaatcacaagggcacttttgtcccagctcgacaatatctgcttcatctgctgacaaaggccagcattctcagggtgtcaagactggcttttgcatttcacagaacagatcttggaagggaagctgggagggtgaggacattgggagcagtttggagacccaag

SEQ ID NO: 5817 - DNA, 540 bp, Homo sapiens
  MAP TO AL031719.10; EXPRESSED IN BONE MARROW, SIGNAL =  12; EXPRESSED IN BRAIN, SIGNAL = 0.88; EXPRESSED IN FETAL LIVER, SIGNAL = 0.72; EXPRESSED IN ADULT LIVER, SIGNAL = 1.5; EXPRESSED IN PLACENTA, SIGNAL = 0.89; EXPRESSED IN HEART, SIGNAL = 1.4; EXPRESSED IN LUNG, SIGNAL = 3.9; EST_HUMAN HIT: BF516493.1, EVALUE 0.00e+00; NT HIT: gi15320009, EVALUE 5.10e-01; SWISSPROT HIT: Q62209, EVALUE 1.70e+00
cctggtcacgtcattgtcacaagttaggcagtgccccaccccaccaccaccgtgtcctttatgccaggtcctatgaaggtgaatgccagctcaggggtgtgtgtggagccggtgcgcccgcggtccaccgtggtggctgctggtgcagtagcatctgtgttggcttctgtggccatgcagggctgcctgtccttccccttctcggaatgtccctctggggtctacgctccctctgtcccagtttaaatgctccctcgacccaccttgggttataaaagtaacacaggcttactgaagaaaattagaaaagtacagagttcattcttaacatcgataagccactgcatgtggaaattcaaaagcaatccaggtccgagtctacagggtttagtccttcctctgatttgacagtaaacaggaagaggcagagaagactctgtgcgtgttgtttgctgacggagtgtgtaacaggagagaagcttccatgtttcacagaaataaaagcagcagcagctggtggcatcctaggtcccgaaaggt

SEQ ID NO: 5818 - DNA, 556 bp, Homo sapiens
  MAP TO AC022073.13; EXPRESSED IN HEART, SIGNAL = 1.1; EXPRESSED IN ADULT LIVER, SIGNAL = 0.76; EXPRESSED IN LUNG, SIGNAL =   1; EXPRESSED IN HELA, SIGNAL = 0.51; EXPRESSED IN BONE MARROW, SIGNAL = 0.59; EXPRESSED IN PLACENTA, SIGNAL = 0.55; SWISSPROT HIT: O74015, EVALUE 2.30e+00; EST_HUMAN HIT: BI759867.1, EVALUE 3.00e-28; NT HIT: gi15300044, EVALUE 2.00e-28
agatagcaagccaccattgccttggacctctccttgacatagtattttcccagtggctcctgcactagaggactagcctgtcagtgagggacaggaggaagccaatggcctcgcggcccttcttgttgctcccagaactgtggggtgaactgatcaccccacagttcaccctttagagacactgcacacatcccagccagctggctgtcccgcagggcccccttgcaatgcagctgtttaatgtgctcctggatgcagttgtccaccacctccttgcccaggaagttttgcgggtagcagaagctgacttcccgcagacagcgcatgatgtactctagggaaattttctccaattcctgcctcatgatgtgtcccaggggcatttcacgcatagtgcagaagtcggggacctccagcgtgcacccagagagggaacgatgtatgtgatgtgaagccaaggtgtggggagtgtggccatggtcccgagccaccgcagtcagtactggggacaggggaaagttgctcacaactctcaggagaagggatctgcgttcag

SEQ ID NO: 5819 - DNA, 577 bp, Homo sapiens
  MAP TO AC020663.1; EXPRESSED IN LUNG, SIGNAL = 1.8; EXPRESSED IN BRAIN, SIGNAL = 1.7; EXPRESSED IN PLACENTA, SIGNAL = 0.88; EXPRESSED IN HEART, SIGNAL = 1.2; EXPRESSED IN ADULT LIVER, SIGNAL = 1.3; NT HIT: AJ277546.2, EVALUE 1.00e-04; SWISSPROT HIT: P23961, EVALUE 5.50e+00; EST_HUMAN HIT: BI828537.1, EVALUE 6.00e-08
cctctgaagtgcctctcacctctttgcttgcaacatttgcaattacccccttatgaatgcacgcctagacttacctcctaattggctctgagactttcccctctgcactcggtgactactggtgcacacacgggaggcacacactgccactggctcagtcaccttcccgggcccccactgactccaagacgctttagtaccacgctgcttcagtagaccttcaggccctccacgatccagggacaagcttcctttttctcggctttcctcactatcctctccctgttcgagagtatctccaccagcaccgagcctcacacgggctgtgccctccatctttggaatgcctacccttctttcttgctaagcccctcccagggccagcccttgtgcaccggctcaagtggactgctctcctgcctcgcgctcctactttacacctgcatccaggccgtgtctctcacctggtctatgggattctttattttttaattttttaaataagattcggggtctcactccatcacccaggctagaatgcagtggtgcaatcggctcaatgcaactttgagctcca

SEQ ID NO: 5820 - DNA, 548 bp, Homo sapiens
  MAP TO AF192304.2; EXPRESSED IN ADULT LIVER, SIGNAL = 1.6; EXPRESSED IN HEART, SIGNAL = 1.6; EXPRESSED IN BRAIN, SIGNAL = 1.1; EXPRESSED IN FETAL LIVER, SIGNAL = 1.4; EXPRESSED IN BONE MARROW, SIGNAL = 1.9; EXPRESSED IN PLACENTA, SIGNAL = 3.2; NT HIT: gi4507920, EVALUE 0.00e+00; SWISSPROT HIT: P18406, EVALUE 1.00e-20; EST_HUMAN HIT: BF510649.1, EVALUE 0.00e+00
tcaggggaagaaagtggttgtccattctctgagcactcccactgaaagctcctttcctttccttcaggcagggaagaagtgtctggctgtgtaccagccagaggcatccatgaacttcacacttgcgggctgcatcagcacacgctcctatcaacccaagtactgtggagtttgcatggacaataggtgctgcatcccctacaagtctaagactatcgacgtgtccttccagtgtcctgatgggcttggcttctcccgccaggtcctatggattaatgcctgcttctgtaacctgagctgtaggaatcccaatgacatctttgctgacttggaatcctaccctgacttctcagaaattgccaactaggcaggcacaaatcttgggtcttggggactaacccaatgcctgtgaagcagtcagcccttatggccaataacttttcaccaatgagccttagttaccctgatctggacccttggcctccatttctgtctctaaccattcaaatgacgcctgatggtgctgctcaggcccatgctatgagttt

SEQ ID NO: 5821 - DNA, 599 bp, Homo sapiens
  MAP TO AC004017.1; EXPRESSED IN ADULT LIVER, SIGNAL = 1.5; EXPRESSED IN PLACENTA, SIGNAL = 0.93; EXPRESSED IN HEART, SIGNAL = 1.1; EXPRESSED IN LUNG, SIGNAL = 2.4; EXPRESSED IN HELA, SIGNAL = 1.1; EXPRESSED IN BRAIN, SIGNAL = 1.7; EXPRESSED IN BONE MARROW, SIGNAL = 1.6; NT HIT: AL163268.2, EVALUE 2.30e+00; SWISSPROT HIT: P49910, EVALUE 3.00e-08
tccctagagacacaaggcaagagactgaatcatcaaagtaaagtctctctgagaattattgctaagaatggctttagatctaagaaccatatttcagtgtgaaccatccgagaataatcttggatcagaaaattcagcgtttcaacaaagccaaggacctgctgttcagagagaagaagggatttctgagttctcaagaatggtgctcaattcatttcaagacagcaataattcatatgcaaggcaggaattgcaaagactttataggatctttcactcatggctgcaaccagaaaagcacagcaaggatgaaattatttctctattagtcctggagcagtttatgattggtggccactgcaatgacaaagccagtgtgaaagagaaatggaaatcaagtggcaaaaacttggagagattcatagaagacctgactgatgacagcataaatccacctgccttagtgagtacagggttctaacttctgggatgagagacaaaggaaagtaaggaataaatcacagtcagttagagttgtctggaagttagagaagctattggaggtccagttattagtcagctcacactctcccaccatt

SEQ ID NO: 5822 - DNA, 532 bp, Homo sapiens
  MAP TO AC011904.3; EXPRESSED IN BONE MARROW, SIGNAL = 0.92; EXPRESSED IN PLACENTA, SIGNAL = 1.3; EXPRESSED IN ADULT LIVER, SIGNAL = 1.4; EXPRESSED IN FETAL LIVER, SIGNAL = 0.61; EXPRESSED IN BRAIN, SIGNAL = 1.3; EXPRESSED IN LUNG, SIGNAL = 1.7; EST_HUMAN HIT: R96774.1, EVALUE 4.00e-21; NT HIT: gi13937343, EVALUE 0.00e+00; SWISSPROT HIT: P79102, EVALUE 2.00e-09
ctgtggattgtgtcaatggcaattttctgttactagagtgacagaaatacactgtatctacagttaaataagacatcaccattgggggaaataggacgaagtataaagcactttcctgtccattttctgggcaagtttccatgaatatataatcatttaagaataaaaatttgattaatacatttgaaaatataggcctaccatctggtttgtgaagacagagtaacattctttcactaacactgttttgatcatgtcgggatccatgatgaccagcatgggctgttgcccctcatacagcctgtgtgggggaaaacagagctgactaaacctcgcttgcctgattctgcagctggaaccacaccaaagaatccagattttgatcctgacattccatcatccatacttgcagttgtgcaatacacagcaaagccagctccaaggtcaattagggtatgacacagagtaagattctcaccacggaagccacttaagccttcatacaacgaagggtgatgtggctcaaacagga

SEQ ID NO: 5823 - DNA, 589 bp, Homo sapiens
  MAP TO AC025816.1; EXPRESSED IN PLACENTA, SIGNAL = 1.3; EXPRESSED IN HEART, SIGNAL = 1.3; EXPRESSED IN ADULT LIVER, SIGNAL = 1.4; EXPRESSED IN LUNG, SIGNAL = 1.8; EXPRESSED IN FETAL LIVER, SIGNAL = 1.3; EXPRESSED IN BRAIN, SIGNAL = 1.3; EST_HUMAN HIT: AL557946.1, EVALUE 0.00e+00; NT HIT: gi14743149, EVALUE 0.00e+00; SWISSPROT HIT: P42679, EVALUE 6.60e-01
gcagtctcctttccatttcgttccccttttagccaagggcatttgttagcagccgtcatctagagtgagggatgtaatagctgtgttctgtgtggatgatggaatcacagcttgtgaagcccctttctcaccagtggactggccactggggaggtggtgtcgtgtgagaccttcctgaactggtggttttttccctctctgtcaacagatttgccaacattacaacaaaggagatggaccccacggctcttgtgcctttcaaaagcagtgcatcaagctccatatctgccagtattttttacagggggaatgcaagtttggcactagctgtaagagatcccatgatttctctaattctgagaatctggaaaaattggagaagttgggtatgagctcagacctggtgagcaggctgcctaccatttatagaaatgcacatgacatcaagaataagagctctgcccccagcagagtgcctcctctttttgtcccacaggggacttctggtaaggctggtggggagtggtaaggctggtggggagcacgggaggtcctgggctgggggttcccggattccagctagccatta

SEQ ID NO: 5824 - DNA, 505 bp, Homo sapiens
  MAP TO AC002319.1; EXPRESSED IN BRAIN, SIGNAL = 1.1; EXPRESSED IN BONE MARROW, SIGNAL = 0.66; EXPRESSED IN PLACENTA, SIGNAL = 0.93; EXPRESSED IN ADULT LIVER, SIGNAL = 0.9; SWISSPROT HIT: P21414, EVALUE 1.00e-06; EST_HUMAN HIT: BF507432.1, EVALUE 1.00e-08; NT HIT: gi8923845, EVALUE 1.90e+00
aaggtcatttctgtggtgggggtttcaaatcaagtttaagaggttcccgtatctgaaccaatccaattaactttgggccccttttcagaaaaacacttttttactatgttatactgctccagtaaacttgttagggcgagatttgctttcaaagctaaaagggcacataaaatttttctcaggagaaataaccttagagtttcctgattctcctggactagaattgttatgctgtctacagacagaaatctataagattgaaactcaggcctgtaatacccctgatctttcaaaaatatctaaatttttgggggcctcttccccaactgatatggtaagaattaaaagttgggaacctataaaagtacaaagagatcgttctaaacctttgcctaaattaccccaatatcctctaaaacctgaagcaattcgggggctgtcaccaattgtagaagatttcattaaacaaggactcataatcccgtgcaccagcccttgtaacagt

SEQ ID NO: 5825 - DNA, 555 bp, Homo sapiens
  MAP TO AC034103.5; EXPRESSED IN PLACENTA, SIGNAL =   2; EXPRESSED IN ADULT LIVER, SIGNAL = 2.1; EXPRESSED IN HEART, SIGNAL = 2.1; EXPRESSED IN FETAL LIVER, SIGNAL = 2.1; NT HIT: Z35840.1, EVALUE 5.30e-01; SWISSPROT HIT: Q02785, EVALUE 5.30e+00
tttggtttttggtttgctcctttttttttttttttcttattaaccaacacctttagtactagaggctggctagattaagtaaacaaaaaaattcaggaatatttcgtaggcattattttgtgagtgtgtggctccttgggtgctccgaaaatctttaattatttactggcactacttttattcaaaccagttaatacaggctttttttaaaccttttctttttctatttttctttttctagtctattctttttctattttttcacgtaataggagcataaataaatttcacataataggaacataactgtcacaccccttgtccagtctgtccccccaccccaatgctctaatttgaaaattagtgcaaaagaaaatcagtgcaaaatcagtctatctccccaccccaatgcactgattcgaaaatcagtgcaaaagaaagtagtcatttcaaaggtgattttgactacagccagcaggatcatggatgaccccgtggtaaatcaactagttcaaaatattttcagcatgatttgccttcctcttctattgcccc

SEQ ID NO: 5826 - DNA, 577 bp, Homo sapiens
  MAP TO AC016553.4; EXPRESSED IN BRAIN, SIGNAL = 1.4; EXPRESSED IN HELA, SIGNAL = 1.1; EXPRESSED IN BONE MARROW, SIGNAL = 0.65; EXPRESSED IN ADULT LIVER, SIGNAL = 1.1; NT HIT: AL163209.2, EVALUE 1.00e-120; SWISSPROT HIT: P31792, EVALUE 3.00e-14; EST_HUMAN HIT: BG955121.1, EVALUE 5.00e-67
acacatctccttggacctggcatgcagccattgacttggcaaatgcctttttctccattcctgtccataaggcctaccagaagcaatttgccttcagctggcaaggccagaaatataccttcactgtcctacctcaggggtatataaactctctggctttgtgtcataatcttattcagagagaccttgattgcttctcacttccgcaatatatcacactggtcctttacattgatggcgttatgttgactggatccagtgagcaagaagtagcaaacacactagacttactggtaagacatttgtgtgccagaggatgggaaataaatccaactaaaattcagggactttttacctcagtaaaatttctaggggtccaatggtgtggagcctgtcgagatattccttccaaggtgaaggacaagttgctgcatttggcccctcctacaatcaaggaagaggcatgacgcctagtgagcctatttggattttggaggcaacacattcctcatttggatgtgtttctctggcttattgagtcacccaagaggctgccagttttgagtggggtccagaa

SEQ ID NO: 5827 - DNA, 587 bp, Homo sapiens
  MAP TO AL049779.5; EXPRESSED IN BONE MARROW, SIGNAL = 0.82; EXPRESSED IN ADULT LIVER, SIGNAL = 0.48; EXPRESSED IN FETAL LIVER, SIGNAL = 0.72; EXPRESSED IN BRAIN, SIGNAL = 0.39; EXPRESSED IN HELA, SIGNAL = 0.78; NT HIT: AB002319.1, EVALUE 1.00e-121; SWISSPROT HIT: Q9CX84, EVALUE 5.70e+00; EST_HUMAN HIT: AL040774.1, EVALUE 0.00e+00
ctaagcaatatgcccaaggccacacaagactcacactgagcatctcattccagagacatgctcttaaccactatccgattctgctgcatgttttggcagaaggaatgaaacatgcctttgctggtgagggcagtgatttgggatctaggctaagacttttcacactcactgaataacagttgtgcagagtcccctgttttgacttgactctgctagagatggccccatagctcaacacagggttaagtgtcagggggttattgtcccgcttaaggctgagtggtccaagccagaggagtaaggcaggcactgcctttttgagctgtgtccatgtcccaccttgttgagaaggtgcagaagagcttcccgcaggcagctgtgcctcacgtagaagctgatgatggccaggttggtgctatagttgtgcaggtagaagaggcattcctggtagtaggtgttgttcatgattttcccttcaggaatcactgccagagaaaggctctgcgtccgaagggtagcttccagttccctcagggtggcaaagtaatcgtcatcttgctgacagcacagggagcgagagagaaaaa

SEQ ID NO: 5828 - DNA, 551 bp, Homo sapiens
  MAP TO AC003005.1; EXPRESSED IN ADULT LIVER, SIGNAL = 0.44; EXPRESSED IN BRAIN, SIGNAL = 0.47; EXPRESSED IN HELA, SIGNAL = 0.59; NT HIT: AB016432.1, EVALUE 2.10e+00; SWISSPROT HIT: P08863, EVALUE 1.80e+00; EST_HUMAN HIT: BE617215.1, EVALUE 3.10e+00
gaaggagagaaatggagggggagttgcctcatgggtttgccgcctattgttgtgcctgtacaccaatgttgggtctttgaggaaggaaggagcacaaatgagcatgggataaaggaggaaagtaaatccttgggctcccatactctctcatcacctacatccagaattcagagccttttcttattgtcatacatcaggcattgcttggccaccgttaattttaatattgggtgtccttttgtcaaaggaaatttggggatctatacgtggctcttcccagagaaacctctttactgtggccctgaagatcctcttcaattccttcaaaagaaggaaagattggggtatcagctgcaggaaactgaaatccaggcccatctccaaaaacagcagtttctggatgagtccgagagaagttctcaaccctaatttctcctccatctcctattccgttatctccatctccatcatcatctccatctccgtctccatctccatcatcatctatcatctccaatctccatctccgaagttatgcccacttcctggaa

SEQ ID NO: 5829 - DNA, 516 bp, Homo sapiens
  MAP TO AC004058.1; EXPRESSED IN ADULT LIVER, SIGNAL = 0.92; EXPRESSED IN BRAIN, SIGNAL = 0.94; EXPRESSED IN BONE MARROW, SIGNAL =   1; NT HIT: U91953.1, EVALUE 4.90e-01; SWISSPROT HIT: Q03307, EVALUE 4.80e+00
actgccctttcccaactatgaaattctaggaggggtggggaatttctggcaatacttcctcaccacaggtatagatgtgcaatcaaggttaacccatcagtgtactacattcctgtagaaataataagtatttctaggtaagcataaaaccacatcagtacaaattagaattatttgagactaggattaatatggatgctgtatataagaattttatgccatctccaactgggaatatgagttaaaagtattattataatcttgtggatgctggaagtcatccttgctgccataggaaaatgcctgcctgaaaataaagtcaacatataggaaaagatgacaagaaaatgaagagaagcattgttttgatgacatcgtgtatacctctggatgtccatgttagagtccatttacagcatttgataaatgctctattaatggtagcaagcaaggtgggggtggtggcatgagaatataattggtccagctttgatcagggttccaggctatgatgtg

SEQ ID NO: 5830 - DNA, 586 bp, Homo sapiens
  MAP TO AC005573.1; EXPRESSED IN LUNG, SIGNAL = 0.42; EXPRESSED IN ADULT LIVER, SIGNAL = 0.46; EST_HUMAN HIT: BF816305.1, EVALUE 2.10e-01; NT HIT: AL163201.2, EVALUE 9.00e-06; SWISSPROT HIT: Q11086, EVALUE 4.30e+00
tggtagattcagggtgaggcaaatctggcatgcgtttagtttcttggggcaagaatgcttcactatggctctaaaatatcactggaaatgttgggaaaagttgaaaatgtttttgacatcactcctttcttggggacgctgtatgttttcatgtgatcgattttgacaccctgaggaggtcaggagtctcatttggtctcacctagtgaggtaagagttctcaagtgatgctataatgcgtggggacaatttcttgcctttgacttttccagtttctggacaccagcagtggcatcactgtgacatttgtttccatcattgcatcacctcctctcactctgacactcctgcctccctcttatgaggatccttgtgattatattgagcacactggaattcaggaaaatccatcctcatcttaaaatccttaacttagatatatcttcaaaatcccttttgccatataagataatgtagtcacagttctctggattagaacagctttgggtgccattgttcaatctaccatagagaggaggccgatatcaagaaattcagcttacttccaccccatgccttactgaat

SEQ ID NO: 5831 - DNA, 577 bp, Homo sapiens
  MAP TO AL121924.12; EXPRESSED IN BONE MARROW, SIGNAL = 1.2; EXPRESSED IN LUNG, SIGNAL = 1.1; EXPRESSED IN FETAL LIVER, SIGNAL = 0.79; EXPRESSED IN ADULT LIVER, SIGNAL = 0.85; EST_HUMAN HIT: AU152688.1, EVALUE 1.00e-05; NT HIT: U60822.1, EVALUE 2.00e-03
aatgcaaaacacttccggtctcaagcattttggttaaggggtattcaatcgctacctctcaggtttctggcttatgcagggtatatagactcgcatgctgtcaactgattgactaggcaagacttcaggatcagtagttttacggacaatgtcaaaagtgttctgtttagatgtgttacttttgagatgcctgtaagaactttctcgtggagatgtcagtaagtggttggaaatatgaatctgaagcttgggggagaagttggggttggagatacaaatgttggggtcattggcatggaattggtaattaaagccaaggggctggatgatgatacctagggagagagtgtggtaggtccagaactgagcccagggcccattcaacattttgaagtcaggtagacttcaaagtcacaggagactgagaaagagcagccagtcaggtagagtgagaacctgataagtatggtatggaggtagctgagaggagaatgtttcaaggaggaaatggtcaactagatctgacattgccaagatatatgataagatgaaggcaggggaatctgtctgatttggc

SEQ ID NO: 5832 - DNA, 516 bp, Homo sapiens
  MAP TO AC010202.6; EXPRESSED IN BONE MARROW, SIGNAL = 0.96; EXPRESSED IN ADULT LIVER, SIGNAL = 1.9; EXPRESSED IN PLACENTA, SIGNAL = 1.3; EST_HUMAN HIT: BF171241.1, EVALUE 0.00e+00; SWISSPROT HIT: P05019, EVALUE 5.00e-32; NT HIT: U13800.1, EVALUE 0.00e+00
attgcaccctaacatgaggccactctgtttgatttgtgcagacaagcccacagggtatggctccagcagtcggagggcgcctcagacaggcatcgtggatgagtgctgcttccggagctgtgatctaaggaggctggagatgtattgcgcacccctcaagcctgccaagtcagctcgctctgtccgtgcccagcgccacaccgacatgcccaagacccagaaggtaagcccacctgggtgggatccagccatcctcaagtggtctctctcttgtgcatgtgggtgggccaagcagaaatcctgccccatagtctcctggcttacaagtcagaaaagctcctttgcaccaaagggatggattacatccccatctctttggtcactctgcattgcaaatttcccctcccaccgctatggacgatgtgatgattggaagatgttacaaaacagtggctaaacaaacatgggctttggtgtcagacaaaagtgaagtcctggctttctcacacaccagct

SEQ ID NO: 5833 - DNA, 572 bp, Homo sapiens
  MAP TO AC008996.5; EXPRESSED IN ADULT LIVER, SIGNAL = 0.8; EXPRESSED IN BRAIN, SIGNAL = 0.72; EXPRESSED IN FETAL LIVER, SIGNAL =   1; EXPRESSED IN BONE MARROW, SIGNAL = 0.58; SWISSPROT HIT: P10267, EVALUE 1.00e-111; NT HIT: X92887.1, EVALUE 0.00e+00; EST_HUMAN HIT: BG433950.1, EVALUE 0.00e+00
ccctctcttgctctcaccagcagaatacggtgttgccaattaaaagttgaatcaatgcaagtaagcaatctacaattttcacaggttatagtctgagagtctggtttaataactatatttcctacaactagcatataagggggctttacgcaactttgtaaaggaagtgttagactggaatttaggtcgacagtataaaatggcttacgatctcttgtttctaaagtttgatttccagaccaaattctaatgtggtgtgaggccacagtaagcctccataattctggatgttcaggaccagaaacaggacttattatttttggtcttggggtagagattcctttttctccccattcccaagggtagaaagactgcaattttttatgcttatgtttgtctaaactttctgttaagtcgctatcaacagctggactcacttgtgcacttggacatgactgagtttgtcctgagcaattgtggtagaattgacctcgaggtgcccaatctataatagttccgaattcattgttttgtaatatcaccgcactattggccacacattcttcccaaac

SEQ ID NO: 5834 - DNA, 591 bp, Homo sapiens
  MAP TO AC004107.1; EXPRESSED IN PLACENTA, SIGNAL = 0.81; EXPRESSED IN ADULT LIVER, SIGNAL = 0.67; EXPRESSED IN FETAL LIVER, SIGNAL = 0.45; SWISSPROT HIT: Q09966, EVALUE 1.30e-01; NT HIT: AB043547.1, EVALUE 2.00e-19; EST_HUMAN HIT: AA219449.1, EVALUE 1.00e-24
caagattagggtggggtgaccagccttccccatgcactgtggaaaggtcacacctggtcgaaccaatctgtgggtcccatggaaatcagacactgcctcctcaagcctgcctataaaatctgctgtggtcctccacatgccagcttttcccttttggacacccctctctctcacaagagagaaagagctgctgtcctttctctttcttttgcccactgaacctctgctcctgaacttgctcctcatgtgtgtccgtgtctttaatcttcttggcatgagatgatgaacccgggtatttaccccagacaacgatgcctacagatttacaaaataatctcaaacaagaaaggaaactgtatagaaagctgactttacttcaaaagggattcttatttaaaagcatgataatggattaattatcattagaaaacagaggagcaggctatctatatagagttacacaaagagaatctgaacacctccatgttctcagatagctttaagaataggtttgtaagctccaatttatctttgggatagggtaataaattccaccatccaaattccaatagccttctgggaaagttgatg

SEQ ID NO: 5835 - DNA, 577 bp, Homo sapiens
  MAP TO AF230666.1; EXPRESSED IN BRAIN, SIGNAL = 1.8; EXPRESSED IN PLACENTA, SIGNAL = 1.9; EXPRESSED IN BONE MARROW, SIGNAL = 1.6; EXPRESSED IN HEART, SIGNAL = 2.3; EXPRESSED IN ADULT LIVER, SIGNAL = 1.3; SWISSPROT HIT: P01266, EVALUE 3.00e-24; NT HIT: X06062.1, EVALUE 0.00e+00; EST_HUMAN HIT: AU141143.1, EVALUE 1.00e-112
ccgtggagaaaactggactcagaaaagctctgttaatgccaggcctgcactctgatcccatctcccctccacaggaccgtgctctggggtacctgactgatgtggcaccagcgagatcagcccttctctgactcagtccacaggatactagctaggcctgttctgtggctgccaccccatcactgcgtgtccttgggcgggtcattcccctctcagctgtgtccccttgggaagggagcatgagttttcctgggctctgccccctggaaatttccctgcagttctatctaacattgctccttgtacccacaggtctgtcattttgtcagctacagaaacagcagatcttactgagtggctacattaacagcacagacacctcctacctccctcagtgtcaggattcaggggactacgcgcctgttcagtgtgatgtgcagcaggtccagtgctggtgtgtggacgcagaggggatggaggtgtatgggacccgccagctggggaggccaaagcgatgtgagtttcactgagcgcctgcacccctagagctggggaggggctgaagctttcctcactg

SEQ ID NO: 5836 - DNA, 554 bp, Homo sapiens
  MAP TO AL022343.6; EXPRESSED IN PLACENTA, SIGNAL = 1.4; EXPRESSED IN BONE MARROW, SIGNAL = 1.1; EXPRESSED IN HEART, SIGNAL = 2.2; EXPRESSED IN ADULT LIVER, SIGNAL = 0.95; EXPRESSED IN LUNG, SIGNAL = 2.1; EXPRESSED IN BRAIN, SIGNAL = 1.4; NT HIT: gi15305376, EVALUE 1.00e-69; EST_HUMAN HIT: BG026373.1, EVALUE 2.00e-69
attggaggtttcctgcactgaatattaagttgtttcttttctaaaaatgaaaacaacttcagtctcttttagaatgtaccgtaatctctactgagtagaggggttgttaaagataacattaaatctcattacgttaactgtactttctttgtgcctaaaacctggtttcactttaccccccttcttgtgtgctgcagctggtggatagcgaggtggtcatgctttctgcgcactgggagaagaaaaagacaagcctcgtggagctgcaagagcagctccagcagctcccagctttaatcgcagacttagaatccatgacagcaaatctgagtaagtccaatgttttcattgtacattacttttaggaatgaaaacaacttgggcagggtttggtgtaatttcagagcttttcaggaacacatgaaattctgggttaacaggattttttggaaaatcatgatttcatattttgattagttgaggattccacagaaaatgatgtaaagtgtagaaattagttctgtttctgcctcaggtcagctccggacacataa

SEQ ID NO: 5837 - DNA, 575 bp, Homo sapiens
  MAP TO AC016597.4; EXPRESSED IN HEART, SIGNAL = 6.1; EXPRESSED IN FETAL LIVER, SIGNAL = 4.2; EXPRESSED IN BONE MARROW, SIGNAL = 3.6; EXPRESSED IN PLACENTA, SIGNAL = 3.9; EXPRESSED IN ADULT LIVER, SIGNAL = 3.8; EST_HUMAN HIT: AW451984.1, EVALUE 0.00e+00; SWISSPROT HIT: O68826, EVALUE 7.30e+00; NT HIT: gi15318237, EVALUE 1.00e-119
acacagccaagaagcaatccagtgccccttccactcacagctaagttcctgttgacgaggcggcccagctccccaggcgtggctgtgttccggatatccacatcgtggggcgacacataaagctttgtgtcattcaagtcaaagaactcgacttctgtgagacccacccaccacgagttgccccagttggacaggatctccatggtcacgtagatggcatctttgatctcgtctgccctcattctctgtttgtccttaaagaagagaaaaataacaccaaaggattaagtcatgacaggcttgaattcggctctgcctctgccaccactgccttcaaaaagttagttaaccttcagggtctcagtctctccatctgtacaatgaggataagaatagcacccactacctatggttattacaatgattaaatgaattcatactgtaaagcattcaaaatagaggccctgtgtaactggcactctgtgagcattctgtttgaaagtttacaaataaataaaaatgtctaaaaagcattgaattctgcctgaacatgcacgtctctcccccactactca

SEQ ID NO: 5838 - DNA, 538 bp, Homo sapiens
  MAP TO AC003107.1; EXPRESSED IN ADULT LIVER, SIGNAL = 0.6; EXPRESSED IN PLACENTA, SIGNAL = 0.75; EST_HUMAN HIT: AI750257.1, EVALUE 1.00e-107; SWISSPROT HIT: P49747, EVALUE 3.00e-35; NT HIT: gi14766986, EVALUE 1.00e-108
agtccgtggacagattcagggtctgggaggatggggggctctgcagaaggacttggaaactaaggaaaagtttagggctgtgtgagagggtttagggtccataggaagactggggggccctgagaatgtttgagaatttgtgcaaggaactgggaggatttggggactgcgggagcccagaggagggctgggacagctttgaggtccatagtatgaggctagggggctggggggctctaagggctgtaaagggttttacggagggtcatgggagggcatgaggaccgcagaggtcaggcacggacggccctggcaccttgagttggatgccaggctcggccacagcacggaaggggttcgcctgccaatacgtttgctccatctgcttccacatgaccacgtagaagctggagctgtcctggtagccaaagatgaagcccgcatagtcgtcatccgtgaccgtgttcacatggaacgtgccctcgaagtccacgccattgaaggcagtgtaacctagggatggaaagagagcagtggc

SEQ ID NO: 5839 - DNA, 526 bp, Homo sapiens
  MAP TO AL109839.11; EXPRESSED IN BRAIN, SIGNAL = 0.43; EXPRESSED IN BONE MARROW, SIGNAL = 0.53; EXPRESSED IN ADULT LIVER, SIGNAL = 0.57; EST_HUMAN HIT: BF085839.1, EVALUE 0.00e+00; SWISSPROT HIT: P53043, EVALUE 7.00e-04; NT HIT: gi14771042, EVALUE 1.00e-78
tggtgaggaaattgaggtccaaaagttaggtaggtcacacaagatcttccagctaccaagaggcagtgccaaggctagaacctgggttgctttttatcatttatatatttttatgtgcatgcaaaaatgtttttatatcaggattccccaacttcttgatgaaaaactgttgaattgcccagaagctattaattgggggaagtcattaatcaggaaggatgatttacagcaggggaggaaatctctgggagagaggattgtagtcagtttggaagggacgatgctgaagagacctcactgatctcagttgggtgctgctccatggtttttttcctcttctgaatttgtatctagtgccttctgctggggatgtggagaaagccagagttctgaaggaagaaggcaatgagcttgtaaagaagggaaaccataagaaagctattgagaagtacagtgaaagcctcttgtgtagtaacctggaatctgccacgtacagcaacaggtatctcctatacagctgctggcc

SEQ ID NO: 5840 - DNA, 545 bp, Homo sapiens
  MAP TO AC012156.14; EXPRESSED IN PLACENTA, SIGNAL = 2.6; EXPRESSED IN ADULT LIVER, SIGNAL = 2.2; EXPRESSED IN HEART, SIGNAL = 2.7; EXPRESSED IN BRAIN, SIGNAL = 2.2; EXPRESSED IN LUNG, SIGNAL = 1.5; EXPRESSED IN FETAL LIVER, SIGNAL = 1.7; SWISSPROT HIT: P20740, EVALUE 2.00e-09; EST_HUMAN HIT: AI492147.1, EVALUE 4.90e-02
tatgtgggtggtgttcatgcacctgtaatattcttttctatattaagcagaaagaagtatttacctcaaagctgatgcatttgaagaaattttctccagtaacattttcttcaaatattttggtctggacctcaccatagttgagggagaccgtcaaaacaacagattcagtgagattaaaaagctgggcacaagctttatccaaagagccttcttgtagaacagaaggaatcagcagaacatactgcctacaaaattcaagcaagaccattacaattgaatgtgtgattagttacttagcaattattgtgttaattgaagaatttttgagtttaagagaagtatgttatttttaaatgttagaaatacatcaaatggctaaatctgtatgaaacagaaagatgttggcatatgaattaaatttttaaaagtcaaaaaggaaatcccaattaaaaatcagcaggtaatttgtcattagttctataaaggttaacatcatcagtgttcttgtacaatgcttttgcccccaaactgacacagcacat

SEQ ID NO: 5841 - DNA, 579 bp, Homo sapiens
  MAP TO AL109981.1; EXPRESSED IN ADULT LIVER, SIGNAL = 3.4; EXPRESSED IN HEART, SIGNAL = 3.4; EXPRESSED IN HELA, SIGNAL = 2.5; EXPRESSED IN BRAIN, SIGNAL = 3.6; EXPRESSED IN BONE MARROW, SIGNAL = 3.8; EXPRESSED IN FETAL LIVER, SIGNAL = 3.5; SWISSPROT HIT: P40355, EVALUE 3.20e+00; NT HIT: gi13812105, EVALUE 8.60e+00; EST_HUMAN HIT: BG311161.1, EVALUE 7.00e-57
aagtccctttcctgaggagcttatggcattaaaggtgggataagaaatatttttaaaatacttcaaaaacaataaaagtaacgtgtgaataaataccaaagaatgtgataaaattgatgtgtcttagaagtgaaaagatgaaaattttaaatagaagttgcctgataaaagtatgcttatgatgttagaagttagttcatttcattaccaactgttcactaggtttttaaatcaagtacatctcaatcttagttctgctgacctgttgttctagtaaagaatcaccatcagccttgttggagcacaggcattatatatcttatatatcttttatttctaggcatacttccgacagggtgttgccctccagtaccttggacgtcatgccgatgccctggcagcctttgcatctggactggctcaagaccccaagagtctccagcttctggtggggatggtggaagccgccatgaaatctcccatgagaggtaaatatgataaaagtacttggtataacattaatttaaagaagatcatttctagccttccaagactttaggctcaggcacagagaattga

SEQ ID NO: 5842 - DNA, 523 bp, Homo sapiens
  MAP TO AC035149.2; EXPRESSED IN PLACENTA, SIGNAL =  18; EXPRESSED IN ADULT LIVER, SIGNAL =   3; EXPRESSED IN HEART, SIGNAL = 3.7; EXPRESSED IN FETAL LIVER, SIGNAL = 3.8; SWISSPROT HIT: P49313, EVALUE 4.80e+00; NT HIT: AK024505.1, EVALUE 7.80e+00; EST_HUMAN HIT: AW294065.1, EVALUE 4.70e-02
gctgctctattctgggatggccatggagcatcacgaaaggctttgctgagcacatttgtgctggacttagaatgatggctaggagttactaggctaagaaagagggatgtgccaaagatctttaaggaacttaacatgaatgtggctgaggaaaagtgagggatgagcttagagagtgtggaaagggtcagataatggaggacacagtcagtcgtgataaggattttgcttttttatcttaaaagcaatggagctcatgtactttcctcttgatctgcccaagtacttcagtcttcttttccccttttatgcttttcatctgtccaagctcttcagctgagctttcctcactgatgacagcactatctggagtgaaggaggtgcagatcctgagatggactgcacaccccttggggctggatggacagactactcttcgagtgagataagggatgcagtgtaaagggcgagtatgttgcctcactcaatcacatgttcaccaccctctctgccaacctttctg

SEQ ID NO: 5843 - DNA, 569 bp, Homo sapiens
  MAP TO AL109910.27; EXPRESSED IN FETAL LIVER, SIGNAL = 1.7; EXPRESSED IN BRAIN, SIGNAL = 1.9; EXPRESSED IN PLACENTA, SIGNAL =   2; EXPRESSED IN ADULT LIVER, SIGNAL = 2.3; SWISSPROT HIT: P14335, EVALUE 2.40e+00; NT HIT: gi15295249, EVALUE 2.10e+00; EST_HUMAN HIT: R19890.1, EVALUE 2.00e-01
ggactcctttgacaagccagtgaaagaaactgaccatttacctagaaaaactcaccaacacccaccattttgcccagttttaaaagtctcacaaaaccaacaaagcccacacggagacctcctactgggaataccacatctccaggggccacgcctccagcttccacgcctccagtggccatcactgcctgctgccttgtcccagaaaccatggcaagagtgcccaggcttgagcccacacgggtgtcagtggggtgggtgacacacatctcttcaaaaagcagcatccttgttccctgcatgcttgctgagcttgacataagtggagtcccccaaacccagaactcaggtcccccaccagaccttagtttggaatgactgaactactgatcagtaggatactccagccccagaagaattaggaagggctgaggggcctggggagtggtagctccttcctaagaactctccagcagacccccatgtcctgtaatacacagagaggagagaaaacaccactcaacctgttgtccgtggggaaagggccctgtggtttccaagagaccgaa

SEQ ID NO: 5844 - DNA, 537 bp, Homo sapiens
  MAP TO AC010205.5; EXPRESSED IN BONE MARROW, SIGNAL = 1.1; EXPRESSED IN PLACENTA, SIGNAL =   3; EXPRESSED IN ADULT LIVER, SIGNAL =   2; EXPRESSED IN HEART, SIGNAL = 2.8; EST_HUMAN HIT: BE695877.1, EVALUE 6.00e-91; NT HIT: gi14766988, EVALUE 1.00e-91
tgattgtctttgctagctgccaacaaaatattctagtcagttaactacatttattgaacaattaattcaggacactctaaaaggaagtcattaaattaatttactcccatagctaaaaggccatctaccctagttctcttgttttatacgtgaggaatatctaaagaaaaattttatagaatatcattcccccagagaatcatatcagcaaatataccaacttgggacataagtccatttaaaatatatttggaatccacatccttgttttgttaggtcaggattatccatatgtaactaataaccctggctctctgttatttcaggaagtttgtttgcctgaatgacaacattgaccacaatcataaagatgctcagacagtgaaggctgttctcagggacttctatgaatccatgttccccataccttcccaatttgaactgccaagagagtatcgaaaccgtttccttcatatgcatgagctgcaggaatggtaaattctcatgttttatatatgcatgtgtgtgggtgagtgt

SEQ ID NO: 5845 - DNA, 600 bp, Homo sapiens
  MAP TO AC008509.5; EXPRESSED IN BRAIN, SIGNAL = 0.94; EXPRESSED IN BONE MARROW, SIGNAL = 0.69; EXPRESSED IN PLACENTA, SIGNAL =   1; EXPRESSED IN HEART, SIGNAL = 1.2; EXPRESSED IN ADULT LIVER, SIGNAL = 0.88; EST_HUMAN HIT: AW950418.1, EVALUE 0.00e+00; NT HIT: gi14734562, EVALUE 0.00e+00
aacaaaagaggggagaaaggtttctgttatttttaactattctccttacctaaagcaataaaaatgtagagaagtgacagatatttaccttgttcactggattctcttatgtagggcttaaggtgggacattttgataggtcttttcagtctaaccccagtgttgtctctcaggacagcacatccactttctgtaatatagtctatgacacaaggaccaacccattcagactgaaaacgaccatccttccaccaatttttcctttgtcttaaaacttcatgacccacttttaaatgaaatggatttaattgtttgggtttctttttaacaatgatcttgcttttatttagttcatccaaattgttgttctccatctacaagtgtaaaaagaaaaagaacaaagagatgaaagagctataatatcttgaaggtaaatgcaaataatgagaatattgtaacaaaatggtacttgagatgctactaaaaggtaggtatgaattctatttaattcttaaaacatttcaaagtcagtattattagctcctactttatatagaaggtaaactaagataggttaagtaatttgccgaagtcaaacaa

SEQ ID NO: 5846 - DNA, 520 bp, Homo sapiens
  MAP TO AC007379.2; EXPRESSED IN LUNG, SIGNAL = 3.5; EXPRESSED IN BRAIN, SIGNAL = 3.2; EXPRESSED IN BONE MARROW, SIGNAL = 2.3; EXPRESSED IN PLACENTA, SIGNAL = 3.6; EXPRESSED IN HEART, SIGNAL = 2.9; EXPRESSED IN ADULT LIVER, SIGNAL = 3.7; EST_HUMAN HIT: BG054538.1, EVALUE 4.00e-33; SWISSPROT HIT: P94210, EVALUE 6.30e+00; NT HIT: gi14737906, EVALUE 3.00e-39
gcacattcctttcccttcaggtgcactaagatacggaagctagaagcagacatgggggacatgcctgcaactctagaaagctgtatgaaaacagacacacaacactctctgtcagataaccacaacaaagagacacagaggcagtccaaccctctgataagcactgtgagactgaatcacggaatactcttagtctgttaacagagtgtggctctgacttaacctggccagccgcccctctcacactgattaaaaataaacctgtccctgttgactgtcaagctacccttcaggtttctctcctctttctttaatccttacattggttgctgatacccaggaccggtattggtggcagaggctcccttacatcccaggaagctgtgggcaatggcagcttatcctaagcaaactcctggatcctgagagtctctggccacctgccccatctttttgctcattttactcttcaagcgatttgtgtgagaaggacaactgacctgaaggaaactgcaaggct

SEQ ID NO: 5847 - DNA, 546 bp, Homo sapiens
  MAP TO AC010609.5; EXPRESSED IN FETAL LIVER, SIGNAL = 0.8; EXPRESSED IN HELA, SIGNAL = 0.98; EXPRESSED IN BRAIN, SIGNAL = 0.88; EXPRESSED IN BONE MARROW, SIGNAL = 0.66; EXPRESSED IN PLACENTA, SIGNAL = 0.84; EXPRESSED IN ADULT LIVER, SIGNAL = 0.94; NT HIT: AF361887.1, EVALUE 8.00e-03; EST_HUMAN HIT: AI806748.1, EVALUE 8.00e-04; SWISSPROT HIT: O43524, EVALUE 1.50e-01
actacacaatggcccaggagaccactgcaggagactgtacccagcttcctggcttctattcttggccattgtataatctgctgaccccatagctgtcagttcacttctagatggagggactcacacccactgcttcaaccttggaaacttttcatgggagttggaatcaaatccaaactccttgccatgatccacaagggcctgcagagtttggcttctgcccctcgtcttgtgcccctctcttgaactctgcatgttcaaatctctgttcctcacgcaagccaagctttttccttcctcagggtctttgtacttgccgttccctctgcccagaatgctctttcccatttcttcatttaactagttatttcctcaaacttcagtttagctataaattccttctctgaccaccccacctcccagttcagccagagtggctgcctggtcttgccatagaacctaccacattctctatctgccctatgcagttatacacttgcttgctgtctgtcccatcccctagaatgcaagctattagggtggtgc

SEQ ID NO: 5848 - DNA, 561 bp, Homo sapiens
  MAP TO AC005685.1; EXPRESSED IN HEART, SIGNAL = 0.96; EXPRESSED IN BRAIN, SIGNAL = 1.3; EXPRESSED IN HELA, SIGNAL = 1.6; EXPRESSED IN ADULT LIVER, SIGNAL = 1.1; NT HIT: AF057728.1, EVALUE 8.30e+00; SWISSPROT HIT: P06460, EVALUE 3.10e+00
tagttgtcccagagatgcccaaggatagacagtgatggagggcataaacaagaaaatagtaggctgcacctgcaagaaacttgtagaagcctgtgcagaacctgtccctgtagaggtagctgcaatgagaggtaaggcctggagcacatgaagacgtaagtgagaggtgttagaatcaatcctttaatgaagatcaaaaataagcttagccatactatccttacatgtatagtgtatataatgaatatgtagatgtctgagacatttcctacacatccacatatgcctatgtatttctcaatatatacccctgtaagtataggtggatatgcacacccttacacatatgtacacatatacctggacacatacatattatatacatctgtaaatatttaatttaaataactacttatcacatgtgaaacacttgtatcatatttgataatggcaatggtaatagaaattttcaatacttttctcatctacagtttagtgctacgtaagaaatatggctactctcattttggcttcattggaagggaacaccatttgaccttg

SEQ ID NO: 5849 - DNA, 578 bp, Homo sapiens
  MAP TO AC021092.1; EXPRESSED IN BONE MARROW, SIGNAL = 1.5; EXPRESSED IN PLACENTA, SIGNAL = 1.9; EXPRESSED IN ADULT LIVER, SIGNAL = 1.8; EXPRESSED IN HEART, SIGNAL =   2; EXPRESSED IN BRAIN, SIGNAL =   2; NT HIT: AF228417.1, EVALUE 2.00e-10; EST_HUMAN HIT: AA305027.1, EVALUE 0.00e+00; SWISSPROT HIT: Q9V3T9, EVALUE 1.10e+00
tgttcttcattgcctctcccaaaccattgtacttgctcactcttccaacttttagttttggcctcatattatcagtttatagtaatcaatcatcaatcatctactgacccctaaaaagtcattccccatttagtccttgaagattgtatctcctcgcttgttctctttccaataatcctccgtagtcctgggaggcgtttagacttcaggaattgctgtctattcaatattttcgctcaaggactcaggcagagggaaggacgactctcagggtcacagtccacattccctaccaagcgctcagcgatataggattcgttccccatgggcagtgcgggaatcgtaggcaaggagcaccgcggagtcccatcgcttttccctgaagggtgagattctgaacgtttttccctcagcattctgagtgtaatccaaacgctcagtggagtcgtggtccatttgacccacgcagggggatccggggaattctgggaaatgtagtcccgccaatcagtggagtcgcgggcacttccgctccagggaagagggggcgattgtcacggcacattccacggtagttt

SEQ ID NO: 5850 - DNA, 531 bp, Homo sapiens
  MAP TO AF067846.1; EXPRESSED IN FETAL LIVER, SIGNAL = 1.3; EXPRESSED IN HELA, SIGNAL = 1.2; EXPRESSED IN PLACENTA, SIGNAL = 5.5; EXPRESSED IN ADULT LIVER, SIGNAL = 1.1; EXPRESSED IN HEART, SIGNAL = 1.8; SWISSPROT HIT: Q9ZCN6, EVALUE 1.50e-01; NT HIT: AF223391.1, EVALUE 2.00e-52; EST_HUMAN HIT: AW971754.1, EVALUE 8.00e-44
ttggtgatgctggtgtaagcaaaccattctgtgctgtcagtcacacatttatgtacagcacatatatatgtatagcacacaatacttaagataataaactatattattgttttacgaatttgctatacttcttatcactactttagagtatactttttctacttataaaaaaatacaagttaaatgtaaaacagtctcaggcagttccttctggaggtattccagaagaaggcactgttatcacaggagatgacagctccctgcgtgttattgcccctgaagacctcccagtgggacaagatgtggaggaggaagacagtgatattgatgatcctgacttctgtgtaggcctaggctaatgtgtgagtttgtgtcttggtttttaacaaaaagttcaaaagtttaaaaaaaaaggtaaaaatacaaaaaaagtttatagaacacatatatatagaaaaagtattttttgtacaacatacaatgtctttgtgttttaagctattatttccaaaaagtcaaaacgtttaaaca

SEQ ID NO: 5851 - DNA, 588 bp, Homo sapiens
  MAP TO AC012310.4; EXPRESSED IN ADULT LIVER, SIGNAL = 1.1; EXPRESSED IN HEART, SIGNAL = 1.3; EXPRESSED IN BRAIN, SIGNAL = 1.1; EXPRESSED IN PLACENTA, SIGNAL = 1.1; SWISSPROT HIT: P24849, EVALUE 1.90e+00; NT HIT: AF114379.2, EVALUE 5.60e-01; EST_HUMAN HIT: BI459025.1, EVALUE 6.00e-54
cggccagaaaggtaactcaccaaccctgccaccaggtctccttggctggtcgaaagcaaacaagctaggcagcgggaagaaaaaggcggtgcctgcccggtgattagccagctgactcctctcttgattggccaaggtgggttcttgatgaccttcgcgatggaggggaaatactgctgcacctgcgtgtttctgcccagatgccccaattgtctttcttcacccaggactaaacagggtctgctgattaggagacggtccacaccccgtttatgatgttggagctcatggggcatctgaccaagaacctccaaaacaattgacttaggcagtgccgggggaaagaagttttccaccaataatctcaatttcggataaccatctatacagtaagctccatgaggggaatacgctgtctagtctacataaccacctggcaaggatcctttcaaatctgagggaggccataaatatttgtggaacaaatgcaaccaaaggcatgtttaacaggtgatagaatttgcggaggcacgtcctagatcctccacccggggggcccgtcttggctgcctattggaatcacctgga

SEQ ID NO: 5852 - DNA, 580 bp, Homo sapiens
  MAP TO AC006942.1; EXPRESSED IN PLACENTA, SIGNAL =   1; EXPRESSED IN ADULT LIVER, SIGNAL = 1.6; EXPRESSED IN HELA, SIGNAL =   1; EXPRESSED IN BRAIN, SIGNAL = 2.1; EXPRESSED IN FETAL LIVER, SIGNAL = 0.87; EXPRESSED IN BONE MARROW, SIGNAL = 2.1; EST_HUMAN HIT: BI823246.1, EVALUE 0.00e+00; SWISSPROT HIT: P37386, EVALUE 1.90e+00; NT HIT: gi14786903, EVALUE 5.00e-63
agatgcccacctcagatgacagaacaatgagggtgatgctgtggaatggaagtgagaagaatgagtcaaggcctggggaatcaggaaggggtatgttggagtccgcccattgatcctagaacaccagatacatcctctctcagaccaacctgcctttcttatagagaacatcagggatcaaagagggtaactggcttgctaaagatcccatagccaaattaacagctgcttttagagagctggaaggcctccggggtcatcttcaacagggactatcacccaggccctgtccctgtcccacgttccctcctggggacctgtcatggaagcttttccacaccacagtcgtgttctcggtcctcgcagagctcagctgcacctccagattctgcccaaacatgtggactccattgagggaaccgatgacagagaacgggagctaaggaggggttagggacatcagacaagagcacccccccatccccttcccccttaggacccaagtgtgccagctcccagccccatcctctttccatatgacctggcagtgcctctttggggaaccaggcttattggtcca

SEQ ID NO: 5853 - DNA, 560 bp, Homo sapiens
  MAP TO AL117187.3; EXPRESSED IN ADULT LIVER, SIGNAL = 5.1; EXPRESSED IN HEART, SIGNAL = 5.1; EXPRESSED IN LUNG, SIGNAL = 5.9; EXPRESSED IN FETAL LIVER, SIGNAL = 6.4; EXPRESSED IN BONE MARROW, SIGNAL = 4.9; EXPRESSED IN PLACENTA, SIGNAL = 5.3; EST_HUMAN HIT: BG057788.1, EVALUE 0.00e+00; SWISSPROT HIT: P08594, EVALUE 4.10e+00; NT HIT: gi14748136, EVALUE 6.00e-53
ttggggtggacttgtctctcatgcaggctgtgctgcaggggattcatgaagaggatcagggaacaggcagaattggaagggacgccctggctgggcctgggcagagcactgctgggtgatgtcacctactttacactgcagcgtgacatactgacttggatttggttgttctgtctttcagtcccaggaatccccaaacctggaaaacatagcaaaccccctagaagaaaatgtaacgaaagaatcaatcagtagtaaaaaaaaggaaaaaaggaaacatgtggaccacgtagaaagttcactatttgtagcaccaggaagtgttcaatcctcagatgacctagaagaagacagtagcgactacagcattccttccaggtattttattcatctcttttcacccgtaaggtggagccagagagttagagagttatttgcagtttctgatttgatggggtgggaggtgcaggcatgggattggacagcaagggaaatacagcttcatacacaatcctcattctctacacctgggttccccgacccaccctcatcattaccag

SEQ ID NO: 5854 - DNA, 529 bp, Homo sapiens
  MAP TO AC037199.1; EXPRESSED IN ADULT LIVER, SIGNAL = 2.7; EXPRESSED IN HEART, SIGNAL = 3.8; EXPRESSED IN FETAL LIVER, SIGNAL = 4.2; EXPRESSED IN BRAIN, SIGNAL = 2.3; EXPRESSED IN LUNG, SIGNAL = 2.3; EXPRESSED IN PLACENTA, SIGNAL = 3.9; EST_HUMAN HIT: AV718078.1, EVALUE 9.00e-53; SWISSPROT HIT: Q9Y5K2, EVALUE 9.00e-04; NT HIT: AL163246.2, EVALUE 3.00e-45
tcaaactctcctccagccagcgcttgcctcttagctggcgctctgccccagacccacccagcactcacttctggaggcagtgtgcagccgacagcacccactgtggatgctctaagatgccccagcgtcttaaagttttccactgacggtgctggctgcctgccagggctgcaagtgcagactgtattcctgttgccaccaatgaggactttgctggcactggagaaagtgcttgggaatggagtctgggatccttcagggggaatcacagctcctggggatggaatcaggacacaaagtggaggggttcagagtcgagggtcagggttaggattaggaaggtgtgggttgtattgaggggtgtgatggttaatatcaagcatcaacttgattggattgaaggatggaaagtactgttccctgggggtgtctgtgagggtgttgccaaaggagattaagattttacttagtggactgggaaaggcagacccaccctcaatctgggtgggcaccatctaatcagctgcca

SEQ ID NO: 5855 - DNA, 522 bp, Homo sapiens
  MAP TO AC044786.2; EXPRESSED IN LUNG, SIGNAL = 2.9; EXPRESSED IN HELA, SIGNAL = 2.2; EXPRESSED IN FETAL LIVER, SIGNAL = 1.7; EXPRESSED IN BONE MARROW, SIGNAL = 2.1; EXPRESSED IN PLACENTA, SIGNAL = 1.7; EXPRESSED IN HEART, SIGNAL = 2.2; EXPRESSED IN ADULT LIVER, SIGNAL =   2; EST_HUMAN HIT: BG952859.1, EVALUE 7.30e-01; NT HIT: AE006768.1, EVALUE 5.00e-01
gtggtggaaacaaggagaccacacaggagactgttcaataatccaatgaagagattaaaattacaccaactcaagatataaatcagaggctggatcaataggaattcatgatcatgtggatacagggattaagatactcagagatatcaggacaactgtctggattaaatttgaacaacagtgcgagtgtggaaaagttgacagttactaagaagggaagattagggaggtaagaggagttttgcacatgtcgcttttgagatgtcattgaggtatcccagtggacataaccaggaggtctttggaggtacaaggctggagcacagaagagacattaaggtggaactactgtgcttagtgccttcatttattaagattaatctagtaccatttttcgattagcttccatcaaatgtgattttgtttaaaactcaaaaccaccatctgaaacagatgaagtgagcattaaccagttttatagtgagttagtactcttgtgatggcagagccaaatcaagcaat

SEQ ID NO: 5856 - DNA, 557 bp, Homo sapiens
  MAP TO AC018557.5; EXPRESSED IN PLACENTA, SIGNAL = 0.75; EXPRESSED IN HEART, SIGNAL = 0.94; EXPRESSED IN ADULT LIVER, SIGNAL = 0.87; EXPRESSED IN BRAIN, SIGNAL = 0.95; NT HIT: gi14739656, EVALUE 4.00e-05; SWISSPROT HIT: P55085, EVALUE 1.40e+00; EST_HUMAN HIT: BG428960.1, EVALUE 8.00e-07
cagacacacaatgaccctggtcaaaccgtgaagggttctgcgttttgtttactactgaagattcctttgtacttctggctcccatttatccctgaagtcatgcatatacaagcgcataatggtagatgaagcagtgggtttctctatgttggattctcagatccaccattctgtggctccttgtaaaacagtcccattttcctttaggaagattgttatctttaggagttgtcttcctgatcaaggacttggagtcaaataaattctggcagaaaagcaaagttataattactcttaagtttttttgatgattaaaaatagtgaaattataatccacgatctcaaaagaagttgttaaatgtagagcgtacatgtgttttacaaaaccacacaaagacagttcaagaaaatgatactacagaccaatattccttatatgaacacagacacagaaatcctcaacaaaataccatatagaaaataaaacccagcataatggagaaagaataatacaccaaaccaatttgatttatcccaggaacaaaaaggttggtgca

SEQ ID NO: 5857 - DNA, 530 bp, Homo sapiens
  MAP TO AC010169.7; EXPRESSED IN ADULT LIVER, SIGNAL = 0.6; EXPRESSED IN BRAIN, SIGNAL = 0.54; EXPRESSED IN HELA, SIGNAL = 0.58; EXPRESSED IN BONE MARROW, SIGNAL = 0.6; SWISSPROT HIT: P32241, EVALUE 3.00e-18; EST_HUMAN HIT: AW630780.1, EVALUE 5.00e-82; NT HIT: U11084.1, EVALUE 0.00e+00
gcctgaagggctgtgtctacctagacggacattctctttctaattgtgacagaggccctttatagattagcagtggccctgtgtatttcgggaactaaagggaaatggaaagatgttcacaaaatctgtcccacaggtcagccctaggtgcagctgcaacctgagggacttgtcctgggatcagacattttgaggactttcttgacccttggctgatatccttgcaggcaggacctgcagctaagcaagacgtaggactgcaagctgggttggcaccctccccctagggagttctccaggccttgccccctctgtccccagcctggaagccctccctggtaccataccccagccgatgagtatgtacccccagaagtacttccgctcagagaagaaggagacggcaagcagggtgtacaggtagaggccctccaccagcagccagaagaagttagccatgacacaatattggaaaaagaccatggctgccttacagcccacctgcagggggaggagaaaagacggggttc

SEQ ID NO: 5858 - DNA, 560 bp, Homo sapiens
  MAP TO AL034409.4; EXPRESSED IN LUNG, SIGNAL = 3.2; EXPRESSED IN FETAL LIVER, SIGNAL = 2.8; EXPRESSED IN ADULT LIVER, SIGNAL = 2.9; EXPRESSED IN HEART, SIGNAL = 1.6; SWISSPROT HIT: P53285, EVALUE 1.10e+00; EST_HUMAN HIT: H88396.1, EVALUE 1.00e-112; NT HIT: AL163213.2, EVALUE 0.00e+00
cttgccactaagggtgaaggatcaaggcaggcgtccccatggtgatcagacacctctgaaatgtgggtgaataatcaagcaggcgtccccacagtaattaaacaccaagggaagactttctttccgagtccgtgactggagccggcgttttgggttcacggataaaacgcatctcctctgtctctaccagaaaaggaaagaaactgaaaataagagaagggagaaattgaagtgtggcaccaagattgaaaggagaaagaggttgagggatagtgagagaggttggagaagagagtaaagagaggctgcttaccggatataaaattggtgagatgttccttgggctggttggcctgaggaccagaggttgtaggtggatctttctcatggagtaaagagcaggaggacaggggattgatcttccaagggaggtcccccgattcgagtcatggcaccaaatttcagatgcgtctgtatgaagagaccaccaaacaggctttgtgtgagcaataaagctttctaatcacctggctgccggcgggctgtgtccgaaaagagag

SEQ ID NO: 5859 - DNA, 590 bp, Homo sapiens
  MAP TO AC022154.3; EXPRESSED IN ADULT LIVER, SIGNAL = 0.8; EXPRESSED IN HEART, SIGNAL = 1.1; EXPRESSED IN FETAL LIVER, SIGNAL = 1.1; EXPRESSED IN BRAIN, SIGNAL = 0.93; EXPRESSED IN HELA, SIGNAL =   1; EXPRESSED IN PLACENTA, SIGNAL = 1.3; EST_HUMAN HIT: AA502354.1, EVALUE 0.00e+00; SWISSPROT HIT: P50234, EVALUE 8.00e-06; NT HIT: U92322.1, EVALUE 0.00e+00
ccttggtgtggtgaggattctccacgccccgctgcctgccctgccacagcgcatcaaggaacctggacagaatcgacgtgtttattatgagggtcgtgggtgcggggtctcagaggcctggccggggctggggctggggctggagttgggtctgggctcacgctccaggctggtgttgggctcaaggctgggcttgggctcaggctcagggctgggctcaggatctgggctgccgtcctcctccgggtcttcatcccaggggaaggtcggcatcccccgcatctgcttgcggtaggcacgatcgaaggcttcgctctgggccaccgtgaagtggttcttccagtcgccacagacccctggagaagagggggcaccagggggtgaggagcctctggggagcactgcgcccctacctccaacattccagcaacctccttccccttcccggcctttggcgaggtgttccctttgccagaaacaccgtcctccctaccctccacattgccccctttgtgtcctatggtggcagagtcttggcctgtcacctggcgccgttctcacctccgccctcactgcctctgctactgcag

SEQ ID NO: 5860 - DNA, 561 bp, Homo sapiens
  MAP TO AL031600.4; EXPRESSED IN BRAIN, SIGNAL = 4.7; EXPRESSED IN FETAL LIVER, SIGNAL = 4.1; EXPRESSED IN LUNG, SIGNAL = 1.3; EXPRESSED IN BONE MARROW, SIGNAL =   3; EXPRESSED IN PLACENTA, SIGNAL = 2.8; EXPRESSED IN ADULT LIVER, SIGNAL = 2.1; EXPRESSED IN HEART, SIGNAL = 5.9; EST_HUMAN HIT: BF869164.1, EVALUE 0.00e+00; SWISSPROT HIT: P97347, EVALUE 2.00e-04
gggagctcagcacacacttcggggccccagggaaggggagagcggcacacacgtcggggcctcagggaaggggagctcagcacacacgtcggggccccagggaaggggagctcagcacacatgtcggggcctcagggaaggggagagcagcacacacgtcggggcctcagggaaggggagagcagcacacacttcggggccccagggaaggggagctcagcacacacgtcggggcctcagggaagggaagagcagcacacacgttggggccccagggaagggtctcatgtcgttggggtagctgctctcactcttcccagcccagacacagatcaaggacgtggtggaggcggaggtggagatggaaggaggggagggcagagtgaggagatggaaggaggggcggagtggggtgagggtgcccaggcctgtgctggtaggtcaggagcagcaccccagggctctgggggtgaagaggccctggtgtgtctgctcctcctgaggttgtgagtctggaccacgtgattctaaaagtgcccgggttgtcagccaatgtgatgg

SEQ ID NO: 5861 - DNA, 587 bp, Homo sapiens
  MAP TO AF187320.1; EXPRESSED IN ADULT LIVER, SIGNAL = 3.7; EXPRESSED IN HEART, SIGNAL = 3.5; EXPRESSED IN FETAL LIVER, SIGNAL = 6.8; EXPRESSED IN PLACENTA, SIGNAL = 4.1; NT HIT: AF187320.1, EVALUE 0.00e+00; EST_HUMAN HIT: BF514758.1, EVALUE 0.00e+00; SWISSPROT HIT: P02786, EVALUE 4.00e-34
aaatatccgcaggacactggcggtgcagcagctcagtctcatgtttcaagggggtcttttggaaaaaactacctatgttttgaataggtagctatttgaaataaagctagtatataatttattaagtggtttaaagtatacaaaactgagatgcattatatactttaaaactacttagaatttgatgaaaaccagtattttcaaggcttacctgaaaatattaacagattaacagggatagattacaaatgaaattctgagttcagctctggaactttgtctctttaggatttatgattggctacttgggctattgtaaaggggtagaaccaaaaactgagtgtgagagactggcaggaaccgagtctccagtgagggaggagccaggagaggacttccctgcagcacgtcgcttatattgggatgacctgaagagaaagttgtcggagaaactggacagcacagacttcaccggcaccatcaagtgagtgccagctgctgtgcaagtatctagacaagtaattcaagaattatgataggccacggggaaacaataatggtgacactgtggggaatggcttgttaga

SEQ ID NO: 5862 - DNA, 502 bp, Homo sapiens
  MAP TO AL096870.3; EXPRESSED IN LUNG, SIGNAL = 1.8; EXPRESSED IN PLACENTA, SIGNAL = 1.2; EXPRESSED IN ADULT LIVER, SIGNAL = 3.9; NT HIT: gi14750738, EVALUE 1.00e-104; EST_HUMAN HIT: BG420177.1, EVALUE 0.00e+00; SWISSPROT HIT: Q9UHD4, EVALUE 3.00e-30
ggacagaaagtccaagcgagggagggtctgacccagtgctgatggagattagtggtgggtgtctggtatgaggatctactgcactgacaagggtgtcctacagagtggagtgctgtcatatggcctgggacgggagaggcccaagcacagcaaggacatcgcccgattcacctttgacgtgtacaagcaaaaccctcgagacctctttggcagcctgaatgtcaaagccacattctacgggctctactctatgagttgtgactttcaaggacttggcccaaagaaagtactcaggtcagaaatcaacatgtcatactgccccatcccctacagttggatagtccccataattcgtcctcttgcacccacctacccctagttagctcttgcttgtggaaagtcctcatctcccagcttgatggcttcctcccaagttttccaaatcatctgatttcctcttgtctctgccattcagggagctccttcgttggacctccacact

SEQ ID NO: 5863 - DNA, 556 bp, Homo sapiens
  MAP TO AF274858.1; EXPRESSED IN BONE MARROW, SIGNAL = 1.4; EXPRESSED IN PLACENTA, SIGNAL = 1.4; EXPRESSED IN ADULT LIVER, SIGNAL = 1.4; EXPRESSED IN HEART, SIGNAL = 1.3; EXPRESSED IN BRAIN, SIGNAL = 1.6; EXPRESSED IN FETAL LIVER, SIGNAL = 1.7; NT HIT: gi15314108, EVALUE 1.00e-128; SWISSPROT HIT: O75909, EVALUE 4.60e-01; EST_HUMAN HIT: AW957921.1, EVALUE 1.00e-128
atcgcaacagggtactttcgagcttccatgttccccagcagcccgtatctttcttcatggataattaatagaatttggtgagcactgcaatacagagacttccagagggaaagggggcacgtccagtgtgccaagcagccacctcacctgccaccacggcttctcagcctcgacctcggcgggcacctcaactccgtagacctgcagggccaggtagagcaccgccacggcgatgtgctgggcctggaagcggaggcacagcgccccatggtagctgtcccgcagcagggcccaggcggtgacggcaacaggggtccgctgccagctgtggcggttcagccagttctggagggaaaccaggtagtggagcaggtactgcaaagacacgtgtgtcagcctttaggcccaccagctgctctcctcatgctgacataatcatatcagcacctgctccaaccctccagcagcttccatgtccctcaggaagaagccccaaggccttctgctggccccatctcctgccgatcccaccctgccttccagcaaaccccatcta

SEQ ID NO: 5864 - DNA, 524 bp, Homo sapiens
  MAP TO AC016749.4; EXPRESSED IN FETAL LIVER, SIGNAL = 1.6; EXPRESSED IN BONE MARROW, SIGNAL = 0.79; EXPRESSED IN PLACENTA, SIGNAL = 1.3; EXPRESSED IN ADULT LIVER, SIGNAL = 0.88; EXPRESSED IN HEART, SIGNAL = 1.6; SWISSPROT HIT: P10264, EVALUE 9.00e-12; EST_HUMAN HIT: BE465115.1, EVALUE 1.90e-01
tgggctaatgactcccaatccataggtattaaatgccagttataagccacagattgtaacaaggaatgaacagaaggagaatttggcccatattgtccaattgcttgctttaagttttttaatattttaaaaggaaatggctcccagcatgcttgagcatgttctttaggatcctcagctggcaaaataattaccagtaactgccaagcatccaaattgcccatttctcgttcttggagaatggatgcctggattgtccctgcaccataatttgtattagggctggcttgcataattcctctaccataattaagaggcagacaagcctggatcgttcccccactgtaactggctgttgggtgagcctgaagcttccctttgccatagttaatggtggagtatgcaacaatgggagcagcaagccgagtctcaggctcccattccaaaaattcaaaaggctgagctgggggtggccattccagatgttctgctaaaggcacagtaggtggtactgtttctgcggt

SEQ ID NO: 5865 - DNA, 563 bp, Homo sapiens
  MAP TO AC005163.2; EXPRESSED IN HEART, SIGNAL = 2.2; EXPRESSED IN BRAIN, SIGNAL = 1.9; EXPRESSED IN HELA, SIGNAL = 2.3; EXPRESSED IN PLACENTA, SIGNAL = 2.1; EXPRESSED IN ADULT LIVER, SIGNAL = 1.9; SWISSPROT HIT: P04461, EVALUE 6.00e-20; EST_HUMAN HIT: BE088828.1, EVALUE 2.00e-41; NT HIT: U51472.2, EVALUE 5.00e-66
aggcactgttcccagatgtcactgcacagagtcctgcttcctggatgcccacgtgggtgtctggtgcatctctacactggccctgggctcagtaccagtttgtcctcttttgggtcctgccacctcctctaacatcaccctgttctcttccttcccagcccatgggcatcttctccatcttggaggaacagtgcgtcttccccaaagccaccgatgccacgttcaaggcagccctgtacgacaaccacctgggcaagtccagcaacttcctgaagcccaaggggggcaagagcaaggggcccgaggtccacttcgagctggttcactacgcaggcaccgtgagtactggcctcagggtccctctgtgtttcaggtcccagctggctgccatcactgccgctgttgtaggtacatgctgacacacccctccagagacgtcccgcttccactagtgcacaaccatggtataacagggtaatcagccaattgaagtgagctccgctcacacttcctcatcacttctccaagggaaatatccattagggaacagccatcagacctgt

SEQ ID NO: 5866 - DNA, 597 bp, Homo sapiens
  MAP TO AC022336.12; EXPRESSED IN ADULT LIVER, SIGNAL = 1.7; EXPRESSED IN FETAL LIVER, SIGNAL = 1.7; EXPRESSED IN BRAIN, SIGNAL = 1.4; EXPRESSED IN LUNG, SIGNAL = 1.5; EXPRESSED IN PLACENTA, SIGNAL = 1.6; EXPRESSED IN BONE MARROW, SIGNAL = 1.4; SWISSPROT HIT: P70394, EVALUE 2.00e-21; EST_HUMAN HIT: BF244299.1, EVALUE 6.00e-45; NT HIT: gi14743858, EVALUE 6.00e-41
ctttggtgagggtcatgaggcagcacccacaggtttaaatcagattggggtatttggtccttgtgggattcacaagatggattactgactgccttgctgtgaatggcacaactcacaccttaatgtagcttcgcatacagcttgggaagaacataggaggcaaagttgctcactgcagtaatgtccctgactgctgcggcctctactatgttttgcacgacgagcttcttaatggtcttttccttgggcatgcatcggacatagtatgtgccactactggccacagccctttttggcacgatcattgttcctttcttttctttgtcatcttggaagtaaggacctgagagagctacagaagaattcttgacatctagagacttatggtcatgggaaatttttttttaattaccattttaaatttcagtttacatacatatagacaagtatgacagagggatcagtaaaagcttttcaagtataatcatatattactttagaataaaattctgtggacacagtggagtgaaaatatgagttggaaaaagatgtaaaaaattttaaacttttcatagtccagcaatttcacgttttgtt

SEQ ID NO: 5867 - DNA, 526 bp, Homo sapiens
  MAP TO AC005582.1; EXPRESSED IN BONE MARROW, SIGNAL = 0.46; EXPRESSED IN ADULT LIVER, SIGNAL = 0.62; EXPRESSED IN FETAL LIVER, SIGNAL = 0.41; EST_HUMAN HIT: AL597035.1, EVALUE 2.90e+00; SWISSPROT HIT: Q61751, EVALUE 2.20e+00; NT HIT: AL161582.2, EVALUE 8.00e-03
agcctcaggttacaaggacgatgactaatgaattatagaggaaggtaattaacttcctacattccctggaagcttgctttgtgagaacctctctgatactcatttacagaagactgtaacttctgattagcattgttaggaaaactgcccacttcttttctattttcaggattctttcagactgggggtgtagctccagcaggctgtggaaatcctggagctgatcagaaaaggaagtgtgaagacagtgtcagaagtcattttgctattaaccagcaaaggtgttgagggcatgttttttcaactctctttgtcatgaatttccttatttgtaaaatgagggggtgagaaacaatgacctatgggtttgcttccctaccttacattcagtgatctgagctttctcatccaaaggcaaataaaatattgtagagtgttgggtggtacatgcgggtttaaatatatttaaaacaaaacttaacagactttcatacatggatagcttccttttatgacttgttgggca

SEQ ID NO: 5868 - DNA, 546 bp, Homo sapiens
  MAP TO AC004400.1; EXPRESSED IN BONE MARROW, SIGNAL = 0.71; EXPRESSED IN PLACENTA, SIGNAL =   1; EXPRESSED IN HEART, SIGNAL = 1.4; EXPRESSED IN ADULT LIVER, SIGNAL = 0.65; EXPRESSED IN BRAIN, SIGNAL = 0.73; EXPRESSED IN FETAL LIVER, SIGNAL = 0.78; SWISSPROT HIT: P03186, EVALUE 1.20e-01; NT HIT: gi4885350, EVALUE 8.10e+00
gtatatgaagtggcgtgcccaggcacagagcccctttctgtacacccagctgcacgcgcggggaggagctgacatcccaaaaggccacgcagaggtgggagctggaggacacagccctgcagtatctgctggggtgagccctgcaccactggcagcccgctccccagcctggtgggtagggctgttttgggagggcctgcaagtgtggaaacctacactaaaaatagcagccacatgcctcctgtgggcggcccacgctcacctctcctggcaccctagcgtgcccggaagcagcagggtgggagggcacaccaggccccacacaagcccatactgtccttacacgtatgcatgaggctgggtgagccatgcacacccaaggccaccctccacagccctgtatcccatgctagggtttggggtgccccagaaatcaggaatcagaatagctccatttgcaggaagacatcacagcacacatgcagccatgatgcagcttccccagtgggtccaggcgggcgcactccatccacctgctattcggtt

SEQ ID NO: 5869 - DNA, 531 bp, Homo sapiens
  MAP TO AC005486.2; EXPRESSED IN PLACENTA, SIGNAL = 0.48; EXPRESSED IN ADULT LIVER, SIGNAL = 0.61; EXPRESSED IN LUNG, SIGNAL = 2.2; EST_HUMAN HIT: BI063705.1, EVALUE 0.00e+00; SWISSPROT HIT: Q9Y5A7, EVALUE 5.00e-27; NT HIT: gi14740080, EVALUE 0.00e+00
tttcggggtaaaacaccaagctggggaaggggttagggacgcagacctgggaggcagatggaacggcctgcgccaggccagaggaagcttcttccccgagaccacgcatgaaggccctgggacccctcctggacttgtcccctgcccaccccctcctacacccaaagaggacttgtaattcagataaaaagtaagaacagaaagagctgcattagccttttcataatgatagcatttataagcagaaaattagcgctatttctgttcattatttagtttttctttgttgctgacttcctattttctacataggataggtactctgcaataataatttcttcatcttccagagttgagtcaagatagtcttcctcatgctctggaatgtcttccagtatctcattgacggcctctgtctccatgtcttcgtctgttgaggcactagaggttcctacaataaaataccgcaggagtaagtgaattatgtgaggattgtcctggggacactgcacgaccacagtcaacctcaga

SEQ ID NO: 5870 - DNA, 570 bp, Homo sapiens
  MAP TO AC003111.1; EXPRESSED IN HELA, SIGNAL = 0.52; EXPRESSED IN ADULT LIVER, SIGNAL = 0.45; EXPRESSED IN LUNG, SIGNAL = 0.93; EST_HUMAN HIT: BI260465.1, EVALUE 3.00e-03; SWISSPROT HIT: Q07889, EVALUE 1.40e+00
tttcctgctatcgagttgccagctgttgcttcctgtcttgtacctttaactgctactctccttttaatggtctgcttatgatctggtgtcctgggaactgagataagcctgccagtggccttacccggtgccaccctgctgggtctacccagtgccaccctcctaggacttctggtttgggctcaggtagccaggagcccttaaaacaaccactctagtgtctttaacaagcgaaactgtatggtttcaggcttgttttttagcttcggtttttatattggcacctgaggttcagctaatctttttctgagttaaagatgagcttatttatttatttttttctttcagcctggatgtcactgttttgagtggtgctgccattggcctccttgaacttttagcatcgacagtagtcggctgttgtggagacacccaggtgtgcacttggtgtggtctggcaggaagcaccctttcaggggcacttaactccaagaggagttaagagagtaggacattaactaccagcagtgtgagcagagttaccctccttctgttgctgcaatcctttca

SEQ ID NO: 5871 - DNA, 506 bp, Homo sapiens
  MAP TO AC006126.1; EXPRESSED IN ADULT LIVER, SIGNAL =   2; EXPRESSED IN FETAL LIVER, SIGNAL = 0.77; EXPRESSED IN BONE MARROW, SIGNAL = 1.3; SWISSPROT HIT: P02467, EVALUE 4.80e-02; NT HIT: M60341.1, EVALUE 7.50e+00
gggaaaagggagttggaaagagtgaaaggtggaggggacaggcttcccaagcccactgtgaccccctccctccacagcacctcctgcttccaaaatgcaaagttccaggtaccttaacatctgtgacgcattcatcctccaaaccccgcagggtgccaggggagagaaggggccccagctccccattctccagggcggccatgtccaccagccctaggacctctctggggatgggggtgagagaaaaggaggtctgtgaaaagtggggctgggcagttggaaccttccccacaccctcctacccactgtttctgtgaccctgggccactcccttcctctctctaagtcatctctgctcatccctcagaggaagtctttggaattgttgcttccccggctccagctctctgagtcagctccctgatggatggtgtcccggcatgatatttaggggtcaagtccaggcttgaagatctgacatgcaaggcttcacccatgatccattt

SEQ ID NO: 5872 - DNA, 506 bp, Homo sapiens
  MAP TO AC036102.3; EXPRESSED IN FETAL LIVER, SIGNAL = 1.5; EXPRESSED IN BONE MARROW, SIGNAL = 1.4; EXPRESSED IN PLACENTA, SIGNAL = 1.5; EXPRESSED IN ADULT LIVER, SIGNAL = 1.1; EXPRESSED IN BRAIN, SIGNAL = 1.4; EST_HUMAN HIT: BI907326.1, EVALUE 4.00e-95; SWISSPROT HIT: Q15647, EVALUE 7.00e-27; NT HIT: gi16191882, EVALUE 1.00e-94
gatatctccccatgccactgcccaccctctccaaaccaaacttgcctctgataactcccataatcagtggatgagggatggcagacttgatgtgaagtgactgttcatagagtgctttaagttttttgttatttttctgtgctgtgtacatttgaatttccaaagcatatatttctaataactgtgtaccttttttcagatcatcttctccatcatcagtctaggaaagcaaatatttaactttagacaagatagaattcagacagtaattcttatttgcattagcctggaaatcttacatttataatactatttccatgtgaaaacacaacacaaattttaattgggagctacagtactaagaataccacttgtaatggccaaaaagaaactaatacatcctttctactttttagttatgagataaggaaaaagtagccaaaggttttttttatagtagtccttccttatccacagggaatatattccaagacgtccagtggatg

SEQ ID NO: 5873 - DNA, 552 bp, Homo sapiens
  MAP TO AC020663.1; EXPRESSED IN PLACENTA, SIGNAL = 2.4; EXPRESSED IN ADULT LIVER, SIGNAL = 2.2; EXPRESSED IN LUNG, SIGNAL = 1.7; EXPRESSED IN FETAL LIVER, SIGNAL = 2.6; EXPRESSED IN HELA, SIGNAL = 1.4; EST_HUMAN HIT: BI832349.1, EVALUE 6.00e-60; SWISSPROT HIT: Q9UH03, EVALUE 3.00e-10; NT HIT: gi10337612, EVALUE 1.30e-01
tgtcctcgtcaaagcacatctgggggtagacgtcgatgcagtgggtcctcaggttctgctggatctggagatcccacacaggtgacctcagcccaccctgcccactctgccctctgcccccgctgaccccagccctgcccgggcatccagatcaccctgcgcctgaaggcctctcgctcctccatggtcaggctgtcggccctggcaatcacgggcaccacattcacagtccggcacagccgctgcaggaactcaatgtccaggggccgcaggctgccggaggcagggcagtgatgggggtggcggtggtggtgagtgtataaacgacagcagcagggcacgggggtgggggcagccggcagcccatggtggggaccccttctcctcctccctgccccgtgcaggtggtcctcgccttgcaggtgcagccccctcaccagtgcccagtgggtggtacaaagtacacgcagcagtgcacccgggtgtctgggatgtggcgctggcgggtgatgaggatctcctcctgcaggtactgctcgtattgctcgttga

SEQ ID NO: 5874 - DNA, 566 bp, Homo sapiens
  MAP TO AL031709.10; EXPRESSED IN BRAIN, SIGNAL = 2.3; EXPRESSED IN ADULT LIVER, SIGNAL = 2.8; EXPRESSED IN PLACENTA, SIGNAL = 2.2; EXPRESSED IN HEART, SIGNAL = 2.6; EXPRESSED IN FETAL LIVER, SIGNAL = 3.4; EST_HUMAN HIT: BF915018.1, EVALUE 5.00e-70; SWISSPROT HIT: Q20591, EVALUE 2.40e+00; NT HIT: gi14776618, EVALUE 3.00e-70
cctcagtgtacccaaccctgccagaggccctgcagcggcagtgggaccaggtagagcaggacctggccgatgagctgatcaccccccaggtaagcgtgcgctcggggtggcccctggtgggcctggctgggagctgggtgctgcccctgcatcctccaccttcagggccatgagaagttgctgaggacactttttgaggatgctggctacttaaagaccccagaagaaaatgaacccacccagctggagggaggtcctgacagcttggggtttgagaccctggaaaactgcaggaaggtaccgtattggggggaggtggtggcacgcagtagccctccagcacctgggctttcccttgaactctttttgtggttggtaggctcataaagaactctcaaaggagatcaaaaggctgaaaggtttgctcacccagcacggcatcccctacacgaggcccacaggtgagtcacctgtggggagagggccaggctcaccatcacactcgccacctgtgggtccaggtgaggactggccacctggtgttttggcagaaacttccaacttgg

SEQ ID NO: 5875 - DNA, 564 bp, Homo sapiens
  MAP TO AF087017.1; EXPRESSED IN ADULT LIVER, SIGNAL = 1.8; EXPRESSED IN HELA, SIGNAL =   2; EXPRESSED IN BONE MARROW, SIGNAL = 1.1; EXPRESSED IN PLACENTA, SIGNAL = 1.9; EST_HUMAN HIT: H12107.1, EVALUE 1.30e-02; SWISSPROT HIT: Q9QZZ4, EVALUE 4.20e-02; NT HIT: gi14786883, EVALUE 9.00e-03
caaattagccaaggggacagtcgactctgtcctttcttcttaatccctctggctcagggtttcccagcctggacagcctgtccgaggggaaggctgcccaagggcacacgggcatcggtccggggacattcaggcagtgaccaatccctggccaccctggtgtgtgcccggcaatgtgggccttttcccagacagccagtgggggagcggctgctgtgggtccctgagtcttagccagatggtcaaggataggacaatgatggagacccgcatgcggccgcatccatgggtaaaggaggcggaacggaggacagctctgccatcccctcagccagccatgaaaagcaaccctttcccctaaggccccagcaccaccttggaggccaccatgggctggagcccagcacagccaccatcgcatcttggctgtccagctcaggacggccagttccaaggcgtccaggctggagctctgggggcggaagagcacaagctcctgaagagcctctggtccagccctggcagcggagggccaggtgagagcctgttgagggctctgaggac

SEQ ID NO: 5876 - DNA, 510 bp, Homo sapiens
  MAP TO AC004471.2; EXPRESSED IN BONE MARROW, SIGNAL =   3; EXPRESSED IN PLACENTA, SIGNAL = 4.4; EXPRESSED IN HEART, SIGNAL = 4.1; EXPRESSED IN ADULT LIVER, SIGNAL = 2.7; EXPRESSED IN FETAL LIVER, SIGNAL = 4.1; EXPRESSED IN BRAIN, SIGNAL = 3.4; EST_HUMAN HIT: AW246142.1, EVALUE 6.00e-91; SWISSPROT HIT: P34420, EVALUE 4.00e-07; NT HIT: L77570.1, EVALUE 0.00e+00
tgctatttacgcaagacccctcaggaacaagatgtggcctgcagccctctggaccaccccctcagggcctcacaggctaagattcccaggcaatcctgaccatgtgacttaaagagggcaccctcactcaccatcctccaggcctcggccgcggggcctgggcttgttgcccaccactccagtgcctgcatgcacctcaggggtttcaaatgtggctggagtcacatctaggggaagagagggggataagaattagagtgagcctgaagcgacagttcagcaggctttcccctctccgccacccacagggtcctcatacagggtggcgggggctcccgggacatcttgcccaaggcagagccaaacttgatggcaatctggcgcatccgttccaagtctccattctcctcggcttccaggtactccttctgtgcctggagcttctccacatcaggaaagaaatccctttggatgaccgtctggaggccctgcaaggagagatcagaatga

SEQ ID NO: 5877 - DNA, 552 bp, Homo sapiens
  MAP TO AC009320.7; EXPRESSED IN HEART, SIGNAL = 1.1; EXPRESSED IN BRAIN, SIGNAL = 0.95; EXPRESSED IN LUNG, SIGNAL = 0.78; EXPRESSED IN FETAL LIVER, SIGNAL = 0.71; EXPRESSED IN PLACENTA, SIGNAL =   1; EXPRESSED IN ADULT LIVER, SIGNAL = 0.99; EST_HUMAN HIT: BE612417.1, EVALUE 1.00e-110; SWISSPROT HIT: O43765, EVALUE 6.00e-01; NT HIT: gi14764139, EVALUE 1.00e-111
gaattttgtgccatggttccattttacaaggaacagtactagccccctgaggacaccaggaaatggtaacctcacaccctgcattagtagaattgaaaatctgtttttctgccatttatccttacagtataactctcctctttcacattctgcaactgatctagtgcttaaaacaaatggagtcttcaaaagcaccaatagacaaggataaaattacacatacagacagagtttccatatgagaacattaatgtaaaactgggcagagggtcagtttcttagtctcttcattctctgagagagttttgtgatggatcagaatgtaattgctccctctttcccacccccagggaaaatatgtgtctgcaagagcttattatgagagagccttacagctggttccagacagcaaactgctgaaggaaaatcttgccaaattggatcgcctagaaaaacgattacaagaagttcgagaaaaggatcaaacatagcaccaccgtctgacccaacctcataggataatgtggtgcctctgaaaggggagtgatggaa

SEQ ID NO: 5878 - DNA, 565 bp, Homo sapiens
  MAP TO AL031719.10; EXPRESSED IN PLACENTA, SIGNAL = 2.9; EXPRESSED IN ADULT LIVER, SIGNAL = 3.8; EXPRESSED IN HEART, SIGNAL = 3.2; EXPRESSED IN BRAIN, SIGNAL = 4.2; SWISSPROT HIT: P08489, EVALUE 1.20e-02; EST_HUMAN HIT: BG202414.1, EVALUE 0.00e+00; NT HIT: gi14774693, EVALUE 0.00e+00
gacacataccacccctccacagccgccagagcctgaagtcctaagagccacagaagggctaatacaaggtggctcaacaccagggcagccgccccgtaaagcaggaacccgctctaggacagagggctggggaaggataaagcaggctggaacccgctctaggacagagggctggggaaggataaagcaggctggaacctgctctaggacagagggctggggaaggagtggaacccgccttcctctcagacaaggcctctcaacccttctctcatctgcaggttttgtcctggtcatcgggctcgtgactttctacagaattggcccatacaccaacctgtcctggtcctgctacctgaacattggcgcctgccttctggccacgctggcggcagccatgctcatctggaacattctccacaagagggaggactgcatggccccccgggtgattgtcatcagccgctccctgacagcgcgctttcgccgtgggctggacaatgactacgtggagtcaccatgctgagtcgcccttctcagcgctccatcaacgcacacctgctat

SEQ ID NO: 5879 - DNA, 545 bp, Homo sapiens
  MAP TO AC008821.4; EXPRESSED IN BONE MARROW, SIGNAL = 0.82; EXPRESSED IN PLACENTA, SIGNAL = 1.7; EXPRESSED IN ADULT LIVER, SIGNAL = 1.2; EXPRESSED IN HEART, SIGNAL = 1.5; EXPRESSED IN BRAIN, SIGNAL = 1.1; EXPRESSED IN LUNG, SIGNAL = 0.93; NT HIT: gi13646934, EVALUE 0.00e+00; SWISSPROT HIT: O00472, EVALUE 4.00e-44; EST_HUMAN HIT: AW630424.1, EVALUE 0.00e+00
gcaaaatgaccaaaatacatgcattatacatattatttccaagaaatgattttattaaaataatttctaattcaaattttagaccatttatttaaaatgctttctgtttgcatgccttcttaaagattgaaataaagtggcctttattattatttcctctagaaatgaagaggtacctaaatcagaattgtggaaactgaggtgctcatattgtaacccacaaatgtgtaacaatgtcatttccactggactttagggaaaagagtgcaaattcggaaagcacctcaagctgtttcagatacagttcctgagaggaaaaggtcaacccccatgaaccctgcaaatacaattcgaaagacacatagcagcagcaccatctctcagaggccatacagggacagggtgattcacttactggccctgaaggcctacaagaaaccggagctacttgctagactccagaaagatggtgtcaatcaaaaagacaagaactccctgggagcaattctgcaacaggtgaggacagctggagagaggtccttcct

SEQ ID NO: 5880 - DNA, 580 bp, Homo sapiens
  MAP TO AL118558.2; EXPRESSED IN HEART, SIGNAL = 4.9; EXPRESSED IN ADULT LIVER, SIGNAL = 3.8; EXPRESSED IN FETAL LIVER, SIGNAL = 4.3; EXPRESSED IN BRAIN, SIGNAL = 6.4; EXPRESSED IN PLACENTA, SIGNAL = 5.6; EST_HUMAN HIT: BF747695.1, EVALUE 2.00e-97; SWISSPROT HIT: Q9JHU4, EVALUE 2.00e-39; NT HIT: gi9506548, EVALUE 5.00e-60
tgaatgatttgctgtctgccacggagctggacaaaataagacaggcgcttgttgccattttcacacatttgagaaagatccgaaacacaaaatatcctattcagagggcactgcgtttggtggaggcaatttcaagagacttgagttctcaattactcaaagtattgggcactaggaaattgatgcatgttgcttatgaagaatttgaaaaagtaagtttgaatatataagacaaccaacctcaagacattgagatgaaaatatgtcttaataataagcctcacttttgaaattatatcctaggttatggtagcatgctttgaagtttttcagacttgggatgatgagtatgagaaacttcaggtattgttgagagacatcgtcaaaagaaaaagggaagaaaatctgaagatggtgtggcgtatcaaccctgcccacaggaagctgcaggcccgccttgaccagatgagaaaatttagacgccagcatgaacagctaagagctgttatcgtcagggtcctgaggccacaggtaagatttgcattctaaaagtttgtgttttgtttttgtttttgttttg

SEQ ID NO: 5881 - DNA, 588 bp, Homo sapiens
  MAP TO AC020728.4; EXPRESSED IN BONE MARROW, SIGNAL = 0.99; EXPRESSED IN PLACENTA, SIGNAL = 1.5; EXPRESSED IN ADULT LIVER, SIGNAL =   1; EXPRESSED IN BRAIN, SIGNAL = 0.89; EXPRESSED IN FETAL LIVER, SIGNAL = 1.6; EXPRESSED IN HELA, SIGNAL = 1.5; EST_HUMAN HIT: BG942165.1, EVALUE 0.00e+00; SWISSPROT HIT: P42285, EVALUE 7.00e-20; NT HIT: gi14721268, EVALUE 5.00e-72
taaggtattccgggcttcagccagttgttgtttgtaacattcatctatttaaaacatgactttctgttaatggtatagagcagtattttatgatgttgcccttaaagtaaaagtggatactgcagaattcattccaaactatttacttttcaggaaacgttttgatggtaaattacaatcagaatcaactaataatggaaaaaataagagagatgtagatttcgaaggtacagatgaacccatttttggaaagaagcccaggatagaagagtcaataactgaagacttaaggtaatatttccaaagtcctaaatgttagtaactcataattcaggtggttacatgaggttttaaaaattgtctccatgttgctacttagatatatgcccgtattagagaaatgaagatattctttctatttttacacaggcatgtaaatgtagaacacttacctaagtttggggagttggaaagcaatatggaaaatactcatcttttaatactttagaatccagttttgagaaaaaagtcttaaaacctgattaaaaaaaatacgttttctttatttgtaatgcctcaggaggagga

SEQ ID NO: 5882 - DNA, 550 bp, Homo sapiens
  MAP TO AC024070.2; EXPRESSED IN BRAIN, SIGNAL = 0.86; EXPRESSED IN HELA, SIGNAL = 0.78; EXPRESSED IN FETAL LIVER, SIGNAL = 0.89; EXPRESSED IN BONE MARROW, SIGNAL = 0.76; EXPRESSED IN PLACENTA, SIGNAL = 0.94; EXPRESSED IN ADULT LIVER, SIGNAL = 0.93; EST_HUMAN HIT: AI684831.1, EVALUE 0.00e+00; SWISSPROT HIT: Q19084, EVALUE 3.10e-02; NT HIT: gi9631294, EVALUE 8.20e+00
cgctgtatagaaccaatgcctttattctgtattgctgatggatttttgaaaaatatgtaggtggacttagttttctaaggggaatagaatttctaatatatttaaaatattttgcatgtatgttctgaaggacattggtgtgtcatttctataccatctggctacgagaggagccgactgaaagtcacactgccggaggaggggagaggtgctcttccgtttctggtgtctgtagccatctccagtggtagctgcagtgataataatgctgcggtgccgacagttctggaaggagcaacaacagtgatttcagcagcagcagtattgcgggatccccacgatggagcaagggaaataattctggaagcaatgacaatatcagctgtggctatagcagctgagatgtgagttctcacggtggcagcttcaaggacagtagtgatggtccaatggcgcccagacctagaaatgcacatttcctcagcaccggctccagatgctgagcttggacagctgacgccttggatcatctgccactgatctctggtca

SEQ ID NO: 5883 - DNA, 581 bp, Homo sapiens
  MAP TO AF006501.4; EXPRESSED IN HEART, SIGNAL = 1.9; EXPRESSED IN ADULT LIVER, SIGNAL = 2.3; EXPRESSED IN BONE MARROW, SIGNAL =   2; EXPRESSED IN PLACENTA, SIGNAL = 1.1; EST_HUMAN HIT: BE897246.1, EVALUE 0.00e+00; SWISSPROT HIT: P56693, EVALUE 1.00e-87; NT HIT: gi14778832, EVALUE 0.00e+00
gtggccataatagggtcctgagggctgatggtcagagtagtcaaactgggggcgggagatggaggggaaggctgagccatagtggggcaggctgagggaggtgtaggcgatctgtgaggtggatggctggtcggtgtagtgtgggggcccctggggccccgcggtctctgtcttcacctgggctttggcatccacaccaggtggtgagaccgtgggcagagccacgcctggtggcttggagatccaggcggagtgtccactggccacggccagggcactgcccagcccatagccggctgctgagtagctgctcacgtggcctgggtgcccattgggcggcaggtactggtccaactcagccacatcaaaggtctccatgttggacattacctcgtggctgatctcaccaatgtccacgttgccgaagtcgatgtgaggcttcccgccctcccccatggagcgcccgtcccgcttcgggtctgccttgcccgactgcagctctgtcttcggggtggttggaggggtgggtgggccatggctctggcctgggtagaagggagacagagagagagagcgcaagg

SEQ ID NO: 5884 - DNA, 597 bp, Homo sapiens
  MAP TO AC004790.1; EXPRESSED IN BRAIN, SIGNAL = 1.1; EXPRESSED IN BONE MARROW, SIGNAL = 0.8; EXPRESSED IN PLACENTA, SIGNAL = 0.87; EXPRESSED IN ADULT LIVER, SIGNAL =   1; SWISSPROT HIT: P70460, EVALUE 5.10e-01; NT HIT: X63596.1, EVALUE 9.00e-03
gttcatcctgtgtgtgcctgtctctgggcgtctggggacaacaggcctctgtgtccaggtccccctgtcaggtgcagagactccagagaccccagcaggcatggggccactgggtcttcacccagggctgtggtggcatggggctcacccggccggcggtgtctcagagcccccgggagcggttcagatgttctctgaagcgctcaggtgcagcgttgcctttgggcgatgttgtctcacaggatggacgtggaggaagacgtggctaccctacttgcacaggagcagggggcatcattgcccagtgtgagcaggtacaggtcgggctgctccctcgagagaggtggggcctcgcctctcccactgtgccctggtgggaggatcctgggctcccttaggaagcagggtgggagctggttgcccatgcctttgtgcccccacagcccttcacctcagccccctcactctggacccctctgggtcccagggacgctgtagggcccaaggatgtggacagcttacaaagttaccgatcgcctcgagattctgcagtgagtcctctgtccctgctgcccgaccatcaccaaactcacctca

SEQ ID NO: 5885 - DNA, 519 bp, Homo sapiens
  MAP TO AL118559.4; EXPRESSED IN FETAL LIVER, SIGNAL =   3; EXPRESSED IN PLACENTA, SIGNAL = 3.4; EXPRESSED IN ADULT LIVER, SIGNAL = 2.6; NT HIT: M94579.1, EVALUE 7.70e+00; SWISSPROT HIT: P49782, EVALUE 2.80e+00
atcaatggcaccaggaagagccctaacaagccaaggcctcctgcatccaaggctgctcacttttatggtccttcaagcaaactcacctcattaatgatgatcctgctggccatccgtagtcgggtcctgggtccaaacttattggtgatcatgattcgtaagcctgcttcagggaaggtgaacttgggagggctggagctcataatctcgtccaccatcaccacggggttcttgccatactgtggcttctccttcactgttgagcgcaacaccgtgattagtgctgatctctctgaggacaacacccaagtgctggggccactgacttcccctcaccttgtgagctgccctaggctgtggtcctggcagctggcagccaccgggaagtctggatgcctggcttcaactcctcatgtcaggcaaagtgggtcactagctttgaaacacctgctgacctagtgtgtgaagcccagtgtgtccccttgctccaggaccactcgtgggcaattgatgctcttt

SEQ ID NO: 5886 - DNA, 536 bp, Homo sapiens
  MAP TO AC006163.1; EXPRESSED IN ADULT LIVER, SIGNAL = 0.78; EST_HUMAN HIT: BF897579.1, EVALUE 3.00e-46; NT HIT: AF423072.1, EVALUE 4.00e-26
tcacaacatattttctccccctaatataacacacttcaataatctctcttgaccattattacataatgaatttttctctcattatgatatactgacttgatctgttagcagtattaaatcttatgcatatcttatttgtattttattataactagtagggcaatttaaatattcaatattctagaagatgaagaattgggttgacttggttagctcttctttttagtgatatttttggttaatttattgtcttggtacctactattgaaactcccttctctttcattattgcctctgacatcatctcatgtcagacgttcttatttctgctaacgttcatacttacagcagggctgttactggcggtgaatccgtaggtgtctgcagcaacctcaattcctacctcctcagaagaaagaatttgactgaggggcataaggcagaaggagacaacgaggcaagttttagagcaggagtgaaagtttattaaaaggctttagagcaggaaggaaagtacatttggaagagggccaagt

SEQ ID NO: 5887 - DNA, 503 bp, Homo sapiens
  MAP TO AC006231.18; EXPRESSED IN ADULT LIVER, SIGNAL = 0.82; EXPRESSED IN PLACENTA, SIGNAL = 0.59; EST_HUMAN HIT: AL045258.1, EVALUE 1.00e-05; SWISSPROT HIT: Q09758, EVALUE 2.10e+00; NT HIT: U63630.3, EVALUE 2.00e-03
gttccatgtggttgtagggctaaggttcctgatcccttgctggccatcatctgggaactgctttcaactcctagatgctgcctgccttatggcctccatccttcatctttaaagccaggaagtgtgtcaagtcctcatgattctgcatcttttctatctcttctgcctcctcctcttttgccatctctctctcattgactctttcgccttcctcttctgactttacatgcccatgcaataatattgggcctatttgaataatccagaataatgtcctgacttcatgccagctgattagcaaccttaattccaactgcaaagtgtattttcccatgcaacatcacatattcacaagcctaataccagtgagcaaaaattacgggagacaaaaatattgtctccaataattttggagacactatattgttcctaagaatttttggtttcctccagcttgagactgacttgacctataagggatgactcccaacaagacctggtgt

SEQ ID NO: 5888 - DNA, 565 bp, Homo sapiens
  MAP TO AF254983.1; EXPRESSED IN PLACENTA, SIGNAL = 1.1; EXPRESSED IN ADULT LIVER, SIGNAL = 0.9; EXPRESSED IN HEART, SIGNAL = 0.92; EST_HUMAN HIT: AV707625.1, EVALUE 0.00e+00; NT HIT: AL163201.2, EVALUE 0.00e+00
tcccttgatatgggtattttggaacagtaatcagtcaaatttaaaatgaaagtttaaatttgtattcttgggattttgtaattttagacccacccaagacttatacccaggatgatgtgtgtttgattgaatcagggatgactcagttacagagcctcacagttacagttccaagaagaaaactgtcaaaaccaaaactgaaattgaagattataaatcagaatagcgtggccgtccttcagacccctccagacatccaatcagaacattcaagggatggtgatatggatgatagtcgaggtaatactaatttattttccatgaaattagtgcaagaattacagcatataaagtaacttttgaaatatgtgtatgatttaccaaagggtaaatcacactgacttagataaccccgatgtgacccttgccatctccaaatgagtgatcttcttagaccttgccttttcgggttctcttcctttcacacattttagaacagacctaccttacagaaatctcaaggagcaccatatctttgaagatcacaggtggggaactacagagg

SEQ ID NO: 5889 - DNA, 597 bp, Homo sapiens
  MAP TO AL110121.1; EXPRESSED IN BRAIN, SIGNAL = 1.2; EXPRESSED IN ADULT LIVER, SIGNAL = 0.8; EST_HUMAN HIT: BI821887.1, EVALUE 2.10e-01; SWISSPROT HIT: O83759, EVALUE 3.40e+00; NT HIT: AF144618.2, EVALUE 1.40e-01
atcccagactctgctcaacgcagctcagcaacagagaaatgagaaggggacttggcttcagcaagagtgaacttacttggatgctccagggaggcaggaaggtgcaggggtggacactatagatgtggaaggtaggaattctcagcgtgattcccattctggatacctcccaggaaccagcctggaggatgagggcaggggcagtatagcccaggacacaggtacagaggcgggaagtcaccagcacagcaggatggtctgtaccacaagccatggaggggtgtgggtgccacctttggagaaggaaagaggtagcatctatagggagtgtcctttaagctgagtgttgacaaatgagaaggcagcttcagttctgcctcgctccaatgatagcaatccttttgtttctgattataatactgggtacttgaactctactgacctacaatatgcagtctctgtcaacagtaagagcatctgcccttgtagcagccctcatgcggaacaagatctctgacagacggctagcacatattactcttaattatcataactgccaacaaggttggtatcattgctcctgtttttggatgggaa

SEQ ID NO: 5890 - DNA, 596 bp, Homo sapiens
  MAP TO AC012398.4; EXPRESSED IN ADULT LIVER, SIGNAL = 0.85; EXPRESSED IN LUNG, SIGNAL = 0.84; EXPRESSED IN FETAL LIVER, SIGNAL = 0.66; EXPRESSED IN BONE MARROW, SIGNAL = 0.83; EXPRESSED IN PLACENTA, SIGNAL = 0.85; EST_HUMAN HIT: BI561135.1, EVALUE 9.00e-10; SWISSPROT HIT: P53195, EVALUE 2.60e+00; NT HIT: AB037275.1, EVALUE 2.20e+00
gagggggaggaagaagtgactcttagcaactgatatgtaatccaaaatggcatttagctatgatggcttcaggttgtagactgtatccttggggtccttgtccttggaagcaatgtcttctccttggattcagtattttgcacttgccaacctacgtggacctgagagatccaccatccagaagctgatgtcttttccagtgtgtatcctacccttgttttggaggccttgaagttgactacactttctgatcaagttttcaatattcattgagagaaacacagccttgtgcaaacaatccacaacatgacatacccctcaaaaagctttgtttctgtattgcaggtggtgcaggtggcccctctgaggcgtgaatctagtaagtattctggaatcacttaccaagaaaacaatctggatgccaagaaaggtgtggcatccttgcctggtttcaatgtgaagagccaccctgatcctgggattgtgataggaataagtataggggaagtgtttttttaaaacctgaattccccagggaaaaattatggccaaattttgaggaagcagctgtgctcccttttgggtggtgctgagtt

SEQ ID NO: 5891 - DNA, 534 bp, Homo sapiens
  MAP TO AL050302.2; EXPRESSED IN PLACENTA, SIGNAL = 0.6; EXPRESSED IN ADULT LIVER, SIGNAL = 0.64; EXPRESSED IN FETAL LIVER, SIGNAL = 0.68; EXPRESSED IN HELA, SIGNAL = 0.7; NT HIT: AL163203.2, EVALUE 0.00e+00; EST_HUMAN HIT: BE968588.1, EVALUE 2.00e-29; SWISSPROT HIT: Q9CX84, EVALUE 3.80e+00
aaaagaactccagggctacttgaacaatttaaatataggagaagactattttttagaaatgttttccgtcgccaacttgttaaagctttatagcactttgcatattttggagaatgtcaactatatttttatcagagctgatttgttccagtggaacaacagtggcatagacatcgcccacaaggttctgcatactcaggaagactgggttacacgtccacagcagggttgaagaagatgagatgatgaggtccacccagcacatgaccagacagtagctcactaacagcgggatggtctgagcagcccttttctctgggaaggcttgtggagagatgctgatgctgtgaaggtgctgagattgcctctcatgcctggacacaaggatcaccatgtgtgcaattgaatgcagtgtaattcctataatgaagacatccctggataatgtcagagtaaaaaatacttttctcatgaaggacttcatgggagaaagtgaacagtatttgctgcccttgggtagactggtctgggtca

SEQ ID NO: 5892 - DNA, 559 bp, Homo sapiens
  MAP TO AC010163.7; EXPRESSED IN BONE MARROW, SIGNAL = 0.5; EXPRESSED IN ADULT LIVER, SIGNAL = 0.69; EXPRESSED IN BRAIN, SIGNAL = 0.52; SWISSPROT HIT: P52073, EVALUE 6.90e+00; NT HIT: AB010415.1, EVALUE 1.30e-01; EST_HUMAN HIT: BI457152.1, EVALUE 7.80e-01
tatgctgggcacagaaacagacgcagggaaccttggcttaagagctcccaccactgctgctgtatgccacactgcttcctgcctggtccatcaatgtccccagcaggtgaccttggacagcatcccaggagccaaatgtggtcccagggtcagactgacatgacagggaagatctataggtctggtggaagctgcttggtggcatctcgcccaggagtatctaagaatataaaagggttagatttggggatatgtattttagcagattctgaaacttgcctcttgtatttttgtatacctatactctgcttcatgagctcagatataaaatctaggtctgtcttctctcctagtgcctctgttgcttgaagatacagaacttccttcaaagaaataggtgaatggcccatgcagtaaatgcccccaggactgaggtgataagctcctggcttttcagtagaccttctgcttggccatgctttgcaggcttctgatcactagtccaggtgactggttgaggatgaaaaagtcacctcttagcctcctccattactcctcc

SEQ ID NO: 5893 - DNA, 507 bp, Homo sapiens
  MAP TO AL031300.1; EXPRESSED IN ADULT LIVER, SIGNAL = 1.6; EXPRESSED IN PLACENTA, SIGNAL = 1.8; EXPRESSED IN HEART, SIGNAL = 1.9; EXPRESSED IN BONE MARROW, SIGNAL = 2.1; SWISSPROT HIT: P47307, EVALUE 7.10e-01; NT HIT: gi8923825, EVALUE 4.80e-01; EST_HUMAN HIT: BG222054.1, EVALUE 1.00e-102
cacaatgcagtgggaatcagtggtgacaacagctgtcagccagagggagaaaaagttgcttctagctcctgccaggctgaagtaagaggcctgatgtgcaggcttaatgtgtggaaaaggtcatatataaccccctgtcgacatgcagtattgacctggcagatattgatggtggccactctagttgtcatttctcccttctttcttgttaataaaacatcagttttattccagtagcaaaatacccagcctcaggacatgaattgtgatataatccaaaatagtcatgcaatcttctctctctttcctagatactaggtccaagtatgggcgtctgacccagttctggaaaatgagacgctcagggaagtctacttggtgcttctgggaaagctatttctccctagtaagagagagacaccctcttccttactgctggatcattgtggtgaggatctgatgactcacttagaagacatcacctagcgtgctgagaatgatggagca

SEQ ID NO: 5894 - DNA, 574 bp, Homo sapiens
  MAP TO AC008580.5; EXPRESSED IN BRAIN, SIGNAL = 1.2; EXPRESSED IN BONE MARROW, SIGNAL = 0.54; EXPRESSED IN PLACENTA, SIGNAL = 1.3; EXPRESSED IN ADULT LIVER, SIGNAL = 1.3; SWISSPROT HIT: Q9Y5H8, EVALUE 4.20e+00; NT HIT: AJ235272.1, EVALUE 2.20e+00
tacaccattcccctggctacagtgattgagtcaggtacggacatgtgacccaacaggcccattcgaacatttcctgagagtattactggagcttttgaaagagggctccgtgtcattgaggactgctagctctagtgctctgagctgccatgggctgtctttgaccccaggtcgaaagagcttgtcaaaaaacaaattcgatgcagagaaaaactgaaaagagagacagagaaatgagtgagccaatattttccctgcttgcttaagccattctgtgactattttccagtacttttaacttgaagacatacctttattttatggtggaaactgaggcccagttggtgaaatgcatagtctgtttacttgtaccccagtttccttttctcttgtacataaatgaacatattttagattagttctgtgatctgatgagtccttataagtagtgattgcttacaatattaaataatattttttagtattatagtaataatcaataaaaatatctatagtactaaacaagatgtagtgattgaagaaacatattcttgggttcattgtgagaaaacca

SEQ ID NO: 5895 - DNA, 509 bp, Homo sapiens
  MAP TO AC007181.1; EXPRESSED IN PLACENTA, SIGNAL = 1.5; EXPRESSED IN ADULT LIVER, SIGNAL = 1.8; EXPRESSED IN HEART, SIGNAL = 2.1; EXPRESSED IN LUNG, SIGNAL =   2; EXPRESSED IN FETAL LIVER, SIGNAL = 1.8; EST_HUMAN HIT: BG424659.1, EVALUE 3.00e-06; SWISSPROT HIT: Q9Y4W6, EVALUE 4.00e-29; NT HIT: gi15317437, EVALUE 1.00e-111
gtacagcttctccaccagggtcttgccgtgtcgggaaaagtcgaaggacacctggcccagcttctcactcaccccaaactgcacaacctgccagtgcggaacccaggatgagcctgcgcccaacagagcctcctgcggcccgtgccgggggatgcccacccttacctgggcgtaggcactctgggtgaccttcctcaggtcgtcctgagcccccatagtgatctacccggagcacagctgctcggctacccggcccccgagcatcatgcacgtgcggtcgaagagctgctcctgggtgtagagctgctgctcccggggcaggtactgtgcgtagcggagccccttgccctggggtatgatggacacctgaggacaggacacatgccctcatcaccccaaacactgtccccacttcctccaggagccaccctggagcggccaggccacctgaccctagctctgaccacaggtccttctactggaacaggagagaagacagcctgacccag

SEQ ID NO: 5896 - DNA, 506 bp, Homo sapiens
  MAP TO AF134576.1; EXPRESSED IN PLACENTA, SIGNAL = 1.9; EXPRESSED IN ADULT LIVER, SIGNAL = 1.1; EXPRESSED IN FETAL LIVER, SIGNAL = 1.6; EST_HUMAN HIT: BE734462.1, EVALUE 0.00e+00; SWISSPROT HIT: P43359, EVALUE 7.00e-66; NT HIT: U10690.1, EVALUE 0.00e+00
cacatgctccctctctctccaggccagtgggtctccattgcccagctcctgcccacactcctgcctgttgcggtgaccagagtcgtcatgtctcttgagcagaagagtcagcactgcaagcctgaggaaggccttgacacccaagaagaggccctgggcctggtgggtgtgcaggctgccactactgaggagcaggaggctgtgtcctcctcctctcctctggtcccaggcaccctgggggaggtgcctgctgctgggtcaccaggtcctctcaagagtcctcagggagcctccgccatccccactgccatcgatttcactctatggaggcaatccattaagggctccagcaaccaagaagaggaggggccaagcacctcccctgacccagagtctgtgttccgagcagcactcagtaagaaggtggctgacttgattcattttctgctcctcaagtattaagtcaaggagccggtcacaaaggcagaaatgctggagagcgtcat

SEQ ID NO: 5897 - DNA, 600 bp, Homo sapiens
  MAP TO AF216808.2; EXPRESSED IN ADULT LIVER, SIGNAL = 0.98; EXPRESSED IN FETAL LIVER, SIGNAL = 1.1; EXPRESSED IN PLACENTA, SIGNAL = 0.98; NT HIT: AL163267.2, EVALUE 1.50e-01; EST_HUMAN HIT: BE243894.1, EVALUE 8.40e-01
gccatcccacatttcctaagatttctctcttaccttttaatctctgcacatggcatgcccgctgttgggctaccttctccaacttgcccagttggtcagcacatttatccagactgtgatgaggggtaatcttccctgtgatgcctgccataaaccctcccagggacagttaggctctctcctctgtacccaatgacactttgcatatacttccaatttaagcatgcttgtcatagatttgttattatttatctctatttttagtctgtgagctcctggcagaaagtaaatatgtcttagtcatctttgaatccctagtacctagaacattgtctaatcttagtaggcatgcacatgcgtctatttaaaaaaaaatacattgaatgtattaaactgataaattggagaataatgaacgtgcttttgtagagtctactgaaatctgaagttctttaaggaactaagaatggctctttgatttctttgaatgtgtcttaagcactctttcccatctttcattctgcaggatttaagatctgctcgataaagtaatatcttagtcatatataagattggcacaggtgaggtgaatgatgcaaa

SEQ ID NO: 5898 - DNA, 584 bp, Homo sapiens
  MAP TO AL031598.4; EXPRESSED IN ADULT LIVER, SIGNAL = 2.6; EXPRESSED IN PLACENTA, SIGNAL = 3.7; EXPRESSED IN HEART, SIGNAL = 3.8; EXPRESSED IN BRAIN, SIGNAL = 4.4; EXPRESSED IN FETAL LIVER, SIGNAL = 4.4; EXPRESSED IN BONE MARROW, SIGNAL = 5.9; SWISSPROT HIT: P13889, EVALUE 5.70e-02
gaatcctgtctccctcctcccatctctctggcatcttcaggcccacccaggaccccctcctgatgcattccacggctgccccagctccccgatgcccccctgctgcccccagctccatcttgtgcaccgagcagccccgcaaggcacagctgagctcgctcctgaccaagcagagggtcctccagggcttggggcgagtggctgagggccccccgctgcagcaggcctggggccctcctccagggcacgtcttgatcacggccagagtcccagaagtgccaccactcagccctggcgtgggcatgaggcacgtcaggtctggaggagctgcctgcacaccctggcctggagaggcctggccacctgaggccaccagaccctggacagaggccctgacgccacccacttccccaagggccggcaggagtcataggatggcagcgggggctgcgggcccatctcatcggaagcgggtgggttcccttgagataacagcatttgcattttttcacatttgccataagctgccagccacctgctctaaggatttccccgataatcattgctcagggcaacagattagc

SEQ ID NO: 5899 - DNA, 578 bp, Homo sapiens
  MAP TO AC008456.4; EXPRESSED IN BONE MARROW, SIGNAL = 0.88; EXPRESSED IN PLACENTA, SIGNAL = 0.87; EXPRESSED IN ADULT LIVER, SIGNAL = 0.95; EXPRESSED IN HELA, SIGNAL = 0.62; NT HIT: gi14722722, EVALUE 1.00e-109; EST_HUMAN HIT: AA527514.1, EVALUE 2.00e-10; SWISSPROT HIT: O94823, EVALUE 8.00e-35
taagcaatgttattccggggcttgccatacatcattttgctttaagttgcagtttctaagaacctattggcaatgttaagtgaagacttactgtccactcccctttaaacaagttagtggaattcccttcaggtcctgaagaatgttagtagcaatagtagtagtagtaacagtggtagctactgctccgaggattagaattctctctcatccttacataaccctgtgtgttataaatgaggcaactgccactccagcagctcccagaggtcccaagcaggagctggtgaccggctgcacatggagccccactcacaaggccatgctctctgcctgcagtgctacgtcaacctgctcttctggtatcagttcttctgtggtttctccagctccaccatgattgattactggcagatgatattcttcaatctcttctttacctccttgcctcctcttgtctttggagtccttgacaaagacatctctgcagaaacactcctggcattgcctgagctatacaagagtggccagaactctgaggtaaggagatcgggcagccaaagggaggtgacttcagc

SEQ ID NO: 5900 - DNA, 585 bp, Homo sapiens
  MAP TO AF227509.1; EXPRESSED IN HEART, SIGNAL = 1.3; EXPRESSED IN ADULT LIVER, SIGNAL = 1.1; EXPRESSED IN BONE MARROW, SIGNAL = 1.4; EXPRESSED IN PLACENTA, SIGNAL =   2; SWISSPROT HIT: Q92618, EVALUE 8.50e-01; NT HIT: AL163209.2, EVALUE 0.00e+00; EST_HUMAN HIT: BF358416.1, EVALUE 8.20e-01
ccattggaagagaagcaaccataaaaaataacttaatgcgcttcctgttttatagatttatacatccatctcccatagataaagtgtctctccaagatcccaagtctagtttgtcaaggataggattcgaattcttacctcctagacttgtgctttctccagctttgcatgctctcttgattactattaaaccttttcggtttatctctagaatatgacttggaagccaaggtggttttgtgaaatgggtctgagtttttccattgatgatatttgagttcaaatcctggttcagtttcattgccttcatctagaaaaatgataattagaccttgttttcaaaaataattttaacattagaaacgaagtacgtacaatgcctcaaacctaagatgttctgaaaatggtagctgttattatcattgcatctttgaggcctgggtacttagtatggactcaataaacaaatgacagaataaatgaaaaaaataacagatcacataagaatgagtaagtgaatgaatgacaatagtaagaattgccactaaaagataaatgaagaggcctgtgaatattttctttggg

SEQ ID NO: 5901 - DNA, 515 bp, Homo sapiens
  MAP TO AL109839.11; EXPRESSED IN BONE MARROW, SIGNAL = 4.3; EXPRESSED IN PLACENTA, SIGNAL = 3.9; EXPRESSED IN ADULT LIVER, SIGNAL = 4.1; EXPRESSED IN HEART, SIGNAL = 3.3; SWISSPROT HIT: Q15097, EVALUE 1.00e-32; NT HIT: AF032896.1, EVALUE 9.00e-15; EST_HUMAN HIT: BI013430.1, EVALUE 0.00e+00
cctcggcagaagcaagttagaaacctccatttccctagaactctagtcttcatgctctgccttgctggggcaggggggaaggctgcggtgggagttgcgggcaggccgtcacctggggcatggcaggcaggaagtagctggagggctgctgaaaggagcccaggagggggttgctcagggtccgcatggtggagaggcgctgcatgtactggttggtcaagatggccttccgctcctctttgcgctgggccagtgccacgtagagtggcttggtgcccacgatgcgcccgttcatctctgtcacggcctttgtcgcctcttctggggaggaaaaacacacaaagccaaaccccttgctgtggccaccctctgtcatcacctaaaagcaagacaagacaagagctgctggggtggggaaggaaggctcctggggctgcgctgcctccctcctccccatgggctaagcccagcactgggcaggcccgcgagaaagctgtgatggagggatgtagcgt

SEQ ID NO: 5902 - DNA, 580 bp, Homo sapiens
  MAP TO AC007920.18; EXPRESSED IN HEART, SIGNAL = 4.6; EXPRESSED IN FETAL LIVER, SIGNAL = 4.2; EXPRESSED IN BRAIN, SIGNAL = 2.7; EXPRESSED IN BONE MARROW, SIGNAL = 1.9; EXPRESSED IN PLACENTA, SIGNAL = 3.9; EXPRESSED IN ADULT LIVER, SIGNAL = 2.9; SWISSPROT HIT: Q01042, EVALUE 6.40e-01; NT HIT: gi6678028, EVALUE 5.50e-01; EST_HUMAN HIT: F13710.1, EVALUE 8.00e-04
cttccaccccctcttttctctgtagtactttgcagcaaaaaatcttgtgttgatatattcactgtctccagttcttctcctattttctcttaaagagactcgaactaaggctttcatgctgatgactccacatgaagagctcttgtccaggtcaccagtgactccacattgctaagcccagtggttgattttcagccatgctcctacttaagccaccggcaacatttgatgcagccaatctttgcttcctccttgaggcatttcctttccttggcttgtgggacagcaccactttgtctttctttgtcctttttcactgactgctccttctcattctcatcttctctgagactcctgacattggagcccacagggccctgtccttggtcctcctctgtgtgtgcatacatttcctcagcaagctcttccaggcttaaggttttaactaccacttgtgtaccaaagacttctaaatgtataccttcagccaagcctgttccctgaatcccagactcacctgtcctgctgcccactctggtagataccaataagcttaacatgtcccaaactggactcctca

SEQ ID NO: 5903 - DNA, 534 bp, Homo sapiens
  MAP TO AF274858.1; EXPRESSED IN ADULT LIVER, SIGNAL = 1.1; EXPRESSED IN BRAIN, SIGNAL = 1.1; SWISSPROT HIT: O74627, EVALUE 5.00e-04; NT HIT: gi15314108, EVALUE 1.00e-103; EST_HUMAN HIT: BE513130.1, EVALUE 1.00e-103
cttccttccaagctccattgctggcacctggtgggcagggccccataggagccttccctgcccgtcccccccaccgggtggagatcaggagcccagccaaatgccattacctgttggacacattgatgatgtcacgagtccgcaggtgctgctcttccactttgccggccaagtaaattgaagacatggcaatcaggtaagggtcataggcgtccaggttggtctcgcaaaagaacttatggtaaatggtgcaagcagtggcaatgggaatggaccgcatccctagcttgacacctgcggagagaaagcaggcaagagaggacttcaatccagcgctggctcactgctccagtgaggggagccattggaatgggccctagcaggtacaaccctacttggacaaggctaagaacttccagcagagccagtggctcctgctgggtctcttactgggctctcagactctagtgggtgacccaagcccctggggatggtgttcaaatgcagacttccccttttgtaggtctgcggctc

SEQ ID NO: 5904 - DNA, 590 bp, Homo sapiens
  MAP TO AC004191.1; EXPRESSED IN ADULT LIVER, SIGNAL = 0.7; EXPRESSED IN LUNG, SIGNAL = 0.55; EXPRESSED IN HELA, SIGNAL = 0.81; EXPRESSED IN FETAL LIVER, SIGNAL = 0.38; EST_HUMAN HIT: AL119382.1, EVALUE 2.10e-01; NT HIT: AB031008.1, EVALUE 5.60e-01
tgcactttggggcttaaaacctattggttggctaattcagttattaaagaattcagtaaatgagaataacaccttgtctctcttgactcttggtccaaatctcttgcaaataggccacaccgtagtcatagagcaagaggactcagatacagtttggttggtcctttaccttcaaaagttcaagtgctggctgccgagacttctccaactcagtgatcagggtcccaagctggaccacctcctcagaatccttgatgacacggctgttcctccttttggtgagttcttgctctagccctaccagctgctccaacaggtactgttccctttctctcaaaaaccgatggccctattcaaacactgatacaatgtcttgcctgtggttctgaaatgttgtctccagtaaatgcagaaagagaaaagtgacctttttgagaggctagggaacaccagaacatgtgtgagatcttctgaggatgagttcagaacagaaatctctttgatcactctccccctccccattcctcaatacttcccccacacacataccccttcctctccttaacctatgccccgctactacctacaca

SEQ ID NO: 5905 - DNA, 578 bp, Homo sapiens
  MAP TO AL033544.15; EXPRESSED IN ADULT LIVER, SIGNAL = 2.1; EXPRESSED IN PLACENTA, SIGNAL = 2.3; EXPRESSED IN HEART, SIGNAL = 1.2; EXPRESSED IN FETAL LIVER, SIGNAL = 2.6; EXPRESSED IN BRAIN, SIGNAL = 2.4; EXPRESSED IN LUNG, SIGNAL = 1.6; EXPRESSED IN HELA, SIGNAL = 2.2; EST_HUMAN HIT: AA777415.1, EVALUE 1.30e-02; SWISSPROT HIT: P10231, EVALUE 1.40e+00; NT HIT: AF004877.1, EVALUE 8.60e+00
acacatcttgggagctgtcctggatcccggaggatgaattctgatttctccttcctttgcagaaacatcttccaagagcctgccatcagctctgccatcagccctgccatcagctctgccatcagctctgccagtactgacaaggactcccttggaggcacttccccttagaggcccagatcactggtatttgtaatcagcctatatttagcagatgacaattacactgactggggaggcacatttgaattcaccactcagttggcaagaagaggagaggccgtcactcacccctctgtgagtgagctctggtgaattcctgggagctaaagctttctaaactgtcttttcatcatctctaaaagcatcacgttctaatgaggtccccagacagtgcctcccaacacaggcagaggtggacttggcctcattattcctcatatgagacatctcatgtggtggtaggaggtgggaggtgatggtaagagggggaagaaaggaaacaattcaagtaagactatttgcagttcagattattctgtgttgtcagaggcaggtggaggaagcaagttgacagg

SEQ ID NO: 5906 - DNA, 571 bp, Homo sapiens
  MAP TO AL079302.4; EXPRESSED IN HEART, SIGNAL = 1.2; EXPRESSED IN ADULT LIVER, SIGNAL = 1.1; EXPRESSED IN FETAL LIVER, SIGNAL = 0.98; EXPRESSED IN BRAIN, SIGNAL = 0.92; EXPRESSED IN PLACENTA, SIGNAL = 0.77; EST_HUMAN HIT: Z28672.1, EVALUE 1.00e-101; SWISSPROT HIT: Q9ULJ7, EVALUE 3.00e-09; NT HIT: gi16191151, EVALUE 0.00e+00
gtcactagtggatcccgacgctcttcccactgagcctggacacagcctcagcatctttctcaacacagcactctaggaggaaactctcactccatcagtgtgcgcacaagatgacccctaactcgccttcccttagagctgacctctgacatccttcccgtgtgccctttggggactccatgacctagggacccttagccactcaccgtacttggctaagaacctcaaggcctccaactgtccactctgggcggccacgaacaagggggtgatgccgtaggcgttcttggattccaccttggctcctccgctcaccaggatctgcatgacctccaggtcattgcgagacacagactcgtgcagagcggtccagccgcggttgcagcggtggttggtgtctgcattgtgctgcaccagaatcttcacggcctccgcgttcttgcgctcgcaggctgtgctcagggggaagcagggatggtcagcagggcctggcaggaactggccagcagagactgcattcattcgcctgtccattcactcatccactcattcagctttccactgcatgtgt

SEQ ID NO: 5907 - DNA, 547 bp, Homo sapiens
  MAP TO AC008488.6; EXPRESSED IN PLACENTA, SIGNAL = 0.65; EXPRESSED IN ADULT LIVER, SIGNAL = 0.97; EXPRESSED IN BRAIN, SIGNAL = 0.89; SWISSPROT HIT: Q01484, EVALUE 5.00e-05; EST_HUMAN HIT: BE878557.1, EVALUE 1.90e-01
ccatttttccccataggaccgaaatatcacttttgctgcatattaaattctctatttcttagttttcaacaatctagtattaatttggcctttgttgatgaggcagtatatggctgcagcttgtcagagtgatagattctctttttctgtcttcttggggaagcacggcttgacagtaattcaccttgcagcctggtctgggagccttgaggtcatgctcatgctggttaaagctggagcagaccagagagccaagaatcaggtaggtatgtgggtcacacctggacaaaagctcttacctcaccattgcaggagagaggaagttctgaggtcactgtctatctcccccacccctggttctcttcaggatggaatgagcgccctccactttgccactcagagcaatcatgtgcgcatcgtggagtatcttattcaagatctgcacctcaaggacctgaaccagcctgatgaggtgtgttcactttggttgtgtaggtcttgcatacacccctatcaaatttcactttcttcctgcctctggtacagc

SEQ ID NO: 5908 - DNA, 577 bp, Homo sapiens
  MAP TO AL118559.4; EXPRESSED IN HELA, SIGNAL = 1.1; EXPRESSED IN FETAL LIVER, SIGNAL = 1.3; EXPRESSED IN BONE MARROW, SIGNAL = 1.1; EXPRESSED IN PLACENTA, SIGNAL = 1.6; EXPRESSED IN ADULT LIVER, SIGNAL = 0.77; EXPRESSED IN HEART, SIGNAL = 1.3; SWISSPROT HIT: P14083, EVALUE 4.20e+00; NT HIT: X56512.1, EVALUE 1.40e-01; EST_HUMAN HIT: AI341308.1, EVALUE 1.30e-02
tctgggtgtcctgatcttccccaaggcaccgacaggctagaggggtcagccagggagagaggtgtcacttttgtggaagcacagcttctcaatgggtacgatgagggactctgtccatccagtcaccattcgctgtaagctgagtctatgcctgactctggtctcacctctagagccaaggacaaagaggacatagtccttgccctcaaggagctcaaaggcaagaagggaaagaatggcaaatacctacattcttatcatcgcaatctgccatgagctaatactgagccaagcacagcctgctaattggggagaccgccccaactgtggattactgagaaccagtttgccaacttccccctgggccagcacaggtagctggcatctcccaggcatcactgccaccccctccccatgtttttaaaaaaaaaaatccaagtaatctgatccagccctagccctagttgagcactggctcctagataaatccccaaagcctaattacttactattgtacctggtaatcttaggaggtgtttattttctctttccccttggacagccaatgagcaagaca

SEQ ID NO: 5909 - DNA, 589 bp, Homo sapiens
  MAP TO AC007343.4; EXPRESSED IN HEART, SIGNAL = 1.7; EXPRESSED IN BRAIN, SIGNAL = 1.5; EXPRESSED IN FETAL LIVER, SIGNAL = 0.87; EXPRESSED IN PLACENTA, SIGNAL = 1.5; EXPRESSED IN ADULT LIVER, SIGNAL = 1.5; EST_HUMAN HIT: AA760867.1, EVALUE 8.30e-01; SWISSPROT HIT: P51957, EVALUE 1.90e+00; NT HIT: gi14861873, EVALUE 2.00e-03
cgtcctgacaactgtggatgtgagtgaggccatggaagtcctgtgttccccccaacaggaactgtcctgtgtgtgagccaccgcgcctggcctgaggtcatcattttccttggtgatctaggactttagcaggttgttcattcactaactcatccactcattcagcccgtgtggagcaggcactctgcaatgcaccgggacacggcaatgaatagaacagatgcagcctctcaggagcaaatgatccaggcgacaaggaggcagttacagcagcacgtcaacaagggcaaaatgtgttcatcttccgtgagaactggcgaggagagcaacccagtgctttgggagcctgtagggcaaaaatccctggtcagcaaagtcagaaaaggcttccccaggaaggagacactggggctgagacctgaagcatgagaagagctcaccagacaagggagcgacaggaagagaacattcccagcaaagggaaccgcaagtgcaaaggatccgtggcagaagagagcatcgcagacatgagggactgaagaggcgtgaagacttgaggggtggctggaggacagagttaggggtgggt

SEQ ID NO: 5910 - DNA, 538 bp, Homo sapiens
  MAP TO AC008010.10; EXPRESSED IN FETAL LIVER, SIGNAL = 1.3; EXPRESSED IN BONE MARROW, SIGNAL = 2.5; EXPRESSED IN PLACENTA, SIGNAL = 1.5; EXPRESSED IN ADULT LIVER, SIGNAL = 2.3; EXPRESSED IN HEART, SIGNAL = 2.5; SWISSPROT HIT: P20740, EVALUE 4.00e-16; NT HIT: AE006808.1, EVALUE 8.00e+00
tggcaatgaggatagcactggaacacacatcactatgaaacaccatgctcaatacactgtttaaactgtcactgtgaatgaaagcaattgtatttgtttgaggaatatggacctaagtcttatacctttatagtagcattttgcacttgaggataaagagaatatggaaatattaagaatattttagctttgttagatttttgcctccagatcaaacagaacaacgcacctctacacatgtattcaggtagctgaaggcattgacaatcaaatcaaattgttcattttgaacaaccgaaaagggtgaggcaatttcaataaagaaaggttgggagacttctagagtggttgtagaggaaatgccaaatccaacgtcgccattcacacaaaagccacttgcctcccattgggttatcgtatcaggaatgaggaacgaaagattggcagagcctgaggaactggaagaagaggttatcggtaaaacacattctttgtctgaaccaagaacttaaaattaagtgcagagcaagcagaaaag

SEQ ID NO: 5911 - DNA, 524 bp, Homo sapiens
  MAP TO AL031707.17; EXPRESSED IN FETAL LIVER, SIGNAL = 3.8; EXPRESSED IN BRAIN, SIGNAL = 2.9; EXPRESSED IN LUNG, SIGNAL = 1.5; EXPRESSED IN ADULT LIVER, SIGNAL = 2.3; EXPRESSED IN PLACENTA, SIGNAL = 2.6; EST_HUMAN HIT: AV733042.1, EVALUE 4.70e-02; SWISSPROT HIT: P02462, EVALUE 3.80e-02
cacacacacaaagggctgagacagtgcagcctggcgtgtgagcagccctggtgtctccaggctggggtgctgtccgcctgcccacctggccacggtccccaacagccggttcagcaaaggacaggcagaccctacgggccaaggatgcgctggcctggccggtgcggggccaggcgggcagcttgccaggatttggggattttgagccagctgctgcagcaggtgtggccggcccagccaggcaagtcctgctgccgggagggtcgcccaccagctgctggagggtgtggggcggccgggctggccactcgccggcagcaaagccagcagagagtgggtggggctgggggaggcgggagggtcccagtcccacccccagggtccagcttccctgggccctgcagccaggccaggaaggtcagctgggctggttctgggccctaggtcttagcctggaaaccaggggtttcaatcttggcatgagaaagccctcgccacagggcaggaggagccccacatagaac

SEQ ID NO: 5912 - DNA, 508 bp, Homo sapiens
  MAP TO AC004711.1; EXPRESSED IN BONE MARROW, SIGNAL = 0.83; EXPRESSED IN PLACENTA, SIGNAL = 1.4; EXPRESSED IN ADULT LIVER, SIGNAL =   1; EXPRESSED IN LUNG, SIGNAL = 0.61; EST_HUMAN HIT: AI459161.1, EVALUE 8.00e-81; NT HIT: AL163284.2, EVALUE 1.00e-32; SWISSPROT HIT: P09620, EVALUE 9.30e-01
ctctcttgctcctgctctggccatgtaagacatgcctgcttttcctttgccttctgccatgattataagtttcctgaagcctccccagaagtagaagccactatgcttcctgtacagcctgcaaaactgtgagccattaaacctcttttctttataaattacccagtcttgggtatttctttatagcaatgcaagaacagactaatacagaaaatgggtacttggagtggtgcattgctataaagatacctaaaaatgtggaatcaaccttggaatcaggtaatgagcagaggttggaagagtacagagggctcagaagaggacagaaagatgagggaaagtttaaacttcctagagacttcctgaatggttgtgaccaaaatactcatagtgatatggacaatgaggcccaggactcagacagagatgaggaatatattggcaactggagaaaatgtcacttttgttatgtgttagcaaagagctaaggatctgtgggaccttgaac

SEQ ID NO: 5913 - DNA, 535 bp, Homo sapiens
  MAP TO AL118521.15; EXPRESSED IN BRAIN, SIGNAL = 0.88; EXPRESSED IN ADULT LIVER, SIGNAL = 0.7; EXPRESSED IN FETAL LIVER, SIGNAL = 0.71; SWISSPROT HIT: P30203, EVALUE 1.70e+00; NT HIT: AF152224.1, EVALUE 5.10e-01; EST_HUMAN HIT: AV754005.1, EVALUE 1.90e-01
agaaaactttctgggccctctgcagaggaattagaaaggcagttttcttaagtcagaacaactcaaaagaatcagctcactcctttctctggcagccagaattccgctcctgggtcacatgtcacttctaattgtgggcatgatgctcgagttccccttgggcctgaatttcatccgagtaaatcctctccttcagcagctgcaggattgtgtcagggagagtgatcttcaggcacacacttctgcagaagagagcagctgagcctggcacgaaccctcggagtcagtcatctcccatcgacctgttatcgactctgacatggcctccctcagtcagacactaacaaacagaggccaatgggtgcaagagaaggagctggagtcctggagatggggctttactctcgcttttaaataacggcgagtgtttccaagagagaaagtgctggaatggctggggtaatgaaaaatactctgagtagaattctctctggttttacctagtttggccaaatggtttttgggtgtctggtgt

SEQ ID NO: 5914 - DNA, 571 bp, Homo sapiens
  MAP TO AL031709.10; EXPRESSED IN BRAIN, SIGNAL = 2.8; EXPRESSED IN BONE MARROW, SIGNAL = 4.5; EXPRESSED IN LUNG, SIGNAL = 7.1; EXPRESSED IN PLACENTA, SIGNAL = 2.4; EXPRESSED IN ADULT LIVER, SIGNAL = 1.9; EXPRESSED IN HEART, SIGNAL = 4.4; SWISSPROT HIT: P33485, EVALUE 2.30e-01; NT HIT: gi14776632, EVALUE 0.00e+00; EST_HUMAN HIT: AU125529.1, EVALUE 0.00e+00
acaagagggaggggtgaaagggcaagggccagcctgacaggaaaggcggctcccagggagacaggcaaggaggccacagggggctgtgctggggtggggcaccgtctcctcctccctaggcccggagcagaccctggggcaggggaggaaggggacaccgcaccagccagggccctccccagacagggacagcagccctgcaggcaggctggcccctcaccctgcccagagcaggactcacgccgtccaccgcctccaggtccaggcgcagctgactctgcagcgagtgcagcttcggcaggggaatggtgccgatgtccccacagccccgcagccccggcagtgtggaggctacgcccaggccctccagctcctcctgcagctgcttcacctgtgcctccacctcctccttcttctgcagcgccagctgccggtcgctatcggccacacgggcacgctccttggcctcctgcgcctctcgctgccaggcatcgcagacctgaaacccagggcccgtctcagcaccccccacctcacctgtgccacctgcagaccctcttgcctgtgtcac

SEQ ID NO: 5915 - DNA, 515 bp, Homo sapiens
  MAP TO AL023495.1; EXPRESSED IN PLACENTA, SIGNAL =   5; EXPRESSED IN HEART, SIGNAL =   5; EXPRESSED IN ADULT LIVER, SIGNAL = 3.5; EST_HUMAN HIT: BG740319.1, EVALUE 1.00e-111; NT HIT: AL163282.2, EVALUE 4.00e-60; SWISSPROT HIT: Q04018, EVALUE 1.90e-01
ctatgttggacccttcagccatagctggagcagcttagatgcaggacaccaagtccctaggctgcacacagcatggggaccctgggtccaacctgtgaaaccattttttcctcctaggcctctgggcctgtgttgggaggggctgccatgaaggtctctgacatggcctggagacatttcaccattgtcttggggattaacattcggctccttattacttatgcaaatttctgcaactggcttgaatttcttcttagaaaatgctattttattttctatggcattgtcaggctgcaaattttctgaacttttatggtctgtttcccttataaaactgaatgcctttaacagcacacgagtaacctcttgaatgcattgctgcttagaaatttcttccaccaggtaccccaaatcatcccgctcaagtccaaagtcccacaaatctctagggaagggacaaaatgccaccagtctctttgctaaaacataacaagagtcacctttgctccagttcc

SEQ ID NO: 5916 - DNA, 579 bp, Homo sapiens
  MAP TO AC013620.2; EXPRESSED IN FETAL LIVER, SIGNAL = 0.87; EXPRESSED IN BONE MARROW, SIGNAL = 0.48; EXPRESSED IN PLACENTA, SIGNAL = 0.94; EXPRESSED IN ADULT LIVER, SIGNAL = 0.7; EST_HUMAN HIT: AA230165.1, EVALUE 2.00e-20; NT HIT: AL163201.2, EVALUE 2.00e-22; SWISSPROT HIT: P73421, EVALUE 2.50e+00
cctatggaggctccttcctctggaggctctgtcccagggagtactgatgtgttgccagcctgaacacatctgtaagaggtggttagagccccttttgggaagtctcactgagtcaggaggaatgggatcatggacccaattaaagaagcagtctggccgctttttggtacagcaggtatgctctattggggaggaccctttctcgtccagatcttttggactttcaaagctggcaggctggaatggttgaattgactgaaccacagagatggcagccacccctcccaccaggagctccatcccagggagagatcaaagctctgtccataggatttttgcaggtggctgaaacaccttcagggaggtcctgccaagtgatgatgaatgaatcatggtcccatttaaagatgcagtctagctacaatctggcaacgcagctgtgctttgtcgtggggggtctttccttgtctggaccattagtattcccaaaggtgcaggctggaccaactaagtctaccaaactgcaaagttggtggccaccctgccttcccagaacttggttctgactcaggcggactc

SEQ ID NO: 5917 - DNA, 512 bp, Homo sapiens
  MAP TO AL050328.24; EXPRESSED IN BRAIN, SIGNAL = 1.1; EXPRESSED IN HELA, SIGNAL = 0.61; EXPRESSED IN ADULT LIVER, SIGNAL =   1; EXPRESSED IN PLACENTA, SIGNAL = 0.85; EST_HUMAN HIT: BE535681.1, EVALUE 1.80e-01; SWISSPROT HIT: Q9NPA2, EVALUE 7.20e-01
aacaggaaagcaaagcgaaggaaaaaatgctgccactctaacaaatttcaggaagtactccatgaaggatgccaggatggtgtgggagatggagaaaggtcttgcagctcctttttctggatgtcgttcagtctggaacaatctgagatttcatttgacctgcaggcaggagtatgtatgaaagagctcctggagtccaggacctggaccccatctctctctagcttagtctcctcaccttcttcacccgtgcctccctccagcaatctctcttcatggcttcctgcagggtggcagctacctcgcccacccatgggagcgtcttctgtacaggttcgattggcttcagctgttcaaacatcttctcttctgtggtgtctctttctagctttatccactcctggcctggtgcccaggcctgactggattccttcctggggctatctacctcccagtaactgggcagatggagaggcccagcaaaggccccagggtttgatgtggcttcctgt

SEQ ID NO: 5918 - DNA, 525 bp, Homo sapiens
  MAP TO AC026733.3; EXPRESSED IN HEART, SIGNAL = 1.2; EXPRESSED IN ADULT LIVER, SIGNAL = 1.2; EXPRESSED IN HELA, SIGNAL = 0.84; EXPRESSED IN PLACENTA, SIGNAL = 1.1; EST_HUMAN HIT: AI198608.1, EVALUE 4.70e-02; NT HIT: AL111752.1, EVALUE 2.00e+00; SWISSPROT HIT: P54688, EVALUE 2.20e+00
ccactatccatccccaacagacaaagattgagctgtcacaacaagcatctaacagggaagtttttttacaccacggtccagggactcctttcctccttcagaatacaccaagtaagtggccacacagaggccacctttctgcctctgtagacagcatcagcaggggccagaggagcaccagtagtaccacatgaaccaggcaaatcaaaacaatgtaatgaagtctttgaaaattaaactgttattggaatcatagcccacataagtaggccagaacttatttagtaaatctgagcatcttatcctgaattctggtgtacaactcagtccatcctgcgttatattcagccaattcctagatttagaaaagcttacagatacagatcaaagaaatgggttggaaatcaacagaaagcaagtcaatgaaaaggcttattttggatctatggagaaaatgaagggaatgccaaatgggtaaggtactgagtgtacaaacagtctatttgcctggaaattgaagcagat

SEQ ID NO: 5919 - DNA, 538 bp, Homo sapiens
  MAP TO AL117259.3; EXPRESSED IN BONE MARROW, SIGNAL =   1; EXPRESSED IN ADULT LIVER, SIGNAL = 1.7; EXPRESSED IN BRAIN, SIGNAL = 1.8; EXPRESSED IN HELA, SIGNAL = 2.3; NT HIT: AF281074.1, EVALUE 8.00e+00; SWISSPROT HIT: P02857, EVALUE 2.60e-01
agagggagaagggtgtagcctcactttgagctggtgccagaaaacagctgcaagttgacaggactttgactgctctcacagtcattccatagacactgttgttacaacagttaacccccaccatctcaagtattctactctcagaccaaccaccacctcctttctttctagctcattccttttggcacccaactccaacaatcctctagtcccactgggatgcaaatccattgattctactggttttcatttctctctcttctcttgggtcctcacttccttcttgcccagcttcaatgtcataatcagtcacagcctctgctcctttgtcctcctcttgctttatcagggctgcttgacaagtcctccaactctcttcctgttccgtgccaacactcgagctgttgaatgtagccagagaaaaccacactatgcaggctagccccgttttaaatccatgatcactaacctcaagagagcttggatcctggagagcaagcattctctactccctgaaccattccatattcccactgcc

SEQ ID NO: 5920 - DNA, 523 bp, Homo sapiens
  MAP TO AL023801.1; EXPRESSED IN HEART, SIGNAL = 1.5; EXPRESSED IN ADULT LIVER, SIGNAL = 1.7; EXPRESSED IN BONE MARROW, SIGNAL =   2; EXPRESSED IN PLACENTA, SIGNAL = 1.9; EST_HUMAN HIT: AA837401.1, EVALUE 7.30e-01; SWISSPROT HIT: Q9PJL4, EVALUE 2.50e-01
gttgcctttgataagcctcgccatctgcagctcaattcttcagcccttgccaaacttcagtctgacaaatgataagagccttggagacgtcgctctggtgggtgtgagctcgctgccaggttgctgcttcccggtgctcacgctagagatccatatgggttgctctggggttttaaaaaagcgcatcgtgctcatgtcctccattttaccaaaggaggtaaatctggctttggcagcagacaaagtgcagagatttttatccggccatgagagcaggcgctgtcagtggctggggctccctctttcaggcagagcggtggagtggaggacagaggcactggagccggctttgcttctgccggtgcctttccctctcggctgcactcagtattcccagttttggatactgaggccatgttagccaatgttctttggttgtcagctgttctctagtcaggaggctggtatggagttaagcatggggctctgcacataacagacatccgttcagttcgtgtttgtg

SEQ ID NO: 5921 - DNA, 562 bp, Homo sapiens
  MAP TO AC026730.3; EXPRESSED IN BONE MARROW, SIGNAL = 5.5; EXPRESSED IN ADULT LIVER, SIGNAL = 3.5; EXPRESSED IN BRAIN, SIGNAL = 4.1; EXPRESSED IN FETAL LIVER, SIGNAL = 3.2; SWISSPROT HIT: P29572, EVALUE 9.20e+00; EST_HUMAN HIT: AI355801.1, EVALUE 3.10e+00; NT HIT: gi9964314, EVALUE 2.10e+00
tttggcggacctatgagaaggcctgtgggaagttggccccatgcttttctggttcaggagtgagctatatatttgggcagaattcatacacggaattcatagatccacttccctggctctctcctttctggaatttttccctttagattccagtggctgtgattgccgtaaattctggcttctggtgttttcaaaacgatgagactgtgagtttttctattgaaatgttagccttcctgtcagatataaatttgggctatctcatgataaaaacaatgacatgagtaaatcactcttcatcgtatcttcatccctgtttccaagtgtaacactccttccagtgtctgctttgtttttccacaatcttccactttcaggtacttgttttatatatttatttttctaaaaactacagttatctttctttactcagtttaaaattactgaaatcaacagtaaaaatgtaaaacaataaaaatctgatctttcacataccatatgttagaaaacatatttcattagaatatttttagtacaggccagaggctgtggcttatgccta

SEQ ID NO: 5922 - DNA, 519 bp, Homo sapiens
  MAP TO AF006752.1; EXPRESSED IN BRAIN, SIGNAL = 0.92; EXPRESSED IN HELA, SIGNAL = 0.46; EXPRESSED IN ADULT LIVER, SIGNAL = 0.85; SWISSPROT HIT: Q99NB9, EVALUE 1.60e+00; EST_HUMAN HIT: AW820914.1, EVALUE 4.00e-33; NT HIT: Z95558.1, EVALUE 4.90e-01
ccagagaatgaactctgtccctcttttaaatctggttggtttagtctttttagacacataccgttcggggacaaagagatcgatcagaattttcttgcctcctcggacggcatctgacctggctaggttgcggggatctgttggagagagaagcgtgtcatggatcccgcatcgaaaacagccttgaagagggccaggagcacggaggacctggggagggccctgaccactggacacatctgccctttgctcctcctttttgtctctgctggtggccctttctgctgtattcacgcgccctcaccacctcctgtgtattcgtgtgctggagttcagccgccaaggtggagagagactccctgtcggggaaggactccggccccaatgcctcctcctccaggccaggccgccatggtgggtgggaagagaggccactcctagagaaagagacactgtcagtaggtgtcaggaggtgtcccgggagctcgccgcgtggtaaccaacagacacagcccttct

SEQ ID NO: 5923 - DNA, 560 bp, Homo sapiens
  MAP TO AC009087.4; EXPRESSED IN ADULT LIVER, SIGNAL = 2.3; EXPRESSED IN FETAL LIVER, SIGNAL = 8.2; EXPRESSED IN BONE MARROW, SIGNAL = 1.9; EXPRESSED IN HELA, SIGNAL =  11; SWISSPROT HIT: P25705, EVALUE 1.00e-80; EST_HUMAN HIT: BE796410.1, EVALUE 0.00e+00; NT HIT: gi4757809, EVALUE 0.00e+00
tgggttccaagacccataagtgagtcggtctgaaagcccccagaatcattcctcgaacttcagtgtgggaaccaatgccgactggcattaaggctgtggatagcttggtgccaattggtcgtggtcagcatgagctcattattggtgaccgaaggactgggaaaacctcaattgctattgacacaatcattaaccagaaacatttcaatgatagatctgaagaaaagaagaagctgtactgtatctatgttgctattggtcgaaagagatccactgttgctcagttggtgaagagacttacagatgcagatgccgtgaagtacaccactgtggtgtcagctatggcctcagatgctgccctacttcagtacctggctccttactctgactgttccatgggagagtattttagagacgatggcaaatatactttgatcatctatgacgacttatccaaacaggctgtcgcttactgtcagatgtctctgttgctccaccgacccccctggtcgtaaggcctgtcctggtgatgtgttttacctatactcccggttgctgga

SEQ ID NO: 5924 - DNA, 594 bp, Homo sapiens
  MAP TO AL109754.13; EXPRESSED IN PLACENTA, SIGNAL = 1.5; EXPRESSED IN ADULT LIVER, SIGNAL =   2; EXPRESSED IN HEART, SIGNAL = 1.2; EXPRESSED IN BRAIN, SIGNAL = 2.5; EXPRESSED IN LUNG, SIGNAL = 2.2; EXPRESSED IN FETAL LIVER, SIGNAL = 2.2; EXPRESSED IN BONE MARROW, SIGNAL = 1.8; EST_HUMAN HIT: BG539084.1, EVALUE 0.00e+00; NT HIT: AF200843.1, EVALUE 8.90e+00; SWISSPROT HIT: P39869, EVALUE 3.90e-01
ttctccccattagagtccccacagtgaagcaatattccacactttacctttagccactgttttgtaccagttgggaaatcaaaactttcattaaaccagccttcctggtagatacttggaagaattacaacactctttagcatgtttagaaatgtccttattcctgcccacattttataaagacataatcacgtggtagatgcctttgggacttttgaaatgcattctgtgaatgagaagaaatgcaaacatgttggcaaaactgattattttcattgtggatctcacgcttgctttggccatttttgttatcttttatttaatggctgccactgtttttttcatctcggtcattttctatattttcaaaagggagatggaaaaaaaactttgacttcaacaagcgccgaatctgggcgctggattctagcaatgctactgaggagcctttggcaggtggcgcagagaaagtcagctccaagctgcttcctgtccattgtccagctgtaggagaagggtctttcctgcccaaggacagtggtcctctcttctaaagagcaaggagctctctgaggtggaggaggcttgtgaaga

SEQ ID NO: 5925 - DNA, 583 bp, Homo sapiens
  MAP TO AC008546.5; EXPRESSED IN ADULT LIVER, SIGNAL = 0.97; EXPRESSED IN BONE MARROW, SIGNAL = 0.62; EXPRESSED IN PLACENTA, SIGNAL = 0.89; NT HIT: AF223391.1, EVALUE 0.00e+00; EST_HUMAN HIT: BG722895.1, EVALUE 4.00e-86; SWISSPROT HIT: P21414, EVALUE 2.00e-06
aaggggaggttgtgattgtgtgaggtatccaaggaagcaggagggatatacgtagggaaagagcaaataagaaggtaaagagggtgctctggaagacaagattattttatctagtctgagttaaaggtaggagtaaattgctgtcaaaaggaaggaagattgaagaaagaaggttgatgtgattaggattttcatcctggtaggagctacagtatatagtcctattgcaaagagtatggttagtatgctgttttcacttaccttttttaaggaggaaggggtttttccacaggatcagtggtaggagcctttttagtctgggatgtttccttctgaaataggagatgtaagtcctccaatggttcacaggtgtatcgagggtggtctggctgatcttgggactcctgagctgagggtcctgcaggttcctcaggggatgtccaaagtttaactcgggtgtggtgagtccaagattccactcctgccaccttaactgcagtgggggtagagaagattactgagtatgttccttcccacaaagagtccatagatgggcaggtagaggggagagatttgaccaaca

SEQ ID NO: 5926 - DNA, 515 bp, Homo sapiens
  MAP TO AL035666.7; EXPRESSED IN BRAIN, SIGNAL = 5.2; EXPRESSED IN BONE MARROW, SIGNAL = 6.8; EXPRESSED IN PLACENTA, SIGNAL = 8.6; EXPRESSED IN ADULT LIVER, SIGNAL = 4.3; EXPRESSED IN HEART, SIGNAL =   4; NT HIT: D50868.1, EVALUE 8.00e-03; SWISSPROT HIT: P27435, EVALUE 6.20e+00
gcagtctcacttccctggtctccaggcagagatggcctccaacatctgagcactcactgaccacagcttcctcccatggcttaacagtgccttctattgtggctgcctcgcccatcaggctgtaagggtactgatggcagcacccctcgttcacctctgcacctccagtgcctgtcacagggcctgccacagagtacttcacggcggctaaataaacgaatgaagaagatactggcaggctagaaccttgtaagcaaatcaaagtgttccaacaatcatcttatttgcaatggtgaaggatggagttgagggagcaaactggaggcagggagacaagatgccctggtttattaggagtaagatattgaggacctggtggcaagggagcagcagtgcagatgcaccggaagtggaaaggacagaattcagggaataatgggagtaagtgtccacagcagccaagcattgagggtaatgcccatactctggcttggacaactgggtggtgacatttg

SEQ ID NO: 5927 - DNA, 591 bp, Homo sapiens
  MAP TO AC016046.1; EXPRESSED IN BONE MARROW, SIGNAL =  12; EXPRESSED IN PLACENTA, SIGNAL =  15; EXPRESSED IN ADULT LIVER, SIGNAL =  13; EXPRESSED IN FETAL LIVER, SIGNAL =  18; EXPRESSED IN BRAIN, SIGNAL =  13; SWISSPROT HIT: P11369, EVALUE 3.00e-04; EST_HUMAN HIT: BE149314.1, EVALUE 9.00e-10; NT HIT: AL163301.2, EVALUE 4.00e-08
agagtgggaggaagaggtgggagtagataagaagaaaaagaaggagggtgtgtttatgaaattacaacataagggatcctcgtgatactggaactgaccagtatctgaactgtggtgttgaagacatgaacttatacagattctaaaataatataatacttaatccacacacacaatgagcacagcaaaattagggaaattggattaaggtcagtagattatatcaatgtcaatatcctggtataatagatactatattatactatattatagtgtataatgagcataattttcatttctcagggataaatgcccaggagaacagttgtgggtcacatggtagttacaggttttatttgttaagaaagtgacaaactacttttcagtgtagttgtaccattttacacttccagcagcaatgttggagtgatccagtttctctgtatccttggcagcataacactatgccacaacatagtatctgctatactgtattatagtatattatatatatactatagtatagtatatattaatgtatactatattatactatagttttcaaatgttacaactggaggaaacaatgca

SEQ ID NO: 5928 - DNA, 527 bp, Homo sapiens
  MAP TO AC005944.1; EXPRESSED IN BONE MARROW, SIGNAL = 0.99; EXPRESSED IN PLACENTA, SIGNAL = 1.1; EXPRESSED IN ADULT LIVER, SIGNAL = 1.2; SWISSPROT HIT: P46687, EVALUE 4.90e+00; EST_HUMAN HIT: BG939731.1, EVALUE 4.70e-02; NT HIT: AF209746.1, EVALUE 1.30e-01
tttatggcaggcaatgagtgctcattttccaccctgaggcctggaggggctggtgtttgggtgcggagggtcctgccccctgactccggagctgtagttctggcaataggtgcccttgcaccctgcctgtcctcagcctgggtccccatcacctttgtcctcgctcgcagctctgtgccaggaaatggccttgttctcaccccgggccctcataaaatccagttcctcaaggtccaggaggccaaggccacaaggaagggaggaggccgtggggagctgaggagggagggaggggccgccaacgccatgaaggcactgctgtgagtgtggactttgtcactctgagcctctgggtggggacgctggagtcagtattcagctccgggttggggcccagggtcaactccccatctctggatgggcctcagtttccccatcttccccacaggaggctttctgtgtcctggcccagttcccggcacacagtaggcactgagaacggaagaccccccatgatgttgttgttt

SEQ ID NO: 5929 - DNA, 593 bp, Homo sapiens
  MAP TO AC010505.6; EXPRESSED IN FETAL LIVER, SIGNAL = 1.3; EXPRESSED IN PLACENTA, SIGNAL = 0.98; EXPRESSED IN ADULT LIVER, SIGNAL = 1.1; EXPRESSED IN HEART, SIGNAL = 1.4; EXPRESSED IN BRAIN, SIGNAL = 0.99; NT HIT: AB066618.1, EVALUE 3.60e-02; SWISSPROT HIT: P40602, EVALUE 6.70e-01
agaggagctggggtaggaagtggggcctgcaggggcatggcgctgaggaggctggaggcttcaggcaccaggcagggcagcaggaagtgaggaagactggcagtgaactggagaggccaagggccggaagaccagctaggaggttgtggccggtgctagacgtctgcagcttaaccagggtgtcggccttggggatgcacggaaacaggtttgagaggtgcacacagcacccacgaacagggcctcagggacacagcccctccagcctcggtctgggtgtctactcacagcccagtgccctgaagggtggcagccccactaggcgagtggagatggctccagccgtccaagctgctgaacaaggggctgtggacaaggccagcgtggccaaggaggcaggggctgcagctgaggtcttctcaggggaaaagggagcaggcaggtggggagacacccttgggcagacagaaataaggaggaagatggcagagctgggtcgcaggggtggggagccgtgtgggcatacctccgggtgttgggcaggctgcagccttgtctggcttagctttgtgagttcagtcaagggtgagcct

SEQ ID NO: 5930 - DNA, 534 bp, Homo sapiens
  MAP TO AC006326.2; EXPRESSED IN HEART, SIGNAL = 2.5; EXPRESSED IN ADULT LIVER, SIGNAL = 1.5; EXPRESSED IN LUNG, SIGNAL = 2.2; EXPRESSED IN BRAIN, SIGNAL = 1.5; EXPRESSED IN PLACENTA, SIGNAL = 1.1; NT HIT: gi14734195, EVALUE 3.00e-42; SWISSPROT HIT: Q28521, EVALUE 2.00e-05; EST_HUMAN HIT: BG944269.1, EVALUE 4.00e-27
gatgtagatcctgccaccgcagttggctgagttaataaacttgttgtaacctgtagctttcctgttatttttcaggctttcctcttttgctaagcacttttttttggcagtaattaaaatcttctgccactgctatagcttctcctgatgctaatacaaccataaccaccttggttttgtggtttggcaaagtattggctctcccagtataagaaccggagcttctgctccatgatctccttcctttatgggtccagaatttgaagattattgtaattgccattgtccactgtcgcttccaccacctccaaaattgcttctatcattaccaacaccattataactatccccactggcatcatatccaccaccatcatggctgccaccaaagctatcacaaccattgtaatttcctccataattaaagttgccattccctctaaaataacctccacaacgactgctgaagttttcagaaccactttgacctagataaggcacttacaatctcttgcttagccagggatttcccta

SEQ ID NO: 5931 - DNA, 541 bp, Homo sapiens
  MAP TO AC010512.7; EXPRESSED IN FETAL LIVER, SIGNAL = 0.47; EXPRESSED IN ADULT LIVER, SIGNAL = 0.95; EXPRESSED IN HEART, SIGNAL = 0.92; EST_HUMAN HIT: AL572690.1, EVALUE 3.00e+00; NT HIT: gi14764193, EVALUE 8.00e+00; SWISSPROT HIT: Q13796, EVALUE 1.30e-02
acgggtgaatctggatgttcctaattgcctcttgaagctgttgctaagatttgaaggggttacctgtagagcactcagtagtgacttaatcagtgctctgtaggaggcactgctggtgccctgcccatagcctgcaaattaaagtttctgcatctttttacctgagggcattctgcaaagctccagtgtgcaactgtgcctacctcatggtcatcaggaaatgccaggggattaacaccttctgggatggcccctaccaagtggcactggtggatcaataccccaactccttcacctcagatgggatcatggaatgggtgttttatgcagtctcccagagtaccagggaggccttggacctccagaatgctgagaagatggctgctgcgtcacttccgcctcccaaatctcagggaatgtctcttgtggcccaacccatgcgaactgggaactgcatagggaaggacatgctgggaaatgcagctgcagctcatgtgggtccacacaataccaatcctccccaaggacccctcattaggct

SEQ ID NO: 5932 - DNA, 548 bp, Homo sapiens
  MAP TO AC007206.1; EXPRESSED IN ADULT LIVER, SIGNAL = 0.64; EXPRESSED IN PLACENTA, SIGNAL = 0.56; EST_HUMAN HIT: BF911407.1, EVALUE 7.70e-01; NT HIT: AB040292.1, EVALUE 5.20e-01; SWISSPROT HIT: P08428, EVALUE 5.20e+00
tgcttctgagcttgttgagctcagcatcagcacagacatctagctagtccgagaactcagatagggaccaggctctgtcctggtgggttaaatcttaaatctctatgtagcccattactatcagcaaatggatctttatttaagctctgatcttgtattgtgtgtatatccttctccccagctctgagctctctgagaggacagcctacagtttttccatttctatctccagggcctactcccaaaagatgaaccttcaactgtctacattgcacgtctgggccttcagcatcgctgatgcgccagctggcaccagcttcagcagcccagcgcatctgctgtgcttgcatctgccatgtcatcgtggggtcctgggcccctgaatgcagcaggccagcttatgtggtcccatcctctgcatctctgtctgcctctgcagtgcagacggctctgaagtcacaccagcctaacttccaggcccagacctcagggggagccagattgccatatcattcctgtatccagatccagatttttcctgctgcctc

SEQ ID NO: 5933 - DNA, 593 bp, Homo sapiens
  MAP TO AC006128.1; EXPRESSED IN HEART, SIGNAL = 2.5; EXPRESSED IN ADULT LIVER, SIGNAL = 1.1; EXPRESSED IN BRAIN, SIGNAL = 1.4; EXPRESSED IN FETAL LIVER, SIGNAL = 2.3; SWISSPROT HIT: Q9ULX6, EVALUE 3.00e-40; EST_HUMAN HIT: BF986401.1, EVALUE 1.00e-106; NT HIT: gi14761746, EVALUE 1.00e-75
caccagctcctcctcaactcgccctgccacttccacctgggcctgagccaaggctggtctcctgaccttccctgggggaacagaagggtgtcctgaccctgcaccgaaaatcaggagtgcaggctgaggccttgcctggtgggagtgggctgaaaatctcctcaccctgggtcagatcctggtctctgtagatttggtggatgaggccatcaaggtcctccacggtttttcggagctcctctgtcttcttggtcttgttagtgacgtactcctgcaaggaatataaaggttcatgtgggccgccttatgttctcaggggtccaagaaactaagagcggctgtgttactccaaggctcacctgcagaaagtcagccgtctgcttagggagcttggtgcctacgtacttaaagtgttccttgtggaacttgctgtcaagatggctggccatctcgtcctcatagaaggtccggtatttgcacagagaacacacaaactggatcctgccacaggaaggaaacgaggggctgaggctgcaagtgtcccaggggatagtgctgccgcctcacccaacccagacacaagccctgaaaca

SEQ ID NO: 5934 - DNA, 590 bp, Homo sapiens
  MAP TO AF212831.1; EXPRESSED IN BONE MARROW, SIGNAL =   1; EXPRESSED IN ADULT LIVER, SIGNAL = 0.92; EXPRESSED IN LUNG, SIGNAL = 0.77; EXPRESSED IN FETAL LIVER, SIGNAL = 0.58; SWISSPROT HIT: P11369, EVALUE 9.00e-37; EST_HUMAN HIT: BE145672.1, EVALUE 5.00e-27; NT HIT: AL163213.2, EVALUE 0.00e+00
ccacttttgtgtccacttcgatttttttcattagtattttcattttcatgatagagaccttttccttttttgattaacttaattcctagatatttaattttatctgtagctattgttaatgggattactttcttgatttatttttcagattgcttacctttgacatataaaagtgctacctatttttgtatgttgattttgtatcctgcaactttgcagaatatcttagttctaatcattttttggtgcagtctttaggcttttccaattattaaattatatcatctgcagacaaaggtgattgtactcattcctttccaagttgcatgccctttctttctttctcctgtctgattgctctagctgggacttccagtactatgttgaataacagtggtgaaagtggtcatccttgtcgtggtccagatcttaaagaaaatgttttcatgtttttcccatccagtattattgtacctatgggcctgttatatatggcttttattgtgttccttctacccccagattttttaaggatttttatcatgaaggtatgttgaattttatcaaatgctttttcagcatcaattgga

SEQ ID NO: 5935 - DNA, 507 bp, Homo sapiens
  MAP TO AC010518.5; EXPRESSED IN PLACENTA, SIGNAL = 0.76; EXPRESSED IN ADULT LIVER, SIGNAL = 0.74; EXPRESSED IN BRAIN, SIGNAL = 1.2; EXPRESSED IN LUNG, SIGNAL = 1.9; SWISSPROT HIT: P43629, EVALUE 2.00e-18; EST_HUMAN HIT: AW467285.1, EVALUE 0.00e+00; NT HIT: AF014923.1, EVALUE 0.00e+00
ctgtcgatttccaccctctcatggtctggaccctcccctgcagaccctcccccttcactcccctcattcattattgtcccagagctctgctgggggcagggcctgagctgagcctttgagctcagagaggacagggtcagggccctcacctgagaccacgagctccagggggtcactggggtgagtcagcaggtaggggttggagctgagtgagccgtagcacctgtaggtccccgcgtgggccgaggtcacaggactcatggggaattcagcctggtacttatgagattggcgctttgattttagacgcagcggggaatcagctgccccctccttggtcaaaaggaaagtgtgcatccctccctgtgactgacacagcagggtcacgttctctcctgaggccactgtggggcccggccgcacggagaggaagggtctggcacggatctgtcctggagagaagaaggatgggtgaggggctgccccaccttgctctgagctgagacc

SEQ ID NO: 5936 - DNA, 577 bp, Homo sapiens
  MAP TO AC008982.4; EXPRESSED IN ADULT LIVER, SIGNAL = 1.2; EXPRESSED IN FETAL LIVER, SIGNAL = 0.85; EXPRESSED IN LUNG, SIGNAL =   1; EXPRESSED IN BRAIN, SIGNAL = 1.1; SWISSPROT HIT: P04706, EVALUE 5.50e+00; EST_HUMAN HIT: AW004003.1, EVALUE 2.00e-60; NT HIT: L11797.1, EVALUE 8.60e+00
tgtggattaagaacgggagcgacctgctctttcagaggctgcccagctgtggtaatttttcgcggttcttccactctctgggccagttttacttcaactgtgaaatgggggtagtcctctaaggtcccgtttccattctctgcattcctcatgacgacccagacgaagctcctactgccatccccctaacggatgaggaaggctaagttactttcctaaggccagagacagtaaatgcagcttccacgttggaaccccggtagggtggctccagtcccctgctctgaaccccccatctctacagcctaccccatcaccctaataagccctgcaagtgcagtggtgatgcgtctgctccggcgtcagaccagccccgccatgccacttgcaagctgtggcatcctgggttagtcacttgcgtccctccagcccatttccttatgtgagcaatgtacaccccaaacacttgcctcagccaagacacttgcctgaccaggaggaaagatgcgcgagtctcaaacaactgcgtgactttccgtctgcggggggcgggggtggatttttggggaaaagggac

SEQ ID NO: 5937 - DNA, 553 bp, Homo sapiens
  MAP TO AC008620.5; EXPRESSED IN BONE MARROW, SIGNAL = 0.61; EXPRESSED IN PLACENTA, SIGNAL = 0.84; EXPRESSED IN ADULT LIVER, SIGNAL = 1.3; EXPRESSED IN HELA, SIGNAL = 1.3; EXPRESSED IN FETAL LIVER, SIGNAL =   1; NT HIT: gi15809033, EVALUE 0.00e+00; SWISSPROT HIT: Q29435, EVALUE 8.00e-03; EST_HUMAN HIT: BF036269.1, EVALUE 1.00e-128
agggagaaaagaggcagctctggacaggcgtttggtaagcactgcctgacagccaacacagaatgctgggggaacagggaggggacattgctcacctggagcagccggagacccccctgctggctccgctcctgggcctctgccagcaggcggctgagctgggcggcctgttctgcaaggcgactagccgcggctcccgcacgccccagctgggcttcatgcatctctctgagacgccgttccagccctgcctgctcttcagccagaaaccgtgtcagtcgcccaaactccgaggccaccgctgccagctctgacttcatctggctctggaatggtgcaaaggggatggcagacaccacctcaacacgtacgaagataacctccagttttgcaactactacttctcaatgcaaggcaaaggagccctacactccccaggtccaagatagtcccggaaagaggctcatcccctaccagccttaccagataccacccccttgctcccagcacagtggtctcaaactcactaacctctgcctggaacactcctctc

SEQ ID NO: 5938 - DNA, 525 bp, Homo sapiens
  MAP TO AC009087.4; EXPRESSED IN BONE MARROW, SIGNAL = 1.3; EXPRESSED IN ADULT LIVER, SIGNAL = 0.95; EXPRESSED IN BRAIN, SIGNAL = 0.87; EXPRESSED IN HELA, SIGNAL = 0.94; EST_HUMAN HIT: BI830262.1, EVALUE 0.00e+00; NT HIT: M94065.1, EVALUE 1.00e-118; SWISSPROT HIT: Q02127, EVALUE 6.00e-36
aaatccccactgctcacttggggttctggttttcaaaaagatcagtcccagctgagaagtttaggggactgcagccttcgcctttgtatttaatgtatagggtgtctgggagcactaccagcatgtcagagtcttgaaatctggcccgtggaaggagccccagggaggtgaagcgaacagccagtctgtgggctgactccgggtccagcagcccctgcagagtcggcatcaggtgttcagcatagaaacgctcatctcccgtggccatcaggtaggaggcgaagagaagtcctcctccccccaggatgatcacagcatcctgggcccgcttctgcaaaaaagagcatattaggggggtcccccaggccaggctgcagcacccttcctgagcccttcacacccaggtacacagagggcataacggcaggtcacatgaaacagacgcccttagccttccgctgacactggtctctacagtcagaggctgtatctatacttctgcctacacaccttcttcaggcccta

SEQ ID NO: 5939 - DNA, 567 bp, Homo sapiens
  MAP TO AL118559.4; EXPRESSED IN LUNG, SIGNAL = 0.76; EXPRESSED IN HELA, SIGNAL = 1.8; EXPRESSED IN BONE MARROW, SIGNAL = 1.7; EXPRESSED IN PLACENTA, SIGNAL = 1.9; EXPRESSED IN ADULT LIVER, SIGNAL = 1.6; EXPRESSED IN BRAIN, SIGNAL = 2.4; EST_HUMAN HIT: AA428281.1, EVALUE 5.00e-05; NT HIT: gi13641703, EVALUE 2.00e-06; SWISSPROT HIT: O34971, EVALUE 5.40e+00
ccaggatctgtggctctctcttcccatggagagtggtggctgaggaattactgactagccaggggcatttcccaggcccccttgcatgtaggtggggcccgtgaccagctctcaccggtggaagcgacatgttcccttgcagaccctgggagcccagcagcaggtgcctttattccacctctttctctccatccattggatgcatgtccaagaccctgggcctgagaggagacaagctgcaagatggaaagagcctggatccctgaatgaccacatggaagaccaggaacacatgctgcagtgttgcataaatgaggcgtaaacctttattgtgctaagaccctgaaccaagagggcctactgcaccagctggcattatccggttcaatactacaccatcgtcctggtcacattcaactcaagattcctaaaataggaatcggaatgttccctggtaggcctggtgcccgtgccactttggtaaaatgctgccagccggcctgtttggtgacaagtaagttcaatagcatagaaaggcaccagaaggcttacagggttggtggagga

SEQ ID NO: 5940 - DNA, 579 bp, Homo sapiens
  MAP TO AC006133.1; EXPRESSED IN ADULT LIVER, SIGNAL = 1.9; EXPRESSED IN BRAIN, SIGNAL = 1.3; EXPRESSED IN FETAL LIVER, SIGNAL = 1.9; EST_HUMAN HIT: AV716973.1, EVALUE 1.00e-116; NT HIT: U68396.1, EVALUE 0.00e+00; SWISSPROT HIT: Q05315, EVALUE 3.00e-37
aaaatggcaagtgaaccgacattgaccctggtcaggtatgggaaaagagctgaggatggcagtgcaaggagaggtgatggcagagcaagcaacaacacctgttgaatgagagagggaaatgataaaagtaaagggaacccctgtgtgtgtgataaaaagcctgggacagggggagttatgggtgatgaaaagcctgggataaggggagttgtgggtgatgaaaagccggggacagagggagttatctggagttagggcatgaagagctgcctcctgctctgagatcccatggaagccgggtgcggggagctcctggggtgctcacctggtacttatctggcagcactgagatgctcagttcaaattcttggccatcctgaaagggcatattcttggattccacctgctgcttccaggccccatactcacggctgttcatgaccacacgacgaccaaagcacacttggaaatggaagacaatgtctgattcctccttcatctcagtgtggaaatccacctgcagatatggttcattcctgagggcagagcacacagtgttgagcaggtccctttcttgtg

SEQ ID NO: 5941 - DNA, 501 bp, Homo sapiens
  MAP TO AC011471.5; EXPRESSED IN ADULT LIVER, SIGNAL = 5.8; EXPRESSED IN HEART, SIGNAL = 6.6; SWISSPROT HIT: P23964, EVALUE 1.40e-01; EST_HUMAN HIT: BG573431.1, EVALUE 7.00e-78; NT HIT: gi14767583, EVALUE 6.00e-90
atggcccttctatgagggtgaggcaccttggattgtcccttatgttacagatcacgtggattgcaggagcagtgacaaaggactttaaactgacagacaagcatgagacggtggttagctacctcccactcagccatattgcagcacagatgatggacatctgggtacccataaagattggggcgctcacatactttgctcaagcagatgctctcaaggtaagattgagtaaggacctggggctccgacttcatcctcttgggcagcccaggtgagtagatggttgttaatcattcgacagattttttgggtgaagccccatgtctaacggttttatctctgccctcatcttaatgctctatttagaagcattaaaaacaagaccaggcacagtggctcaatctgtaatcccggcactctgggaggccaagacgggcagattgcttgagctcaggagttgagaccagcctgagcaagatggcgaaaccctatctctacaaa

SEQ ID NO: 5942 - DNA, 534 bp, Homo sapiens
  MAP TO AL031709.10; EXPRESSED IN FETAL LIVER, SIGNAL = 3.2; EXPRESSED IN ADULT LIVER, SIGNAL = 2.1; EXPRESSED IN HEART, SIGNAL = 1.2; SWISSPROT HIT: Q61245, EVALUE 5.10e-02; EST_HUMAN HIT: BI755009.1, EVALUE 1.00e-104; NT HIT: AB018277.1, EVALUE 1.00e-104
tcggaagaaggtggacactcagccaggggcggccggtgaagcagtgagcgaggcggtgagtgaccagctggggaggggagccggcaggaggtggggggccatcaccaggccccggacccatcgttgcctggccacacctcctccagctctgcgtggtcctcaacaatgtggagctcgtgcgcaaggctgctgggcaggccttgaagggcctggcatggccagagggggccacggggcccgagggggtgctcccccgccctctgctcagctgcacacaggccctggacgatgatctgcaacgggaggcccacacggtgacagcgcacctgacctctaaggtgggtggggcctggagaccaaggcgtggaggcagtccctggtgccccctgcccgtgctgagcactgctcctgccctcagatggtgggcgacatccgcaagtatgtacagcacatcagtctctcgcctgactccatccagaacgatgaggtgagtgccggggcgaggggccgtggaggactgtgtgtactgggggt

SEQ ID NO: 5943 - DNA, 524 bp, Homo sapiens
  MAP TO AC008971.5; EXPRESSED IN LUNG, SIGNAL =   1; EXPRESSED IN HELA, SIGNAL = 0.74; EXPRESSED IN BONE MARROW, SIGNAL = 0.77; EXPRESSED IN ADULT LIVER, SIGNAL = 0.89; EXPRESSED IN HEART, SIGNAL = 1.3; EXPRESSED IN PLACENTA, SIGNAL = 0.97; SWISSPROT HIT: Q9Y2J0, EVALUE 3.30e-01; EST_HUMAN HIT: BG677470.1, EVALUE 6.00e-20; NT HIT: U60822.1, EVALUE 6.00e-19
aacccactttctgagggaggaattcaagctagctgtagaaatttgtgtaagcaaagagaactgaatgttaatagtcaagacaatgaggaaagtgcctcaaaagcattctagagacctctgcagcagctgctccatcacagacccagagatctaggagaaaagaatggttttgtgggccaggcccagggcactactgccctgtgcaaccttgggacactgctccctgtgtcccagccactctagctccagccatggctaaaagggtcccagacatatgtcaggccactgctccagaggatgcaagctgtaagcctcagtggcttccacgtggtgttatgcctgcaggtgcacagagggcaatagctgaggactggggacctccacccagacttcagaggatgtatgaaaatgcctggatgtccaagcagaagtctgctgcaggggtagagccctcatggagatcctctggtagggcaatgcagaggggaaatgtgtggctggaaccctacacagggtccccacta

SEQ ID NO: 5944 - DNA, 570 bp, Homo sapiens
  MAP TO AJ012008.1; EXPRESSED IN BONE MARROW, SIGNAL = 3.6; EXPRESSED IN ADULT LIVER, SIGNAL = 2.1; EXPRESSED IN PLACENTA, SIGNAL = 3.6; EXPRESSED IN HEART, SIGNAL = 3.3; EXPRESSED IN BRAIN, SIGNAL = 2.6; EXPRESSED IN FETAL LIVER, SIGNAL = 4.1; NT HIT: AJ012008.1, EVALUE 0.00e+00; SWISSPROT HIT: O00299, EVALUE 2.00e-20; EST_HUMAN HIT: BG398704.1, EVALUE 0.00e+00
atggtactgtggctcaagggagtcaccttcaatgttaccaccgttgacaccaaaaggtaggcctgcttatgttccttgaaacacccctggtgtacacatgtgtgcaaacacacacccacccgagtccttctgtcatgaacatttttgccctccccctggagtccctttcttatcccacgtcctccattccccctttctggttcttcctgacccccatttccagtcctgattcctgatcctttctccaggcggaccgagacagtgcagaagctgtgcccaggggggcagctcccattcctgctgtatggcactgaagtgcacacagacaccaacaagattgaggaatttctggaggcagtgctgtgccctcccaggtataggggcactcagaaagtggagaggtggagcagggagattctgggaaacagacagtttgcagaaatggaaaacagagatggtggtggggctggggcaggagagctagctgaggttcctcccaggaagacatcttacctcatttttcccattggctttcaggtaccccaagctggcagctctgaaccctgagtc

SEQ ID NO: 5945 - DNA, 576 bp, Homo sapiens
  MAP TO AC007570.23; EXPRESSED IN ADULT LIVER, SIGNAL = 1.6; EXPRESSED IN FETAL LIVER, SIGNAL = 1.1; EXPRESSED IN PLACENTA, SIGNAL = 1.9; EST_HUMAN HIT: BG696450.1, EVALUE 0.00e+00; NT HIT: gi14767828, EVALUE 0.00e+00; SWISSPROT HIT: P07313, EVALUE 9.50e+00
ttcctatgtgggctttttgggtgacactcccttaagggttcagtttgacaattctgagagttgtcctgcagttggaggccaccagaggtatctgagctccctgcttcctatttcataatcctccagccccagcaggtccactcctggttcctgtgtgtttggcccgggcacaatccccactgctttgctagacgtgctttctgccatgtggctttgggcctagagcttgttgataattgcagcttgtggcagtggaaatatggctgaatgagcgtctaaatcgttgagaccagtgcaactttgggtgcaaggctttgtttagggatcaagccttttgccaccttgggctggtctttggcctggtgctcactgggaccccatatgtctgcgtaggagcagaactttccatggcagtaagtgtccagctctgtttctggttctttccccaactccagccccgtccagttgttctcctgattgacccgactccactccaggaaggccatctgaccctgtgacaggcatagctcataaactacccctccctgggatcccgctcctcttcagcctccttcc

SEQ ID NO: 5946 - DNA, 542 bp, Homo sapiens
  MAP TO AC010609.5; EXPRESSED IN ADULT LIVER, SIGNAL =   1; EXPRESSED IN HEART, SIGNAL = 1.2; EXPRESSED IN FETAL LIVER, SIGNAL = 0.76; EXPRESSED IN PLACENTA, SIGNAL = 0.94; EST_HUMAN HIT: BF980230.1, EVALUE 0.00e+00; NT HIT: AF415236.1, EVALUE 2.00e+00; SWISSPROT HIT: P38705, EVALUE 3.00e+00
tccaccaaaaaggagtcgagaacaactcaggaactggggaagaaccaatctgcatctagcacaggagctttacaaaagaaagccagtaagatcagctcttttttaaggagcctcagggccactcctggttcaaaaacaagggtcacatcacatgacagagaggtagatatcgtggctaagatggtggagaagcaaaacatagaggccaaagtggagaaagcccagggtggccaggagctggagatgatcagtggcactatgacatccgagaagacggagatgatcgtctttgaaaccaaatccatttaaagaggagccagggctacaaccgcccagggatctggaagtatccctagaggagcccatcccagctttctttactgcagttcaaataataaaggaaatcgtacaactccaaaagaaatacaatctcctgcttgaatttttctgcccatagcctggtggtgacctcacagtggcttctgtgatggtggctatgctacagctggagaccccagcctccaggcaagtagagctccacc

SEQ ID NO: 5947 - DNA, 537 bp, Homo sapiens
  MAP TO AC016630.5; EXPRESSED IN ADULT LIVER, SIGNAL = 4.5; EXPRESSED IN HEART, SIGNAL = 4.7; EXPRESSED IN FETAL LIVER, SIGNAL =   9; EXPRESSED IN BRAIN, SIGNAL = 5.6; EXPRESSED IN BONE MARROW, SIGNAL = 4.3; SWISSPROT HIT: Q13263, EVALUE 4.00e-28; EST_HUMAN HIT: BF796499.1, EVALUE 1.00e-58; NT HIT: U78773.1, EVALUE 7.00e-59
gtcactctccagagcccaagaggcaaagcgcagaatgtgctcctggtgcttctggatcttggtcatggtccagtgctgccgctccaggcgctcctgctgcccctcagtcaccttctgcagatagaaggtgtatgaggtaagcagagaaggcagaagaatactaggatcactcctcaccccagacagcatcatcaatcagcagagggggctcagggacccttctcaccggcacaaggcttacctgggcatcattgaccagcacacggccccgcttattcagctccttcatgatctgcaggatggccatcttgacatccacttgcacacgcttctgtacgtcagacacctggcggattctaggggacacagcaggtcaggctaggtagggtcttgctgccctgggccacccccacagccccagaacccacacttacgagctgcgaacctccttggtgctcttctgcaatgttgcatgtttgtccccaaggcgcttcaccagtgaggccaggagcttgcgctggttcctcactgcatcct

SEQ ID NO: 5948 - DNA, 581 bp, Homo sapiens
  MAP TO AL023494.12; EXPRESSED IN BONE MARROW, SIGNAL = 3.1; EXPRESSED IN ADULT LIVER, SIGNAL = 3.4; EXPRESSED IN FETAL LIVER, SIGNAL = 4.8; SWISSPROT HIT: Q92080, EVALUE 4.30e+00; EST_HUMAN HIT: AW179178.1, EVALUE 1.00e-52; NT HIT: AB026898.1, EVALUE 4.00e-82
gggcttgcaacttagctcacacccgaccaatcagagagctcactaaaatgctaattaggcaaaaacaggggtaaagaaatagccaatcatctattgcctgagagcacagcaggagggacaaggatccggatataaacccaggcattcgagccggcaacggcaaccccctttgggtcccctccccttatatgggaactctgttttcactttatttcactctattggatcttgcaactgcactcttctggtccatgtttgttgcaactcgagctgagctttccatccaccactgctgttttgcctccgtcgctgacttccatccctctggatccagcagggtgtcctctgtgctcctgatacagcagggcgcccattgccgctcccgatcgggctaaaggcttttcattgttcctgcacagctaagtgcctgggttcgtcctaatcgagctgaacactagtcactgggttccacggttctcttccatgacccacaacttctaatagagctataacactcaccgcatggcccaagattccattccttggaatccctgaggccaagaaccccaggtcagaaaaca

SEQ ID NO: 5949 - DNA, 545 bp, Homo sapiens
  MAP TO AC008795.5; EXPRESSED IN BONE MARROW, SIGNAL = 0.69; EXPRESSED IN PLACENTA, SIGNAL = 0.97; EXPRESSED IN ADULT LIVER, SIGNAL = 0.81; EXPRESSED IN HEART, SIGNAL = 0.97; EXPRESSED IN LUNG, SIGNAL = 0.86; EXPRESSED IN BRAIN, SIGNAL = 0.8; SWISSPROT HIT: Q05486, EVALUE 3.00e+00; EST_HUMAN HIT: AW176580.1, EVALUE 7.60e-01; NT HIT: gi13277373, EVALUE 1.30e-01
tcatcccaaattcccaaaagacaaaatgaagttctgtgcggatagccagtgaatcttagctttgctaatggctgccttgggagtctggttccttaatagctaaatttggagtctgttttatgtggaaattttccttaactcttcactttgttctgcccatggaaagggctcatttcaaaggccaggaaatggctcagaagttgtacaaaggcaccagcagcctgagctttccctgggcagcgcagtgggacagctgaggaggggccggtttgtcctaatttccctgcttgtaggacttgctctttctcccccaagactgcatcctccagggttaggaaaggtaagtgctccaggagccgagagcctgtgtcagatccccagccattcagagcaggtcccctccctgtggggtcagacattgggctgacttgcatcctttctgtgcgtcccctgtcttcccagtctgtgagtacaaacgtctccctctgacttagtcatgtcacacctgacagcatgtctgcattacctggaaggctttcaaatga

SEQ ID NO: 5950 - DNA, 518 bp, Homo sapiens
  MAP TO AC018555.4; EXPRESSED IN ADULT LIVER, SIGNAL = 0.84; SWISSPROT HIT: O08796, EVALUE 1.60e+00; EST_HUMAN HIT: AA077675.1, EVALUE 4.00e-18; NT HIT: AL163218.2, EVALUE 2.00e-12
taggaagcatgactgggagggctcaggaaacttaccatcatggcagaaggcgaaggagaagcaactaccttcttcacaatggtgtcaggagagagagcgagagcaagagcaagagtgcgagtgaaagcgcacgcgtgtgagagagagacagacagacagaaggggggagtgccacacacttttaaactatcagatctcatgggaacccactcattttcatgagaacagcatgggggaagttcaccccgtgatccaaccacctcccaccaggtttctcctccaatttgacctgagagtttggaaggaataccaatacaaaccatatcactcacatgtctccttctgccattattgattcttccttcctgaggctccaagacacgctcttttattatttgaaaaaaaattattttatccattttttaagggtaggtctgctagcaacaaatacttttttgttttctgcatttgagaatttatttttccctcattatttttgatgacggttctgctggtta

SEQ ID NO: 5951 - DNA, 568 bp, Homo sapiens
  MAP TO AC008149.14; EXPRESSED IN BRAIN, SIGNAL = 2.2; EXPRESSED IN BONE MARROW, SIGNAL = 1.4; EXPRESSED IN ADULT LIVER, SIGNAL = 2.4; EXPRESSED IN PLACENTA, SIGNAL = 2.7; EXPRESSED IN HEART, SIGNAL = 2.9; EXPRESSED IN FETAL LIVER, SIGNAL = 2.3; NT HIT: gi11435887, EVALUE 1.00e-114; SWISSPROT HIT: P41970, EVALUE 6.00e-27; EST_HUMAN HIT: BI767724.1, EVALUE 1.00e-114
ggtggggaaaatccctacagcacagcttttctccaaaaagaaggtatgcactgcccctattttattttctaacttgattcatagcacgctattattttctttcatcagtgaactacgcagaggggattccaccctccccaagacggccccatgcaaggtcaagggtttaccttgtcataatagtatcgcagggctctgctcagcttatcatagttcatatttgttttgttttttcggagtccccacagcttggccacttcttctgctttgaggagcttgaattcaccatcgttcgaggtccagcagatcaaatgctcatgtttctgatccagcagcaactgcaacaggaactgccacagcgtgattgcactctccatacctgcagggagaggaggccaggtcagagctgctggtcacgatgccgaccaaacttggcgaggagagagggggcttcagaatgggcaactcagctgtcccctccttcccccagtgaacctaataaaaagtagctttcacttccatctcaaggggccactctgaaccaggagcttcctggctgcatttctgt

SEQ ID NO: 5952 - DNA, 546 bp, Homo sapiens
  MAP TO AC010617.5; EXPRESSED IN ADULT LIVER, SIGNAL = 1.3; EXPRESSED IN HEART, SIGNAL = 1.2; NT HIT: AB049453.1, EVALUE 8.00e-03; SWISSPROT HIT: Q05319, EVALUE 2.00e-13; EST_HUMAN HIT: AI698086.1, EVALUE 1.00e-109
catcctgagggtgtgtgttggtttcctagggtgactcaggaggacccctggtctgcgaggagccctctggccggttctttctggctggcatcgtgagctggggaatcgggtgtgcggaagcccggcgtccaggggtctatgcccgagtcaccaggctacgtgactggatcctggaggccaccaccaaagccagcatgcctctggcccccaccatggctcctgcccctgccgcccccagcacagcctggcccaccagtcctgagagccctgtggtcagcacccccaccaaatcgatgcaggccctcagtaccgtgcctcttgactgggtcaccgttcctaagctacaaggtattttcggggcagaaaggtagaagatgatgtacgtgcctatcttgatttagggagaacggatatcgtcatagtatcttcataattttggatcttcctgttcaaggaaaggtcacatgtgtatccgtttattcccatcttacgttgcgtgtaccctcatggtatctttctgtccacaggtcttgcccatgtcttgtt

SEQ ID NO: 5953 - DNA, 596 bp, Homo sapiens
  MAP TO AL031007.1; EXPRESSED IN ADULT LIVER, SIGNAL =   1; EXPRESSED IN FETAL LIVER, SIGNAL = 1.4; EXPRESSED IN LUNG, SIGNAL =   1; EXPRESSED IN PLACENTA, SIGNAL = 0.82; EST_HUMAN HIT: AW748040.1, EVALUE 5.40e-02; NT HIT: U91328.1, EVALUE 2.20e+00; SWISSPROT HIT: Q9YFI5, EVALUE 4.40e+00
acactggcttccttgactggtgtcttcagatactgctctatttcttctctcccttccccctacctgtatcagaagagccactcgtcccatcccagaggtcaaccttgctttgggaattaaacattcgtaacaaccaagtctgctcttcctctgaaaataccttttgaatactcaaggactgttactgtcagataagagtgactttacctctccataagcatagaagtcctttaaatgtatgtttatttccttattttcagcaacaacaaaataccctttaagaacacctcaaaggctgaggaaaactctagaaggaaaccacaaggggtagataccagtggaaaggaaaacaaggaagcatgttcctggtacttatcacaacaggcatctggaagtcagaagccagctgaacactaagaattttctcagaagaggtggggtagagatcacatggacatggggctctgttaccaattgctctttacagctattcctttccctgcttctcactatctattgtaggaacactggttccatactaattaggttcaaatccagcttcgccacacaatacctcctatgagatttggggcaga

SEQ ID NO: 5954 - DNA, 576 bp, Homo sapiens
  MAP TO AC002481.1; EXPRESSED IN ADULT LIVER, SIGNAL = 0.9; EXPRESSED IN HEART, SIGNAL = 1.4; EXPRESSED IN FETAL LIVER, SIGNAL = 0.95; EXPRESSED IN BRAIN, SIGNAL = 1.1; EXPRESSED IN BONE MARROW, SIGNAL = 0.48; EST_HUMAN HIT: BG703106.1, EVALUE 0.00e+00; NT HIT: AF040708.1, EVALUE 8.00e-68; SWISSPROT HIT: P39923, EVALUE 2.80e-01
agatctgatgcggtggtttcctccaaagaaagcgggatactccgggccctgccgcgcgcaccgccgctccgtcacggagccgctttacttccgggtgcgacgtctacccacccaggacttcctgggacgagccgtcccccgccccagccacgcctctgagtcgcgctgcgcaggcgccattgggcagagggattggcaagcttgcgtgccccagcgacacaggcctcgaggctgtctctgacaagtgttcacaggaggtggggacgcctctgcgcgaggaacgaggagctacgggcctgggcccggttattgccatgggcagcggctgccgcatcgaatgcatattcttcagcgagttccaccccacgctgggacccaagatcacctatcaggtgccacccgggctcgcgggactgggcgggaagagggacgttctcgagagctcaactggctgcctgaaggcagtagtttcccgtgctgcacgcaggcatgctgcttcattcgcagacaactgtgaggctagaggatagtcagacccaggcccccggctcccaatgtggcagggaagacatacgt

SEQ ID NO: 5955 - DNA, 543 bp, Homo sapiens
  MAP TO AC007136.1; EXPRESSED IN BONE MARROW, SIGNAL = 2.4; EXPRESSED IN PLACENTA, SIGNAL = 0.81; EXPRESSED IN HEART, SIGNAL = 1.6; EXPRESSED IN ADULT LIVER, SIGNAL = 1.4; EXPRESSED IN FETAL LIVER, SIGNAL = 0.86; EST_HUMAN HIT: BI195494.1, EVALUE 2.00e-04; SWISSPROT HIT: O42502, EVALUE 1.00e+00
ctgttgatgacacgctgaggtcaggaccagggccacagcctgtgtctgacaagaagcagtttccagttatttggtgaatcagtgctgggggcctggcctgaggggtccagggagtcacacctgactccatgtccctctttcccacaaagtaggagagcgccatgggtcacctgcccgaaaaggcaggtccatcctctgcctgcagtcagaactcagggggatccctgaggccggcagcagagccacgaggacgcagtggcctggcggcgggtggggcagcgcgggagctgctttccaggccagacagacggagccgttctcctgccggccttcccgggagcaggatcccatccagtgatgcgtaggcctgtggcggggacaaggagggcgggcagctgcttttgtttcccatctgcttctctggcttggaaagaagggcagacagctccagaaatatcgaggaacgtgggccacgcctccggggcggccaccaggcggtggcaccagaaggtcagcagagacagagcataaacagcagccaca

SEQ ID NO: 5956 - DNA, 572 bp, Homo sapiens
  MAP TO AC004176.1; EXPRESSED IN ADULT LIVER, SIGNAL = 0.61; EXPRESSED IN BRAIN, SIGNAL = 0.62; EXPRESSED IN FETAL LIVER, SIGNAL = 0.44; EXPRESSED IN HELA, SIGNAL = 0.74; SWISSPROT HIT: Q9KCB7, EVALUE 5.50e+00; EST_HUMAN HIT: AA152177.1, EVALUE 1.00e-48; NT HIT: AF055066.1, EVALUE 0.00e+00
tgtaattctgcggccaagacagtgactttgaactcttacaggctgatgcaaaaataattgcagtttttgccattacaataattcttaccaagaactattcacattggaccaaagccaattgtaatgatccatgtgatggagagagccagaatgctatgaaagtggccttgaccagaaataggtcatttgatccttggctcattgacatctccatagattttcggtgtacaatgttcggtctgatgtgcaaggtaattccatcttgcaaaggattcgatgttacattctaccacacacacacctgaattaaacttttacagaattggaaatgcacattactgatcaaaataaattaaacaggaaaaaattatataggaataaccagtgatagaatagcaaataggaatggaaaacacaataggattgcttaaaaaatactgtagaagtacagaatagcagtgctatttagaatcatagtgatgtccaaatcatgtctaccacgtctcattaaaaaccagagcgaaagatgtcaagtttattatggaatgcccacccagtagccagtttttgga

SEQ ID NO: 5957 - DNA, 527 bp, Homo sapiens
  MAP TO AC010642.4; EXPRESSED IN BRAIN, SIGNAL = 0.68; EXPRESSED IN LUNG, SIGNAL = 0.61; EXPRESSED IN HELA, SIGNAL = 0.74; EXPRESSED IN FETAL LIVER, SIGNAL = 0.53; EXPRESSED IN PLACENTA, SIGNAL = 0.6; EXPRESSED IN ADULT LIVER, SIGNAL = 0.74; SWISSPROT HIT: P10073, EVALUE 2.00e-62; EST_HUMAN HIT: BF431722.1, EVALUE 3.00e-03; NT HIT: U09413.1, EVALUE 1.30e-01
tacaaggtgtgtgctctcgctgaaggtgcgtccacactcaccacacacgtatggcttctcacctgtgtgcacacgctggtgcttggcaagggatgagctctctcggaagcacttgccacagtggccacacatgtagggcttctcgcctgtgtggacgtgccagtgcttgactagagatgaattgttgctgaaggtacacccacattcctggcatgcatacagcttctcactggtgtgctgaacaaggtgacttctctgtccaaaggccttgccacactcttcgcacgtacagggtctccttttgttgggaatctgctgatagctcacaaggcacgtgttcttgccaaaggtatcttcccacccactacatggcagtacaccctccccagcgtggactccttgtggctgattaaggtctgggaaacagctgcaggcctccccacatacaccctctccttggcaggagcacccccgatctaggacggaaacacacgtgagatcgttttccagaatgtggttaggggtgg

SEQ ID NO: 5958 - DNA, 577 bp, Homo sapiens
  MAP TO AC012049.7; EXPRESSED IN HELA, SIGNAL = 1.6; EXPRESSED IN BONE MARROW, SIGNAL = 1.7; EXPRESSED IN ADULT LIVER, SIGNAL = 1.5; EXPRESSED IN HEART, SIGNAL = 2.7; SWISSPROT HIT: Q15404, EVALUE 1.00e-50; EST_HUMAN HIT: BI835294.1, EVALUE 2.00e-94; NT HIT: gi14742541, EVALUE 1.00e-94
cagtttccctaggctgcaagatcaggttgttatccctaaagctgggtatctgcaactttgtgagcttcctaatatctggttgcaggattttaaaatcattgtcacttacataagagtgcacggaaggtagtaaggtagatgaagtttccaggaagagaattctcattcaaattgtacatcaagtccagaaggtcaagagctgggtagaaagcaaaatccttcaggcaaagtatttagcccattcatgcccaggttcatgtgtttgagtttctgaaggctgccgatctgtgtgggcagctcctcaatctggctattaaggaagttgagcacttccaaattcttcagttctgctgtgtttggtggcaccactgtgagcttgttatggctgaggaccagttgtatggtatgggataaggaaaatgtgccattgacatacagcatgttgtagatgacctagtcaccctgtccacttcctggctctccacaaactttttcagagtcttggacatggtcgtgaagagcagcacctaacagcgtgggcatggaatgacagattgcggcaggatgcacttttatt

SEQ ID NO: 5959 - DNA, 507 bp, Homo sapiens
  MAP TO AL117382.28; EXPRESSED IN BRAIN, SIGNAL = 1.3; EXPRESSED IN PLACENTA, SIGNAL = 1.4; EXPRESSED IN HEART, SIGNAL = 1.6; EXPRESSED IN ADULT LIVER, SIGNAL = 1.3; SWISSPROT HIT: Q62203, EVALUE 2.00e-03; EST_HUMAN HIT: AV707726.1, EVALUE 5.00e-05; NT HIT: AF242195.1, EVALUE 4.80e-01
tctgattgcacaaggcagacctgtgactcctccatccagctatgcccctgctgcccagcaccgtgggcctggcaggcctgctcttctgggctggccaggcagtgaacgccttgataatgcctaatgctaccccagccccggcccagcccgagagcacggctatgcggctcctgagtggcctggaggtgcccaggtaccgccggaagcgccacatctctgtgagagacatgaatgccttactggattatcacaaccacatccgggccagtgtgtacccacctgccgccaacatggaatacatggtgagtccccgtacctgccccccaccccccgcagtgtcccttccggcaaacgcagccggactcatcttggcctagaatgactggctttgaagagctggaccacttgcctgcctggccccactagccagtatctgggtgtcgacctgtggaaagggcaggagttaatctgcccattttacagatgaggaaaccaagaaggttgcac

SEQ ID NO: 5960 - DNA, 524 bp, Homo sapiens
  MAP TO AL080273.10; EXPRESSED IN PLACENTA, SIGNAL = 1.2; EXPRESSED IN ADULT LIVER, SIGNAL =   1; EXPRESSED IN BRAIN, SIGNAL = 2.1; EXPRESSED IN FETAL LIVER, SIGNAL = 1.5; NT HIT: U47285.1, EVALUE 3.20e-02; SWISSPROT HIT: P17426, EVALUE 2.80e+00; EST_HUMAN HIT: AI218377.1, EVALUE 8.00e-04
agagcaaaggagtggtcctgtgtgtggccactcatccccctggaagtaagtgggggtgtcctgcccactccctgctcctccccatgcatctccctggatacctttggaatcctgagatcacccccaccccacccctatttaaactcaatggggcaaaataactccaagtgttgtctgtgaatggcggcagcaggagcagcggcggcagcagcagcatcagcgacagcagcagcacaggcagcagcagcacctgggagctagttagaaatgcagacgcttggatcccatcccaggcctacccagtcagagtctacattttaacaaggtccccaggtgtctcatgtgcacattcaaatttaagaagctggactagagaatgaaaaaaggaaagggttgggctaagaaaagggtaacctaactctagaaaggaagtaatttagtttttcagtgatttatgcacttatttttggttatctatctgaagttcagactctaccaaagatccttgaaaaacccctttgcag

SEQ ID NO: 5961 - DNA, 546 bp, Homo sapiens
  MAP TO AC007181.1; EXPRESSED IN PLACENTA, SIGNAL = 2.6; EXPRESSED IN HEART, SIGNAL = 3.6; EXPRESSED IN ADULT LIVER, SIGNAL =   3; EXPRESSED IN LUNG, SIGNAL =   4; EXPRESSED IN BONE MARROW, SIGNAL = 3.1; EXPRESSED IN BRAIN, SIGNAL = 2.7; NT HIT: gi15317437, EVALUE 4.00e-82; SWISSPROT HIT: Q9Y4W6, EVALUE 3.00e-09; EST_HUMAN HIT: AI693214.1, EVALUE 5.00e-82
tctcatctatggcctgagggtgggactgcccaggacatctaccacacaacgggttttcaacccaggcctcagagctcacagcttcttaagggcatcgcagaccacgtgcaccactacagcggcctccttcccaggtaggtaaactataaattcctctcaccagacctctggccaggtaatactgtacaaagtgcttccacgtgatttctcttccaggatctcgaaaatagaggtagaaaaatcccatggcaacgcctgcccccaaaagggccagactgcggaaatcctcgtcatcccaggggaagtcccccctgtggaaaaaagaaaacacattttccagttaaatgaaggtagtttctttatgaaaatagctatttcctttttcagatgttattaggaaagttttgcaacccccccccaccgaccgtacacaatgtagcctcagttcctctcatgaggaaagatctttacgtggtgtatgacacacactgaaagccgcagctcagcagatgcctcaggagaagcagaaagtccacagagagcgct

SEQ ID NO: 5962 - DNA, 572 bp, Homo sapiens
  MAP TO AC002050.5; EXPRESSED IN PLACENTA, SIGNAL = 0.77; EXPRESSED IN ADULT LIVER, SIGNAL = 0.51; EST_HUMAN HIT: BE388677.1, EVALUE 3.00e-03; NT HIT: D38544.1, EVALUE 1.40e-01; SWISSPROT HIT: Q28555, EVALUE 1.60e-01
aagatggacaaggttggctggcaagaaataaagaatgaagaatttcagtagtgataaggatcctgaagaaaataaatcatgcaagcgagtaacaggaatggcagtaggtaccattggcagagtagtcagagatgctgggtctgaggaaatgacattcaagccaaggcccaaatcagggaaagacgcagccacatggagatctggaggcagaacattctggacagagggtacaccaggcagaggtgcaaaagccctgatctggaacaagcttgccagagaagaggacgagaaagaaaggtcaggatggctggcatataggtattataagacaaggctgccgagataggtggcttcatttctatcacatcataactcaccatcagcgctacagtcatccacatccaccattggctttagtcagaaagccattcatattctccccacgacagacggcagagagatttggagaccaagactgtgcctttgtgtcccagtgtccagcttcatggatgtttacctgcctgagttcctactgaggaaggaggcacttcagacccaacaccaagtgcttt

SEQ ID NO: 5963 - DNA, 504 bp, Homo sapiens
  MAP TO AC009494.2; EXPRESSED IN LUNG, SIGNAL = 3.3; EXPRESSED IN BRAIN, SIGNAL = 1.8; EXPRESSED IN BONE MARROW, SIGNAL = 1.5; EXPRESSED IN ADULT LIVER, SIGNAL = 1.9; EXPRESSED IN HEART, SIGNAL = 1.8; EST_HUMAN HIT: T78159.1, EVALUE 6.00e-26; NT HIT: gi5032158, EVALUE 4.00e-26; SWISSPROT HIT: Q9QXE7, EVALUE 9.00e-10
ttaaggaacatgcactccccttcttatcccagtttggatggacccagaaatgggtgactctatgagccacttctctatgggtctcatattgtgcagaagccatagttcaagtccttttctctgtggggtgaagagtaacacaaggcagttaaaattaccaaatgcaaagatggcaaggacagaaacaggcatccaacggtatgaaaaaaggcagaagagcacatgcggacaatgtcacctggccagagagcaagctgtggtgagcttttcatcccatttcaaccaaacgccagagcctcctgtgtttttattctgcagatctgaagactcaactgcaaagatatggaacctgaatgagaatggcaacagggcctccacccagcttatgttaaggcaccgtataccagaaggggccatgacatcccaagtaacaaagatgtcagatgtcatttcactggactggaacgtaagcatcttccaccccctgggcactttgaaattggt

SEQ ID NO: 5964 - DNA, 581 bp, Homo sapiens
  MAP TO AC010510.6; EXPRESSED IN PLACENTA, SIGNAL = 1.2; EXPRESSED IN ADULT LIVER, SIGNAL = 1.2; EST_HUMAN HIT: BI859745.1, EVALUE 2.10e-01; NT HIT: AF021234.1, EVALUE 2.20e+00; SWISSPROT HIT: P40136, EVALUE 4.30e+00
ttctctctccgtgtgtgtgcatgtgtgtgtgtgtgtgcatgcatttgccctctggagtgttcatggtactgaagagattctcttgaccatcaggcctctgtggcaaaagttgtgtgctctgttccaggcctaactgcagacagggagctcatgggcagctgcccagccaagctatggtcaggaccttgggtggcaagaggggctgcaagtgtggggtaaggggaccacagggacagggatggggtcattgcactgtgagctagtccggcaagtgactttttgctcactccactctcccctctctttgttcctaccttctctcctgctctgctccaacagctttgggatgtaggatgaataagggttccactgccctgtttttcctgacacttgagtccctggcccttgcactcagctcctccaatctgcacctgactgaggcggaggagggtgatttcagacacacacacacacacacacacacacacacattcccctcatgcgtgcagccagtggagtgtgcctgggtcccagcgcagccccaggcctgggtcactccgagcctaaagtcctggaaaggg

SEQ ID NO: 5965 - DNA, 505 bp, Homo sapiens
  MAP TO AC002985.1; EXPRESSED IN HEART, SIGNAL = 5.6; EXPRESSED IN HELA, SIGNAL = 4.3; EXPRESSED IN ADULT LIVER, SIGNAL =   5; SWISSPROT HIT: Q09903, EVALUE 1.00e-07; EST_HUMAN HIT: BI871604.1, EVALUE 1.00e-102; NT HIT: gi14766934, EVALUE 0.00e+00
aggaacagtgacaaggaccgttcaaggaccaacaagagggggcccagtcctagcaatgttattcgggggtagggccttgctgagacttgggtgaggggcaggcctcccttggaaggagggtactccagggcctagggtccatgtccatgcctctcaaagaggcctgcttcaggggtggccaagacccggggccatggacggcaccctcacccctgcccccattggcacggcaggtgatggatgaggcagaccggctgctggaacagggctgcactgacttcaccgtggacctggaggccatcctggcggctgtgccggcccgcaggcagacactgctgttcagcgccacgctgaccgacacactccgggagctgcagggtctggccaccaaccagcccttcttctgggaagcacaggccccgtgagtccacagcccagacagcgtggggagggcagccccatcctacagacagggacactgaggcgtggcggtctatctgtccat

SEQ ID NO: 5966 - DNA, 509 bp, Homo sapiens
  MAP TO AC013455.4; EXPRESSED IN BRAIN, SIGNAL = 1.4; EXPRESSED IN LUNG, SIGNAL = 0.83; EXPRESSED IN BONE MARROW, SIGNAL = 1.3; EXPRESSED IN ADULT LIVER, SIGNAL = 1.3; EXPRESSED IN PLACENTA, SIGNAL = 1.2; SWISSPROT HIT: O33180, EVALUE 9.40e-01; EST_HUMAN HIT: BF761392.1, EVALUE 4.60e-02
ggaggatgtggtggaatcaccccgaggatgtctgctttaaatgcaagtcaggaagcacaacagaaagataccttgtgctttaagaaaactgaaatgccctggcagatgctagaaccgtggccacagtcacacttgggttccctttgggaaaaagctcaaaaggttttgcttttccttcaagacagaaagacaagggaggagagaggggttctgtttcctccaatttggtgaccaacttcctcacctcttacatcgtcttcacccacatccttgtgatcattcacaatgactatggtttgagtgattaatttgccaagtcctgagctaaacctaaggtagcattctcatttcacagataaggttagaaaactgatttcccaagactatcctgacacatgcaggtacacacaatactttgggtcgtgcattttaagaataattttcttcctgaggatgctaatttcacaaaatagtgtcaacaaaagattgaaaatattaggccaggcacg

SEQ ID NO: 5967 - DNA, 572 bp, Homo sapiens
  MAP TO AC008886.4; EXPRESSED IN ADULT LIVER, SIGNAL = 1.3; EXPRESSED IN PLACENTA, SIGNAL = 0.81; EXPRESSED IN HEART, SIGNAL = 1.5; EXPRESSED IN BRAIN, SIGNAL = 0.98; EXPRESSED IN BONE MARROW, SIGNAL = 1.2; SWISSPROT HIT: P05680, EVALUE 4.80e-01; EST_HUMAN HIT: BF346695.1, EVALUE 8.00e-01; NT HIT: gi11497621, EVALUE 5.50e-01
aacaacagccaaaacccaaggtgtctgttaagggaagcaggcttagtgggaagtgcccaggaaaatctccttggagggtttgttcctcagggaagagagtaagagaggagagagagcccttggctcgcatagctaattgcaagcaggaggaagcggaaaaagaacatgattagcatgtttctctccttccctctataaagatgacagaagcaggcaatctgctgtttgtgcagaaggggcatagggaaggagagaagagagcatctgttctgagaaactgctgtttaaaaatgcaagaagaacacaaagcaaaggaggaaatctccattgtacaggccactggctctgaaaaccatgagaactggagaggtacctgccgagaaagcctcaggttgccctgactctggatctggcacctgggctcagaagccctgttgggggccttcttctctgcccttcagagctgaggctttcagttgtggtccctggctgtgacctccaactaaggaacagccttcctaaggacagacatgccacccacgtctgcagtcagccatcctcacccttactga

SEQ ID NO: 5968 - DNA, 547 bp, Homo sapiens
  MAP TO AC004185.1; EXPRESSED IN ADULT LIVER, SIGNAL = 0.57; SWISSPROT HIT: Q9D952, EVALUE 7.80e-01; NT HIT: L05532.1, EVALUE 1.30e-01
aggagccctgacacacaaagcagaaagaaagaaactttaggacaatttttatcagtcttacgggttagagagaaaaagaaagcaaatgaaagtctgtgaatacagatggatcaaaaaggacaataaattttcatggaaggacagaattcaaaaggggtgaaatgcaaagaagtgcaaacataacaagatgattgttagtagtaagaaaaatgaagatctccagacattgcaaatgaggattcccagacagtgcacagcctggacggaagccctgccagcttcacaaacctcctgtcaaggagggccacagtgaactagatctacttggtgtgaactttgaagtcctcacctctgcttgtcacctatcaggctatcaggatgaactgataaatcagctgaagggagcaaagtcacagtgcgtgagaattgttttggagatttgtaagtggaagaatgagaggaaagggagagactcagtgatggaaaagaaaaccttaagccttaaagtggtgaggattgtatcaatagttttactctttggcaattg

SEQ ID NO: 5969 - DNA, 548 bp, Homo sapiens
  MAP TO AC010515.5; EXPRESSED IN BRAIN, SIGNAL =   2; EXPRESSED IN LUNG, SIGNAL = 2.4; EXPRESSED IN PLACENTA, SIGNAL = 1.4; EXPRESSED IN ADULT LIVER, SIGNAL = 2.3; SWISSPROT HIT: P10587, EVALUE 2.00e-07; EST_HUMAN HIT: AW081820.1, EVALUE 1.00e-112; NT HIT: D10667.1, EVALUE 9.00e-06
aattcatggcccaaagacacacggtttgtagaagcaaaggtggatggtgtagacagaggggtctggagggtggcctggtgggcatgcaaggggccagacctgtatgtgctgctgcagcctcttcttctcggtttgcatttgacggctgcactcctcctcctcgcccacgcgagcctccagctctgacaccaccagctccagctcctgcttgcgggctgccagcctcccccgcgtctcctcggcctctgcacacagttctgcctctgctcgcaattgctctgccaggcgggcgcgctcctcttccagctggggagtgtgtgggaggttagtggtcagcaggcagtgctcccagggcaacctgcactgggtgcctactgccttgtaacttgctttggcctttaagttctccagtgacaggactgaggggcaggaggacacggtgtccccacctcctccccctcaggtccccatctcaggatgagcccacatccccctaatcactaagtcagaatcctggggatgccctccctcacctctcacagccatca

SEQ ID NO: 5970 - DNA, 531 bp, Homo sapiens
  MAP TO AC013602.2; EXPRESSED IN BRAIN, SIGNAL = 0.6; EXPRESSED IN LUNG, SIGNAL = 0.55; EXPRESSED IN PLACENTA, SIGNAL = 0.53; EXPRESSED IN ADULT LIVER, SIGNAL = 0.77; NT HIT: gi14743943, EVALUE 8.00e-03; SWISSPROT HIT: P25802, EVALUE 3.80e+00; EST_HUMAN HIT: BF743645.1, EVALUE 3.00e-34
gccttgctcttccatcagactctaccagggttgctttgagtgtgctgttgggtttgcacttgagagttgctcaccaaacaccttctgttgaatccttaagcatagatagaaggcccactgtgtgctgagggctggggacaggatgagggaacaccacttccctgagctgcgggctggtgggtccagctggaaggaggtgttaggcatagctggcaaaatgactggcttgtagagtacagatggtacgttccccatccttactggtgtccatggcccagggggactgtgtgccagggatgtagcataggatattccaggaaagcaagaggatgagattcaacattgactcgaggtccctgctcatctggatagtatatgattcagtgaaggggctgcagaacaggagatctggggaagatgaagaggaagaagaagatgttgatgatggcagctaatgttttttgagggcttattgtgtgctatctgtggttctaagcatgtcacataccctgcactgaaaacagctccaca

SEQ ID NO: 5971 - DNA, 531 bp, Homo sapiens
  MAP TO AC027663.12; EXPRESSED IN ADULT LIVER, SIGNAL = 1.7; EXPRESSED IN HEART, SIGNAL = 1.9; EXPRESSED IN BRAIN, SIGNAL = 2.2; EXPRESSED IN LUNG, SIGNAL = 1.5; NT HIT: AF083064.1, EVALUE 5.00e-01; SWISSPROT HIT: Q00191, EVALUE 4.90e+00; EST_HUMAN HIT: BG422719.1, EVALUE 7.40e-01
ttcctcttatttggtcctccctagatgctacattttatgggtaaggacaaatgatattacccacttacagctagtgacagactcagaatatgattccaggtcccttaactctgaaacccctgcacagacacttgagaacatgtcacagtatttgatgagctatgagtgctattcagatgtgagcactcatcaccaatgggacttatatctgtacagcttttctaatgacatcatagattcagagaggcaaaatgattgcccagggtcatacagctagtgattggcagttgttgtctcctgatgctttatcacatgattgtttccttcttcctgggtacaactactcagagaagatatactgattttgtgtcagctggctcttctgtgctctgagcatcaagatggtgggctataaaccatagtctagacgaactccatctgtcctgtgcttcttatctccttatcaaactagggttttgattaaatagcttcccaaatttcatttcttattgattccccacatggctttaa

SEQ ID NO: 5972 - DNA, 540 bp, Homo sapiens
  MAP TO AC005203.1; EXPRESSED IN ADULT LIVER, SIGNAL = 0.34; SWISSPROT HIT: Q12931, EVALUE 7.00e-25; EST_HUMAN HIT: BG819286.1, EVALUE 3.00e-86; NT HIT: AF043254.1, EVALUE 2.00e-86
ctgggaggaagcagaatgagctcttgcagaaggtcggtcacaggaggctgcatagtgtccaccaggcgacaggccagtcctgcagctcagccactgagaaaggagctcagcgcgggccggacctgccttcccgagcgcagtggtggtgaccaaccacatgggaccagacaggtgccataggccacctggagccacaaaagtcactaactccccaaaatgggagagtcagatttcatataaaaagcccagaaaatgcctgtgtacgttttctgagtccatccctttccaaactccatgctaagggctccagctcagctttgagctgcctgtcaggcgacattcgtcactcacccatctgaaagccactggtaacccaggctccccggggctgccgagcgggaatagacctccactctgtcagccaccatgaaagctgagtagaaacccactccaaactggccgatgatcttgctgctggcctcagcctggttctgcagagcatccaggaaggcctgtggggcagaggccagttagtgaggc

SEQ ID NO: 5973 - DNA, 545 bp, Homo sapiens
  MAP TO AL118559.4; EXPRESSED IN PLACENTA, SIGNAL = 0.62; EXPRESSED IN ADULT LIVER, SIGNAL = 0.82; EXPRESSED IN HELA, SIGNAL = 0.61; SWISSPROT HIT: P32712, EVALUE 6.70e+00; EST_HUMAN HIT: R71824.1, EVALUE 7.60e-01; NT HIT: AF240786.1, EVALUE 5.20e-01
cccaacatttaaaggtcccctaactttatagttctgtaataggatgctgaaacattctattttttaagccttagtatactaagggcacaaatataaaattcagactccgatctccaatgcggagcatcatgagaaaatgcagcaagaactggtggtgctgagagttaaggaagggaacgtggagtgggagtggttgcaagagacttttctggaatccctgagacctctgcaaatcgtggaggaggtgctcagcccccgtctgacaggcacccagctctgggagtaacatggacatggaagagcaacctcagagaagcttccatttacaatcagctttgtgactttactccgccttccaagagactgactgttcgcataccattgaccagagagctgggtccttcaagatgacgttggattggctctggtcttgtccctcactgcctggaggacctagggacaagtcgcttcttggtctgagccttggtcttctcgaatgagtgggaaccacaccacctcttctggctgatggagaaagccaccat

SEQ ID NO: 5974 - DNA, 500 bp, Homo sapiens
  MAP TO AC004090.24; EXPRESSED IN ADULT LIVER, SIGNAL = 1.7; EXPRESSED IN FETAL LIVER, SIGNAL = 0.59; SWISSPROT HIT: P18330, EVALUE 5.30e-01; EST_HUMAN HIT: BF855842.1, EVALUE 9.00e-22; NT HIT: AL163300.2, EVALUE 2.00e-25
cctcactctcctttctccccagctcctggcaaccaccctgctactttctgtctgtatgaatctgactatgcaaggtacctcattgtattagtctgttctctcattgctataaaaaaaatacctgagactgggtaatttataaagaaaataggtttaattggctcatggttctgcaggctgtacaggaagcatggcaacactgcttggcttctgggaaggcgtcaggaaacttacagtcatggtagaaggggaaacgggagcaggcacttcacacggccagagcaggaagaagagagattgaggtggaaggtgcctcacacttttaaacaaccagatatcacaagaactcactaccacaagaacagcaccaagaggatggtgctaaaccactcatgagaaaaccacccctatgatccaatcacctcccaccaggtcccaccttcaacaccagggattatacttcaataggggatttggtggggacacagatccaaaccata

SEQ ID NO: 5975 - DNA, 558 bp, Homo sapiens
  MAP TO AC006537.1; EXPRESSED IN FETAL LIVER, SIGNAL = 2.1; EXPRESSED IN LUNG, SIGNAL = 5.6; EXPRESSED IN BRAIN, SIGNAL =   4; EXPRESSED IN BONE MARROW, SIGNAL = 4.5; EXPRESSED IN PLACENTA, SIGNAL = 3.5; EXPRESSED IN ADULT LIVER, SIGNAL = 4.6; SWISSPROT HIT: Q06666, EVALUE 1.40e-02
ctctccctgccgagtacaaggggagaagcagcctctgccatcagctggaacacgcttaagtggcccatttcctgggaggctgggtggcctcaccagccattagggtaatgagccgcatgctgtcccccatccagcgccctggtaaccaaggaggggggcattgctcgctctgcagggctgcgttttcctcctcctggcagggatagggatggggagcagggagggagggccctgcagacacagaccaaggccagaggggagggacacagcagagattcacatacaggtcggttggaggcaggaagggaacaagagacagagaggagagggagagacagagccagagatagactgagagcgaaaatggggtggagacagagatagagagagactaacgaccaggcaaggaggaggaagacagggaaatgagagagaagatgtttggggggtgggagagagaaacaggcagagagacagacaggaaaagaaccagacaggtgcagactcacagatcaccagggagatggccagggacaaccgaggcaggaagagagacag

SEQ ID NO: 5976 - DNA, 566 bp, Homo sapiens
  MAP TO AL109865.36; EXPRESSED IN BONE MARROW, SIGNAL = 3.3; EXPRESSED IN PLACENTA, SIGNAL = 4.5; EXPRESSED IN ADULT LIVER, SIGNAL = 3.7; EXPRESSED IN BRAIN, SIGNAL = 3.7; SWISSPROT HIT: Q01572, EVALUE 2.40e+00; EST_HUMAN HIT: AW999301.1, EVALUE 8.00e-04; NT HIT: AL163303.2, EVALUE 6.00e-04
gtttcccccaaaatagcctcaaaactccccaaaaatcacactccagtgaattatcactcttggcctttctggaacctcactgaaaagctctttttctctgagcgtgtctttgactggactcagctcactttgcttaaaaagctctatcttcatggtgtttgtaaaaaatcgttcctgccgttgtttaacacagcagttgcctgaggcatgtgggcctaaaaagcagctgactaaaaagtaggaaatgtagagggctttgaaaagttccattatgttcctgggaatctcgaaggccacacatttgtgcaagactgttggcatgcccaagaaaaaaatataaggcactaacctcacctgtagcagaccctgaggctctgtgccagcaggaagtgaaaggtaagccacagttgtaaactacatgctggagttttgaaggcatatcccagacagagcactttagcaagacagagacttactggttcaaagcatttaaggaaatctgtctagttattagctgaccactaagctaatgaagcagacttcagtggtcacagcagagaatgcaa

SEQ ID NO: 5977 - DNA, 595 bp, Homo sapiens
  MAP TO AC024077.2; EXPRESSED IN BONE MARROW, SIGNAL = 2.8; EXPRESSED IN ADULT LIVER, SIGNAL = 3.8; EXPRESSED IN HEART, SIGNAL = 3.5; EXPRESSED IN HELA, SIGNAL = 2.6; EXPRESSED IN BRAIN, SIGNAL = 3.6; NT HIT: U04324.1, EVALUE 0.00e+00; SWISSPROT HIT: P11464, EVALUE 3.00e-47; EST_HUMAN HIT: AL549146.1, EVALUE 0.00e+00
tgttatccacacagcgaagctgcccaagccctaaatcaccatcaacaacttaaaccccagggagaataaggatgtattagccttcacctgtgaacctaagagtgagagctacacctacatttggtggctaaatggtcagagcctcccggtcagtcccagggtaaagcgacccattgaaaacaggatcctcattctacccagtgtcacgagaaatgaaacaggaccctatgaatgtgaaatacgggaccgatatggtggcatccacagtgacccagtcaccctgaatgtcctctgtatcttttgttcctctgtgggccaggccaccagcttaaatccaaatgaccaggggccaggcctctcagtctctctccggtccaagtatagacaactttacttctggacatccaagctggccatgactccctgccctgggaaaacctgggtaggcacagccttaaccaagaatataaggggagtggacggtcttgtcgtgggagacttggggcccacatcttgtggtgggagaaacaggtgaatacttcagggttcggctcagtgaacatagagggggttttgctgggacttgaggatgtgt

SEQ ID NO: 5978 - DNA, 551 bp, Homo sapiens
  MAP TO AJ239328.2; EXPRESSED IN FETAL LIVER, SIGNAL = 1.2; EXPRESSED IN PLACENTA, SIGNAL = 0.84; EXPRESSED IN ADULT LIVER, SIGNAL = 0.87; NT HIT: AL163303.2, EVALUE 0.00e+00; SWISSPROT HIT: P57721, EVALUE 4.00e-06; EST_HUMAN HIT: BE258224.1, EVALUE 2.00e-35
aggccataagacagccacacagagggtgtgggggctggaggtcttcactcccctcccccagcactgctgcgaaactcggggaggtgtggggagcgtggagctggtgcagggggctgagtggggtgggccggggcacgcctccccattgccaggctgcgaagctgctctaacgctctctctccctctcctgtcccttttcctagtccccaccgaaaggtgccaccattccctaccgcccaaagcccgcctccacccctgtcatttttgcaggtggtcaggtaagagccgatccgctcgcggcctccactgccaacctcagccttttactgcagcacccgccgctgcccgttagtgcactcaggttttctcgccttctcacgtgcacgtctcccacccgtgctggaggcagagctcttccacctacacccagcaccaggcggacgcagggggccttcagagcggcattcccccacagagacggccccacggaatcatgttctccctccctgacccgggcaggaagatctggctctgcctaaatccagttccca

SEQ ID NO: 5979 - DNA, 570 bp, Homo sapiens
  MAP TO AC025811.1; EXPRESSED IN BRAIN, SIGNAL = 1.3; EXPRESSED IN LUNG, SIGNAL = 0.99; EXPRESSED IN PLACENTA, SIGNAL = 1.4; EXPRESSED IN ADULT LIVER, SIGNAL = 1.5; SWISSPROT HIT: Q12983, EVALUE 5.00e-03; EST_HUMAN HIT: AI206282.1, EVALUE 1.00e-98; NT HIT: AL163202.2, EVALUE 9.00e-40
ctcccattcccattatcgtgaaggtgcaatttcacccaggaggcctgcaggctctcctcctgcagctcaggcttcattgtctgatgggacgctggagtgctgctgtggcaactggggttcatgtaagatgtgagctgccagtgacaagctttatgttgtggcctctgcgtcagtggcagatggtaggcgtcaagagaggacatggccatcaggagagggcaagcagggtgctctagcccagtgctaaaggagtaaagagccattgctttaaaatataaatagccaaaaagataacaccctattcaaccatttctgtaggagagtgggagcctaccttcagcaggcacctggcttcaagttgcaaaattacctcctgttatgaagatgtgaaaagtttattttgtcattgaatataaccaattagcatacacggatggccttgccaattaccagcggaatttaggatgaactacgtatgacatggtgctgtaaatttttctacttgtggactaactatggtgactgtctttctgtctttgcaatctgttgagcagattgactgtgatgcgt

SEQ ID NO: 5980 - DNA, 571 bp, Homo sapiens
  MAP TO AC024561.4; EXPRESSED IN ADULT LIVER, SIGNAL = 0.44; EXPRESSED IN BRAIN, SIGNAL = 0.57; SWISSPROT HIT: P13117, EVALUE 2.00e-05; EST_HUMAN HIT: AL574028.1, EVALUE 0.00e+00; NT HIT: gi14723126, EVALUE 0.00e+00
gccatgctagcaagagaagcttaagcattttgtgaggcataaacaaaaatgcattcattaaggattaagttcttattcatatcttctctttctgaaggtgcacttacagagtgctacgatgaactggggaacagatatcagcttccagtgtattgcttggcaccgccaatcaacatgatagaggaaaagagcgacatagagactctggatattcctgagccaccacccaattctggatatgaatgtcagcttcgtttgcgcctttccacaggcaaagacctcaagcttgtggttcgcagcacagacacagtattccacatgaagagacggttgcatgcagcagagggagtggaaccaggtagtcagcggtggtttttttctggcagacctctcactgacaaaatgaagttcgaagagctgaagatcccaaaggactatgttgtacaggttatagtgagccaacctgtgcagaacccaacaccagtggagaactgaactgagccctgttggccagctcccacatccctctgctcctttttatggttcttgttgtcatttcctactctgcggc

SEQ ID NO: 5981 - DNA, 546 bp, Homo sapiens
  MAP TO AC004461.3; EXPRESSED IN ADULT LIVER, SIGNAL = 0.76; EXPRESSED IN FETAL LIVER, SIGNAL = 0.83; EXPRESSED IN HELA, SIGNAL = 1.9; SWISSPROT HIT: P21133, EVALUE 6.70e+00; EST_HUMAN HIT: AA280079.1, EVALUE 4.90e-02; NT HIT: L77570.1, EVALUE 0.00e+00
tgcatgtgaaaaggcttctgtagaggattgttcttattttttgatcatagtatttaggggtagaatatcataatatctgtaacctctcaaagggttcagaagaaaaacacaaagagcaactgcggcaggtgaacccgggtaaaggtgcggcaggacactatcagctggtgaacccgggtaaaggctgcaggagtgtttattgcactatgattatgagttttttatagatctgaaattattcatattaaaaggtgggcgcagggacaaggcaggtggacacacccagattcctcccacaactcaagcagtaaacaaatcaagagttaactggtaagaagataaaacaggtggtgtctgggttaggggacaccagttcagctgaaaatcagggttctttactcagggaagagaggacagattccccatcgccatttttcttccactaagctctcagaaccccaggctccaggcagataggaaatggtcctttatggaaaaaatctgaccaggtcaagaagaaagtccccaacaggaggagattcccaa

SEQ ID NO: 5982 - DNA, 576 bp, Homo sapiens
  MAP TO AC018555.4; EXPRESSED IN BRAIN, SIGNAL = 1.1; EXPRESSED IN LUNG, SIGNAL = 0.51; EXPRESSED IN PLACENTA, SIGNAL =   1; EXPRESSED IN ADULT LIVER, SIGNAL = 1.1; SWISSPROT HIT: Q57252, EVALUE 9.50e+00; EST_HUMAN HIT: AV727273.1, EVALUE 1.30e-02
gcctcaattccttagtccccttatatgactgttgtgagattaaaagagataatgagcacaggaaagagtctggcatagtgtcaaataataataacaaataataaatgctgattgtgttgttaacattcctatttaaaaaatggtagtagagtaacagtagttattatattatcaacacctatcttgcaaaaactgcctcctaggcttgtgttgaagatcaaataacataaaaagatgcaaaaactttgaaatgccatgcaaattaaaggtgttaataattataatcatatctagtttattcttaattttttatattattgtgtttatttctcagatagacctgatttacagtctaagcacacagtaaagctgaaacaaatagtcaaaggaataaataggggcttgcaggaaatctttgggaaatatcagacctatcacttcctgaagcaggttccctcatgctgtgggctagcaggactgccaggtcaccgagcattctttgtacatcctgtttattggaggcagtaggtattaaattatttcatcaagcagtcctgtaactttgcagctccctgg

SEQ ID NO: 5983 - DNA, 540 bp, Homo sapiens
  MAP TO AC002471.5; EXPRESSED IN PLACENTA, SIGNAL = 0.48; EXPRESSED IN ADULT LIVER, SIGNAL = 0.43; EXPRESSED IN HELA, SIGNAL = 0.57; EXPRESSED IN FETAL LIVER, SIGNAL = 0.92; SWISSPROT HIT: Q9UGI0, EVALUE 4.50e-01; EST_HUMAN HIT: BG990032.1, EVALUE 9.00e-19; NT HIT: AL163203.2, EVALUE 3.00e-33
ttttatcccctccccaattcatgaaatttgaaaaagtcagagactatcacaacaaaaaagaaacaagatacacaaatagtcaccccctaagttttgttaagaataagacaatcctgcccctcacgcctggctcagtcaccagcaggaggagggcaccctccacagattgcaggagaaggggaaggactcctcctttccctaggtgcacctccactgctgccaccaaggcctggtacagtacccgcaggttcctccccatccccaggtcgggctgggccctgcagcgctcctactcccccttcccagcccccagacttaatgctgataccaccactagcaccgatgccaatacaaccgctgtcgccctcaatgcagcagcccaccctacaaggctcctaccaccttgcccccgcgggcaccctcctaccactccagtcgagctgcagtctccgtcgctgccaccaatctcgtgagaccagctgcagagccatatgcaggctccagtttaccacaggtgactcttccttgtcctcctcctcc

SEQ ID NO: 5984 - DNA, 526 bp, Homo sapiens
  MAP TO AC026404.4; EXPRESSED IN BRAIN, SIGNAL = 1.4; EXPRESSED IN LUNG, SIGNAL = 1.3; EXPRESSED IN PLACENTA, SIGNAL = 3.4; EXPRESSED IN ADULT LIVER, SIGNAL = 1.4; NT HIT: gi14727857, EVALUE 3.20e-02; SWISSPROT HIT: O43100, EVALUE 8.40e+00; EST_HUMAN HIT: BE262635.1, EVALUE 4.70e-02
acagcatgcaaaaaggaaccagggccagattcccaggctcgattgctgatcatttggccttcaattcatgggctccttatattggtctctgatcactttcttctgggcctcccaaaatttatgaaggttcctgcttcctcttctagcttaaacatcctgctttcagcttgacacgccttcctgacatcttgctttcttcctcctggctccttcacctccacttccacattagggtaaagcctaaatctgatgtcctttctcagctgagcctcagagggccaactgtccagatcatagctgaagagcagaggtttccaaatgtattttatccagagaccttcatccaaatggaagccgacatggaagctcagcatgtgaaatgggaaaatatgacaattcattcaggtaggagtgagctgaggacctggagtgtggcctgttcctacttccttcccactctcccctcttccaaacagcaggccctgacgaggctcatggacctttaggcctcaacagagtcctttgc

SEQ ID NO: 5985 - DNA, 516 bp, Homo sapiens
  MAP TO AC010645.5; EXPRESSED IN ADULT LIVER, SIGNAL = 0.9; EXPRESSED IN HEART, SIGNAL = 1.1; NT HIT: U71363.1, EVALUE 3.00e-64; SWISSPROT HIT: Q61967, EVALUE 4.00e-08; EST_HUMAN HIT: AU140332.1, EVALUE 0.00e+00
tgaccagtgggcctagtttctcctatgtttgaggaccttgagaggaggatgtgcgagagtagatgtgtgggagagatggattgtgatacctcagcataggggtggtttgtggtttcatctgtcaacatcataacagggcacagtgacttttgaagacgtggctgtgaaatttacccaggaggaatggaatctccttagtgaggctcagagatgcctgtaccgtgatgtgacgctggagaacctggcacttatgtcctccctgggtaagttgcccacactcacccctgtgacctgagctagtctctgtctttccccctctttttctattggcaagactttctcatgtcaggagcatggacacagcttcctacttcagttcttggttggtaggactgaggtatgcatactgccctctccattcttggagcagccccaacacctgctattgagctcccagggaagaattcagagtcagaagtcttacaggcaacttaatgcaggctaccttgtttgtcc

SEQ ID NO: 5986 - DNA, 516 bp, Homo sapiens
  MAP TO AC005570.1; EXPRESSED IN ADULT LIVER, SIGNAL = 0.51; EXPRESSED IN BRAIN, SIGNAL = 0.54; EXPRESSED IN HELA, SIGNAL = 0.49; SWISSPROT HIT: P81286, EVALUE 3.00e-06; EST_HUMAN HIT: BG762809.1, EVALUE 9.00e-93; NT HIT: K02435.1, EVALUE 5.00e-04
tacaaggagtaagggtgccgctgctggactcgcgcacctgcgacggcctctaccacgtgggcgcggacgtgccccaggctgagcgcattgtgctgcctgggagtctgtgtgccggctacccccagggccacaaggacgcctgccaggtgtgcacccagcctccccagcctccggagtcccctccctgtgcccagcaccctccctccctgaactccaggacccaggacatcccaactcaggctcaggatcctggcctccaacctagaggcaccacgccaggggtctggaaccctgagaactgaagtcctgggagggctgggacttaggctcctctttctcctgcagggtgattctgggggacctctgacctgcctgcagtctgggagctgggtcctggtgggcgtggtgagctggggcaagggttgtgccctgcccaaccgtccaggggtctacaccagtgtggccacatatagcccctggattcaggctcgcgtcagcttctaatgctagccggtg

SEQ ID NO: 5987 - DNA, 565 bp, Homo sapiens
  MAP TO AC008563.4; EXPRESSED IN PLACENTA, SIGNAL = 1.1; EXPRESSED IN ADULT LIVER, SIGNAL = 0.86; SWISSPROT HIT: P92230, EVALUE 1.40e+00; EST_HUMAN HIT: AW197134.1, EVALUE 1.00e-101; NT HIT: gi16158802, EVALUE 1.00e-102
tgaaatttctcaatgatgaatgcattaacatattttctacaatcagtatcaggtctttatttagcaacaataaaatattaaattgaaagttcttatagttgctccagaataatcataaaatcatacctcaaaaacatcatcatggttaacaatatgcttcaagttctcagaggctttcatatttgcagtcactggtaaactcccaggactaatctcagcttcaggttcactgatcttctgtacagagtttcctatcatatatttttctctttcatcaactttgctttttactgtagtagtactttctgaggtctaagtaaaagaaaagataaagagctcatattctttaagttttatatctattttaaaagttcagataaaaatttgtaagcaatttgccaacttccaattctggactaatctcaaacatgaaaactttaaacatagaaacctgtgacactcacagataaaatgctcattttaggagcacgtggcccccaaagatccatgagccacattaaaatttaaaagttagccaaggttactttcctcttagaagctgcca

SEQ ID NO: 5988 - DNA, 596 bp, Homo sapiens
  MAP TO AC003004.1; EXPRESSED IN PLACENTA, SIGNAL =  11; EXPRESSED IN ADULT LIVER, SIGNAL = 6.9; EXPRESSED IN HEART, SIGNAL =  13; SWISSPROT HIT: P49641, EVALUE 7.00e-37; EST_HUMAN HIT: AW500018.1, EVALUE 1.00e-112; NT HIT: D55649.1, EVALUE 1.00e-112
ggctgtacagaacctctgcccccctgcccagagagagaagttagctgccagcctgcaccactagccagggcccacccacactctgccagtgcagcctccttcctgtcgcaccctcctctacctgccctggcctctgggcctatctattcccttctgagccaatccagcccctccttaaaccccaaaggctgactctccccatccagcctggaagcggggacagggtctcaccgcaggtgggcttccaggactcggtctaagctcttgtagaagggccgggaagtgtaatagcctgtccagtaatgatcctcccggtccgcataggagaagaaatccccgctcagcacaggaaaccctggaggccgggcccctggctccacccctgtcctcttgtacagggcatcaaaatagtcagaaagagtgccaaactgggcctgtgggaaccccaaaaacccactcccatcagttctagagcctcctgcaaattgtggccacagtgctgcagttgggggtgaggcaggggctctggcctcagaagcaggaactgtacatcctgccattctagacttaacagaagtaggggagcctgggaatta

SEQ ID NO: 5989 - DNA, 600 bp, Homo sapiens
  MAP TO AC004189.1; EXPRESSED IN PLACENTA, SIGNAL = 0.4; EXPRESSED IN ADULT LIVER, SIGNAL = 0.68; NT HIT: Y07829.2, EVALUE 0.00e+00; SWISSPROT HIT: Q02084, EVALUE 8.00e-27; EST_HUMAN HIT: X90536.1, EVALUE 3.00e-74
ccttttggttatccccacagctcacatttctctagaccctcagacttcccaccccaagctcctcttgtccgaggaccaccagcgagctcagttctcctacaaatggcagaactcaccagacaacccccagcgttttgaccgggccacctgtgttctggcccacactggcatcacaggggggagacacacgtgggtggtgagtatagacctggcccatgggggcagctgcaccgtgggcgtggtgagcgaggatgtgcagcggaagggggagcttcggctgcggccagaggagggggtgtgggctgtgaggctggcttggggcttcgtctcggctctgggctccttccccacacggctgaccctgaaggagcagccccggcaggtgagggtgtctcttgactatgaggtgggctgggtgaccttcaccaacgctgtcacccgagagcccatctacaccttcactgcctccttcactaggaaggtcattcccttctttgggctctggggccgagggtccagtttctccctgagctcctgagaaggagcagttacctactctcctctaagtacaggactcatatcaacccaagtaccatgtgg

SEQ ID NO: 5990 - DNA, 587 bp, Homo sapiens
  MAP TO AC025182.2; EXPRESSED IN LUNG, SIGNAL = 0.61; EXPRESSED IN BONE MARROW, SIGNAL = 1.1; EXPRESSED IN PLACENTA, SIGNAL = 1.3; EXPRESSED IN ADULT LIVER, SIGNAL =   1; NT HIT: AJ298105.1, EVALUE 3.00e-12; SWISSPROT HIT: P21416, EVALUE 1.00e-05; EST_HUMAN HIT: AA190755.1, EVALUE 1.00e-08
catacttccctgtctcctgactcagttgaaggacagctagtcctaaagtacaagtttattactcaggcagcccctgatattagaagaaaattacagaaacaggcaataggaccagacagtattctggagaacctcctcagggtagccacctcggtcttttacagcagggatcgggaggaggcccaggaaaaagagaggaagcacaggagaaggatggaatctctgatggctgctttagaggtctgtaaagtacaggatccactaattgctatccatgtggcaaaccagggcactttaagaaggactgtcctggcagtaagaagccacctcgaccctgtccagcctgtggcaaggacaactagaggtcggactgcctgcagagacggagagacatctccgtccagaactggtctcccaaatgctccagcagaactgatgggtcccagggctcaattcctcaactctagtggcccaaactgccgttacgcccaggagccctgggtgattctggaaattgaaggaaggagggtagacctccttctggacactggagctggtctctctgttcttttccaatccaggcttcc

SEQ ID NO: 5991 - DNA, 542 bp, Homo sapiens
  MAP TO AC004004.1; EXPRESSED IN ADULT LIVER, SIGNAL = 2.9; EXPRESSED IN HEART, SIGNAL = 3.4; EXPRESSED IN LUNG, SIGNAL = 3.1; EXPRESSED IN BRAIN, SIGNAL = 2.8; EXPRESSED IN FETAL LIVER, SIGNAL = 2.9; EXPRESSED IN BONE MARROW, SIGNAL = 1.9; EST_HUMAN HIT: BF849973.1, EVALUE 5.00e-82; NT HIT: L78810.1, EVALUE 1.00e-63
gtggttgcattgtggctatgcaggagaatgtccggttgtaagaactgtacaccaaagctttaggggtgatgggacatcaggttggcaattgaccctcaaatgggtcaagaaaaaagttctttgtactgtacctgcaaccattctctaagttgattattgttttggaatgatttattgtaaacatttatttttaaaaattatttttaaaatgacattttgaatttcaaaggatgagaaattcttgacaaaactgatgaaatcttaaaatgcttctgcaaatcaggcctcagaagtcatgctgtgtccggaatgggtgggtgtcttggtctcactgacttcaagaatgaagccgcggaccctcgcggtgagtgttacagctcttaagatggcgcgtctagagtttgttccttctgatgttcagatgtgttcggagtttcttccttctcgtggtctcgctggctcaggagtgaagctgcagaccttccccgtgagtgtcacagctcttaaggcggcgtgtctggagttgttgttcctcctggtgg

SEQ ID NO: 5992 - DNA, 512 bp, Homo sapiens
  MAP TO AC007796.1; EXPRESSED IN FETAL LIVER, SIGNAL = 0.55; EXPRESSED IN PLACENTA, SIGNAL = 0.64; EXPRESSED IN ADULT LIVER, SIGNAL = 0.62; EST_HUMAN HIT: AI831462.1, EVALUE 2.00e-78; NT HIT: AL163210.2, EVALUE 5.00e-78
attggggtgttgctgaaaagatacccaaaaatgtggaaatgggtaacaggcagagactggaacagtttgaagggctgagaagaagacaagaaaatgtgggaaagtttggaacttcctagagacttgttgaatggctttgcccaaaatgctgatatggacaataaaatccaggctgaggtggtctcagctggagatgaggaacttgttgggaactggatcaagggtgactcttgatatgttttcacaaagagactggtgacattttgcccctgccctagagatttgtgacactttgaattaagagaaatgatttagggtttttgccaaagtaatgactattacttttgcaccaacctaatagcagaagtcaggtgcatggactgcagcctgctaaaggctatctggttggcacaccatcagctacaggcagcaggactttgcaagtgaaatctctttctaccatttctctaccaatcttcaatctgcattctggaccgcaaagacaagaaagc

SEQ ID NO: 5993 - DNA, 562 bp, Homo sapiens
  MAP TO AC005786.1; EXPRESSED IN LUNG, SIGNAL = 1.4; EXPRESSED IN FETAL LIVER, SIGNAL = 0.94; EXPRESSED IN BONE MARROW, SIGNAL = 0.73; EXPRESSED IN PLACENTA, SIGNAL = 0.42; EXPRESSED IN ADULT LIVER, SIGNAL = 0.4; SWISSPROT HIT: Q9MDB7, EVALUE 6.20e-01; EST_HUMAN HIT: BF339469.1, EVALUE 6.00e-91; NT HIT: U41302.1, EVALUE 8.40e+00
tggccaccttatccaagaagctcatggagccgtacacgaacgctccgctgttctgtggagacacaggcgaggtggtcagcgtgcaccccgagatctaggacccggcctcccccaccccagcctggctaccagccctaccgtgtggggaccgatgaggtcggccgtcatggccagcgaggtgacgaggatggtggcacagccagcacccagcagcacagccgctgcgtacacggccacacccagtccctccgccagcgccacccaggcggcaaaggccaggatcaccaggaggcctgagaagtaggtcatctgcagggacagccccggggtcaggcccacaccactgggtgcccccaagcctggcgcttcaatccgccacccctacccccaaccccagcaaacaaggcatgagctggatggtccctaaggagccctggctctggccctggacacaacaccgaggctctgcagatcctccatgccagagctgtgctctctgtccacgccgtagcggctggagacgtgtggctattctgcctgagcgcaggtcagttacaacgaa

SEQ ID NO: 5994 - DNA, 516 bp, Homo sapiens
  MAP TO AC010593.4; EXPRESSED IN BRAIN, SIGNAL = 0.95; EXPRESSED IN PLACENTA, SIGNAL = 0.69; EXPRESSED IN ADULT LIVER, SIGNAL = 0.89; NT HIT: gi14731393, EVALUE 1.20e-01; SWISSPROT HIT: Q62885, EVALUE 1.60e+00; EST_HUMAN HIT: BF827391.1, EVALUE 1.80e-01
attctgggataggctctgggcctcagaacaccctacagtggatattgttatgaagacacacatgaagatgtcctgtcgatggtgtggcaatgagtttgtctgagatggtgacactgacgcacatttttctgtctcccggaatacatgtttctcaatccttagcttttgagtggttttgcctacagaaaggccccggcgcagtgccccctgctggtgagtggcagccaggcgcgtgcgtcatgtcagtgatggacacagtgggtccctttgctgacacggaccttgggggtgatgctgagcctgccaggttatttcagatcaggtcattaaagcaacagaaggtcgactcgatgtaaaacgagcagctcccagtattctctacattttttagacatgtgatgatttgctatagctcattttggctgataaaatatgaacacttcacaaaatatttgtatttcagcctctgtcttcattcatttaacaagccattttgccctaattcccaggagctgt

SEQ ID NO: 5995 - DNA, 578 bp, Homo sapiens
  MAP TO AC005947.1; EXPRESSED IN ADULT LIVER, SIGNAL = 0.85; EXPRESSED IN LUNG, SIGNAL = 0.63; SWISSPROT HIT: Q16557, EVALUE 2.00e-33; EST_HUMAN HIT: BG011880.1, EVALUE 0.00e+00; NT HIT: gi14765369, EVALUE 0.00e+00
aggggatgagttggtgacagtgagaagcaactcgatgttcagcactctccttcttgtccctctgtgaagcctcttctaccacatagggctcagggctgataaagccccctccctacctttctcaggccagacacaaggtcagtcatgagaaaacagaaaaaaaaggagaagagagtctgtagagacaaattgggagggttcaggaggagaatttgggatttgcctgtgcccatgggacacaggctgggaataaaaatgttttcctgactcttctctgaaagctagatagactccacctaaaaccctattgccaaggatgctgggatccacttaccaatgactctgattgtcaaggatgtggagctttcctcgccagtggctgagttacgagcagagcaagcatagagcccattatgctttggagtaatctgagggataaagagcttttgtcctgatagctgaaacttcccattaattgtccaagaatactgtgctggtgggttagagtttgcgaagcaggacaagtcgaggttctctcctgaatagtaagaggtgactgaagggaaaattctggggag

SEQ ID NO: 5996 - DNA, 554 bp, Homo sapiens
  MAP TO AC025467.3; EXPRESSED IN BONE MARROW, SIGNAL = 1.5; EXPRESSED IN PLACENTA, SIGNAL = 1.3; EXPRESSED IN ADULT LIVER, SIGNAL = 1.3; EXPRESSED IN BRAIN, SIGNAL = 1.3; EXPRESSED IN LUNG, SIGNAL = 0.95; SWISSPROT HIT: Q24324, EVALUE 6.90e+00; EST_HUMAN HIT: BG489430.1, EVALUE 1.30e-02; NT HIT: AF293359.1, EVALUE 2.10e+00
cgtcctaatggatcctgctgtcagcaatggatgagcattgagctaatagatgtcaaacagcatttacatttctgaaatggcttcatctgctccctctcccaggactctccaaagtgaaatttgaaatgtggacagacgggtcagctctggacagctccacttccagaattctcgtgggcaagaaacaattatttattttttcctaaacagacagacagtgctgagcttattcaacaacaacaagctgcttttcaaccttgtcttcttggaaaggcatgcaatttcctaagaggcacatggaaatatctgtcaccttgtagtttaaatagcattcattcattcattcaaagcacactcacaatgaattatcttgttcattagaaattctgcagaagaccagtgagaggtttggattggagagagcatgggggagtttagcatctgcgatgcggtacgagaatcaaaccgcgctgctagattcacccaagcaccctctgcatattgacggcagggtcagaatggtattctcagtctgggtttcagtagcagggaca

SEQ ID NO: 5997 - DNA, 565 bp, Homo sapiens
  MAP TO AC006138.1; EXPRESSED IN PLACENTA, SIGNAL = 0.58; EXPRESSED IN ADULT LIVER, SIGNAL = 0.77; EXPRESSED IN LUNG, SIGNAL = 1.7; EXPRESSED IN FETAL LIVER, SIGNAL = 0.68; EXPRESSED IN BONE MARROW, SIGNAL = 0.71; SWISSPROT HIT: P06893, EVALUE 3.10e+00; EST_HUMAN HIT: BG213837.1, EVALUE 0.00e+00; NT HIT: gi14752388, EVALUE 4.00e-94
tttcccctttctgtcacctgcagagctccggaaattggcctcagtccttgtcagcgactggatggctgtcatccgctctcagagcagtacccagcctgctggtaagctccttagtcctttatcctttgtatttatttctttcctattgggatgtggcctttaggtgctcccagtctgcttcacctctgacagtgttcatctaaataaaatccttttctgctttgttttttcacaacagagaaagataagaagaaacgtaaagatgaaggaaaaagtcgaactacccttcctgagcgacctttgacagaggtgaaggctgagacccgggctgaggaggccccagagaagaagagggagaagcccaagtctcttcgcaccacagcacccagtcatgccaagttccgttccactggtaagactggcggctggcctctggagggttcatgggcatgtgcacacccagagccttatgggggaatcatttgatgtgtggtatgttaatcgtaaggaagagggaagactagcagaggaagctttggttacaaggctagaagaacatttgcgg

SEQ ID NO: 5998 - DNA, 506 bp, Homo sapiens
  MAP TO AC006565.3; EXPRESSED IN ADULT LIVER, SIGNAL = 2.1; EXPRESSED IN PLACENTA, SIGNAL = 3.1; EXPRESSED IN BRAIN, SIGNAL = 2.5; EXPRESSED IN LUNG, SIGNAL = 2.8; EXPRESSED IN HELA, SIGNAL = 2.4; EXPRESSED IN FETAL LIVER, SIGNAL = 3.6; SWISSPROT HIT: P10263, EVALUE 5.00e-23; EST_HUMAN HIT: H57764.1, EVALUE 4.00e-33; NT HIT: gi15208634, EVALUE 1.00e-127
gggacacaaatgggacaaactgaaagtcagtacaccacgtatctgagcttgccatggcagctcttgaagcgtggtggggtaaaagttgatacggaaaatcttatggatttatttcatgctgtggaataattttgtcctttgttccctggacagggaactttagaattaaacgattgggaaggagttggaaaagactttaaaagagcatatagagaaggaaagaaaattcctttgcatgtttggtcagtttgatcattggtgcatgcaacattggagccttttcagacagctgatgagactgagtcagaggaggagagagagaagtttgatgatcacaactctaaaccgcctctaccgagtactaacaaaaaggagagcccgaacaagatttctgccaattcccccagtctccttaacctactcagaaaattgttcagcccagggctccttcagaggaatgtctggaatggccacctcctcagcccagtgagtgctggaagagggag

SEQ ID NO: 5999 - DNA, 539 bp, Homo sapiens
  MAP TO AC002103.1; EXPRESSED IN ADULT LIVER, SIGNAL =   1; EXPRESSED IN HEART, SIGNAL = 1.4; EXPRESSED IN BRAIN, SIGNAL = 1.1; SWISSPROT HIT: Q43349, EVALUE 3.00e-04; EST_HUMAN HIT: AW803156.1, EVALUE 2.00e-04; NT HIT: gi14762607, EVALUE 1.00e-04
ctgccttcatcttctcagggcctcatccctatgcctctctcctcttctgtctcttaagaggatgctggtcattggatttgcggcccaccctaagctgggatggcctcttcttgaggtccttacctcagttacatctgcaaagaccgttttcctaaatcaggtcacgtttggaggttctgggagtcaggacaagataggggacgtggtgcacagtccagcctctgcactgcttactctttcttccgtccagacggtcacggggtgcttggtgcctctgtgccctgggctccctggtagggaggggcaggggtcagagcctgccctgaaagctcaggcctgcagcagaatggggtgtgaaaggggtggtgagaggaacagcttgagaggtgggcaccctgggaaggagcagtctggcgcagagggtgggcaggagcttggggaggtcaccgtcggggaagcccggagcggaggcctgagtgaggtgggtcggggtgcagggcctgggtctgtgcctcccagctgtgcctctcttgtggctt

SEQ ID NO: 6000 - DNA, 572 bp, Homo sapiens
  MAP TO AC024124.1; EXPRESSED IN BRAIN, SIGNAL = 1.7; EXPRESSED IN FETAL LIVER, SIGNAL = 2.8; EXPRESSED IN HELA, SIGNAL = 2.4; EXPRESSED IN PLACENTA, SIGNAL = 2.8; EXPRESSED IN BONE MARROW, SIGNAL = 1.5; EXPRESSED IN ADULT LIVER, SIGNAL =   2; NT HIT: AF283320.1, EVALUE 0.00e+00; SWISSPROT HIT: O08983, EVALUE 4.80e-01
ctttctgcacgtgttcctcccacctcagctgcctctgctcctcaaggaggaacagagggagtaggaaaggccatcccaggaggcccagcaccccatgacctggctctggggccttgtgggtttatggattcccagtgctgagtcatccctcacaggctcttgtgggcaccttggacattgctcagaagcatctggtccccgggaacacaccttttcctgatcatctgggaagggcagcttgtgccagcgaggccacctgttcagcgccacggcccgccagacagctgcagccacagccttgcctttgatcagagcaaacaccagacatgtgtgtcatgcccccaacccatctccaggggacacatgtcctttcttgccaggcctgagatgaacaagagagggacaagtccccaagcctctctctccttcctgcctcacccactccgctgttagattctcaaggtggatggtgggctaactagggcaaccgaccatcctggtttacctagaactgagggggcattttcaggaataaaactgcaaaagtctggagcaaacaggagcaagttggt

SEQ ID NO: 6001 - DNA, 545 bp, Homo sapiens
  MAP TO AC008149.14; EXPRESSED IN PLACENTA, SIGNAL = 3.6; EXPRESSED IN HEART, SIGNAL = 5.2; EXPRESSED IN ADULT LIVER, SIGNAL = 2.4; EXPRESSED IN FETAL LIVER, SIGNAL = 4.6; EXPRESSED IN BRAIN, SIGNAL = 2.2; EST_HUMAN HIT: BE933126.1, EVALUE 1.90e-01; SWISSPROT HIT: P53599, EVALUE 5.10e+00
tttcttgggagaggcagttgatctcagatatgtattattaatactaacattttcttgtcgtgattgcacgcccaatttaaaatgaattatccaattaagttaagaaggtgatgcgttctaattccaggaataggttgccaatgactttgtcttgactgttctccccgaaatcccttccaattaagtaaagattgttcagtacatcgtgaggctaagccaagaggttgctgtggagacgggaggatttttcatcctatcaccattttcctctcttgatgagaagggagccagcagagctttcagcctcccccggggttgaatgttcagtgccagcaaggacaaaaggtctgctggacagaagaggatgaggggttgtgaaagcttccaggtctccttctgcaacaacagagagaacccgtgtcttcagcttctcgtgagcaaaagacagttgcccacattatggggataccagagcccatcctttttccctctccacctcatgctgaaggtgtgatagggccaactcggccagcagagagaaatag

SEQ ID NO: 6002 - DNA, 593 bp, Homo sapiens
  MAP TO AC004780.1; EXPRESSED IN ADULT LIVER, SIGNAL = 0.5; EXPRESSED IN BRAIN, SIGNAL = 0.47; SWISSPROT HIT: Q09550, EVALUE 7.70e-02; NT HIT: gi14743158, EVALUE 3.60e-02
tctgtcaaactgcctcaacgagccagcccctgcacaaaaccctggaggtgggacagggcctttggaccaaggtcaccagatcaccacggtggtggtggtggaaacgctaggccggatttccagagtgcctcatttcacccatccgggcatcctggtcacctgcagcacctccttcaccaccatctaccggatgcttcacacgcccctggatttggcagccagggacaccaagagtgtgctgattcagaccttccttggcaacactgaccacaagatcacaggtgaatccaatcaacaatctcagccctgagctgggccagcaggaggtggtaggttagggctgggagggcacagttctctctgtccccagccttgtgctgaaaggggctgggatggaagaaactgaagctccaactctcctggactgagttgcatgctgtctggtgccgtcttgccttgggtctcccatctttctctggccgttgcccccaccacctttcctactctggcaaacccccaaatcaaccagcaggaagaccccctggggaagcaggggtggggatgagacttggggcagacattttgacaaggca

SEQ ID NO: 6003 - DNA, 598 bp, Homo sapiens
  MAP TO AC006506.1; EXPRESSED IN ADULT LIVER, SIGNAL = 2.1; EXPRESSED IN BRAIN, SIGNAL = 2.5; EXPRESSED IN LUNG, SIGNAL = 1.3; EXPRESSED IN FETAL LIVER, SIGNAL = 1.5; EXPRESSED IN HELA, SIGNAL = 2.3; EXPRESSED IN PLACENTA, SIGNAL = 2.3; SWISSPROT HIT: P15368, EVALUE 7.60e+00; EST_HUMAN HIT: AV730663.1, EVALUE 2.10e-01; NT HIT: AF029308.1, EVALUE 2.00e-03
gcagagggtgaccatttctccgttggtatgtcatgccctctgggaggagggtggtggcttcagcatgaccctgacagcaagaaccttgtgggcggtgctgtcttcagcagaatccaactcacactctctctgggccctgtcctctcctacgcgggcttcgtgctggtgacttgggacccgatgttttgaaatgtaggttttattattattcagatatggcgtggccaacagggcaggagacaactgagattgaagggacagtttgttactcacagttcccaagaggaagacatgccatgccacgtggggatcacatggagaagcaccaggattcctgggaggcagaaggcgagaggggagaagagggacaagagcctttatcatagcttcccagggaaaggcaaggcaaggcagggctgggagggtttgaattggctcgtttgagtggtttccacaggcatggaccataggggttgcttctagttgtctggtttctggccatgggcgattagggcaggaggatagtggccccaagtggggaggccctgtgagagcccagtaaaggtggtgtgggcggtgtggtttggactggctgttt

SEQ ID NO: 6004 - DNA, 550 bp, Homo sapiens
  MAP TO AC008821.4; EXPRESSED IN HEART, SIGNAL = 4.5; EXPRESSED IN ADULT LIVER, SIGNAL =   4; EXPRESSED IN BRAIN, SIGNAL = 3.2; EXPRESSED IN PLACENTA, SIGNAL = 6.3; EXPRESSED IN BONE MARROW, SIGNAL = 2.5; SWISSPROT HIT: P10809, EVALUE 1.00e-41; EST_HUMAN HIT: AV727748.1, EVALUE 0.00e+00; NT HIT: gi14730099, EVALUE 1.00e-85
atgagtccaaggctggaatgaactgaagcaaggcacaaccccatcccagaatgatgtcttcttcagtagcagctcttatagcattaagggcatctgtaactctgtctttcttttcattagttttgacatcacttgttacaccaaccttcagcacagctactccattttaaagttttgccattcattcacttttcccttttcatattcactagctgtgatatctaactgctcaatgatttcttgaatacaattttcaattcaagacttgtcaccatttcctttaaagagcatagcatcacctttggtcccaatgacctctccaacttttcctgtgttatgaggcctacccccttctccaaacactgcaccaccaacagcaagagccatatctttaagctggttctttctattgtcaacaaacctggagcttttactgctataacctgaggaccagcttttagcctattcaaaaggaaggttcatagagcttctccatcaacatcttcagcaatgacaaccaaaggtgtatactgagcactggcaatttcaa

SEQ ID NO: 6005 - DNA, 562 bp, Homo sapiens
  MAP TO AC007093.3; EXPRESSED IN BRAIN, SIGNAL = 4.1; EXPRESSED IN LUNG, SIGNAL = 2.9; EXPRESSED IN FETAL LIVER, SIGNAL = 4.9; EXPRESSED IN PLACENTA, SIGNAL = 4.8; EXPRESSED IN HEART, SIGNAL =  11; EXPRESSED IN ADULT LIVER, SIGNAL = 3.4; SWISSPROT HIT: P35590, EVALUE 9.20e+00; EST_HUMAN HIT: BG207793.1, EVALUE 1.00e-18; NT HIT: AB038490.1, EVALUE 4.00e-08
gctggcctacactggagaacttacacttacttatcacttacatcagtctccctgaaggctccagggctctgagttgaggagattttatgggcaagttggtgggcaggggttagggaatgggagctgctgattggttagggatgagatcataagggtgtggaaaatggccctcatgcactgagtctgcccctgggtgtggtcacagggtcagttgagtcaggagtcacaagtccaggtggagtcagtctgcaaaacatctcaaaaaaaaaaaaaaatcagtcttgggttctacaaccctctggccatataactcctgagcaagaaaggattataaaaactgtgcttacattttagcagagttcaggctcctcccataatcctgttcttgtggcctttcgtcagtcttacaaaggcagtttttggtccctgagcaaggaagggattagttttagggagggactattcttatcctccctttcaagttaaactataaactaaattccttctgaagttagcttagcctacacccaagaataaccaagggcagcttggagatcagaag

SEQ ID NO: 6006 - DNA, 587 bp, Homo sapiens
  MAP TO AC002321.1; EXPRESSED IN BONE MARROW, SIGNAL = 0.55; EXPRESSED IN ADULT LIVER, SIGNAL = 0.58; SWISSPROT HIT: P47709, EVALUE 5.20e-01; EST_HUMAN HIT: BF760112.1, EVALUE 5.30e-02
ttttctgtccctcttgccacatccccctcacttgccgtaaagcccacgggaacggacccctccagagcttatttattttgtgccccagccccagcccccgccactgccttgcatggtacagggcccaggcgacgcttaatgaaggcttctgtctgcctcgttcacctgagatgcccagcgctcgtggtaggagccagggagaagccaaggcctacatcctcggcactggccgtgccctctggctcatccagccccgcgccttccaaaccaaccgggccccaggacggggagcctggtaaacacacagacgtcccgacggcagtgcagctgcacgggccctgcaatctgatggcttcacaagcggcccctctaaccaggtgaggcgggcgccctccacttccagatggggaaaccaaggccagggcagagagggccaaccctgggggcccagggcagagctggacctggaacccaggcttgttgcctcacggtcagactcctccccatgccggcgtctcgtcgagggcttatggagactcagagcgccttttctccacaaacacatctgtctggttacaaaggcgctc

SEQ ID NO: 6007 - DNA, 511 bp, Homo sapiens
  MAP TO AC006147.2; EXPRESSED IN HELA, SIGNAL = 0.73; EXPRESSED IN ADULT LIVER, SIGNAL = 0.55; NT HIT: AB040899.1, EVALUE 7.00e-25; SWISSPROT HIT: P03356, EVALUE 2.00e-29; EST_HUMAN HIT: AV686737.1, EVALUE 1.00e-24
gactgaaaaggcacgagaggtgacaaaggtgctactaaaagacatcataccaaggtttggattgcctttaaccctaggatcagacaatggtcctgcatttgtggcagaagtagtactacagctgactcagcttttaaagatcaaatggaaactgcacacagcctactgaccacagagttcagggaaggcggaatggatgaaccagacactcaaacagctactaaaaatgttttgccaggaaactcacttacgatgggatcaggtcttgcccatggtcctcctccaggtcaggtgtacacttacagaacaaattgggtattcaccctatgaaatattatttggaaggccacccccaatcattaatcaaattagagggtagttaaaggagttaggagagctaacccttagaagacagatgcaggctttaggagtggcaatgcaggaggtgcaaggctgggtaagtgaaaggatacctttaagtctaacagacccagtgcatccacataaaccg

SEQ ID NO: 6008 - DNA, 511 bp, Homo sapiens
  MAP TO AC011452.5; EXPRESSED IN BRAIN, SIGNAL = 0.82; EXPRESSED IN PLACENTA, SIGNAL = 0.71; EXPRESSED IN HEART, SIGNAL = 0.96; EXPRESSED IN ADULT LIVER, SIGNAL = 0.85; SWISSPROT HIT: O09046, EVALUE 4.00e-14; EST_HUMAN HIT: AL554402.1, EVALUE 1.00e-112; NT HIT: gi15303444, EVALUE 1.00e-112
tgagtagaacccctctcccccgacctgccacaaccccgttgaccctgtcctcctcctcccagccctgcacctcctcgtcctcgtccccatcctcctcagcctggtggcctcccaggactggaaggctgaacgcagccaagaccccttcgagaaatgcatgcaggatcctgactatgagcagctgctcaaggtggtgacctgggggctcaatcggaccctgaagccccagagggtgattgtggttggcgctggtgtggccgggctggtggccgccaaggtgctcagcgatgctggacacaaggtgggaagcactgcttgcagtctacctggagtccctcctgctgcaggctggagtccctgggcacagggacacggccgcgttcctccttgagggggtggaggtggggatgtggggggagaggctatctttccctgtagtctgggggtgaggcccaagccccctgctgtcacatgtctccactgagaggccccagactttcctgtcccacgt

SEQ ID NO: 6009 - DNA, 578 bp, Homo sapiens
  MAP TO AC026796.2; EXPRESSED IN PLACENTA, SIGNAL = 0.95; EXPRESSED IN HEART, SIGNAL = 0.96; EXPRESSED IN ADULT LIVER, SIGNAL = 0.82; SWISSPROT HIT: P72482, EVALUE 9.60e+00; EST_HUMAN HIT: R88910.1, EVALUE 8.10e-01; NT HIT: AF141333.1, EVALUE 3.50e-02
gaaaggcttgtgctggactccagtggtttccagtcctagctgtactttagaaatacctagggaggtattaaaaagtactcatttcaggcacaacacagactaattaatttagagtctctgggatggtaccttgacactggtatgttttaacgtctgccccctgccttgccccaagtgactctaaaatgtgcaggtggagataagtccactactctaaggcagtggcagttggaaaggagaagaagaggatttggacctgaattacgttccaggggtgggatccctaaaaaggatataaatcttaggacatgaatttggctttagtgggtttccttccattctatatagctctcaaggtcaagtgcattgctgaggaatggacaatagcctctgctgatccctctgatctaagctgctgctggcacggcagcattggaggctacatccattctcagcacatttggagtgcaatgatgctgcaggaacaaatcgcccaccttccaaatgccctgtgagtgagtcagtgctcagcagcattggcaaggcggagcgctgtaacggcaagaaaggatgacatc

SEQ ID NO: 6010 - DNA, 593 bp, Homo sapiens
  MAP TO AC005680.1; EXPRESSED IN BRAIN, SIGNAL = 1.3; EXPRESSED IN PLACENTA, SIGNAL = 1.6; EXPRESSED IN HEART, SIGNAL = 2.3; EXPRESSED IN ADULT LIVER, SIGNAL = 1.5; SWISSPROT HIT: P36006, EVALUE 5.80e+00; EST_HUMAN HIT: H72751.1, EVALUE 2.00e-35
tctccacaattttgatcccttcaaaaaaaaatcttaactaattattctctatatattctattaggaatcttggctgtagacttaatcttgaggttagaaagaaaatagatcttgaagccactattttggcacattctgtaattcttagaatttccattctaacaattttctggatgaatttaataaccgtttatattttatgagctaaagtgccaattaaaattattcatttaccatctttaagacttacttgtctgttttattcaaatgcaataaaaatgcggaactaataagagtaactcccgatgagtgttcaacaaagaaaagaaagaaaacatattttttggcgcacattcaaatcatttcctttttctggtagggccaaatcttctcatattgggaaaggaaattagctttgcttcaaagcactttctgaagagcaatttactaatgagcttaggaattctctgccctcataaccctcctatacattacctgaacgcagagaaacttgagacgttcagcaagggaggtaaggccaggagtgttgaggcgtccaggtccgtctgtggagttcactgccaccttcctgt

SEQ ID NO: 6011 - DNA, 570 bp, Homo sapiens
  MAP TO AL021812.1; EXPRESSED IN PLACENTA, SIGNAL = 0.82; EXPRESSED IN ADULT LIVER, SIGNAL = 0.69; SWISSPROT HIT: P26490, EVALUE 7.10e+00; NT HIT: AJ414152.1, EVALUE 1.40e-01; EST_HUMAN HIT: BF377862.1, EVALUE 8.00e-01
tggcactttgcacagctatcttgatctactgagtgaatttgtaagaaacagtaagagataattttctcattttgtgcagagtgtttccattctttctatgactaaatacagatctctgaactaaattataagcacagagtaatattcagggtacatgaggagaaaaagcaatttagtgaccgttttgtcattaaaaactgaagcaaaactcccaagcctgaaaaccacaaaatctgtttattgccagcataatcttggcagtgatgagttatattcacgttattcaatgagacaaaagaagggtcaactactttttcaaaaacattttacttgctttataagcatttggaaggacttactcctgtttcctcagggctttcactgaccttatatgttggggtatattctgaaagtgagtaactttgggaagttttagcagcctaaaggaaagaaagggcaaggctgggacaatattttcactgcactaaaggttgagtgtgtttgtacacatacaactgaattatgtttctctggccaattgtaaatggctcaagggtgaggctctcagtc

SEQ ID NO: 6012 - DNA, 561 bp, Homo sapiens
  MAP TO AC007023.3; EXPRESSED IN ADULT LIVER, SIGNAL = 1.1; EXPRESSED IN BRAIN, SIGNAL = 1.2; EXPRESSED IN BONE MARROW, SIGNAL = 0.99; SWISSPROT HIT: P18963, EVALUE 4.10e+00; NT HIT: AF213884.1, EVALUE 2.00e-03; EST_HUMAN HIT: AV657555.1, EVALUE 3.00e-03
tccctgtgggacagctaaacagagcctattagacttgctccactgacctccacaccccatacatactgtgcagatatgccacagtgacctcctctcagacacagcatgcctacatagaacttgtgcctgcttcctctaaacccaccaattagaactccctgtgggaaacttacttgggtaacacgacggaccccagtaaagacttcgacccacatgtctatctctttctgtcttcttcccaaccgccagttgagagtacatgtcctggatgactccccttcctcctgctggccctgaggtgtgctgccctcttctttctgggtctgtaaataacatacactgcttgttatttcatgcctcctctgtgtctcacccgaccaacacaaccaaacctaactctctgcccagtcatggctctcctagagagtggctatctcatacactggacacaagtcaggcacgaaccacaaaggtacctgccagtatattcaagttccctgtaagagggaaacctggtcatgagttagacacttaggttagactgtccaccgggataaagaa
